United States Patent Application Publication US 2025/0101403 A1 - sequence listing, part 3

SEQ ID NO: 8371 - protein, 485 aa, synthetic construct
MTKKVAIYTRVSTTNQAEEGFSIDEQIDRLTKYAEAMGWQVSDTYTDAGFSGAKLERPAMQRLINDIENRAFDTVLVYKLDRLSRSVRDTLYLVKEVFTKNKIDFISLNESIDTSSAMGSLFLTILSAINEFERENIKERMTMGKLGRAKSGKSMMWTKTAFGYYHNRKTGILEIVPLQATIVEQIFTDYLSGISLTKLRDKLNESGHIGKDIPWSYRTLRQTLDNPVYCGYIKFKGSLFEGMHKPIIPYETYLRVQKELEERQRQTYERNNNPRPFQAKYMLSGMARCGYCGAPLKIVLGHKRKDGSRTMKYHCANRFPRKTKGVTVYNDNKKCDSGTYDLSHLENTVIDNLIGLQENNDSLLKIINGNNQPILDTGSFKKQISQIDKKIQKNSDLYLNDFITMDELKDRTDSLQAEKKLLKAKISENKSNDSTDVFELVRAQLGSIPINELSYDNKRRIVNNLVSKVDVTADNVDIIFKFQLA

SEQ ID NO: 8372 - protein, 452 aa, synthetic construct
MKAAIYIRVSTREQVENYSIQAQTEKLTALCRSKDWDVYDIFIDGGYSGSNMNRPALNEMLSKLHEIDAVVVYRLDRLSRSQRDTITLIEEYFLKNNVEFVSLSETLDTSSPFGRAMIGILSVFAQLERETIRDRMVMGKIKRIEAGLPLTTAKGRTFGYDVIDTKLYINEEEAKQLQLIYDIFEEEQSITFLQKRLKKLGFKVRTYNCYSNWLTNDLYCGYVSYKDKVHVKGIHEPIISEEQFYRVQEIFTRMGKNPNMNRDSASLLNNLVVCGKCGLGFVHRRKDAMSRDKKYHYRYYSCKTYKHIHELEKCGNKIWRADKLEELIIDRVNNYSLASRNVDKEDELGSLNEKLKAEHAKKKRLFDLYINGSYEVSELDSMMNDIDAQINYYESQIEANEELKKNKKIQENLADLATVDFDSLEFREKQLYLKSLINKIYIDGEQVSIEWL

SEQ ID NO: 8373 - protein, 485 aa, synthetic construct
MTKKVAIYTRVSTTNQAEEGFSIDEQVDRLTKYAEAMGWQVSDTYTDAGFSGAKLERPAMQRLINDIENKAFDTVLVYKLDRLSRSVRDTLHLVKDVFTKNRIDLISLNESIDTSSAMGSLFLTILSAINEFERENIKERMTMGKLGRAKSGKSMMWTKTAFGYYHNRKTGILEIVPLQATIVEQIFTDYLSGISLTKLRDKLNESGHIGKDIPWSYRTLRQTLDNPVYCGYIKFKDSLFEGMHKPIIPYETYLKVQKELEERQQQTFARNNNPRPFQAKYMLSGMARCGYCGAPLRIVLGHKRKDGSRTMKYHCANRFPRKTKGITVYNDNEKCDSGTYDLSNLENAVIDNLIGFQENNDSLLKIINGNNQPILDTSSLKEQISQIDKKIQKNSDLYLNDFITMEELKDRTDSLQAEKKLLKAKISENKFNDSTDVFELVKTQLGSIPISELSYDNKKKIVNNLVSKVDVTADNVDIIFKFQLA

SEQ ID NO: 8374 - protein, 469 aa, synthetic construct
MSYTTPVRAAVYLRISEDRSGEQLGAARQREDCLELCCQRKWVPVEYLDNDVSASTGKRRPAYEQMLADITAGKIAAVVAWDLDRLHRRPIELEAFMSLADEKRLALATVAGDVDLATPQGRLVARLKGSVAAHETEHKKARQRRAARQKAERGLPNWSKAFGYLPGPNGPEPDPRTAPLVKQAYADILAGASLGDVRRQWNDAGAFTITGRPWTTTTLSKFLRKPRNAGLRAYKGARYGPVDRDAIVGKALWSPLVDEATFWAAQAVLDAPGRAPGRKSVRRHLLTGLAGCGKCGNHLAGSYRTDGRVVYVCKACHGVAILADNIEPILYHIVAERLAMPDAVDLLRREIHDAAEAETIRLELETLYGELDCLAVERAEGLLTARQVKISTDIVNAKITKLQARQQDQERLRVLDGIPLGTPQVAGMIAELSPDRFRAVLDVLAEVVVQPVGKGGRIFNPERVQVNWR

SEQ ID NO: 8375 - protein, 469 aa, synthetic construct
MSYTTPVRAAVYLRISEDRSGEQLGVARQREDCLKLCGQRKWVPVEYLDNDVSASTGKRRPAYEQMLADITAGKIAAVVAWDLDRLHRRPIELEAFMSLADEKRLALATVAGDVDLATPQGRLVARLKGCVAAHETEHKKARQRRAARQKAERGHPNWSKAFGYLPGPNGPEPDPRTAPLVKQAYADILAGASLGDVCRQWNDAGAFTITGRPWTTTALSKFLRKPRNAGLRAYKGARYGPVDRDAIVGKALWSPLVDEATFWAAQAVLDAPGRAPGRKSVRRHLLTGLAGCGKCGNHLAGSYRTDGRVVYVCKACHGVAILADNIEPILYHIVAERLAMPDAVDLLRRETHDAAEAETIRLELETLYGELDRLAVERAEGLLTARQVKISTDIVNAKIAKLQARQQDQERLRVLDGIPLGTPQVAGVIAELSPDRFRAVLDVLAEVVVQPVSKSGRIFNPERVRVNWR

SEQ ID NO: 8376 - protein, 452 aa, synthetic construct
MKAAIYIRVSTREQVENYSIQAQTEKLTALCRSKDWDVYDIFIDGGYSGSNMNRPALNEMLSKLHEIDAVVVYRLDRLSRSQRDTITLIEEYFLKNNVEFVSLSETLDTSSPFGRAMIGILSVFAQLERETIRDRMVMGKIKRIEAGLPLTTAKGRTFGYDVIDTKLYINEEEAKQLQLIYDIFEEEQSITSLQKRLKKLGFKVCTYNRYNNWLTNDLYCGYVSYKDKVHVKGIHEPIISEEQFYRVQEIFTRMGKSPNMNRDSASLLNNLVVCSKCGLGFVHRRKDTMSRGKRYHYRYYSCKTYKHIHELERCGNKIWRADKLEELIINRVSNYSFASRNVDKEDELDSLNEKLKIEHAKKKRLFDLYINGSYEVSELDSMMSDIDAQINYYEGQIEANEELKKNKKIQKNLANLATVDYDSLEFREKQLYLKSLINRIYIDGEQVTIEWL

SEQ ID NO: 8377 - protein, 469 aa, synthetic construct
MSYTTPVRAAVYLRISEDRSGEQLGVARQREDCLKLCGQRKWVPVEYLDNDVSASTGKRRPAYEQMLADITAGKIAAVVAWDLDRLHRRPIELEAFMSLADEKRLALATVAGDVDLATPQGRLVARLKGSVAAHETEHKKARQRRAARQKAERGLPNWSKAFGYLPGPNGPEPDPRTAPLVKQAYADILAGASLGDVCRQWNDAGAFTITGRPWTTTTLSKFLRKPRNAGLRAYKGARYGPVDRDAIVGKAQWSSLVDEATFWAAQAVLDAPGRAPGRKSVRRHLLTGLAGCGKCGNHLAGSYRTDGRVVYVCKACHGVAILADNIEPILYHLVAERLAMPDAVDLLRREIHDAAEAETIRLELETLYGELDRLAVERAEGLLTARQVKISTDIVSAKITKLRARQLDQERLRVFDGIPLGTPQVAGMIAELSPDRFRAVLDVLAEVVVQPVGKGGRIFNPERVQVNWR

SEQ ID NO: 8378 - protein, 469 aa, synthetic construct
MSYTTPVRAAVYLRISEDRSGEQLGVARQREDCLQLCDQRKWVPVEYLDNDVSASTGKRRPAYERMLADITAGKIAAVVAWDLDRLHRRPIELEAFMSLADEKRLALATVAGDVDLATSQGRLVARLKGCVAAHETEHKKARQRRAARQKAERGYPNWSKAFGYLPGPNGPEPDPRTAPLVKQAYADILAGASLGDVCRQWNDAGAFTITGRLWTTTTLSKFLRKPRNAGLRAYKGARYGPVDRDAIVGKAQWSPLVDEATFWAAQAVLDAPGRAPGRKSVRRHLLTGLAGCGKCGNHLAGSCRTDGRVVYVCKACHGVAILADNIVPILYRIVAGRLAMPDAVNLLRREIHDAAEAETIRLELATLYGELDHLAVERAEGLLTARQVKISTDIVNAKITKLQARLLDQERLRVLDGIPLGTPQVAGMIAELSPDRFRAVLDVLAEVVVQPVGKSGRIFNPERVQVNWR

SEQ ID NO: 8379 - protein, 469 aa, synthetic construct
MSYTTPVRAAVYLRISEDRSGEQLGVARQREDCLKLCDQRKWVPVEYLDNDVSASTGKRRPAYEQMLADITAGKIAAVVAWDLDRLHRRPVELEAFMSLADEKRLALATVAGDVDLATPQGRLVARLKGCVAAHETEHKKARQRRAARQKAERGLPNWSKAFGYLPGPNGPEPDPRTAPLVKQAYADILAGASLGDVCRQWNDAGASTTTGRPWATTTLSKFLRKPRNAGLRAYKGARYGPVDRDAIVGKAQWSPLVDEATFWAVQAVLDAPGRAPGRKSVRRHLLTGLAGCGKCGSHLAGNYRADGRVVYVCKACHGVAILAENIEPILYHIVVERLAMPDAVDLLRRETHDAAEAETIRLELETLYGELDRLAVERAEGLLTARQVKISTDIVNAKITKLRARQLDQERLRVFDGIPLGTPQVAGVIAELSPDRLRAVLDVLAKVVVQPVGKSGRIFNPERVQVNWR

SEQ ID NO: 8380 - protein, 485 aa, synthetic construct
MTKKVAIYTRVSTTDQAEEGFSIDEQIDRLTKYAEAMGWQVSDTYTDAGFSGAELERPAMQRLINDIESKAFDTVLVYKLDRLSRSVRDTLYLVKDVFTRNKIDFISLNESIDTSSAMGSLFLTILSAINEFERENIKERMTMGKLGRAKSGKSMMWTKTAFGYYHNRKTGILEIVPLQATIVEQIFTDYLSGISLTKLRDKLNESGHIGKDIPWSYRTLRQTLDNPVYCGYIRFKDSLFEGMHKPIISYETYLKVQKELEERQQQTYERNNNPRPFQAKYMLSGMARCGYCGAPLRIVLGHKRKDGSRTMKYHCANRFPRKTKGVTVYNDNKRCDSGTYDLRNLENTVIDYLVGFQENNDSLLKIINGNNQPILDTSSFKKQISQIDKKIQKYSDLYLNDFITMDELKNRTDSLQAEKKLLIARISENKFNDSTEVFELAKAQLGSIPINELSYDNKKKIVNDLVSKVDVTADNVDIIYKFQLA

SEQ ID NO: 8381 - protein, 485 aa, synthetic construct
MTKKVAIYTRVSTTNQAEEGFSIDEQIDRLTKYAEAMGWQVSDTYTDAGFSGAKLERPAMQRLINDIENKAFDTVLVYKLDRLSRSVRDTLYLVKDVLTKNKIDFISLNESIDTSSAMGSLFLTILSAINEFERENIKERMTMGKLGRAKSGKSMMWTKTAFGYYHNRKTGILEIVPLQATIVEQIFTDYLSGISLTKLRDKLNESGHIGKDIPWSYRTLRQTLDNPVYCGYIKFKDSLFEGMHKPIIPYETYLRVQKELEERQQQTYERNNNPRPFQAKYMLSGMARCGYCGAPLRIVLGHKRKDGSRTMKYHCANRFPRKTKGVTVYNDNKKCDSGTYDLSNLENTVIDNLIGFQENNDSLLKFINGNNQPILDTCSLKKQISQIDKKIQKNSDLYLNDFITMDELKDRTDSLQAEKKLLKAKISENKFNDSTDVFELVKTQLGSIPINELSYDNKKKIVNSLVSKVDVTADSVDIIFKFQLA

SEQ ID NO: 8382 - protein, 469 aa, synthetic construct
MSYTTPVRAAVYLRISEDRSGEQLGVARQREDCLKLCGQRKWVPVEYLDNDVSASTGKRRPAYEQMLADIAAGKIAAVVAWDLDRLHRRPIELEAFMCLADEKRLALATVAGDVDLATPQGRLVARLKGCVAAHETEHKKARQCRAARQKAERGHPNWSKAFGYLPGPNGPEPDPRTAPLVKQAYADILAGASLGDVCRQWNDAGAFTITGRPWTTTALSKFLRKPRNAGLRAYKGARYGPVDRDAIVGKAQWSPLVDEATFWAAQAVLDAPGRAPGRKSVRRHLLTGLAGCGKCGNHLAGSYRTDGRVVYVCKACHGVAILADNIEPILYHIVAERLAMPDAVDLLRRGIHDAAEAETIRLELETLYGELDRLAVERAEGLLTARQAKISTDIVNAKITKLQAHQLDQERLRVFDGIPLGTPQVAGMIAELSPDRFRAVLDVLAEVVVQPVGKSGRIVNPERVQVNWR

SEQ ID NO: 8383 - protein, 469 aa, synthetic construct
MSYTTPVRAAVYLRISEDRSGEQLGVARQREDCLKLCGQRKWVPVEYLDNDVSASTGKRRPAYEQMLADITAGKIAAVVAWDLDRLHRRPVELEAFMSLADEKRLALATVAGDVDLATPQGRLVARLKGCVAAHETEHKKARQRRAARQKAERGLPNWSRAFGYLPGPNGPEPDPRTAPLVKQAYADILAGASLGDVCRQWNGAGALTITGRPWTTTTLSKFLRKPRNAGLRAYRGARYGPVDRDAIVGKAQWSPLVDEATFWAAQAVLDAPGRAPGRKSVRRHLLTGLAGCGKCGNHLAGSYRTDGRVVYVCKACHGVAILADNIEPFLYHIVAERLAMPDAVDLLRREIHDAAEAETIRLELETLYGELDRLAVERAEGLLTARQVKISTDIVNAKITKLQARQLDQERLCVFGGIPLGTPQVAGTIAELSPDRFRAVLDVLAEVVVQPVGKSGRIFNPERVQVNWR

SEQ ID NO: 8384 - protein, 485 aa, synthetic construct
MTKKVAIYTRVSTTNQAEEGFSIDEQIDRLTKYAEAMGWQVSDTYTDAGSSGAKLERPAMQRLINDIENKAFDTVLVYKLDRLSRSVRDTLYLVKDVFTKNKIDFISLNESIDTSSAMGSLFLTILSAINEFERENIKERMTMGKLGRAKSGKSMMWAKTAFGYCHNRKTGILEIVPLQATIVEQIFTDYLSGISLTKLRDKLNESGHIGKDIPWSYRTLRQTLDNPVYCGYIKFKDSLFEGMHKPIIPYETYLKVQKELEERQQQAYERNNNPRPFQAKYMLSGMARCGYCGAPLRIVLGHKRKDGSRTMKYHCANRFPRKTKGATVYNDNKKCDSGTYDLSDLENTVIDNLIGFQENSDSLLKIISGNNQPILDTSGFKEQISQIDKKIRKNGDLYLNDLITMDELKDRTDSLQAEKKLLKAKISENKFNGSTDVFELVKTQLGSIPINELSYDNKKKIVNNLVSKVDVTADNVDIIFKFQLA

SEQ ID NO: 8385 - protein, 485 aa, synthetic construct
MTKKVAIYTRVSTTNQAEEGFSIDEQIDRLTKYAEAMGWQVSDTYTDAGFSGAKLERPAMRRLINDIENKAFDTVLVYKLDRLSRSVRDTLHLVKDVFTKNKIDFISLNESIDTSSAMGSLFLTILSAINEFERENIKERMTMGKLGRAKSGKSMMWTKTAFGYYHNRKTGILEIVPLQATIVEQIFTDYLSGISLTKLRDKLNESGHIGKDIPWSYRTLRQTLDNPVYCGYIKFKDSLFEGMHKPIIPYETYLKVQKELEERQQQTYERNNNPRPFQAKYMLSGMARCGYCGAPLRIVLGHKRKDGSRTMKYHCANRFPRKTKGVTVYNDNKKCDSGTYDLRNLENTVIDNLIGFQENNDSLLKIINGNNQPILDTSSFKKQISQIDKKIQKNSDLYLNDFITMDELKDRTDSLQAEKKLLKAKISESKFNDSTDVFELVKTQLGSIPINELSYDNKKKIVNNLVSKVDVTAGNVDIIFKFQLA

SEQ ID NO: 8386 - protein, 469 aa, synthetic construct
MSYTTPVRAAVYLRISEDRSGEQLGVARQREDCLKLCDQRKWVPVEYLDNDVSASTGKRRPAYEQMLADITAGRVAAVVAWDLDRLHRRPIELEAFMSLADERRLALATAAGDVDLATPQGRLVARLKGSVAAHETEHKRARQRRAARQKAERGHPNWSKAFGYLPGPNGPEPDPRTAPLVKQAYVDILAGASLGDVCRQWNDAGAFTITGRLWTTTTLSKFLRKPRNAGLRAYKGARYGPVDRDAIVGKAQWNPLVDEATFWAAQAVLDAPGRAPGRKSVRRHLLTGLAGCGKCGNHLAGSYRTDGRVVYVCKACHGVAILADNIEPILYHIVAERLAMPDAVDLLRREIHDAAEAETIRLELETLHGELDRLAVERAEGLLTARQVKISTDIVNAKITELQARQLDQERLRVLDGIPLGTPQVAGMIAELSPDRFRAVLDVLAEVVVQPVGKSGGVFNPERVQVNWR

SEQ ID NO: 8387 - protein, 469 aa, synthetic construct
MSYTTPVRAAVYLRISEDRSGEQLGVARQREDCLKLCDQRKWVPVEYLDNDVSASTGKRRPAYEQMLADITAGKIAAVVAWDLDRLHRRPIELEAFMSLADEKRLALATVAGDVDLATPQGRLVARLKGSVAAHETEHKKARQRRAARQKAERGHPNWSKAFGYLPGPNGPEPDPRTAPLVKQAYADILAGASLGDVCRRWNDAGALTITGRPWTTTTLSKFLRKPRNAGLRAYKGARYGPVDREAIVGKAQWSPLVDEATFWATQAVLDAPGRAPGRKSVRRHLLTGLAGCGKCGNHLAGSYRTDGRVVYVCKACHGVAILADNIEPILYHIVAERLAMPDAVDLLRREIHDAAEAGTIRLELEALYGELDRLAVERAEGLLTARQVKISTDIVNAKITKLQARQLDQERLRVFDGIPLGTPQVAGVIAELSPDRFRAVLDVLAEVVVQPVGKSGRVFNPERVQVNWR

SEQ ID NO: 8388 - protein, 485 aa, synthetic construct
MTKKVAIYTRVSTTNQAEEGFSIDEQIDRLTKYAEAMGWQVSDTYTDAGFSGAKLERPAMQRLINDIENKAFDTVLVYKLDRLSRSVRDTLYLVREVFTKNKIDFISLNESIDTSSAMGSLFLTILSAINEFERENIKERMTMGKLGRARSGKSMMWTKTAFGYYHNRKTGILEIVPPQATIVEQIFTDYLSGISLTKLRDKLNESGHIGKDIPWSYRTLRQTLDNPVYCGYIKFKDSLFKGMHKPIISYETYLKVQKELEERQQQTYERNNNPRPFQAKYMLSGMARCGYCGAPLRIVLGHKRKDGSRTMKYHCANRFPRKTKGVTVYNDNKKCDSGTYDLSNLENAVIDYLIGFQEDNDSLLKIINGNNQPILDTSSFKRQISQIDKKIRKNSDLYLNDFITMDELKVRTDSLQAEKRLLEAKISENKFNDSTDVFELVRTQLGSIPINELSYDNKKKIVNNLVSKVDVTADNVDIIFKFQLA

SEQ ID NO: 8389 - protein, 469 aa, synthetic construct
MSYTTPVRAAVYLRISEDRSGEQLGVARQREDCLKLCDQRKWVPVEYLDNDVSASTGKRRPAYEQMLADITAGKIAAVVAWDLDRLHRRPIELEAFMSLADEKRLALATVAGDVDLATPQGRLVARLKGSVAAHETEHKRARQRRAARQKAERGYPNWSKAFGYLPGPNGPEPDPRTAPLVKQAYADILAGASLGDVCRQWNDAGAFTITGRPWTTTTLSKFLRKPRNAGLRAYKGARYGPVDRDAIVGKAQWSPLVDEATFWAAQAVLDAPGRAPGRKSVRRHLLTGLAGCGKCGNHLAGSYRTDGRVVYVCKACHGVAILADNIVPILYHIVAERLAMPDAVDLLRREIHDAADAKAIRLELETLHGELDRLAVERAEGLLTARQVKISTDIVSAKITKLQTRQLDQERLRVLDGIPLGTPQVAGMIAELSPDRFRAVLDVLAEVVVQPVGKSGRIFNPERVQVNWR

SEQ ID NO: 8390 - protein, 469 aa, synthetic construct
MSYTTPVRAAVYLRISEDRSGEQLGVARQREDCLKLCGQRKWEPVEYLDNDVSASTSKRRPAYEQMLADITAGKIAAVVAWDLDRLHRRPIELEAFMSLADEKRLALATVAGDVDLATPQGRLVARLKGSVAAHETEHKKARQRRAARQKAERGHPNWSKAFGYLPGPNGPEPDPRTAPLVKQAYADILAGASLGDVCRQWNAAGAFTITGRPWTITTLSKFLRKPRNAGLRAYKGARYGPVDRDAIVGRAQWSPLVDEATFWAAQAVLDAPGRAPGRKSVRRHLLTGLAGCGKCGNHLAGSYRTDGRVVYVCKVCHGVAILADNIEPILYHIVAERLAMPDAVDLLRREVHDAAEAETIRLELETLYGELDRLAVERAEGLLTARQVKISTDIVNAKITKLQARQLDQERLRVFGGIPLGTPQVAGVIAELSPDRFRAVLDVLAEVVVQPVGKGGRIFNPERVQVNWR

SEQ ID NO: 8391 - protein, 452 aa, synthetic construct
MKAAIYIRVSTREQVENYSIQAQTEKLTALCRSKDWDVYDIFIDGGYSGSNMNRPALNEMLGKLHEIDAVVVYRLDRLSRSQRDTITLIEEYFLKNNVEFVSLSETLDTSSPFGRAMIGILSVFAQLERETIRDRMVMGKIKRIEAGLPLTTAKGRTFGYDVIDTKLYINEEEARQLRLIYDIFEEEQSITLLQKRLKELGFKVRTYNRYNNWLTNDLYCGYVSYKDKVHVKGIHEPIISEEQFYRVQEIFTRMGKNPNMNRDSASLLNNLVVCGKCGLGFVHRRKDATSRDKKYHYRYYSCKTYKHIHELEKCGNKIWRADKLEELIINRVNNYSLASRNVDKEDELDSLNEKLKTEHAKKKRLFDLYINGHYEVSELDSMMNDIDAQINYYESQIEANEELKKNKKIRENLADLATVDFDSLEFREKQLYLKSLINKIYIDGEQVTIEWL

SEQ ID NO: 8392 - protein, 500 aa, unidentified
MRALVVIRLSRVTBATTSPERQLESCQQLCAQRGWBVVGVAEBLBVSGAVBPFBRKRRPBLARWLAFEEQPFBVIVAYRVBRLTRSIRHLQQLVHWAEBHKKLVVSATEAHFBTTTPFAAVVIALMGTVAQMELEAIKERBRSAAHFBIRAGKYRGSLPPWGYLPTRVBGEWRLVPBPVQRERILEVYHRVVBBHEPLHLVAHBLBRRGVLSPKBYFAQLQGREPQGREWSATALKRSMISEAMLGYATLBGKTVRBBBGAPLVRAEPILTREQLEALRAELVKTSRAKPAVSTPSLLLRVLFCAVCGEPAYKFAGGGRKHPRYRCRSMGFPKHCGBGTVAMAEWBAFCEEQVLBLLGBAERLEKVWVAGSBSAVELAEVBAELVBLTSLIGSPAYRAGSPQREALBARIAALAARQEELEGLEARPSGWEWRETGQRFGBWWREQBTAAKBTWLRSMBVRLTFBVRGGLTRTIBFGBLQEYEQHLRLGSVVERLHTGMS

SEQ ID NO: 8393 - DNA, 48 bp, unidentified
  source 1..48: mol_type = unassigned DNA
ggtttgtctggtcaaccaccgcggtctcagtggtgtacggtacaaacc

SEQ ID NO: 8394 - DNA, 38 bp, unidentified
  source 1..38: mol_type = unassigned DNA
ggcttgtcgacgacggcggtctccgtcgtcaggatcat

SEQ ID NO: 8395 - protein, 500 aa, synthetic construct
MRALVVIRLSRVTBATTSPERQLASCRQLCAQRGWBVVGVAEBLBVSGAVBPFBRKRRPBLARWLAFEEQPFBVIVAYRVBRLTRSVRHLQQLVHWAEBHKKLVVSATEAHFBTTTPFAAVVIALMGTVAQMELEAIKERBRSAVHFBIRAGKYRGSLPPWGYLPARVBGEWRLVPBPVQRERILEVYHRVVBBHESLHLVAHBLBRRGVLSPKBYFAQLRGREPQGRKWSATALKCSLTSEAMLGYATLBGKIVRBBBGAPLVRAEPILTREQLEALRAELVKTSRAKPAVSTPSLLLRVLFCAVCGEPAYKFAGGGRKHPRYRCRSMGFPKHCGBGTVAMAVWBAFCEEQVLBLLGBAERLEKVWVAGSBSAVELAEVBAELVBLTSLIGSPAYRAGSPQREALBARIAALAARQEELEGLEVRPSGWEWRGTGQRFGBWWREQBTAAKBTWLRSMBVRLTFBVRGGLTRTIBFGELREYEQHLRSGGVVERLHTGMS

SEQ ID NO: 8396 - DNA, 48 bp, synthetic construct
  source 1..48: mol_type = other DNA
cgtttgtctggtcaagcaccgatgcttcagtgctgtacggtacaaacg

SEQ ID NO: 8397 - DNA, 38 bp, synthetic construct
  source 1..38: mol_type = other DNA
cggttgtttagcacggatgcttctgtgctcagaatgag

SEQ ID NO: 8398 - protein, 500 aa, synthetic construct
MRALVVIRLSRVTBATTSPERQLESCQQLCAQRGWBVVGVAEBLBVSGAVBPFBRKRRPBLARWLAFEEQPFBVIVAYRVBRLTRSVRHLQQLVHWAEBHKKLVVSATEAHFBTTTPFAAVVIALMGTVAQMELEAIKERSRSAVHFBIRAGKYRGSLPPWGYLPARVBGEWRLAPBPVQRERILEVYHRVVBBHESLHLVAHBLBRRGILSPKBYFAQLRGREPRGRKWSATALKHSMTSGAMLGYATLBGKTVRBBBGAPLVRAEPILTREQLEALRAELAKTSRAKPAVSTPSLLLRVLFCAVCGEPAYKFAGGGRKHPRYRCRSMGFPKHCGBGTVVMAEWBAFCEEQVLKLLGBTERLEKVWVAGSBSAVELAGVBAELVBLTSLIGSPAYRAGSPQRKALBARIAALAARQEELEGLEARPSGWAWRETGQRFRBWWHEQBTAAKBTWLRSMBVRLTFBVRGGLTRTIBFGBLQEYERHLRLGSVAERLRTGMS

SEQ ID NO: 8399 - protein, 500 aa, synthetic construct
MRALVVIRLSRVTBATTSPERQLESCQQLCAQRGWBVVGVAEBLBVSGAVBPFBRKRRPBLARWLAFEEQPFBVLVAYRVBRLTRSVRHLQQLVHWAEBHKKLVVSATEAHFBTTTPFAAVVIALMGTVAQMELEAIKERIRSAVHFBIRAGKYRGSLPPWGYLPARVBGEWRLVPBPVQRERILEVYHRVVBBHESLHSVAHBLBRRBVLSPKBYFAQLRGREPRGRKWSATALKRSMTSEAMLGYATLBGKIVRGBBGAPLVRAEPILTREQLEALRAVLVKTSRAKPAVSTPSLLLRVLFCAVCGEPAYKFTGGGRKHPRYRCRSMGFPKHCGBGTVVMAEWBTFCEEQVLGLLGBAERLEKVWVAGSBSAVELAEVBAELVBLTGLIGSPAYRAGSPQREALBARIAALAVRQEELEGLEARPSGWEWRGTGQRFGBWWREQBTAAKBTWLRSMBVRLTFBVRGGLTRTIBLGBLQEYEQRLRLGSVAERLHTGTP

SEQ ID NO: 8400 - protein, 500 aa, synthetic construct
MRALVVIRLSRVTBATTSPERQLESCQQLCAQRGWBVVGVAEBLBVSGAVBPFBRKRRPBLARWLAFEEQPFBVIVAYRVBRLARSVRHLQQLVHWAEBHKKLVVSATEAHFBTTTPFAAVVIALMGTVAQMELEAIKERBRSAAHFBIRAGKYRGSLPPWGYLPARVBGEWRLVPBPVQRERILEVYHRVVBBHEPLHSVAHBLBRRGVLSPKBYFAQLRGREPRGRKWSATALKHSMTSEAMLGYATLBGMTVRBBBGAPLVRAEPILTREQLEAVRAELVKTSRAKPAVSTPSLLLRVLFCAVCGEPAYKFTGGGRKRPRYRCRSMGFPKHCGBGTVVMAEWBAFCEEQVLBLLGBAERLEKVRVAGSBSAVELAEVBAELVBLTSLIGSPAYRAGSPQREALBARIAALAARQEELEGLEARPSGWEWRGTGQRFGBWWREQBTAAKBTWLRSMBVRLTFBARGGLTRTIBFGBLQEYVQHVRLGSAVGRLHAGMS

SEQ ID NO: 8401 - protein, 500 aa, synthetic construct
MRALVVIRLSRVTBATTSPERQLESCRQLCAQRGWBVIGVAEBLBVSGAVBPFBRKRRPBLARWLAFEEQPFBVIVAYRVBRLTRSVRHLQQLVHWAEBHKKLVVSATEAHFBTTTPFAAVVIALMGTVAQMELEAIKERBRSAAHFBIRAGKYRGSLPPWGYLPARVBGEWRLVPBPVQRERILEVYHRVVBBHEPLHLVAHBLBRCGILSPKBYFAQLRGREPQGRKWSATALKRSMTSEAMLGYATLBGKIVRBBBGAPLVRAEPILTREQLEALRAELVKTSRAKPAVSTPSLLLRVLFCAVCGEPAYKFAGGGRKHPRYRCRSMGFPKHCGBGTVVMAEWBTFCEEQVLGLLGBAERLEKVWVAGSBSAVELAEVBAELVBLTSLIGSPAYRAGSPQREALBARIAALAARQEELEGLEARPSGWEWRGTGQRFGBWWREQBTAAKBTWLRSMBVRLTFBARGGLTRTIBFGBLQEYEQHLRLGSVVERLHTGMS

SEQ ID NO: 8402 - protein, 500 aa, synthetic construct
MRALVVIRLSRVTBATTSPERQLESCQQLCAQRGWBVVGVAEBLBVSGAVBPFBRBRRPBLARWLAFEEQPFBVLVAYRVBRLARSTRHLQQLVHWAEBHKKLVVSATEAHFBTTTPFAAVVIALMGTVAQMELEAIRERSRSAAHFBIRAGKYRGSLPPWGYLPTRVBGEWRLVPBPVQRERILEVYHRVVBBHEPLHLVAHBLBRRGVLSPKBYFAQLRGREPQGCKWSATALKCSMTSEAMLGYATLBGKTVRGBBGAPLVRAEPILTRGQLEALRAELVKTSRAKPAVSTPSLLLRVLFCAVCGEPAYKFAGGGRKHPRYRCRSMGFPKHCGBGTVAMAEWBAFCEEQVLBLLGBAERLEKVWVAGPBSAVELAEVSAELVBLTSLIGSPAYRAGSPQRKALBARIAALAARQEELEGLEARPSGWEWCETGQRFGBWWREQBTAAKBTWLRSMBVRLTFBVRGGLTRTIBFGBLQEYEQHLRLGRVVKRLHTGMS

SEQ ID NO: 8403 - protein, 500 aa, synthetic construct
MRALVVIRLSRVTBATTSPERQLESCQQLCAQRGWBVVGVAEBLBVSGAVBPFBRKRRPBLARWLAFEEQPFBVIVAYRVBRLTRSIRHLQQLVHWAEBHKKLVVSATEAHFBTTTPFAAVVIALMGTVAQMELEAIKERSRSAAHFBIRAGKYRGSLPPWGYLPTRVBGEWRLAPBPVQRERILEVYHRVVBBHEPLHLVAHBLBRRGVLSPKBYFAQLQGREPQGRKWSATALKRSMISEAMLGYATLBGKTVRBBBGAPLVRAEPILAREQLEALRAELVKTSRAKPAVSTPSLLLRVLFCAVCGEPAYKFAGGGRKHPRYRCRSMGFPKHCGBGTVAMAEWBAFCEEQVLGLLGBAERLEKVWVAGSBSAVELAEVBAELVBLTSLIGSPAYRAGSPQREALBARIAALAARQEELESLEARPSGWEWRETGQRFGBWWREQBTAAKBTWLRSMBVRLTFBVRGGLTRTIBFGBLQEYEQHLRLGSVVERLHTGMS

SEQ ID NO: 8404 - DNA, 48 bp, synthetic construct
  source 1..48: mol_type = other DNA
ggtttggctggtcaaccatcgtcgtatcaatggtgtacggtccaaacc

SEQ ID NO: 8405 - DNA, 38 bp, synthetic construct
  source 1..38: mol_type = other DNA
ggtttggtcactatggtcgtatctatagtgaagacctg

SEQ ID NO: 8406 - protein, 500 aa, synthetic construct
MRALVVIRLSRVTBATTSPERQLESCQQLCAQRGWBVVGVAEBLBVSGAVBPFBRKRRPBLARWLAFEEQPFBVIVAYRVBRLTRSVRHLQQLVHWAEBHKKLVVSATEAHFBTTTPFAAVVIALMGTVAQMELEAIKERSRSAAHFBIRAGKYRGSLPPWGYLPARVBGEWRLVPBPVQRERILEVYHRVVBBHEPLHLVAHBLBRRGVLSPKBYFAQLQGREPQGRKWSATALKRSMISEAMLGYATLBGKTVRBBBGAPLVRAEPILTREQQEALRAELVKTTRAKPAVSTPSLLLRVLFCAVCGEPAYKFTGGGRKHPRYRCRSMGFPKHCGBGTVAMAEWBAFCEEQVLBLLGBAEHLEKVWVAGSBSAVELAEVBAELVBLTSLIGSPAYRAGSPQREALBARIAALAARQEELEGLEARPSGWEWRETGRRFGBWWREQBTAAKBTWLRSMBVRLTFBVRGGLTRTIBLGBLQEYEQHLRLGSVVERLHTGMS

SEQ ID NO: 8407 - protein, 500 aa, synthetic construct
MRALVVIRLSRVTBATTSPERQLESCQQLCAQRGWBVVGVAEBLBVSGAVBPFBRKRRPBLARWLAFEEQPFBAVVAYRVBRLTRSIRHLQQLVHWAEBHKKLVVSATEAHFBTTTPFAAVVIALMGTVAQMELEAIKERBRSAAHFBIRAGKYRGSLPPWGYLPARVBGEWRLAPBPVQRERILEVYHRVVBBHEPLHLVAHBLBRRGVLSPKBYFAQLQGREPQGRKWSATALKRSMTSETMLGYATLBGKIVRBBGGAPLVRAEPILTREQLEALRAELVKTSRAKPAVSTPSLLLRVLFCAVCGEPAYKFAGGGRKHPRYRCRSMGFPKHCGBGTVAMAEWBAFCEEQVLBLLGBAERLEKVWVAGSBSAVELAEVBAELVBLTSLIGSPAYRAGSPQREALBARIAALAARQEELGGLEARLSGWEWRKTGLRFGBWWREQBTAAKBTWLRSMBVRLTFBVRGGLTRTIBFGBLQEYEQHLRLGSVAERLHTGMS

SEQ ID NO: 8408 - protein, 500 aa, synthetic construct
MRALVVIRLSRVTBATTSPERQLESCQQLCAQRGWBVAGVAEBLBVSGAVBPFBRKRRPBLARWLAFEEQPFBVIVAYRVBRLTRSTRHLQQLVHWAEBHKKLVVSATEAHFBTTTPFAAVVIALMGTVAQMELEAIKERSRSAAHFBIRAGKYRGSLPPWGYLPTRVBGEWRLVPBPVQRERILEVYHRVVBBHEPLHLVAHBLBRRGVLSPKBYFAQLQGREPQGRKWSATALKRSMISEAMLGYATLBGKTVRBBBGAPLVRAEPILTRGQQEALRAELVKTSRAEPAVSAPSLLLRVLFCAVCGEPAYKFAGGGRKHPRYRCRSMGFPKHCGBGTVAMAEWBAFCEEQVLGLLGBAERLEKVWVAGSBSAVELAEVBAELVBLTSLIGSPAYRAGSPQREALBARIAALAARQEELEGLEARPSGWEWRGTGQRFGBWWREQBTAAKBTWLRSMBVRLTFBVRGGLTRTIBFGBLQEYEQHLRSGSVVVRLHTGMS

SEQ ID NO: 8409 - protein, 500 aa, synthetic construct
MRALVVIRLSRVTBATTSPERQLESCQQLCAQRGWBVVGVAEBLBVSGAVBPFBRKRRPBLARWLAFEEQPFBVIVAYRVBRLTRSVRHLQQLVHWAEBHKKLVVSATEAHFBTTTPFAAVVIALMGTVAQMELEAIKERSRSAAHFBIRAGKYRGSLPPWGYLPTRVBGEWRLVPBPVQRERILEVYRRVVBBHEPLHLVAHBLBRRGVLSPKBYFAQLRGREPQGRKWSATALKRSMTSEAMLGYATLSGKTVRBBBGAPLVRAEPILTREQQEALRAELVKTSRAKPAVSTPSLLLRVLFCAVCGEPAYKFAGGGRKHPRYRCRSMGFPKHCGBGTVAMAEWBAFCEEQVLBLLGBTERLEKVWVAGSBSAVELAEVBAELVBLTSLIGSPTYRAGSPQREALBARIASLAARQEELEGLEARPSGWEWRETGQRFGBWWREQBTAAKBSWLRSMBVRLTFGVRGGLTRTIBFGBLQEYEQHLRLGSVVERLHTGMS

SEQ ID NO: 8410 - protein, 500 aa, synthetic construct
MRALVVIRLSRVTBATTSPERQLESCQQLCAQRGWBVVGVAEBLBVSGAVBLFBRKRRPBLARWLAFEEQPFBVIVAYRVBRLTRSIRHLQQLVHWAEBHKKLVVSATEAHFBTTTPFAAVVIALMGTVAQMELEAIKERBRSAAHFBIRAGKYRGSLPPWGYLPTRVBGEWRLVPBPVQRERILEVYHRVVBBHEPLHLVAHBLBRRGVLSPKBYFAQLRGREPQGRKWSATALKRSMISEAMLGYATLBGKTVRBBBGAPLVRAEPILTREQLEALRAELVKASRAKPAVPTPSLLLRVLFCAVCGEPAYKFAGGGRKHPRYRCRSMGFPKHCGBGTVAMAEWBAFCEEQVLBLLGBAERLEKVWVAGSBSAVELAEVBKELVBLTSLIGSPAYRAGSPQREALBARIAALAARREELEGLVARPSGWEWRGTGQRFGBWWREQBTAAKBTWLRSMBVRLTFBVRGGLTRMIBFGBLQEYEQHLRLGSVVERLHTGMS

SEQ ID NO: 8411 - protein, 500 aa, synthetic construct
MRALVVIRLSRVTBATTSPERQLESCQQLCAQRGWBVVGVAEBLBVSGAVBPFBHKRRPBLARWLAFEEQPFBVIVAYRVBRLTRSTRHLQQLVHWAEBHKKLVVSATEAHFBTTTPFAAVVIALMGTVAQMELEAIKERSRSAAHFBIRAGKYRGSLPPWGYLPTRVBGEWRLAPBPVQRERILEVYHRVVBBHEPLHLVAHBLBRRGVLSPRBYFAQLRGREPQGRKWSATALKRSMISEAMLGYATLBGKTVRBEBGAPLVRAEPILTREQLEALRAELVKTSRAKPAVSTPSLLLRVLFCAVCGEPAYKFAGGGRKHSRYRCRSMGFPKHCGBGTVAMAEWBAFCEEQVLBLLGBAERLEKVWVAGSBSAVELAEVBAELVBLTSLIGSPAYRAGSPQREALBARIAALAARQEELEGLEARPSGWEWRETGQRFGBWWREQBTAAKBTWLRSMBVRLTFBVRGGLTRTIBFGBLREYEQHLRLGSVVERLHTGMS

SEQ ID NO: 8412 - protein, 500 aa, synthetic construct
MRALVVIRLSRVTBATTSPERQLESCQQLCAQRGWBVVGVAEBLBVSGAVBPFBRKRRPBLARWLAFEERPFBVIVAYRVBRLTRSTRHLQQLVRWAEBHKKLVVSATEAHFBTTTPFAAVVIALMGTVAQMELEAIKERIRSAVRFBIRAGRYRGSLPPWGYLPARVBGEWRLVPBPVQRERILEVYHRVVGBHEPLHLVAHBLBRRGVLSPKBYFAQLRGREPQGRKWSATALKRSMTSGAMLGYATLBGKTVRBBBGAPLVRAEPILTREQQEALRAELAKTSRAKPAVSTPSLLLRVLFCAVCGEPAYKFTGGGRKHPRYRCRSMGFPKHCGBGTVVMAEWBAFCEKQVLBLLGBAERLEKVWVAGSBSAVELAEVBAELVBLTSLIGSPAYRAGSPQREALBARIAALAARQEELEGLEARPSGWEWRRTGRRFGBWWREQBTAAKBTWLRSMBVRLTFBVRGGLTRTIBFGBLQEYEQHLRSGSVVERLHTGTS

SEQ ID NO: 8413 - DNA, 48 bp, synthetic construct
  source 1..48: mol_type = other DNA
gttttctctggtcaaccaccggtgatgcagtggtgtacggtagaaaac

SEQ ID NO: 8414 - DNA, 38 bp, synthetic construct
  source 1..38: mol_type = other DNA
gttttctgaacaacttgtgatgctgttgtctcaaccat

SEQ ID NO: 8415 - protein, 500 aa, synthetic construct
MRALVVIRLSRVTBATTSPVRQLESCQQLCAQRGWBVVGVAEBLBVSGAVBPFBRKRRPBLARWLAFEEQPFBVIVAYRVBRLTRSTRHLQQLVRWAEBHKKLVVSATEAHFBTTTPFAAVVIALMGTVAQMELEAIKERIRSAVRFBIRAGKYRGSLPPWGYLPTRVBGEWRLVPBPVQRERILEVYHRVVBBHEPLHLVAHBLBRRGVLSPKBYFAQLRGREPQGRKWSATALKRSMTSVAMLGYATLBGKTVRBBBGAPLVRAEPILTREQQEALRAELAKTSRAKPAVSTPSLLLRVLFCAVCGEPAYKFVGGGRKHPRYRCRSMGYPKHCGBGTVVMTEWBAFCEEQVLBLLGBAERLEKVWVAGSBSAVELAEVBAELVBLTSLIGSPAYRAGSPQREALBARIAALAARQGELEGVEARPSGWEWRGTGQRLGBWWREQBTAAKBTWLRSMBIRLTFBVRGGLTRTIBFGELQEYEQHLRLGSVAERLHTGMS

SEQ ID NO: 8416 - protein, 500 aa, synthetic construct
MRALVVIRLSRVTBATTSPERQLESCQQLCAQRGWBVVGVAEBLBVSGAVBPYBRKRRPBLARWLAFEEQPFBVIVAYRVBRLTRSTRHLQQLVRWAEBHKKLVVSATEAHFBTTTPFAAVVIALMGTVAQMELEAIKERIRSAVRFBIRAGKYRGSLPPWGYLPTRVBGEWRLVPBPVQRERILEVYHRVVBBHEPLHLVAYBLBRRGVLSPKBYFAQLRGREPQGREWSATALKRSMTSVAMLGYATLBGKTVRBBBGAPLVRAEPILTREQQEALRAELAKTSRAKPAVSTPSLLLRVLFCAVCGEPAYKFVGGGRKHPRYRCRSMGFPEHCGBGTVVMAEWBAFCEEQVLBLLGBAERLEKVWVAGSBSAVELAEVBAELVBLTSLIGSPAYRAGSPQREALBARIAVLAARQEELEGLEARPSGWEWRETGQRFGBWWREQBTAAKBTWLRSMBVRLTFBVRGGLTRTIBFGELQEYVRHLRLGSVAERLHTGMP

SEQ ID NO: 8417 - protein, 500 aa, synthetic construct
MRALVVIRLSRVTBATTSPERQLESCQQLCAQRGWBVVGVAEBLBVSGAVBPFBRKRRPBLARWLAFEEQPFBVIVAYRVBRLTRSIRHLQQLVHWAEBHKKLVVSATEAHFBTTTPFAAVVIALMGTVAQMELEAIKERIRSAVHFBIRAGKYRGSLPPWGYLPTRVBGEWRLVPBPVQRERILEVYHRVVBBHEPLHLVAHBLBRRGVLSPKBYFAQLQGREPQGRKWSATALBRSMISKAMLGYATLBGKTVRGBBGAPLVRAEPILTRGQLEALRAELAKTSRAKPAVSTPSLLLRVLFCAVCGEPAYKFVGGGRKHPRYRCRSMGFPKHCGBGTVVMAEWBAFCEEQVLBLLGBAERLEKVWVVGSBSAVELAEVBAELVBLTSLIGSPAYRAGSPQREALBARIAALAARQEELEGLEARPSGWEWRETGQRFEBWWREQBTAAKBTWLRLMBVRLTFBVRGGLTRTIBFGBLQEYEQHLRLGBVAERLRTGMS

SEQ ID NO: 8418 - protein, 500 aa, synthetic construct
MHALVVIRLSRVTBATTSPERQLESCQQLCAQRGWBVVGIAEBLBVSGAVBPFBRKRRPBLARWLAFEEQPFBVIVAHRVBRLTRSTRHLQQLVRWAEBHKKLVVSATEAHFBTTTPFAPLVIALMGTVAQMELEAIKERIRSAAHFBIRAGKYRGSLPPWGYLPTRVEGEWRLVPBPVQRERILEVYHRVVBBHEPLHLVAYBLBRRGVLSPKBYFAQLQGREPQGRKWSATALKRSMISAAMLGYATLBGKTVRBBBGAPLVRAEPILTREQQEALRAELVKTSRAKPAVSTPSLLLRVLFCAVCGEPAYKFVGGGRKHPRYRCRSMGFPEHCGBGTVVMAEWBAFCEEQVLBLLGBAERLEKVWVAGSBSAVELAEVBAELVBLTSLIGSPAYRAGSPQREALBARIAALAARQEELEGLEARPSGWEWRETGQRFGBWWREQBTAARBTWLRSMBIRLTFBVRGGLTRTIBFGELQEYEQHLRLGSVVERLRTGMS

SEQ ID NO: 8419 - protein, 500 aa, synthetic construct
MRALVVIRLSRVTBATTSPERQLESCQQLCAQRGWBVVGVAEBLBVSGAVBPFBRKRRPBLARWLAFEEQPFBAIVAYRVBRLTRSTRHLQQLVHWAEBHKKLVVSATEAHFBTTTPFAAVVIALMGTVAQMELEAIKERIRSAAHFBIRAGKYRGSLPPWGYLPTRVBGEWRLVPBPVQRERILEVYHRVVHBHEPLHLVAHBLBRRGVLSPKBYFAQLRGREPQGRKWSATALRRSMTSEAMLGYATLBGKIVRBBGGAPLVRAEPILTRGQQEALRAELAKTSRAKPAVSTPSLLLRVLFCAVCGEPAYKFVGGGRKHPRYRCRSMGFPKHCGBGTVVMTEWBAFCEEQVLBLLGBAERLEKVWVAGSBSAVELSEVBAELVBLTSSIGSPAYRAGSPQREALBARIAALAARQEELEGLEARPSGWEWRETGQRFGBWWREQBTAAKBTWLRSMBVRLSFBVRGGLTRTIBFGBLQEYEQHLRLGSGVERLHTGMS

SEQ ID NO: 8420 - protein, 500 aa, synthetic construct
MRALVVIRLSRVTBATTSPERQLESCQQLCAQRGWBVVGVAEBLBVSGAVBPFBRKRRPBLARWLAFEEQPFBVIVAHRVBRLTRSTRHLQQLVRWAEBHKKLVVSATEAHFBTTTPFAAVVIALMGTVAQMELEAIKERIRSAVHFBIRAGKYRGSLPPWGYLPTRVBGEWRLVPBPVQRERILEVYHRVVBBHEPLHLVAYBLBRRGVLSPKBYFAQLQGREPQGRKWSATALKRSMISVAMLGYATLSGKIVRBBBGAPLVRAEPILTREQQEALRAELARTSRAKPAVSTPSLLLRVLFCAVCGEPAYKFVGGGRKHPRYRCRSMGFPERCGBGTVVMAEWBAFCEEQVLBLLGBAERLEKVWVAGSBSAVELAEVBAELEBLTSLIGSPAYRAGSPQREALBARIAALAARQEELEGLEARPSGWEWRGTGQRFGBWWRELBTAAKBTWLRSMBVRLTFBVRGGLARTIBFGELQEYEQHLRSGSVVECLHTGMS

SEQ ID NO: 8421 - protein, 500 aa, synthetic construct
MRALVVIRLSRVTBATTSPERQLESCRQLCAQRGWBVVGVAEBLBVSGAVBPFBSKRRPBLARWLAFEEQPFBVIVAYRVBRLTRSVRHLQQLVRWAEBHKKLVVSATEAHFBTTTPFAAVVIALMGTVAQMELEAIKERIRSAAHFBIRAGKYRGSLPPWGYLPTRVBGEWRLVPBPVQRERILEVYHRVVBSHEPLHLVAYBLBRRGVLSPKBYFAQLQGREPQGRKWSATALKRSMISVAMLGYATLBGKIVRBBBGAPLVRAEPILTREQQEALRAELAKTSRAKPAVSAPSLLLRVLFCAVCGEPAYKFVGGGRKHPRYRCRSMGFPEHCGBGTVVMAEWBVFCEEQVLBLLGBTERLERVWVAGSBSAVELTEVBAELVBLTGLIGSPAYRAGSPQREALBARIAALAARQEELEGLEARPSGWEWRGTGQRFRBWWREQBTAAKBTWLRSMBVRLTFBVRGGLTRTIBFGBLQEYEQHLRLGSVVERLHTGMS

SEQ ID NO: 8422 - protein, 500 aa, synthetic construct
MRALVVIRLSRVTBATTSPERQLESCQQLCAQRGWBVVGVAEBLBVSGAVBPFBRKRRPBLARWLAFEEQPFBVIVAYRVBRLTRSTRHLQQLVHWAEBHKKLVVSATEAHFBTTTPFAAVVIALMGTVAQMELEAIKERBRSAAHFBIRAGKYRGSLPPWGYLPTRVBGEWRLVPBPVQRERILEVYHRVVBBHEPLHLVAHBLBRRGVLSPKBYFAQLQGREPQGRKWSATALKRSMTSEAMLGYATLBGKTVRGBBGAPLVRAEPILTRGQLEALRAELVRTSRAKPAVSTPSLLLRVLYCAVCGEPAYKFAGGGRKHPRYRCRSMGFPKHCGBGTVAMAEWBAFCEEQVLBLLGBAERLEKVWVAGSBSAIELAEVSAELVBLTSLIGSPAYRAGSPQREALBARIAALAARQEELEGLEARPSGWEWRGTGQRFGBWWREQBTAAKBTWLRSMBVRLTFBVRGGLTRTIBFGBLQEYEQHLRPGSVVERLHTGMS

SEQ ID NO: 8423 - DNA, 48 bp, synthetic construct
  source 1..48: mol_type = other DNA
caggtctctggtcaaccaccgaggtcccagtggtgtacggtagacctg

SEQ ID NO: 8424 - DNA, 38 bp, synthetic construct
  source 1..38: mol_type = other DNA
caggtctgaaccactgaggtcccagtggtggtgaccaa

SEQ ID NO: 8425 - protein, 500 aa, synthetic construct
MHALVVIRLSRVTBATTSPERQLESCRQLCAQRGWBVVGVAEBLBVSGAVBPFBRKRRPBLARWLAFEEQPFBAIVAYRVBRLTRSVRHLQQLVHWAEBHKKLVVSATEAHFBTTTPFAAVVVALMGTVAQMELEAIKERBRSAAHFBIRAGKYRGSLPPWGYLPTRVBGGWRLAPBPVQRERILEVYHRVVBBHEPLHLVAHBLBRRGVLSPKBYFAQLQGREPQGRKWSATALKRSMISEAMLGYATLBGKTVRBBBGAPLVRAEPILTREQLETLRAELVKTSRAKPAVSTPSLLLRVLFCAVCGEPAYKFAGGGRKHPRYRCRSMGFPKHCGBGTVAMAEWBAFCEEQVLBLLGBAERLEKVWVAGSBSAVELAEVBAELVBLTSLIGSPAYRAGSPQREALBARIAALAARQEELEGLEARPSGWEWRGTGQRFGBWWREQBTATKBTWLRSMBVRLTFBVRGGLTRTIBFGBLQEYEQHLRLGSVVERLHTGMS

SEQ ID NO: 8426 - protein, 500 aa, synthetic construct
MRALVVIRLSRVTBATTSPERQLESCQQLCAQRGWBVVGVAEBLBVSGAVBPFBRKRRPBLARWLAFEEQPFBAIVAYRVBRLTRSVRHLQQLVHWAEBHKKLVVSATEAHFBTTTPFAAVVIALMGTVAQMELEAIKERBRSAAHFBIRAGKYRGSLPPWGYLPTRVBGEWRLVPBPVQRERILEVYHRVVBBHEPLHLVAHBLBRRGVLSPKBYFAQLQGREPQGREWSATALKRSMTSEAMLGYATLBGKTVRBBBGAPLVRAEPILTREQLGALRAELVKTSRAKPAVSTPSLLLRVLFCAVCGEPAYKFAGGGRKHPRYRCRSMGFPKHCGBGTVAMAEWBAFCEEQVLGLLGBVERLEKVWVVGSBSAVELEEVBAELVBLTSLIGSPAYRAGSPQREALBARIAALAASQEELEGLEARPSGWEWRGTGQRFGBWWREQBTAAKBAWLRSMBVRLTFBVRGGLTRTIBFGBLQEYEQHLRLGSAAERLHTGMS

SEQ ID NO: 8427 - protein, 500 aa, synthetic construct
MRTLVVIRLSRVTBATTSPERQLESCQQLCAQRGWBVVGVAEBLBVSGAVBPFBRKRRPBLARWLAFEEQPFBAIVTYRVBRLTRSVRHLQQLVHWAEBHKKLVVSATEAHFBTTTPFAAVVIALMGTVAQMELEAIRERBRSAAHFBIRAGKYRGSLPPWGYLPARVBGEWRLVPBPVQRERILEVYHRVVBBHEPLHLVAHBLBRRGVLSPKBYFAQLQGREPQGRKWSATALKRSMTSEAMLGYATLBGKTVRBBBGAPLVRAEPILTREQLEALRAELVKTSRAKPAVSTPSLLLRVLFCAVCGEPAYKFAGGGRKHPRYRCRSMGFPKHCGBGTVVMAEWBAFCEEQVLBLLGBAERLEEVWVAGSBSAVELAEVBAELVBLTSLIGSPAYRASSPQREALBARIAALAARQEELEGLGARPSGWEWRETGQRFGBWWREQBTAAKBTWLRSMSVRLTFBARGGLTRTIBFGBLQEYEQHLRLGSVVERLHTGMS

SEQ ID NO: 8428 - protein, 500 aa, synthetic construct
MRALVVIRLSRVTBATTSPERQLESCQQLCAQRGWBVVGVAEBLBVSGAVBPFBRKRRPBLARWLAFEEQPFBVIVAYRVBRLTRSTRHLQQLVHWAEBHKKLVVSATEAHFBTTTPFAAVVIALMGTVAQMELEAIRERBRSAAHFBIRAGKYRGSLPPWGYLPTRVBGEWRLVPBPVQRERILEVYHRVVBBHEPLHLVAHBLBRRGVLSPKBYFAQLQGREPQGRKWSATALKRSMISEAMLGYATLBGKTVRBBBGAPLVRAEPILTREQLEALRAELVKTSRAKPAVSTPSLLLRVLFCAVCGEPAYKFAGGGRKHPRYRCRSMGFPKHCGBGTVATAEWBAFCEEQVLBLLGBAARLEKVWVAGSBSAVELAEVBAELVBLTSLIGSPAYRABSPQREALBARIAALAARQEELEGLGARPSGWEWRGTGQRFGBWWREQBTAAKBTWLRSMBVRLTFBVRGGLTRTIBFGBLQEYEQHLRLGSVVERLHTGMS

SEQ ID NO: 8429 - protein, 500 aa, synthetic construct
MRALVVIRLSRVTBATTSPERQLESCQQHCAQRGWBVVGVAEBLBVSGAVBPFBRKRRPBLARWLAFEEQPFBVIVTYRVBRLTRSVRHLQRLVHWAEBHKKLVVSATEAHFBTTTPFAAVVIALMGTVAQMELEAIKERBRSAAHFBIRAGKYRGSLPPWGYLPTRVBGEWRLVPBPVQRERILEVYHRVVBBHEPLHSVAHBLBRRGILSPKBYFAQLQGREPQGRKWSATALKRSMISEAMLGYATLBGKTVRBBBGAPLVRAEPILTREQLEALRAELVKTSRAKPAVSTPSLLLRVLFCAVCGEPAYKFAGGGRKHPRYRCRSMGFPKHCGBGTVAMAEWBAFCEEQVLBLLGBAERLEKVWVAGSBSAVELAEVBAELVBLTSLIGSPAYRAGSPQRGALBARIAALAARQEELEGLGARPPGWEWRETGQRFGBWWREQBTAARBTWLRSMBVRLTFBVRGGLTRTIBFGBLQEYGQHLRLBSVVERLHTGMS

SEQ ID NO: 8430 - protein, 500 aa, synthetic construct
MRALVVIRLSRVTDATTSPERQLESCQQLCAQRGWDVVGVAEDLDVSGAVDPFDRKRRPNLARWLAFEEQPFDVIVAYRVDRLTRSTRHLQQLVHWAEDHKKLVVSATEAHFDTTTPFAAVVIALMGTVAQMELEAIKERSRSAAHFNIRAGKYRGSLPPWGYLPARVDGEWHLVPDPVQRERILEVYHRVVDNHEPLHLVAHDLNRRGVLSPKDYFAQLRGREPQGREWSATALKRSMTSVAMLGYATLNGKTVRDDDGAPLVRAEPILTREQLEALRAELVKTSRAKPAVSTPSLLLRVLFCAVCGEPAYKFVGGGRKHPRYRCRSMGFPEHCGNGTVVMAEWDAFCEEQVLDLLGDVERLEKVWVAGSDSAVELAEVNAELVDLTSLIGSPAYRAGSPQREALDARIAALAARQEELEGLEARPSGWEWRGTGQRFGDWWREQDTAAKNTWLRSMNVRLTFDARGGLTRTIDFGDLQEYEQHLRLGCVVERLHTGMS

SEQ ID NO: 8431 - protein, 500 aa, synthetic construct
MRALVVIRLSRVTDATTSPERQLESCQQLCAQRGWDVVGVAEDLDVSGAVDPFDRKRRPNLARWLAFEEQPYDVIVAYRVDRLTRSIRHLQQLVHWAEDHKKLVVSATEAHFDTTTPFAAVVIALMGTVAQMELEAIKERIRSAAHFNIRAGKYRGSLPPWGYLPTRVDGEWRLVPDPVQRERILEVYHRVVDNHEPLHLVAHDLNRRGVLSPKDYFAQLRGREPRGRKWSATALRRSMISVAMLGYVTLNGKIVRDDDGAPLVRAEPILTREQQEALRAELAKTSRAKPAVSTPSLLLRVLFCAVCGEPAYKFAGGGRKHPRYRCRSMGFPKHCGNGTVVMTEWDAFCEEQVLDLLGDAERLERVWVAGSDSAIELAEVNAELVDLTSLIGSPAYRAGSPQREALDARIAALAARQEELEGLEARPSGWEWRETGQRFGDWWREQDTAAKNTWLRSMNVRLTFDVRGGLTRTIDFGDLQEYEQHLRLGSVAERLHTGMS

SEQ ID NO: 8432 - protein, 500 aa, synthetic construct
MRALVVIRLSRVTDATTSPERQLESCQQLCAQRGWGVVGVAEDLNVSGAVDPFDRMRRPNLARWLAFEEQPFDVIVAYRVDRLTRSIRHLQQLVHWAEDHKKLVVSATEAHFDTTTPFAAVVIALMGTVAQMELEAIKERNRSAAHFNIRAGKYRGSLPPWGYLPTRVDGEWRLVPDPVQRERILEVYHRVVDNHEPLHLVAHDLNRRGVLSPKDYFAQLQGREPQGRKWSATALKRSMISVAMLGYATLNGKTVRDDDGAPLVRAEPILTRGQLEALRAELVKTSRARPAVSTPSLLLRVLFCAVCGEPAYKFAGGGRKHPRYRCRSMGFPKHCGNGTVAMAEWDAFCEEQVLNLLGDAERLEKVWVAGSDSAVELAEVNAELVDLTSLIGSPAYRAGSPQREALDARIAALAARQEELEGLEARPSGWEWRGTGQRFGDWWREQDTAAKNTWLRSMNVRLTFDVRGGPTHAIDFGDLQEYKQRLRLGSVVERLHTGMS

SEQ ID NO: 8433 - protein, 500 aa, synthetic construct
MRALVVIRLSRVTEATTSPERQLESCQQLCAQRGWDVVGVAEDLDVSGAVDPFDRKRRPNLARWLAFEEQPFDVIVAYRVDRLTRSIRHLQQLVHWAEDHKKLVVSATEAHFDTTTPFAAVVIALMGTVAQMELEAIKERIRSAVHFNIRAGKYRGSLPPWGYLPTRVDGEWRLVPDPVQRERILEVYHRVVDNHEPLHLVAHDLNRRGVLSPKDYFAQLQGREPQGRKWSATALKRSMISGAMLGYATLNGKIVRDDDGAPLVRAEPILTREQQEALRAELAKTSRAKPAVSTPSLLLRVLFCAVCGEPAYKFVGGGRKHPRYRCRSMGFPEHCRNGTVVMAEWDAFCEEQVLDLLGDAERLEKVWVAGSDSAVELAEVSAELVDLTSLIGSPAYRAGSPQREALDARIVALAARQEELESLEARPSGWEWRGTGQRLGDWWREQDTAAKNTWLRSMNIRLTFDVRGGLTRTIDFGDLQEYERHLRSGSVAERLHTGMP

SEQ ID NO: 8434 - protein, 500 aa, synthetic construct
MRALVVIRLSRVTDATTSPERQLESCQQLCAQRGWDVVGVAEDLDVSGAVDPFDRKRRPNLARWLAFEEQPFDVIVAYRVDRLTRSTRHLQQLVHWAEDHKKLVVSATEAHFDTTTPFAAVVIALMGTVAQMELEAIKERIRSAAHFNIRAGKYRGSLPPWGYLPARVDGEWRLVPDPVQRERILEVYHRVVDNHEPLHLVAHDLNRRGVLSPKDYFAQLQGREPQGREWSATALKRSLISKAMLGHAILNGKTVRDDDGAPLVRAEPILTREQQEALRAELAKTSRAKPAVSTPSLLLRVLFCAVCGEPAYKFVGGGRKHPRYRCRSMGFPEHCGNGTVVMAEWDAFCEEQVLNLLGDAERLERVWVAGSDSAVELAEVNAELVDLTSLIGSPAYRAGSPQREALDARIAALAARQEELEGLEARPSGWEWRETGQRFGDWWREQDTAAKNTWLRSMNVRLTFDVRGGLTRTIDFGDLQEYEQLLRLGSVVERLHTGTS

SEQ ID NO: 8435 - protein, 500 aa, synthetic construct
MRALIVIRLSRVTDATTSPERQLESCQQLCSQRGWDVVGVAEDLDVSGAVDPFDRKRRPNLARWLAFEEQPFDVIVAYRVDRLTRSTRHLQQLVHWAEGHKKLVVSATEAHFDTTTPFAAVVIALMGTVAQMELEAIKERIRSAVHFNIRAGKYRGSLPPWGYLPTRVDGEWRLVPDPVQRERILEVYHRVVGNHEPLHLVAHDLNRRGILSPKDYFAQLQGREPRGRKWSATALKRSLISKAMLGYATLNGKTVRGDDGAPLVRAEPILTREQLEALRAELAKTSRAKPAVPTPSLLLRVLFCAVCGEPAYKFVGGGRKHPRYRCRSMGFPEHCGNGTVVMAEWDAFCEEQVLGLLGDAERLEKVWVAGSDSAVELAEVNAELMDLTSLIGSPAYRAGSPQREALDARIAALAARQEELEGLEARPSGWEWRGIGQRFGDWWREQDTAAKNTWLRSMNVRLTFDVRGGLTRTIDFGELQEYVQHLRLGSVVERLHTGMS

SEQ ID NO: 8436 - protein, 500 aa, synthetic construct
MRALVVVRLSRVTDATTSPERQLESCQQLCARRGWDVVGVAEDLDVSGAVDPFDRKRRPNLARWLAFEEQPFDAIVAYRVDRLARSIRHLQQLVHWAEDHKKLVVSATEAHFDTTTPFAAVVIALMGTVAQMELEAIKERNRSAAHFNIRAGKYRGSLPPWGYLPTRVDGEWRLVPDPVQRERILEVYHRVVDNHEPLLLVAHDLNRRGVLSPKDYFAQLQGREPRGRKWSATALKRSMISKAMLGYATLNGKTVRDDDGAPLVRAEPILTREQLEALRAELVKTSRAKPAVSTPSLLLRVLFCAVCGEPAYKFAGGGRKHPRYRCRSMGFSKHCGNGTAAMAEWDAFCEEQVLNLLGDAERLEKVWVAGSDSAVELAEVNAELVDLTSLIGSPAYRAGSPQREALDARIAALAARQEELEGLGARPPGWEWRETGQRFGDWWREQDTAAKNTWLRSMNVRLTFDARGGLTRTIDFGDLQEYEQHSRLGSVVERLHTGMS

SEQ ID NO: 8437 - protein, 500 aa, synthetic construct
MRALVVIRLSRVTDATTSPERQLESCQQLCAQRGWDVVGVAEDLDVSGAVDPFDRKRRPNLARWLAFEEQPFDVIVAYRVDRLTRSTRHLQQLVHWAEDHKKLVVSATEAHFDTTTPFAAVVIALMGTVAQMELEAIKERIRSATHFNIRAGKYRGSLPPWGYLPTRVDGEWRLVPDPVQRERILEVYHRVVDNHEPLHLVAYDLNRRGVLSPKDYFAQLQGREPQGRKWSATALKRSMISGAMLGYATLNGKTVRGDDGAPLVRAEPILTREQQEALRAELAKTSRAKPAVSTPSLLLRVLFCAVCGEPAYKLVGGGRKHPRYRCRSMGFPEHCGNGTVVMAEWDAFCEEQVLDLLGDAERLEKVWVAGSDSAVELAEVNAELVDLTSLIGSPAYRAGSPQREALDARIAALAARQGELEGLEARPSGWEWRGTGQRFGDWWREQDTAAKNAWLRAMNVRLTFDVRGGLTRTIDFGDLQEYEQHLRLGSVAERLHTGMS

SEQ ID NO: 8438 - protein, 500 aa, synthetic construct
MRALVVIRLSRVTDATTSPERQLESCQQLCVQRGWDVVGVAEDLDVSGAVDPFDRKRRPNLARWLAFEEQPFDVIVAYRVDRLTRSTRHLQQLVRWAEDHKKLVVSATEAHFDTTTPFAAVVIALMGTVAQMELEAIKERVRSAVRFNIRAGKYRGSLPPWGYLPARVDGEWRLVPDPVQRERILEVYHRVVDNHEPLHLVAYDLNRRGVLSPKDYFAQLRGREPRGRKWSATALKRSMISAAMLGYATLNGKTVRGDDGAPLVRAEPILTREQLEALRAELVKTSRAKPAVSTPSLLLRVLFCAVCGEPAYKFVGGGRKHPRYRCRSMGFPEHCGNGTVVMAEWDAFCEEQVLNLLGDVERLEKVWVAGSDSAVELAEVNAELVDLTSLIGSPAYRAGSPQREALDARIAALAARQGELEDLEARPSGWEWRETGQRFGDWWREQDTAAKNTWLRSMNVRLTFDVRGGLTRTIDFGDLQEYEQHLRSGSVVERLHTGMS

SEQ ID NO: 8439 - protein, 500 aa, synthetic construct
MRALVVIRLSRVTDATTSPERQLESCQQLCAQRGWDVVGVAEDLDVSGAVDPFDRKRRPNLARWLAFEEQPFDVIVAYRVDRLTRSTRHLQQLVRWAEDHKKLVVSATEAHFDTTTPFAAVVIALMGTVAQMELEAIKERIRSAVRFNIRAGKYRGSLPPWGYLPTRVDGEWRLVPDPVQRERILEVYHRVVDNHEPLHIVAHDLNRRGVLSPKDYFAQLQGREPQGRKWSATALKRSMISVAMLGYATLKGKTVRDDDGAPLVRAEPILTREQQEALRAELAKTSRAKPAVSTPSLLLRVLFCAVCGEPAYKFVGGGRKHPRYRCRSMGFPKHCGNGTVVMAEWDAFCEEQVLGLLGDAERLERVWVAGSDSAVELAEVNAELMDLTSLIGSPAYRAGSPQREALDARIAALAARQEELEGLEARPSGWEWRETGQRFGDWWREQDTAAKNTWLRSMNVRLTFDVRGGLTRTIDFGDLQEYEQHLRLGSVVERLRTGMS

SEQ ID NO: 8440 - protein, 500 aa, synthetic construct
MRALVVIRLSRVTDGTTSPERQLESCQQLCAQRGWDVVGVAEDLDVSGAVDPFDRKRRPNLARWLAFEEQPFDVIVVYRVDRLTRSTRHLQQLVRWAEDHKKLVASATEAHFDTTTPFAAVVIALMGTVAQMELEAIKERIRSAVRFNIRAGKYRGSLPPWGYLPTRVDGEWRLVPDPVQRERILEVYHRVVDNHEPLHLVAHDLNRRGVLSPKDYFAQLQGREPQGRKWSATALKRSMISEAMLGYATLNGKTVRGDDGVPLVRAEPILTREQQEALRAELAKTSRAKPAVSTPSLLLRVLFCAVCGEPAYKFVGGGRKHPRYRCRSMGFPEHCGNGTVVMAEWDAFCEEQVLDLLGDAERLEKVWVAGSDSAVELAEVNAELVDLTSLIGSPAYRAGSPQREALDARIAVLAARQEELEGLKARPSGWEWRGTGQRLGDWWREQDTAAKNTWLRSMNVRLTFDARGGLTRTIDFGDLQEYEQHLRLGSVVKRLHTGTS

SEQ ID NO: 8441 - protein, 500 aa, synthetic construct
MRALVVIRLSRVTDATTSPERQLESCQQLCAQRGWDVVGVAEDLDVSGAVDPFDRKRRPNLARWLAFEEQPFDVIVAYRVDRLTRSIRHLQQLIHWAEDHKKLVVSATEAHFDTTTPFAAVVIALMGTVAQMELEAIKERIRSAVRFNIRAGKYRGSLPPWGYLPTRVDGEWRLVPDPVQRERILEVYHRVVDSHEPLHLVAHDLNRRGVLSPKDYFAQLRGREPQGRKWSATALKRSMTSEAMLGYATLNGKIVRDDGGAPLVRAEPILTRGQLEALRAELVKTSRAKPAVSTPSLLLRVLFCAVCGEPAYKFVGGGRKHPRYRCRSMGFPEHCGNGTVVMAEWDAFCEEQVLNLLGDAERLEKVWVAGSDSAAELAEVNAELMDLTSLIGSPAYRAGSPQREALDARITALAARQEELEGLEARPSGWEWRGTGQRFGDWWREQDTAAKNTWLRSMNVRLTFDVRGGLTRTIDFGDLQEYEQHLRLGSVAERLHTGMS

SEQ ID NO: 8442 - protein, 500 aa, synthetic construct
MRALVVIRLSRVTDATTSPERQLESCQQLCAQRGWDVVGVAEDLDVSGAVDPFDRKRRPNLARWLAFEEQPFDVIVAYRVDRLTRSTRHLQQLVHWAEDHKKLVVSATEAHFDTTTPFAAVVIALMGTVAQMELEAIKERNRSAAHFNIRAGKYRGSLPPWGYLPTRVDGEWRLVPDPVQRERILEVYHRVVDNHEPLHSVAHDLNRRGVLSPKDYFAQLQGREPQGRKWSATALKRSMISEAMLGYVTLNGKTVRDDDGAPLVRAEPILTRGQLEALRAELVRTSRAKPAVSTPSLLLRVLFCAVCGEPAYKFAGGGRKHPRYRCRSMGLPKHCGNGTVVMAEWDAFCEEQVLDLLGDAKRLEKVWVAGSDSAVELAEVNAELVDLTSLIGSPAYRAGSPQREALDARIAALAARQEELEGLEARPSGWEWRETGQRFGDWWREQNTAAKNTWLRSMNVRLTFDVRGGLTRTIDFGDLQEYEQHLRLGSVVERLHTGMS

SEQ ID NO: 8443 - protein, 500 aa, synthetic construct
MRALVVIRLSRVTDATTSPERQLESCQQLCAQRGWDVVGVAEDLDVSGAVDPFDRKRRPNLARWLAFEEQPFDVIVAYRVDRLTRSVRHLQHLVHWAEDHKKLVVSATEAHFDTTTPFAAVVIALMGTVAQMELEAIKERNRSAAHFNIRAGKYRGSLPPWGYLPTRVDGEWRLVPDPAQRERILEVYHRVVDNHEPLHLVAHDLNRRGVLSPKDYFAQLRGREPQGRKWSATALKRSMISEAMLGYATLNGKTVRDDVGAPLVRAEPILTREQLETLRAELVKTSRAKPAVSTPSLLLRVLFCAVCGEPAYKFAGGGRKHPRYRCRSMGFPKHCGNGTVVMVEWDAFCEEQVLDLLGNTERLEKVWVAGSDSAVELAEVNAELVDLTSLIGSPAYRADSPQRQALDARIAALAARQEELEGLEARPSGWEWRETGQRFGDWWREQDTAAKNTWLRSMNVRLTFDVRGGLTRTIDFGNLQEYEQHLRLGSVVERLHTGMS

SEQ ID NO: 8444 - protein, 500 aa, synthetic construct
MRALVVIRLSRVTDATTSPERQLESCRQLCAQRGWDVVGVAEDLDVSGAVDPFDRKRRPNLARWLAFEEQPFDVIVAYRVDRLTRSTRHLQQLVHWAEDHKKLVVSATEAHFDTTTPFAAVVIALMGTVAQMELEAIKERIRSAAHFNIRAGKYRGSLPPWGYLPTRVDGEWRLVPDPVQRERILEVYHRVVDNHEPLHSVAHDLNRRGVLSPKDYFAQLRGREPQGRMWSATALKRSMTSVAMLGYATLNGKTVRDDDGAPLVRAEPILTREQLEALRAELVKTSRAKPAVSTPSLLLRVLFCAVCGEPAYKFVGGGRKHPRYRCRSMGFPKHCGNGTVVMAEWDVFCEEQVLDLLGDAERLEKVWVAGSDSAVELAEVNAELVDLTSLIGSPAYRAGSPQREALDARIAALAARQEELEGLEARPSGWEWRETGQRFGDWWREQDTATKNTWLRSMNVRLTFDVRGGLTRTIDFGDLQEHEQRLRLGSVVERLHTGMS

SEQ ID NO: 8445 - protein, 500 aa, synthetic construct
MRALIVIRLSRVTEATTSPERQLESCQQLCAQRGWDVVGVAEDLDVSGAVDPFDRKRRPNLARWLAFEEQPFDVIVAYRVDRLTRSVRHLQQLVHWAEDHKKLVVSATEAHFDTTTPFAAVVIALMGTVAQMELEAIKERIRSAAHFNIRAGKYRGSLPPWGYLPARVGGEWRLVPDPVQRERILEVYHRVVDNHEPLHLVAHDLNRRGVLSPKDYFAQLRGREPQGRKWSATALRRSMTSVAMLGYATLSGKTVRGDDGAPLVRAEPILTREQQEALRAELAKTSRAKPAVSTPSLLLRVLFCAVCGEPAYKFVGGGRKHPRYRCRSMGFPEHCGNGTVVMAEWDAFCEGQVLNLLGDTERLEKVWVAGSGSAVELAEVNAELVDLMSLIGSPAYRAGSPQREVLDARIAALAARQEELEGLEARPSGWEWRGTGQRFGDWWHEQDTAAKNTWLRSMNVRLTFDVRGGLTRTIDFGDLQEYERHLRLGSVAERLHTGMS

SEQ ID NO: 8446 - protein, 500 aa, synthetic construct
MRALVVIRLSRVTDATTSPERQLGSCQQLCAQRGWDVVGVAEDLDVSGAVDPFDRKRRPNLARWLAFEEQPFDVIVAYRVDRLTRSTRHLQQLVRWAEDHKKLVVSATEAHFDTTTPFAAVVIALMGTVAQMELEAIKERIRSAVHFNIRAGKYRGSLPPWGYLPARVDGEWRLVPDPVQRERILEVYHRVVDNHEPLHSVAYDLNRRGVLSPKDYFAQLRGREPRGRKWSATALRRSMTSEAMLGYATLNGKTVRDDDGAPLVRAEPILTREQQGALRAELAKTSRAKPAVSTPSLLLRVLFCAVCGEPAYKFVGGGRKHPRYRCRSMVFPKHCGNGTVVMAEWDAFCEEQVLNLLGDAERLEKVWVAGSDSAVELAEVNAELVDLTSLIGSPAYRAGSPQREALDARIAALAARQEELEGIEARPSGWEWRETGQRFGDWWREQDTAAKNTWLRSMNIRLTFDARGGLTRTIDFGDLQEYEQHLRLGSVVERLHTGMQ

SEQ ID NO: 8447 - protein, 500 aa, synthetic construct
MRALVVIRLSRVTDATTSPGRQLESCRQLCAQRGWDVVGVAEDLDVSGAVDPFDRKRRPNLARWLAFEEQPFDVIVAYRVDRLTRSTRHLQQLVHWAEDHKKLVVSATEAHFDTTTPFAAVVIALMGTVAQMELEAIKERNRSAAHFNIRAGKYRGSLPPWGYLPARVGGEWRLVPDPVQRERILEVYHRVVDDHEPLHLVAHDLNRRGVLSPKDYFAQLQGREPQGRKWSATALKRSMTSEAMLGYATLNGKTVRDDDGAPLVRAEPILTREQLEALRAELVKTSRVKPAVSTPSLLLRVLFCAVCGEPAYKFAGGGRKHPRYRCRSMGFPKHCGNGTVAMAEWDAFCEEQVLDLLGDAERLEKVWVTGSDSAVELAEVNAELVDLTSLIGSPAYRAGSPQREALDARIAALAARQEELEGLEARPSGWGWRETGQRFGDWWREQDTAARNTWLRSMNVRLTFDVRGGLTRTIDFGDLQEYEQHLRLGSVVERLLTGMP

SEQ ID NO: 8448 - protein, 500 aa, synthetic construct
MRALVVIRLSRVTDATTSPERQLESCQQLCAQRGWDVVGVAEDLDVSGAVDPFDRKRRPNLARWLAFEEQPFDVIVAYRVDRLTRSTRHLQQLVHWAEDHKKLVVSATEAHFDTTTPFAAVVIALMGTVAQMELEAIKERNRSAAHFNIRAGKYRGSLPPWGYLPTRVDGEWRLAPDPVQRERILEVYHRVVDNLESLHLVAHDLNRRGVLSPKDYFAQLQGREPQGRKWSATALKRSMISEAMLGYATLNGKTVRDDDGAPLVRAEPILTREQLEALRAELVKTSRAKPAVSTPSLLLRVLFCAVCGEPAYKFAGGGRKHPRYRCRSMGFPKHCGNGTVVMAEWDAFCEEQVLDLLGDAERLEKVWVAGSDSAAELAEVNAELVDLTSLIGSPAYRAGSLQREALDARIAALAARQEELEGLGARPPGWEWRETGQRFGDWWREQDTAAKNTWLRSMNVRLTFDVRGGLTRTIDFGDLQEYEQHLRLGSVVERLHTGMS

SEQ ID NO: 8449 - protein, 500 aa, synthetic construct
MRALVVIRLSRVTDATTSPGRQLESCQQLCAQRGWDVVGVAEDLDVSGAVDPFDRKRRPNLARWLAFEEQPFDVIVAYRVDRLTRSVRHLQQLVHWAEDHKKLVVSATEAHFDTTTPFAAVVIALMGTVAQMELEAIKERNRSAAHFNIRAGKYRGSLPPWGYLPTRVDGEWRLVPDPVQRERILEVYHRVVDNHEPLHLVAHDLNRRGVLSPKDYFAQLQGREPQGRKWSATALKRSMISVAMLGYATLNGKTVRDDDGAPLVRAEPILTREQLEALRAELVKTSRAKPAVSTPSLLLRVLFCAVCGEPAYKFAGGGRKRPRYRCRSMGFPKHCGNGTVAMAEWDAFCEEQVLGLLGDAERLERVWVAGSDSAVELAEVNAELMDLASLIGSPAYRAGSPQREALDARIAALAARQEELEGLEARPSGWEWRETGQRFGDWWREQDTAAKNTWLRSMNVRLTFDARGGLTRTIDFGDLLEYEQHLRLGSVVERLHTGVS

SEQ ID NO: 8450 - protein, 500 aa, synthetic construct
MRALVVIRLSRVTDATTSPERQLESCQQLCAQRGWDVVGVAEDLDVSGAVDPFDRKRRPNLARWLAFEERPFDVIVAYRVDRLTRSVRHLQQLVHWAEDHKKLVVSATEAHFDTTTPFAAVVIALMGTVAQMELEAIKERNRSAAHFNIRAGKYRGSLPPWGYLPTRVDGEWRLVPDPVQRERILEVYHRVVDNHESLHLVAHDLNRRGVLSPKDYFAQLRGREPQGREWSATALKRSMVSVAMLGYATLNGKTVRDDDGAPLVRAEPILTRGQLEVLRAELVKTSRAKPAVSTPSLLLRVLFCAVCGEPAYKFAGGGRKHPRYRCRSMGFPKHCGNGTVVMAEWDAFCEEQVLNLLGDAERLEKVWVAGSDSAVELAEVNAELVDLTSLIGSPAYRAGSPQREALDARIAALAARQEELEGLEARPSGWEWRKTGQRFGDWWCEQDTAAKNTWLRSMNVRLTFDVRGGLTRTIDFGDLQEYEQHLRLGSVVERLHTGMS

SEQ ID NO: 8451 - protein, 500 aa, synthetic construct
MRALVVIRLSRVTDATTSPERQLESCQQLCAQRGWDVVGVAEDLDVSGAVDPFDSKRRPNLARWLAFEEQPFDVIVAYRVDRLTRSTRHLQQLVHWAEDHKKLVVSATEAHFDTTTPFAAVVIALMGTVAQMELEAIKERNRSAAHFNIRAGKYRGSLPPWGYLPTRVDGEWRLVPDPVQRERILEVYHRVVDNHEPLHWVAHDLNRRGVLSPKDYFAQLRGREPQGRKWSATALKRSMISGAMLGYATLNGKTVRDDDGAPLVRAEPILTREQLEALRAELVKASRAKPAVSTPSLLLRVLFCAVCGEPAYKFAGGGRKHPRYRCRSMGFPKHCGNGTVVMAEWDAFCEEQVLNLLGDSERLEKVWVAGSNSAVELSEVNAELVDLTSLIGSPAYRAGSPQREALDARIAVLAARQEELEGLEARPSGWEWRETGQRFGDWWREQDTAAKNTWLRSMNVRLTFDVRGGLTRTIDFGDLQEYEQHLRLGSVVERLHTGMP

SEQ ID NO: 8452 - protein, 500 aa, synthetic construct
MRALVVIRLSRVTDATTSPERQLESCQQLCAQRGWDVVGVAEDLDVSGAVDPFDRKRRPNLARWLAFEEQPFDAIVAYRADRLARSIRHLQQLVHWAEDHKKLVVSATEAHFDTTTPFAAVVIALMGTVAQMELEAIKERNRSAAHFNIRAGKYRGSLPPWGYLPTRVDGEWRLVPDPVQRERILEVYHRVVVDHEPLHLVAHDLNRHGVLSPKDYFAQLQGREPQGRKWSATALKRSMISEAMLGYATLNGKTVRDDGGAPLVRAEPILTREQLEALRAELVKTSRAKPAVSTPSLLLRVLFCAVCGEPAYKFAGGGRKHPRYRCRSMGFPKHCGNGTVVMAEWDAFCEEQVLDLLGDAERLEKVWVVGSDSAVELAEVNAELEDLTNLIGSPAYRAGSPQREALDARIAALAARQEELEGLETRPSGWEWRETGQRFGDWWREQDTAAKNTWLRSMNVRLTFDVRGGLTRTIDFGDLQEYEQHLRLGGAAKRLHTGMS

SEQ ID NO: 8453 - protein, 500 aa, synthetic construct
MRALVVIRLSRVTDATTSPERQLESCQQLCAQRGWDVAGVAEDLDVSGAVDPFDRKRRPNLARWLAFEEQPFDVIVAYRVDRLTRSTRHLQQLVHWAEDHKKLVVSATEAHFDTTTPFAAVVIALMGTVAQMELEAIKERSRSAAHFNIRAGKYRGSLPPWGYLPTRVDGEWRLVPDPVQRERILEVYHRVVDDHEPLHLVAYDLNRRGVLSPKDYFAQLQGREPQGRKWSATALKRSMISGAMLGYATLSGKIVRDDDGAPLVRAEPILTREQQEAFRAELVKTSRAKPAVSTPSLLLRVLFCAVCGEPAYKFVGGGRKHPRYRCRSMGSPEHCGNGTVVMAEWDAFCEEQVLNLLGDAKRLERVWVAGSDSAVELAEVNAELVDLTSLIGSPAYRAGSPQREALDARIAALAARQEELEGLEARPSGWEWRETGQRFRDWWREQDTAAKNTWLRSMNVRLTFDVRGGLTRTIDFGDLREYVQHLRLGSVVERLHTGMS

SEQ ID NO: 8454 - protein, 500 aa, synthetic construct
MRALVVIRLSRVTDATTSPERQLESCQQLCAQRGWDVVGVAEDLDVSGAVDPFDRKRRPNLARWLAFEEQPFDVIVAYRVDRLTRSTRHLQQLVRWAEDHEKLVVSATEAHFDTTTPFAAVVIALMGTVAQMELEAIKERIRSAAHFNIRAGKYRGSLPPWGYLPTRVNGEWRLVPDPVQRERILEVYHRVVDNHEPLHLVAHDLNRRGVLSPKDYFAQLQGREPQGRKWSATALKRSMTSGAMLGYATLNGKIVRDDDGAPLVRAEPILTREQLEVLRAELVKTSRAKPAVSTPSLLLRVLFCAVCGEPAYKFVGGGRKHPRYRCRSMGFPEHCGNGTVVMAEWDAFCEEQVLDLLGDAERLEKVWVAGSDSAVELAEVNAELMDLTSLIGSPAYRAGSPQREALDARIAALAARQVELEGLEARPSGWEWRGTGQRFGDWWRGQDTAAKNTWLRSMNVRLTFDVRGGLTRTIDFGDLQEYEQHLRSGSVAGRLHTGMS

SEQ ID NO: 8455 - protein, 500 aa, synthetic construct
MRALVVIRLSRVTDATTSPERQLESCQQLCAQRGWDVVGVAEDLDVSGAVDPFDRKRRPNLARWLAFEEQPFDVIVAYRVDRLTRSVRHLQQLVHWAEDHKKLVVSATEAHFDTTTPFAAVVIALMGTVAQMELEAIRERIRSAVRFNIRAGKYRGSLPPWGYLPARVDGEWRLVPDPVQRERILEVYHRVVDNHEPLHLVAHDLNRRGVLSPKDYFAQLQGREPQGRKWSATALRRSMISGAMLGYATLNGKTVRGDDGAPLVRAEPILTHEQQEALRAELVKTSRAKPAVSTPSLLLRVLFCAVCGEPAYKFVGGGRKHPRYRCRSMGFPEHCGNGTVVMAEWDSFCEEQVLDLLGDAERLEKVWVAGSDSAVELAEVNAELVDLTSLIGSPAYRAGSPQREALDARIAALAARQEELEGLEARPSGWEWRETGQRFRDWWREQDTAAKNTWLRSMNVRLTFDVRGGLTRTIDFGELQEYEQHLRLGSVAGRLHTGMS

SEQ ID NO: 8456 - protein, 500 aa, synthetic construct
MRALVVIRLSRVTDATTSPERQLESCQQLCAQRGWDVVGVAEDLDVSGVVDPFDRKRRPNLARWLAFEEQPFDVIVAYRVDRLTRSTRHLQQLVRWAEDHKKLVVSATEAHFDTTTPFAAVVIALMGTVAQMELEAIKERSRSAAHFNIRAGKYRGSLPPWGYLPTRVDGEWRLVPDPVQRERILEVYHRVVDNHEPLHLVAYDLNRRGVLSPKDYFAQLQGREPQGRKWSATALKRSMTSVAMLGYATLNGKIVRDDDGAPLVRAEPILTREQQEALRAELVRTSRAKPAVSTPSLLLRVLFCAVCGEPAYKFVGGGRKHPRYRCRSMGFPGHCGNGTVVMAEWDAFCEEQVLDLLGDAERLEKVWVAGSDSAVELVEVNAELVDLTSLIGSPAYRASSPQREALDARIAALAARQEELEGLEAHPSGWEWRGTGQRFGDWWREQDTAAKNTWLRSMNVRLTFDVRGGLTRTIDFGELQEYERHLRLGSVVERLHTGMS

SEQ ID NO: 8457 - protein, 500 aa, synthetic construct
MRALVVIRLSRVTDATTSPERQLESCQQLCAQRGWDVVGVAEDLDVSGAVDPFDRKRRPNLARWLAFEEQPFDVIVAYRVDRLTRSVRHLQQLVHWAEDHKKLVVSATEAHFDTTTPFAAVVVALMGTVAQMELEATKERNRSAAHFNIRAGKYRGSLPPWGYLPARVDGEWRLVPDPVQRERILEVYHRVVDNHEPLHLVAHDLNRRGVLSPKDYFAQLRGREPQGRKWSTTALKRSMISEAMLGYATLNGKTVRDDDGAPLVRAEPILTRKQLEALRAELVKASRAKPAVSTPSLLLRVLFCAVCGEPAYKFAGGGRKHPRYRCRSMGFPKHCGNGTVVMAEWDAFCEEQVLDLLGDAERLEKVWVAGSDSAVELAEVNAELVDLTSLIGSPAYRAGSPQREALDARIAALAARQEELEGLEARPSGWEWRGAGQRFGDWWREQDTAAKNTWLRSMNVRLTFDVRGGLTRTIDFGDLQEYEQHLRLGSVDERLHTGMS

SEQ ID NO: 8458 - protein, 500 aa, synthetic construct
MRALVVIRLSRVTDATTSPERQLESCQQHCAQRGWDVVGVAEDLDVSGAIDPFDRKRRPNLARWLASEEQPFDVIVAYRVDRLTRSVRHLQRLVRWAEDHKKLVVSATEAHFDTTTPFAAVVIALMGTVAQMELEAIKERIRSAAHFNIRAGKYRGSLPPWGYLPTRVDGEWRLAPDPVQRERILEVYRRVVDNHEPLHLVAHDLNQRGVLSPKDYFAQLQGREPRGRKWSATALKRSMISGAMLGYATLNGRIVRDDDGAPLVRAEPILTREQQEALRAELAKTSRAKPAVSTPSLLLRVLFCAVCGEPAYKFVGGGRKHPRYRCRSMGFPKHCGNGTVVMTEWDAFCEEQVLDLLGDAERLEKVWVAGSVSAVELAEVNAELVDLTSLIGSPAYRAGSPQREALDARIAALAARQEELEGLEARPSGWEWRGTGQRFGDWWREQDTAAKNTWLRSMHVRLTFDIRGGLTRTIDFGDLQEYEQHLRSGSVVERLHTGMS

SEQ ID NO: 8459 - protein, 500 aa, synthetic construct
MRALVVIRLSRVTDATTSPERQLESCQQLCAQRGWDVVGVAEDLDVSGAVDPFDRKRRPNLARWLAFEEQPFDVIVAYRVDRLTRSTRHLQQLVHWAEDHEKLVVSATEAHFDTTTPFAAVVIALMGTVAQMELEAIKERNRSAAHFNIRAGKYRGSLPPWGYLPMRVDGEWRLVPDPVQRERILEVYHRVVDNHEPLHWVAHDLNRRGVLSPKDYFAQLQGREPQGRKWSATALKRSMTSEAMLGYATLNGKTVRDDDGAPLVRAEPILTREQLEALRAELVKTSRAKPAVSTPSLLLRVLFCAVCGEPAYKFAGGGRKHPRYRCRSMGFPKHCGNGTVAMAEWDAFCEEQVLDLLGDAEHLGKVWVAGSDSAIELAEVNAELADLTSLIGSPAYRAGSPQREALDARIAALAARQEELEGLEARPSGWEWRETGQRFGDWWREQDTAAKNTWLRSMNVRLTFDVRGGLTRTIDFGDLQEYEQHLRLGSVVERLHTGMS

SEQ ID NO: 8460 - protein, 500 aa, synthetic construct
MRALVVIRLSRVTDATTSPERQLESCQQLCAQRGWDVVGVAEDLDVSGAVDPFDRKRRPNLARWLAFEEQPFDVIVAYRVDRLTRSIRHLQQLVHWAEDHKKLVVSATEAHFDTTTPFAAVVIALMGTVAQMELEAIKERIRSAVRFNIRAGKYRGSLPPWGYLPTRVDGEWRLVPDPVQRERILEVYHRVVDNHEPLHLVAHDLNRRGVLSPKDYFAQLQGREPQGRKWSATALKRSMISVAMLGYATLNGKTVRDDDGAPLVRAEPILTRGQQEALRAELAKTSRAKPAVSTPSLLLRVLFCAVCGEPAYKFVGGGRKHPRYRCRSMGFPEHCGNGTVVMAEWDAFCEEQVLNLLGDAERLEKVWVAGSDSAVELAEVNAELVDLTSLIGSPAYRAGSPQREALDARIAALAVRQEELEGLEARPSCWEWRETGQRFGDWWREQDTAAKNTWLRSMNVRLTFDVRGGPTRTIDFGDLQEYEQHLRLGSVAERLHTGMS

SEQ ID NO: 8461 - protein, 500 aa, synthetic construct
MRTLVVIRLSRVTDATTSPERQLESCQQLCAQRGWDVVGVAEDLDVSGAVDPFDRKRRPNLARWLAFEAQPFDVIVAYRVDRLTRSTRHLQQLVRWAEDHKKLIVSATEAHFDMTTPFAAVVIALMGTVAQMELEAIKERIRSATHFNIRAGKYRGSLPPWGYLPTRVDGEWRLVPDPVQRERILEVYHRVVDDHEPLHLVAHDLNRRGVLSPKDYFAQLRGREPQGRKWSATALKRSMISGAMLGYATLNGKIVRDDDGAPLVRAEPILTREQLEALRAELVKTSRAKPAVSTPSLLLRVLFCAVCGEPAYKFAGGGRKHPRYRCRSMGFPEHCGNGTVALAEWDAFCEEQVLDLLGDAERLEKVWVAGSDSSVELAEVNAELVDLTSLIGSPAYRAGSPQREALDARIAALAARQEELEGLEARPSGWEWHETGQRFGDWWREQDTAAKNTWLRSMNVRLTFDVRGGLTRTVDFGDLREYEQHLRLGSVVERLHAGMS

SEQ ID NO: 8462 - protein, 500 aa, synthetic construct
MRALVVIRLSRVTDATTSPERQLESCQQLCAQRGWDVVGVAEDLDVSGAVDPFDRKRRPNLARWLAFEEQPFDVIVTYRVDRLTRSTRHLQQLVRWAEDHKKLVVSATEAHFDTTTPFAAVVIALMGTVAQMELEAIKERIRSAVRFNIRAGKYRGSLPPWGYLPARVDGEWRLVPDPVQRERILEVYHRVVDNHEPLHLVAHDLNRRGVLSPKDYFAQLRGREPQGREWSATALKRSMTSGAMLGYATLNGKTVRGDDGAPLVRAEPILTRGQQEALRAELVKTSRAKPAVSTPSLLLRVLFCAVCGEPAYKFVGGGRKHPRYRCRSMGFPEHCGNGTVVMAEWDAFCEEQVLDLLGDAERLEKVWVAGSDSAVELAEVNAELVDLTSLIGSPAYRAGSPQREALDARIAALAARQEELEGLEARPPGWEWRGTGQRFGDWWREQNTAAKNTWLRSMNVRLTFDARGGLTRTIDFGELQEYERQLRLGSVVERLHAGMS

SEQ ID NO: 8463 - protein, 500 aa, synthetic construct
MRALVVIRLSRVTDATTSPERQLESCQQLCAQRGWDVVGVAEDLNVSGAVDPFDRKRRPNLARWLAFEEQPFDVIVAYRVDRLTRSVRHLQQLVHWAEDHKKLVVSATEAHFDTTTPFAAVVIALMGTVAQMELEAIKERNRSAAHFNIRAGKYRGSLPPWGYLPTRVDGEWRLVPDPVQRERILEVYHRVVDNHEPLHWVAHDLNRRGVLSPKDYFAQLQGREPQGRKWSATALKRSMISEAMLGYATLNGKTVRDDGGAPLVRAEPILTREQLEALRAELVETPRVKPAVSTPSLLLRVLFCAVCGEPAYKFAGGGRKHPRYRCRSMGFPKHCGNGTVAMAEWDAFCEEQVLDLFGDAERLEKVWVAGSDSAVELAEVNAELVDLTSLLGSPAYRAGSPQREALDARIAALAARQEELEGLEARPSGWEWRETGQRFGDWWREQDTAAKNTWLRSMNVRLTFDVRGGLTRTIDFGDLQEYEQHLRLGSVVERLHTGMS

SEQ ID NO: 8464 - protein, 500 aa, synthetic construct
MRALVVIRLSRVTDATTSPERQLESCQQLCAQRGWDVVGVAEDLDVSGAVDPFDRKRRPNLARWLAFEEQPFDVIVAYRVDRLTRSTRHLQQLAHWAEDHKKLVVSATEAHFDTTTPFAAVVIALMGTVAQMELEAIKERIRSAVHFNIRAGKYRGSLPPWGYLPTRVNGEWRLVPDPVQRERILEVYHRVVDNHEPLHLVAHDLNRRGVLSPKDYFAQLRGREPRGRKWSATALKRSMISVAMLGYATLNGKIVRNDDGAPLVRAEPILTREQLEALRAELAKTSRAKPAVSAPSLLLRVLFCAVCGEPAYKFVGGGRKRPRYRCRSMGFPEHCGNGTVVMAEWDAFCEEQVLDLLGDAERLEKVWVAGSDSAVELAEVNAELVDLTSLIGSPAYRAGSPQREALDARTAALAARQEELEGLEARPSGWEWRGTGQRFGDWWREQDTAAKNTWLRSMSIRLTFDVRGGLVRTIDFGELQEYEQHLRSGSVVERLHTGMS

SEQ ID NO: 8465 - protein, 500 aa, synthetic construct
MRALVVIRLSRVTDATTSPGRQLESCQQLCAQRGWDVVGVAEDLDVSGAVDPFDRKRRPSLARWLAFEEQPFDVIVAYRVDRLTRSIRHLQQLVHWAEDHKKLVVSATEAHFDMTTPFAAVVIALMGTVAQMELEAIKERNRSAAHFNIRAGKYRGSLPPWGYLPTRVDGEWRLVPDPVQRERILEVYHRVVDNHEPLHLVAHDLNRRGVLSPKDYFAQLQGREPQGRKWSATALKRSMISEAMLGYATLNGKTVRDDDGAPLVRAEPILTRVQLEALRAELVKTSRAKPAVSTPSLLLRVLFCAVCGEPAYKFAGGGRKHPRYRCRSMGFPKHCGNGTVVMAEWDAFCEELVLELLGDTERLEKVWVAGSDSAAELAEVNAELVDLTSLIGSPAYRVDSPQREALGARIAALAARQGELGGLEARPPGWEWRGTGQRFGDWWREQDTAAKNTWLRSMNVRLTFDVRGGLTRTIDFGELQEYERHLRLGSVVERLHIGMS

SEQ ID NO: 8466 - protein, 500 aa, synthetic construct
MRALVVIRLSRVTDATTSPERQLESCQQLCAQRGWNVVGVAEDLDVSGAVDPFDRKRRPNLARWLAFEEQPFDVIVAYRVDRLTRSTRHLQQLVHWAEDHEKLVVSATEAHFDTTTPFAAVVIALMGTVAQMELEAIKERIRSAVHYNIRAGKYRGSLPPWGYLPTRVDGEWRLVPDPVQRERILEVYHRVVDNHEPLHLVAHDLNRRGVLSPKDYFAQLQGREPQGRKWSATALKRSMTSVAMLGYATLNGKIVRDDDGALLVRAEPILTREQQEAFRAELAKTSRAKPAVSTPSLLLRVLFCAVCGEPAYKFVGGGRKHPRYRCRSMGFPKHCGNGTVAMAEWDAFCEEQVLDLLGDVERLEKVWVAGSDSAVELAEVNAELVDLTSLIGSPAYRAGSPQREALDARIAALAARQVELEGLEARPSGWEWRETGQRFGDWWREQDTAAKNTWLRSMNVRLTFDVRGGLTRTIDFGDLQEYEQHLRLGSAVERLHTGMS

SEQ ID NO: 8467 - protein, 500 aa, synthetic construct
MRALVVIRLSRVTDATTSPERQLESCQQLCAQRGWDVVGVAEDLDVSGAVDPFDRKRRPNLARWLAFEEQPFDVIVAYRVDRLTRSTRHLQQLVHWAEDHKKLVVSATEAHFDTTTPFAAVVIALMGTVAQMELEAIKERNRSAAHFNIRAGKYRGSLPPWGYLPTRVDGEWRLVPDPVQRERILEVYHRVVDNHEPLHLVAHDLNRRGVLSPKDYFAQLQGREPQGRKWSATALKRSMISEAMLGYATLNGKTVRNDDGAPLVRAEPILTRGQLEALRAELVKTSRAKPAVSTPSLLLRVIFCAVCGEPAYKFAGGGRKHPRYRCRSMGFPKHCGNGTVAMAEWDAFCEEQVLDLLGDAERLEKVWVAGSDSAVELAEVNAELMDLTSLIGSPAYRAGSPQREALDARIAALAARQEELEGLEARPSGWEWRGTGQRFGDWWREQDTAAKNTWLRSMNVRLTFDVRGGLTRTIDFGDLQEYEQHLRLGGVVERLHTGMS

SEQ ID NO: 8468 - protein, 500 aa, synthetic construct
MRALVVIRLSRVTDATTSPERQLESCQQLCAQRGWDVVGVAEDLDVSGAVDPFDRKRRPNLARWLAFEEQPFDVIVAYRVDRLTRSVRHLQQLVHWAEDHRKLVVSATEAHFDTTTPFAAVVIALMGTVAQMELEAIKERNRSAAHFNIRAGKYRGSLPPWGYLPTRVDGEWRLVPDPVQRERILEVYHRVVDNHEPLHWVAHDLNRRGVLSPKDYFAQLQGREPQGRKWSATALKRSMISEAMLGYATLNGKTVRDDDEAPLVRAEPILTREQLGALRAELVKTSRAKPAVSTPSLLLRVLFCAVCGEPAYKFAGGGRKHPRYRCRSMGFPKHCGNGTVVMAEWDAFCEEQVLDLLGDAERLEKVWVAGSDSAVELAEVNAELVDLTSLIGSPAYRAGSPQREALDARIAALAARQEELEGLGARPPGWEWRETGQRFGDWWREQDTAAKNTWLRSMNVRLTFDVRGGLTRTIDFGGLQEYEQHLRLGSVVERLHTGMS

SEQ ID NO: 8469 - protein, 500 aa, synthetic construct
MRALVVIRLSRVTDATTSPERQLESCQQLCAQRGWDVVGVAEDLDVSGAVDPFDRKRRPSLASWLAFEEQPFDVIVAYRVDRLTRSTRHLQQLVHWAEDHKKLVVSATEAHFDTTTPFAAVVIALMGTVAQMELEAIKERNRSAAHFNIRAGKYRGSLPPWGYLPTRVDGEWRLVPDPVQRERILEVYHRVVDNHESLHLVAHDLNRRGVLSPKDYFAQLRGREPQGRKWSATALKRSMISEAMLGYATLNGKTVRDDDGAPLVRAEPILTREQLEALRAELVKTSRAKHAVSTPSLLLRVLFCAVCGEPAYKFAGGGRKHPRYRCRSTGFPKHCGNGTVAMAEWDAFCEEQVLDLLGDTERLEKVWAAGSDSAVELAEVNAELVDLTSLIGSPAYRAGSPQREALDARIAALAARQEELEGLGARPSGWEWRETGQRFGDWWREQDTAAKNTWLRSMNVRLTFDVRGGLTRAIDFGDLQEYEQHLRSGSVVERLHTGMS

SEQ ID NO: 8470 - protein, 500 aa, synthetic construct
MRALVVIRLSRVTDATTSPERQLESCQQLCAQRGWDVVGVAEDLDVSGAVDPFDRKRRPNLARWLAFEEQPFDVIVAYRVDRLTRSTRHLQQLVHWAEDHKKLVVSATEAHFDTTTPFAAVVIALMGTVAQMELEAIKERNRSAAHFNIRAGKYRGSLPPWGYLPARVDGEWRLVPDPVQRERILEVYHRVADNHEPLHLVAHDLNRRGVLSPKDYFAQLRGREPQGRKWSATALKRSMISEAMLGYATLNGKTVRDDDGAPLVRAEPILTREQLEALRAELAKTSRAKPAVSTPSLLLRVLFCAVCGEPAYKFAGGGRKHPRYRCRSMGFPKHCGNGTVVMAEWDAFCEEQVLNLLGDAERLEKVWVAGSDSAVELAEVNAELVDLTSLIGSPAYRAGSTQREALDARIAALAARQEELESLEARPSGWEWRETGQRFGDWWREQDTAAKNTWLRSMNVRLTFDVRGGLTRTIDFGDLQEYEQHLRSGSVVERLHTGMS

SEQ ID NO: 8471 - protein, 500 aa, synthetic construct
MRALVVIRLSRVTDATTSPERQLESCQQLCAQRGWDVVGVAEDLDVSGAVDPFDHKRRPNLARWLAFKEQPFDVIVACRVDRLTRSTRHLQQLVHWAEDHKKLVVSATEAHFDTTTPFAAVVIALMGTVAQMELEAIKERNRSAAHFNIRAGKYRGSLPPWGYLPARVDGEWRLVPDPVQRECILEVYHRVVDNHEPLHSVAHDLNRRGVLSPKDYFAQLQGREPQGRKWSATALKRSMISVAMLGYATLNGKTVRDDDGAPLVRAEPILTRGQLEALRAELVKTSRAKPAVSTPSLLLRVLFCAVCGEPAYRFAGGGRKHPRYRCRSMGFPKHCGNGTVAMAEWDAFCEEQVLDLLGDAERLEKVWVAGSDSAVELAEVNAELVDLTSLIGSPAYRAGSPQREALDARIAALAARQEELEGLETRPSGWEWRGTGQRFGDWWREQDTAAKNTWLRSMNVRLTFDVRGGLTRTIDFGDLQEYEQHLRLGGVVERLYTGMS

SEQ ID NO: 8472 - protein, 500 aa, synthetic construct
MRTLVVIRLSRVTDATTSPERQLESCQQLCAQRGWDVVGVAEDLDVSGAVDPFDRKRRPNLARWLAFEERPFDVIVAYRVDRLTRSVRHLQQLVHWAEDHKKLVVSATEAHFDTTTPFAAVVIALMGTVAQMELEAIKERNRSAAHFNIRAGKYRGSLPPWGYLPTRVDGEWRLVPDPVQRERILEVYHRVVDNHESLHLVAHDLNRRGVLSPKDYFAQLRGREPQGREWSATALKRSMVSVAMLGYATLNGKIVRGDDGAPLVRAEPILTREQLEVLRAELVKTSRAKPAVSTPSLLLRVLFCAVCGEPAYKFAGGGRKHPRYRCRSMGFPKHCGNGTVVMAEWDAFCEEQVLNLLGDAERLEKVWVAGSDSAVELAEVNAELVDLTSLIGSPAYRAGSPQREALDARIAALAARQEELEGLEARPSGWEWRETGQRFGDWWREQDTAAKNTWLRSMNVRLTFDVRGGLTRTVDFGDLQEYEQHLRLGSVAKRLHTGMS

SEQ ID NO: 8473 - protein, 500 aa, synthetic construct
MRALVVIRLSRVTDATTSPERQLESCQQLCTQRGWDVVGVAEDLDVSGAVDPFDRKRRPNLARWLAFEEQPFDVIVVYRVDRLTRSTRHLQQLVHWAEDHKKLVVSATEAHFDTTTPFAAVVIALMGTVAQMELEAIKERIRSATHFNIRAGKYRGSLPPWGYLPTRVDGEWRLVPDPAQRERILEVYHRVVDNHEPLHLVAHDLNRRGVLSPKDYFAQLRGREPQGRKWSATALKRSMISAAMLGYATLDGKIVRDDDGAPLVRAEPILTREQQEALRAELVKTSRAKPAVSTPSLLLRVLFCAVCGEPAYKFVGGGRKHPRYRCRSMGFPEHCGNGTVVMAEWDAFCEEQVLDLLGDAERLEKVWVAGSDSAVELAEVNAELVDLTSLIGSPAYRAGSPQREALDARIAALAARQEELESLEARPSGWEWRETGQRFGDWWREQDTAAKNTWLRAMNVRLTFDVRGGLTRTIDFGDLQEYEQHLRLGSVAERLRTGMS

SEQ ID NO: 8474 - protein, 500 aa, synthetic construct
MRALVVIRLSRVTDATTSPERQLESCQQLCAQRGWNVVGVAEDLDVSGAVDPFDRKRRPNLARWLAFEEQPFDVIVAYRVDRLTRSVRHLQQLVHWAEDHKKLVVSATEAHFDTTTPFAAVVIALMGTVAQMELEAIKERIRSAVRFNIRAGKYRGSLPPWGYLPTRVDGEWRLVPDPVQRERILEVYHRVVDNHEPLHLVAHDLNRRGVLSPKDYFAQLQGREPQGREWSATALKRSLISKAMLGYATLNGKTVRGDDGAPLVRAEPILTREQLGALRAELVKTSRAKPAVSTPSLLLRVLFCAVCGEPAYKFVGGGRKHPRYRCRSMGFPKHCGNGTVVMAEWDAFCEEQVLDLLGDTERLERVWVAGSDSAVELAEVNAELVDLTSLIGSPAYRVGSPQREALDARIAALAARQEELESLEARPSGWEWRGTGQRLGDWWREQDTAAKNTWLRSMNVRLTFDVRGGLTRTIDFGDLQEYEQHLRLGSVAERLHTGMS

SEQ ID NO: 8475 - protein, 500 aa, synthetic construct
MRALVVIRLSRVTDATTSPERQLESCQQLCAQRGWDVVGVAEDLDVSGAVDPFDRKRRPNLARWLAFEEQPFDVIVAYRVDRLTRSIRHLQQLVRWAEDHKKLVVSATEAHFDTTTPFAAVVIALMGTVAQMELEAIKERIRSAVRFNIRAGKYRGSLPPWGYLPTRVDGEWRLVPDPVQRERILEVYRRVVDNHEPLHLVAHDLNRRGVLSPKDYFAQLRGREPQGREWSATALKRSMTSGAMLGYATLNGKIVRDNDGAPLVRAEPILTREQQEALRAELAKTSRAKPAVSTPSLLLRVLFCAVCGEPAYKFVGGGRKHPRYRCRSMGFPKHCGNGTVVMAEWDAFCEEQVLSLLGDAERLEKVWVAGSDSAVELTEVNAELVDLTSLIGSPAYRAGSPQREALDARIAALAARQEELEGLEARPSGWEWRGTGQRLGDWWREQDTAAKNTWLRSMNIRLTFDVRGGLTRTIDFGELQEYEQHLRLGSVAERLHTGMS

SEQ ID NO: 8476 - protein, 500 aa, synthetic construct
MRALVVIRLSRVTEATTSPERQLESCQQLCAQRGWDVVGVAEDLDVSGAVDPFDRKRRPNLARWLAFEEQPFDVIVAYRVDRLTRSTRHLQQLVRWAEDHKKLVVSATEAHFDTTTPFAAVVIALMGTVAQMELEAIKERSRSATHFNIRAGKYRGSLPPWGYLPARVDGEWRLVPDPVQRERILEVYHRVVDNHEPLHLVAHDLNRRGVLSPKDYFAQLRGREPQGREWSATALRRSMISGAMLGYATLNGMTVRGDDGAPLVRAEPILTREQQEALRAELVKTSRAKPAVSTPSLLLRVLFCAVCGEPAYKFVGGGRKHPRYRCRSMGFPKHCGNGTVVMAEWDAFCEEQVLGLLGDAERLEKVWVAGSDSAVELAEVNAELVDLTSLIGSPAYRAGSPQREALDARIAALAARQEELEGLEARPSGWEWRETGQRFGDWWREQDTAAKNAWLRSMNVRLTFDVRGGLTRTVDFGDLREYEQHLRLGSVVERLRTGMS

SEQ ID NO: 8477 - protein, 500 aa, synthetic construct
MRALVVIRLSRVTDATTSPERQLESCQQLCAQRGWDVVGVAEDLDVSGAVDPFDRKRRPNLARWLAFEEQPFDVIVAYRVDRLTRSARHLQQLVHWAEDHKKLVVSATEAHFDTTTPFAAVVIALMGTVAQMELEAIKERNRSAAHFNIRAGKYRGSLPPWGYLPTRVDGEWRLVLDPVQRERILEVYHRVVDNHEPLHLVAHDLNRRGVLSPKDYFAQLQGREPQGRKWSATALKRSMTSEVMLGYATLNGKIVRDDDGAPLVRAEPILTREQLEVLRVELVKTSRAKPAVSTPSLLLRVLFCAVCGEPAYKFAGGGRKHPRYRCRSMGFPKHCGNGTVAMAEWDAFCEERVLDLLGDAERLEKVWVAGSDSAVELAEVNAELADLTGLIGSPAYRAGSPQREALDARIAALASRQEELEGLEARPSGWEWRKTGQRFGDWWREQDTAAKNTWLRSMNVRLTFDVRGGLTRTIDFGDLQEYEQHLRLGSVVERLHTGMS

SEQ ID NO: 8478 - protein, 500 aa, synthetic construct
MRALVVIRLSRVTDATTSPERQLESCQQLCAQRGWDIVGVAEDLDVSGAVDPFDRRRRPNLARWLAFEEQPFDVIVAYRVDRLTRSVRHLQQLVSWAEDHKKLVVSATEAHFDTTTPFAAVVIALMGTVAQMELEAIKERIRSAVHFNIRAGKYRGSLPPWGYLPTRVDGEWRLVPDPVQRERILEVYHRVVDNHEPLHLVAHDLNRRGVLSPKDYFAQLRGREPRGRKWSATALKRSMISVAMLGYATLNGKIVHGDDGAPLVRAEPILTREQWEALRAELAKTSRAKPAVSTPSLLLRVLFCAVCGEPAYKFVGGGRKHPRYRCRSMGFPKHCGNGTVVMAEWDAFCEEQVLNLLGDAERLEKVWVAGSDSAVELAEVSAELVDLTSLIGSPAYRAGSPQREALDARIAALAARQEELEGLEARPSGWEWRGTGQRFGDWWREQDTAAKNTWLRSMNVRLTFDVRGGLTRTIDFGELQEYKQHLRLGSVVERLHTGMS

SEQ ID NO: 8479 - protein, 500 aa, synthetic construct
MRALVVIRLSRVTDATTSPGRQLESCQQLCAQRGWDVVGVAEDLDVSGAVDPFDRKRRPNLARWLAFEEQPFDVIVAYRVDRLTRSTRHLQQLVLWAEDHKKLVVSATEAHFDTTTPFAAVVIALMGTVAQMELEAIKERIRSAAHFNIRAGKYRGSLPPWGYLPTRVDGEWRLAPDPVQRERILEVYRRVVDNHEPLHLVAYDLNRRGVLSPKDYFAQLQGREPQGRKWSATALKRSMTSVAMLGYATLNGKTVRDDDGAPLVRAEPILTREQQEALRAELVKTSRAKPAVSTPSLLLRVLFCAVCGEPAYKFTGGGRKHPRYRCRSVGLPKHCGNGTVVMAEWDAFCEKQVLDLLGDTERLERVWVAGSDSAVELAEVNAELMDLTSLIGSPAYRAGSPQREALGARIAALAARQEELESLEARPSGWEWRGTGQRLGDWWREQDTAAKNTWLRSMNIRLTFDVRGGLTRTIDFGDLQEYEQHLRLGSVVERSHTGMS

SEQ ID NO: 8480 - protein, 500 aa, synthetic construct
MRALVVIRLSRVTDATTSPERQLESCQQLCAQRGWDVVGVAEDLDVSGAVDPFDRKRRPNLARWLAFEEQPFDVIVAYRVDRLTRSTRHLQQLVHWAEDHKKLVVSATEAHFDTTTPFAAVVIALMGTVAQMELEAIKERIRSAAHFNIRAGKYRGSLPPWGYLPTRVDGEWRLVPDPVQRERILEVYHRVVDNHEPLHLVAHDLNRRGILSPKDYFAQLRGREPQGRKWSATALKRSMISEAMLGYATLNGKIVRDEDGAPLVRAEPILTREQQEALRAELAKTSRAEPAVSTPSLLLRVLFCAVCGEPAYKFVGGGRKHPRYRCRSMGFPKHCGNGTVVMAEWDAFCEKQVLGLLGDAERLEKVWVAGSDSSVELAEVNAELVDLTSLIGSPAYRTGSPQREALDARIAALAARQEELEGLEARPSGWEWRETGQRFGDWWREQDTAAKNTWLRSMNVRLTFDVRGGLTRTIDFGDLQEYEQRLRLGSVVERLHTGMS

SEQ ID NO: 8481 - protein, 500 aa, synthetic construct
MRALVVIRLSRVTDATTSPERQLESCQQLCAQRGWDVVGVAEDLDVSGAVDPFDHKRRPNLARWLAFEEQPYDAIVAYRVDRLTRSVRHLQQLVHWAEDHKKLVVSATEAHFDTTTPFAAVVIALMGTVAQMELEAIKERNRSAAHFNIRAGKYRGSLPPWGYLPTRVDGEWRLVPDPVQRERILEVYHRVVDNHEPLHWVAHDLNRRGVLSPKDYFAQLQGREPQGRKWSATALKRSMTSEAMLGYATLNGKTVRDDDGAPLVRAEPILTREQLEALRAELVKTSRAKPAVSTPSLLLRVLFCAVCGEPAYKFAGGGRKHPRYRCRSMGFLKHCGNGTVAMAEWDAFCEEQVLNLLGDAERLEKVWVAGSDSAVELAEVNAELVDLTSLIGSPAYRAGSPQRKALDARIAALAARQEELEGLEARPSGWEWRETGQRFGDWWREQNTAAKNTWLRSMNVRLTFDVRGGLTRTIDFGDLQGYEQHLRLGGVAERLHTGMS

SEQ ID NO: 8482 - protein, 500 aa, synthetic construct
MRALVVIRLSRVTDATTSPERQLGSCQQLCAQRGWDVVGVAEDLDVSGAVDPFDRKRRPNLARWLAFEEQPFDVIVAYRVDRLTRSVRHLQQLVHWAEDHKKLVVSATETHFDTTTPFAAVVIALMGTVAQMELEAIKERNRSAAHFNIRAGKYRGSLPPWGYLPARVDGEWRLVPDPVQRERILEVYHRVVDNHEPLHLVAHDLNRRGVLSPKDYFAQLQGREPQGRKWSATALKRSMISETMLGYATLNGKTVRDDDGAPLVRAKPILTREQLEALRAELVKTSRAKPAVSTPSLLLRVLFCAVCGEPAYKFAGGGRKHPRYRCRSMGFPKHCGNGTVVMAEWDAFCEEQVLNLLGDAVRLEKVWVAGSDSAVELAVVSAELVDLTSLIGSPAYRAGSPQREALDARIAALAARQEELEGLEARPSGWEWRETGQRFGDWWREQDTAAKNTWLRSMNVRLTFDVRGGLTRTIDFGDLQEYEQHLRLGRVVERLHTGMS

SEQ ID NO: 8483 - protein, 500 aa, synthetic construct
MRALVVIRLSRVTDATTSPERQLESCQQLCAQRGWDVVGVAEDLDVSGAVDPFDRKRRPNLARWLAFEEQPFDVIVAYRVDRLTRSTRHLQQLVHWAEDHKKLVVSATEAHFDTTTPFAAVVIALMGTVAQMELEAIKERNRSAAHFNIRAGKYRGSLPPWGYLPTRVDGEWRLVPDPVQRERILEVYHRVVDNHEPLHLVAHDLNRRGVLSPKDYFAQLQGREPQGRKWSATALKRSMISEAMLGYATLNGKTVRDDDGAPLVRAEPILTREQLEALRAVLVKASRAKPAVSTPSLLLRVLFCAVCGEPAYKFAGGGRKHPRYRCRSMGFPKHCGNGTVAMAEWDAFCEEQVLNLLGDAERLEKVWVAGSDSAVELAEVNAELVDLTSLIGSPAYRAGSPQREALDARIAALAARQEELEGLEARPSGWEWRETGQRFGDWWRELDTAAKNTWLRSMNVRLMFDVRGGLTRTIDLGVLQEYGQHLRLGSVVERLHTGMP

SEQ ID NO: 8484 - protein, 500 aa, synthetic construct
MRALVVIRLSRVTDATTSPERQLESCQQLCAQRGWDVVGVAEDLDVSGAVDPFDRKRRPNLARWLAFEEQPFDVIVAYRVDRLTRSTRHLQQLVHWAEDHEKLVVSATEAHFDTTTPFAAVVIALMGTVAQMELEAIKERNRSAVHFNIRAGKYRGSLPPWGYLPTRVDGEWRLVPDPVQRERILEVYHRVVDNHEPLHLVAHDLNRHGVLSPKDYFAQLQGREPRGRKWSATALKRSMISEAMLGYATLNGKTVRDDDGAPLVRAEPILTREQLEALRAELVKTSRAKPAVSTPSLLLRVLFCAVCGEPAYKSAGGGRKHPRYRCRSMGFPKHCGNGMVAMAEWDAFCEEQVLDLLGDAERLEKVWVAGSDSAVELAEVNAELVDLTSLVGSPAYRAGSPQREALDARIAALAARQEELEGLGARPSGWEWRETGQRFGDWWREQDTAAKNTWLRSMNVRLTFDVRGGLTRTIDFGDLREYEQHLRLGSVVGRLHTGMS

SEQ ID NO: 8485 - protein, 500 aa, synthetic construct
MRALVVIRLSRVTDATTSPERQLESCQQLCAQRGWDVVGVAEDLDVSGAVDPFDRKRRPNLARWLAFEEQPFDVIVAYRVDRLTRSTRHLQQLVHWAEDHKKLVVSATEAHFDTTTPFAAVVIALMGTVAQMELEAIKERNRSAAHFNIRAGKYRGSLPPWGYLPARVDGEWRLAPDPVQRERILEVYHRVVDNHEPLHLVAHDLNRRGVLSPKDYFAQLQGREPQGRKWSATALKRSMTSEAMLGYATLNGKTVRDDDGAPLVRAEPVLSREQLEALRAELVETSRAKPAVSTPSLLLRVLFCAVCGEPAYKFAGGGRRHPRYRCRSMGFPKHCGNGTVVMAEWDAFCEEQVLDLLGDAERLEKVWVAGSDSAVELAEVNAELVDLTSLIGSPAYRAGSPQREALDARIAALAARQEELEGLGARPSGWEWRETGQRFGDWWREQDTAAKNTWLRSMNVRLTFDVRGGLTRTIDFGDLQEYEQHLRLGSVVERLHTGMS

SEQ ID NO: 8486 - protein, 500 aa, synthetic construct
MRALVVIRLSRVTDATTSPERQLESCQQLCAQRGWDVVGVAEDLDVSGAVDPFDRKRRPNLARWLAFEEQPFDAIVAYRVDRLTRSTRHLQQLVHWAEDHKKLVVSATEAHFDTTTPFAAVVIALMGTVAQMELEAIKERNRSAAHFNIRAGKYRGSLPPWGYLPTRVDGEWRLVPDPVQRERILEVYHRVVDNHEPLHLVAHDLNRRGVLSPKDYFAQLQGREPQGRRWSATALKRSMISEAMLGYATLNGKTVRDDDGAPLVRAEPILTREQLEALRAELVKTSRAKPAVSTPSLLLRVLFCAVCGEPAYKFAGGGRKHPRYRCRSMGFPKHCGNGTVVMAEWDAFCEEQVLDLLGDAERLEKVWVAGSDSAVELAEVNAELVDLTSLIGSPAYRAGSPQREALDARIAALAARQGELEGLEARPSGWEWRETGQRFGDWWREQDTAAKNTWLRSMNVRLAFDVRGGLTRTIDFGDLQEYEQHLRLGSVVERLHTGMS

SEQ ID NO: 8487 - protein, 500 aa, synthetic construct
MRALVVIRLSRVTDATTSPERQLESCQQLCAQRGWDVVGVAKDLDVSGAVDPFDRKRRPNLARWLAFEELPFDVIVAYRVDRLTRSVRHLQQLVHWAEDHKKLVVSATEAHFDTTTPFAAVVIALMGTVAQMELEAIKERIRSAVRFNIRAGKYRGSLPPWGYLPTRVDGEWRLVPDPVQRERILEVYHRVVDNHEPLHLVAYDLNRRGVLSPKDYFAQLQGREPQGRKWSATALKRSMISVAMLGYATLNGKIVRDDDGAPLVRAEPILTRGQQEALRVELAKTSRARPAVSTPSLLLRVLFCAVCGEPAYKFVGGGRKHPRYRCRSMVSPKHCGNGTVVMAEWDAFCEEQVLGLLGDAERLEKVWVAGSDSVVELAEVNAELVDLTSLIGSPAYRAGSPQREALDARIAALAARQEELEGLEARPSGWEWRGTGQRFGDWWRERDTAAKNTWLRSMNVRLTFDVRGGLTRTIDFGDLQEYEQHLRSGSVAERLHTGMS

SEQ ID NO: 8488 - protein, 500 aa, synthetic construct
MRALVVIRLSRVTDATTSPERQLESCQQLCAQRGWDVVGVAEDLDVSGAVDPFDRKRRPNLARWLAFEEQPFDVIVAYRVDRLTRSTRHLQQLVRWAEDHKKLVASATEAHFDTTTPFAAVVIALMGTVAQMELEAIKERIRSAVHFNIRAGKYRGSLPPWGYLPTRVDGEWRLVPDPVQRERILEVYHRVVDNHEPLHLVAHDLNRRGVLSPKDYFAQLQGREPQGRKWSATALKRSMTSGAMLGYATLNGKIVRDDDGAPLVRAEPILTREQQEALRAELAKTSRAKPAVSTPSLLLRVLFCAVCGEPAYKFTGGGRKHPRYRCRSMGFPKHCGNGTVVMAELDAFCEEQVLGLLGDAERLEKVWVAGSDSTVELAEVNAELVDLTSLIGSPAYRAGSPQREALDARIAALAARQGELEGLEARPSGWEWREAGQRFGDWWREQDTAAKNTWLRSMNVRLTFDVRGGLTRTVDFGDLQEYGQHSRSGSVVERLHTGMS

SEQ ID NO: 8489 - protein, 500 aa, synthetic construct
MRALVVIRLSRVTDATTSPERQLESCQQLCAQRGWDVVGVAEDLDVSGAVDPFDRKRRPNLARWLAFEEQPFDVIVAYRVDRLTRSTRHLQQLVRWAEDHKKLVVSATEAHFDTTTPFAAVVIALMGTVAQMELEAIKERIRSAVHFNIRAGKYRGSLPPWGYLPTRVDGEWRLVPDPVQRERILEVYHRVVDNHEPLHLVAHDLNRRGVLSPKDYFAQLRGREPRGRKWSATALKRSMISAAMLGYATLNGKTVRGDDGAPLVRAEPILTREQQEALRAELAKTSRAKPAVSTPSLLLRVLFCAVCGEPAYKFVGGGRKHPRYRCRSMGFPEHCGNGTVVMAEWDAFCEEQVLNLLGDAERLEKVWVAGSDSAVELAEVNAELVDLTGLIGSPAYRAGSPQREALDARIAALAARQEELEGLEARPSGWEWRETGQRLGDWWREQNTAAKNTWLRSMNVRLTFDVRGGLTRTIDFGDLQEYEQHLRLGSVVERLHTGMT

SEQ ID NO: 8490 - protein, 500 aa, synthetic construct
MRALVVIRLSRVTDATTSPERQLESCQQLCARRGWDVVGVAEDLDVSGAVDPFDRKRRPNLARWLAFEEQPFDVIVAYRVDRLTRSTRHLQQLVHWAEDHKKLVVSATEAHFDTTTPFAAVVIALMGTVAQMELEAIKERIRSAVHFNIRAGKYRGSLPPWGYLPTRVDGEWRLVPDPVQRERILEVYHRVVDNHEPLHLVAHDLNRRGVLSPKDYFAQLRGREPQGREWSATALKRSMTSLAMLGYATLNGKTVRDDGGAPLVRAEPILTREQQEALRAELAKTSRAKPAVSTPSLLLRVLFCAVCGEPAYKFVGGGRKHPRYRCRSMGFPKHCGNGTVVMAEWDAFCEEQVLDLLGDAERLEKVWVAGSDSAVELAEVNAELVDLTSLIGSPAYRAGSPQREALDARIAALAARQEELEGLEARPSGWEWRETGQRFGDWWREQDTAAKNTWLRSMNVRLTFDVRGGLTRTIDFGDLQEYEQHLRLGSVVERLHTGMS

SEQ ID NO: 8491 - protein, 500 aa, synthetic construct
MRALVVIRLSRVTDATTSPERQLESCQQLCAQRGWDVVGVAEDLDVSGAVDPFDRKRRPNLARWLAFEEQPFDVIVAYRVDRLTRSTRHLQQLVRWAEDHKKLVVSATEAHFDTTTPFAAVVIALMGTVAQMELEAIKERIRSAAHFNIRAGKYRGSLPPWGYLPTRVDGEWRLVPDPVQRERILEVYHRVVDNHEPLHLVAHDLNRRGVLSPKDYFAQLRGREPQGRKWSATALKRSMISVAMLGYATLNGKIVRDDDGAPLVRAEPILTRGQQEALRAELAKTSRAKPAVSTPSLLLRVLFCAVCGEPAYKFVGGGRKHPRYRCRSMGFPEHCGNGTVVMAEWDAFCEEQVLDLLGDAERLEKVWVAGSDSAVELAEVNAELVDLTSLIGSPAYRAGSPQREALDARIAALAARQEELEGLEARPSGWEWRETGQRFRDWWHEQDTAAKNTWLRSMNVRLTFGVRGGLTRTIDFGDLQEYEQPLRSGSVVERLHTGKS

SEQ ID NO: 8492 - protein, 500 aa, synthetic construct
MRALVVIRLSRVTDATTSPERQLESCQQLCAQRGWDVVGVAEDLDVSGAVDPFDRKRRPNLARWLAFEEQPFDVILAYRVDRLTRSTRHLQQLVHWAEDHKKLVVSATEAHFDTTTPFAAVVIALMGTVAQMELEAIRERNRSAAHFNIRAGKYRGSLPPWGYLPTRVDGEWRLVPDPVQRERILEVYHRVVDNHEPLHLVAHDLNRRGVLSPKDYFAQLQGREPQGRKWSATALKRSMISEAMLGYATLNGKTVRDDDGAPLVRAEPILTREQLEALRAELVRTSRAKPAVSSPSLLLRVLFCAVCGEPAYKFAGGGRKHPRYRCRSMGFPKHCGNGTVVMAEWDAFCEEQVLDLLRDAERLEKVWVAGSDSAVELGEVNAELVDLTSLIGSPAYRAGSPQREALDARIAALAARQEELEGLGARPSGWEWRETGQRFGDWWREQDTAAKNSWLRSMNVRLTFDARGGLTRTIDFGDLQEYEQHLRLGSVVERLHTGMS

SEQ ID NO: 8493 - protein, 500 aa, synthetic construct
MRALVVIRLSRVTDATTSPERQLESCQQLCAQRGWDVVGVAEDLDVSGAVDPFDRKRRPNLARWLAFEEQPFDAIVAYRVDRLTRSVRHLQQLVRWAEDHKKLVVSATEAHFDTTTPFAAVVIALMGTVAQMELEAIKERIRSAAHFNIRAGKYRGSLPPWGYLPARVDGEWRLVPDLVQRERILEVYHRVVDNHEPLHLVAHDLNRRGVLSPKDYFAQLRGREPQGRKWSATALKRSMTSEAMLGYATLNGKIVRDDDGAPLVRAEPILTREQQEALRAELAKTSRAKPAVSTPSLLLRVLFCAVCGEPAYKFVGGGRKHPRYRCRSMGFPKHCGNGTVVMTEWDAFCEEQVLDLLGDTERLEKVWVAGSDSAVELAEVNAELVDLTSLIGSPAYRAGSPQREALDARIAALAARQEELEGLEARPSGWEWRGTGQRLGDWWREQDTAAKNTWLRSMNVRLTFDVRGGLTRTIDLGDLQEYEQHLRSGSVVERLHTRMS

SEQ ID NO: 8494 - protein, 500 aa, synthetic construct
MRALVVIRLSRVTDATTSPVRQLESCQQLCAQRGWDVVGVAEDLDVSGAVDPFDRKRRPNLARWLAFEEQPFDVIVAHRVDRLTRSVRHLQRLVHWAEDHKKLVVSATEAHFDTTTPFAAVVIALMGTVAQMELEAIKERIRSAAHFNIRAGKYRGSLPPWGYLPMRVNGEWRLVPDPVQRERILEVYHRVVDNHEPLHLVAHDLNRRGVLSPKDYFAQLRGREPRGRRWSATALRRSMTSEAMLGYATLNGKTVRGDDGAPLVRAEPILTREQLEALRAELAKTSRAKPAVSTPSLLLRVLFCAVCGEPAYKFVGGGRKHPRYRCRSMGLPKHCGNGTVVMAEWDAFCEEQVLNLLGDTERLEKVWLAGSDSAAELAEVNAELVDLTGLIGSPAYRAGSPQREALDARIAALAARQEELEGLEARPSGWEWRGTGQRFGDWWRVQDTAAKNTWLRSMNVRLTFDVRGGLTRAIDFGDLQEYEQHLRLGSVVERLHTGMS

SEQ ID NO: 8495 - protein, 500 aa, synthetic construct
MRALVVIRLSRVTDATTSPERQLESCQQLCAQRGWDVVGVAEDLDVSGAVDPFDRKRRPNLARWLAFEEQPFDVIVAYRVDRLTRSTRHLQQLVHWAEDHKKLIVSATEAHFDTTTPFAAVVIALMGTVAQMELEAIKERNRSAAHFNIRAGKYRGSLPPWGYLPTRVDGEWRLVPDPVQRERILEVYHRVVDNHEPLHWVAHDLNRRGVLSPKDYFAQLQGREPQGRKWSATALKRSMISEAMLGYATLNGKTVRDDDGAPLVRAEPILTREQLEALRAELVKTSRAKPAVSTPSLLLRVLFCAVCGGPAYKFAGGGRKHPRYRCRSMGFPKHCGNGTVAMAEWDAFCEEQVLNLLGDAERLEKVWVAGSDSAVELAEVNAELVDLTSLIGSPAYRAGSPQREALDARIAALAARQEELEGLEARPSGWGWRRTGQRFGDWWRELDTAAKNTWLRSMNVRLTFDVRGGLTRTIDFGDLQEYEQHLRLGSVVERLHTGMS

SEQ ID NO: 8496 - protein, 500 aa, synthetic construct
MRALVVIRLSRVTDATTSPERQLESCQQLCAQRGWDVAGVAEDLDVSGAVDPFDRKRRPNLARWLAFEEQPFDAIVAYRVDRLTRSTRHLQQLVHWAEDHKKLVVSATEAHFDTTTPFAAVVIALMGTVAQMELEAIKERIRSAAHFNIRAGKYRGSLPPWGYLPTRVDGEWRLVPDPVQRERILEVYHRVVDNHEPLHLVAHDLNRRGVLSPKDYFAQLQGREPRGHKWSATALKRSMISEAMLGYATLNGRTVRDDDGAPLVRAEPILTREQQEALRAELAKTSRAKPAVSTPSLLLRVLFCAVCGEPAYKFVGGGRKHPRYRCRSMGFPKHCGNGTVVMTEWDAFCEEQVLGLLGDTERLEKVWVAGSDSTVELAEVSAELVDLTSLIGSPAYRAGSPQREALDARIAVLAARQGELEGLEARPSGWEWRGTGQRFGDWWREQDTAAKNTWLRSMNVRLTFDVRGGLTRTIDFGDLQEYEQHLRSGSVVERLHTGMS

SEQ ID NO: 8497 - protein, 500 aa, synthetic construct
MRALVVIRLSRVTDATTSPERQLESCQQLCAQRGWDVVGVAEDLDVSGAVDPFDRKRRPNLARWLAFGEQPFDVIVAYRVDRLTRSTRHLQRLVLWAEDHKKLVVSATEAHFDTTTPFAAVVIALMGTVAQMELEAIKERIRSAVRFNIRAGKYRGSLPPWGYLPTRVDGEWRLVPDPVQRERILEVYHRVVDNHEPLYLVAHDLNRRGVLSPKDYFAQLRGREPQGREWSATALKRSMTSVAMLGYATLNGKTVRGDDGAPLVRAEPILTREQQEALRAELAKTSRAKPAVSTPSLLLRVLFCAVCGEPAYKFVGGGRKHPRYRCRSMGFPKHCGNGTVVMTEWDAFCEEQVLNLLGDAERLEKVWVAGSDSAVELAEVNAELADLTSLIGSLAYRAGSPQREALDARIAALAARQGELEGLEARPSGWEWRGTGQRLGDWWREQDTAAKNTWLRSMNIRLTFDVRGGLTRTIDFGELQEYEQHLRSGSVAKRLRTGVS

SEQ ID NO: 8498 - protein, 500 aa, synthetic construct
MRALVVIRLSRVTDATTSPERQLESCQQLCAQRGWDVVGVAEDLDVSGAVDPFDRKRRPNLARWLAFEEQPFDVIVAYRVDRLTRSTRHLQQLVHWAEDHKKLVVSATEAHFDTTTPFAAVVIALMGTVAQMELEAIKERNRSAAHFNIRAGKYRGSLPPWGYLPTRVDGEWRLVPDPVQRERILEVYHRAVDNHEPLYLVAHDLNRRGVLSPKDYFAQLQGREPQGRKWSATALKRSMTSEAMLGYATLNGKTVRDDDGAPLVRAEPILTRGQLEALRAELVKTSRAKPAVSTPSLLLRVLFCAVCGEPAYKFAGGGRKHPRYRCRSMGFPKHCGNGTVVMAEWDAFCEEQVLNLLGDAERLEKVWVAGSDSAVELSEVNAELVDLTSLIGSPAYRADSPQREALDARIAALAARQEELEGLEARPSGWEWRETGQRFGDWWREQDTAAKNTWLRSMNVRLTFDVRGGLTRTIDFGDLQEYKQHLRLGSVVERLHTGMS

SEQ ID NO: 8499 - protein, 500 aa, synthetic construct
MRALVVIRLSRVTDATTSPERQLESCQQLCAQRGWDVVGVAEDLDVSGAVDPFDRKRRPNLARWLAFEEQPFDVIVAYRVDRLTRSTRHLQQLVHWAEDHKKLVVSATEAHFDTTTPFAAVVIALMGTVAQMELEAIKERNRSAAHFNIRAGKYRGSLPPWGYLPTRVDGEWRLVPDPVQRERILEVYHRVVDNHEPLHWVAHDLNRRGVLSPKDYFAQWQGREPQGRKWSATALKRSMISEAMLGYATLNGMTVRDDDGAPLVRAEPILTREQLEALRAELVKTSRAKPAVSAPSLLLRVLFCAVCGEPAYKFAGGGRKHPRYRCRSMGFPRHCGNGTVAMAEWDAFCEEQVLDLLGDAERLEKVWVAGSDSAVELAEVNAELVDLTSLIGSPAYRAGSPQREALDARIAALAARQEELEGLEARSSGWEGRGTGQRFGDWWREQDTAAKNTWLRSMNVRLTFDVRGGLTRTIDFGGLLEYEQHLRLGSVVERLHTGMS

SEQ ID NO: 8500 - protein, 500 aa, synthetic construct
MRALVVIRLSRVTDATTSPERQLESCQQLCAQRGWDVVGVAEDLDVSGAVDPFDRKRRPNLARWLAFEEQPFDVIVAYRVDRLTRSTRHLQQLVRWAEDHKKLVVSATEAHFDTTTPFAAVVIALMGTVAQMELEAIKERIRSAVHFNIRAGKYRGSLPPWGYLPTRVDGEWRLVPDPVQRERILEVYHRVVDNHEPLHLVAYDLNRRGVLSPKDYFAQLRGREPQGRKWSATALKRSMISVAMLGYATLNGKTVRDDDGVPLVRAEPILTREQLEALRAELVKTSRAKPAVSTPSLLLRVLFCAVCGEPAYKFVGGGRKHPRYRCRSMGFPKHCGNGTVVMAEWDAFCEEQVLDLLGDAERLEKVWVAGSDSAVELAEVNAELVDLTSLIGSPAYRAGSPQREALDARIAALAARQGELEGLEARPSGWEWRGTGQRFGDWWRQQDTAAKNTWLRSMNVRLTFDVRGGLTRAIDFGDLQEYEQHLRLGSVVERLHPGMS

SEQ ID NO: 8501 - protein, 500 aa, synthetic construct
MRALVVVRLSRVTDTTTSPERQLESCQQLCAQRGWDVVGVAVDLDVSGAVDPFDRKRRPNLARWLAFEEQPFDVIVAYRVDRLTRSTRHLQQLVLWAEDHKKLVVSATEAHFDTTTPFAAVVIALMGTVAQMELEAIKERIRSAAHFNIRAGKYRGSLPPWGYLPTRVDGEWRLVPDPVQRERILEVYHRVVGNHEPLHLVAHDLNRRGVLSPKDYFAQLRGREPQGRKWSATALKRSMTSVAMLGYATLNGKTVRGDDGVPLVRAEPILTREQLEALRAELAKTSRAKPAVSTPSLLLRVLFCAVCGEPAYKFTGGGRKHPRYRCRSMGFPKHCGNGTVVMAEWDAFCEEQVLDLLGDAERLEKVWVAGSDSAVELAEVNAELVDLTSLIGSQAYRAGSPQREALDARIAALAARQEGLEGLEARPSGWEWRGTGQRFGDWWREQDTAAKNTWLRSMNVRLTFDVRGGLTRTIDFGDLQEYEQHLRLGSVVERLHTGMS

SEQ ID NO: 8502 - protein, 500 aa, synthetic construct
MRALVVIRLSRVTDATTSPERQLESCQRLCAQRGWDVVGVAEDLDVSGAVDPFDRKRRPNLARWLAFEEQPFDVVVAYRVDRLTRSVRHLQQLVHWAEDHKKLVVSATEAHFDTTTPFAAVVIALMGTVAQMELEAIKERNRSAAHFNIRAGKYRGSLPPWGYLPTRVDGEWRLVPDPVQRERILEVYHRVVDNHEPLHLVAHDLNRRGVLSPKDYFAQLQGREPQGRKWSATALKRSMISEAMLGYATLNGKIVRGDDGAPLVRAEPILTREQLEVLRAELVKTSRARPAVSTPSLLLRVLFCAVCGEPAYKFAGGGRKHPRYRCRSMGFPKHCGNGTVVMAEWDAFCEEQVLNLLGDAERLEKVWVAGSDSAVELAEVNAELVDLTSLIGSPAYRAGSPQREALDARIAALAARQEELEGLEARPSGWEWRETGQRFGDWWREQDTAAKNTWLRSMNVCLTFDVRGGLTRTIDFGDLQEYEQHLRLGGVVERLHTGMS

SEQ ID NO: 8503 - protein, 500 aa, synthetic construct
MRALVVIRLSRVTDATTSPERQLESCQQLCAQRGWDVVGVAEDLDVSGAIDPFDRKRRPNLARWLAFEEQPFDVIVAYRVDRLTRSTRHLQQLVRWAEDHKKLVVSATEAHFDTTTPFAAVVIALMGTVAQMELEAIKERIRSAVRFNIRAGKYRGSLPPWGYLPTRVDGEWRLVPDPVQRERILEVYHRVVDNHEPLHLVAHDLNRRGVLSPKDYFAQLRGREPQGRKWSATALKRSMTSVAMLGYATLNGKTVRDDDGAPLVRAEPILTREQLEALRAELVKTSRAKPAVSTPSLLLRVLFCAVCGEPAYKFVGGGRRHPRYRCRSMGSPKHCGNGTVVMAEWDAFCEEQMLNLLGDAERLEKVWVAGSDSAVELAEVNAELVDLTSLIGSPVYRAGSPQREALDAHIAALAARQEELEGLEARPSGWEWRETGQCFGDWWREQDTAAKNTWLRSMNVRLTFDVRGGLTRTIDFGDLQEYEQHLRLGSVVERLHSGMS

SEQ ID NO: 8504 - protein, 500 aa, synthetic construct
MRALVVIRLSRVTDATTSPERQLESCQQLCAQRGWDVVGVAEDLDVSGAVDPFDRRRRPNLARWLAFEEQPFDVIVAYRVDRLTRSTRHLQQLVRWAEDHKKLVVSATEAHFDTTTPFAAVVIALMGTVAQMELEAIKERIRSAAHFNIRAGKYRGSLPPWGYLPTRVDGEWRLVPDPVQRERILEVYRRVVDNHEPLHLVAHDLNRRGVLSPKDYFAQLQGREPQGRKWSATALKRSMISGAVLGYATLNGKIVRDDDGAPLVRAEPILTREQQEALRAELAKTSRAKPAVSTPSLLLRVLFCAVCGEPAYKFVGGGRKHPRYRCRSMGFPKHCGNGTVMMTEWDAFCEEQVLGLLGDAERLEKVWVAGSDSAVELAEVNAELLDLTSLIGSPAYRAGSPQREALDARIAALAARQEELEGLEARPSGWGWRETGQRFRDWWREQDAAAKNAWLRSMNVRLTFDVRGGLTRAIDFGDLREYVQHLRSGSVVERLHTGMS

SEQ ID NO: 8505 - protein, 500 aa, synthetic construct
MRALVVIRLSRVTDATTSPERQLESCQQLCAQRGWDVVGVAEDLDVSGAVDPFDRKRRPNLARWLAFEEQPFDVIVAYRVDRLTRSTRHLQRLVHWAEDHKKLVVSATEAHFDTTTPFAAVVIALMGTVAQMELEAIKERIRSAVRFNIRAGKYRGSLPPWGYLPTRVEGEWRLVPDPVQRERILEVYHRVVDNHESLHLVAHDLNRRGILSPKDYFAQLRGREPQGREWSATALKRSMTSEAMLGYATLNGKTVRDDDGAPLVRAEPILTREQQEALRAELAKTSRAKPAVSTPSLLLRVLFCAVCGEPAYKFVGGGRKHPRYRCRSMGFPEHCGNGTVVMAEWDAFCEEQVLNLLGDAEHLEKVWVAGSDSAVELAEVNAELVDLTSLIGSPAYRAGSPQRKALDARIAALAARQEELEGLEARPSGWEWRETGQRFGDWWREQGTAAKNTWLRSMNVRLTFDVRGGLTRTIDFGELQEYEQHLRLGSVVERLHTGMS

SEQ ID NO: 8506 - protein, 500 aa, synthetic construct
MRALVVIRLSRVTDATTSPERQLESCRQLCAQRGWNVVGVAEDLDVSGAVDPFDRKRRPNLARWLAFEEQPFDVIVAYRVDRLTRSTRHLQQLVHWAEDHKKLVVSATEAHFDTTTPFAAVVIALMGTVAQMELEAIKERNRSAAHFNIRAGKYRGSLPPWGYLPTRVDGEWRLVPDPAQRERILEVYHRVVDNHEPLHLVAHDLNRRGVLSPKDYFAQLQGREPQGRKWSATALKRSMTSEAMLGYATLNGKTVRDDDGAPLVRAEPILTREQLEALRAELVKTSRAKPAVSTPSLLLRVLFCAVCGEPAYKFAGGGRKHPRYRCRSMGFPKHCGNGTVVMAEWDAFCEERVLDLLGDAERLEKVWVAGSDSAVELAEVNAELVDLTSLIGSPAYRAGSPQHEALDTRIAALAARQEELEGLEARPSGWEWRETGQRFGDWWREQDTAAKNAWLRSMNVRLTFDVRGGLTRTIDFGDLQEYEQHLRLGSVVGRLHTGMS

SEQ ID NO: 8507 - protein, 500 aa, synthetic construct
MRTLVVIRLSRVTDATTSPERQLESCQQLCAQRGWDVVGVAEDLDVSGAVDPFDRKRRPNLARWLAFEEQPFDVIVAYRVDRLTRSVRHLQQLVHWAEDHKKLVVSATEAHFDTTTPFAAVVIALMGTVAQMELEAIKERNRSAAHFNIRAGKYRGSLPPWGYLPTRVDGEWRLVPDPVQRERILEVYHRVVDNHESLHLVAHDLNRRGVLSPKDYFAQLRGREPQGREWSATALKRSMVSVAMLGYATLNGKIVRGDDGAPLVRAEPILTREQLEVLRAELVKTSRAKPAVSTPSLLLRVLFCAVCGEPAYKFAGGGRKHPRYRCRSMGFPKHCGNGTVVMAEWDAFCEEQVLNLLGDAERLEKVWVAGSDSAVELAEVNAELVDLTSLIGSPAYRAGSPQREALDARIAALAARQEELEGLEARPSGWEWRETGQRFGDWWREQDTAAKNTWLRSMNVRLTFDVRGGLTRTIDFGDLQEYEQHLRLGGVVERLHTGMS

SEQ ID NO: 8508 - protein, 500 aa, synthetic construct
MRALVVIRLSRVTDATTSPERQLESCQQLCAQRGWDVVGVAEDLDVSGAVDPFDRKRRPNLARWLAFEEQSFDVIVAYRVDRLARSTRHLQQLVHWAEDHKKLVVSATEAHFDTTTPFAAVVIALMGTVAQMELEAIKERNRSAAHFNIRAGKYRGSLPPWGYLPARVDGEWRLVPDPVQRERILEVYHRVVDNHEPLHLVAHDLNRRGVLSPKDYFAQLQGREPQGRKWSATALRRSMISEAMLGYATLNGKTVRDDDGAPLVRAEPILTRGQLEALRAELVKTSRAKPAVSTPSLLLRVLFCAVCGEPAYKFAGGGRKHPRYRCRSMGFPKHCGNGTVAMAEWDAFCEEQVLGLLGDAERLEKVWAAGSDSAVELAEVNAELVDLTSLIGSPAYRAGSPQREALDARIAALAARQEELEGLEACPSGWEWRGTGQRFGDWWREQDTAAKNTWLRSMNVRLAFDVRGGLTRTIDFGELQEYEQHLRLGSVVERLHTGRS

SEQ ID NO: 8509 - protein, 500 aa, synthetic construct
MRALVVIRLSRVTDATTSPERQLESCQQLCAQRGWDVVGVAEDLDVSGAVDPFDRKRRPNLARWLAFEEQPFDVIVAYRVDRLTRSTRHLQQLVHWAEDHKKLVVSATEAHFDTTTPFAAVVIALMGTVAQMELEAIKERNRSAAHFNIRAGKYRGSLPPWGYLPTRVDGEWRLVPDPVQRERILEVYHRVVDNHEPLHLVAHDLNRRGILSPKDYFAQLQGREPQGRKWSATALKRSMISEAMLGYATLNGRTVRDDDGAPLVRAEPILTRGQLEALRAELVRTSRAKPAVSAPSLLLRVLFCAVCGEPAYKFAGGGRKHPRYRCRSMGFPKHCGNGTVAMAEWDAFCEEQVLGLLGDAERLEKVWVAGSDSAVELAEVNAELVDLTSLIGSPAYRAGSPQREALDARIAALAARQEELEGLEARPSGWEWRETGQRFGDWWREQDTAAKNAWLRSMNVRLTFDVRGGLTRTIDFGDLQEYEQHLRLGSVVERLHTGMS

SEQ ID NO: 8510 - protein, 500 aa, synthetic construct
MRALVVIRLSRVTDATTSPERQLESCQQLCAQRGWDVVGVAEDLDVSGAVDPFDRKRRPNLARWLAFEEQPFDVIVAHRVDRLTRSTRHLQQLVRWAEDHKKLVVSATEAHFDTTTPFAAVVIALMGTVAQMELEAIKERIRSAAHFNIRAGKYRGSLPPWGYLPTRVDGEWRLVPDPVQRERILEVYHRVVDNHEPLHLVAHDLNRRGVLSPKDYFAQLRGREPQGRKWSATALRRSMTSMAMLGYATLNGKIVRDDDGAPLVRAEPILTREQLEALRAELVKTSRAKPAVSTPSLLLRVLFCAVCGEPAYKFVGGGRKHPRYRCRSMGFPEHCGNGTVVMAEWDAFCEEQVLNLLGDAERLEKAWVAGSDSAVELAEVNAELVDLTSLIGSPAYRAGSPQREALDARIAALAARQEELEGLEARPSGWEWRETGQRFRDWWREQDTAAKNTWLRSMNIRLTFDVRGGLTRTIDFGDLQEYERHLRLGSVAERLRTGMS

SEQ ID NO: 8511 - protein, 500 aa, synthetic construct
MHALVVIRLSRVTDATTSPERQLKSCQQLCAQRGWDVVGVAEDLDVSGAVDPFDRKRRPNLARWLTLEVQPFDVIVAYRVDRLTRSVRHLQQLVRWAEDHKKLVVSATEAHFDTTTPFAAVVIALMGTVAQMELEAIKERIRSAAHFNIRAGKYRGSLPPWGYLPARVDGEWRLVPDPVQRERILEVYHRVVDNHEPLHLVAHDLNRRGVLSPKDYFAQLRGREPQGRKWSATALKRSMTSVAMLGYATLNGKIVRDDDGAPLVRAEPILTREQQEALRAELAKTSRAKPAVSTPSLLLRVLFCAVCGEPAYKFTGGGRKHPRYRCRSVGFLKHCGNGTVVMTEWDAFCEEQVLNLLGDAERLEKVWVAGSDSSVELAEVNAELVDLTSLIGSPAYRAGSPQREALDARIAALAARQEELKGLGARPSGWEWRETGQRFGDWWREQDTAAKNTWLRSMNVRLTFDVRGGLARTIDFGDLQEYKRHLRSGSVVERLHTGMS

SEQ ID NO: 8512 - protein, 500 aa, synthetic construct
MRALVVIRLSRVTDATTSPERQLESCQQLCAQRGWDVVGVAEDLDVSGAVDPFDSKRRPNLARWLAFEERPFDVIVAYRVDRLTRSTRHLQQLVHWAEDHKKLVVSATEAHFDTTTPFAAVVIALMGTVAQMELEAIKERSRSAAHFNIRAGKYRGSLPPWGYLPTRVDGEWRLAPDPVQRERILEVYHRVVDNHEPLHLVAYDLNRRGVLSPKDYFAQLQGREPQGRKWSATALKRSMISVAMLGYATLNGKIVRDDDGAPLVRAEPILTREQQEALRAELVRTSRAKPAVSTPSLLLRVLFCAVCGEPAYKFVGGGRKHPRYRCRSMGFPEHCGNGTVVMAEWDAFCEEQVLDLLGDAERLEKVWVAGSDSAVELAEVNAELVDLTSLIGSPAYRAGSPQREALDARIAALAARQEELEGLEARPSGWEWRETGQRFGDWWREQDTAAKNTWLRSMNVRLTFDVRGGLTRTIDFGDLQEYEQHSRLGSVVERLYTGMS

SEQ ID NO: 8513 - protein, 500 aa, synthetic construct
MRALVVIRLSRVTDATTSPERQLESCQQLCAQRGWDVVGVAEDLDVSGAVDPFDRKRRPNLARWLAFEEQPFDVIVAYRVDRLTRSVRHLQRLVRWAEDHKKLVVSATEAHFDTTTPFAAVVIAIMGTVAQMELEAIKERIRSAVHFNIRTGKYRGSLPPWGYLPTRVDGEWRLVPDPVQRERILEVYHRVVDNHEPLHLVAHDLNRRGVLSPKDYFAQLRGREPRGRKWSATALRRSMISVAMLGYATLDGKTVRDDDGAPLVRAEPILTREQQEALRAELAKTSRAKPAVSTPSLLLRVLFCAVCGEPAYKFVGGGRKHPRYRCRSVGFPKHCGNGTVVMAEWDAFCEEQVLNLLGDAERLEKVWVAGSDSAVELAEVNAELVDLTSLIGSPAYRAGSPQREALDARIAALAARQEELEGLEARPSGWEWRETGQRFRDWWREQDTAAKNTWLRSMNVRLTFDVRGGLTRTIDFGDLQEYDRHLRLGSVVERLHTGMP

SEQ ID NO: 8514 - protein, 500 aa, synthetic construct
MRALVVIRLSRVTDATTSPERQLESCQQLCAQRGWDVVGVAEDLDVSGAVDPFDRKRRPNLARWLAFEEQPFDVIVAYRVDRLTRSTRHLQQLVRWAEDHKKLVVSATEAHFDTTTPFAAVVIALMGTVAQMELEAIKERIRSAVHFNIRAGRYRGSLPPWGYLPTRVDGEWRLVPDPVQRERILEVYHRVVDNHEPLHLVAHDLNRRGVLSPKDYFAQLQGREPQGRKWSATALRRSMTSVAMLGYATLNGKTVRDDDGAPLVRAEPILTREQLEALRAELAKTSRAKPAVSTPSLLLRVLFCAVCGEPAYKFVGGGRKHPRYRCRSMGFPKHCGNGTVVMAEWDAFCEGQVLNLLGDAERLEKVWVAGSDSAVELAEVNAELMDLTSLIGSPAYRAGSPQREALDARIAALAARQEELEGLEARPSGWEWRETGQHFGDWWREQDTAAKNTWLRSMNVRLTFDARGELTRTIDFGELQEYEQHLRLGSVAERLHAGMS

SEQ ID NO: 8515 - protein, 500 aa, synthetic construct
MRALVVIRLSRVTDATTSPERQLESCQQLCAQRGWDVVGVAEDLDVSGAVDPFDRKRRPNLARWLAFEEQPFDVIVAYRVDRLTRSTRHLQQLVHWAEDHKKLVVSATEAHFDTTTPFAAVVIALMGTVAQMELEAIKERNRSAAHFNIRAGKYRGSLPPWGYLPARVDGEWRLVPDPVQRERILEVYHRVVDNHEPLHLVAHDLNRRGVLSPKDYFAQLRGREPQGRKWSATALKRSMISEAMLGYATLNGKTVRDDNGAPLVRAEPILTREQLEALRAELVKTPRAKPAVSTPSLLLRVLFCAVCGEPAYKFAGGGRKHPRYRCRSMGFPKHCGNGTVVVAEWDAFCEEQVLDLLGDAERLEKVWVAGSDSAVELAGVNAELVDLTSLIGSPAYRAGSPQREALDARVAALAARQEELEGLEARPSGWEWRETGQRFGDWWREQDTAAKNTWLRSMNVRLTFDVRGGLTRTIDFGDLQEYEQHLRLGSVVERLHTGMS

SEQ ID NO: 8516 - protein, 500 aa, synthetic construct
MRALVVIRLSRVTDATTSPERQLESCQQLCAQRGWDVVGVAEDLDVSGAVDPFDRKRRPNLARWLAFEEQPFDVIVAYRVDRLTRSTRHLQQLVRWAEDHKKLVVSATEAHFDTTTPFAAVVIALMGTVAQMELEAIKERIRSAAHFNIRAGKYRGSLPPWGYLPARVDGEWRLVPDPVQRERILEVYHRVVDNHEPLHLVARDLNRRGVLSPKDYFAQLRGREPRGRKWSATALRRSMISKAMLGYATLNGKIVRDDDGAPLVRAEPILTREQQEALRAELAKTSRAKPAVSTPSLLLRVLFCAVCGEPAYKFVGGGRKHPRYRCRSVGFPKHCGNGTVVMAEWDAFCEKQVLDLLGDAERLEKVWVAGSDSAVELAEVSAELVDLTSLIGSPAYRAGSPQREALDARIAALAARQEELGGLEARPSGWEWRETGQRFRDWWREQDTAAKNTWLRSMNVRLTFDVRGGLTRTIDLGDLQEYEQHLRLGSVVERLRSGMS

SEQ ID NO: 8517 - protein, 500 aa, synthetic construct
MRALIVIRLSRVTDATTSPERQLESCQQLCAQRGWDVVGVAEDLDVSGAVDPFDRKRRPNLARWLAFEEQPFDVIVAYRVDRLTRSTRHLQQLVRWAEDHRKLVVSATEAHFDTTTPFAAVVIALMGTVAQMELEAIKERIRSAVHFNIRAGKYRGSLPPWGYLPTRVDGEWRLVPDPVQRERILEVYHRVVDHHEPLHLVAHDLNRRGVLSPKDYFAQLRGREPRGRKWSATALKRSMTSVAMLGYATLNGKTVRDDDGAPLVRAEPILTREQQEALRAELAKTSRAKPAVSTPSLLLRVLFCAVCGEPAYKFVGGGRKHPRYRCRSMGFPRHCGNGTVVMAEWDAFCEEQVLNLLGNAERLEKVWVAGSDSAVELAEVNAELMDLTSLISSPAYRAGSPQREALDARIAALAARQEELEGLEARPPGWEWRGTGQRLGDWWREQDTAAKNTWLRSMNVRLTFDVRGGLTRTIDFGDLQEYEQHSRSGSVVERLHTGMS

SEQ ID NO: 8518 - protein, 500 aa, synthetic construct
MRALVVVRLSRVTDSTTSPERQLESCKQLCAQRGWDVVGVAEDLDVSGAVDPYDRKRRPNLARWLAFEEQPFDVIVAYRVDRLTRSVRHLQQLVHWAEDHKKLVVSATEAHFDTTTPFAAVVIALMGTVAQMELEAIKERNRSAAHFNIRAGKYRGSLPPWGYLPTRVDGEWRLVPDPVQRECILEVYHRVVDNHEPLHLVAHDLNRRGVLSPKDYFAQLQGREPQGRKWSATALKRSMTSKAMLGYATLNGKIVRDDDGAPLVRAEPILTREQLEALRAELVKTSRAKPAVSTPSLLLRVLFCAVCGEPAYKFAGGGRKHPRYRCRSMGFPKHCGNGTVVMAEWDAFCEEQVLDLLGDTKRLEKVWIAGSDSAVELAEVSAELVDLTSLIGSPAYRAGSPQREALDARIAALAARQEELEGLEARPSGWEWRETGQRFGDWWREQDTAAKNTWLRSMNVRLTFDVRGGLTRTIDFGDLQEYEQHLRLGSVVERLHTGMS

SEQ ID NO: 8519 - protein, 500 aa, synthetic construct
MRALVVIRLSRVTDATTSPERQLESCQRLCAQRGWDVVGVAEDLDVSGAVDPFDRKRRPNLARWLAFEEQPFDVIVAYRVDRLTRSTRHLQQLVHWAEDHKKLVVSATEAHFDTTTPFAAVVIALMGTVAQMELEAIKERNRSAAHFNIRAGKYRGSLPPWGYLPTRVDGEWRLAPDPVQRERILEVYHHVVDNHEPLHLVAHDLNRRGVLSPKDYFAQLQGREPQGRKWSATALKRSMISEAMLGYATLNGKTVRDDDGAPLVRAEPILTREQLEALRAELVRTSRAKPAVSTPSLLLRVLFCAVCGEPAYKFAGGGRKHPRYRCRSMGFPKHCGNGTVAMAEWDAFCEEQVLDLLGDAERLEKVWVAGSDSAVKLAEVNAELVDLTSLIGSPAYRAGSPQREALDARIAALAARQEELEGLEARPSGWEWHETGQRFGDWWREQDTAAKNTWLRSMNVRLTFDVRGGLTRTIDLGDLQEYEQHLRLGSVVERLHTGMS

SEQ ID NO: 8520 - protein, 500 aa, synthetic construct
MRALVVIRLSRVTDATTSPERQLESCQQLCAQRGWDVVGVAEDLDVSGAVDPFDRKRRPNLARWLAFEEQPFDVIVAYRVDRLTRSARHLQQLVLWAEDHKKLVVSATEAHFDTTTPFAAVVIALMGTVAQMELEAIKERIRSAAHFNIRAGKYRGSLPPWGYLPTRVDGEWRLVPDPVQRERILEVYHRVVDNHEPLHLVAHDLNRRGVLSPKDYFAQLRGREPQGREWSATALKRSMTSVAMLGYATLNGKTVRDDDGAPLVRAEPILTREQQEALRAELVKTSRAKPAVSTPSLLLRVLFCAVCGEPAYKFVGGGRKHPRYRCRSMGFPKHCGNGTVAMAEWDAFCEEQVLNLLGDAERLEKVWVAGSDSAVELAEVNAELVDLTSLIGSPAYRAGSPQREALDARIAALAARQEELEGLEARPSGWEWRETGQRFGDWWREQNTAAKNTWLRSMNVRLTFDVRGGLTRTIDFGELQEYMQHLRLGSAVERLYTGMS

SEQ ID NO: 8521 - protein, 500 aa, synthetic construct
MRALVVIRLSRVTDATTSPERQLESCQRLCAQRGWDVVGVAEDLDVSGAVDPFDRKRRPNLARWLAFQEQPFDAIVAYRVDRLARSIRHLQQLVHWAEDHKKLVVSATEAHFDTTTPFAAVVIALMGTVAQMELEAIKERNRSAAHFNIRAGKYRGSLPPWGYLPTRVDGEWRLVPDPVQRERILEVYHRVVDNHEPLHLVAHDLNRRGVLSPKDYFAQLQGREPQGRKWSATALKRSMVSETMLGYATLNGKTVRDDDGAPLVRAEPILTREQLEALRAELVKTPRAKPAVSTPSLLLRVLFCAVCGEPAYKFAGGGRKHPRYRCRSMGFPKHCGNGTVVMTEWDAFCEEQVLDLLGDAECLEKVWVAGSDSAVELAEVNAELVDLTSLIGSPAYRAGSPQREALDARIAALAARQEELEGLEVRPSGWEWRETGQRFGDWWREQDTAAKNTWLRSMNVRLTFDVRGGLTRTIDFGDLQEYEQHLRLGSVVERLHTGMS

SEQ ID NO: 8522 - protein, 500 aa, synthetic construct
MRALVVIRLSRVTDATTSPERQLESCQQHCAQRGWDVVGVAEDLDVSGAVDPFDRKRRPNLARWLAFEEQPFDVIVAYRVDRLTRSIRHLQQLVHWAEDHKKLVVSATEAHFDTTTPFAAVVIALMGTVAQMELEAIKERNRSAAHFNIRAGKYRGSLPPWGYLPTRVDGEWRLAPDPVQRERILEVYHRVVDNHESLHLVAHDLNRRGVLSPKDYFAQLQGREPQGRKWSATALKRSMISEAMLGYATLNGKTVRDDNGAPLVRAEPILTREQLEALRAELVKTSRAKPAVSAPSLLLRVLFCAVCGEPAYKFAGGGRKHPRYRCRSVGFPKHCGNGTVAMAEWDAFCEEQVLDLLGDAERLEKVWVAGSDSAVELAEVNAELVDLTSLIGSPAYRAGSPQREALDARIAALAARQEELEGLETRPSGWEWRETGQRFGDWWREQDTAAKNTWLRSMNVRLTFDVRGGLTRTIDFGGLREYEQHLRLGSVVERLHTGMS

SEQ ID NO: 8523 - protein, 500 aa, synthetic construct
MRALVVIRLSRVTDATTSPERQLESCQQLCAQRGWDVVGVAEDLDVSGAVDPFDRKRRPNLARWLAFERQPFDVIVAYRVDRLTRSVRHLQQLVHWAEDHKKLVVSATEAHFDTTTPFAAVVIALMGTVAQMELEAIKERIRSAAHFNIRAGKYRGSLPPWGYLPTRVDGEWRLVPDPVQRERILEVYRRVVDNHEPLHSVAHDLNRRGVLSPKDYFAQLQGREPQGRKWSATALRRSMTSVAMLGYATLSGKIVRGDDGAPLVRAEPILTREQQGALRAELARTSRAKPAVSTPSLLLRVLFCAVCGEPAYKFVGGGRKHPRYRCRSMGFPKHCGNGTVVMAEWDVFCEEQVLNLLGDAERLEKVWVAGSDSAVELAEVNAELVDLTSLIGSPAYRAGSPQREALDARIAALAARQEELEGLEARPSGWEWRETGQRFGDWWREQDTAAKNTWLRSMNVRLTFDVRGGLTRTIDFGDLQEYERHLRLGRMVKRLHTGMS

SEQ ID NO: 8524 - protein, 500 aa, synthetic construct
MRALVVIRLSRVTDATTSPERQLESCQQLCAQRGWDVVGVAEDLDVSGAVDPFDRKRRPNLARWLAFEEQPFDVIVAYRVDRLTRSTRHLQQLVRWAEDHKKLVVSATEAHFDTTTPFAAVVIALMGTVAQMELEAIKERIRSAAHFNIRAGKYRGSLPPWGYLPTRVDGEWRLVPDPVQRERILEVYHRVVDNHESLHLVAHDLNRRGVLSPKDYFAQLRGREPRGRKWSATALKRSMISVAMLGYATLSGKIVRDDDGAPLVRAEPILTREQLEALRAELVKTSRAKPAVSAPSLLLRVLFCAVCGEPAYKFVGGGRKHPRYRCRSMGSPKHCGNGTVVMTEWDTFCEEQVLGLLGDVERLEKVWVAGSDSAVELAEVNAELVDLTSLIGSPAYRVGSPQREALDARIAALAARQEELEGLEARPSGWEWRETGQRFRDWWREQDTAAKNTWLRSMNVRLTFDVRGGLTRTVDFGDLREYEQHLRLGGVVERLYAGMS

SEQ ID NO: 8525 - protein, 500 aa, synthetic construct
MRALVVIRLSRVTDATTSPERQLESCQQLCAQRGWDVVGVAEDLDVSGAVDPFDRKRRPNLARWLAFEEQPFDVIVAYRVDRLARSTRHLQQLVHWAEDHKKLVVSATEAHFDTTTPFAAVVIALMGTVAQMELEAIKERNRSAAHFNIRAGKYRGSLPPWGYLPTRVDGEWRLVPDPVQRERILEVYHRVVDNHEPLHLVAHDLNRRGVLSPKDYFAQLQGREPQGRKWSATALKRSMISEAMLGYATLNGKTVRGDDGAPLVRAEPILTREQLEALRAELVKTSRAKPAVSTPSLLLRVLFCAVCGEPAYKFAGGGRKRPRYRCRSMGFPKHCGNGTVTMAEWDTFCEEQVLDLLGDAERLEKVWVAGSDSAVELAEVNAELVDLTSLIGSPAYRAGSPQREALDARIAALAARQEELEGLEARPSGWEWRETGQRFGDWWREQDTAAKNTWLRSVNVRLTFDVRGGLTRTIDFGDLQEYEQHLRLGSVVERLHTGMS

SEQ ID NO: 8526 - protein, 500 aa, synthetic construct
MRALVVIRLSRVTEATTSPERQLASCQQLCAQRGWDVVGVAEDLDVSGAVDPFDRKRRPNLARWLAYEEQPFDAIVAYRVDRLTRSIRHLQQLVRWAEDHKKLVVSATEAHFDTTTPFAAVVIALMGTVAQMELEAIKERSRSAAHFNIRAGKYRGSLPPWGYLPTRVDGEWRLVPDPVQRERILEVYHRVVDNHEPLHLVAHDLNRRGVLSPKDYFAQLRGREPRGRKWSATALRRSMTSVAMLGYATLNGKTVRDDGGAPLVRAEPILTREQQEALRAELAKTSRAKPAVSAPSLLLRVLFCAVCGEPAYKFVGGGRKHPRYRCRSMVFPKHCGNGTVAMAEWDAFCEERVLDLLGDAERLEKVWVAGSDSAVELAEVNAELMDLMSLIGSPAYRAGSPQREALDARIAALAARQEELEGLEARPSGWEWRETGQRFQDWWREQDTAAKNTWLRSMNVRLTFDVRGGLTRTIDFGELQEYEQHLRLGSVAERLHTGMS

SEQ ID NO: 8527 - protein, 500 aa, synthetic construct
MRALVVIRLSRVTDATTSPERQLESCQQHCAQRGWDVVGVAEDLDVSGAVDPFDRKRRPNLARWLAFEEQPFDVIVAYRVDRLTRSIRHLQQLVHWAEDHKKLVVSATEAHFDTTTPFAAVVIALMGTVAQMELEAIKERNRSAAHFNIRAGKYRGSLPPWGYLPTRVDGEWRLVPDPVQRERILEVYHRVVDNHEPLHLVAHDLNRRGVLSPKDYFAQLQGREPQGRKWSATALKRSMISEAMLGYATLNGKIVRDDDGAPLVRAEPILTREQLEALRAELVKTSRAKPAVSTPSLLLRVLFCAVCGEPAYKFAGGGRKHPRYRCRSMGFPKHCGNGTVVMAEWDAFCEEQVLDLLGDAERLEKVWVAGSDSAVELAEVNAGLVDLTSLIGSPAYRAGSPQREALDARIAALAARQEELEGLGARPSGWEWRETGQRFGDWWREQDTAAKNTWLRSMNVRLTFDVRGGLTRTIDFGDLQEYEKHLRLGSVVERLHTGMS

SEQ ID NO: 8528 - protein, 500 aa, synthetic construct
MRALVVIRLSRVTDATTSPERQLESCQQLCAQRGWDVVGVAEDLDVSGAVDPFDRKRRPNLARWLAFEEQPFDVIVAYRVDRLTRSTRHLQQLVHWAEDHKKLVVSATEAHFDTTTPFAAVVIALMGTVAQMELEAIKERNRSAAHFNIRAGKYRGSLPPWGYLPTRVDGEWRLVPDPVQRERILEVYHRVVDNHEPLHLVAHDLNRRGVLSPKDYFAQLRGREPQGRKWSATALKRSMISEAMLGYATLNGKTVRDDDGAPLVRAEPILTREQLEALRAELVKASRAKPAVSTPSLLLRVLFCAVCGEPAYKFAGGGRKHPRYRCRSMGLPKHCGNGTVVMAEWDAFCEEQVLDLLGDAERLERVWVAGSDSAVELAEVNAELVDLTSLIGSPAYRAGSPQREALDARIAALAARQEELEGLEARPSGWEWRETGQRFGDWWREQDTAVKNTWLRSMNVRLTFDVRGGLTRTIDFGDLQEYEQHLRSGSVVERLHTGMS

SEQ ID NO: 8529 - protein, 500 aa, synthetic construct
MRALVVIRLSRVTDATTSPERQLESCQQLCAQRGWDVVGVAEDLDVSGAVDPFDRKRRPNLARWLAFEEQPFDVIVAYRVDRLTRSTRHLQQLVHWAEDHKKLVVSATEAHFDTTTPFAAVVVALMGTVAQMELEAIKERNRSAAHFNIRAGKYRGSLPPWGYLPTRVDGEWRLVPDPVQRERILEVYHRVVDNHEPLHWVAHDLNRRGVLSPKDYFAQLQGREPQGRKWSATALKRSMISETMLGYATLNGKIVRDDDGAPLVRAEPILTREQLGALRAVLVKTSQAKPAVSTPSLLLRVLFCAVCGEPAYKFAGGGRKHPRYRCRSMGFPKHCGNGTVAMAEWDAFCEEQVLDLLGDAERLEKVWVAGSDSAVELAEVNAELVDLTSLIGSPAYRAGSPQREALDARIAALAARQEELEGLEARPSGWGWRETGQRFGDWWRVQDTAAKNTWLRSMNVRLAFDVRGGLTRTIDFGDLQEYEQHLRLGSVAKRLHTGMS

SEQ ID NO: 8530 - protein, 500 aa, synthetic construct
MRALVVIRLSRVTDATTSPERQLESCQQLCAQRGWDVVGVAEDLDVSGAVDPFDRKRRPNLARWLAFEEQPFDVIVAYRVDRLTRSTRHLQQLVHWAEDHKKLVASATEAHFDTTTPFAAVVIALMGTVAQMELEAIKERIRSAVRFNIRAGKYRGSLPPWGYLPTRVDGEWRLVPDPVQRECILEVYHRVVDNHEPLHLVAHDLNRRGVLSPKDYFAQLQGREPRGRKWSATALRRSMTSVAMLGYATLNGKTVRDGNGTPLVRAEPILTREQQEALRAEFVKTSRAKPAVSTPSLLLRVLFCAVCGEPAYKFVGGGRKHPRYRCRSMGFPEHCGNGTVVMAEWDAFCEEQVLNLLGDAERLEKVWVAGSDSAVELAEVNAELVDLTSLIGSPAYRAGSPQREALDARIAALAARQEELEGLKARPSGWEWRETGQRFRDWWREQDTAAKNTWLRSMNVRLTFDVRGGLTRTIDFGDLREYVQHLRLGSVAERLHTGMS

SEQ ID NO: 8531 - protein, 500 aa, synthetic construct
MRALVVIRLSRVTDATTSPERQLESCQQLCAQRGWDVVGVAEDLDVSGAVDPFDRKRRPNLARWLAFEEQPFDVIVAYRVDRLTRSVRHLQQLVHWAEDHKKLVVSATEAHFDTTTPFAAVVIALMGTVAQMELEAIKERNRSAAHFNIRAGKYRGSLPPWGYLPARVDGEWRLVPDPVQRERILEVYHRVVDNHEPLHLVAHGLNRRGVLSPKDYFAQLRGREPQGRKWSATALKRSIISEAMLGYATLNGRTVRDDDGAPLVRAEPILTREQLEALRAVLVKTSLAKPAVSTPSLLLRVLFCAVCGEPAYKFAGGGRKHPRYRCRSMGFPKHCGNGTVVMNEWDAFCEEQVLDLLGDAKRLEKVWVAGSDSAVELAEVNAELVDLTSLIGSPAYRAGSPQREALDARIAALAARQDELEGLEARPSGWEWRETGQRFGDWWREQDTAAKNTWLRSMNVRLTFDVRGGLTRTIDFGDLQEYEQHLRLGSVVERLHTGMS

SEQ ID NO: 8532 - protein, 500 aa, synthetic construct
MRALVVIRLSRVTDATTSPERQLESCQQLCAQRGWDVVGVAEDLDVSGTVDPFDRKRRPNLARWLAFEEQPFDVIVAYRVDRLTRSTRHLQQLVHWAEDHKKLVVSATEPHFDTTTPFAAVVIALMGTVAQMELEAIKERNRSAAHFNIRAGKYRGSLPPWGYLPTRVDGEWRLVPDPVQRERILEVYHRVVDNHEPLHLVAHDLNRRGVLSPKDYFAQLQGREPQGRKWSATALKRSMISGAMLGYATLNGKTVRDDDGAPLVRAEPILTREQLEALRAELVKTSRAKPVVSIPSLLLRVLFCAVCGEPAYKFAGGGRKHPRYRCRSMGFPKHCGNGTVTMAEWDAFCEEQVLNLLGDAERLEKVWVASSDSAVELAEVNAELVDLTSLIGSPAYRAGSPQREALDARIAALAARQEELEGLGARPSGWEWRETGQRFGDWWHEQDTAAKNTWLRTMNVRLTFDVRGGLTRTIDFGDLQEYEQHLRLNSVVERLHTGMS

SEQ ID NO: 8533 - protein, 500 aa, synthetic construct
MRALVVIRLSRVTDATTSPERQLESCQQLCAQRGWDVVGVAEDLDVSGAVDPFDRKRRPNLARWLAFEEQPFDVIVAYRVDRLTRSTRHLQQLVRWAEDHKKLVVSATEAHFDTTTPFAAVVIALMGTVAQMELEAIKERIRSAVHFNIRAGKYRGSLPPWGYLPTRVDGEWRLVPDPVQRERILEVYHRVVDNHEPLHLVAHDLNRRGVLSPKDYFAQLQGREPQGRKWSATALKRSMTSKAMLGYATLNGKTVRDDDGAPLVRAEPILTREQQEALRAELVKTSRAKPAVSTPSLLLRVLFCAVCGEPAYKFVGGGRKHPRYRCRSMGFPEHCGNGTVVMAEWDAFCEEQVLDLLGGVERLEKVWVAGSDSAVELAEVNAELVDLTNLIGSPAYRAGSPQREALDARIAALAARQEELEGLEARPSGWEWRETGQRFGDWWREQDTAAKNTWLRSVNVRLTFDVRGGLTRTIDFGDLQEYEQHLRLGSVVECLHTGMS

SEQ ID NO: 8534 - protein, 500 aa, synthetic construct
MRALVVIRLSRVTDATTSPERQLESCRQLCAQRGWDVVGVAEDLDVSGAVDPFDRKRRPNLARWLASEEQPFDVIVAYRVDRLTRSTRHLQQLVHWAENHKKLVVSATEAHFDTTTPFAAVVIALMGTVAQMELEAIKERIRSATHFNIRAGKYRGSLPPWGYLPTRVDGEWRLVPDPVQRERILEVYHRVVDNHEPLHLVAHDLNRRGVLSPKDYFAQLRGREPQGREWSATALKRSMISVAMLGYATLNGKIVRGDDGAPLVRAEPILTREQQEALRAELAKTSRATPAVSTPSLLLRVLFCAVCGEPAYKFVGGGRKHPRYRCRSMGFPKHCGNGTVVMTEWDAFCEEQVLNLLGDAERLEKVWVAGSDSAVELAEVNAELVDLTSLIGSPAYRAGSPQREALDARIAALAARQEELEGLEARPSGWEWRGTGQRLGDWWREQDTAAKNTWLRSMNVRLTFDVRGGLTRTIDFGELQEYEQHLRLGSVAERLHTGMS

SEQ ID NO: 8535 - protein, 500 aa, synthetic construct
MRALVVIRLSRVTDATTSPERQLESCQQLCAQRGWDVVGVAEDLDVSGAVDPFDRKRRPNLARWLAFEEQPFDAIVAYRVDRLARSIRHLQQLVHWAEDHKKLVVSATEAHFDTTTPFAAVVIALMGTVAQMELEAIKERNRSAAHFNIRAGKYRGSLPPWGYLPTRVDGEWRLVPDPVQRERILEVYHRVVDNHEPLHLVAHDLNRRGVLSPKDYFAQLQGREPQGRKWSATALKRSMISEAMLGYATLNGKIVRDDDGAPLVRAEPILTREQLEALRAELVKTSRAKPAVSTPSLLLRVLFCAVCGESAYKFAGGGRKHPRYRCRSMGFPKHCGNGTVVMAEWDAFCEEQVLNLLGDAERLEKVWVVGSDSAVELAEVNAELVDLTSLIGSPAYRAGSPQREALDARIAALAARQEELEGLEARPPGWEWRETGQRFGDWWREQDTAAKNTWLRSMNVRLTFDVRGGLTRTIDFGDLQEYEQHLRLGSVVERLHTGMS

SEQ ID NO: 8536 - protein, 500 aa, synthetic construct
MRALVVIRLSRVTDATTSPERQLESCQQLCAQRGWDVVGVAEDLDVSGAVDPFDRKRRPNLARWLAFEEQPFDVIVAYRVDRLTRSTRHLQQLVRWAEDHKKLVVSATEAHFDTTTPFAAVVIALMGTVAQMELEAIKERIRSATHFNIRAGKYRGSLPPWGYLPTRVEGEWRLVPDPVQRERILEVYHRVVDNHEPLHLVAYDLNRRGVLSPKDYFAQLRGREPRGRKWSATALRRSMTSEAMLGYATLNGKTVRDDDGAPLVRAEPILTREQLEALRAELAKTSRAKPAVSTPSLLLRVLFCAVCGEPAYKFVGGGRKHPRYRCRSMGFPKHCGNGTVVMAEWDAFCEEQVLDLLGDAERLEKVWVAGSDSAVELAEVNAELVDLTSLIGSQVYRAGSPQREALDARIAALAARQEELEGLEAHPSGWVWRGTGQRFGDWWREQDTAAKNTWLRSMNVRLTFDARGGLTRTIDFGDLLEYEQHLRLGSVTERLYTGMS

SEQ ID NO: 8537 - protein, 500 aa, synthetic construct
MRALVVIRLSRVTDATTSPERQLESCQQLCAQRGWDVVGVAEDLDVSGAVDPFDRKRRPNLARWLAFEEQPFDVIVAYRVDRLTRSVRHLQRLVLWAEDHRKLVVSATEAHFDTTTPFAAVVIALMGTVAQMELEAIKERIRSAAHFNIRAGKYRGSLPPWGYLPARVDGEWRLVPDPVQRERILEVYHRVVDNHEPLHLVAHDLNRRGVLSPKDYFAQLQGREPQGRKWSATALKRSMISGAVLGYATLNGKIVRDDDGAPLVRAEPILTREQQEALRAELAKTSRAKPAVPTPSLLLRVLFCAVCGEPAYKFVGGGRKHPRYRCRSMGFPKHCGNGTVVMTEWDAFCEEQVLGLLGDAERLEKVWVAGSDSTVELAEVNAELVDLTSLIGSPAYRAGSPQREALDARIAALAARQEELEGLEARPSGWEWRETGQRFGDWWREQDTAAKNTWLRLMNVRLTFDVRGGLTRTIDFGDLQEYERHLRLGSVAERLRTGMS

SEQ ID NO: 8538 - protein, 500 aa, synthetic construct
MRALVVIRLSRVTEATTSPERQLESCQQLCAQRGWDVVGVAEDLDVSGAADPFDRKRRPNLARWLAFEEQPFDVIVAYRVDRLTRSTRHLQQLVHWAEDHKKLVVSATEAHFDTTTPFAAVVIALMGTVAQMELEAIKERYRSAAHFNIRAGKYRGSLPPWGYLPTRVDGEWRLVPDPVQRERILEVYHRVVDNHEPLHLVALDLNRRGVLSPKDYFAQLRGREPRGRKWSATALRRSMTSEAMLGYATLNGKTVRDDDGAPLVRAEPILTREQQEALRAELDRTSRAKPAVSTPSLLLRVLFCAVCGEPAYKFVGGGRKHPRYRCRSMGFPKHCGNGTVVVTEWDAFCEEQVLDLLGDTERLEKVWVAGSDSAVELAEVNAELVDLTSLIGSPAYRAGSPQREALDARIAALAARQEELEGLEARPSGWEWRETGQRFRDWWREQDTAAKNTWLRLMNVRLTFDVRGGLTRTIDFGDLQEYEQHLRLGSVVERLHAGMP

SEQ ID NO: 8539 - protein, 500 aa, synthetic construct
MRALVVIRLSRVTDATTSPERQLESCQQLCAQRGWDVVGVAEDLDVSGAVDPFDRKRRPNLARWLAFEEQPFDVIVAYRVDRLTRSTRYLQQLVRWAEDHKKLVVSATEAHFDTTTPFAAVVIALMGTVAQMELEAIKERIRSAAHFNIRAGKYRGSLPPWGYLPTRVDGEWRLVPDPVQRERILEVYRRVVDNHEPLHLVAYDLNRRGVLSPKDYFAQLQGREPQGRKWSATALKRSMTSVAMLGYATLNGKTVRDDDGAPLVRAEPILTREQLEALRAELVKTSRAKPAVSTPSLLLRVLFCAVCGEPAYKFVGGGRKHPRYRCRSMGFPKHCGNGTVAMAEWDAFCEEQVLNLLGDAERLEKVWVVGSDSAVELAEVNAELVDLTSLIGSPAYCAGSPQREALDARIAALAARQEELEGLEARPSGWEWRGTGQRLGDWWREQDTAAKNTWLRSMNVRLTFDVRGGLTRTIDFGDLQGYEQHLRLGSVAERLHTGMP

SEQ ID NO: 8540 - protein, 500 aa, synthetic construct
MRALVVIRLSRVTDATTSPERQLESCQQLCAQRGWDVVGVAEDLDVSGAVDPFDRKRRPNLARWLAFEQQPFDVIVAYRVDRLTRSTRHLQQLVHWAEDHKKLVVSATEAHFDTTTPFAAVVIALMGTVAQMELEAIKERIRSAAHFNIRAGKYRGSLPPWGYLPTRVDGEWRLVPDPVQRERILEVYHRVVNNHEPLHLVAHDLNRRGVLSPKDYFAQLQGREPQGRKWSATALKRSMTSGAMLGYATLSGKTVRDDDGAPLVRAEPILTREQQEALRAELAKTSRAKPAVSTPSLLLRVLFCAVCGEPAYKFVGGGRKHPRYRCRSMGFPKHCGNGTVAMAEWDAFCEEQVLDLLGDAERLEKVWVAGSDSAVELAEVNAELVDLTSLIGSPAYRAGSPQREALDTRIAALAARQGELEGLEARPSGWEWRGTGQRFGDWWREQDTAAKNTWLRSMNVRLTFDVRGGLTRTIDFGDLQEYEQHLRLGSVAERLHTGMS

SEQ ID NO: 8541 - protein, 500 aa, synthetic construct
MRALVVIRLSRVTDATTSPERQLESCQQLCAQRGWDVVGVAEDLDVSGAVDPFDRKRRPNLARWLAFEEQPFDVIVAYRVDRLTRSTRHLQRLVHWAEDHKKLVVSATEAHFDTTTPFAAVVIALMGTVAQMELEAIKERSRSAAHFNIRAGKYRGSLPPWGYLPTRVDGEWRLVPDPVQRERILEVHRRVVDNHEPLHLVAHDLNRRGVLSPRDYFAQLQGREPQGRKWSATALKRSMISEAMLGYATLNGKTVRNDDGAPLVRAEPILTREQLEALRAELVKTSRAKPAVSTPSLLLRVLFCAVCGEPAYKFAGGGRKHPRYRCRSMGSPKHCGNGTVAMAEWDAFCEEQVLDLLGDAERLERVWVAGSDSAVELAEVNAELVDLTSLISSPAYRAGSPQREALDARIAALAARQEELEGLEARPSGWEWRGTGQRFEDWWREQDTAAKNAWLRSMNVRLTFDVRGGLTRTIDFGDLQEYEQHLRLGSVVERLHTGMS

SEQ ID NO: 8542 - protein, 500 aa, synthetic construct
MRALVVIRLSRVTDATTSPERQLESCQQLCAQRGWVVVGVAEDLDVSGAVDPFDRKRRPNLARWLAFEEQPFDVIVAYRVDRLTRSIRHLQQLVHWAEDHKKLVVSATEAHFDTTTPFAAVVIALMGTVAQMELEAIKERIRSAVRFNIRAGKYRGSLPPWGYLPARVDGEWRLVPDPVQRERILEVYHRVVDNHEPLHLVAHDLNRRGVLSPKDYFAQLRGREPQGRKWSATALKRSMTSVAMLGYATLNGKIVRDDDGAPLVRAEPILTREQLEALRAELVRTSRAKPAVSTPSLLLRVLFCAVCGEPAYKFVGGGRKHPRYRCRSMGFPEHCGNGTVVMAEWDAFCEEQVLDLLGDAERLEKVWVAGSDSAVELAEVNAELVDLMGLIGSPAYRAGSPQREALDARIAALAARQGELEGLEARPSGWEWRETGQRFGDWWREQDTAAKNTWLRSMNVRLTFDVRGGLSRTIDFGDLQEYEQHLRLGSVVERLHTGMS

SEQ ID NO: 8543 - protein, 500 aa, synthetic construct
MRALVVIRLSRVTDATTSPERQLESCQQLCAQRGWDVAGVAEDLDVSGAVDPFDRKRRPNLARWLAFEEQPFDVIVAYRVDRLTRSVRHLQQLVHWAEDHKKLVVSATEAHFDTTTPFAAVVIALMGTVAQMELEAIKERIRSAVHFNIRAGKYRGSLPPWGYLPTRVDGEWRLVPDPVQRERILEVYHRVVDNHEPLHLVAHDLNRRGILSPKDYFAQLRGREPQGREWSATALKRSMTSVAMLGYATLNGKTVRSDDGAPLVRAEPILTREQLEALRAELAKTSRAKPAVSTPSLLLRVLFCAVCGEPAYKFTGGGRKHPRYRCRSMGFPKHCGNGTVVMAEWDAFCEEQVLNLLGDAERLEKVWVAGSDSAVELAEVNAELVDLTSLISSPAYRAGSPQREALDARVAALAARQEELEGLEARPSGWVWRVTGQRFGDWWRVQDTAAKNTWLRSMNVRLTFDVRGGLTRTIDFGDLQEYEQHLRLGSAVERLHTGMS

SEQ ID NO: 8544 - protein, 500 aa, synthetic construct
MRALVVIRLSRVTDATTSPERQLESCQQLCAQRGWDVVGVAEDLDVSGAVDPFDCKRRPNLARWLAFEELPFDVIVAYRVDRLTRSTRHLQQLVRWAEDHKKLVVSATEAHFDTTTPFAAVVIALMGTVAQMELEAIKERIRSAVRFNISAGKYRGSLPPWGYLPTRVDGEWRLVPDPVQRERILEVYHRVVDNHEPLHLVAYDLNRRGVLSPKDYFAQLQGREPQGRKWSATALRRSMTSEAMLGYATLNGKIVRDDDGAPLVRAEPILTREQQEALRAELAKTSRAKPAVSTPSLLLRVLFCAVCGEPAYKFVGGGRRHPRYRCRSIGFPKHCGNGTVVMAEWDAFCEEQVLNLLGDAERLEKVWVAGSDSTVELAEVNAELVDLTSLIGSPAYRAGSPQREALDARIAALATRQEELEGLEARPSGWEWRETGQRFGDWWREQDTAAKNTWLRSMNVRLTFDVRGGLTRTIDFGDLQEYEQHLRLGSVVERLHTGMS

SEQ ID NO: 8545 - protein, 500 aa, synthetic construct
MRALVVIRLSRVTDATTSPERQLESCQQLCAQRGWNVVGVAEDLDVSGAVDPFDRKRRPNLARWLAFEEQPFDVIVAYRVDRLTRSTRHLQQLVRWAEDHKKLVVSATEAHFDTTTPFAAVVIALMGTVAQMELEAIKERIRSAAHFNIRAGKYRGSLPPWGYLPTRVDGEWRLAPDPVQRERILEVYRRVVDNHEPLHLVAHDLNRRGVLSPKDYFAQLRGREPRGRKWSATALRRSMTSGAMLGYATLNGKTVRDDDGAPLVRAEPILTREQLEVLRAELAKTSRAKPAVSTPSLLLRVLFCAVCGEPAYKFVGGGRKHPRYRCRSMGFPEHCGNGTVVMAEWDAFCEEQVLDLLGDAERLEKVWVTGSDSAVELAEVNAELVDLTSLIGSPAYRAGSPQREALDARIAALAARQEELEGLEARPSGWGWRETGQRFGDWWRAQDTAAKNTWLRSMNVRLTFDVRGGLTRTIDFGELQEYEQHLRLGSVAERLHTGMS

SEQ ID NO: 8546 - protein, 500 aa, synthetic construct
MRALVVIRLSRVTDATTSPERQLESCQQLCAQRGWDVVGVAEDLDVSGAVDPFDRKRRPNLARWLAFEQQPFDVIVAYRVDRLTRSVRHLQQLVRWAEDHKKLVVSATEAHFDTTTPFAAVVIALMGTVAQMELEAIKERIRSAVHFNIRAGKYRGSLPPWGYLPTRVDGAWRLVPDPVQRERILEVYHRVVDNHEPLHLVAHDLNRRGVLSPKDYFAQLQGREPQGRKWSATALKRSMTSEAMLGYATLNGKTVRGDDGAPLVRAEPILTREQLEALRAELVKTSRAKPAVPTPSLLLRVLFCAVCGEPAYKFVGGGRKHPRYRCRSMGLPKHCGNGTVVMAEWDVFCEEQVLNLLGDAERLEKAWVAGSDSAVELAEVNAELVDLTSLIGSPAYRAGSPQREALDARIAALAARQEELEGLEAHPSGWEWRETGQRFGDWWREQDTAAKNTWLRSMNVRLTFDVRGGLTRTIDLGDLQEYEQHLRLGSVVERLHTGMS

SEQ ID NO: 8547 - protein, 500 aa, synthetic construct
MRALVVIRLSRVTDATTSPERQLESCQQLCAQRGWSVVGVAKDLDVSGAVDPFDRKRRPNLARWLAFEEQPFDVIVAYRVDRLTRSTRHLQQLVHWAEDHKKLVVSATEAHFDTTTPFAAVVIALMGTVAQMELEAIKERIRSAAHFNIRAGKYRGSLPPWGYLPTRVDGEWRLAPDPVQRERILEVYHRVVDNHEPLHLVAHDLNRRGVLSPKDYFAQLQGREPQGRKWSATALKRSMISVAMLGYATLNGKTVRDDDGAPLVRAEPILTREQLEALRAELIKTSRAKPAVSTPSLLLRVLFCAVCGEPAYKFVGGGRKHPRYRCRSMGFPKHCGNGTVVMAEWDAFCEEQVLDLLGDAERLEKVWVAGSDSAVELAEVNAELVDLTSLIGSPAYRAGSPQREALDARIAALAARQEELEDLEARPSGWEWRETGQRFGDWWREQDTAAKNTWLRSMNVRLTFDVRGGLTRTIDFGDLLEYEQHLRLGSVVERLHTGMS

SEQ ID NO: 8548 - protein, 500 aa, synthetic construct
MRALVVIRLSRVTDATTSPERQLESCQQLCAQRGWDVVGVAEDLDVSGAVDPFDRKRRPNLARWLAFEEQPFDVIVAYRVDRLTRSTRHLQQLVHWAEDHKKLVVSATEAHFDTTTPFAAVVIALMGTVAQMELEAIKERNRSAAHFNIRAGKYRGSLPPWGYLPARVDGEWRLVPDPVQRERILEVYHRVVDNHEPLHLVAHDLNRRGVLSPKDYFAQLQGREPQGRKWSATALKRSMISEAMLGYATLNGKTVRDDDGAPLVRAEPILTREQLEVLRAELAKTSRAKPAVSTPSLLLRVLFCAVCGEPAYKFAGGGRKHPRYRCRSMGFPKHCGNGTVVLAEWDAFCEEQVLNLLGDAERLEKVWVAGSDSAVELAEVNAELVDLTSLIGSPAYRAGSPQREALDARIAALAARQEELEGLEARPSGWEWRETGQRFGDWWREQDTAAKNTWLRSMNVRLTFDVCGGLTRTIDFGDLQEYEQHLRLGSVVERLHTGMS

SEQ ID NO: 8549 - protein, 500 aa, synthetic construct
MRALVVIRLSRVTDATTSPERQLESCQQLCAQRGWDVVGVAEDLDVSGAVDPFDCKRRPNLARWLAFEEQPFDVIVAYRVDRLTRSTRHLQQLVRWAEDHKKLVVSATEAHFDTTTPFAAVVIALMGTVAQMELEAIKERIRSAVRFNIRAGKYRGSLPPWGYLPTRVDGEWRLVPDPVQRERILEVYHRVVDNHEPLHLVAYDLNRRGVLSPKDYFAQLQGREPQGRKWSATALKRSMISVAMLGYATLNGKIVRDDDGAPLVRAEPILTREQQEALRAELAKTSRAKPAVSTPSLLLRVLFCAVCGEPAYKFVGGGRKHPRYRCRSMGFPKHCGNGTVVMAEWDAFCEEQVLNLLGDAERLEKVWVASSDSAVELAEVNAELVDLTSLIGSPAYRAGSPQREALDARIAALAARQEELEGLEARPSGWEWRKTGQRFGDWWREQDTAAKNTWLRSMNVRLTFDVRGGLTRTIDFGDLQEYERHLRLGGVAGRLHTGMS

SEQ ID NO: 8550 - protein, 500 aa, synthetic construct
MRALVVIRLSRVTDATTSPERQLESCQQLCAQRGWDVVGVAEDLDVSGAVDPFDRKRRPNLARWLAFEEQPFDVIVAYRVDRLTRSTRHLQQLVHWAEDHKKLVVSATEAHFDTTTPFAAVVIALMGTVAQMELEAIKERNRSAAHFNIRAGKYRGSLPPWGYLPTRVDGEWRLVPDPVQRERILEVYHRVVDNHEPLHWVAHDLNRRGVLSPKDYFAQLQGREPQGRKWSATALKRSMISEAMLGYATLNGKTVRDDDGAPLVRAEPILTREQLEALRAELVKTSRVKPAMSTPSLLLRVLFCAVCGEPAYKFAGGGRKHPRYRCRSMGFPKHCGNGTVAMAEWDAFCEEQVLDLLGDAERLEKVWVAGSDSAVELAEVNAELVDLTSSIGSPAYRAGSPQREALDARIAALAERQEELEGLEARPSGWEWRETGQRFGDWWREQDTAAKNTWLRSMNVRLTFDVRGGLTRTIDFGELQECEQHLRLGSVVERLHTGMS

SEQ ID NO: 8551 - protein, 500 aa, synthetic construct
MRALVVIRLSRVTDATTSPERQLESCQQLCAQRGWDVVGVAEDLDVSGAVDPFDRKRRPNLARWLAFEEQPFDVIVAYRVDRLTRSTRHLQQLVHWAEDHKKLVVSATEAHFDTTTPFASVVIALMGTVAQMELEAIKERNRSAAHFNIRAGKYRGSLPPWGYLPTRVDGEWRLVPDPVQRERILEVYHRVVDNHEPLHLVAHDLNRRGVLSPKDYFAQLRGREPQGRKWSATALKRSMISEAMLGYATLNGKTVRDDDGAPLVRAEPILTREQLEAVRAELVKTSRAKPAVSTPPLLLRVLFCAVCGGPAYKFAGGGRKHPRYRCRSMGFPKHCGNGTVVMAEWDAFCEEQVLNLLGDAERLEKVWVAGSDSAVELAEVNAELVDLTSLIGSPAYRAGSPQREALDARIAALAARQEELGGLGARPSGWEWRGTGQRFGDWWREQDTAAKNTWLRSMNVRLTFDVRGGLTRTIDFGDLQEHEQLLRLGSVVERLRTGMS

SEQ ID NO: 8552 - protein, 500 aa, synthetic construct
MRALVVIRLSRVTDATTSPERQLESCQQLCAQRGWDVVGVAEDLNVSGAVDPFDRKRRPNLARWLAFEEQPFDVVVAYRVDRLTRSIRHLQQLVHWAEDHKKLVVSATEAHFDTTTPFAAVVIALMGMVAQMELEAIKERNRSAAHFNIRAGKYRGSLPPWGYLPTRVDGEWRLVPDPVQRERILEVYHRVVDNHEPLHLVAHDLNRRGVLSPKDYFAQLQGREPQGRKWSATALKRSMISEAMLGYATLNGKTVRDDDGAPLVRAEPILTREQQEALRAELVKTSRVKPAVSTPSLLLRVLFCAVCGEPAYKFAGGGRKHPRYRCRSMGFPKHCGNGTVAMAEWDAFCEEQVLDLLGDAERLEKVWVAGSDSAVELAEVNAELVDLTSLIGSPAYRAGSPQREALDARIAALAARQEELEGLEARPSGWEWRETGQRFGDWWREQDTAAKNTWLRSMNVRLTFDVRGGLTRTIDFGDLQEYEQHLRLGSVVERLHTGMS

SEQ ID NO: 8553 - protein, 500 aa, synthetic construct
MRALVVIRLSRVTDATTSPERQLKSCQQLCAQRGWDVVGVAEDLDVSGAVDPFDRKRRPNLARWLAFEEQPFDAIVAYRVDRLTRSVRHLQQLVHWAEDHKKLVVSATEAHFDTTTPFAAVVIALMGTVAQMELEAIKERNRSAAHFNIRAGKYRGSLPPWGYLPTRVDGEWRLVPDPVQRERILEVYRRVVDNHEPLHLVAYDLNRRGVLSPKDYFAQLQGREPQGRKWSATALKRSMISEAMLGYATLNGKTVRDDDGAPLVRAEPILTREQLEALRAELVKTSRAKPAVSTPSLLLRVLFCAVCGEPAYKFAGGGRKHPRYRCRSMGFPKHCGNGTVVMAEWDAFCEEQVLDLLGDVERLEKVRVAGSDSAVELAEVNAELVDLTSLIGSPAYRAGSPQREALDARIAALAARQEELEGLGARPSGWEWRETGQRFGDWWREQDTAAKNTWLRSMNVRLTFDVRGGLTRTIDFGDLREYRRHLRLGSVVERLHTGMS

SEQ ID NO: 8554 - protein, 500 aa, synthetic construct
MRALVVIRLSRVTDATTSPERQLASCQQLCAQRGWDVVGVAEDLDVSGAVDPFDRKRRPNLARWLAFEEEPFDVIVAYRVDRLTRSTRHLQQLVRWAEDHKKLVVSATEAHFDTTTPFAAVVIALMGTVAQMELEAIKERIRSAAHFNIRAGKYRGSLPPWGYLPTRVDGEWRLVPDPVQRERILEVYHRVVDNHEPLHLVAYDLNRRGVLSPKDYFAQLRGREPRGRKWSATALRRSMTSEAMLGYATLNGKIVRDDDGAPLVRAEPILTREQQEALRAELVKTSRAKPAVSTPSLLLRVLFCAVCGEPAYKFVGGGRKHPRYRCRSMGFPEHCGNGTVVMAEWDAFCEEQVLDLLGDAERLEKVWSAGSDSAVELAEVNAELVDLTSLIGSPAYRAGSPQREALDARIAALAARQEELEGLEARPSGWEWRETGQRFGDWWREQDTAAKNTWLRSMNIRLTFDVRGGLTRTIDFGDLQEYEQHLRLGSVVERLHTGMS

SEQ ID NO: 8555 - protein, 500 aa, synthetic construct
MRALVVIRLSRVTDATTSPERQLESCQQLCAQRGWDVVGVAEDLDVSGAVDPFDRKRRPNLARWLASEEQPFDAIVAYRVDRLTRSVRHLQQLVHWAEDHKKLVVSATEAHFDTTTPFAAVVIALMGTVAQMELEAIKERIRSAAHFNIRAGKYRGSLPPWGYLPTRVDGEWRLAPDPVQRERILEVYHRVVDNHEPLHLVAHDLNRRGVLSPKDYFAQLRGREPQGRKWSATALKRSMTSEAMLGYATLNGKTVRDDDGAPLVRAEPILTREQQEALRAELARTSRAKPAVSTPSLLLRVLFCAVCGEPAYKFVGGGRKHPRYRCRSMGFPKHCGNGTVAMAEWDTFCEEQVLGLLGDVERLEKVWVAGSDSSVELAEVNAELVDLTSLIGSPAYRAGSPQRGALDARIAALAARQEELEGLEVRPSGWEWRGTGQRFGDWWRQQDTAAKNTWLRSMNVRLTFDVRGGLTRTVDFGDLQEYGQHLRLGSVTERLHTRMS

SEQ ID NO: 8556 - protein, 500 aa, synthetic construct
MRALVVIRLSRVTDATTSPERQLESCQQLCAQRGWDVVGVAEDLDVSGAVDPFDRKRRPNLARWLAFEEQPFDVIVAYRVDRLTRSVRHLQQLVHWAEDHRKLVVSATEAHFDMTTPFAAVVIALMGTVAQMELEAIKERNRSAAHFNIRAGKYRGSLPPWGYLPTRVDGEWRLVPDPVQRERILEVYHRVVDNHEPLHLVAHDLNRRGVLSPKDYFAQLRGREPQGRKWSATALKRSMISEAMLGYATLNGKTVRDDDGAPLVRAEPILTREQLEALRAELVKTPRAKPAVSTPSLLLRVLFCAVCGEPAYKFAGGGRKHPRYRCRSMGFPKHCGNGTVAMAEWDVFCEEQVLDLLGDAERLEKVWVAGSDSAVELAEVSAELVDLTSLIGSPAYRAGSPQRGALDARIAALVARQEELEGLEARPSGWEWREAGQRFGDWWREQDTAAKNTWLRSMNVRLTFDVRGGLTRTIDFGDLQEYEQHLRLDSVVERLHTGMS

SEQ ID NO: 8557 - protein, 500 aa, synthetic construct
MRALVVIRLSRVTDATTSPERQLESCQQLCAQRGWHVVGVAEDLDVSGAIDPFDRKRRPNLARWLAFEEQPFDVIVAYRVDRLTRSVRHLQRLVRWAEDHKKLVVSATEAHFDTTTPFAAVVIALMGTVAQMELEAIKERIRSAVRFNIRAGKYRGSLPPWGYLPTRVDGEWRLVPDPVQRERILEVYHRVVDNHEPLHLVAHDLNRRGVLSPKDYFARLRGREPRGRKWSATALKRSMISVAMLGYATLNGKTVRDDDGAPLVRAEPILTREQLEALRAELAKTSRAKPAVSTPSLLLRVLFCAVCGEPAYKFVGGGRKHPRYRCRSIGFPKHCGNGTVAMAEWDAFCEEQVLNLLGDAERLEKVWVAGSDSAVELAEVSAELVDLTSLIGSPAYRAGSPQREALDARIAALAARQEELEGLEARPSGWEWRGTGQRFGDWWREQDTAAKNTWLRSMNVRLTFDVRGGLTRTIDFGELQEYELHLRLGRVVERLHTGMS

SEQ ID NO: 8558 - protein, 500 aa, synthetic construct
MRALVVIRLSRVTDATTSPERQLESCQQLCAQRSWDVVGVAEDLGVSGAVDPFDRKRRPNLARWLAFEEQPFDVIVAYRVDRLTRSIRHLQQLVHWAEDHKKLVVSATEAHFDTTTPFAAVVIALMGTVAQMELEAIKERNRSAAHFNIRAGKYRGSLPPWGYLPTRVDGEWRLVPDPVQRERILEVYHRVVNNHEPLHLVAHDLNRRGVLSPKDYFAQLQGREPQGRKWSATALKRSMISEAMLGYATLNGKTVRDDGGAPLVRAEPILTRGQLEALRAELAKTSRAKPAVSTPSLLLRVLFCAVCGEPAYKFAGGGRKHPRYRCRSMGFPKHCGNGTVVMAEWDAFCEEQVLDLLGDAERLEKVWVAGSDSAVELAEVNAELVDLTSLIGSPAYRAGSPQREALDARIAALAVRQGELEGLGARPSGWEWRETGQRFGDWWREQDTAAKNAWLRSMNVRLTFDVRGGLTRTIDFGDLQEYEQHSRLGSVVERLHTGMS

SEQ ID NO: 8559 - protein, 500 aa, synthetic construct
MRALVVIRLSRVTDATTSPERQLESCQQLCAQRGWDVVGVAEDLDVSGAVDPFDRKRRPNLARWLAFEEQPFDVIVAYRVDRLTRSVRHLQQLVHWAEDHKKLVVSATEAHFDTTTPFAAVVTALMGTVAQMELEAIKERNRSAAHFNIRAGKYRGSLPPWGYLPARVDGEWRLVPDPVQRERILEVYHRVVDDHEPLHLVAHDLNRRGVLSPKDYFAQLQGREPQGRKWSATALKRSMTSEAMLGYATLSGKTVRNDDGAPLVRAEPILTREQLEALRAELVKTSRAKPAVSTPSLLLRVLFCAVCGEPAYKFAGGGRKYPRYRCRSMGFPKHCGNGTVAMAEWDAFCEEQVLSLLGNAERLEKVWVAGSDSAVELAEVNAELVDLTSLIGSPAYRAGSPQREALDARIAALAARQEELEGLGARPSGWEWRETGQRFGDWWREQDTAAKNTWLRSMNVRLTFDVRGGLTRTIDFGDLQEYEPHLRLGSVVERLHAGMP

SEQ ID NO: 8560 - protein, 500 aa, synthetic construct
MRALVVIRLSRVTDATTSPERQLESCQQLCAQRGWDIVGVAEDLNVSGAVDPFDRKRRPNLARWLAFEEQPFDAIVAYRVDRLTRSIRHLQQLVHWAEDHKKLVVSATEAHFDTTTPFAAVVIALMGTVAQMELEAIKERNRSAAHFNIRAGKYRGSLPPWGYLPTRVDGEWRLAPDPVQRERILEVYHRVVDNHEPLHLVAHVLNRRGVLSPKDYFAQLQGREPQGRKWSATALKRSMISGAMLGYATLNGKTVRDDDGAPLVRAEPILTREQLEALRAELAKTSRAKPAVSTPSLLLRVLFCAVCGEPAYKFAGGGRKHPRYRCRSMGFPKHCGNGTVAMAEWDAFCEEQVLDLLGDAERLEKVWVAGSDSALELAEVNAELVDLMSLIGSPAYRAGSPQREALDARIAALAARQEELEGLEARPSGWEWRETGQRFGDWWREQDTAAKNTWLRSMNVRLTFDVRGGLTRTIDFGDLQEYEQHLRLGSVVKRLHTGMS

SEQ ID NO: 8561 - protein, 500 aa, synthetic construct
MRALVVIRLSRVTDATTSPERQLKSCQQLCAQRGWDVVGVAEDLDVSGAVDPFDRKRRPNLARWLAFEEQPFDVIVAYRVDRLTRSIRHLQQLVHWAEDHKKLVVSATEAHFDTTTPFAAVVIALMGTVAQMELEAIKERIRSAVRFNIRAGKYRGSLPPWGYLPTRVDGEWRLVPDPVQRERILEVYHRVVDNHEPLHLVAHDLNRRGILSPKDYFAQLQGREPQGRKWSATALKRSMTSEAMLGYATLNGKTVRDDDGAPLVRAEPILTREQLEAVRAELAKTSRAKPAVSTPSLLLRVLFCAVCGEPAYKFVGGGRKHPRYRCRSMGFPEHCGNGTVAMAEWDAFCEEQVLDLLGDSERLEKVWVAGSDSAVELAEVNAELMDLTSLIGSPAYRAGSPQREALDARIAALAARQEELEGLEARPSGWGWRETGQRFGDWWREQDTAAKNTWLRSMNVRLAFDVRGGLTRTIDFGDLQEYKQHLRLGSVAERLHTGMS

SEQ ID NO: 8562 - protein, 500 aa, synthetic construct
MRALVVIRLSRVTDATTSPERQLESCQQLCAQRGWDVVGVAEDLDVSGAVGPFDRKRRPNLARWLAFEEQPFDVIVAYRVDRLTRSTRHLQQLVHWAEDHKKLVVSATEAHFDTTTPFAAVVIALMGTVAQMELEAIKERNRSAAHFNIRAGKYRGSLPPWGYLPTRVDGEWRLAPDPVQRERILEVYHRVVDNHEPLHLVAHDLNRRGVLSPKDYFAQLQGREPQGCEWSATALKRSMISEAMLGYATLNGKIVRDDDGAPLVRAEPILTREQLEALRAELAKTSRAKPAVSTPSLLLRVLFCAVCGEPAYKFAGGGRKHPRYRCRSIGFPKHCGNGTVVMAEWDAFCEEQVLNLLGDAERLEKVWVAGSDSAVELAEVNAELVDLTSLIGSPAYRAGSPQREALDARIAALAARQEELEGLGVRPSGWEWRETGQRFGDWWREQDTAAKNTWLRSMNVRLMFDARGRQTRTIDFGDLQEYEQHLRLGSVVERLHTGMP

SEQ ID NO: 8563 - protein, 500 aa, synthetic construct
MRALVVIRLSRVTDATTSPERQLESCQQLCAQRGWDVVGVAEDLDVSGAVDPFDRKRRPNLARWLAFEEQPFDVIVVYRVDRLTRSIRHLQQLVHWAEDHKKLVVSATEAHFDTTTPFAAVVIALMGTVAQMELEAIKERIRSAVHFNIRAGKYRGSLPPWGYLPARVDGEWRLVPDPVQRERILEVYHRVVDNHEPLHLVAHDLNRRGVLSPKDYFAQLRGREPRGRKWSATALKRSMISGAMLGYATLNGKTVRDDDGAPLVRAEPILTRGQLEALRAELAKASRAKPAVSTPSLLLRVLFCAVCGEPAYKFVGGGRKHPRYRCRSMGSPKHCGNGTVVMTEWDAFCEEQVLNLLGDAERLEKVWVAGSDSAVELAEVNAELVDLTSLIGSPAYRAGSPQREALDARIAALAARQEELESLEARPSGWEWRGTGQRFGDWWREQDTAAKNTWLRSMNIRLTFDVRGGLTRTIDFGDLQEYERHLRLGSVAERLRTGMS

SEQ ID NO: 8564 - protein, 500 aa, synthetic construct
MRALVVIRLSRVTDATTSPERQLESCQQLCAQRGWDVVGVAEDLDVSGAVDPFDRKRRPNLARWLAFEEQPFDVIVAYRVDRLTRSTRHLQQLVHWAEDHKKLVVSATEAHFDTTTPFAAVVIALMGTVAQMELEAIKERNRSAAHFNIRAGKYRGSLPPWGYLPTRVDGEWRLVPDPVQRERILEVYHRVVDNHEPLHLVAHDLNRRGVLSPKDYFAQLQGREPQGRKWSATALKRSMISEAMLGYATLNGKTVRDDDGAPLVRAEPILTREQLEALRAELVKTSRAKPAVSTPSLLLRVLFCAVCGEPAYKFAGGGRKHPRYRCRSMGFPKHCGNGTVVMAEWDAFCEEQVLGLLGDAERLEKVWVAGSDSAVELAEVNAELVDLTSLIGSPAYRTGSPQREALDARIAALAARQEELEGLEARPSGWEWRETGQRFGDWWREQDTAAKNTWLRSMNVRLTFDVRGGLTRTIDFGDLQEYEQHLRLSSVVERLHTGMS

SEQ ID NO: 8565 - protein, 500 aa, synthetic construct
MRALVVIRLSRVTDATTSPERQRESCQQLCAQRGWDVVGVAEDLDVSGAVDPFDRKRRPNLARWLAFEEQPFDVIVAYRVDRLTRSTRHLQQLVHWAEDHKKLVVSATEAHFDTTTPFAAVVIALMGTVAQMELEAIKERIRSAAHFNIRAGKYRGSLPPWGYLPTRVDGEWRLVPDPVQRERILEVYHRVVDNHEPLHLVAHDLNRRGVLSPKDYFAQLRGREPQGRKWSATALKRSMISGAMLGYATLNGKTVRDDDGAPLVRAEPILTREQLEALRAELAKTSRAKPAVSTPSLLLRVLFCAVCGEPAYKFVGGGRKHPRYRCRSMGFPKHCGNGTVVMTEWDAFCEEQVLDLLGDAERLEKVWVAGSDSAVELAEVNAELVDLTSLIGSPAYRAGSPQREALDARIAALAARQGELEGLEARPSGWEWRKTGQRFGDWWREQDTAAKNTWLRSMNIRLTFDVRGGLTRTIDFGDLQEYERHLRLGSVAERLHTGMS

SEQ ID NO: 8566 - protein, 500 aa, synthetic construct
MRALVVIRLSRVTDATTSPERQLESCRQLCAQRGWDVVGVAEDLDVSGAVDPFDRKRRPNLARWLAFEEQPFDVIVAYRVDRLTRSIRHLQQLVRWAEDHKKLVVSATEAHFDTTTPFAAVVIALMGTVAQMELEAIKERIRSAVHFNIRAGKYRGSLPPWGYLPTRVDGEWRLVPDPVQRERILEVYHRVVDNHEPLHLVAHDLNRRGVLSPKDYFAQLQGREPQGRKWSATALKRSMTSVAMLGYATLNGKTVRDDDGAPLVRAEPILTREQQEALRAELAKTSRAKPAVSTPSLLLRVLYCAVCGEPAYRFVGGGRKHPRYRCRSMGFPKHCGNGTVVMAEWDAFCEEQVLNLLGDAERLEKVWVAGSDSAAELAEVNAELVDLTSLIGSPAYRTGSPQREALDARIAALAARQGELEGLEARPSGWAWRETGQRFGDWWREQDTAAKNTWLRLMNVRLTFDVRGGLTRTIDFGELQGYEQHLRLGSVAERLHTGMS

SEQ ID NO: 8567 - protein, 500 aa, synthetic construct
MRALVVIRLSRVTDATTSPERQLESCQQLCAQRGWDVVGVAEDLDVSGAVDPFDRKRRPNLARWLAFEEQPFDVIVAYRVDRLTRSTRHLQQLVRWAEDHKKLVVSATEAHFDTTTPFAAVVIALMGTVAQMELEAIKERIRSAMHFNIRAGKYRGSLPPWGYLPTRVDGEWRLVPDPVQRERILEVYHRVVDNHEPLHLVAHDLNRRGVLSPKDYFAQLRGREPQGREWSATALKRSMTSEAMLGYATLNGKIVRDDNGAPLVRAEPILTREQLEALRAELAKTSRAKPAVSTPSLLLRVLFCAVCGEPAYKFVGGGRKHPRYRCRSMGFPEHCGNGTVVMTEWDAFCEEQVLDLLGDAERLEKVWVAGSDSAVELAEVNAELVDLTSLIGSPAYRAGSPQREALDARIAALAARQEELEGLEARPSGWEWRETGQRFGDWWREQDTAAKNTWLRSMNVRLTFDVRGGLTRTIDFGDLQEYEQLLRSGGVAERLRTGMS

SEQ ID NO: 8568 - protein, 500 aa, synthetic construct
MRALVVIRLSRVTDATTSPERQLESCQQLCAQRGWDVVGVAEDLDVSGAVDPFDRKRRPNLARWLAFEEQPFDVIVAYRVDRLTRSTRHLQQLVHWAEDHKKLVVSATEAHFDTTTPFAAVVIALMGTVAQMELEAIKERIRSAVRFNIRAGKYRGSLPPWGYLPTRVDGEWRLVPDPVQRERILEVYHRVVDNHEPLHLVAHDLNRRGVLSPKDYFAQLRGREPQGREWSATALKRSMTSKAMLGYATLNGKIVRDDDGAPLVRAEPILTREQQEALRAELTKTSRAKPAESTPSLLLRVLFCAVCGEPAYKFVGGGRKHPRYRCRSMGFPEHCGNGTVVMAEWDAFCEEQVLDLLGDAERLEKVWVAGSDSAVELAEVNAELVDLTSLIGSPAYRAGSPQREALDARIAALAARQEELEGLEARPSGWEWRETGQRFGDWWREQDTAAKNTWLRSMNVRLTFDVRGGLTRTIDFGELQEYKRHLRSGSVVERLHTGMS

SEQ ID NO: 8569 - protein, 500 aa, synthetic construct
MRALVVIRLSRVTEATTSPERQLESCQQLCAQRGWDVVGVAEDLDVSGAVDPFDRKRRPNLARWLAFEERPFDVILAYRVDRLTRSVRHLQQLVHWAEDHKKLVVSATEAHFDTTTPFAAVVIALMGTVAQMELEAIKERIRSATHYNIRAGKYRGSLPPWGYLPTRVDGEWRLVPDPVQRERILEVYRRVVDDHEPLHLVAYDLNRRGVLSPKDYFAQLQGREPQGRKWSATALKRSMISVAMLGYATLNGTIVRDDDGAPLVRAEPILTRGQLEALRAELAKTSRAKPAVSSPSLLLRVLFCAVCGEPAYKFTGGGRKHPRYRCRSMGFPKHCGNGTVAMAEWDAFCEEQVLDLLGDAERLEKVWVAGSDSAVELAEVNAELVDLTSLIGSPAYRAGSPQREALDARIAALAARQEELEGLEARPSGWEWRETGQRFRDWWREQDTAAKNTWLRSMNIRLTFDVRGGLTRTIDFGELQEYEQHLRLGSVAERLHTGMS

SEQ ID NO: 8570 - protein, 500 aa, synthetic construct
MRALIVIRLSRVTDATTSPERQLESCQQLCAQRGWDVVGVAEDLDVSGAVDPFDRKRRPNLARWLAFGEQPFDVIVAYRVDRLTRSTRHLQQLVHWAEDHKKLVVSATEAHFDTTTPFAAVVVALMGTVAQMELEAIKERNRSAAHFNIRAGKYRGSLPPWGYLPTRVDGEWRLAPDPVQRERILEVYHRVVDNHEPLHLVAHDLNRRGVLSPKDNFAQLQGREPQGRKWSATALKRSMISEAMLGYATLNGKTVRDDDGAPLVRAEPILTREQLEALRAELVKAPRAKPAVSTPSLLLRVLFCAVCGEPAYKFAGGGRKHPRYRCRSMGFPKHCGNGTVVMAEWDAFCEEQVLDLLGDAERLEKVWVASSDSAVELAEVNAELVDLTSLISSPAYRAGSPQREALDARIAALAARQEELEGLEARPSGWEWRGTGQRFGDWWREQDTAAKNTWLRSMNVRLTFDVRGGLTRTIDFGELQEYEQHLRLGSVVERLHTGMS

SEQ ID NO: 8571 - protein, 500 aa, synthetic construct
MRALVVIRLSRVTDATTSPERQLESCQQLCAQRGWDVVGVAEDLDVSGAVDPFNRKRRPNLARWLAFEERPFDVIVAYRVDRLTRSTRHLQQLVHWAEDHKKLVVSATEAHFDTTTPFAAVVIALMGTVAQMELEAIKERNRSAAHFNIRAGKYRGSLPPWGYLPTRVDGEWRLVPDPVQRERILEVYHRVVDNHEPLHLVAHDLNRRGVLSPKDYFAQLQGREPQGRKWSATALKRSMISETMLGYATLNGKTVRDDDGAPLVRAEPILTREQLEALRAELAKTSRAKPAVSTPSLLLRVLFCAVCGEPAYKLAGGGRKHPRYRCRSMGFPKHCGNGTVAMAEWDAFCEEQVLDLLGDAERLEKVWVAGSDSAVELAEVNAELVDLTSLIGSPAYRAGSPQREALDARIAALAARQEELKGLEARPSGWEWRETGQRFGDWWREQDTAAKNAWLRSMNVRLTFDARGGLTRTIDFGDLQEYEQHLRLGSVVERLHTGMS

SEQ ID NO: 8572 - protein, 500 aa, synthetic construct
MRALVVTRLSRVTDATTSPERQLESCQQLCAQRGWDVVGVAEDLDVSGAVDPFDRKRRPNLARWLAFEEQPFDVIVAYRVDRLTRSVRYLQQLVHWAEDHKKLVVSATEAHFDTTTPFAAVVIALMGTVAQMELEAIKERNRSAAHFNIRAGKYRGSLPPWGYLPTRVDGEWRLVPDPVQRERILEVYHRVVDNHEPLHLVAHDLNRRGVLSPKDYFAQLRGREPQGRKWSATALKRSMVSEAMLGYATLNGKTVRDDDGAPLVRAEPILTRGQLEALRAELVKTSRAKPAVSTPSLLLRVLFCAVCGEPAYKFAGGGRKHPRYRCRSMGFPKHCGNGTVVMAEWDAFCEEQVLDLLGDAERLEKVWVAGSDSAVELAEVNAELVDLTSLIGSPAYRAGSPQREALDARIAALAARQEELEGLEARPSGWEWRETGQRFGDWWREQDTAAKNIWLRSMNVRLTFDVRGGLTRTIDSGDLQEYEQHLRLGSVVERLHTGMS

SEQ ID NO: 8573 - protein, 500 aa, synthetic construct
MRALVVIRLSRVTDATTSPERQLESCQQLCAQRGWDVVGVAEDLDVSGAVDPFDRKRRPNLARWLAFEEQPFDVIVAYRVDRLTRSTRHLQQLVHWAEDHKKLVVSATEAHFDTTTPFAAVVIALMGTVAQMELEAIRERNRSTAHFNIRAGKYRGSLPPWGYLPTRVDGEWRLVPDPVQRERILEVYRRVVDNHEPLHLVAHDLNRRGVLSPKDYFAQLQGREPQGRKWSATALKRSMISEAMLGYATLNGKTVRDDDGAPLVRAEPILTREQLEALRAELAKTSRAKPAVSTPSLLLRVLFCAVCGEPAYKFAGGGRKHPRYRCRSMGFPKHCGNGTVAMAEWDAFCEEQVLDLLGDAERLEKVWVAGSDSAVELAEVNAELVDLTSLIGSPAYRAGSPQREALDARIAALAARQEELEGLEARPSGWEWRGTGQRFGDWWREQDAAAKNTWLRSMNVCLTFDVRGGLTRTIDFGDLQEYEQHLRLGSVVERLHTGMP

SEQ ID NO: 8574 - protein, 500 aa, synthetic construct
MRALVVIRLSRVTDATTSPERQLESCQQLCAQRGWDVVGVAEDLDVSGAVDPFDRKRRPSLARWLAFGEQPFDAIVAYRVDRLTRSVRHLQQLVHWAEDHKKLVVSATEAHFDTTTPFAAVVIALMGTVAQMELEAIKERNRSAAHFNIRAGKYRGSLPPWGYLPARVDGEWRLVPDPVQRERILEVYHRVVDNHEPLHLVAHDLNRRGVLSPKDYFAQLQGREPQGRKWSATALKRSMISVAMLGYATLNGKTVRDDDGAPLVRAEPILTREQLEALRAELAKTSRAKPAVSTPSLLLRVLFCAVCGEPAYKFAGGGRKHPRYRCRSMGFPKHCGNGTVVMAEWDAFCEEQVLDLLGDTERLEKVWVAGSDSAVELAEVSAELVDLTGLIGSPAYRAGSPQREALDARIAALAARQEELEGLEARPSGWEWRETGQRFGDWWREQDTAAKNAWLRSMNVRLTFDVRGGLTRTIDFGDLQECEQHLRLGSEVVRLRTGMS

SEQ ID NO: 8575 - protein, 500 aa, synthetic construct
MRALVVIRLSRVTDATTSPGRQLESCQQLCAQRDWDVVGVAEDLDVSGAVDPFDRKRRPNLARWLAFEEQPFDVIVAYRVDRLTRSTRHLQQLVRWAEDHKKLVVSATEAHFDTTTPFAAVIIALMGTVAQMELEAIKERYRSAAHFNIRAGKYRGSLPPWGYLPTRVEGEWRLAPDPVQRERILEVYHRVVHNHEPLHLVAHDLNRRGVLSPKDYFAQLQGREPQGRKWSATALKRSMTSVAMLGYATLNGKIVRDEDGAPLVRAEPILTREQQEALRAELVKTSRAKPAVSTPSLLLRVLFCAVCGEPAYKFTGGGRKHPRYRCRSMGFPEHCGNGTVVMAEWDAFCEEQVLDLLEDAERLEKVWVAGSDSAVELAEVNAELVDLTSLIGSPAYRAGSPQREALDARIAALAARQEELEDLEARPSGWGWRGTGQRFGDWWREQDTAAKNTWLRSMNIRLTFDVRGGLTRTIDFGDLQEYEQHLRLGSVVERLHTGTS

SEQ ID NO: 8576 - protein, 500 aa, synthetic construct
MRALVVIRLSRVTDATTSPERQLESCQQLCAQRGWDVVGVAEDLDVSGAVDPFDRKRRPNLARWLAFEEQPFDVIVAYRVDRLTRSTRHLQRLVLWAEEHKKLVVSATEAHFDTTTPFAAVVIALMGTVAQMELEAIKERSRSAAHFNIRAGKYRGSLPPWGYLPTRVDGEWRLVPDPVQRERILEVYHRVVDNHEPLHLVAHDLNRRGVLSPKDYFARLQGREPRGRKWSATALKRSMTSVAMLGYATLNGKTVRDDDGAPLVRAEPILTRGQQEALRAELAKTSRAKPAVSTPSLLLRVLFCAVCGEPAYKFAGGGRKHPRYRCRSMGFPEHCGNGTVVMAEWDAFCEKQVLDLLGDAERLEKVWVAGSDSVVELAEVNAELVDLTSLIGSPAYRAGSPQREALDTRIAALAARQEELEGLEARPSGWEWRETGQRFGDWWREQDTAAKNTWLRSMNVRLTFDVRGGLTRTIDFGDLQEYEQHLRSGSVVERLHTGMS

SEQ ID NO: 8577 - protein, 500 aa, synthetic construct
MRALVVIRLSRVTDATTSPERQLESCQQLCAQRGWDVVGVAEDLDVSGAVDPFDRKRRPNLARWLASEEQPFDVIVAYRVDRLTRSTRHLQQLVRWAEDHKKLVVSATEAHFDTTTPFAAVVIALMGTVAQMELEAIKERIRSAVHFNIRAGKYRGSLPPWGYLPTRVDGEWRLVPDPVQRERILEVYHRVVDNHEPLHLVAHDLNRRGVLSPKDYFAQLQGREPRGRKWSATALRRSMTSEAMLGYATLNGKTVRDDDGAPLVRAEPILTREQQEALRAELAKTSRAKPAVSTPSLLLRVLFCAVCGEPAYKFVGGGRKHSRYRCRSMGFPEHCGNGTVVMAEWDAFCEERVLDLLGDAERLEKVWVAGSDSAVELAEVNTELVDLTSLISSPAYRAGSPQREALDARIAALAARQEELEGLEARQSGWEWRETGQRFGDWWREQDTAAKNTWLRAMNVRLTFDVRGGLTRTIDFGDLREYEQHLRLGSEVERLHTGMS

SEQ ID NO: 8578 - protein, 500 aa, synthetic construct
MRALVVIRLSRVTDATTSPERQLESCQQLCAQRGWDVVGVAEDLDVSGAVDPFDRKRRPNLARWLAFEEQPFDVIVAYRVDRLTRSTRHLQQLVRWAEDHKKLVVSATEAHFDTTTPFAAVVIALMGTVAQMELEAIKERIRSAVRFNVRAGKYRGSLPPWGYLPTRVDGEWRLVPDPVQRERILEVYHRVVDNHEPLHLVAHDLNRRGVLSPKDYFAQLQGREPQGRKWSATALKRSMTSVAMLGYATLNGEIVRDDDGAPLVRAEPILTREQLEALRAELVKTSRAKPAVSTPSLLLRVLFCAVCGEPAYKFVGGGRKHPRYRCRSMGFPKHCGNGTVVMAEWDAFCEEQVLDLLGDAERLEKVWVAGSDSAVELAEVNAELVDLTSLIGSPAYRAGSPQREALDARIAALAARQEELEGLEARPSGWEWRETGQRFGDWWREQDTAAKNTWLRSMNVRLSFDVRGGLTRTIDFGDLQEYEQHLRLGSVVERSHTGMS

SEQ ID NO: 8579 - protein, 500 aa, synthetic construct
MRALVVIRLSRVTDATTSPKRQLESCQQLCAQRGWDVVGVAEDLDVSGAVDPFDRKRRPNLARWLAFEERPFDVIVAYRVDRLTRSTRHLQQLVRWAEDHKKLVVSATEAHFDTTTPFAAVVIALMGTVAQMELEAIKERSRSAARFNIRAGKYRGSLPPWGYLPTRVDGEWRLAPDPVQRERILEVYHRVVDNHEPLHLVAYDLNRRGVLSPKDYFAQLRGREPQGRRWSATALKRSMTSEAMLGYATLNGKTVRGDDGAPLVRAEPILTREQLEALRAELVKTSRAKPAVSTPSLLLRVLFCAVCGEPAYKFVGGGRKHPRYRCRSMGFPKHCGNGTVVMAEWDVFCEEQVLNLLGDAERLEKVWVAGSDSAVELAEVNAELVDLTSLIGSPAYRTGSPQREALDARIAALAARQEELEGLEARPSGWWWRGTGQRFGDWWREQDTAAKNTWLRSMNVRLTFDVRGGLTRTIDFGDLQEYEQHLRLGGVAERLHTGMS

SEQ ID NO: 8580 - protein, 500 aa, synthetic construct
MRALVVIRLSRVTDATTSPKRQLESCQQLCAQRGWDVVGVAEDLDVSGAVDPFDRKRRPNLARWLAFEEQPFDVIVAYRVDRLTRSTRHLQQLVRWAEDHKKLVVSATEAHFDTTTPFAAVVIALMGTVAQMELEAIKERIRSAAHFNIRAGKYRGSLPPWGYLPTRVDGEWRLVPDPVQRERILEVYHRVVDNHEPLHLVARDLNRRGVLSPKDYFAQLRGREPRGRKWSATALKRSMTSEAMLGYATLNGKIVRDDDGAPLVRAEPILTREQQEALRAELAKTSRAKPAVSTPSLLLRVLFCAVCGEPAYKFVGGGRKHPRYRCRSMGFPEHCGNGTVVMAEWDVFCEEQVLGLLGDAERLEKVWVAGSDSAVELAEVNAELVDLTSLIGSPAYRAGSPQREALDARIAALAARQEELEGLETRPSGWEWRETGQRFGDWWREQDTAAKNTWLRSMNVRLTFDVRGGLTRTIDFGDLQEYEQHLRLGRVVERLHTGMS

SEQ ID NO: 8581 - protein, 500 aa, synthetic construct
MRALVVIRLSRVTDATTSPERQLESCRQLCAQRGWDVVGVAEDLDVSGAVDPFDRRRRPNLARWLAFEEQPFDVIVAYRVDRLTRSTRHLQQLVRWAEDHKKLVVSATEAHFDTTTPFAAVVIALMGTVAQMELEAIKERIRSAVHFNIRAGKYRGSLPPWGYLPTRVDGEWRLAPDPVQRERILEVYHRVVDNHEPLHLVAHDLNQRGILSPKDYFAQLQGREPQGRKWSATALKRSMISVAMLGYATLSGKTVRGDDGAPLVRAEPILTREQQEALRAELAKTSRAKPAVSTPSLLLRVLFCAVCGEPAYKFVGGGRKHPRYRCRSMGFPKHCGNGTVVMAEWDAFCEEQVLDLLGDAERLEKVWVAGSDSAVELAEVNAELVDLAGLIGSPAYRAGSPQREALDARIAALAARQEELESLEARPSGWEWRETGQRFGDWWREQDTAAKNTWLRSMNVRLTFDVRGGLTRTIDFGDLQEYERHLRLGSVAERLRTGMS

SEQ ID NO: 8582 - protein, 500 aa, synthetic construct
MRALVVIRLSRVTDATTSPERQLGSCQQLCAQRGWDVVGVAEDLDVSGAVDPFDRKRRPNLARWLAFEEQPFDVIVAYRVDRLTRSVRHLQQLVHWAEDHKKLVVSATEAHFDTTTPFAAVVIALMGTVAQMELEAIKERNRSAAHFNIRAGKYRGSLPPWGYLPTRVDGEWRLVPDPVQRERILEVYHRVVGNHEPLHLVAHDLNQRGVLSPKDYFAQLQGREPQGRKWSATALKRSMISEAMLGYATLNGKTVRDDGGAPLVRAEPILTREQLEALRAELVKTSRAKPAVSTPSLLLRVLFCAVCGEPAYKFAGGGRKHPRYRCRSMGFPKHCGNGTVAMAEWDAFCEEQVLNLLGDAERLEEVWVAGSDSAVELAEVNAELVDLTSLISSPAYRAGSPQREALDARIAALAARQEELEGLEARPSGWEWRETGQRFGDWWREQDTAAKNTWLRSMNVRLTFDVRGGLTRTIDFGDLQEYEQHLRLGSVVERLHTGMS

SEQ ID NO: 8583 - protein, 500 aa, synthetic construct
MRALVVIRLSRVTDATTSPERQLESCQQLCAQRGWGVAGVAEDLDVSGAVDPFDRKRRPNLARWLAFEEQPFDVIVAYRVDRLTRSTRHLQQLVRWAEDHKKLVVSATEAHFDTTTPFAAVVIALMGTVAQMELEAIKERSRSAAHFNIRAGKYRGSLPPWGYLPARVDGEWRLVPDPVQRERILEVYHRVVDNHEPLHLVAYDLNRRGVLSPKDYFAQLRGREPQGRKWSATALKRSMISEAMLGYATLNGKIVRDDDGAPLVRAEPILTREQLEALRAELVKTSRAKPAVSTPSLLLRVLFCAVCGEPAYKFVGGGRKHPRYRCRSMGFPEHCGNGTVVMAEWDAFCEEQVLNLLGDAERLEKVWVAGSDSAVELAEVNAELVDLTSLIGSPAYRAGSPQREALDARIAALAARQEELEGLEARPSGWEWRETGQRLGDWWREQDTAAKNTWLRSMNVRLTFDVRGGLTRTIDFGDLQEYEQHLRLGSVAERLHTGMS

SEQ ID NO: 8584 - protein, 500 aa, synthetic construct
MRALVVIRLSRVTDATTSPERQLESCQQLCAQRGWNVVGVAEDLDVSGAVDPFDHKRRPNLARWLAFEEQPFDVIVAYRVDRLTRSTRHLQQLVRWAEDHKKLVVSATEAHFDTTTPFAAVVIALMGTVAQMELEAIRERIRSAAHFNIRAGKYRGSLPPWGYLPARVDGEWRLVPDPVQRERILEVYHRVVDNHEPLHLVAHDLNRRGVLSPKDYFAQLRGREPQGREWSATALKRSMTSVAMLGYATLNGKTVRDDDGAPLVRAEPILTREQQEALRAELVKTSRAKPAVSTPSLLLRVLFCAVCGEPAYKFIGGGRKHPRYRCRSMGFPKHCGNGTVVMAEWDAFCEEQVLNLLGDAERLEKVWVAGSDSAAELAEVNAELVDLTSLIGSPAYRAGSPQREALDARIAALAARQEELEGLETRPSGWEWRETGQRFGDWWREQDTAAKNAWLRSMNVRLTFDVRGGLTRTIDFGDLQEYERHLRLVSVVERLRTGMS

SEQ ID NO: 8585 - protein, 500 aa, synthetic construct
MRALVVIRLSRVTDATTSPERQLESCQQLCAQRGWDVVGVAEDLDVSGAVDPFDRKRRPNLARWLAFEEQPFDVIVAYRVDRLTRSTRHLQQLVHWAEDHKKLVVSATEAHFDTTTPFAAVVIALMGTVAQMELEAIKERNRSAAHFNIRAGKYRGSLPPWGYLPTRVDGEWRLVPDPVQRERILEVYHRVVDNHEPLHLVAHDLNRRGVLSPKDYFAQLQGREPRGRKWSATALKRSMVSEAMLGYATLNGKTVRDDDGAPLARAEPILTREQLEALRAVLVKTSRAKPAVPTPSLLLRVLFCAVCGEPAYKFAGGGRKHPRYRCRSMGFPKHCGNSTVAMAEWDAFCEEQVLDLLGDAERLERVWVAGLDSAVELAEVNAELVDLTSLIGSPAYRAGSPQREALDARIAALAARQEELEGLGARPSGWEWRGTGQRFGDWWHEQDTAAKNTWLRSMNVRLTFDVRVGLTRTIDFGDLQEYEQHLRLGSVVERSHTGMS

SEQ ID NO: 8586 - protein, 500 aa, synthetic construct
MRALVVIRLSRVTEATTSPERQLVSCQQLCAQRGWDVVGVAEDLDVSGAVDPFDRKRRPNLARWLAFEEQPFDAIVAYRVDRLTRSIRHLQQLVRWAEDHKKLVVSATEAHFDTTTPFAAVVIALMGTVAQMELEAIKERSRSAAHFNIRAGKYRGSLPPWGYLPTRVDGEWRLAPDPVQRERILEVYRRVVDNHEPLHLVAHDLNRRGVLSPKDYFAQLRGREPQGREWSATALKRSMISVAMLGYATLNGRTVRDDDGAPLVRAEPILTREQQEALRAELAKTSRAKPAVSTPSLLLRVLFCAVCGEPAYKFVGGGRKHPRYRCRSMGFPEHCGNGTVVMAEWDAFCEEQVLDLLGDAERLEKVWVAGSDSVVELAEVNAELVDLTSLIGSPAYRAGSPQREALDARIAALAARQEELEGLEARPSGWEWRGTGQRFGDWWREQDTAAKNTWLRSMSVRLTFDVRGGLTRTIDFGDLREYVQHLRSGSVAERLYTGMS

SEQ ID NO: 8587 - protein, 500 aa, synthetic construct
MRTLVVVRLSRVTDATTSPERQLESCQQLCAQRGWDVVGVAEDLDVSGAVDPFDRKRRPNLARWLAFEEQPFDAIVAYRVDRLTRSIRHLQQLVHWAEDHKKLVVSATEAHFDTTTPFAAVVIALMGTVAQMELEAIKERNRSAAHFNIRAGKYRGSLPPWGYLPTRVDGEWRLVPDPVQRERILEVYHRVVDNHEPLHLVAHDLNRRGVLSPKDYFAQLRGREPQGRKWSATALKRSMISEAMLGYATLNGKTVRDDGGAPLVRAEPILTRGQLEALRAELVKTSRAKPAVPTPSLLLRVLFCAVCGEPAYKFAGGGRKHPRYRCRSMGFPKHCGNGTVAMAEWDAFCEEQVLDLLGDAERLEKVWVAGSDSAVELAEVNAELVDLTSLIGSPAYRAGSPQREALDARIAALAARQEELEGLEARPSGWEWRGTGQCFGDWWREQDTAAKNTWLRSMNVRLTFDVRGGLTRTIDFGDLQEYEQHLRLGGVVERLHTGMS

SEQ ID NO: 8588 - protein, 500 aa, synthetic construct
MRALVVIRLSRVTDATTSPERQLESCQQLCAQRGWDVVGVAEDLDVSGAVDPFDRKRRPNLARWLAFEEQPFDVIVAYRVDRLTRSVRHLQQLVHWAEDHKKLVVSATEAHFDTTTPFAAVVIALMGTVAQMELEAIKERNRSAAHFNIRAGKYRGSLPPWGYLPTRVDGEWRLVPDPVQRERILEVYHRVVDNHEPLHLVAHDLNRRGVLSPKDYFAQLQGREPQGRKWSATALKRSMISEAMLGYGTLNGKIVRDDDGAPLVRAEPILTREQLEALRAELVKTSRAKPAVSTPSLLLRVLFCAVCGEPAYKFAGGGRKHPRYRCRSMGFPKHCGNGTVVMAEWDAFCEEQVLDLLGDAERLERVWVAGSDSAVELAEVSAELVDLTSLIGSPAYRAGSPQREALDARIAALAARQEELEGLEARPSGWGWRGTGQRFGDWWREQDTAAKNTWLRSMNVRLTFDVRGGLTRTIDFGDLQEYEQHLRLGSVVERLHTGMS

SEQ ID NO: 8589 - protein, 500 aa, synthetic construct
MRALVVIRLSRVTDATTSPERQLESCQQLCAQRGWDVVGVAEDLDVSGAVDPFDRKRRPNLARWLAFEEQPFDVIVAYRVDRLTRSTRHLQQLVRWAEDHKKLVVSATEAHFDTTTPFAAVVIALMGTVAQMELEAIKERIRSAVRFNIRAGKYRGSLPPWGYLPTRVEGEWRLVPDPVQRERILEVYHRVVDNHEPLHLVAHDLNRRGVLSPKDYFAQLQGREPRGRKWSATALRRSMISGAMLGYATLNGKTVRGDDGAPLVRAEPILTREQLEALRAELAKTSRAKPAVSTPSLLLRVLFCAVCGEPAYKFVGGGRKHPRYRCRSMGFPKHCGNGTVVMTEWDAFCEEQVLDLLGDAERLEKVWVAGSDSAIELAEVNAELVDLTSLIGSPAYRAGSPQRKALDARIAALAARQEELEGLEARPSGWEWRGTGQRFGDWWREQDTAAKNTWLRSMNVRLTFDVRGGQTRTIDFGDLQEYGQYLRLGSVVERLHTGMP

SEQ ID NO: 8590 - protein, 500 aa, synthetic construct
MRALVVIRLSRVTDATTSPERQLESCQQLCAQRGWDVVGVAEDLDVSGAVDPFDRKRRPNLARWLAFEEQPFDVIVAYRVDRLARSVRHLQQLVHWAEDHKKLVVSATEAHFDTTTPFAAVVIALMGTVAQMELEAIKERNRSAAHFNIRAGKYRGSLPPWGYLPTRVDGEWRLVPDPVQRERILEVYHRVVDDHEPLHWVAHDLNRRGVLSPKDYFAQLQGREPQGRKWSATALKRSMISEAMLGYATLNGKTVRDDDGAPLVRAEPILTREQLEALRAELVKTSRAKPAVSTPSLLLRVLFCAVCGEPAYKFAGGGRKYPRYRCRSMGFPKHCGNGTVAMAEWDAFCEEQVLDLLGDAERLEKVWVAGSDSAVELAEVNAELVNLTSLIGSPAYRAGSPQREALDARIAALAARQEELEGLEARPSGWEWRGTGQRFGDWWREQDTAAKNTWLRSMNVRLTFDVRGGLTRTIDFGGLQEYEQRLRLGSVVERLHTGMS

SEQ ID NO: 8591 - protein, 500 aa, synthetic construct
MRALVVIRLSRVTDATTSPERQLESCQRLCAQRGWDVVGVAEDLDVSGAVDPFDRKRRPNLARWLAFEEQPFDVIVAYRVDRLTRSVRHLQQLVHWAEDHKKLVVSATEAHFDTTTPFAAVVIALMGTVAQMELEAIKERIRSAAHFNIRAGKYRGSLPPWGYLPTRVDGEWRLVPDPVQRERILEVYHRVVDNHEPLHLVAHDLSRRGVLSPKDYFAQLRGREPQGRKWSATALKRSMISVAMLGYATLNGKIVRDDDGAPLVRAEPILTREQQEALRAELVKTSRAKPAVSTPSLLLRVLFCAVCGEPAYKFVGGGRKHPRYRCRSMGFPEHCGNGTVVMTEWDAFCEEQVLDLLGDAERLEKVWVAGSDSAVELAEVNAELVDLTSLIGSPAYRAGSPQREALDARIAALAARQEELEGLEARPSGWEWRGTGQRFGDWWRELDTAAKNTWLRSMNVRLTFDVRGGLTRTIDFGDLQEYEQHLRLGSVAERLHTGMS

SEQ ID NO: 8592 - protein, 500 aa, synthetic construct
MRALVVIRLSRVTDATTSPERQLESCHQLCAQRGWDVVGVAEDLDVSGAVDPFDRKRRPNLARWLAFEEQPFDVIVAYRVDRLTRSTRHLQQLVHWAEDRKKLVVSATEAHFDTTTPFAAVVIALMGTVAQMELEAIKERIRSAVHFNIRAGKYRGSLPPWGYLPTRVDGEWRLVPDPVQRERILEVYHRVVDNHEPLHLVAYDLNRRGVLSPKDYFAQLQGREPQGRKWSATALKRSMISVAMLGYATLNGKIVRDNDGAPLVRAEPILTREQQEALRAELAKTSRAKPAVSTPSLLLRVLFCAVCGEPAYKFVGGGRKHPRYRCRSMGFPEHCGNGTVVMAEWDAFCEEQVLDLLGDAERLEKVWVAGSDSAVELAEVNAELVDLTSLIGSPAYRAGSPQREALDARIAALAARQEELEGLEARPSGWEWRETGQRFGDWWREQDTAAKNTWLRSMNVRLTFDVRGGLTRTIDFGDLQEYEQHLRSGSVVGRLHTGMS

SEQ ID NO: 8593 - protein, 500 aa, synthetic construct
MRALVVIRLSRVTDATTSPERQLESCRQLCAQRGWDVVGVAEDLDVSGAVDPFDRKRRPNLARWLAFEEQPFDVIVAYRVDRLTRSTRHLQQLVHWAEDHKKLVVSATEAHFDTTTPFAAVVIALMGTVAQMELEAIKERIRSAAHFNIRAGKYRGSLPPWGYLPMRVDGEWRLVPDPVQRERILEVYHRVVDNHEPLHLVAYDLNRRGVLSPKDYFAQLRGREPRGRKWSATALKRSMISKAMLGYATLNGKTVRDDGGAPLVRAEPILTREQQEALRAELARTSRAKPAVSTPSLLLRVLFCAVCEEPAYRFVGGGRKHPRYRCRSMGFPKHCGNGTVVMAEWDAFCEEQVLGLLGDAERLEKVWVAGSDSAVELAEVNAELVDLTSLIGSPAYRAGSPQREALDARIAALAARQEKLEGLEARPSGWEWRGTGQRFGDWWREQDTAAKNTWLRSMNVRLTFDVRGGLARTIDFGELQEYEQHLRLGSEVERLHTGMS

SEQ ID NO: 8594 - protein, 500 aa, synthetic construct
MRALVVIRLSRVTDATTSPERQLESCQQLCAQRGWDVVGVAEDLDVSGAVDPFDRKRRPNLARWLAFEEQPFDVIVAYRVDRLTRSTRHLQQLVRWAEDHKKLVVSATEAHFDTTTPFAAVVIALMGTVAQMELEAIRERIRSAVRFNIRAGKYRGSLPPWGYLPARVDGEWRLVPDPLQRERILEVYHRVVDNHEPLHLVAHDLNRRGVLSPKDYFAQLRGREPQGREWSATALKRSMTSVAMLGYATLNGKTVRDGDGAPLVRAEPILTREQQEALRAELAKSSRAKPAVSTPSLLLRVLFCAVCGEPAYKFVGGGRKHPRYRCRSMGFPKHCGNGTVVMTEWDAFCEEQVLGLLGDAKRLEKVWVAGSDSAVELAEVNAELVDLASLIGSPAYRAGSPQREALDARIAALAARQEELEGLEARPSGWEWRVTGQRFRDWWREQDTAARNTWLRSMNVRLTFDVRGGLTRTIDFGDLQEYEQHLRLGSVVERLHAGMS

SEQ ID NO: 8595 - protein, 500 aa, synthetic construct
MRALVVIRLSRVTDATTSPERQLESCQQLCAQRGWDVVGVAEDLDVSGAVDPFDRKRRPNLARWLAFEEQPFDVIVAYRVDRLTRSTRHLQQLVRWAEDHKKLVVSATEAHFDTTTPFAAVVIALMGTVAQMELEAIKERIRSAAHFNIRAGKYRGSLPPWGYLPTRVDGEWRLVPDPVQRERILEVYHRVVDNHEPLHLVAHDLNRRGVLSPKDYFAQLRGREPRGRKWSATALRRSMTSVAMLGYATLNGKTVRNDDGTPLVRAEPILSREQLEALRAELVKTSRAKPAVSTPSLLLRVLFCAVCGEPAYKFVGGGRKHPRYRCRSMGFPKHCGNGTVVMAEWDAFCEEQVLDLLGDAERLEKVWVAGSDSAAELAEVNAELVDLTSLIGSPAYRADSPQREALDARIAALAARQEELEGLEARPSGWEWRETGQRFGDWWREQDTAAKNTWLRSMNVRLTFDVRGGLTRTIDFGDLQEYEQHLRLGSAVERLHAGMS

SEQ ID NO: 8596 - protein, 500 aa, synthetic construct
MRTLVVIRLSRVTDATTSPERQLESCQQLCVQRGWDVVGVAEDLDVSGAVDPFDRKRRPNLARWLAFEEQPFDAIVAYRVDRLTRSIRHLQRLVRWAEDHKKLVVSATEAHFDTTTPFAAVVIALMGTVAQMELEAIKERIRSAVRFNIRAGKYRGSLPPWGYLPTRVDGEWRLVPDPVQRERILEVYHRVVDNHEPLHLVAYDLNRRGVLSPKDYFAQLQGREPRGRKWSATALKRSMISVAMLGYATLNGMTVRDDDGAPLVRAEPILTREQQEALRAELAKTSRAKPAVSTPSLLLRVLFCAVCGEPAYKFVGGGRKHPRYRCRSMGFPKHCGNGTVVMAEWDAFCEEQVLNLLGDAERLEKVWVAGSDSAVELAEVNAELVDLTSLIGSPAYRAGSPQREALDARIAALAARQEELEGLEVRPSGWEWRETGRRFGDWWREQDTAAKNAWLRAMNVRLTFDVRGGLTRTIDFGDLQEYEQHLRSGSVVERSHTGMS

SEQ ID NO: 8597 - protein, 500 aa, synthetic construct
MRTLVVVRLSRVTDATTSPERQLESCQQLCAQRGWDVVGVAEDLDVSGAVDPFDRKRRPNLARWLAFEEQPFDVIVAYRVDRLTRSTRHLQQLVRWAEDHKKLVVSATEAHFDTTTPFAAVVIALMGTVAQMELEAIKERIRSAAHFNIRAGKYRGSLPPWGYLPTRVDGEWRLVPDPVQRERILEVYHRVVDNHEPLHLVAHDLNRRGVLSPKDYFAQLRGREPQGRKWSATALKRSMTSVAMLGYATLNGKTVRDDDGAPLVRAEPILTREQQEALRAELAQTSRAKPAVSTPSLLLRVLFCAVCGEPAYKFAGGGRKHPRYRCRSMGFPKHCGNGTVVMTEWDAFCEEQVLDLLGDAERLEKVWVAGSDSAVELAEVNAELVDLTSLIGSPAYRVGSPQREALDARIAALAARQEELEGLEARPSGWEWRETGQRFGDWWREQDTAAKNTWLRSMNVRLTFDVRGGLTRTIDFGDLLEYEQHLRLGSVVERLHTGMS

SEQ ID NO: 8598 - protein, 500 aa, synthetic construct
MRALVVIRLSRVTDATTSPERQLESCQQLCAQRGWDVVGVAEDLDVSGAVDPFDRKRRPNLARWLAFEEQPFDVIVAYRVDRLTRSVRHLQQLVLWAEDHKKLVVSATEAHFDTTTPFAAVVIALMGTVAQMELEAIKERIRSAVHFNIRAGKYRGSLPPWGYLPARVDGEWRLVPDPVQRERILEVYHRVVDNHEPLHLVAHDLNRRGVLSPKDYFAQLQGREPQGRKWSATALKRSMISVAMLGYATLSGKTVRGDDGAPLVRAEPILTRGQLEALRAELVKTSRAKPAVSTPSLLLRVLFCAVCGEPAYKFVGGGRKHPRYRCRSMGFPKHCGNGTVVMAEWDAFCEEQVLDLLGDAERLEKVWVAGSDSAVELAEVNAELVDLTSLIGSPAYRAGSPQREALDARIAALAARQEELEGLEARPSGWEWRETGQRFGDWWREQDTAAKNTWLRSMNVRLTFDVRGGLTRTIDFGDLQEYEQHLRSGSVVERLRTGMS

SEQ ID NO: 8599 - protein, 500 aa, synthetic construct
MRALVVIRLSRVTDATTSPERQLESCQQLCAQRGWDVVGVAEDLDVSGAVDPFDRKRRPSLARWLAFEEQPFDVIVAYRVDRLTRSTRHLQQLVRWAEDHKKLVVSATEAHFDTTTPFAAVVIALMGTVAQMELEAIKERIRSAVRFNIRAGKYRGSLPPWGYLPTRVDGEWRLVPDPVQRERILEVYHRVVDNHEPLHLVAHDLNRRGVLSPKDYFAQLRGREPQGRRWSATALKRSMTSKAMLGYATLNGKIVRGDDGAPLVRAEPILTREQQEALRAELAKTSRAKPAVSTPSLLLRVLFCAVCGEPAYKFVGGGRKHPRYRCRSMGFPEHCGNGTVVMAEWDAFCEEQVLDLLGDAERLEKVWLAGSDSAVELAEVNAELVDLTSLIGSPAYRAGSPQREALDARIAALAARQEELEGLEARPSGWEWRGTGQRFGNWWREQDTAAKNTWLRSMNVRLTFDVRGGLARTIDYGDLQEYKQHLRLGSVVERLHTGMS

SEQ ID NO: 8600 - protein, 500 aa, synthetic construct
MRALVVIRLSRVTDATTSPERQLESCQQLCAQRGWDVVGVAEDLDVSGAVDPFDRKRRPNLARWLAFEEQPFDVIVAYRVDRLTRSTRHLQQLVHWAEDHKKLVVSATEAHFDTTTPFAAVVIALMGTVAQMELEAIKERNRSAAHFNIRAGKYRGSLPPWGYLPTRVDGEWRLVPDPVQRERILEVYHRVVDNHEPLHLVAHDLNRRGVLSPKDYFAQLQGREPQGRKWSATALKRSMISEAMLGYATLNGKTVRDDDGAPLVRAEPILTREQLEALRAELVKTTRAKPAVSTPSLLLRVLFCAVCGEPAYKFAGGGRKHPRYRCRSTGFPKHCGNGTVVMAEWDAFCEEQVLGLLGDAERLEKVWVAGSDSAVELAEVNAELVDLTSLIGSPAYRAGSPQREALDARIAALAARQEELEGLGACPSGWEWRETGQRFGDWWREQDTAAKNAWLRSMNVRLTFDVRGGLTRTIDFGDLQEYEQHLRLGSVVERLHTGMS

SEQ ID NO: 8601 - protein, 500 aa, synthetic construct
MRALVVIRLSRVTDATTSPERQLESCRQLCAQRGWDVVGVAEDLDVSGAVDPFDRKRRPNLARWLAFEEQPFDVIVAYRVDRLTRSTRHLQQLVHWAEDHKKLVVSATEAHFDTTTPFAAVVIALMGTVAQMELEAIKERIRSATHFNIRAGKYRGSLPPWGYLPTRVDGEWRLVPDPVQRERILEVYHRVVDNHEPLHLVAHDLNRRGVLSPKDYFAQLQGREPQGRKWSATALKRSMISEAMLGYATLNGKTVRDDVGAPLVRAEPILTREQQEALRAELAKTSRAKPAVSTPSLLLRVLFCAVCGEPAYKFAGGGRKHPRYRCRSMGFPEHCGNGTVVMAEWDAFCEEQVLNLLGDAERLEKVWLAGSDSAAELAEVNAELVDLTSLIGSPTYRAGSPQREALDARIAALAARQEELEGLEARPSGWEWRGTGQRLGDWWREQDTAAKNTWLRSMNVRLTFDVRGGLTRTIDFGELREYVQHLRLGSVTERLHTGMS

SEQ ID NO: 8602 - protein, 500 aa, synthetic construct
MRALVVIRLSRVTDATTSPERQLESCQQLCAQRGWDVVGVAEDLDVSGAVDPFDRKRRPNLARWLAFEEQPFDVIVAYRVDRLTRSIRHLQQLVHWAEDHKKLVVSATEAHFDTTTPFAAVVIALMGTVAQMELEAIKERIRSAVHFNIRAGKYRGSLPPWGYLPTRVDGEWRLVPDPVQRERILEVYHRVVDNHEPLHLVAHDLNRRGVLSPKDYFAQLQGREPQGRKWSATALKRSMISAAMLGYVTLNGKIVRDDDGAPLVRAEPILTREQQGALRAELAKTSRAKPAVSTPSLLLRVLFCAVCGEPAYKFVGGGRKHPRYRCRSIGSPKHCGNGTVTMAGWDAFCEEQVLDLLGDAERLEKVWVAGSDSAVELAEVNAELVDLTSLIGSPAYRAGSPQREALDARIAALAARQEELEGLEARPSGWEWRETGQRFGDWWREQDTAAKNTWLRSMNVRLTFDVRGGLTRTIDFGDLQEYEQHLRLGGVVGRLHTGTS

SEQ ID NO: 8603 - protein, 500 aa, synthetic construct
MRALVVIRLSRVTDATTSPERQLESCQQLCAQRGWDVVGVAEDLDVSGAVDPFDRKRRPNLARWLAFEEQPFDAIVAYRVDRLARSIRHLQQLVHWAEDHKKLVVSATEAHFDTTTPFAAVVIALMGTVAQMELEAIKERNRSAAHFNIRAGKYRGSLPPWGYLPARVDGEWRLVPDPVQRERILEVYHRVVDNHEPLHWVAHDLNRRGVLSPKDYFAQLQGREPQGRKWSATALKRSVISEAMLGYATLNGKTVRDDDGAPLVRAEPILTREQLEALRAELVKTSRAKPAVTTPSLLLRVLFCAVCGEPAYKFAGGGRKHPRYRCRSMGFPKHCGNGTVAMAEWDAFCEEQVLDLLGDAERLEKVWVAGSDSAVELAEVNAELVDLTSLIGSPAYRAGSPQREALDARIAALAARQEELEGLEARPSGWEWRETGQRFGDWWREQDTAAKNTWLRSMNVRLTFDVRGGLTRTIDLGDLQEYEQHLRLGSVVERLHTGMS

SEQ ID NO: 8604 - protein, 500 aa, synthetic construct
MRALVVIRLSRVTDATTSPERQLESCQQLCAQRGWDVVGVAEDLDVSGAVDPFDRKRRPNLARWLAFEEQPFDVIVAYRVDRLTRSTRHLQQLVRWAEDHKKLVVSATEAHFDTTTPFAAVVIALMGTVAQMELEAIKERSRSAAHFNIRAGKYRGSLPPWGYLPARVDGEWRLVPDPVQRERILEVYHRVVDNHEPLHLVAHDLNRRGALSPKDYFAQLRGREPRGRKWSATALKRSMTSEAMLGYATLNGKTVRDDDGAPLVRAEPILTREQLEALRAELAKTSRAKPAVSTPSLLLRVLFCAVCGEPAYKFVGGGRKHPRYRCRSMGFPKHCGNGTVVTAEWDAFCEEQVLDLLGDAERLEKVWVAGSDSAVELAEVNAELVDLTSLIGSPAYRAGSPQREALDARIAALAARQEELESLEARPSGWEWRKTGQCFGDWWREQDTAAKNTWLRSMNVRLTFDVRGGLTRTIDFGELQEYEQLLRLGRVVERLHTGMP

SEQ ID NO: 8605 - protein, 500 aa, synthetic construct
MRALVVIRLSRVTDATTSPERQLASCQQLCAQRGWDVVGVAEDLDVSGAVDPFDRKRRPNLARWLAFEEQPFDVIVAYRVDRLTRSTRHLQLLVHWAEDHKKLVVSATEAHFDTTTPFAAVVIALMGTVAQMELEAIKERIRSAAHFNIRAGKYRGSLPPWGYLPARVDGEWRLVPDPVQRERILEVYRRVVDNHEPLHLVAYDLNRRGVLSPKDYFAQLQGREPQGRKWSATALKRSMISVTMLGYATLNGKTVRDDDGAPLVRAEPILTREQQEALRAELAKTSRAKPAVSTPSLLLRVLFCAVCGEPAYKFVGGGRKHPRYRCRSMGFPKHCGNGTVVMTEWDAFCEEQVLDLLGDAERLEKVWVAGSDSAVELAEVNAELVDLTSLIGSPAYRAGSPQREALDARIAALAARQEELEGLEARPSGWEWRGTGQRLGDWWREQDTAAKNTWLRSMNVRLTFDVRGGLTRTIDFGELQEYEQHLRLGSVAERLHTGMS

SEQ ID NO: 8606 - protein, 500 aa, synthetic construct
MRALVVIRLSRVTDATTSPERQLESCQQLCAQRGWDVVGVAEDLDVSGAVDPFDRKRRPNLARWLAFEEQPFDAIVAYRVDRLARSIRHLQQLVHWAEDHKKLVVSATEAHFDTTTPFAAVVIALMGTVAQMELEAIKERNRSAAHFNIRAGKYRGSLPPWGYLPTRVDGEWRLVPDPVQRERILEVYHRVVDNHEPLHLVAHDLNRRGVLSPKDHFARLQGREPQGRKWSATALKRSMTSEAMLGYATLNGKTVRDDDGAPLVRAEPILTRVQLEALRAELVKTSRAKPAVSTPSLLLRVLFCAVCGEPAYKFAGGGRKHPRYRCRSMGFPRHCGNGTVAMAEWDAFCEEQVLDLLGDAERLEKVWVAGSDPAVELAEVNAELVDLTSLIGSPAYRAGSPQREALDARIAALAARQEELEGLGARPSGWEWRETGQRFGDWWREQDTAAKNTWLRSMNVRLTFDVRGGLTRTIDFGDLQEYEQHLRLGSVVERLHTGMS

SEQ ID NO: 8607 - protein, 500 aa, synthetic construct
MRALVVIRLSRVTEATTSPERQLESCQQLCAQRGWDVVGVAEDLDVSGAVDPFDRKRRPNLARWLAFEEQPFDVIVAYRVDRLTRSVRHLQHLVHWAEDHKKLVVSATEAHFDTTTPFAAVVIALMGTVAQMELEAIKERIRSAAHFNIRAGKYRGSLPPWGYLPTRVDGEWRLVPDPVQRERILEVYHRVVDNHEPLHLVAHDLNRRGVLSPKDYFAQLQGREPQGRKWSATALKRSMISVAMLGYATLNGKIVRDGDGAPLVRAEPILTREQQEAFRAELAKTSRVKPAVSTPSLLLRVLFCAVCGEPAYKFVGGGRKHPRYRCRSMVFPKHCGNGTVVMAEWDAFCEEQVLDLLGDAERLEKVWVAGSDSVVELAEVNAELVDLTSLIGSPAYRAGSPQREALDARIAALAARQEELEGLEVRPSGWEWRGTGQRFGDWWREQDTAAKNTWLRSMNVRLTFDVRGGLTRTIDFGDLQEYEQHLRLGSVVERLHTGMS

SEQ ID NO: 8608 - protein, 500 aa, synthetic construct
MRALVVIRLSRVTDATTSPERQLESCQQLCAQRGWDVVGVAEDLDVSGAVDPFDRKRRPNLARWLAFEEQPFDVIVAYRVDRLTRSTRHLQQLVHWAEDHKKLVVSATEAHFDTTTPFAAVVIALMGTVAQMELEAIKERNRSAAHFNIRAGKYRGSLPPWGYLPTRVDGEWRLAPDPVQRERILEVYHRVVDNHEPLYLVAHDLNRRGVLSPKDYFAQLRGREPQGREWSATALKRSMISEAMLGYATLNGKIVRDDDGAPLVRAEPILTREQLEALRAELVKTSRAKPAVSTPSLLLRVLFCAVCGEPAYKFAGGGRKHPRYRCRSMGFSKHCGNGTVAMAEWDAFCEEQVLDLLGDTERLEKVWVAGSDFAIELAEVNAELVDLTSLIGSPVYRAGSPQREALDARIAALAARQEELEGSEVRPSGWEWRETGQRFGDWWREQDTAAKNTWLRSMNVRLTFDVRGGLTRTIDFGDLQEYEQHLRLGSVVERLHTGTS

SEQ ID NO: 8609 - protein, 500 aa, synthetic construct
MRALVVIRLSRVTDATTSPERQLESCQQLCAQRGWDVVGVAEDLDVSGAVDPFDRKRRPNLARWLAFEEQPFDAIVAYRVDRLARSIRHLQQLVHWAEDHKKLVVSATEAHFDTTTPFAAVVIALMGTVAQMELEAIKERSRSAAHFNIRAGKYRGSLPPWGYLPTRVDGEWRLVPDPVQRERILEVYHRVVDNHEPLHLVAHDLNQRGVLSPKDNFAQLRGREPQGRKWSATALKRSMISEAMLGYATLNGKTVRDDDGAPLVRAEPILTREQLEALRAELVKTSRAKPAVSTPSLLLRVLFCAVCGEPAYKFAGGGRKHPRYRCRSMGFPKHCGNGTVVMAEWDAFCEEQVLDLLGDTERLEKVWVTGSDSAVELAEVNAELADLTSLIGSPAYRAGSPQRETLDARIAALAARQEELEGSEARPSGWGWRETGQRFGDWWREQDTAAKNTWLRSMSVRLTFDVRGGLTRTIDFGDLQEYEQHLRLGSVVERLHTGMS

SEQ ID NO: 8610 - protein, 500 aa, synthetic construct
MRALVVIRLSRVTDATTSPERQLESCQQLCAQRGWDVVGVAEDLDVSGAVDPFDRKRRPNLARWLAFEEQPFDVIVAYRVDRLTRSVRHLQQLVHWAEDHKKLVVSATEAHFDTTTPFAAVVIALMGTVAQMELEAIKERNRSAAHFNIRAGKYRGSLPPWGYLPTRVDGEWRLVPDPVQRERILEVYHRVVDNHESLHLVAHDLNRRGVLSPKDYFAQLRGREPQGREWSATALKRSMVSVAMLGYATLNGKIVRDDDGAPLVRAEPILTREQLEVLRAELVRTSRAKPAVSTPSLLLRVLFCAVCGEPAYKFAGGGRKHPRYRCRSMGFPKHCGNGTVVMAEWDAFCEEQVLNLLGDAERLEKVWVAGSDSAVELAEVNAELVDLTSLIGSPAYRAGSPQREALDARIAVLAARQEELEGLEASPSGWEWRETGQRFGDWWREQDTAAKNAWLRSMNVRLTFDVRGGQTRTIDFGDLQEYEQHLRSGSVVERLHTGMS

SEQ ID NO: 8611 - protein, 500 aa, synthetic construct
MRALVVIRLSRVTDATTSPERQLESCQQLCAQRGWVVVGVAEDLDVSGAVDPFDRKRRPNLARWLAFEEQPFDVIVAYRVDRLTRSTRHLQQLVHWAEDHKKLVVSATEAHFDTTTPFAAVVIALMGTVAQMELEAIKERNRSAAHFNIRAGKYRGSLPPWGYLPARVDGEWRLVPDPVQRERILEVYHRVVDNHEPLHWVAHDLNRRGVLSPKDYFAQLQGREPQGRKWSATALKRSMISEAMLGYATLNGKTVRNDDGAPLVRAEPILTRGQLEALRAELVKTSRAKPAVSTPSLLLRVLFCAVCGEPAYKFAGGGRKHPRYRCRSMGFPKHCGNGTVVMAEWDAFCEEQVLDLLGDAERLEKVWVAGSDSAVELAEVNAELVDLTSLIGSPAYRAGSLQREALDARIAALAARQEELVGLEARPSGWEWRETGQRFGDWWREQDTAAKNTWLRSMNVRLTFDVRGGLTRTIDFGDLQEYEQHLRLGSVVERLHTGMS

SEQ ID NO: 8612 - protein, 500 aa, synthetic construct
MRALVVIRLSRVTDATTSPERQLESCQQLCAQRGWDVVGVAEDLDVSGAVDPFDRKRRPNLARWLAFEEQPFDVIVAYRVDRLTRSTRHLQQLVHWAEDHKKLVVSATEAHFDTTTPFAAVVIALMGTVAQMELEAIKERNRSAAHFNIRAGKYRGSLPPWGYLPTRVDGEWRLVPDPVQRERILEVYHRVVDNHESLHLVAHDLNRRGVLSPKDYFAQLRGREPQGRKWSATALRRSMISEAMLGYATLNGKTVRDDGGAPLVRAEPILTREQLEALRAELVKTSRAKPAVSTPSLLLRVLFCAVCGEPAYKFAGGGRKHPRYRCRSMGFPKHCGNGTVVMAEWDAFCEEQVLDLLGDAERLEKVWVAGSDSAVELAEVNAELVDLTSLIGSPVYRAGSPQREALDARIAALAARQEELEGLEARPSGWEWRETGQRFGDWWREQNTAAKNTWLRSMNVRLTFDVRGGLTRTIDFGDLREYEQLLRLGSVVKRLHAGMS

SEQ ID NO: 8613 - protein, 500 aa, synthetic construct
MRALVVIRLSRVTDATTSPERQLASCQQLCDQRGWVVVGVAEDLDVSGAVDPFDHKRRPNLARWLAFEEQPFDVIVAYRVDRLTRSTRHLQQLVRWAEDHKKLVASATEAHFDTTTPFAAVVIALMGTVAQMELEAIKERIRSAVHFNIRAGKYRGSLPPWGYLPTRVDGEWRLVPDPVQRERILEVYHRVVDNHEPLHLVAHDLNRRGVLSPKDYFAQLRGREPQGRKWSATALRRSMTSVAMLGYATLNGKIVRDDDGAPLVRAEPILTREQQEALRAELVKTSRAKPAVSTPSLLLRVLFCAVCGEPAYKFVGGGRKHPRYRCRSMGFPKHCGNGTVVMAEWDAFCEEQVLNLLGDAERLEKVWVAGSDSAVELAEVNAELVDLTSLIGSPAYRAGSPQREALDARIAALAARQGELEGLEARPSGWEWRGTGQRFGDWWREQDTAAKNTWLRSMNVRLTFDVRGGLTRAIDFGDLQEYEQHLRLGSVAERLHTGMS

SEQ ID NO: 8614 - protein, 500 aa, synthetic construct
MRALVVIRLSRVTDATTSPERQLESCQQLCAQRGWDVVGVAEDLDVSGAVDPFDRKRRPSLARWLAFEEQPFDVIVAYRVDRLTRSTRHLQQLVHWAEDHKKLVASATEAHFDTTTPFAAVVIALMGTVAQMELEAIKERNRSAAHFNIRAGKYRGSLPPWGYLPTRVDGEWRLVPDPVQRERILEVYHRVVDDHEPLHLVAHDLNRRGVLSPKDYFAQLQGREPQGRKWSATALKRSMISEAMLGHATLNGKTVRDDDGAPLVRAEPILTREQLEALRAELVKTPRAKPAVSTPSLLLRVLFCAVCGEPAYKFAGGGRKHPRYRCRSMGFPKHCGNGTVAMAEWDAFCEEQVLDLLGDAERLEKVWVAGSDSAVELAAVNAELVDLTSLIGSPAYRAGSPQREALDARIAALAARQEELEGLEARPSGWEWRGTGQRFGDWWREQDTAAKNTWLRSMNVRLTFDVRGGLTRTIDFGDLQEYEQRLRLGSVVERLHTGMS

SEQ ID NO: 8615 - protein, 500 aa, synthetic construct
MRALVVIRLSRVTDATTSPERQLESCQQLCAQRGWDVVGVAEDLDVSGAVDPFDRKRRPNLARWLAFEELPFDVIVAYRVDRLTRSTRHLQQLVHWAEDHKKLVVSATEAHFDTTTPFAAVVIALMGTVAQMELEAIKERNRSAAHFNIRAGKYRGSLPPWGYLPTRVDGEWRLVPDPVQRERILEVYHRVVDNHEPLHWVAHDLNRRGVLSPKDYFAQLQGREPQGRKWSATALKRSMISEAMLGYATLNGKTVRDDDGAPLVRAEPILTREQLEALRAELIKTSRAKPAVSTPSLLLRVLFCAVCGEPAYKFAGGGRKHPRYRCRSMGFPKHCGNGTVTMAEWDAFCEEQVLDLLGDAERLEKVWVAGSDSAVELAEVNAELVDLTSLIGSPAYRAGSPQREALDARIAALAARQEELEGLEARPSGWEWRETGQRFGDWWREQDTAAKNTWLRSMNVRLTFDVRGGLTRTIDFGDLQEYEQHSRLGSVVERLHTGMS

SEQ ID NO: 8616 - protein, 500 aa, synthetic construct
MRALVVVRLSRVTDATTSPERQLESCQQLCAQRGWDVVGVAEDLDVSGAVDPFDRKRRPNLARWLAFEEQPFDVIVAYRVDRLTRSTRHLQQLVRWAEDHKKLVVSATEAHFDTTTPFAAVVIALMGTVAQMELEAIKERIRSAAHFNIRAGKYRGSLPPWGYLPTRVDGEWRLVPDPVQRERILEVYHRVVDNHEPLHLVAHDLNRRGVLSPKDYFARLQGREPRGRKWSATALKRSMISGAMLGYATLNGKTVRDDDGAPLVRAEPILTREQLEALRAELAKTSRAKPAVSTPSLLLRVLFCGVCGEPAYKFVGGGRKHPRYRCRSMGFPEHCGNGTVVMTEWDVFCEEQVLNLLGDAERLEKVWVAGSDSAVELAEVNAELMDLTSLIGSPAYRAGSPQREALDARIAALAARQEELEGLEARPSGWEWRGTGQRLGDWWREQDTAAKNTWLRAMNFRLTFDVRGGLTRTIDFGDLQEYEQHSRSGSVVERLHTGMS

SEQ ID NO: 8617 - protein, 500 aa, synthetic construct
MRALVVIRLSRVTDATTSPERQLESCQQLCAQRGWDVVGVAEDLDVSGAVDPFDRKRRPNLARWLAFEEQPFDVIVAYRVDRLTRSTRHLQQLVHWAEDHKKLVVSATEAHFDTTTPFAAVVIALMGTVAQMELEAIKERIRSATHFNIRAGKYRGSLPPWGYLPTRVDGEWRLVPDPVQRERIFEVYRRVVDNHEPLHLVAHDLNRRGVLSPKDYFAQLRGREPQGRKWSATALKRSMISVAMLGYATLNGKIVRDDDGAPLVRAEPILTREQLEALRAELAKTSRAKPAVSSPSLLLRVLFCAVCGEPAYKFAGGGRKHPRYRCRSMGFPKHCGNGTVAMAEWDAFCEEQVLDLLGDTERLEKVWVAGSDSAVELAEVNAELVDLTSLIGSPAYRAGSPQREALDARIAALAARQEELEGLEACPSGWEWRETGQRFGDWWREQDTAAKNTWLRSMNVRLTFDVRGGLTRTIDFGDLQEYEQHLRLGSVVERLHTGMP

SEQ ID NO: 8618 - protein, 500 aa, synthetic construct
MRALVVIRLSRVTDATTSPERQLESCQQLCAQRGWDVVGVAEDLDVSGAVDPFDRKRRPNLARWLAFEEQPFDVIVVYRVDRLTRSTRHLQQLVHWAEDHKKLVVSATEAHFDTTTPFAAVVIALMGTVAQMELEAIKERNRSAAHFNIRAGKYRGSLPPWGYLPARVDGEWRLAPDPVQRERILEVYHRVVDNHEPLHLVAHDLNRRGVLSPKDYFAQLQGREPQGRKWSATALKRSMISEAMLGYATLNGKTVRNDDGAPLVRAEPILTREQLEALRAELVRTSRAKPAVSTPSLLLRVLFCAVCGEPAYKFAGGGRKHPRYRCRSMGFPKHCGNGTVVMAEWDAFCEEQVLDLLGDAERLEKVWVAGSDSAVELAEVNAELVDLTSLIGSPAYRAGSPQREALDARIAALAARQEELEGLEARPSGWEWRETGQRFGDWWREQDTAAKNTWLRSMNVRLTFDVRGGLTRTIDLGDLQEYEQHLRLGSVVERLRTGMS

SEQ ID NO: 8619 - protein, 500 aa, synthetic construct
MRALVVIRLSRDTDATTSPERQLESCQQLCAQRGWDVVGVAEDLDVSGAVDPFDRKRRPNLARWLAFEERPFDVIVAYRVDRLTRSVRHLQQLVHWAEDHKKLVVSATEAHFDMTTPFAAVVIALMGTVAQMELEAIKERNRSAAHFNIRAGKYRGSLPPWGYLPTRVDGEWRLVPDPVQRERILEVYHRVVDNHEPLHLVAHDLNRRGVLSPKDYFAQLRGREPQGRKWSATALKRSMISEAMLGYATLNGKTVRDDDGAPLVRAEPILTREQLEALRAELVKASRAKPAVSTPSLLLRVLFCAVCGEPAYKFAGGGRKHPRYRCRSMGFPKHCGNGTVVMAEWDAFCEEQVLDLLGDAERLEKVWVAGSDSAVELAEVNAELVDLTSLIGSPAYRAGSPQREALDARIAALAARQEELEGLEARPSGWEWRETGQRFGDWWREQDTAAKNAWLRSMNVRLTFDVRGGPTHTIDFGDLQEYEQHLRLGSVVERLHTGMS

SEQ ID NO: 8620 - protein, 500 aa, synthetic construct
MRALVVIRLSRVTDATTSPERQLESCQQLCAQRGWDVVGVAEDLDVSGAVDPFDRKRRPNLARWLAFEEQPFDAIVAYRVDRLTRSVRHLQQLVHWAEDHKKLVVSATEAHFDTTTPFAAVVIALMGTVAQMELEAIKERNRSAAHFNIRAGKYRGSLPPWGYLPTRVDGEWRLAPDPVQRERILEVYHRVVDNHEPLHLVAHDLNRRGVLSPKDYFAQLQGREPQGRKWSATALKRSMISEAMLGYATLNGKTVRDDDGAPLVRAEPILTREQLEALRVELVKTSRAKPAVSTPSLLLRVLFCAVCGEPAYKFAGGGRKHPRYRCRSMGFPKHCGNGTVAMAEWDAFCEEQVLDLLGDAERLEKVWVAGSDSAVELAEVNAELVDLTSLIGSPAYRAGSPQREALDARIAALAARQKELEGLEARPSGWEWRETGQRFGDWWREQDTAAKNTWLRSMNVRLTFDVRGGLTRTIDFGDLQEYEQLLRLGSAVERLHTGMS

SEQ ID NO: 8621 - protein, 500 aa, synthetic construct
MRALIVIRLSRVTDATTSPERQLESCQQLCAQRGWDVVGVAEDLDVSGAVDPFDRKRRPNLARWLAFEEQPFDVIVAYRVDRLTRSTRHLQRLVRWAEDHKKLVVSATEAHFDTTTPFAAVVIALMGTVAQMELEAIKERIRSAAHFNIRAGKYRGSLPPWGYLPTRVDGEWRLVPDPVQRERILEVYHRVVDNHESLHLVAHDLNRRGVLSPKDYFAQLRGREPQGRKWSATALKRSMISKAMLGYATLSGRTVRDDDGAPLVRAEPILTREQQEALRAELAKTSRAKPAVSTPSLLLRVLFCAVCGEPAYKFIGGGRKHPRYRCRSMGFPKHCGNGTVVMAEWDAFCEEQVLDLLGDAERLERVWVAGSDSAVELAEVNAELVDLTSLIGSPAYRAGSPQREALDARIAALAARQEELEGLEARPSGWEWRGTGQRFGDWWREQDTAAKNTWLRSMNVRLTFDARGGLTRTIDFGDLQEYEQHLRLGSVVERLRTGMP

SEQ ID NO: 8622 - protein, 500 aa, synthetic construct
MRALVVVRLSRVTDATTSPERQLESCRQLCAQRGWDVVGVAEDLDVSGAVDPFDRKRRPNLARWLAFAEQPFDVIVAYRVDRLTRSTRHLQQLVRWAEDHKKLVVSATEAHFDTTTPFAAVVIALMGTVAQMELEAIKERIRSAAHFNIRAGKYRGSLPPWGYLPTRVDGEWRLAPDPVQRERILEVYRRVVDNHEPLHLVAHDLNRRGVLSPKDYFAQLRGREPRGRKWSATALRRSMTSEAMLGYATLNGKTVRDDDGAPLVRAEPILTREQQEALRAELVKTSRAKPAVSTPSLLLRVLFCAVCGEPAYKFAGGGRKHPRYRCRSMGFPEHCGNGTVVMAEWDAFCEEQVLDLLGDAERLEKVWVAGSDSAVELAEVNAELVDLTSLIGSPAYRTGSPQREALDARIAALAARQEELESLEARPSGWEWRETGQRFGDWWREQDTAAKNTWLRSMNVRLTFDVRGGLTRTIDFGDLQEYEQHLRSGSVVERLHTGMS

SEQ ID NO: 8623 - protein, 500 aa, synthetic construct
MRALVVIRLSRVTDATTSPERQLESCQQLCAQRGWDVVGVAEDLDVSGAVDPFDRKRRPNLARWLAFEEQPFDVIVAYRVDRLTRSTRHLQQLVHWAEDHKKLVVSATEAHFDTTTPFAAVVIALMGTVAQMELEAIKERVRSAAHFNIRAGKYRGSLPPWGYLPTRVDGEWRLVPDPVQRERILEVYHRVVDNHEPLHLVAYDLNRRGVLSPKDYFAQLQGREPRGRKWSATALRRSMISVAMLGYATLNGKTVRDDDGAPLVRAEPILTREQQEALRAELAKTSRAKPAVSTPSLLLRVLFCAVCGEPAYKFVGGGRKHPRYRCRSMGFPEHCGNGTVVMAEWDVFCEEQVLDLLGDAERLEKVWVAGSDSAVELAEVNAELVDLASLIGSPAYRAGSPQREALDTRIAALAARQEELEGLEARPSGWEWRGTGQRFGDWWREQDTAAKNTWLRSMNVRLTFDVRGGLTRTIDLGDLQEYEQHLRSGSVVERLHTGMS

SEQ ID NO: 8624 - protein, 500 aa, synthetic construct
MRALVVIRLSRVTDATTSPERQLESCQQLCAQRGWDVVGVAEDLDVSGAVDPFDRRRRPNLARWLAFEELPFDVIVAYRVDRLTRSVRHLQQLVHWAEDHKKLIVSATEAHFDTTTPFAAVVIALMGTVAQMELEAIKERNRSAAHFNIRAGKYRGSLPPWGYLPTRVDGVWRLVPDPVQCERILEVYHRVVDNHEPLHLVAHDLNRRGVLSPKDYFAQLRGREPQGRKWSATALKRSMVSEAMLGYATLNGKTVRDDNGAPLVRAEPILTREQLEALRAELVKTSRAKPAVSTPSLLLRVLFCAVCGEPAYKFAGGGRKHPRYRCRSTGFPKHCGNGTVAMAEWDAFCEEQVLNLIGDAERLEKVWVAGSDSAVELAEVNAELVDLTSLVGSPAYRAGSPQREALDARIAALAARQEELEGLEARPSGWEWRGTGQRFGDWWREQDTAAKNTWLRSMNVRLTFDVRSGLTRTVDFGDLQEYGQHLRLGSVVERLHTGMS

SEQ ID NO: 8625 - protein, 500 aa, synthetic construct
MRALVVIRLSRVTDATTSPERQLESCRQLCAQRGWDVVGVAEDLDVSGAVDTFDRKRRPNLARWLAFEEQPFDVIVAYRVDRLTRSTRHLQQLVRWAEDHKKLVVSATEAHFDTTTPFAAVVIALMGTVAQMELEAIRERCRSAAHFNIRAGKYRGSLPPWGYLPTRVDGEWRLVPDPVQRERILEVYHRVVDNHEPLHLVAHDLNRRGVLSPKDYFAQLQGREPQGRKWSATALKRSMISGAMLGYATLNGKIVRDDDGAPLVRAEPILTRGQLEALRAELAKTSRAKPAVSTPSLLLRVLFCAVCGEPAYKFVGGGRKHPRYRCRSMGFPGHCGNGTVVMAEWDAFCEEQVLDLLGDAERLEKVWVAGSDSAVELAEVNAELVDLTSLIGSPAYRTGSPQREALDARIAALAARQEELEGLEARPSGWEWRETGQRFRDWWREQDTAAKNTWLRSMNVRLTFDVRGGLTRTIDFGDLQEYEQHLRLGSVAERLHTGMP

SEQ ID NO: 8626 - protein, 500 aa, synthetic construct
MRALVVIRLSRVTDATTSPERQLESCQQLCAQRGWNVVGVAEDLDVSGAVDPFDRKRRPNLARWLAFEEQPFDVIVAYRVDRLTRSTRHLQQLVHWAEDHKKLVVSATEAHFDTTTPFAAVVIALMGTVAQMELEAIKERNRSAAHFNIRAGKYRGSLPPWGYLPARVDGEWRLVPDPVQRERILEVYHRVVDSHEPLHLVAHDLNRRGVLSPKDYFAQLQGREPQGRKWSATALKRSMISEAMLGYATLNGKTVRDDDGAPLVRAEPILTRGQLVALRAELVKSSRAKPAVSTPSLLLRVLFCAVCGEPAYKFAGGGRKHPRYRCRSMGFPKHCGNGTVVMAEWDAFCEEQVLDLLGDAERLEKVWVAGSDSAVELAEVNAELVDLTSLIGSPAYRAGSPQREALDARIAALAARQEELEGLEARPSGWEWRETGQRFGDWWREQDTAAKNTWLRSMNVRLTFDVRGGLTRTIDFGDLQEYEQHLRLGSVVERLHTGMS

SEQ ID NO: 8627 - protein, 500 aa, synthetic construct
MRALVVIRLSRVTDTTTSPERQLESCQQLCGQRGWDVVGVAEDLDVSGAVDPFDRKRRPNLARWLAFEEQPFDVIVAYRVDRLTRSTRHLQQLIHWAEDHKKLVVSATEAHFDTTTPFAAVVIALMGTVAQMELEAIKERSRSAAHFNIRAGKYRGSLPPWGYLPTRVDGEWRLVPDPVQRERILEVYHRVVVNHEPLYLVAHDLNRRGVLSPKDYFAQLQGREPQGRKWSATALKRSMISKAMLGYATLNGKTVRDGDGAPLVRAEPILTREQQEALRAELAKTSRAKPAVSTPSLLLRVLFCAVCGEPAYKFAGGGRKHPRYRCRSMGFPKHCGNGTVVMTEWDAFCEEQVLDLLGDAERLEKVWVAGSNSAVELAEVSAELVDLTRLIGSPAYRAGSPQREALDARIAALAARQEELEGLEARPSGWGWRETGQRFGDWWREQDTAAKNTWLRSMNVRLTFDVRGGLTRTIDFGDLQEYERHLRLGSVVKRSHTGMS

SEQ ID NO: 8628 - protein, 500 aa, synthetic construct
MRALVVIRLSRVTDATTSPERQLESCQQLCAQRGWDVVGVAEDLDVSGAVDPFDRKRRPNLARWLAFEEQPFDVIVAYRVDRLTRSVRHLQQLVHWAEDHKKLVVSATEAHFDTTTPFAAVVIALMGTVAQMELEAIKERNRSAAHFNIRAGKYRGSLPPWGYLPTRVDGEWRLVPDPVQRERILEVYHRVVDNHEPLHLVAHDLNRRGVLSPKDYFAQLRGREPQGRKWSATALKRSMISEAMLGYATLNGKTVRDDDGAPLVRAEPILTREQLEALRAELVKTSRAKPAVSTPSLLLRVIFCAVCGEPAYKFAGGGRKHPRYRCRSMGFPKHCGNGTVVMAEWDAFCEEQVLDLLGDAERLEKVWVAGSDSAVELAEVNAELVDLTSLIGSPAYRAGSPQREALGARIAALAARQEELEGLGARPSGWEWRETGQRFGDWWREQDTAAKNTWLRSMNVRLTFDVRGKLTRTIDFGDLQEYEQHLRLGSMVERLHTGMS

SEQ ID NO: 8629 - protein, 500 aa, synthetic construct
MRALVVIRLSRVTDATTSPERQLESCQQLCAQRGWDVVGVAEDLDVSGAVDPFDRKRRPNLARWLAFEEQPFDVIVAYRVDRLTRSTRHLQQLVRWAEDHKKLVVSATEAHFDTTTPFAAVVIALMGTVAQMELEAIKERIRSATHFNIRAGKYRGSLPPWGYLPTRVDGEWRLVPDPVQRERILEVYHRVVDNHEPLHLVAHDLNRRGVLSPKDYFAQLRGREPRGRKWSATALRRSMTSEAMLGYATLNGKTVRDDDGAPLVRAEPILSREQLEALRAELVRTSRAKPAVSTPSLLLRVLFCAVCGEPAYKFVGGGRKHPRYRCRSMGSPEHCGNGTVVMAEWDAFCEEQVLDLLGDAERLEKVWVAGSDSAVELAEVNAELVDLTSLVGSPAYRAGSPQREALDARIAALAARQEELECLEARPSGWEWRGTGQRFGDWWREQDTAAKNTWLRSMNIRLTFDVRGGLTRTIDFGELQEYEQHLRLGSVVERLHTGMS

SEQ ID NO: 8630 - protein, 500 aa, synthetic construct
MRALVVIRLSRVTDATTSPERQLESCQQLCAQRGWDVVGVAEDLDVSGAVDPFDRKRRPNLARWLAFEEQPFDVIVAYRVDRLTRSTRHLQQLVRWAEDHKKLVVSATEAHFDTTTPFAAVVIALMGTVAQMELEAIKERIRSAVHFNIRAGKYRGSLPPWGYLPTRVDGEWRLVPDPVQRERILEVYHRVVDNHEPLHLVAHDLNRRGVLSPKDYFAQLQGREPQGRKWSATALRRSMTSGAMLGYATLNGKTVRDDDGAPLVRAEPILTREQLEALRAELVRTSRAKPAVSAPSLLLRVLFCAVCGEPAYKFAGGGRKHPRYRCRSMGFPEHCGNGTVVMAEWDAFCEEQVLDLLGDAERLEKVWVAGSDSAAELAEVNAELVDLTSLIGSPAYRAGSPQREALDARIAALAARQEELEGLEARPSGWEWRETGQRFGDWWREQDTAAKNTWLRSMNVRLTFDVRGGLTRTIDIGDLQEYEQHLRLGSVAERLHTGMS

SEQ ID NO: 8631 - protein, 500 aa, synthetic construct
MRALVVIRLSRVTDATTSPERQLESCQQLCAQRGWDVVGVAEDLDVSGAVDPFDRKRRPNLARWLAFEEQPFDVIVAYRVDRLTRSTRHLQQLVHWAEDHKKLVVSATEAHFDTTTPFAAVVIALMGTVAQMELEAIKERNRSAAHFNIRAGKYRGSLPPWGYLPTRVDGEWRLVPDPVQRERILEVYHRVVGNHEPLHLVAHDLNRRGVLSPKDYFAQLQGREPQGRKWSATALKRSMISEAMLGYVTLNGKTVRDDDGAPLVRAEPILTRGQLEALRAELVRTSRAKPAVSTPSLLLRVLFCAVCGEPAYKFAGGGRKHPRYRCRSMGFPKHCGNGTVVMAEWDAFCEEQVLNLLGDSERLEKVWVAGSDSAVELSEVNAELVDLTSLIGSPAYRAGSPQREALDARIAALAARREELEGLEARPSGWEWRETGQRFGDWWREQDTAAKNTWLRSMNVRLTFDVRGELTRTVDFGDLQEYEQHLRLGSVVERLHAGMS

SEQ ID NO: 8632 - protein, 500 aa, synthetic construct
MRALVVIRLSRVTDATTSPERQLESCRQLCAQRGWDVVGVAEDLDVSGAVDPFDRKHRPNLARWLAFEEQPFDVIVAYRVDRLTRSIRHLQQLVHWAEDHKKLVVSATEAHFDTTTPFAAVVIALMGTVAQMELEAIKERIRSAVRFNIRAGKYRGSLPPWGYLPTRVEGEWRLVPDPVQRERILEVYHRVVDNHEPLHLVAHDLNRRGVLSPKDYFAQLQGREPRGRKWSATALRRSMTSVAMLGCATLNGKTVRDDDGAPLVRAEPILTREQQEALRAELVKTSRAKPAVSTPSLLLRVLFCAVCGEPAYKFVGGGRKHPRYRCRSMGFPKHCGNGTVVMAEWDAFCEEQVLDLLGDAERLEKVWVAGSDSAVELAEVNAELVDLTSLISSPAYRAGSPQREALDARIAALAARQEELEGIEARPSGWGWRETGQRFGDWWREQDTAAKNTWLRSMNIRLTFDVRGGLTRTIDFGELQEYEQHLRLGSVAERLRTGMP

SEQ ID NO: 8633 - protein, 500 aa, synthetic construct
MRALVVIRLSRVTEATTSPERQLESCQQLCAQRGWDVVGVAEDLDVSGAVDPFDRKRRPNLARWLAFEEQPFDVIVAYRVDRLTRSTRHLQQLVRWAEDHKKLVVSATEAHFDTTTPFAAVVIALMGTVAQMELEAIKERSRSAAHFNIRAGKYRGSLPPWGYLPTRVDGEWRLVPDPVQRERILEVYHRVVDNHEPLHLVAHDLNRRGILSPKDYFAQLRGREPQGREWSATALKRSMTSVAMLGYATLNGKIVRDDDGAPLVRAEPILTREQQEALRAELAKTSRAKPAVSTPSLLLRVLFCAVCGEPAYKFVGGGRKHPRYRCRSMGFPEHCGNGTVVMAEWDAFCEEQVLNLLGDAERLEKVWVAGSDSAVELAEVNAELVDLTSLIGSPAYRAGSPQREALDARIAALAARQEELEGLEARPSGWEWRGTGQRFGDWWREQDTAAKNTWLRSMNVRLTFDVRGGLTRTIDFGDLQEYEQHLRLGSVAERLHTGMS

SEQ ID NO: 8634 - protein, 500 aa, synthetic construct
MRALVVIRLSRVTDATTSPKRQLESCQQLCAQRGWDVVGVAEDLDVSGAVDPFDRKRRPNLARWLAFEEQPFDVIVAYRVDRLTRSTRHLQQLVRWAEDHKKLVVSATEAHFDMTTPFASVVIALMGTVAQMELEAIKERSRSAAHFNIRAGKYRGSLPPWGYLPTRVDGEWRLVPDPVQRERILEVYHRVVDNHEPLHLVAHDLNRRGVLSPKDYFAQLRGREPQGRKWSATALKRSMISVAMLGYATLSGKIVRDDDGAPLVRAEPILTREQQEALRAELAKTSRAKPAVSTPSLLLRVLFCAVCGEPAYKFVGGGRKHPRYRCRSMGFPEHCGNGTVVMAEWDAFCEEQVLDLLGDAERLEKVWVAGSDSAVELAEVNAELVDLTSLIGSPAYRAGSPQREALDARIAALAARQEELEGLEARPSGWEWRGTGQRFGDWWREQDTAAKNAWLRSMNVRLTFDVRGGLPRTIDFGELQEYEQHLRLGSVAERLHTGMS

SEQ ID NO: 8635 - protein, 500 aa, synthetic construct
MRALVVIRLSRVTDTTTSPERQLESCQQLCAQRGWDVVGVAEDLDVSGAVDPFDRKRRPNLARWLAFEEQPFDVIVAHRVDRLTRSVRHLQQLVHWAEDHKKLVVSATEAHFDTTTPFAAVVIALMGTVAQMELEAIKERNRSAAHFNIRAGKYRGSLPPWGYLPTRVDGEWRLVPDPVQRERILEVYHRVVDNHEPLHWVAHDLNRRGVLSPKDYFAQLQGREPQGRKWSATALKRSMTSEAMLGYATLNGKTVRDDDGAPLVRAEPILTREQLEALRAELVKTSRAKPAVSTPSLLLRVLFCAVCGEPAYKFAGGGRKHPRYRCRSMGFPKHCGNGTVAMAEWDAFCEEQVLDLLGDAERLEKVWVAGSDSAVELAEVNAELVDLTSLIGSPAYRAGSPQREALDARIAALAARQEELEGLGARPSGWEWRETGQRFGDWWREQDTAAKNTWLRSMNVRLTFDVRDGLTRTIDFRDLQVHGQHLRLGSVVERLHTGTP

SEQ ID NO: 8636 - protein, 500 aa, synthetic construct
MRALVVIRLSRVTDATTSPERQLESCQQLCAQRGWDVVGVAEDLDVSGAVDPFDRKRRPNLARWLAFEEQPFDVIVAYRVDRLTRSTRHLQQLVHWAEDHKKLVVSATEAHFDTTTPFAAVVIALMGTVAQMELEAIKERNRSAAHFNIRAGKYRGSLPPWGYLPTRVDGEWRLVPDPVQRERILEVYHRVVDNHEPLHLVAHDLNRRGVLSPKDYFAQLQGREPQGRKWSATALKRSMISVAMLGYATLNGKTVRDDNGAPLVRAEPILTREQLEALRAELAKTSRAKPAVSTPPLLLRVLFCAVCGEPAYKFAGGGRKHPRYRCRSMGFPKHCGNGTVVMAEWDAFCEEQVLNLLGDAERLEKVWVAGSDSAVELAEVNAELVDLTSLIGSPAYRAGSPQREALDARIAALAARQEELEGLEARPSGWEWRETGQRFGDWWREQDTAAKNTWLRSMNVRLTFDVRGGLTRTIDFGDLQEYEQQLRSGSVVERLHTGMS

SEQ ID NO: 8637 - protein, 500 aa, synthetic construct
MRALVVIRLSRVTDATTSPERQLESCQQLCAQRGWDVVGVAEDLDVSGAVDPFDRKRRPNLARWLAFEEQPFDVIVAYRVDRLTRSTRHLQQLVHWAEDHKKLVVSATEAHFDTTTPFAAVVIALMGTVAQMELEAIKERNRSAAHFNIRAGKYRGSLPPWGYLPTRVDGEWRLVPDPVQRERILEVYHRVVNNHEPLHLVAHDLNRRGVLSPKDYFAQLQGREPQGRKWSATALKRSMISEAMLGYATLNGKTVRDNDGAPLVRAEPILTREQLEALRAELVKTSRAKPAVSTPSLLLRVLFCAVCGGPAYKFAGGGRKHPRYRCRSMGFPKHCGNGTVVMAEWDAFCEEQVLDLLGDAERLEKVWVAGSDSAVELAEANAELVDLTRLIGSPAYRAGSPQREALDARIAALAARQEELEGLGARPSGWEWRETGQRFGDWWREQDTAAKNTWLRSMNVRLTFDVRGGLTRTIDFGDLQEYEKHLRLGSVVERLHTGMS

SEQ ID NO: 8638 - protein, 500 aa, synthetic construct
MRALVVIRLSRVTDATTSPERQLESCQQLCAQRGWDVVGVAEDLDVSGAVDPFDRKRRPNLARWLAFEEQPFDVIVAHRVDRLTRSVRHLQQLVHWAEDHKKLVVSATEAHFDTTTPFAAVVIALMGTVAQMELEAIKERIRSAAHFNIRAGKYRGSLPPWGYLPTRVGGEWRLVPDPVQRERILEVYHRVVDNHEPLHLVAHDLNRRGVLSPKDYFAQLQGREPQGREWSATALKRSLISKAMLGYATLNGKIVRDDDGAPLVRAEPILTREQQEALRAELAKTSRAKPAVSTPSLLLRVLFCAVCGEPAYKFVGGGRKHPRYRCRSMGFPKHCGNGTVVMAEWDAFCEEQVLDLLGDAERLERVWVAGSDSAVELAEVNAELVDLTSSIGSPAYRAGSPQREALDARIAALVARQEELEGLEARPSGWEWRETGQRFRDWWREQDTAAKNTWLRSMSVRLTFDVRGGLTRTIDFGELQEYEQHLRLGSVVERLHTGMS

SEQ ID NO: 8639 - protein, 500 aa, synthetic construct
MRALVVIRLSRVTDATTSPERQLESCQQLCAQRGWDVVGVAEDLDVSGAVNPFDRKRRPNLARWLAFEEQPFDVIVAYRVDRLTRSVRHLQQLVRWAEDHKKLVVSATEAHFDTTTPFAAVVIALMGTVAQMELEAIKERIRSAAHFNIRAGKYRGSLPPWGYLPTRVDGEWRLVPDPVQRERILEVYHRVVHNHEPLHSVAHDLNRRGVLSPKDYFARLQGREPQGRKWSATALKRSMISKAMLGYATLNGKTVRGDDGAPLVRAEPILTRGQLEALRAELAKTSRAKPAVSTPSLLLRVLFCAVCGEPAYKFVGGGRKHPRYRCRSMGSPEHCGNGTVVMAEWDVFCEEQVLNLLGDAERLEKVWVAGSDSAVELAEVNAELVDLTSLIGSPAYRAGSPQREALDTRIAALAARQEELESLEARPSGWGWRGTGQRLGDWWREQDTAAKNTWLRSMNVRLTFDVRGGLTRTIDFGDLQEYEQHLRLGSVVERLHTGMS

SEQ ID NO: 8640 - protein, 500 aa, synthetic construct
MRALVVIRLSRVTDATTSPERQLESCQQLCAQRGWDVVGVAEDLDVSGAVDPFDRKRRPNLARWLAFEEQPFDAVVAYRVDRLARSIRHLQQLVHWAEDHKKLVVSATEAHFDTTTPFAAVVIALMGTVAQMELEAIKERNRSAAHFNIRAGKYRGSLPPWGYLPTRVDGEWRLVPDPVQRERILEVYHRVVDNHEPLHWVAHDLNRRGVLSPKDYFAQLQGREPQGRKWSATALKRSMISGAMLGYATLSGKTVRDDDGAPLVRAEPILTREQQEALRAELVKTSRAEPAVSTPSLLLRVLFCAVCGEPAYKFAGGGRKHPRYRCRSMGFPKHCGNGTVAMAEWDAFCEEQVLNLLEDAERLEKVWVAGSDSAVELAEVNAELVDLTSLIGSPTYRAGSPQREALDARIAALAARQEELEGLEARPSGWEWRGTGQRFGDWWREQDTAAKNTWLRSMNVRLTFDVRGGLTRTIDFGDLQEYEQHLRLGSVVERLRTGMS

SEQ ID NO: 8641 - protein, 500 aa, synthetic construct
MRALVVIRLSRVTDATTSPERQLESCQQLCAQRGWDVVGVAEDLDVSGAVDPFDRKRRPNLARWLAFEAQPFDVIVAYRVDRLTRSTRHLQQLVHWAEDHKKLVVSATEAHFDTTTPFAAIVIALMGTVAQMELEAIKERIRSAAHFNIRAGKYRGSLPPWGYLPTRVDGEWRLVPDPVQRERILEVFHRVVDNHEPLHLVAHDLNRRGVLSPKDYFAQLRGREPQGRKWSATALRRSMTSEAMLGYATLNGMTVRDDDGAPLVRAEPILTREQLEALRAELAKTSRAKPAVSTPSLLLRVLFCAVCGEPAYKFTGGGRKHPRYRCRSMGFPGHCGNGTVAMAEWDAFCEEQVLNLLGDAERLEKVWVAGSDSALELAEVNAELVDLTSLIGSPAYRAGSPQREALDARIAALAARQGELEGLEARPSGWEWRGTGQRLGDWWRKQDTAAKNTWLRSMNIRLTFDVRGGLTRTIDFGELQEYEQHLRLGSVSERLHTGMS

SEQ ID NO: 8642 - protein, 500 aa, synthetic construct
MRALVVIRLSRVTDATTSPERQLESCQQLCAQRGWDVVGVAEDLDVSGGVDPFDRKRRPNLARWLAFEEQPFDVIVAYRVDRLTRSVRHLQRLVRWAEDHKKLVVSATEAHFDMTTPFAAVVIALMGTVAQMELEAIKERIRSAVRFNIRAGKYRGSLPPWGYLPTRVDGEWRLVPDPVQRERILEVYRRVVDNHEPLHLVAHDLNRRGVLSPKDYFAQLRGREPRGRKWSATALRRSMTSEAMLGYATLNGKTVRDDDGAPLVRAEPILTREQLKALRAELVKTSRAKPAVSTPSLLLRVLFCAVCGEPAYKFVGGGRKHPRYRCRSMGSPKHCGNGTVVMAEWDAFCEEQVLNLLGDVERLEKVWVVGSDSSVELAEVNAELVDLTSLIGSQAYRAGSPQREALDARIAALAARQEELGGLEARPSGWEWRETGQRFRDWWREQDTAAKNTWLRSMNVRLTFDVRGGLTRTIDFGDLQEYEQHLRLGNVVGRLHTGMS

SEQ ID NO: 8643 - protein, 500 aa, synthetic construct
MRALVVIRLSRVTEATTSPERQLESCQQLCAQRGWDVVGVAEDLDVSGAVDPFDRKRRPNLARWLAFEEQPFDVIVAYRVDRLTRSTRHLQQLVRWAEDHKKLVVSATEAHFDTTTPFAAVVIALMGTVAQMELEAIKERIRSAVRFNIRAGKYRGSLPPWGYLSTRVDGEWRLVPDPVQRERILEVYRRVVDNHEPLHLVAHDLNRRGVLSPKDYFAQLRGREPQGRKWSATALKRSMTSVAMLGYATLNGETVRDDDGVPLVRAEPILTREQQEALRAELAKTSRAKPAVSTPSLLLRVLFCAVCGEPAYKFAGGGRKHPRYRCRSMGSPKHCGNGTVVMAEWDAFCEEQVLDLLGDTERLEKVWVAGSDSVVELAEVNAELVDLTSSIGSPAYRAGSPQREALDARIAALAARQEELEGLETRPSGWEWRETGQRFGDWWREQDTAAKNTWLRSMNVRLTFDVRGGLTRTIDFGELQEYERHLRLGSVAERLRTGMS

SEQ ID NO: 8644 - protein, 500 aa, synthetic construct
MRALVVIRLSRVTDATTSPERQLESCQQLCAQRGWDVVGVAEDLDVSGAVDPFDRKRRPNLARWLAFEEQPFDAIVAYRVDRLTRSVRHLQQLVRWAEDHEKLVVSATEAHFDTTTPFAAVVIALMGTVAQMELEAIKERIRSAVHFNIRAGKYRGSLPPWGYLPTRVDGEWRLAPDPVQRERILEVYRRVIDNHEPLHLVAHDLNRRGVLSPKDYFAQLRGREPRGRKWSATALRRSMTSEAMLGYATLNGKTVRDDDGAPLVRAEPILTREQLEALRAELAKTSRAKPAVSAPSLLLRVLFCAVCGEPAYKFAGGGRKHPRYRCRSMGFLKHCGNGTVVMAEWDAFCEEQVLDLLGDAERLEKVWVAGSDSAVELAEVNAELVDLTSLIGSPAYRAGSPQREALDARIAALAARQEELEGLEARPSGWEWRGTGQRFGDWWREQDTAAKNAWLRLMNVRLTFDVRGGLTRAIDFGDLQEYGQHLRLGSVAERLHTGMS

SEQ ID NO: 8645 - protein, 500 aa, synthetic construct
MRALVVIRLSRVTDATTSPERQLESCQQLCAQRGWDVVGVAEDLDVSGAVDPFDRKRRPNLARWLAFEEQPFDVIVAYRVDRLTRSTRHLQQLVHWAEDHKKLVVSATEAHFDTTTPFAAVVIALMGTVAQMELEAIKERNRSAAHFNIRAGKYRGSLPPWGYLPTRVDGEWRLVPDPVQRERILEVYHRVVDNHEPLHLVAHDLNRRGVLSPKDYFAQLRGREPQGRKWSATALKRSMTSEAMLGYATLNGKTVRDDDGAPLVRAEPILTREQLEALRAELIRTSRAKPAVPTPSLLLRVLFCAVCGEPAYKFAGGGRKHPRYRCRSMGFPKHCGNGTVVMAEWDAFCEEQVLDLLGDAERLEKVWIAGSDSAVELAEVNAELVDLTSLIGSPAYRAGPPQREALDARIAALAARQEELEGIGARPSGWEWRETGQRFGDWWREQDTAAKNTWLRSMNVRLTFDVRDGLTRTIDFGDLQEYEQHLRLGSVVERLHTGMS

SEQ ID NO: 8646 - protein, 500 aa, synthetic construct
MRALVVIRLSRVTDATTSPERQLESCQQLCAQRGWDVVGVAEDLDVSGAVDPFDRKRRPNLARWLAFEEQPFDVIVAYRVDRLTRSTRHLQQLVHWAEDHKKLVVSATEAHFDTTTPFAAVVIALMGTVAQMELEAIKERNRSAAHFNIRAGKYRGSLPPWGYLPTRVDGEWRLVPDPVQRERILEVYHRVVDNHESLHLVAHDLNRRGVLSPKDYFAQLRGREPQGRKWSATALKRSMISEAMLGYATLNGKTVRDDDGAPLVRAEPILTREQLEAVRAELVKTSRAKPAVSTPSLLLRVLFCAVCGEPAYKFAGGGRKHPRYRCRSMGFPKHCGNGTVAMAEWDAFCEEQVLDLLGDAERLEKVWVAGSDSAVELAEVNAELVDLTSLIGSPAYRAGSQQREALDARIAALAARQEELEGLEARPSGWEWCETGQRFGDWWREQDTAAKNTWLRSMNVRLTFDVRGGLTRTIDFGDLQEYEQHLRLGSVVERLHTGMS

SEQ ID NO: 8647 - protein, 500 aa, synthetic construct
MRALVVIRLSRVTDATTSPKRQLESCQQLCAQRGWDVVGVAEDLDVSGAVDPFDRKRRPNLARWLAFEEQPFDVIVAYRVDRLTRSVRHLQQLVRWAEDHKKLVVSATEAHFDTTTPFAAVVIALMGTVAQMELEAIKERIRSATHFNIRAGKYRGSLPPWGYLPARVDGEWRLVPDPVQRERILEVYHRVVDNHEPLHLVAHDLNRRGVLSPKDYFAQLRGREPRGRKWSATALRRSMTSEAMLGYATLNGKTVRDDDGAPLVRAEPILTREQLEALRAELVKTSRAKPAVSTPSLLLRVLFCAVCGEPAYKFVGGGRRHPRYRCRSMGFPKHCGNGTVVMAEWDAFCEKQVLGLLGDAERLEKVWVAGSDSAVELAEVNAELVDLMSLIGSPAYRAGSPQREALDARIAALAARQEELEGLEARPSGWEWRETGQRFGDWWREQDTAAKNTWLRSMNVRLTFDVRGGLTRTVDFGDLQEYERHLRLGSVVERLHTGTS

SEQ ID NO: 8648 - protein, 500 aa, synthetic construct
MRALVVIRLSRVTDATTSPERQLESCQQLCAQRGWDVVGVAEDLDVSGAVDPFDRKRRPNLARWLAFEEQPFDVIVAYRVDRLTRSTRHLQQLVHWAEDHKKLVVSATEAHFDTTTPFAAVIIALMGTVAQMELEAIKERYRSAAHFNIRAGKYRGSLPPWGYLPTRVDGEWRLVPDPVQRERILEVYRRVVDNHEPLHLVAYDLNRRGVLSPKDYFAQLRGREPQGRKWSATALRRSMTSVAMLGYATLNGKTVRDDDGAPLVRAEPILTREQLEALRAELVKTSRAKPAVSTPSLLLRVLFCAVCGEPAYKFVGGGRKHPRYRCRSMGFPKHCGNGTVAMAEWDAFCEEQVLDLLGDAERLEKVWVAGSDSAVELAEVNAELVDLTSLIGSPAYRAGSPQREALDARIAALAARQEELEGLEARPSGWEWRETGQRFGDWWHEQDTAAKNTWLRSMNVRLTFDVRGGLTRTIDFGDLKEYEQHLRSGSVVERLHTGMS

SEQ ID NO: 8649 - protein, 500 aa, synthetic construct
MRALVVIRLSRVTDATTSPERQLESCQQLCAQRGWDVVGVAEDLDVSGAVDPFDRKRRPNLARWLAFEEQPFDAIVAYRVDRLTRSTRHLQQLVLWAEDHKKLVVSATEAHFDTTTPFAAVVIALMGTVAQMELEAIKERIRSATHFNIRAGKYRGSLPPWGYLPARVDGEWRLVPDPVQRERILEVYHRVVDNHEPLHLVAYDLNRRGVLSPKDYFAQLQGREPQGRKWSATALKRSMTSKAMLGYATLNGKTVRDDDGVPLVRAEPILTREQQEALRAEFVKTSRAKPAVSTPSLLLRVLFCAVCGEPAYKFVGGGRKHPRYRCRSMGFPEHCGNGTVVMAEWDAFCEEQVLNLLGDAERLEKVWVAGSDSVADLAEVNAELVDLTSLIGSPAYRAGSPQREALDARIAALAARQEELEGLEARPSGWEWRGTGQRLGDWWREQDTAAKNTWLRSMNIRLTFDVRGGLTGTIDFGELREYEQHLRLGGVAERLHTGMS

SEQ ID NO: 8650 - protein, 500 aa, synthetic construct
MRALVVIRLSRVTDATTSPERQLESCQQLCAQRGWDVVGVAEDLDVSGAVDPFDRKRRPNLARWLAFEEQPFDVIVACRVDRLTRSVRHLQQLVHWAEDHKKLVVSATEAHFDTTTPFAAVVIALMGTVAQMELEAIRERNRSAAHFNIRAGKYRGSLPPWGYLPTRVDGEWRLVPDPVQRERILEVYHRVVDNHEPLHLVAHDLNRRGVLSPKDYFAQLQGREPQGRKWSATALKRSMISEAMLGYATLNGKTVRDDDGAPLVRAEPILTRGQLEALRAVLVKTSRAKPAVSTPSLLLRVLFCAVCGEPAYKFAGGGRKHPRYRCRSMGFPKHCGNGTVAMAEWDAFCEEQVLDLLGNTERQEKVWVAGSDSAVELAEVNAELVDLTSLIGSPAYRAGSPQREALDARIAALAARQEELEGLEARPSGWEWRETGQRFGDWWREQDTAAKNTWLRSMNVRLTFDVRGGLTRTIDFGDLQEYEQHLRLGSVVERLHTGMS

SEQ ID NO: 8651 - protein, 500 aa, synthetic construct
MRALVVIRLSRVTEATTSPGRQLESCQQLCAQRGWDVVGVAEDLDVSGAVDPFDRKRRPNLARWLAFEEQPFDVIVAYRVDRLTRSIRHLQQLVHWAEDHKKLVVSATETHFDTTTPFAAVVIALMGTVAQMELEAIKERIRSAAHFNIRAGKYRGSLPPWGYLPTRVDGEWRLVPDPVQRERILEVYHRVVGNHEPLHLVAHDLNRRGVLSPKDYFAQLQGREPQGRKWSATALKRSMISAAMLGYATLNGKTVRDDDGAPLVRAEPILTREQQEALRAELAKTSRAKPAVSTPSLLLRVLFCAVCGEPAYKFVGGGRKHPRYRCRSMGFPKHCGNGTVVMTEWDAFCEEQVLDLLGDAERLEKVWVAGSDSAVELAEVNAELVDLTSLISSPAYRAGSPQREALDARIAALAARQGELEGLEARPSGWEWRGTGQRFGDWWREQDTAAKNTWLRSMNVRLTFDVRGGLTRTIDFGDLREYEQHLRLGSVVERLHTGMS

SEQ ID NO: 8652 - protein, 500 aa, synthetic construct
MRALVVIRLSRVTDATTSPERQLESCQQLCAQRGWDVVGVAEDLDVSGAVDPFDRKRRPSLARWLAFEEQPFDVIVAYRVDRLTRSVRHLQQLVHWAEDHKKLVVSATEAHFDTTTPFAAVVIALMGTVAQMELEAIKERNRSAAHFNIRAGKYRGSLPPWGYLPTRVDGEWRLVPDPVQRERILEVYHRVVDNHEPLHLVAHDLNRRGVLSPKDYFAQLQGREPQGRKWSATALKRSMTSEAMLGYATLNGKTVRDDDGAPLVRAEPILTREQLEALRAELVKTTRAKPAVSTPSLLLRVLFCAVCGEPAYKFAGEGRRHPRYRCRSMGFPKHCGNGTVAMAEWDAFCEEQVLDLLGDAERLEKVWVAGSDSAVELAEVNAELVDLTSLIGSPAYRAGSPQREALDARIAALAARQEELEGLEARPSGWEWRETGQRFGDWWREQDTAAKNTWLRSMNVRLTFDVRGGLTRTIDFGVLQEYEQHLRLGSVVERLHTGMP

SEQ ID NO: 8653 - protein, 500 aa, synthetic construct
MRALVVIRLSRVTDATTSPERQLESCQQLCAQRGWDVVGVAEDLEVSGAVDPFDRKRRPNLARWLAFEEQPFDVIVAYRVDRLTRSTRHLQQLVRWAEDHKKLVVSATEAHFDTTTPFAAVVIALMGTVAQMELEAIRERIRSATHFNIRAGKYRGSLPPWGYLPTRVDGEWRLVPDPVQRERILEVYHRVVDSHEPLHLVAHDLNRRGVLSPKDYFAQLRGREPRGRKWSATALKRSMISKAMLGYATLNGKIVRDDDGAPLVRAEPILTREQLEALRAELVKTSRAKPAVSTPSLLLRVLFCAVCGEPAYKFVGGGRKHPRYRCRSMGFPKHCGNGTVVMAEWDAFCEEQVLDLLGDAERLERVWVAGSDSAVELAEVNAELVDLTSLIGSPAYRAGSPQREALDARIAALAARQEELEGLEARPSGWEWRGTGQRFGDWWREQDTAAKNTWLRSMNVRLTFDVRGGLTRTIDLGELQEYEQHLRLGSVAERLHTGMS

SEQ ID NO: 8654 - protein, 500 aa, synthetic construct
MRALVVIRLSRVTDATTSPGRQLESCQQLCAQRGWDVVGVAEDLDVSGAVDPFDRKRRPNLARWLAFEEQPFDVIVAYRVDRLARSTRHLQQLVHWAEDHKKLVVSATEAHFDTTTPFAAVVIALMGTVAQMELEAIRERNRSAAHFNIRAGKYRGSLPPWGYLPTRVDGEWRLVPDPVQRERILEVYHRVVVNHEPLHLVAHDLNRRGVLSPKDYFAQLQGREPQGRKWSATALKRSMISEALLGYATLNGKTVRDDGGAPLVRAEPILSREQLEALRAELVKTSRAKPAVSTPSLLLRVLFCAVCGEPAYKFAGGGRKHPRYRCRSMGFPKHCGNGTVAMAEWDAFCEEQVLGLLGDAERLEKVWVAGSDSAVELAEVNAELVDLTSLIGSPAYRAGSPQREALDARIATLAARQEELEGLGTRPSGWEWRETGQRFGDWWREQDTAAKNTWLRSMNVRLTFDVRGGLTRTIDFGDLQEYEQHLRLGSVVERLHTGMS

SEQ ID NO: 8655 - protein, 500 aa, synthetic construct
MRALVVIRLSRVTDATTSPERQLESCQQLCAQRGWDVVGVAEDLDVSGAVDPFDRKRRPNLARWLAFEEQPFDVIVAYRVDRLTRSIRHLQQLVHWAKDHKKLVVSATEAHFDMTTPFAAVVIALMGTVAQMELEAIKERIRSAAHFNIRAGKYRGSLPPWGYLPSRVDGEWRLVPDPVQRERILEVYHRVVDNHEPLHLVAHDLNRRGVLSPKDYFAQLQGREPQGRKWSATALKRSMISGAMLGYATLNGKTVRGDDGAPLVRAEPILTREQQEALRAELAKSSRAKPAVSTPSLLLRVLFCAVCGEPAYKFVGGGRKHPRYRCRSMGFPEHCGNGTVVMAEWDAFCEEQVLDLLGDAEHLEKVWVAGSDSAAELAEVNAELVDLTGLIGSPAYRAGSPQREALDARIAALAARQEELEGLEAHPSGWEWRGTGQRFGDWWHEQDTAAKNTWLRSMNVRLTFDVRGGLTRTIDFGDLQEYEQHLRSGSAVERLHTGMS

SEQ ID NO: 8656 - protein, 500 aa, synthetic construct
MRVLVVIRLSRVTDATTSPERQLESCQQLCAQRGWDVVGVAEDLDVSGAVDPFDRKRRPNLARWLAFEEQPFDVIVAYRVDRLTRSTRHLQQLVHWAEDHKKLLVSATEAHFDTTTPFAAVVIALMGTVAQMELEAIKERNRSAAHFNIRAGKYRGSLPPWGYLPTRVDGEWRLVPDPVQRERILEVYHRVVDDHEPLHLVAHDLNRRGVLSPKDYFAQLQGREPQGRKWSATALKRSMISEAMLGYATLNGKTVRDDDGAPLVRAEPILTREQLEALRAELVKTSRAKPAVSTPSLLLRVLYCAVCGEPAYKFAGGGRKHPRYRCRSMGSPKHCGNGTVAMAEWDAFCEEQVLDLLGDAERLEKVWVAGSDSAVELAEVNAELVDLTSLIGSPAYRAGSPQREALDARIAALAARQEELEGLEARPSGWGWRETGQRFGDWWREQDTAAKNTWLRSMNVRLTFDVRGGLTRTIDFGDLQEYEQHLRLGSVVERLHTGIS

SEQ ID NO: 8657 - protein, 500 aa, synthetic construct
MRALVVIRLSRVTDATTSPERQLESCQQLCAQRGWDVVGVAEDLDVSGAVDPFDRKRRPNLARWLAFEEQPFDVIVAYRVDRLTRSTRHLQQLVRWAEDHKKLVVSATEAHFDTTTPFAAVVIALMGTVAQMELEAIKERIRSATHFNIRAGKYRGSLPPWGYLPTRVDGEWRLVPDPVQRERILEVYHRVVDNHEPLHLVALDLNRRGVLSPKDYFAQLRGREPQGRRWSATALKRSMTSGAMLGYATLNGKTVRDDDGAPLVRAEPILTREQQEALRAELAKTSRAKPAVSTPSLLLRVLFCAVCGEPAYKFVGGGRKHPRYRCRSMGFPEHCGNGTVVMAEWDAFCEEQVLNLLGDAERLEKVWVAGSDSAAELAEVNAELVDLTSLIGSPAYRAGSPQREALDARIAALAARQEDLEGLEARPSGWEWRGTGQRLGDWWCEQDTAAKNTWLRSMNVRLTFDVRGGPTRTIDFGDLREYEQHLRLGSVVERLHTGMS

SEQ ID NO: 8658 - protein, 500 aa, synthetic construct
MRALVVIRLSRVTDATTSPERQLESCQQLCAQRGWDVVGVAEDLDVSGAVNPFDRKRRPNLARWLAFEEQPFDVIVTYRVDRLTRSTRHLQQLVHWAEDHKKLVVSATEAHFDTTTPFAAVVIALMGTVAQMELEAIKERNRSAAHFNIRAGKYRGSLPPWGYLPARVDGVWRLVPDPVQRECILEVYHRVVDNHEPLHLVVHDLNRRGVLSPKDYFAQLQGREPQGRKWSATALKRSMTSEAMLGYATLNGKTVRDDDGAPLVRAEPILTRGQLEALRAELVRTSRAKPAVSTPSLLLRVLFCAVCGEPAYKFAGGGRKHPRYRCRSMGFPKHCGNGTAAVAEWDAFCEEQVLDLLGDAERLEKVWVAGSDSAVELAEVNAELVDLTSLIGSPAYRAGSPQREALDARIAALAARQEELEGLGARPPGWEWRETGQRFGDWWREQDTAAKNTWLRSMNVRLTFDVRGGLTRTIDFGDLQEYEQHLRSGSAVERLHTGMS

SEQ ID NO: 8659 - protein, 500 aa, synthetic construct
MRALVVIRLSRVTDATTSPERQLESCQQLCAQRGWDVVGVAEDLDVSGAVDPFDRKRRPNLARWLAFEEQPFDVIVAYRVDRLTRSVRHLQQLVHWAEDHKKLVVSATEAHFDTTTPFAAVVIALMGTVAQMELEAIKERIRSAAHFNIRAGKYRGSLPPWGYLPARVDGEWRLVPDPVQRERILEVYHRVVDNHEPLHLVAYDLNRRGVLSPKDYFAQLRGREPRGRKWSATALKRSMTSVAMLGYATLNGKTVRDDNGAPLVRAEPILTREQLEALRAELARTSRAKPAVSAPSLLLRVLFCAVCGEPAYKFVGGGRKHPRYRCRSMGFPKHCGNGTVVMTEWDAFCEEQVLDLLGDAERLEKVWVAGSDSAVELAEVNAELVDLTSLIGSPAYRAGSPQREALDARIAALAARREELEGLEARPSGWEWRETGQRFGDWWREQDTAAKNTWLRSMNVRLTFDVRGGPTRTIDFGDLQEYVQHLRLGSVVERLRTGMS

SEQ ID NO: 8660 - protein, 500 aa, synthetic construct
MRALVVIRLSRVTDATTSPERQLESCQQLCAQRGWDVVGVAEDLDVSGAVDPFDRKRRPNLARWLAFEEQPFDVIVTYRVDRLTRSTRHLQQLVRWAEDHKKLVVSATEAHFDTTTPFAAVVIALMGTVAQMELEAIKERIRSATHFNIRAGKYRGSLPPWGYLPTRVDGEWRLVPDPVQRERILEVYHRVVDNHEPLHLVAHDLNRRGVLSPKDYFAQLQGREPQGRKWSATALKRSMISVAMLGYATLNGKIVRDDDGAPLVRAEPILTREQQEALRAEFAKTSRAKPAVSTPSLLLRVLFCAVCGEPAYKFTGGGRKHPRYRCRSMGFPKHCGNGTVVMTEWDAFCEEQVLNLLGDAERLEKVWVASSDSAVELAEVNAELVDLTSLIGSPAYRAGSPQREALNARIAALAARQGELEGLEARPSGWEWRETGQRFRDWWCEQDTAAKNTWLRSMNVRLTFDVRGGLTRTIDFGDLQEYEQHLRLGSVVERLRPGVS

SEQ ID NO: 8661 - protein, 500 aa, synthetic construct
MRALVVIRLSRVTDTTTSPERQLETCQQLCAQRGWDVVGVAEDLDVSGAVDPFDRKRRPNLARWLAFEGQPFDAIVAYRVDRLTRSTRHLQQLVHWAEDHKKLVVSATEAHFDTTTPFAAVVIALMGTVAQMELEAIKERNRSAAHFNIRAGKYRGSLPPWGYLPTRVDGEWRLVPDPVQRERILEVYHRVVDNHEPLHLVAHDLNRRGVLSPKDYFAQLQGREPQGRRWSATALKRSMISEAMLGYATLNGKTVRNDDGAPLVRAEPILTRAQLEALRAELVKTSRAKPAVSTPSLLLRVLFCAVCGEPAYKFAGGGRKHPRYRCRSMGFPKHCGNGTVAMAEWDAFCEEQVLDLLGDAERLEKVWVAGSDSAVELAEVNAELVDLTSLIGSPAYRAGSPQREALDARIAALAARQEELEGLEARPSGWEWRETGQRFGDWWREQDTAAKNTWLRSMNVRLTFDVRGGLTRTIDFGDLQEYEQHLRLGSVVERLHTEMS

SEQ ID NO: 8662 - protein, 500 aa, synthetic construct
MRALVAIRLSRVADATTSPERQLESCQQLCAQRGWDVVGVAEDLDVSGAVDPFDRKRRPNLARWLAFEEQPFDVIVAYRVDRLTRSTRHLQQLVHWAEDHKKLVVSATEAHFDTTTPFAAVVIALMGTVAQMELEAIKERNRSAAHFNIRAGKYRGSLPPWGYLPTRVDGEWRLAPDPVQRERILEVYHRVVDNHEPLHLVAHDLNRRGVLSPKDYFAQLQGREPQGRKWSATALKRSMISEAMLGYATLNGKTVRDDDGAPLVRAEPILTRGQLEALRAELVKTSRAEPAVSTPSLLLRVLFCAVCGEPAYKFAGGGRKHPRYRCRSMGFPKHCGNGTVVMAEWDAFCEEQVLDLLGDAERLEKVWVAGSDSAVELAEVNAELVDLTSLIGSPAYRAGSPQREALDARIAALAARQEELEGLEARPSGWEWRETGQRFGDWWREQDTAAKNTWLRSMNVRLTFDVRGGLTRTIDFGVLREYEQHLRLGSVVKRLHTGMS

SEQ ID NO: 8663 - protein, 500 aa, synthetic construct
MRALVVIRLSRVTDATTSPERQLESCQQLCAQRGWDVVGVAEDLDVSGAVDPFDRKRRPSLARWLAFEEQPFDVIVTYRVDRLTRSTRHLQQLVRWAEDHKKLVVSATEAHFDTTTPFAAVVIALMGTVAQMELEAIKERIRSAAHFNIRAGKYRGSLPPWGYLPARVDGEWRLVPDPVQRERILEVYHRVVDNHEPLHLVAHDLNRRGVLSPKDYFAQLRGREPQGRKWSATALKRSMTSVAMLGYATLNGKTVRGDDGAPLVRAEPILTREQQEALRAELAKTSRAKPAVSTPSLLLRVLFCAVCGEPAYKFTGGGRKHPRYRCRSMGFPEHCGNGTVVMAEWDAFCEEQVLDLLGDAERLEKVWVAGSDSAVELAEVNAELVDLTSLIGSPAYRAGSPQREVLDARIAALAARQGELEGLEARPSGWEWRETGQHFGDWWREQDTAAKNTWLRLMNVRLTFDARGGLTRTIDFGDLQEYEQHLRLGSAVERLHTGMS

SEQ ID NO: 8664 - protein, 500 aa, synthetic construct
MRALVVIRLSRVTDATTSPERQLESCRQLCAQRGWDVVGVAEDLDVSGAVDPFDRKRRPNLARWLASEEQPFDVIVAYRVDRLTRSTRHLQQLVRWAEDHKKLVVSATEAHFDTTTPFAAVVIALMGTVAQMELEAIKERIRSAVHFNIRAGKYRGSLPPWGYLPTRVDGEWRLVPDPVQRERILEVYHRVVDNHEPLHLVAYDLNRRGVLSPKDYFAQLQGREPQGREWSATALKRSMTSVAMLGYATLNGKTVRDGDGAPLVRAEPILTRGQQEALRAELAKTSRAKPAVSTPSLLLRVLFCAVCGEPAYKFTGGGRKHPRYRCRSMGFPKHCGNGTVVMTEWDAFCEEQVLDLLGDAERLEKVWVAGSDSAVELAAVNAELVDLTSLIGSPAYRAGSPQREALDARIAALAARQEELEGLEARPSGWEWRGTGQRFGDWWREQDTAAKNTWLRSMNVRLTFDVRGGLTRTVDFGDLQEYEQHSRSGSVVERLHTGMS

SEQ ID NO: 8665 - protein, 500 aa, synthetic construct
MRALVVIRLSRVTDATTSPERQLESCQQLCAQRGWDVVGVAEDLDVSGAVDPFDRKRRPNLARWLAFEEQPFDVIVAYRVDRLTRSTRHLQQLVHWAEDHKKLVVSATEAHFDTTTPFAAVVIALMGTVAQMELEAIKERNRSAAHFNIRAGKYRGSLPPWGYLPTRVDGEWRLAPDPVQRERILEVYHRVVDNHEPLHLVAHDLNRRGVLSPKDYFAQLQGREPQGRRWSATALKRSMISEAMLGYATLHGKTVRDDDGVPLVRAEPILTREQLEALRAELVKTSRAKPAVSTPSLLLRVLYCAVCGEPAYKFAGGGRKHPRYRCRSMGLLKHCGNGTVAMAEWDAFCEEQVLDLLGDAERLEKVWVAGSDSAVELAEVNAELVDLTGLICSPAYRVGSPQREALDARIAALAARQEELEGVGARPSGWEWRETGQRFGDWWREQDTAARNTWLRSMNVRLTFDVRGGLTRTIDFGDLQEYEQHLRLGSAVERLHTGMS

SEQ ID NO: 8666 - protein, 500 aa, synthetic construct
MRALVVIRLSRVTDATTSPERQLESCQQLCAQRGWNVVGVAEDLDVSGAVDPFDRKRRPNLARWLAFEEQPFDVIVAHRVDRLTRSVRHLQRLVLWAEDHKKLVVSATEAHFDTTTPFAAVVIALMGTVAQMELEAIKERIRSAVHFNIRAGKYRGSLPPWGYLPTRVDGEWRLVPDPVQRERILEVYHRVVDNHEPLHLVAHDLNRRGVLSPKDYFAQLRGREPRGRKWSASALKRSMTSVTMLGYATLNGKTVRDDDGAPLVRAEPILTREQLEALRAELAKTSRAKPAVSTPSLLLRVLFCAVCGEPAYKFVGGGRKHPRYRCRSMGFPKHCGNGTVVMAEWDAFCEEQVLDLLGDTGRLEKVWVAGSDSAVELAEVNAELVDLTSLIGSPAYRAGSPQREALDARIAALAARQAELEGLEARPSGWEWRGTGQRFGDWWREQDTAAKNTWLRSMNVRLTFDVRGGLTRTIDFGDLQEYEQHFRSGSAVERLHTGMS

SEQ ID NO: 8667 - protein, 500 aa, synthetic construct
MRALVVIRLSRVTDATTSPERQLESCQQLCAQRGWDVVGVAEDLDVSGAVDPFDRKRRPNLARWLAFEEQPFDAIVAYRVDRLTRSVRHLQQLVHWAEDHKKLVVSATEAHFDTTTPFAAVVVALMGTVAQMELEAIKERNRSAAHFNIRAGKYRGSLPPWGYLPTRVDGEWRLVPDPVQRERILEVYRRVVDNREPLHLVAHDLNRRGVLSPKDYFAQMQGREPQGCEWSATALKRSMTSEAMLGYATLNGKTVRDDDGAPLVRAEPILTREQLEALRAELVKTSRAKPAVSTPSLLLRVLFCAVCGEPAYKSAGGGRKHPRYRCRSMGFPKHCGNGMVAMAEWDAFCEEQVLNLLGDAERLEKVWVAGSDSAVELSEVNAELVDLTGLIGSPAYRAGSPQREALNARIAALAARQEELVGLEARPSGWEWRETGQRFGDWWREQDTAAKNTWLRSMNVRLTFDVRGEPTRTIDFGDLQEYEQHLRLGSVVERLHTGMS

SEQ ID NO: 8668 - protein, 500 aa, synthetic construct
MRALVVIRLSRVTDATTSPERQLESCQQLCAQRGWDVVGVAEDLDVSGAVDPFDRKRRPNLARWLAFEEQPFDVIVAYRVDRLTRSARHLQQLVHWAEDHKKLVVSATEAHFDTTTPFAAVVIALMGTVAQMELEAIQERNRSAAHFNIRAGKYRGSLPPWGYLPARVDGEWRLVPDPVQRECILEVYHRVVDDHEPLHLVAHDLNRRGVLSPKDYFAQLRGREPQGRKWSATALKRSMISEAMLGYATLNGKIVRDGDGAPLVRAEPILTREQLEALRAELVKTTRAKPAVSTPSLLLRVLFCAVCGEPAYKFAGGGRKHPRYRCRSMGFPKHCGNGTVAMAEWDAFCEEQVLDLLGDAERLEKVWVAGSDSAVELAEVNAELVDLTSLIGSPAYRAGSPQREALDARIAALAARQEELQGLEARPSGWEWRETGQRFGDWWREQDTAAKNAWLRSMNVRLTFDVRGGLTRTIDFGDLQGYEQHLRLGSVVERLHTGMS

SEQ ID NO: 8669 - protein, 500 aa, synthetic construct
MRALVVIRLSRVTEATTSPERQLESCQQLCAQRGWDVVGVAEDLDVSGAVDPFDRKRRPNLARWLAFEEQPFDVIVAYRVDRLTRSIRHLQQLVHWAEDRKKLVVSATEAHFDTTTPFAAVVIALMGTVAQMELEAIKERIRSAVRFNIRAGKYRGSLPPWGYLPTRVDGEWRLVPDPVQRERILEVYHRVVDNHEPLHLVAYDLNRRGVLSPKDYFAQLQGREPQGRKWSATALKRSMTSVAMLGYATLNGKIVRDDDGAPLVRAEPILTREQLEALRAELAKTSRAKPAVSTPSLLLRVLFCAVCGEPAYKFVGGGRKHPRYRCRSMGSPKHCGNGTVVMTEWDTFCEEQVLNLLGDVERLEKVWVAGSDSAVELAEVNAELVDLTSLIGSPTYRAGSPQREALDARIAALAARQEELEGLEARPSGWEWRETGQRFGDWWREQDTAAKNTWLRSMNVRLTFDVRGGLTRTIDFGDLQEYEQHLRLGSVVERLHTGTS

SEQ ID NO: 8670 - protein, 500 aa, synthetic construct
MRALVVIRLSRVTDATTSPERQLESCQQLCAQRGWDVVGVAEDLDVSGAVDPFDRKRRPNLARWLAFEEQPFDVIVAYRVDRLTRSTRHLQQLVHWAEDHKKLVVSATEAHFDTTTPFAAVVIALMGTVAQMELEAIKERNRSAAHFNIRAGKYRGSLPPWGYLPARVDGEWRLVPDPVQRERILEVYHRVVDNHEPLHWVAHDLNRRGVLSPKDYFAQLRGREPQGREWSATALKRSMTSEAMLGYATLNGKTVRDDDGAPLVRAEPILTREQLEALRAELVKAPRAKPAVSTPSLLLRVLFCAVCGEPAYKFAGEGRKHPRYRCRSMGFPKHCGNGTVVMAEWDAFCEEQVLDLLGDAERLERVWVAGSDSAAELAEVNAELVDLTSLIGSPTYRAGSPQREALDARIAALAARQEELEGLEARPSGWEWRETGQRFGDWWREQDTAAKNTWLRSMNVRLTFDVRGGLTRTIDFGDLQEYEQHLRLGSVVERLHTGMS

SEQ ID NO: 8671 - protein, 500 aa, synthetic construct
MRALVVIRLSRVTDATTSPERQLESCQQLCAQRGWDVVGVAEDLDVSGAVDPFDRKRRPNLARWLAFEEQPFDVIVAHRVDRLTRSTRHLQQLVHWAEDHKKLVVSATEAHFDTTTPFAAVVIALMGTVAQMELEAIKERNRSAAHFNICAGKYRGSLPPWGYLPARVDGVWRLVPDPVQRERILEVYHRVVDNHEPLHLVAHDLNRRGVLSPKDYFAQLQGREPQGRKWSATALKRSMTSEAMLGYATLNGKTVRDDDGAPLVRAEPILTREQLEALRAELVKTSRARPAVSTPSLLLRVLFCAVCGEPAYKFAGGGRKHPRYRCRSMGFPKHCGNGTVAMAEWDAFCEEQVLNLLGDAERLEKVWVAGSDSAVELAEVNAELVDLTSLIGSPAYRAGSPQREALDARIAALAARQEELEGLEARPPGWEWRETGQRFGDWWREQDTAAKNTWLRSMSVRLTFDVRGGLTRTIDFGDLQEYEQHLRLGSVVKRLHTGMS

SEQ ID NO: 8672 - protein, 500 aa, synthetic construct
MRALVVIRLSRVTDATTSPERQLESCQQLCAQRGWDVVGVAEDLDVSGAVDPFDRKRRPNLARWLAFEEQPFDVIVAYRVDRLTRSTRHLQQLVHWAEDHKKLVVSATEAHFDTTTPFAAVVIALMGTVAQMELEAIKERNRSAAHFNIRAGKYRGSLPPWGYLPTRVDGEWRLAPDPVQRERILEVYHRVVDDHEPLHLVAHDLNRRGVLSPKDYFAQLQGREPQGRKWSATALKRSMISEAMLGYATLNGKTVRDDDGAPLVRAEPILTREQQEALRAELVKTSRAKPAVFTPSLLLRVLFCAVCGEPAYKFAGGGRKHPRYRCRSMGFPKHCGNGTVVMAEWDAFCEEQVLNLLGDAERLEKVWVAGSDSAVELAEVNAELVDLTGLIGSPAYRAGSPQREALDARIAALAARQEELEGLGARLSGWEWRETGQRFGDWWREQDTAAKNTWLRSMNVRLTFDVRGGLTRTIDFGDLQEYEQHLRLGSVVERLHTGKS

SEQ ID NO: 8673 - protein, 500 aa, synthetic construct
MRALVVIRLSRVTDATTSPERQLESCQQLCAQRGWRVVGVAEDLDVSGAVDPFDRKRRPNLARWLAFEEQPFDVIVAYRVDRLTRSTRHLQQLVHWAEDHKKLVVSATEAHFDTTTPFAAVVIALMGTVAQMELEAIKERIRSAAHFNIRAGKYRGSLPPWGYLPTRVDGEWRLVPDPVQRERILEVYHRVVDNHEPLHLVAYDLNRRGVLSPKDYFAQLRGREPQGRKWSATALKRSMISVAMLGYATLNGKIVRDNDGAPLVRAEPILTRGQLEALRAELAKTSRAKPAVSTPSLLLRVLFCAVCGEPAYKFVGGGRKHPRYRCRSMGLPKHCGNGTVVMAEWDAFCEEQVLDLLGDAERLEKIWVAGSDSAAELAEVNAELVDLTSLIGSPAYRAGSPQREALDARIAALAARQEELEGLEARPSGWEWRGTGQRFGDWWREQDTAAKNTWLRSMNVRLTFDVRGGLTRTIDFGDLQEYEQHLRLGSAVERLHTGMP

SEQ ID NO: 8674 - protein, 500 aa, synthetic construct
MRALVVIRLSRVTDATTSPERQLKSCQQLCAQRGWDVVGVAEDLDVSGAVDPFDRKRRPNLARWLAFEEQPFDVIVAYRVDRLTRSTRHLQQLVHWAEDHKKLVVSATEAHFDTTTPFAAVVIALMGTVAQMELEAIKERNRSAAHFNIRAGKYRGSLPPWGYLPTRVDGEWRLAPDPVQRERILEVYHRVVDNHEPLYLVAHDLNRRGVLSPKDYFAQLRGREPQGREWSATALKRSMISEAMLGYATLNGKIVRDDDGAPLVRAEPILAREQLEALRAELVKTSRAKPAVSTPSLLLRVLFCAVCGEPAYKFAGGGRKHPRYRCRSMGFSKHCGNGTVAMAEWDAFCEEQVLDLLGDTERLEKVWVAGSDFAIELAEVNAELVDLTSLIGSPAYRADSPQREALDARIAALAARQEELEGLEARPSGWEWRETGQRFGDWWREQDTAAKNTWLRTMNVRLTFDVRGGLTRTIDFGGLQEYEQLLRSGSVVERLHTGMS

SEQ ID NO: 8675 - protein, 500 aa, synthetic construct
MRALVVIRLSRVTDATTSPERQLASCQQLCAQRGWDVVGVAEDLDVSGAVDPFDRKRRPNLARWLAFEEQPFDVIVAYRVDRLTRSVRHLQRLVRWAEDHKKLVVSATEAHFDMTTPFAAVVIALMGTVAQMELEAIKERSRSAAHFNIRAGKYRGSLPPWGYLPARVDGEWRLVPDPVQRERILEVYRRVVDNHEPLHLVAHDLNRRGVLSPKDYFAQLQGREPQGRKWSATALKRSMISRAMLGYATLNGKIVRDDDGAPLVRAEPILTREQQEALRAELAKTSRAKPAVSTPSLLLRVLFCAVCGEPAYKFVGGGRKHPRYRCRSMGSPKHCGNGTVVMAEWDAFCEEQVLNLLGDAERLEKVWLAGSDSAVELAEVNAELVDLTSLIGSPAYRAGSPQREALDARIAALAARQEELEGLEARPSGWEWRGTGQRLGDWWREQGTAAKNTWLRSMNIRLTFDVRGGLTRTIDFGELQEYKQHLRLGSVAERLHTGMS

SEQ ID NO: 8676 - protein, 500 aa, synthetic construct
MHALVVIRLSRVTDATTSPERQLESCQQLCAQRGWDVVGVAEDLDVSGAVDPFDRKRRPNLARWLAFEERPFDVIVAYRVDRLTRSTRHLQQLVHWAEDHKKLVVSATEAHFDTTTPFAAVVIALMGTVAQMELEAIKERIRSAVHFNIRAGKYRGSLPPWGYMPTRVDGEWRLVPDPVQRERILEVYHRVVDNHEPLHLVAHDLNRRGVLSPKDYFAQLQGREPRGRKWSATALRRSMTSMAMLGYATLNGKIVRDDDGAPLVRAEPILTREQLEALRAELAKTSRAKPAVSTPSLLLRVLFCAVCGEPAYKFVGGGRKHPRYRCRSMGFPEHCGNGTVVMAEWDAFCEEQVLDLLGDAVRLEKVWVAGSDSAVELAEVNAELVDLTSLIGSPAYRVGSPQREALDARIAVLAARQEELEGLGARPSGWEWRGTGQRFGDWWREQDTAAKNTWLRSMSVRLTFDARGGLTRTIDFGDLQEYGQHLRLSSVVERLHAGMS

SEQ ID NO: 8677 - protein, 500 aa, synthetic construct
MRALVVIRLSRVTDATTSPERQLESCQQLCTQRGWDVVGVAEDLDVSGAVDPFDRKRRPNLARWLAFGEQPFDVIVAYRVDRLTRSVRHLQQLVHWAEDHKKLIVSATEAHFDTTTPFAAVVIALMGTVAQMELEAIKERNRSAAHFNIRAGKYRGSLPPWGYLPTRVDGEWRLVPDPVQRERILEVYHRVVDNHEPLHWVAHDLNRRGVLSPKDYFAQLQGREPQGRKWSATALKRSIISEAMLGYATLNGKTVRDDDGAPLVRAEPILTREQLEALRAELAKTSRAKPAVSTPSLLLRVLFCAVCGEPAYKFAGGGRKHPRYRCRSMGFPKHCGNGTVVMAEWDAFCEEQVLDLLGDAERLEKVWVAGSDSAVELAEVSAELVDLTSLIGSPAYRAGSPQREALDARIAALAARQEELEGLEARPSGWEWRETGQRFGDWWREQDTAAKNTWLRSMNVRLTFDVRGGLTRTIDFGDLQEYEQHLRLGSVVERLHTGMS

SEQ ID NO: 8678 - protein, 500 aa, synthetic construct
MRALVVIRLSRVTDATTSPERQLESCQQLCAQRGWDVVGVAEDLDVSGAVDPFDRKRRPNLARWLAFEEQPFDVIVAYRVDRLTRSTRHLQQLVHWAEDHKKLVVSATEAHFDTTTPFAAVVIALMGTVAQMELEAIKERNRSAAHFNIRAGKYRGSLPPWGYLPTRVDGEWRLVPDPVQRERILEVYHRVVDNHEPLHLVAHDLNRRGVLSPKDYFAQLRGREPQGRKWSATALKRSMISEAMLGYATLNGKTVRDDDGAPLVRAEPILTREQLEALRAELAKTSRAKPAVSTPSLLLRVLFCAVCGEPAYKFAGGGRKHPRYRCRSMGFPKHCGNGTVVMAEWDAFCEEQVLNLLGDAERLEKVWVAGSDSAVELAEVNAELVDLTSLIGSPAYRAGSLQREALDARIAALAARQEELESLEARPSGWEWRETGQRFGDWWREQDTAAKNTWLRSMNVRLTFDVRGGLTRTIDFGDLQEYEQHLRLGSVVERLHTGMS

SEQ ID NO: 8679 - protein, 500 aa, synthetic construct
MRALVVIRLSRVTDATTSPERQRESCQQLCAQRGWDVVGVAEDLDVSGAVDPFDRKRRPNLARWLAFEEQPFDAIVAYRVDRLTRSIRHLQQLVHWAEDHKKLVVSATEAHFDMTTPFAAVVIALMGTVAQMELEAIKERIRSAVRFNIRAGKYRGSLPPWGYLPTRVDGEWRLVPDPVQRERILEVYHRVVDNHEPLHLVAHDLNRRGVLSPKDYFAQLRGRVPQGREWSATALKRSMTSEAMLGYATLNGKTVRGDDGAPLVRAEPILTREQLEALRAELVKTSRAKPAVSTPSLLLRVLFCAVCGEPAYKFVGGGRKHPRYRCRSMGFPEHCGNGTVVMAEWDAFCEEQVLNLLGDAERLEKVWLAGPDSAAELAEVNAELVDLTSLIGSPAYRAGSPQREALDARIAALAARQEELEGLEARPSGWEWRETGQRFGDWWREQDTAAKNTWLRSMNVRLTFDVRGGLTRTIDFGDLQEYEQHLRSGSVAERLRTGMS

SEQ ID NO: 8680 - protein, 500 aa, synthetic construct
MRALVVIRLSRVTDATTSPERQLESCQQLCAQRGWDVVGVAEDLDVSGAVDPFDRKRRPNLARWLAFEEQPFDAIVTYRVDRLTRSVRHLQQLVHWAEDHKKLVVSATEAHFDTTTPFAAVVIALMGTVAQMELEAIKERNRSAAHFNIRAGKYRGSLPPWGYLPARVDGEWRLVPDPVQRERIFEVYHRVVDNHEPLHLVAHDLNRRGVLSPKDYFAQLQGREPQGRKWSATALKRSMISKAMLGYATLNGKAVRDDDGAPLVRAEPILTCEQLEALRAELVKTSRAKPAVSTPSLLLRVLFCAVCGEPAYKFAGGGRKHPRYRCRSMGFPKHCGNGTVAMAEWDAFCEEQVLNLLGDAERLEKVWVAGSGSAVELAEVNAELVDLTSLIGSPAYRAGSPQREALDARIAALAARQEELEGLEARPSGWEWRGTGQRFGDWWREQDTAVKNTWLRSMNVRLTFDVRGGLTRTVDFGDLQEYEQHLRLGSVVERLHTGMS

SEQ ID NO: 8681 - protein, 500 aa, synthetic construct
MRALVVIRLSRVTDATTSPERQLESCQQLCAQRGWDVVGVAEDLDVSGAVDPFDRKRRPNLARWLAFEEQPFDVIVAYRVDRLTRSVRHLQQLVHWAEDHKKLVVSATEAHFDTTTPFAAVVIALMGTVAQMELEAIKERNRSAAHYNIRAGKYRGSLPPWGYLPTRVDGEWRLVPDPVQRERILEVYHRVVNNHEPLHLVAHDLNRRGVLSPKDYFAQLQGREPQGRKWSATALKRSMTSEAMLGYATLNGKTVRDDDGAPLVRAEPILTRGQLEALRAELVKTSRAKPAVSTPSLLLRVLFCAVCGEPAYKFAGGGRKHPRYRCRSMGFPKHCGNGTVVMAEWDAFCEEQVLNLLGDAERLEKVWVAGSDSAVELAEVNAELVDLTSLIGSPAYHTGSPQREALDARIAVLAARQEELEGLEARPSGWEWRETGQRFGDWWREQDTAAKNTWLRSMNVRLTFDVRGGLTRTIDFGVLQEYEQRLRLGSVVERLHTGMS

SEQ ID NO: 8682 - protein, 500 aa, synthetic construct
MRALIVIRLSRVTDATTSPERQLESCQQLCAQRGWDVVGVAEDLDVSGAVDPFDHKRRPNLARWLAFEEQPFDVIVAYRVDRLTRSTRHLQQLVRWAEDHKKLVVSATEAHFDTTTPFAAVVIALMGTVAQMELEAIKERSRSAAHFNIRAGKYRGSLPPWGYLPTRVDGEWRLVPDPVQRERILEVYHRVVDDHEPLHLVAHDLNRRGVLSPKDYFAQLRGREPQGRKWSATALKRSMISVAMLGYATLNGMTVRDDDGAPLVRAEPILTREQQEALRAELAKTSRVKPAVSTPSLLLRVLFCAVCGEPAYKFVGGGRKHPRYRCRSMGFPKHCGNGTVVMAEWDAFCEEQVLDLLGDAERLEKVWVAGSDSAVELAEVNAELVDLTSLIGSPAYRAGSPQRGALDARIAALATRQVELEGLEARPSGWEWRETGQRFGDWWREQDTAAKNTWLRSMNVRLTFDVRGGQTRTIDFGELQEYEQHLRLGSVVERLHPGTP

SEQ ID NO: 8683 - protein, 500 aa, synthetic construct
MRALVVIRLSRVTDATTSPERQLASCQQLCAQRGWDVVGVAEDLDVSGAVDPFDRKRRPNLARWLAFEEQPFDVIVTYRVDRLTRSTRHLQQLVHWAEDHKKLVVSATEAHFDTTTPFAAVVIALMGTVAQMELEAIKERIRSAVHFNIRAGKYRGSLPPWGYLPTRVDGEWRLVPDPVQRERILEVYHRVVDNHEPLHLVAYDLNRRGVLSPKDYFAQLRGREPQGREWSATALKRSMTSVAMLGYATLNGRTVRGDDGAPLVRAEPILTREQQEVLRAELAKTSRAKPAVSTPSLLLRVLFCAVCGEPAYKFVGGGRKHPRYRCRSMGFPEHCGNGTVVMAEWDTFCEEQVLGLLGDAERLEKVWVAGSDSAVELAEVNAELVDLTSLIGSPAYRAGSPQREALDARIAALAARQEELEGLEARPSGWGWRGTGRRFGDWWREQDTAAKNTWLRSMNVRLTFDVRGVLTRTIDFGDLQEYEQHLRLGSVVERLHTGVS

SEQ ID NO: 8684 - protein, 500 aa, synthetic construct
MRALVVIRLSRVTDATTSPERQLESCQQLCAQRGWDVVGVAEDLDVSGAVDPFDRKRRPNLARWLAFEEQPFDVIVAYRVDRLTRSTRHLQRLVHWAEDHKKLVVSATEAHFDTTTPFAAVVIALMGTVAQMELEAIKERIRSAVHFNIRAGKYRGSLPPWGYLPTRVDGEWRLVPDPVQRERILEVYHRVVDDHEPLHLVAYDLNRRGVLSPKDYFAQLRGREPRGRKWSATALKRSMTSVAMLGYATLNGKTVRDDDGAPLVRAEPILTREQLEALRAELVKTSRAKPAVSTPSLLLRVLFCAVCGEPAYKFVGGGRKHPRYRCRSMGFPKHCGNGTVVMTEWDAFCEEQVLDLLGDAERLERVWVAGSDSAVELAEVNAELVDLTSLIGSPAYRAGSPQREALDARIAALAARQEELEGLGARPSGWEWRETGQRFGDWWREQNTAAKNTWLRSMNVRLTFDVRGGLTRTIDFGDLQEYEQHLRLGSVVERLHTGMS

SEQ ID NO: 8685 - protein, 500 aa, synthetic construct
MRALVVIRLSRVTDATTSPERQLESCQQLCAQRGWDVVGVAEDLDVSGAVDPFDRKRRPNLARWLAFEEQPFDVIVAYRVDRLTRSTRHLQQLVHWAEDHKKLVVSATEAHFDTTTPFAAVVIALMGTVAQMELEAIKERNRSAAHFNIRAGKYRGSLPPWGYLPTCVDGEWRLAPDPVQRERILEVYHRVVDNHEPLHLVAHDLNRRGVLSPKDYFAQLQGREPQGRKWSATALKRSMISGAMLGYATLNGKTVRDDDGAPLVRAEPILTCGQLEALRAELVKTSRAKPAVSTPSLLLRVLFCGVCGEPAYKFAGGGRKHPRYRCRSMGFPKHCGNGTVVMAEWDAFCEEQVLDLLGDAVRLEKVWVAGSDSAVELAEVNAELVDLTSLIGSPAYRASSPQREALDARIAALAARQEELEGLGARPSGWEWRETGQRFGDWWREQDTAAKNTWLRSMNVRLTFDVRGGLTRTIDFGDLQEYKQHLRLGSVVERLHTGTS

SEQ ID NO: 8686 - protein, 500 aa, synthetic construct
MRALVVIRLSRVTDATTSPERQLESCQQLCAQRGWDVVGVAEDLNVSGAVGPFDRKRRPNLARWLAFEEQPFDVIVAYRVDRLTRSIRHLQQLVHWAEDHEKLVVSATEAHFDTTTPFAAVVIALMGTVAQMELEAIKERNRSAAHFNIRAGKYRGSLPPWGYLPTRVDGEWRLVPDPVQRERILEVYHRVVDNHEPLHWVAHDLNRRGVLSPKDYFAQLQGREPQGRKWSATALKRSMISEAMLGYATLNGKTVRDDDGAPLVRAEPILTREQLEALRAELIKTSRAKPAVSTPSLLLRVLFCAVCGEPAYKLAGGGRKHPRYRCRSMGSPKHCGNGTVAMAEWDAFCEEQVLDLLGDAERLEKVWVAGSDSAVELAEVNAELVDLTSLIGSPAYRAGSPQREALDARIAALAARQEELEGLEARPSGWEWRETGQRFGDWWREQDTAAKNTWLRSMNVRLTFDVRGGLTRTIDFGDLLEYEQHLRLGSVVERLHTGMS

SEQ ID NO: 8687 - protein, 500 aa, synthetic construct
MRALVVIRLSRVTDATTSPERQLESCQQLCAQRGWDVVGVAEDLDVSGAVDPFDRKRRPNLARWLAFEEQPFDVIVAYRVDRLTRSTRHLQQLVHWAEDHKKLVVSATEAHFDTTTPFAAVVIALMGTVAQMELEAIKERNRSAARFNIRAGKYRGSLPPWGYLPTRVDGEWRLVPDPVQRERILEVYHRVVDNHEPLHWVAHDLNRRGVLSPKDYFAQLRGREPQGRKWSATALKRSMISEAMLGYATLDGKTVRDDDGAPLVRAEPILTREQLEALRAGLVKTSRAKPAVSTPSLLLRVLFCAVCGEPAYKFAGGGRKHPRYRCRSMGFPKHCGNGTVVMAEWDAFCEEQVLDLLGDAERLEKVWVAGSDSAVELAEVNAELVDLTSLIGSPAYRAGSPQREALDARIAALTARQEELEGLETRPSGWEWRETGQRFGDWWREQDTAAKNTWLRSMNVRLTFDARGGLTRTIDFGDLREYEQHLRLGSVVERLHTGMS

SEQ ID NO: 8688 - protein, 500 aa, synthetic construct
MRALVVIRLSRVTDATTSPERQLESCQQLCAQRGWDVVGVAEDLDVSGAVDPFDRKRRPNLARWLAFEEQPFDVIVAYRVDRLTRSIRHLQQLVHWAEDHKKLVVSATEAHFDTTTPFAAVVIALMGTVAQMELEAIKERNRSAAHFNIRAGKYRGSLPPWGYLPTRVDGEWRLVPDPVQRERILEVYHRVVDNHEPLHLVAHDLNRRGVLSPKDHFAQLRGREPQGRKWSATALKRSMISVAMLGYATLNGKTVRGDDGAPLVRAEPILTREQLEALRAELVKTSRAKPAVSTPSLLLRVLFCAVCGEPAYKFAGGGRKHPRYRCRSMGFPKHCGNGTVVMAEWDAFCEEQVLDLLGNAERLEKVWVAGSDSAVELAEVNAELVDLTSLIGSPAYRAGSPQREALDARIAALAARQEELEGLGARPSGWEWRGTGQRFGDWWREQDTAAKNTWLRSMSVRLTFDVRGGLTRTIDFGDLQEYEQHLRLGSVVERLHTGMS

SEQ ID NO: 8689 - protein, 500 aa, synthetic construct
MRALVVIRLSRVTDATTSPERQLESCQQLCAQRGWGVVGVAEDLDVSGAVDPFDRKRRPNLARWLAFEEQPFDVIVAYRVDRLTRSVRHLQQLVHWAEDHEKLVVSATEAHFDTTTPFAAVVIALMGTVAQMELEAIKERNRSAAHFNIRAGKYRGSLPPWGYLPMRVNGEWRLVPDPVQRERILEVYHRVVNNHEPLHLVAHDLNRRGVLSPKDYFAQLQGREPQGRKWSATALKRSMISEAMLGYATLNGKTVRDDDGAPLVRAEPILTRGQLEALRAELVKTSRAKPAVSTPSLLLRVLFCAVCGEPAYKFAGGGRKHPRYRCRSMGYPKHCGNGTVVMAEWDAFCEEQVLDLLGDAERLEKVWVAGSDSAVELAEVNAELVDLTSLIGSPAYRVGSPQREALDARIAALAARQEELEGLEARPSGWEWRETGQRFGDWWREQDTAAKNTWLRSMNVRLTFDVRGGLTRTIDFGDLQEYEQHLRLGSVVERLHTGMS

SEQ ID NO: 8690 - protein, 500 aa, synthetic construct
MRALVVIRLSRVTDATTSPERQLESCQQLCAQRGWDVVGVAEDLDVSGAVDPFDRKRRPNLARWLAFEEQPFDVIVAYRVDRLTRSVRHLQQLVHWAEDHKKLVVSATEAHFDTTTPFAAVVIALMGTVAQMELEAIKERNRSAAHFNIRAGKYRGSLPPWGYLPTRVDGEWRLVPDPVQRERILEVYHRVVNNHEPLHLVAHDLNRRGVLSPKDYFAQLQGREPQGRKWSATALKRSMISEAMLGYATLNGKTVRGDDGAPLVRAEPILTREQLEALRAELVKTSRAKPAVSTPSLLLRVLFCAVCGEPAYKFAGGGRKHPRYRCRSMGFPKHCGNGTVVMAEWDAFCEEQVLDLLGDAERLEKVWVAGSDSAVELAEVNAELVDLTSLIGSPAYRAGSPQREALDARIAALAARQEELEGLEARPSGWEWRATGQRFGDWWREQDTAAKNTWLRSMNVRLTFDVRGGLTRTIDFGVLQEYEQHLRLGSVVERLHTGMS

SEQ ID NO: 8691 - protein, 500 aa, synthetic construct
MRALVVIRLSRVTDATTSPERQLESCQQLCAQRGWDVVGVAEDLDVSGAVDPFDRKRRPNLARWLAFEEQPFDVIVAYRVDRLTRSTRHLQQLVHWAEDHKKLVVSATEAHFDTTTPFAAVVIALMGTVAQMELEAIKERNRSAAHFNIRAGKYRGSLPPWGYLPTRVDGEWRLVPDPVQRERILEVYHRVVDNHEPLHLVAHDLNRRGVLSPKDYFAQLRGREPQGRKWSATALKRSMISEAMLGYATLDGKTVRDDDGAPIVRAEPILTREQQEALRAELVKTSRAKPAVSTPSLLLRVLFCAVCGEPAYKFAGGGRKHPRYRCRSMGFPKHCGNGTVVMAEWDAFCEEQVLDLLGDAERLEKVWVAGSDSAVELAEVNAELVDLTSLIGSPAYRAGSPQREALDVRIAALAARQEVLEGLEARPSGWEWRGTGQRFGDWWREQDTAAKNTWLRSMNVRLTFDVRGGLTCTIDFGDLQEYEQHLRLGSVVERLHTGMS

SEQ ID NO: 8692 - protein, 500 aa, synthetic construct
MRALVVIRLSRVTDATTSPERQLESCQQLCAQRGWDVVGVAEDLDVSGAVDPFDRKRRPNLARWLAFEEQPFDVIVAYRVDRLTRSTRHLQRLVLWAEDHKKLVVSATEAHFDTTTPFAAVVIALMGTVAQMELEAIKERIRSAVHFNIRAGKYRGSLPPWGYLPTRVDGEWRLVPDPVQRERILEVYHRVVDNHEPLHLVAHDLNRRGVLSPKDYFAQLQGREPQGRKWSATALKRSMTSEAMLGYATLNGKTVRDDDGAPLVRAEPILTREQQEALRAELVKTSRAKPAVSTPSLLLRVLFCAVCGEPAYKFVGGGRKHPRYRCRSMGFPKHCGNGTVVMAEWDAFCEEQVLNLLGDAERLEKVWVAGSDSAVELAEVNAELVDLTSLIGSPAYRAGSPQREALDARIAALAARQEELEGLEARPSGWEWRETGQRFGDWWREQDTAAKNTWLRTMNVRLTFDVRGGLTRTIDFGDLQEYEQHLRLGSVVERSHTGMS

SEQ ID NO: 8693 - protein, 500 aa, synthetic construct
MRALVVIRLSRVTDATTSPERQLESCQQLCAQRGWDVVGVAEDLDVSGAVDPFDRKRRPNLARWLAFEEQPFDVIVAYRVDRLTRSIRHLQQLVHWAEDHKKLVVSATEAHFDTTTPFAAVVIALMGTVAQMELEAIKERIRSATHFNIRAGKYRGSLPPWGYLPTRVDGEWRLMPDPVQRERILEVYHRVVDNHEPLHLVAHDLNRRGVLSPKDYFAQLRGREPQGRKWSATALKRSMISAAMLGYATLNGKTVRGDDGAPLVRAEPILTREQQEALRAELAKTSRAKPAVSTPSLLLRVLFCAVCGEPAYKFVGGGRKHPRYRCRSMGFPEHCGNGTVVMAEWDVFCEEQVLSLLGDAERLEKVWVADSDSAVELAEVNAELVDLTSLIGSPAYRAGSPQREALDARIAALAARQEELESLEARPSGWEWRGTGQRFGDWWREQDTAAKNTWLRSMNIRLTFDVRGGLTRTIDFGDLQEYEQHLRLGSMLKRLRTGMS

SEQ ID NO: 8694 - protein, 500 aa, synthetic construct
MRALVVIRLSRVTDATTSPERQLESCQQLCAQRGWDVVGVAEDLDVSGAVDPFDRKRRPNLARWLAFEEQPFDVIVAYRVDRLTRSTRHLQQLVHWAEDHKKLVVSATEAHFDTTTPFAAVVIALMGTVAQMELEAIKERNRSAAHFNIRAGKYRGSLPPWGYLPTRVDGEWRLVPDPVQRERILEVYHRVVDSREPLHLVAHDLNRRGVLSPKDYFAQLQGREPQGRKWSATALKRSMISVAMLGYATLNGKTVRDDDGAPLVRAEPILTREQQEALRAELVKTSRAKPAVSTPSLLLRVLFCAVCGEPAYKFAGGGRKHPRYRCRSMGFPKHCGNGTVVMAEWDAFCEEQVLDLLGDAERLEKVWVAGSDSAVELAEVNAELVDLTSLIGSPAYRAGSLQREALDARIAALAARQEELEGLEARPSGWEWRETGQRFGDWWREQDTAAKNTWLRSMNVRLTFDVRGGLTRTIDFGNLQEYEQHLRLGSVVERLHTGMS

SEQ ID NO: 8695 - protein, 500 aa, synthetic construct
MRALVVIRLSRVTDATTSPERQLESCRQLCAQRGWDVVGVAEDLDVSGAVDPFDRKRRPNLARWLAFEEQPFDAIVAYRVDRLARSIRHLQQLVHWAEDHKKLVVSATEAHFDTTTPFAAVVIALMGTVAQMELEAIKERNRSAAHFNIRAGKYRGSLPPWGYLPTRVDGEWRLVPDPVQRERILEVYHRVVDNHEPLHLVAHDLNRRGVLSPKDYFAQLRGREPQGRKWSATALRRSMISEAMLGYATLNGKTVRDDDGAPLVRAEPILTREQLEALRAEFAKTSRAKPAVSTPSLLLRVLFCAVCGEPAYKFAGGGRKHPRYRCRSTGFPRHCGNGTVVMAEWDAFCEEQVLDLLGDAERLEKVWVAGSDSAVELAEVNAELVDLTSLIGSPAYRADSPQREALDARIAALAARQEELGGLGARPSGWEWRETGQRFGDWWREQDTAAKNTWLRSMNVRLTFDVRGGLTRTIDFGDLQEYEQHLRLGSVVERLHTGMS

SEQ ID NO: 8696 - protein, 500 aa, synthetic construct
MRALVVIRLSRVTDATTSPERQLESCQQLCAQRGWDVVGVAEDLDVSGAVDPFDRKRRPNLARWLAFEEHPFDVIVAYRVDRLTRSTRHLQQLVLWAEDHKKLVVSATEAHFDMTTPFAAVVIALMGTVAQMELEAIKERIRSAAHFNIRAGKYRGSLPPWGYLPTRVDGEWRLVPDPVQRERILEVYHRVVDNHEPLHLVAYDLNRRGVLSPKDYFAQLRGREPRGRKWSATALRRSMTSVAMLGYATLSGKTVRDDDGAPLVRAEPILTREQQEALRAELAKTSRAKPAVSTPSLLLRVLFCAVCGEPAYKFVGGGRKHPRYRCRSMGFPKHCGNGTVVMTEWDAFCEEQVLDLLGDAERLEKVWVAGSDSAVELAEVNAELVDLTSLIGSPAYRAGSPQREALDARIAALAARQAELEGLEARPSGWGWRGTGQRFGDWWREQDTAAKNAWLRSMNVRLTFDVRGGLTRTIDFGDLQEYEQRLRSGSVVERLHTRMS

SEQ ID NO: 8697 - protein, 500 aa, synthetic construct
MRALVVIRLSRVTDATTSPERQLESCQQLCAQRGWDVVGVAEDLDVSGAVDPFDRKRRPNLARWLAFEEQPFDVIVAYRVDRLTRSTRHLQQLVHWAEDHKKLVVSATEAHFDTTTPFAAVVIALMGTVAQMELEAIKERIRSAAHFNIRAGKYRGSLPPWGYLPTRVEGEWRLVPDPVQRERILEVYHRVVDNHEPLHLVAHDLNRRGVLSPKDYFAQLRGREPQGRKWSATALRRSMTSEAMLGYATLNGKTVRNDDGAPLVRAEPILTRGQLEALRAELAKTSRAKPAVSTPSLLLRVLFCAVCGEPAYKFVGGGRKHPRYRCRSMGFPEHCGNGTVVMTEWDAFCEEQVLNLLGDAERLEKVWVAGSDSAVELAEVNAELVDLTSLIGSPAYRAGSPQREALDARIAALAARQKELESLEARPSGWEWRGTGQRLRDWWREQDTAAKNTWLRAMNVRLTFDVRGGLTRTIDFGDLQEYERHLRSGSVAERLRTGMS

SEQ ID NO: 8698 - protein, 500 aa, synthetic construct
MRALVVIRLSRVTDATTSPERQLESCQQLCAQRGWDVVGIAEDLDVSGAVDPFDHKRRPNLARWLAFGEQPFDVIVAYRVDRLTRSTRHLQQLVHWAEDHKKLVVSATEAHFDTTTPFAAVVIALMGTVAQMELEAIKERIRSAAHFNIRAGKYRGSLPPWGYLPTRVDGEWRLVPDPVQRERILEVYHRVVDNHEPLHLVAHDLNQRGVLSPKDYFARLQGREPRGRKWSATALKRSMTSEAMLGYATLNGKIVRDDDGAPLVRAEPILTREQQEALRAELAKTSRAKPAVSTPSLLLRVLFCAVCGEPAYKFVGGGRKHPRYRCRSMGFPKHCGNGTVAMAECDAFCEEQVLNLLGDAERLEKVWVAGSDSAVELAEVNAELVDLTSLIGSPAYRAGSPQREALDARIAALAARQEELEGLEARPSGWEWRETGQRFEDWWREQDTAAKNTWLRSMNVRLTFDVRGGLTRTIDLGDLQEYERHLRLGSEAERLRTGMS

SEQ ID NO: 8699 - protein, 500 aa, synthetic construct
MRALVVIRLSRVTDATTSPERQLESCRQLCAQRGWDVVGVAEDLDVSGAVDPFDRKRRPNLARWLAFEEQPFDVIVAYRVDRLTRSVRHLQQLVHWAEDHRKLVVSATEAHFDTTTPFAAVVIALMGTVAQMELEAIKERIRSAVHFNVRAGKYRGSLPPWGYLPTRVDGEWRLVPDPVQRERILEVYHRVVNNHEPLHLVAHDLNRRGVLSPKDYFAQLRGREPQGRKWSATALKRSMTSEAMLGYAILNGKIVRDDNGAPLVRAEPILTREQQEALRAELAKTSRAKPAVSTPSLLLRVLFCAVCGEPAYKFVGGGRKHPRYRCRSMGFPEHCGNGTVVMAEWDAFCEEQVLDLLGDVERLEKVWVAGSDSAVELAEVNAELVDLTSLIGSPAYRAGSPQREALDARITALAARQEELEGLEARPSGWEWRGTGQRLGDWWREQDTAAKNTWLRSMNIRLTFDVRGGLTRTIDFGELQEYEQHLRLGCMVERLHTGMS

SEQ ID NO: 8700 - protein, 500 aa, synthetic construct
MRALVVIRLSRVTDATTSPESQLESCQQLCAQRGWDVVGVAEDLDVSGAVDPFDRKRRPNLARWLAFEEQPFDAIVAYRVDRLARSIRHLQQLVHWAEDHKKLVVSATEAHFDTTTPFAAVVIALMGTVAQMELEAIKERNRSAAHFNIRAGKYRGSLPPWGYLPTRVDGEWRLVPDPVQRERILEVYHRVVNNHEPLHLVAHDLNRRGVLSPKDYFAQLQGREPQGRKWSATALKRSMTSGAMLGYATLNGKTVRGDDGAPLVRAEPILTREQQEALRAELVKTSRAKPTVSTPSLLLRVLFCAVCGEPAYKFAGGGRKHPRYRCRSMGFPKHCGNGTVVMAEWDAFCEEQVLDLLGDAERLEKVWVAGSDSAVELAEVNAELVDLTSLIGSPTYRAGSPQREALDARIAALVARQEELEGLEAHPSGWEWRGTGQRFGDWWREQDTAAKNTWLRSMNVRLTFDVRGGLTRTIDFGDLQEYEQHLRLGSVVERLHTGMS

SEQ ID NO: 8701 - protein, 500 aa, synthetic construct
MRALVVVRLSRVTDATTSPERQLESCQQLCAQRGWDVVGVAEDLDVSGAVDPFDRKRRPNLARWLAFEEQPFDVIVAYRVDRLTRSTRHLQQLVRWAEDHKKLVVSATEAHFDTTTPFAAVVIALMGTVAQMELEAIKERIRSATHFNIRAGKYRGSLPPWGYLPTRVDGEWRLVPDPVQRERILEVYHRVVDSHEPLHLVAHDLNRRGVLSPKDYFAQLRGREPRGRKWSATALRRSMTSEAMLGYATLSGKIVRDDDGAPLVRAEPILTRGQLEALRAELAKTSRAKPAVSTPSLLLRVLFCAVCGEPAYKFVGGGRKHPRYRCRSMGFPKHCGNGTVVMAEWDAFCEEQVLNLLGDAERLEKVWLAGSDSAVELAEVNAELVDLTSLIGSPAYRAGSPQREALDARIAALAARQEELEGLEARLSGWEWRETGQRFRDWWREQDTAAKNTWLRSMNVRLTFDVRGGQTRTIDFGDLQEYEQHLRSGSVVERLHTGMS

SEQ ID NO: 8702 - protein, 500 aa, synthetic construct
MRALVVIRLSRVTDATTSPERQLGSCQQLCAQRGWDVVGVAEDLDVSGAVDPFDRKRRPNLARWLAFEEQPFDAIVAHRVDRLARSIRHLQQLVHWAEDHKKLVVSATEAHFDTTTPFAAVVIALMGTVAQMELEAIKERNRSAAHFNIRAGKYRGSLPPWGYLPTRVDGEWRLVPDPVQRERILEAYHRVVDNHEPLHLVAHDLNRRGVLSPKDYFAQLQGREPQGRKWSATALKRSMTSEAMLGYATLNGKTVRDDDGAPLVRAEPILTREQLEALRAVLVKTSRAKPAVPTPSLLLRVLFCAVCGEPAYKFAGGGRKHPRYRCRSMGFPKHCGNGTVAMAEWDAFCEEQVLGLLGDADRLEKAWVAGSDSAVELAEVNAELVDLTNLIGSPAYRAGSPQREALDARIAALAARQEELEGLEVRPSGWEWRETGQRFGDWWREQDTAAKNTWLRSMNVRLTFDARGGLTRTIDFGDLQEYVQHLRLGSVVERLHTGMS

SEQ ID NO: 8703 - protein, 500 aa, synthetic construct
MRALVVIRLSRVTDATTSPERQLESCQQLCAQRGWDVVGVAEDLDVSGAVDPFDRKRRPNLARWLTLEEQPFDVIVAYRVDRLTRSVRHLQRLVRWAEDHKKLVVSATEAHFDTTTPFAAVVIALMGTVAQMELEAIKERIRSAVRFNIRAGKYRGSLPPWGYLPTRVDGEWRLMPDPVQRERILEVYHRVVDNHEPLHLVAYDLNRRGVLSPRDYFAQLRGREPQGRKWSATALKRSMTSGAMLGYATLNGKTVRDDDGAPLVRAEPILTREQLEALRAELVKTSRVKPAVSTPSLLLRVLFCAVCGEPAYKFVGGGRKHPRYRCRSMGFPKHCGNGTVVMAEWDAFCEEQVLNLLGDAERLERVWVAGSDSAVELAEVNAELVDLTSLTGSPAYRAGSPQREALDARIAALAARQEELEGLEARPSGWGWRETGQRFGDWWREQDTAAKNTWLRSMNIRLTFDVRGGLTRTIDFGDLQEYEQHLRSGSVVERLHTGMS

SEQ ID NO: 8704 - protein, 500 aa, synthetic construct
MRALVVIRLSRVTDATTSPERQLESCQQLCAQRGWDVVGVAEDLDVSGAVDPFDRKRRPNLARWLAFEEQPFDAIVTYRVDRLTRSTRHLQQLVRWAEDHKKLVVSATEAHFDTTTPFAAVVIALMGTVAQMELEAIKERIRSAAHFNIRAGKYRGSLPPWGYLPTRVDGEWRLVPDPVQRERILEVYHRVVDNHEPLHLVAHDLNRRGVLSPKDYFAQLRGREPQGREWSATALKRSMISVAMLGYATLNGKTVRDDDGAPLVRAEPILTREQQEALRAELAKTSRAKPAVSTPSLLLRVLFCAVCGEPAYKFVGGGRKRPRYRCRSMGFPKHCGNGTVAMAEWDAFCEEQVLDLLGDAERLEKVWVVGSDSAVELAEVNAELVDLTSLIGSPAYRAGSPQREALDARIAALAARQEQLEGLEARPSGWEWRETGQRFGDWWREQDTAAKNTWLRSMNVRLTFDVRGGLTRTIDFGDLREYEQHLRLGSAVERLHAGMS

SEQ ID NO: 8705 - protein, 500 aa, synthetic construct
MRALVVIRLSRVTEATTSPERQLESCQQLCAQRGWDVVGVAEDLDVSGAVDPFDRKRRPNLARWLAFEEQPFDAIVAYRVDRLTRSIRHLQQLVHWAEDHKKLVVSATEAHFDTTTPFAAVVIALMGTVAQMELEAIKERNRSAAHFNIRAGKYRGSLPPWGYLPTRVDGEWRLVPDPVQRERILEVYHRVVDNHEPLHLVAHDLNRRGVLSPKDYFAQLRGREPQGRKWSATALKRSMISEAMLGYATLNGKTVRDDDGAPLVRAEPILTREQQEALRAELVKTSRAKPAVSTPSLLLRVLFCAVCGEPAYKFAGGGRKHPRYRCRSMGFLKHCGNGTVAMAEWDAFCEEQVLDLLGDAERLEKVWVAGSDSAVELAEVNAELVDLTSLIGSPAYRAGSPQREALDARIAALAARREELESLEARPSGWEWRETGQRFEDWWREQDTAAKNTWLRSMNVRLTFDVRGGLARTIDFGDLQEYEQHLRLGSVVERLHTGMS

SEQ ID NO: 8706 - protein, 500 aa, synthetic construct
MRALVVIRLSRVTDATTSPERQLESCQQLCAQRGWDVVGVAEDLDVSGAVDPFDRKRRPNLARWLAFEEQPFDVIVAYRIDRLTRSVRQLQQLVHWAEDHKKLVVSATEAHFDTTTPFAAVVIALMGTVAQMELEAIKERNRSAAHFNIRAGKYRGSLPPWGYLPTRVDGEWRLVPDPVQRERILEVYHRVVDNHEPLHLVAHDLNRRGVLSPKDYFAQLQGREPQGRKWSATALKRSMTSEAMLGYATLNGKTVRDDDGAPLVRAEPILTREQLEALRAELVKTSRAKPAVSTPSLLLRVLFCAVCGEPAYKFAGGGRKHPRYRCRSMGFPKHCGNGTVVMAEWDAFCEEQVLDLLGDAECLEKVWVAGSDSAIELAEVNAELVDLTSLIGSPAYRAGSPQREALDARIAALAARQEELEGLEARPPGWEWRETGQRFRDWWREQDTAAKNTWLRSMNVCLTFDVRGGLTRTIDFGDLQEYEQYLRLGSAVKRLHTGMS

SEQ ID NO: 8707 - protein, 500 aa, synthetic construct
MRALVVIRLSRVTDATTSPERQLESCQQLCTQRGWDVVGVAEDLDVSGAVDPFDRKRRPNLARWLAFEEQPFDVIVAYRVDRLTRSVRHLQQLVHWAEDHKKLVVSATEAHFDTTTPFAAVVIALMGTVAQMELEAIKERNRSAAHFNIRAGKYRGSLPPWGYLPTRVDGEWRLVPDPVQRERILEVYHRVVDNHESLHLVAHDLNRRGVLSPKDYFAQLQGREPQGRKWSATALKRSMTSEAMLGYATLNGKTVRDDDGAPLVRAEPILTREQLEALRAELVKTSRAKPAVSTPSLLLRVLFCAVCGEPAYKFAGGGRKHPRYRCRSMGFPKHCGNGTVVMAEWDAFCEEQVLDLLGDAERLEKVWVAGSDSAVELAEVNAELVDLTSLIGSPAYRAGSPQREALDARIAALAARQEELEGLEARPSGWEWRETGQRFGDWWREQDIAAKNTWLRSMNVRLTFDVRGGLTRTIDFGGLLECEQHLRLGSVVERLHTGMS

SEQ ID NO: 8708 - protein, 500 aa, synthetic construct
MRALVVIRLSRVTDATTSPERQLESCQQLCAQRGWDVVGVAEDLDVSGAVDPFDRKRRPNLARWLSLEEQPFDVIVAYRVDRLTRSTRHLQQLVRWAEDHKKLVVSATEPHFDTTTPFAAVVIALMGTVAQMELEAIKERIRSAVHFNIRAGKYRGSLPPWGYLPTRVDGEWRLVPDPVQRERILEVYHRVVDNHEPLHLVAHDLNRRGVLSPKDYFAQLQGREPQGREWSATALKRSMTSVAMLGYATLNGKTVRDDDGAPLVRAEPILTRGQQEALRAELAKTSRAKPAVSTPSLLLRVLFCAVCGEPAYKFVGGGRKHPRYRCRSMGFPEHCGNGTVVMAEWDAFCEKQVLDLLGDAERLEKVWVAGSDSAVELAEVNAELVDLTSLIGSPAYRVGSPQREALDARIAALAARQEELEGLEARPSGWEWRGTGQRFGDWWREQDTAAKNTWLRSMNVRLTFDVRGGLTRTIDFGDLQEYEQHLRSGGVAERLHTGMS

SEQ ID NO: 8709 - protein, 500 aa, synthetic construct
MRALVVIRLSRVTDATTSPERQLESCQQLCAQRGWDVVGVAEDLDVSGAVDPFDRKRRPNLARWLAFEEQPFDVIVAYRVDRLTRSVRHLQQLVHWAEDHKKLVVSATEAHFDTTTPFAAVVIALMGTVAQMELEAIKERNRSAAHFNIRAGKYRGSLPPWGYLPTRVDGEWRLVPDPVQRERILEVYHRVVDNHEPLHLVAHDLNRRGVLSPKDYFAQLQGREPQGRKWSATALKRSMISEAMLGYATLNGKTVRDDDGAPLVRAEPILTREQLGALRAELVKTSRAKPAVSTPSLLLRVLFCAVCGEPAYKFAGGGRKHPRYRCRSMGFPKHCGNGTVAMAEWDAFCEEQVLNLLGDAERLEEVWVAGSDSAVELAEVNAELVDLTSLIGSPAYRAGSPQREALDARIAALAARQEELEGLGARPSGWEWRETGQRFGDWWREQDTAAKNTWLRSMNVRLTFDARGGLTRTIDFGDLQEYEQHLRLGSVVERLHTGMS

SEQ ID NO: 8710 - protein, 500 aa, synthetic construct
MRALVVIRLSRVTDATTSPERQLESCQQLCAQRGWDVVGVAEDLDVSGAVDPFDRKRRPNLARWLAFEEQPFDVIVAYRVDRLTRSIRHLQQLVHWAEDHKKLVVSATEAHFDTTTPFAAVVIALMGTVAQMELEAIKERSRSAVHFNIRAGKYRGSLPPWGYLPTRVDGEWRLVPDPVQRERILEVYHRVVDNHEPLHLVAHDLNRRGVLSPKDYFAQLRGREPRGRKWSATALKRSMTSVAMLGYATLNGKTVRDGDGAPLVRAEPILTREQQEALRAELAKTSRAKPAVSTPSLLLRVLFCAVCGEPAYKFVGGGRKHPRYRCRSTGFPKHCGNGTVVMAEWDAFCEEQVLGLLGDAERLEKVWVAGSDSAVELAEVNAELVDLTSLIGSPAYRAGSPQREALDARIAALAARQEELEGLEARPSGWEWRGTGQRFGDWWREQDTAAKNTWLRSMNVRLTFDVRGGPTRTIDFGDLLEYEQHLRLGSVVERLHAGMS

SEQ ID NO: 8711 - protein, 500 aa, synthetic construct
MRALVVIRLSRVADATTSPERQLESCQQLCAQRGWDVVGVAEDLDVSGAVDPFDRRRRPNLARWLAFEEQPFDVIVAYRVDRLTRSTRHLQQLVHWAEDHKKLVVSATEAHFDTTTPFAAVVIALMGTVAQMELEAIKERIRSAVRFNIRAGKYRGSLPPWGYLPTRVDGEWRLVPDPVQRERILEVYHRVVDNHEPLHLVAHDLNRRGVLSPKDYFAQLRGREPQGREWSATALKRSMTSVAMLGYATLNGKTVRDDEGAPLVRAEPILTREQLEALRAELVKTSRAKPAVSTPSLLLRVLFCAVCGEPAYKFVGGGRKHPRYRCRSMGFPEHCGNGTVVMAEWDAFCEEQVLDLLGDTERLEKVWVAGSDSAVELAEVSAELVDLTSLIGSPAYRAGSPQRGALDARIAALAARQEELEGLEARPSGWEWRETGQRFGDWWREQDTAAKNTWLRSMNVRLTFDVRGGLTRTIDFGDLQEYERHLRSGSVVERLHTGTS

SEQ ID NO: 8712 - protein, 500 aa, synthetic construct
MHALVVIRLSRVTDATTSPERQLESCQQLCAQRGWDVVGVAEDLDVSGAVDPFDRKRRPNLARWLAFEEQPFDAIVAYRVDRLTRSIRHLQQLVRWAEDHKKLVVSATEAHFDTTTPFAAVVIALMGTVAQMELEAIKERIRSAAHFNIRAGKYRGSLPPWGYLPTRVDGEWRLAPDPVQRERILEVYHRVVDNHEPLHLVARDLNRRGVLSPKDYFAQLRGREPRGRKWSATALRRSMTSVAMLGYATLNGKTVRDDDGAPLVRAEPILTREQLEALRAELAKTSRAKPAVSTPSLLLRVLFCAVCGEPAYKFVGGGRKHPRYRCRSMGFPEHCGNGTVVMAEWDAFCEEQVLNLFGDAERLEKVWVAGSDSAAELGEVNAELVDLTSLIGSPAYRAGSPQREALDARIAALATRQEELEGLEARPSGWEWRVTGQRFGDWWREQDTAAKNTWLRSMNVRLTFDVRGGLTRTIDFGDLREYEQHLRLGSVVERLHTGMS

SEQ ID NO: 8713 - protein, 500 aa, synthetic construct
MRALVVIRLSRVTDATTSPERQLESCQQLCAQRGWDVVGVAEDLDVSGAVDPFDRKRRPNLARWLAFEEQPFDAIVAYRVDRLTRSIRHLQQLVHWAEDHKRLVVSATEAHFDTTTPFAAVVIALMGTVAQMELEAIKERNRSAAHFNIRAGKYRGSLPPWGYLPTRVDGEWRLVPDPVQRERILEVYHRVVDNHEPLHLVAHDLNRRGVLSPRDYFAQLRGREPQGRKWSATALKRSMISEAMLGHATLNGKTVRDEDGAPLVRAEPILTREQLEALRAELAKTSRAKPAVSTPSLLLRVLFCAVCGEPAYKFAGGGRKHPRYRCRSMGFPKHCGNGTVAMAEWDAFCEEQVLGLLGDAERLEKVWVAGSDSAVELAEVNAELVDLTSLVGSPAYRAGSPQREALDARIAALAARQEELEGLEARPSGWEWRETGQRFGDWWREQDTAAKNTWLRSMNVRLTFDVRGELTRTIDFGDLQEYEQHLRLGSVVERLRTGMS

SEQ ID NO: 8714 - protein, 500 aa, synthetic construct
MRALVVIRLSRVTDATTSPERQLESCQQLCAQRGWDVVGVAEDLDVSGAVDPFDRKRRPNLARWLAFEEQPFDVIVAYRVDRLTRSTRHLQQLVRWAEDHKKLVVSATEAHFDTTTPFAAVVIALMGTVAQMELEAIKERIRSAVHFNIRAGKYRGSLPPWGYLPTRVDGEWRLVPDPVQRERILEVYRRVVDNHEPLHLVAHDLNRRGVLSPKDYFAQLQGREPQGRKWSATALKRSMTSVAMLGYATLNGKIVRDDDGAPLVRAEPILTREQLEALRAELVRTSRAKPAVSTPSLLLRVLFCAVCGEPAYKFVGGGRKHPRYRCRSVGFPKHCGNGTVVMAEWDAFCEEQVLDLLGDAERLEKVWVVGSDSAVELAEVDAELVDLTNLIGSPAYRAGSPQREALDARIAALAARQEELEGLETRPSGWEWRETGQRFGDWWREQDTAAKNTWLRSMNVRLTFDVRGGLTRTIDFGDLQEYEQHLRLGSVVERLHTGMS

SEQ ID NO: 8715 - protein, 500 aa, synthetic construct
MRALVVIRLSRVTDATTSPERQLESCQQLCAQRGWDVVGVAEDLDVSGAVDPFDRKRRPNLARWLAFEEQPFDVLVAYRVDRLTRSTRHLQQLVHWAEDHKKLVVSATEAHFDTTTPFAAVVIALMGTVAQMELEAIKERIRSAVRFNIRAGKYRGSLPPWGYLPTRVDGEWRLVPDPVQRERILEVYHRVVDNHEPLHLVAHDLNRRGILSPKDYFAQLQGREPQGRKWSATALKRSMISVAMLGYATLNGKIVRDDNGAPLVRAEPILTREQLEALRAELVKTSRAKPAVSTPSLLLRVLFCAVCGEPAYKFVGGGRKHPRYRCRSMGFPKHCGNGTVVMAEWDAFCEKQVLDLLGDAERLEKVWVASSDSAVELAEVNAELVDLTSLIGSPAYRTGSPQREALDARIAALAARQEELESLEARPSGWEWRGTGQRLGDWWREQDTAAKNTWLRSMNVRLTFDVRGGLTRTIDFGELQEYEQHLRLGSVAERLHTGMS

SEQ ID NO: 8716 - protein, 500 aa, synthetic construct
MRALVVIRLSRVTDATTSPERQLESCQQLCAQRGWDVVGVAEDLDVSGAVNPFDRKRRPNLARWLAFEERPFDVIVAYRVDRLTRSTRHLQQLVHWAEDHKKLVVSATEAHFDTTTPFAAVVIALMGTVAQMELDAIKERNRSAAHFNIRAGKYRGSLPPWGYLPTRVDGEWRLVPDPVQRERILEVYHRVVDDHEPLHLVAHDLNRRGVLSPKDYFAQLQGREPQGRKWSATALKRSMISEAMLGYATLNGKTVRDDDGAPLVRAEPILTREQLEALRAELVKTSRAKPAVSTPSLLLRVLFCAVCGEPAYKSAGGGRKHPRYRCRSMGFPKHCGNGMVAMAEWDAFCEEQVLDLLGDAERLEKVWVAGSDSAVELAEVNAELVDLTSLIGSPAYRAGSPQREALDARIAALAARQEELEGLGARPSGWEWRETGQRFGDWWREQDTAAKNTWLRSMNVRLTFDVRGGLTRTIDFGELQEYERHLRLGSVVERLHTGMS

SEQ ID NO: 8717 - protein, 500 aa, synthetic construct
MRALVVIRLSRVTDATTSPERQLESCQQLCAQRGWDVVGVAEDLDVSGAVDPFDRKRRPNLARWLAFEEQPFDVIVAYRVDRLTRSTRHLQQLVRWAEDHKKLVVSATEAHFDTTTPFAAVVIALMGTVAQMELEAIKERIRSAVHFNIRAGKYRGSLPPWGYLPTRVDGEWRLVPDPVQRERILEVYHRVVDNHEPLHLVAHDLNRRGVLSPKDYFAQLRGREPQGREWSATALKRSMTSVAMLGYATLNGKTVRDDDGAPLVRAEPILTREQLEALRAELAKTSRAKPAVSTPSLLLRVLFCAVCGEPAYKFVGGGRKHPRYRCRSMGFPKHCGNGTVVMTEWDAFCEEQVLDLLGDAERLEKVWVAGSDSAVELAEVNAELVDLTSLIGSPAYRAGSPQREALDARIAALAARQEELEGLEARPSGWGWRETGQRFGDWWREQDTAAKNTWLRSMNVRLTFDARGGLTRTVDFGDLQEYEQRLRLGSVVGRLRTGMS

SEQ ID NO: 8718 - protein, 500 aa, synthetic construct
MRALVVIRLSRVTDATTSPERQLESCQQLCAQRGWDVVGVAEDLDVSGAVDPFDRKRRPNLARWLAFEEQPFDVIVAYRVDRLARSTRHLQQLVHWAEDHKKLIVSATEAHFDTTTPFAAVVIALMGTVAQMELEAIKERNRSAAHFNIRAGKYRGSLPPWGYLPTRVDGEWRLVPDPVQRERILEVYHRVVDNHEPLHLVAHDLNRRGVLSPKDYFAQLQGREPQGRKWSATALKRSMISEAMLGYATLNGKTVRDDDGAPLVRAEPILTREQLEALRAELVKTSRVKPAVSTPSLLLRVLFCAVCGEPAYKFAGGGRKHPRYRCRSMGFPKHCGNGTVAMAEWDAFCEEQVLDLLGDAERLEKVWVAGSDSAVELAEVNAELVDLTSLIGPPAYRAGSPQREALDARIAALAARQEELEGLEARPSGWEWRGTGQRLGDWWREQDTAAKNTWLRSMNVRLTFDVRGGLTRTIDFGDLQEYEQHLRLGSVVERLHTGMS

SEQ ID NO: 8719 - protein, 500 aa, synthetic construct
MRALVVVRLSRVTDATTSPERQLESCQQLCAQRGWDVVGVAEDLDVSGAVDPFDRKRRPSLARWLAFEEQPFDVIVAYRVDRLTRSTRHLQQLVHWAEDHKKLVVSATEAHFDTTTPFAAVVIALMGTVAQMELEAIKERNRSAAHFNIRAGKYRGSLPPWGYLPTRVDGEWRLVPDPVQRERILEVYHRVVDDHESLHLVAHDLNRRGVLSPKDYFAQLRGREPQGRKWSATALKRSMISEAMLGYATLNGKTVRDDDGAPLVRAEPILTREQLEALRAVLVKTSRAKPAVSTPSLLLRVLFCAVCGEPAYKFAGGGRKHPRYRCRSMGFPKHCGNGTVAMAEWDAFCEEQVLDLLGDAERLEKVWVAGSDSAVELAEVNAELVDLTSLIGSPAYRAGSPQREALDARIAALAARQGELEGLEARPSGWEWRETGQRFRDWWREQDTAAKNTWLRSMNVRLTFDVRGGLTRTIDFGDLREYEQHLRLGSVVERLHTGMS

SEQ ID NO: 8720 - protein, 500 aa, synthetic construct
MRALVVIRLSRVTDATTSPERQLESCQQLCAQRGWDVVGVAEDLDVSGAVDPFDRKRRPNLARWLAFEEQPFDVIVAYRVDRLTRSTRHLQQLVRWAEDHKKLVVSATEAHFDTTTPFAAVVIALMGTVAQMELEAIKERIRSAAHFNIRAGKYRGSLPPWGYLPTRVDGEWRLVPDPVQRERILEVYHRVVDNHEPLHLVAHDLNRRGVLSPKDYFAQLQGREPQGRKWSATALKRSMISVAMLGYATLNGKIVRDDDGAPLVRAEPILTREQQEALRAELAKTSRAKPAVSTPSLLLRVLFCAVCGEPAYKFIGGGRKHPRYRCRSMGFPKHCGNGTVVMAEWDAFCEEQVLDLLGDAERLEKVWVAGSDSAVELAEVNAELVDLTSLIGSPAYRAGSPQREALDTRIAALAARQEELEGLEARPPGWEWRETGQRFGDWWREQDTAAKNTWLRSMNVRLTFDVRGGLTRTIDFGDLREYEQHSRSGSVVERLHTGMS

SEQ ID NO: 8721 - protein, 500 aa, synthetic construct
MRALVVIRLSRVTDATTSPERQLESCQQLCAQRGWDVVGVAEDLDVSGAVDPFDCKRRPNLARWLAFEELPFDVIVAYRVDRLTRSTRHLQQLVRWAEDHKKLVVSATEAHFDTTTPFAAVVIALMGTVAQMELEAIKERIRSAAHFNIRAGKYRGSLPPWGYLPTRVDGEWRLAPDPVQRERILEVYHRVVDNHEPLHLVAHDLNRRGVLSPKDYFAQLRGREPRGRKWSATALRRSMTSEAMLGYATLNGKTVRDDDGAPLVRAEPILTREQQEALRAELAKTSRAKPAVSTPSLLLRVLFCAVCGEPAYKFVGGGRKHPRYRCRSMGSPKHCGNGTVVMAEWDAFCEKQVLDLLGDAERLEKVWVVGSDFAVELAEVNAELVDLTSLIGSPVYRVGSPQREALDARIAALAARQEELEGLEVRPSGWEWRGTGQRFGDWWREQDTAAKNTWLRSMNVRLTFDVRGGLARTIDFGDLQEYEQHLRLGSVVERLHTGMT

SEQ ID NO: 8722 - protein, 500 aa, synthetic construct
MRALVVIRLSRVTDATTSPERQLESCQQLCAQRGWDVVGVAEDLDVSGAVDPFDRKRRPNLARWLAFEEQPFDVIVAYRVDRLTRSTRHLQQLVRWAEDHKKLIVSATEAHFDTTTPFAAVVIALMGTVAQMELEAIKERIRSAVRFNIRAGKYRGSLPPWGYLPTCVDGEWRLVPDPVQRERILEVYHRVVDDHEPLHLVAHDLNRRGVLSPKDYFAQLQGREPQGRKWSATALKRSMISVAMLGYATLNGKTVRDDDGTPLVRAEPILTREQQEALRAELAKTSRAKPAVSTPSLLLRVLFCAVCGEPAYKFVGGGRKHPRYRCRSMGFPEHCGNGTVVMTEWDAFCEEQVLDLLGDAERLEKVWVAGSDSAVELAEVNAELVDLTSLIGSPAYRAGSPQREALDARIAALAARQEELESLEARPSGWEWRETGQRFGDWWREQDTAAKNTWLRSMNVRLTFDIRGGLTRTIDFGDLQEYEQHLRLGSVVERSHTRMS

SEQ ID NO: 8723 - protein, 500 aa, synthetic construct
MRALVVIRLSRVTDATTSPERQLESCQQLCAQRGWDVVGVAEDLDVSGAVDPFDRKRRPNLARWLAFEEQPFDVIVAYRVDRLTRSTRHLQQLVHWAEDHKKLVVSATEAHFDTTTPFAAVVIALMGTVAQMELEAIKERIRSAVHFNIRAGKYRGSLPPWGYLPTRVDGEWRLVPDPVQRERILEVYRRVVDNHEPLHLVAHDLNRRGVLSPKDYFAQLRGREPQGREWSATALRRSMISKAMLGYATLNGKIVRDEDGAPLVRAEPILTRGQQEALRAELAKTSRAKPAVSTPSLLLRVLFCAVCGEPAYKFVGGGRKHPRYRCRSMGFPEHCGNGTVVMAEWDAFCEEQVLNLLGDAERLEKVWVAGSDSAVELAEVNAELVDLTSLIGSPAYRAGSPQREALDTRIAALAARQEELEGLEVRPSGWEWRETGQRFGDWWREQDTAARNSWLRSMNVRLTFDVRGGLTRTIDFGDLQEYEQHLRLGSVVERLHTGMS

SEQ ID NO: 8724 - protein, 500 aa, synthetic construct
MRALVVIRLSRVTDATTSPERQLESCQQLCAQRGWDVVGVAEDLDVSGAVDPFDRKRRPNLARWLAFEEQPFDVIVAYRVDRLTRSTRHLQQLVHWAEDHKKLVVSATEAHFDTTTPFAAVVIALMGTVAQMELEAIKERNRSAAHFNIRAGKYRGSLPPWGYLPTRVDGEWRLVPDPVQRERILEVYHRVVDNHEPLHLVAHDLNRRGVLSPRDYFAQLRGREPQGRKWSATALKRSMISEAMLGYATLNGRTVRDDDGAPLVRAEPILTREQLAALRAELAKTSRAKPAVSTPSLLLRVLFCAVCGEPAYKFAGGGRKYPRYRCRSMGYPKHCGNGTVVMAEWDAFCEEQVLNLLGDTERLEKVWVAGSDSAVVLAEVNAELVDLTSLIGSPAYRAGSPQREALDARIAALAARQEELEGLGARPSGWEWRETGQRFGDWWREQDTAAKNTWLRSMNVRLTFDVRGGLTRTVDFGDLQEYEQHLRLGGVVERLHTGMS

SEQ ID NO: 8725 - protein, 500 aa, synthetic construct
MRTLVVIRLSRVTDATTSPERQLESCQQLCAQRGWDVVGVAEDLDVSGAVDPFDRKRRPNLARWLAFEEQPFDVIVAYRVDRLTRSVRHLQQLVHWAEDHKKLVVSATEAHFDTTTPFAAVVIALMGTVAQMELEAIKERNRSAAHFNIRAGKYRGSLPPWGYLPTRVDGEWRLVPDPVQRERILEVYHRVVDNHESLHLVAHDLNRRGVLSPKDYFAQLRGREPQGREWSATALKRSMVSVAMLGYATLNGKIVRGDDGAPLVRAEPILTREQLEVLRAELVKTSRAKPAVSTPSLLLRVLFCAVCGEPAYKFAGGGRKHPRYRCRSMGFPKHCGNGTVVMAEWDAFCEEQVLNLLGDAERLEKVWVAGSDSAVELAEVNAELVDLTSLIGSPAYRAGSPQREALDARIAALAARQEELEGLGARPSGWGWCETGQRFGDWWREQDTAAKNTWLRSMNVRLTFDVRGEPTRTIDFGDLQEYEQHLRLGSVVERSHTGMS

SEQ ID NO: 8726 - protein, 500 aa, synthetic construct
MRALVVIRLSRVTDATTSPERQLESCQQLCAQRGWDVVGVAEDLDVSGAVDPFDRKRRPNLARWLAFEEQPFDVIVAYRVDRLTRSTRHLQQLVHWAEDHKKLVVSATEAHFDTTTPFAAVVIALMGTVAQMELEAIKERNRSAAHFNIRAGKYRGSLPPWGYLPTRVDGEWRLVPDPVQRERILEVYHRVVDNHEPLHLVAHDLNRRGVLSPKDYFAQLRGREPQGRKWSATALKRSMISEAMLGYATLNGKTVRDDDGAPLVRAEPILTREQLEALRAELAKTSRAKPAVSTPSLLLRVLFCAVCGEPAYKFAGGGRKHPRYRCRSMGFPRHCGNGTVVMAEWDAFCEEQVLDLLGDAERLEKVWVAGSDSAVELAEVNAELVDLTSLIGSPAYRAGSPQREALDARIAALAARQEELEGLEARPSGWEWRETGQRFGDWWREQDTAAKNTWLRSMNVRLTFDVRGGLTRTIDFGDLQEYEQHLRLGSVVERFHTGMS

SEQ ID NO: 8727 - protein, 500 aa, synthetic construct
MRALVVIRLSRVTDATTSPERQLESCQQLCAQRGWDVVGVAEDLDVSGAVDPFDCKRRPNLARWLAFEEQPFDAIVAYRVDRLTRSVRHLQQLVHWAEDHKKLVVSATEAHFDTTTPFAAVVIALMGTVAQMELEAIKERNRSAAHFNIRAGKYRGSLPPWGYLPTRVDGEWRLVPDPVQRERILEVYHRVVDNHEPLHLVAHDLNRRGVLSPKDYFAQLRGREPQGRKWSATALKRSMISEAMLGYATLNGRTVRDDDGAPLVRAEPILTREQLEALRAELAKTSRAKPAVPTPSLLLRVLFCAVCGEPAYKLAGGGRKHPRYRCRSMGFPKHCGNGTAVMAEWDAFCEEQVLSLLGDAERLEKVWVAGSDSAVELAEVNAELVDLTSLIGSPAYRAGSPQREALDARIAALAARQEELEGFGARSSGWEWRETGQRFGDWWREQDTAAKNTWLRSMNVRLTFDVRGGLTRTIDFGDLQEYEQHLRLGSVVERLHTGMS

SEQ ID NO: 8728 - protein, 500 aa, synthetic construct
MRALVVIRLSRVTDATTSPERQLESCQQLCAQRGWDVVGVAEDLDVSGAVDPFDRKRRPNLARWLAFEEQPFDVIVAYRVDRLTRSVRHLQQLVRWAEDHKKLVVSATEAHFDTTTPFAAVVIALMGTVAQMELEAIKERIRSAVRFNIRAGKYRGSLPPWGYLPTRVDGEWRLVPDPVQRERILEVYHRVVGNHEPLHLVAHDLNRRGVLSPKDYFAQLRGREPQGRKWSATALKRSMTSVAMLGYATLNGKTVRDDDGAPLVRAEPILTREQQEALRAELVKTSRAKPAVSTPSLLLRVLFCAVCGEPAYKFVGGGRKHPRYRCRSMGFPKHCGNGTVVMTEWDTFCEERVLGLLGDAERLEKVWVAGSDSAVELAEVNAELVDLTSLIGSPAYRAGSPQREALDARIAALAVRQEELEGLETRPSGWEWRGTGQRFGDWWREQDTAAKNTWLRSMNVRLTFDVRGELTRTIDFGDLQEYEQHLRFGGVVERLHTGMS

SEQ ID NO: 8729 - protein, 500 aa, synthetic construct
MRALVVIRLSRVTEATTSPERQLESCQQLCAQRGWDVVGVAEDLDVSGAVDPFDRKRRPNLARWLAFEEQPFDVVVAYRVDRLTRSVRHLQQLVHWAEDYKKLVVSATEAHFDTTTPFAAVVIALMGTVAQMELEAIKERIRSAVHFNIRAGKYRGSLPPWGYLPTRVDGEWRLVPDPVQRERILEVYHRVVDNHEPLHLVAHDLNRRGVLSPKDYFAQLQGREPRGRKWSATALKRSMTSEAMLGYATLNGKIVRGDDGAPLVRAEPILTREQLEALRAELVKTSRAKPAVSTPSLLLRVLFCAVCGEPAYKFVGGGRKHPRYRCRSMGFPKHCGNGTVVMAEWDVFCEEQVLDLLGDAERLEKVWVAGSDSAVELAEVNAELVDLTSLIGSPAYRAGSPQREALDARIAALAARQEELEGLEARPSGWEWRETGQRFGDWWREQDTAAKNTWLRSMNVRLTFDVRGGLTRTIDFGDLQEYEQHLRSGSVVERLRTGVS

SEQ ID NO: 8730 - protein, 500 aa, synthetic construct
MRALVVIRLSRVTDATTSPERQLESCQQLCAQRGWDVVGVAEDLDVSGAVDPFDRKRRPNLARWLAFEEQPYDVIVAYRVDRLTRSTRHLQQLVHWAEDHKKLVVSATEAHFDTTTPFAAVVIALMGTVAQMELEAIKERNRSAAHFNIRAGKYRGSLPPWGYLPARVDGEWRLVPDPVQRERILEVYHRVVDNHEPLHLVAHDLNRRGVLSPKDYFAQLQGREPQGRKWSATALKRSMISEAMLGYATLNGKTVRDDDGAPLVRAEPILTREQLEALRAELVKTSRAKPAVSTPSLLLRVLFCAVCGEPAYKFAGGGRKHPRYRCRSMGFPKHCGNGTVAMAEWDAFCEEQVLDLLGDAERLEKVWVAGSDSAVELAEVNAELVDLTSLISSPAYRAGSPQREALDARIAALAARQGELEGLGARPSGWGWRETGQRFGDWWREQDTAAKNTWLRSMNVRLMFDARGGLTRTIDFGDLQEYEQHLRLGSVVERLHTGMS

SEQ ID NO: 8731 - protein, 500 aa, synthetic construct
MRALVVIRLSRVTDATTSPERQLESCQQLCAQRGWDVAGVAEDLDVSGAVDPFDRKRRPNLARWLAFEEQPFDVIVAYRVDRLTRSVRHLQQLVHWAEDHKKLVVSATEAHFDTTTPFAAVVIALMGTVAQMELEAIKERIRSAVRFNIRAGKYRGSLPPWGYLPTRVDGEWRLVPDPVQRERILEVYHRVVDNHEPLHLVAYDLNRRGVLSPKDYFAQLQGREPQGRKWSATALKRSMISVAMLGYATLNGRTVRDDDGAPLVRAEPILTREQQEALRAELAKTSRAKPAVTTPSLLLRVLFCAVCGEPAYKFVGGGRKHSRYRCRSMGFPEHCGNGTVVMAECDAFCEEQVLDLLGDAERLEKVWVAGSDSAVELAEVNAELVDLTSLIGSPAYRAGSPQREALDARIAALAARQEELEGLEVRPSGWGWRETGQRFRDWWREQDTAAKNTWLRSMNVRLTFDVRGGLTRTIDFGDLQEYEQHSRLGSVVERLHTGMS

SEQ ID NO: 8732 - protein, 500 aa, synthetic construct
MRALVVIRLSRVTDATTSPERQLESCQQLCAQRGWDVVGVAEDLDVSGAVDPFDRKRRPNLARWLAFEERPFDVIVAYRVDRLTRSTRHLQRLVHWAEDHKKLVVSATEAHFDTTTPFAAVVIALMGTVAQMELEAIKERIRSATHFNIRAGKYRGSLPPWGYLPTRVDGEWRLVPDPVQRERILEVYHRVVDNHEPLHLVAHDLNRRGVLSPKDYFAQLRGREPRGRKWSATALKRSMTSGAMLGYATLNGKTVRDDDGAPLVRAEPILTREQQEALRAELAKTSRAKPAVSTPSLLLRVLFCAVCGEPAYKFVGGGRKHPRYRCRSMGFPEHCGNGTVVMTEWDAFCEEQVLNLLGDAERLEKVWVAGSDSAVELAEVNAELVDLTSLIGSPAYRAGSPQREALDTRIAALAARQEELEGLEARPSGWEWRGTGQRFGDWWREQDTAAKNTWLRSMNVRLTFDVRGGLTRTIDFGDLQEYEQHLRLGSVVERLHTGMS

SEQ ID NO: 8733 - protein, 500 aa, synthetic construct
MRALVVIRLSRVTDATTSPERQLGSCQQLCAQRGWDVVGVAEDLDVSGAVDPFDRKRRPSLARWLAFEEQPFDVIVAYRVDRLTRSTRHLQQLVRWAEDHKKLVVSATEAHFDTTTPFAAVVIALMGTVAQMELEAIKERIRSAAHFNIRAGKYRGSLPPWGYLPTRVDGEWRLVPDPVQRERILEVYHRVVDNHEPLHLVAHDLNRRGVLSPKDYFAQLRGREPRGRKWSATALKRSMISVAMLGYVTLNGKTVRDGNGAPLVRAEPILTREQLEALRAELAKTSRAKPAVSTPSLLLRVLFCAVCGEPAYKFVGGGRKHPRYRCRSMGSPKHCGNGTVVMTEWDAFCEEQVLDLLGDAERLEKVWVAGSDSAVELAEVNAELVDLTSLIGSPAYRAGSPQREALDARIAALAARQEELESLGARPSGWEWRGTGQRLGDWWRGQDTATKNTWLRSMNVRLTFDVRGGLTRTIDFGDLQEYEQHLRLGSVAERLRTGMS

SEQ ID NO: 8734 - protein, 500 aa, synthetic construct
MRALVVIRLSRVTDATTSPERQLESCQQLCAQRGWDVVGVAEDLDVSGAVDPFDRKRRPNLARWLAFEEQPFDAIVAYRVDRLTRSTRHLQQLVHWAEDHKKLVVSATEAHFDTTTPFAAVVIALMGTVAQMELEAIKERNRSAAHFNIRAGKYRGSLPPWGYLPTCVDGEWRLVPDPVQRERILEVYHRVVDNHEPLHLVAHDLNRRGVLSPKDYFAQLRGREPQGRKWSATALKRSMVSEAMLGYATLNGKTVRDDDGAPLVRAEPILTREQLEALRAELVKTSRVKPAVSTPSLLLRVLFCAVCGEPAYKFAGGGRKHPRYRCRSMGFPKHCGNGTVAMAEWDTFCEEQVLDLLGDAERLEKVWVVGSDSAVELAEVNAELVDLTSLIGSPAYRAGSPQREALDARIAALAARQEELEGLGARPSGWEWRETGQRFGDWWREQDIAAKNTWLRSMNVRLTFDARGGLTRTIDFGDLQEYEQHLRLGSVVERLHTGMS

SEQ ID NO: 8735 - protein, 500 aa, synthetic construct
MRALVVIRLSRVTDATTSPERQLESCQQLCAQRGWDVVGVAEDLDVSGAVDPFDRKRRPNLARWLAFEEQPFDVIVAYRVDRLTRSTRHLQQLVHWAEDHKKLVVSATEAHFDTTTPFAAVVIALMGTVAQMELEAIKERNRSAAHFNIRAGKYRGSLPPWGYLPTRVDGEWRLVPDPVQRERILEVYHRVVVNHEPLHLVAHDLNRRGVLSPKDYFAQLQGREPQGRKWSATALKRSMISEAMLGYATLNGKTVRDDDGAPLVRAEPILTREQLEALRAELVKTSRAKPAVSTPSLLLRVLFCAVCGEPAYKFAGGGRKHPRYRCRSMGFPKHCGNGTVAMAEWDAFCEEQVLDLLGDAERLEKVWVAGSDSAVELAEVNAELVDLTSLIGSPAYRAGSPQREALDARIAALAARQEELEGLEARPSGWEWRETGQRFGDWWREQDTAAKNTWLRSMNVRLTFDVRGGLTRTIDFGELQEYEQHLRLGSVVERLRTGRS

SEQ ID NO: 8736 - protein, 500 aa, synthetic construct
MRALVVIRLSRVTDATTSPERQLASCQQLCAQRGWDVVGVAEDLDVSGAVDPFDRKRRPNLARWLAFEEQPFDVIVAYRVDRLTRSTRHLQQLVHWAEDHKKLVVSATEAHFDTTTPFAAVVIALMGTVAQMELEAIKERSRSAAHFNIRAGKYRGSLPPWGYLPTRVDGEWRLVPDPVQRERILEVYHRVVDNHEPLHLVAHDLNRRGVLSPKDYFAQLRGREPLGRKWSATALKRSMTSVAMLGYATLNGKTVRDDNGAPLVRAEPILTREQQEALRAELAKTSRAKPAVSTPSLLLRVLFCAVCGEPAYKFVGGGRKHPRYRCRSMGFPKHCGNGTVVMAEWDVFCEEQVLDLLGDAERLEKVWVAGLDSAVELAEVNAELVDLTSLIGSPAYRAGSPQREALDARIAALAARQEELEGLEARPSGWEWRETGQRFGDWWREQDTAAKNTWLRSMNVRLTFDVRGGLTRTIDFGDLQEYEQHSRLGSVAERSHTGMS

SEQ ID NO: 8737 - protein, 500 aa, synthetic construct
MRALVVIRLSRVTDATTSPERQLESCQQLCAQRGWDVVGVAEDLDVSGAVDPFDRKRRPNLARWLAFEEQPFDVIVACRVDRLTRSTRHLQQLVHWAEDHKKLVVSATEAHFDTTTPFAAVVIALMGTVAQMELEAIKERNRSAAHFNIRAGKYRGSLPPWGYLPTRLDGEWRLVPDPVQRERILEVYHRVVVNHEPLHLVAHDLNRRGVLSPKDYFAQLQGREPQGRKWSATALKRSLISEAMLGYATLNGRTVRDDDGAPLVRAEPILTREQQEALRAELVKTSRAKPAVSTPSLLLRVLFCAVCGEPAYKFAGGGRKHPRYRCRSMGFPKHCGNGTVAMAEWDAFCEEQVLDLLGDAERLEKVWVAGPDSAVELAEVNAELVDLTSLIGSPAYRAGSPQREALDARIAALAARQGELEGLEARPSGWEWRGTGQRFGDWWREQDTAAKNTWLRSMSVRLTFDVRGGLTRTIDFGDLQEYEQHLRLGSVVERLHTGMS

SEQ ID NO: 8738 - protein, 500 aa, synthetic construct
MRALVVIRLSRVTDATTSPERQLESCQQLCARRGWDVVGVAEDLDVSGAVDPFDSKRRPNLARWLAFEEQPFDVIVAYRVDRLTRSVRHLQQLVHWAEDHKKLVVSATEAHFDTTTPFAAVVIALMGTVAQMELEAIKERNRSAAHFNIRAGKYRGSLPPWGYLPTRVDGEWRLVPDPVQRERILEVYHRVVDNHEPLHLVAHDLNRRGVLSPKDYFAQLRGREPQGRKWSATALKRSMISEAMLGYATLNGKTVRDDDGAPLVRAEPILTREQLGALRAELVKTSRAKPAVSTPSLLLRVLFCAVCGEPAYKFAGGGRKHPRYRCRSMGFPKHCGNGTVAMAEWDAFCEEQVLDLLGDAERLEKVWVAGSDSAAELAEVNAELVDLTSLIGSPAYRADSPQREALDARIAALAARQEELEGLGARPSGWEWRETGQRFGDWWREQDTAAKNTWLRSMNVRLTFDVRGGLTRTIDFGDLQEYEQHLRLGSVVERLHTGMS

SEQ ID NO: 8739 - protein, 500 aa, synthetic construct
MRALVVIRLSRVTDATTSPERQLESCKQLCAQRGWDVVGVAEDLDVSGAVDPFDRKRRPNLARWLAFGEQPFDVIVAYRVDRLTRSTRHLQQLVHWAEDHKKLVVSATEAHFDTTTPFAAVVIALMGTVAQMELEAIRERIRSAAHFNIRAGKYRGSLPPWGYLPTRVDGEWRLVPDPVQRERILEVYHRVVDNHEPLHLVAYDLNRRGVLSPKDYFAQLRGREPQGRKWSATALKRSMISGAMLGYATLNGKIVRDDDGAPLVRAEPILAREQQEALRAELAKTSRAKPAVSTPSLLLRVLFCAVCGEPAYKFVGGGRKHPRYRCRSMGFPKHCGNGTVVMAEWDAFCEEQVLDLLGDAERLEKVWVAGSDFVVELAEVSAELMDLTSLIGSPAYRTGSPQREALDARIAALAARQEELEGLEARPSGWEWRRTGQRFGDWWREQDTAAKNTWLRSMNVRLTFDVRGGLTRTIDFGDLQEYERHLRLGSVAERLRTGMP

SEQ ID NO: 8740 - protein, 500 aa, synthetic construct
MRALVVIRLSRVTDATTSPERQLESCQQLCAQRGWDVVGVAEDLDVSGAVNPFDRKRRPNLARWLAFEEQPFDVIVAYRVDRLTRSTRHLQQLVHWAEDHKKLVVSATEAHFDTTTPFAAVVIALMGTVAQMELEAIKERNRSAAHFNIRAGKYRGSLPPWGYLPTRVDGEWRLVPDPVQRERILEVYHRVVDNHEPLHLVAHDLNRRGVLSPKDYFAQLRGREPQGRKWSATALKRSMISEAMLGYATLNGKTVRDDDGAPLVRAEPILTREQLEALRAELVKTSRAKPAVSTPSLLLRVLFCAVCGEPAYKFAGGGRKHPRYRCRSMGFPKHCGNGTVVMAEWDAFCGEQVLDLLGDAERLEKVWVAGSDSAVELAEVNAELVDLTSLIGSPAYRAGSPQREALDARIAALAARQEELEGLEARPSGWEWRGTGQRFGDWWREQDTAAKNTWLRSMNVRLTFDVRGGLTRTIDFGDLQECEQHLRSGSVVERLHTGMS

SEQ ID NO: 8741 - protein, 500 aa, synthetic construct
MRALVVIRLSRVTDATTSPERQLESCQQLCAQRGWDVVGVAEDLDVSGAVDPFDRKRRPNLARWLAFEEQPFDVIVAYRVDRLTRSIRHLQQLVHWAEDHKKLVVSATEAHFDTTTPFAAVVIALMGTVAQMELEAIKERIRSAVHFNIRAGKYRGSLPPWGYLPTRVDGEWRLVPDPVQRERILEVYHRVVDNHEPLHLVAHDLNRRGVLSPKDYFAQLRGREPRGRKWSATALRRSMISVAMLGYATLNGKIVRDDDGAPLVRAEPILTRAQQEALRAELAKTSRAKPAVPTPSLLLRVLFCAVCGEPAYKFAGGGRKHPRYRCRSMGFPKHCGNGTVVMAEWDAFCEEQVLGLLGDAVRLEKVWVAGSDSAVELAEVNAELMDLTSLIGSPAYRAGSPQREALDARIAALAARQEELEGLEARPPGWEWRETGQRFGDWWREQDTAAKNTWLRSMNVRLTYDVRGGLTRTIDLGELQEYEQHLRLGSVVERLRTGVS

SEQ ID NO: 8742 - protein, 500 aa, synthetic construct
MRALVVIRLSRVTDATTSPERQLESCQQLCAQRGWDVVGVAEDLDVSGAVDPFDRKRRPNLARWLAFEGQPFDVIVAYRVDRLTRSTRHLQRLVHWAEDHKKLVVSATEAHFDTTTPFAAVVIALMGTVAQMELEAIKERNRSAAHFNIRAGKYRGSLPPWGYLPTRVDGEWRLVPDPVQRERILEVYHRVVDNHEPLHLVAHDLNRRGVLSPKDYFAQLQGREPQGRKWSATALKRSMISKAMLGYATLNGKTVRDDDGAPLVRAEPILTREQLEAVRAELVKTSRAKPAVSTPSLLLRVLFCAVCGEPAYKFAGGGRKHPRYRCRSMGFPKHCGNGSVAMAEWDAFCEEQVLDLLGDVERLEKVWVAGSDSAVELAEVNAELVDLTSLIGSPAYRAGSPQREALDARIAALAARQEELEGLEARPSGWGWRETGQRFGDWWREQNTAAKNTWLRSMNVRLTFDVRGGLTRTIDFGDLQEYEQHLRLGSVVERLRTGMS

SEQ ID NO: 8743 - protein, 500 aa, synthetic construct
MRALVVIRLSRVTDATTSPERQLESCQQLCAQRGWDVVGVAEDLNVSGAVDPFDRKRRPNLACWLAFEEQPFDVIVAYRVDRLTRSIRHLQQLVHWAEDHKKLVVSATEAHFDTTTPFAAVVIALMGTVAQMELEAIRERNRSAAHFNIRAGKYRGSLPPWGYLPARVDGEWRLVPDPVQRERILEVYHRVVDNHESLHLVAHDLNRRGVLSPKDYFAQLQGREPQGRKWSATALKRSMISEAMLGYATLNGKTVRDDDGAPLVRAEPILTREQLEALRAELVRTSRAKPAVSTPSLLLRVLFCAVCGEPAYKFAGGGRKHPRYRCRSMGFPKHCGNGTVAMAEWDAFCEEQVLDLLGDAERLEKVWVAGSDSAVELAEVNAELVDLSSLIGSPAYRAGSPQREALDARIAALAARQEELEGLEARPSGWEWRGTGQRFGDWWREQDTTAKNTWLRSMNVRLTFDVRGGLTRTIDFGDLQECEQHLRLGSVVERLHTGMS

SEQ ID NO: 8744 - protein, 500 aa, synthetic construct
MRALVVIRLSRVTDATTSPERQLESCQQLCTQRGWDVVGVAEDLDVSGAVDPFDRKRRPSLARWLAFEEQPFDVIVAYRVDRLTRSTRHLQQLVHWAEDHKKLVVSATEAHFDTTTPFAAVVIALMGTVAQMELEAIKERNRSAAHFNIRAGKYRGSLPPWGYLPTRVDGEWRLVPDPVQRERILEVYHRVVDNHEPLHLVAHDLNRRGVLSPKDYFAQLQGREPQGRKWSATALKRSMTSEAMLGYATLNGKTVRDDDGAPLVRAEPILTRVQLEALRAELVKTSRAKPAASTPSLLLRVLFCAVCGEPAYKLAGGGRKHPRYRCRSMGSPKHCGNGTVAMAEWDAFCEEQVLDLLGDAERLEKVWVAGSDSAVELAEVNAELVDLTSLIGSPAYRAGSPQRETLDARIAALAARQEELEGLEARPSGWEWRETGQRFGDWWREQDTAAKNTWLRSMNVRLTFDVRGGLTRTIDFGDLQAYEQHLRLGSVVERLHTGMS

SEQ ID NO: 8745 - protein, 500 aa, synthetic construct
MRALVVIRLSRVTDATTSPERQLESCQQLCAQRGWDVVGVAEDLDVSGAVDPFDRKRRPNLARWLAFEEQPFDVIVAYRVDRLTRSTRHLQRLVLWAEDHKKLVVSATEAHFDTTTPFAAVVIALMGTVAQMELEAIKERIRSAVRFNIRAGKYRGSLPPWGYLPTRVDGEWRLVPDPVQRERILEVYHRVVDNHEPLHLVAHDLNRRGVLSPKDYFAQLQGREPQGRKWSATALKRSMISVAMLGYATLNGKIVRGDDGAPLVRAEPILTREQQEALRAELVKTSRAKPAVSTPSLLLRVLFCAVCGEPAYKFVGGGRKHPRYRCRSIGLPKHCGNGTVTMAEWDAFCEEQVLDLLGDAERLEKVWVAGSDSAVELAEVNAELVDLTSLIGSPAYRAGSPQREALDARIAALAARQGELEGLEARPSGWEWRGTGQRFGDWWREQDTAAKNTWLRSMNIRLTFDVRGGLTRTIDFGELQEYEQHLRLGSVAERLHTGMS

SEQ ID NO: 8746 - protein, 500 aa, synthetic construct
MRALVVIRLSRVTDATTSPERQLESCQQLCAQRGWDVVGVAKDLGVSGAVNPFDRKRRPNLARWLAFEEQPFDVIVAYRVDRLTRSTRHLQQLVHWAEDHKKLVVSATEAHFDTTTPFAAVVIALMGTVAQMELEAIKERNRSAAHFNIRAGKYRGSLPPWGYLPTRVDGEWRLVPDPVQRERILEVYHRVVDNHEPLHLVAHDLNRRGVLSPKDYFAQLQGREPQGRKWSATALKRSMISEAMLGYATLNGKTVRDDDGAPLVRAEPILTREQLEALRAELVKTSRAKPAASTPSLLLRVLFCAVCGEPAYKFAGGGRKHPRYRCRSMGFPKHCGNGTVAMAEWDAFCEEQVLNLLGDAERLEKVWVAGSDSAVELAEVNAELVDLTSLIGSPAYRAGSPQREALDARIAALAARQEELEGLGARPPGWEWRETGQRFGDWWREQDAAAKNTWLRSMNVRLTFDVRGGLTRTIDFGDLQEYEQHLRLGSVVERLHTGMS

SEQ ID NO: 8747 - protein, 500 aa, synthetic construct
MRALVVIRLSRVTDATTSPERQLESCQQLCAQRGWGVVGVAEDLDVSGAVDPFDRKRRPNLARWLAFEEQPFDVIVAYRVDRLTRSVRHLQRLVRWAEDHKKLVVSATEAHFDTTTPFAAVVIALMGTVAQMELEAIKERIRSAVHFNIRAGKYRGSLPPWGYLPTRVDGEWRLVPDPVQRERILEVYHRVVGNHEPLHLVAHDLNRRGILSPKDYFAQLRGREPRGRKWSATALKRSMISVAMLGYATLNGRTVRDDDGAPLVRAEPILTREQQEALRAELARTSRTKPAVSTPSLLLRVLFCAVCGEPAYKFVGGGRKHPRYRCRSMGFPKHCGNGTVVMAEWDAFCEEQVLDLLGDAERLEKVWVVGSDSAVELAEVNAELVDLTSLIGSPAYRAGSPQRVALDARIAALAARQEELEGLEARPSGWEWRETGQRFRDWWREQDTAAKNTWLRSMNVRLTFDVRGGLTRTIDFGDLQEYEQHLRLGSVAERLYTGMS

SEQ ID NO: 8748 - protein, 500 aa, synthetic construct
MRALVVIRLSRATEATTSPERQLESCQQLCAQRGWNVVGVAEDLDVSGAVDPFDRKRRPNLARWLAFEQQPFDVIVAYRVDRLTRSTRHLQQLVRWAEDHKKLVVSATEAHFDTTTPFAAVVIALMGTVAQMELEAIKERIRSAAHFNIRAGKYRGSLPPWGYLPTRVDGEWRLVPDPVQRERILEVYRRVVDNHEPLHLVAHDLNRRGVLSPKDYFAQLRGREPQGRKWSATALKRSMISVAMLGYATLNGKIVRGDDGAPLVRAEPILTREQQEALRAVLAKTSRAKPAVSTPSLLLRVLFCAVCGEPAYKFVGGGRKHPRYRCRSMGFPKHCGNGTVVMTEWDAFCEEQVLSLLGDAERLEKVWVAGSDSSVELAEVNAELVDLTSLIGSPAYRAGSPQREALDARIAALAARQEELEGLEAHPSGWEWRGTGQRFGDWWREQDTAAKNTWLRSMNVRLTFDVRGGLTRTIDFGDLQEYEQHLRSGGVAERLHTGMS

SEQ ID NO: 8749 - protein, 500 aa, synthetic construct
MRALVVIRLSRVTDATTSPERQLESCQQLCAQRGWNVVGVAEDLDVSGAVDPFDRKRRPNLARWLAFEEQPFDAIVAYRVDRLTRSVRHLQQLVHWAEDHKKLVVSATEAHFDTTTPFAAVVIALMGTVAQMELEAIKERNRSAAHFNIRAGKYRGSLPPWGYLPARVDGEWRLVPDPVQRERILEVYHRVVDNHEPLYLVAHDLNRRGVLSPKDNFAQLQGREPQGRKWSATALKRSMISEAMLGYATLNGKTVRDDDGAPLVRAEPILTREQLEALRAELVKTSRAKPAVSTPSLLLRVLFCAVCGEPAYKFAGGGRKHPRYRCRSMGFPKHCGNGTVAMAEWDAFCEEQVLELLGDAERLEKVWVAGSDFAVELAEVNAGLVDLTSLIGSPAYRAGSPQREALDTRIAALAARQEELEGLGARPSGWEWRETGQRFGDWWREQDTAAKNTWLRSMNVRLTFDVRGGLTRAIDFGDLQEYGQHLRLGSVVERLHTGMP

SEQ ID NO: 8750 - protein, 500 aa, synthetic construct
MRALVVIRLSRVTDATTSPERQLESCQQLCAQRGWDVVGVAEDLDVSGAVDPFDCKRRPNLARWLAFEEQPFDAIVAYRVDRLTRSTRHLQQLVHWAEDHKKLVVSATEAHFDTTTPFAAVVIALMGTVAQMELEAIKERIRSAAHFNIRAGKYRGSLPPWGYLPTRVGGEWRLAPDPVQRERILEVYHRVVDNHEPLHLVAHDLNRRGVLSPKDYFAQLRGREPQGRKWSATALKRSMISVAMLGYATLNGKIVRDDNGAPLVRAEPILTREQQGALRAELAKTSRAKPAVSTPSLLLRVLFCAVCGEPAYKFVGGGRKHPRYRCRSMGFPKHCGNGTVVMTEWDAFCEEQVLDLLGDAERLEKVWVAGSDSAVELAEVNAELVDLTSLIGSPAYRAGSPQRKALDARIAALAARQEELEGLEARPSGWEWRETGQRFGDWWREQDTAAKNTWLRSMNVRLTFDVRGGQTRTIDFGDLQEYEQHLRLGGVVERLRTGMS

SEQ ID NO: 8751 - protein, 500 aa, synthetic construct
MRALVVIRLSRVTDATTSPERQLASCQQLCAQRGWDVVGVAEDLDVSGAVDPFDRKRRPNLARWLAFEEQPFDVIVAYRVDRLTRSTRHLQQLVRWAEDHKKLVVSATEAHFDTTTPFAAVVIALMGTVAQMELEAIKERSRSAAHFNIRAGKYRGSLPPWGYLPTRVDGEWRLVPDPVQRERILEVYHRVVDNHEPLHLVAYDLNRRGVLSPKDYFAQLQGREPQGRKWSATALKRSMISGAMLGYATLNGKIVRDDDGAPLVRAEPILSREQLEALRAELVKTSRAKPAVSTPSLLLRVLFCAVCGEPAYKFVGGGRKHPRYRCRSMGFPEHCGNGTVVMAEWDEFCEEQVLNLLGDAERLEKVWVAGSDSAVELAEVNAELVDLTSLIGSPAYRAGSPQREALDARIAALAARQEELEGLEARPSGWEWRGTGQRLGDWWREQGTAAKNSWLRSMNVRLTFDVRGGLTRTIDFGELQEYEQHLRLGSVAERLHTGMS

SEQ ID NO: 8752 - protein, 500 aa, synthetic construct
MRALVVIRLSRVTDATTSPERQLESCQQLCAQRGWDVVGVAEDLDVSGAVDPFDRKRRPNLARWLAFEEQPFDAIVAYRVDRLTRSTRHLQQLVHWAEDHKKLVVSATEAHFDTTTPFAAVVIALMGTVAQMELEAIKERNRSAAHFNIRAGKYRGSLPPWGYLPTRVDGEWRLVPDPVQRERILEVYHRVVDNHEPLHLVAHDLNRRGVLSPKDYFAQLQGREPQGRKWSATALKRSMTSEAMLGYATLNGKTVRDDDGAPLVRAEPILTRVQPEALRAELVKTSRAKPAVSTPSLLLRVLFCAVCGEPAYKFAGGGRKHPRYRCRSMGFPKHCGNGTVVMAEWDAFCEEQVLNLLGDAERLEKVWVAGSDSAVELAEVNAELVDLTGLIGSPAYRAGSPQREALDARIAALATRQGELEGLEARPSGWEWRGTGQRFGDWWREQDTAAKNTWLRSMNVRLTFDVRGGLTRTIDFGDQQEYEQHLRLGSVVERLHTGMS

SEQ ID NO: 8753 - protein, 500 aa, synthetic construct
MRALVVIRLSRVTDATTSPERQLESCQQLCAQRGWDVVGVAEDLDVSGAVNPFDRKRRPNLARWLAFEEQPFDVIVAYRVDRLTRSTRHLQQLVHWAEDHKKLVVSATEAHFDTTTPFAAVVIALMGTVAQMELEAIKERNRSAAHFNIRAGKYRGSLPPWGYLPARVDGEWRLVPDPVQRERILEVYHRVVDNHEPLHLVAHDLNRRGVLSPKDYFAQLQGREPQGRKWSATALKRSMISEAMLGYATLNGKTVRDDDGAPLVRAEPILTREQLEALRAELVKTSRAKPAVSTPSLLLRVLFCAVCGEPAYKFAGGGRKHPRYRCRSMGFPKHCGNGTVVMAEWDAFCEEQVLDLLGDAERLEKVWVAGSDSAVELAEVNAELVDLTSLIGSPVYRAGSPQREALDARIAALAARQEELEGLEARPSGWEWRETGQRFGDWWREQDTAAKNTWLRSMNVRLTFDVRGGLTRMIDFGDLQGYEQHLRSGSVVKRLHTGMS

SEQ ID NO: 8754 - protein, 500 aa, synthetic construct
MRALVVIRLSRVTDATTSPERQLESCQQLCAQRGWDVVGVAEDLDVSGAVDPFDRKRRPNLARWLAFEEQPFDVIVAYRVDRLTRSTRHLQQLVHWAEDHKKLVVSATEAHFDTTTPFAAVVIALMGTVAQMELEAIKERNRSAAHFNIRAGKYRGSLPPWGYLPTRVDGEWRLVPDPVQRERILEVYHRVVDNHEPLHLVAHDLNRRGVLSPKDYFAQLQGREPQGRKWSATALKRSMTSEAMLGYATLNGKTVRDDDGAPLVRAEPILTREQLEALRAELVRTSRAKPAVSTPSLLLRVLFCAVCGEPAYKFAGGGRKHPRYRCRSMGFPKHCGNGTVAMAEWDAFCEEQVLDLLGDAERLEKVWVAGSDSAVELAEVNAELVDLTSLIGSPTYRAGSPQREALDARIAALAARQEELEGLEARPSGWEWRGTGQRFGDWWREQGTAAKNTWLRSMNVRLTFDVRGGLTRTIDFGDLQEYEQHLRLGSVVERSHTGMS

SEQ ID NO: 8755 - protein, 500 aa, synthetic construct
MRALVVIRLSRVTDATTSPERQLESCQQLCAQRGWDVVGVAEDLDVSGAVDPFDRKRRPNLARWLAFEEQPFDVIVAYRVDRLTRSTRHLQQLVHWAEDHKKLVVSATEAHFDTTTPFAAVVIALMGTVAQMELEAIKERNRSAAHFNIRAGKYRGSLPPWGYLPTRVDGEWRLVPDPVQRERILEVYHRVVDSHEPLHLVAHDLNRRGVLSPKDYFAQLQGREPQGRKWSATALKRSMISEAMLGYATLNGKTVRDDDGAPLVRAEPILTREQLEALRAELVKASRAKPAVSTPSLLLRVLFCAVCGEPAYKFAGGGRKHPRYRCRSMGFPKHCGNGTVVMAEWDAFCEEQVLNLLGDAERLEKVWVAGSDSAVELAEVNAELVDLTSLIGSPAYRAGSPQREALDARIAALAARQEELEGLGARPSDWEWRETGQRFGDWWREQDTAAKNTWLRSMNVRLTFDVRGGLTRTIDFGDLQEYEKHLRLGSVVERLHTGMS

SEQ ID NO: 8756 - protein, 500 aa, synthetic construct
MRALVVIRLSRVTDATTSPERQLESCQQLCAQRGWDVVGVAEDLDVSGAVDPFDRKRRPNLARWLAFEELPFDVIVAYRVDRLTRSVRHLQQLVHWAEDHKKLVVSATEAHFDTTTPFAAVVIALMGTVAQMELEAIKERNRSAAHFNIRAGKYRGSLPPWGYLPTRVDGEWRLVPDPVQRERILEVYHRVVNNHEPLHWVAHDLNRRGVLSPKDYFAQLQGREPQGRKWSATALKRSMISEAMLGYATLNGKTVRDDDGAPLVRAEPILTRGQLEALRAELVKTSRAKPAVSTPSLLLRVLFCAVCGEPAYKFAGGGRKHPRYRCRSMGFPKHCGNGTVAMAEWDAFCEEQVLDLLGDAERLEKVWVAGSDSAVELAEVNAELVDLTSLIGSPAYRAGSPQREALDARIAALAARQEELEGLEARPSGWGWRETGQRFGDWWREQNTAAKNAWLRSMNVRLTFDVRGGLTRTIDFGDLQEYEQHLRLGSVVERLHTGMS

SEQ ID NO: 8757 - protein, 500 aa, synthetic construct
MRALVVIRLSRVTDATTSPERQLESCQQLCAQRGWDVVGVAEDLDVSGAVDPFDRKRRPNLARWLAFEEQPFDVIVAYRVDRLTRSTRHLQQLVHWAEDHKKLVVSATEAHFDTTTPFAAVVIALMGTVAQMELEAIKERIRSAVHFNIRAGKYRGSLPPWGYLPTRVDGEWRLVPDPVQRKRILEVYRRVVNNHEPLLSVAHDLNRRGVLSPKDYFAQLRGREPQGRKWSATALKRSMISVAMLGHATLNGKIVRDDDGAPLVRAEPILTREQQEALRAELAKTSRAKPAVSTPSLLLRVLFCAVCGEPAYKFAGGGRKHPRYRCRSMGFPKHCGNGTVVTAEWDAFCEEQVLNLLGDAERLEKVWVAGSDSAVELAEVNAELVDLTSLIGSPAYRAGSPQREALDARIAALAARQEELEGLEARPSGWEWRETGQRFRDWWREQDTAAKNTWLRSMNVRLTFDVRGGLTRTIDFGDLQEYARHLRLGSVVERLHTGMS

SEQ ID NO: 8758 - protein, 500 aa, synthetic construct
MRVLIVIRLSRVTDATTSPERQLESCQQLCAQRGWDVVGVAEDLDVSGAVDPFDRKRRPNLARWLAFEEQPFDVIVAYRVDRLTRSTRHLQQLVHWAEDHKKLVVSATEAHFDTTTPFAAVVIALMGTVAQMELEAIKERNRSAAHFNIRAGKYRGSLPPWGYLPTRVDGEWRLVPDPVQRERILEVYHRVVDNHEPLHLVAHDLNRRGVLSPKDYFAQLQGREPQGRKWSATALKRSMISEAMLGYATLSGKTVRDDDGAPLVRAEPILTRGQLEALRAELAKTSRAKPAVSTPSLLLRVLFCAVCGEPAYKFAGGGRKHPRYRCRSMGFPKHCGNGTVVMAEWDAFCEEQVLNLLGDAERLEKVWVAGSDSAVELAEVNAELVDLASLIGSPAYRAGSPQREALDARIAALAARQEELEGLEARPSGWEWRGTGQRFGDWWREQDTAAKNTWLRSMNVRLTFDVRGGLTRTVDFGDLQEYEQHLRLGSVVERLHTGMS

SEQ ID NO: 8759 - protein, 500 aa, synthetic construct
MRALVVIRLSRVTDATTSPERQLASCQQLCAQRGWDVVGVAEDLDVSGAVDPFDRKRRPNLARWLAFEVHPFDVIVVYRVDRLTRSTRHLQQLVRWAEDHKKLVVSATEAHFDTTTPFAAVVIALMGTVAQMELEAIKERIRSAAHFNIRAGKYRGSLPPWGYLPARVDGVWRLVPDPVQRERILEVYHRVVDNHEPLHLVAHDLNRRGVLSPKDYFAQLQGREPQGRKWSATALKRSMTSVAMLGYATLNGKIVRDDDGAPLVRAEPILTREQLEALRAELVKTSRAKPAVSTPSLLLRVLFCAVCGEPAYKFVGGGRKHPRYRCRSMGFPKHCGNGTVVMAEWDAFCEEQVLNLLGDAERLEKVWVAGSDSAVELAEVNAELVDLTSLIGSPVYRAGSPQREALDARIAALATRQEELEGLEARPSGWEWRETGQRFRDWWREQDTAAKNTWLRSMNVRLTFDVRGGLTRTIDFGELQEYEHHIRLDSVVERLHIGMA

SEQ ID NO: 8760 - protein, 500 aa, synthetic construct
MRALVVIRLSRVTDATTSPERQLESCQQLCVQRGWDIVGVAEDLDVSGAVDPFDRKRRPNLARWLAFEEQPFDVIVAYRVDRLTRSTRHLQQLVHWAEDHKKLVVSATEAHFDTTTPFAAVVIALMGTVAQMELEAIKERNRSAAHFNIRAGKYRGSLPPWGYLPARVDGEWRLVPDPVQRERILEVYHRVVDDHEPLHLVAHDLNRRGVLSPKDYFAQLQGREPQGRKWSATALKRSMISEAMLGYATLNGKAVRDDDGAPLVRAEPILTREQLEVLRAELVKTSRAKPAVSTPSLLLRVLFCAVCGEPAYKFAGGGRKHPRYRCRSMGFPKHCGNGTVVMAEWDAFCEEQVLDLLGVAERLEKVWVTGSDSAVELAEVNAELVDLTSLIGSPTYRTGSPQREALDARIAALAARQEELESLEARPSGWEWRETGQRFGDWWREQDTAAKNTWLRSMNVRLTFDVRGGLTRTIDFGDLQEYEQHLRLGSVVERLHTGMS

SEQ ID NO: 8761 - protein, 500 aa, synthetic construct
MRALVVIRLSRVTDATTSPERQLESCRQLCAQRGWDVVGVAEDLDVSGAVDPFDRKRRPNLARWLAFEEQPFDVIVAYRVDRLTRSTRHLQQLVRWAEDHKKLVVSATEAHFDTTTPFAAVVIALMGTVAQMELEAIKERIRSAVHFNIRAGKYRGSLPPWGYLPTRVDGEWRLVPDPVQREHILEVYHRVVDNHEPLHLVAHDLNRRGVLSPKDYFAQLQGREPQGRRWSATALKRSMISGAMLGYATLNGKIVRDDDGAPLVRAEPILTREQQEALRAELVKTSRAKPAVSTPSLLLRVLFCAVCGEPAYKFVGGGRKHPRYRCRSMGFPKHCGNGTVVMAEWDAFCEEQVLNLLGDVERLEKVWVAGSGSTVELAEVNAELVDLTSLIGSPAYRAGSPQREALDARIAALAARQEELEGLEARPSGWEWRETGQRFGDWWREQDTAAKNTWLRSMNVRLTFDVRGGLTRTIDFGDLREYEQHLRLGGVVERIHTGAS

SEQ ID NO: 8762 - protein, 500 aa, synthetic construct
MRALVVIRLSRVTDATTSPERQLESCQQLCAQRGWDVVGVAEDLDVSGAVDPFDRKRRPNLARWLAFEEQPFDVIVAYRVDRLTRSTRHLQQLVHWAEDHKKLVVSATEAHFDTTTPFAAVVIALMGTVAQMELEAIKERNRSAAHFNIRAGKYRGSLPPWGYLPTRVDGEWRLVPDPVQRERILEVYHRVVVNHEPLHLVAHDLNRRGVLSPKDYFAQLQGREPQGRKWSATALKRSMISEAMLGYATLNGKTVRDDDGAPLVRAEPILTREQLEALRAELVKTSRAKPAVSTPSLLLRVLFCAVCGEPAYKFAGGGRKHPRYRCRSMGFPRHCGNGTVVMAEWDAFCEEQVLSLLGDAERLEKVWVAGSDSAVELAEVNAELVDLTSLIGSPAYRAGSPQREALDARIAALAARQEVLEGLEARPSGWEWRETGQRFGDWWREQDTAAKNTWLRSMNVRLAFDVRGGLTRTIDFGDLQEYEQHLRLGSVVERSHTGMS

SEQ ID NO: 8763 - protein, 500 aa, synthetic construct
MRALVVIRLSRVTDATTSPERQLESCQQLCGQRGWDVVGVAEDLDVSGAVDPFDRKRRPNLARWLAFEEQPFDVIVAYRVDRLTRSTRHLQQLVHWAEDHKKLVVSATEAHFDTTTPFAAVVIALMGTVAQMELEAIKERNRSAAHFNIRAGKYRGSLPPWGYLPTRVDGEWRLAPDPVQRERILEVYHRVVDNHEPLHLVAHDLNRRGVLSPKDYFAQLQGREPQGRKWSATALKRSMISEAMLGYATLNGKTVRDDDGAPLVRAEPILTREQLEALRAELVKTPRAKPAVSTPSLLLRVLFCAVCGEPAYKFAGGGRKHPRYRCRSMGFPKHCGNGTVVMAEWDAFCEEQVLDLLGDAERLEKVWVAGSDSAVELAEVNAELVDLTSLVGSPAYRAGSPQREALDARIAALAARQEELEGSEARPSGWEWRGTGQRFGDWWREQDTAAKNTWLRSMNVRLTFDVRGGLTRTIDLGDLQEYEQRLRLGSVVERLHPGMS

SEQ ID NO: 8764 - protein, 500 aa, synthetic construct
MRALVVIRLSRVTDATTSPERQLESCQQLCTQRGWDVVGVAEDLDVSGAVDPFDRKRRPNLARWLAFEEQPFDVIVAYRVDRLTRSTRHLQQLVHWAEDHKKLVVSATEAHFDTTTPFAAVVIALMGTVAQMELEAIKERNRSAAHFNIRAGKYRGSLPPWGYLPTRVDGEWRLVPDPVQRERILEVYHRVVDNHEPLHLVAHDLNRRGVLSPKDYFAQLQGREPQGRKWSATALKRSMISVAMLGYATLNGKTVRDDDGAPLVRAEPILTREQLEALRAELVKTSRAKPAVSTPSLLLRVLFCAVCGEPAYKFAGGGRKHPRYRCRSMGFPKHCGNGTVVMTEWDAFCEEQVLDLLGDAERLEKVWVAGSDSAVELAEVNAELVDLTSLIGSPAYRAGSPQREALDARIAALAARQEELEGLEARPSGWEWRETGQRFGDWWREQDTAAKNTWLRSMNVRLTFDVRGGLTRTIDFGDLQEYEQHLRLGSVVERLHTGMS

SEQ ID NO: 8765 - protein, 500 aa, synthetic construct
MRALVVIRLSRVTDATTSPERQLETCQQLCAQRGWDVAGVAEDLDVSGAVDPFDRKRRPNLARWLAFEEQPFDVIVAYRVDRLTRSTRHLQQLVRWAEDHKKLVVSATEAHFDTTTPFAAVIIALMGTVAQMELEAIKERIRSAVHFNIRAGKYRGSLPPWGYLPTRVDGEWRLVPDPVQRERILEVYHRVVDNHEPLHLVAYDLNRRGVLSPKDYFAQLRGREPQGRKWSATALKRSMISVAMLGYATLNGKTVRDDDGAPLVRAEPILTREQLGALRVELAKTSRAKPAVSTPSLLLRVLFCAVCGEPAYKFVGGGRKHPRYRCRSMGFPKHCGNGTVVMAEWDAFCEKQVLDLLGDAERLEKVWVAGSDSAVELAEVNAELMDLTSLIGSPAYRAGSPQREALDARIAALAARQEELDGLEARPSGWEWRETGQRFGDWWREQDTAAKNTWLRSMNVRLMFDVRGGLTRTIDFGDLQEYEQHLRLGSAAERLHTGMS

SEQ ID NO: 8766 - protein, 500 aa, synthetic construct
MRTLVVIRLSRVTDATTSPERQLESCQQLCAQRGWDVVGVAEDLDVSGAVDPFDRKRRPNLARWLAFEEQPFDVIVAYRVDRLTRSIRHLQQLVHWAEDHKKLVVSATEAHFDTTTPFAAVVIALMGTVAQMELEAIKERNRSAAHFNIRAGKYRGSLPPWGYLPTRVDGEWRLVPDPVQRERILEVYHRVVDNHEPLHLVAHDLNRRGVLSPKDYFAQLRGREPQGRKWSATALKRSMTSEAMLGYATLNGKTVRDDDGAPLVRAEPILTREQLEALRAELVKTSRAKPAVSTPSLLLRVLFCAVCGEPAYKFAGGGRKHPRYRCRSMGFPKHCGNGTVVMAEWDTFCEEQVLDLLGDAERLEKVWVAGSDSAVELAEVNAELVDLTSLIGSPAYRAGSPQREALDARIAALAARQEELEGLEARPSGWEWRETGQRFEDWWREQDTAAKNTWLRSTNVRLTFDARGGLTRTIDFGDLQEYEQHLRSGSVVERLHTGMS

SEQ ID NO: 8767 - protein, 500 aa, synthetic construct
MRALVVIRLSRVTDATTSPERQLESCQQLCAQRGWDVVGVAEDLDVSGAVDPFDRKRRPNLARWLAFEEQPFDVIVAYRVDRLTRSTRHLQQLVHWAEDHKKLVVSATEAHFDTTTPFAAVVIALMGTVAQMELEAIKERNRSAAHFNIRAGKYRGSMPPWGYLPTRVDGEWRLVPDPVQRERILEVYHRVVDDHEPLHLVAHDLNRRGVLSPKDYFAQLQGREPQGRKWSATALKRSMISEAMLGYATLNGKTVRDDDGAPLVRAEPILTREQMEALRAELVKTSRAKPAVSTPSLLLRVLFCAVCGEPAYKFAGGGRKHPRYRCRSMGFPKHCGNGTVAMAEWDAFCEEQVLDLLGDAERLEKVWVAGSDSAVELAEVNAELVDLTSLIGSPAYRAGSPQREALDARIAALAARQEELEGLGARPSGWEWRETGQRFGDWWREQDTAAKNTWLRSMNVRLTFDVRGGLIRTIDFGDLQEYEQHLRLGSVVERLHTGMS

SEQ ID NO: 8768 - protein, 500 aa, synthetic construct
MRALVVIRLSRVTEATTSPERQLESCQQLCAQRGWDVVGVAEDLDVSGAVDPFDRKRRPNLARWLAFEEQPFDVIVAYRVDRLTRSTRHLQQLVHWAEDHKKLVVSATEAHFDTTTPFAAVVIALMGTVAQMELEAIKERSRSAAHFNIRAGKYRGSLPPWGYLPTRVNGEWRLVPDPVQRERILEVYHRVVDNHEPLHLVAHDLNRRGVLSPKDYFAQLRGREPRGRKWSATALKRSMISVAMLGYATLSGKTVRGDDGAPLVRAEPILTRGQLEALRAELAKTSRAKPAVSTPSLLLRVLFCAVCGEPAYKFVGGGRKHPRYRCRSMGFPEHCGNGTVVMAEWDAFCEEQVLNLLGDAERLEKVWSAGSDSAVELAEVNAELVDLTSLIGSPAYRVGSPQREALDARIAALAARQEELRGLEARPSGWEWRGTGQRFRDWWREQDTAAKNTWLRSMNVRLTFDVRGGLTRTIDFGDLQEYEQHLRLGSVVERSHTGMS

SEQ ID NO: 8769 - protein, 500 aa, synthetic construct
MRALVVIRLSRVTDATTSPERQLESCQQLCAQRGWDVVGVAEDLDVSGAVDPFDRKRRPNLARWLAFEEQPFDVIVAYRVDRLTRSTRHLQQLVLWAEDHRKLVVSATEAHFDTTTPFAAVVTALMGTVAQLELEAIKERIRSAVRFNIRAGKYRGSLPPWGYLPTRVDGEWRLVPDPVQRERILEVYHRVVDNHEPLHLVAHDLNRRGVLSPKDYFAQLRGREPQGRKWSTTALKRSMTSEAMLGYATLNGKAVRDDDGAPLVRAEPILTREQQEALRAEFAKTSRAKPAVSTPSLLLRVLFCAVCGEPAYKFVGGGRKHPRYRCRSMGFPEHCGNGTVVMAEWDAFCEEQVLNLLGDVERLEKVWVAGSDSAVELAEVSAELVDLTSLIGSPAYRAGSPQREALDARIAALAARQEELEGLEARPSGWGWRETGQRFGDWWREQDTAAKNTWLRSMNVRLTFDVRGGLTRTIDLGDLQVYEQHLRLGSVVERLHTGMS

SEQ ID NO: 8770 - protein, 500 aa, synthetic construct
MHALVVIRLSRVTDATTSPERQLESCQQLCAQRGWDVVGVAEDLDVSGAVDPFDRKRRPNLARWLAFEEQPFDVIVAYRVDRLTRSTRHLQQLVHWAEDHKKLVVSATEAHFDTTTPFAAVVIALMGTVAQMELEAIKERIRSATHFNIRAGKYRGSLPPWGYLPTRVDGEWRLVPDPVQRERILEVYHRVVDNHEPLHLVAHDLNRRGVLSPKDYFAQLRGREPRGRKWSATALRRSMTSEAMLGYATLNGKIVRDDDGAPLVRAEPILTREQQEALRAELAKTSRAKPAVSTPSLLLRVLFCAVCGEPAYKFVGGGRKHPRYRCRSMGFPKHCGNGTVVMTEWDAFCEEQMLDLLGDTERLEKVWVAGSDSVVELAEVNAELVDLTSLIGSPAYRAGSPQREALDARIAALAARQGELEGLEARPSGWEWRGTGQRFGDWWREQDTAAKNTWLRSMNVRLTFDVRGGLTRTIDFGDLQEYEQHLRLGSLVERLHTGMS

SEQ ID NO: 8771 - protein, 500 aa, synthetic construct
MRALVVIRLSRVTDATTSPERQLESCQQLCAQRGWDVVGVAEDLDVSGAVDPFDRKRRPNLARWLAFEEQPFDVIVAYRVDRLTRSTRHLQQLVHWAEDHKKLVVSATEAHFDTTTPFAAVVIALMGTVAQMELEAIKERNRSAAHFNIRAGKYRGSLPPWGYLPTRVDGEWRLVPDPVQRERILEVYHRVVDNHEPLHLVAHDLNQRGVLSPKDYFAQLQGREPQGRKWSATALKRSMVSEAMLGYATLNGETVRDDDGAPLVRAEPILTRGQLEALRAELVKTSRAKPAVSTPSLLLRVLFCAVCGEPAYKFAGGGRKHPRYRCRSMGFPKHCGNGTVVIAEWDAFCEEQVLDLLGDAEHLEKVWVAGSDSAVELAEVNAELVDLTSLIGSPAYRAGSPQREALDARIAALAARQEELEGLEARPSGWEWRGTGQRFGDWWREQDTAAKNTWLRSMNVRLTFDVRGGLTRTIDFGDLQEYEQHLRLGSVVERLHTGMS

SEQ ID NO: 8772 - protein, 500 aa, synthetic construct
MRALVVVRLSRVTDATTSPERQLESCQQLCAQRGWDVVGVAEDLDVSGAVDPFDRKRRPNLARWLAFEEQPFDVIVAYRVDRLTRSTRHLQRLVHWAEDHKKLVVSATEAHFDTTTPFAAVVIALMGTVAQMELEAIKERIRSAVHSNIRAGKYRGSLPPWGYLPARVDGEWRLVPDPVQRERILEVYHRVVDNHEPLHLVAYDLNRRGVLSPKDYFAQLRGREPRGRKWSATALKRSMTSVAMLGYATLSGKTVRGDDGAPLVRAEPILTREQQEALRAELAKTSRAKPAVSTPSLLLRVLFCAVCGEPAYKFVGGGRKHPRYRCRSMGFPKHCGNGTVAMTEWDAFCEEQVLDLLGDAERLEKVWVVGSDSAVELAEVNAELVDLTSLIGSPAYRAGSPQREALDARIAALAARQEELEGLEARPPGWEWRGTGQRLGDWWREQDTAAKNTWLRSMNIRLTFDVRGGLTRTIDFGDLQEYEQHLRLGSMVERLHTGMS

SEQ ID NO: 8773 - protein, 500 aa, synthetic construct
MRALVVIRLSRVTDATTSPERQLESCQQLCAQRGWDVVGVAEDLDVSGAVDPFDRKRRPNLARWLAFEEQPFDVIVAYRVDRLTRSVRHLQQLVRWAEDHKKLVVSATEAHFDTTTPFAAVVIALMGTVAQMELEAIKERIRSAAHFNIRAGKYRGSLPPWGYLPTRVDGEWRLVPDPVQRERILEVYHRVIDNHEPLHLVAYDLNRRGVLSPKDYFAQLRGREPRGRKWSATALRRSMTSEAMLGYATLNGKIVRDDDGAPLVRAEPILTREQQEAFRAKLAKTSRAKPAVSTPSLLLRVLFCAVCGEPAYKFVGGGRKHPRYRCRSMGFPGHCGNGTVVMAEWDAFCEEQVLNLLGDAERLEKVWVAGSDSAVELAEVNAELVDLTSLIGSPAYRAGSPQREALDARIAALAARQGELEGLEARPSGWEWRGTGQRLGDWWREQDTAAKNTWLRSMNVRLTFDVRGGLTRTIDFGDLQEYVQHLRLGGVVERLHTGMS

SEQ ID NO: 8774 - protein, 500 aa, synthetic construct
MRALVVIRLSRVTDATTSPERQLESCQQLCAQRGWDVVGVAEDLDVSGAVDPFDRKRRPSLARWLTLEEQPFDVIVAYRVDRLTRSVRHLQRLVRWAEDHKKLVVSATEAHFDMTTPFAAVVIALMGTVAQMELEAIKERSRSAAHFNIRAGKYRGSLPPWGYLPTRVDGEWRLVPDPVQRERILEVYHRVVGNHEPLHLVAHDLNRRGVLSPKDYFAQLRGREPRGRKWSATALRRSMTSVAMLGYATLSGKTVRDDDGAPLVRAEPILTREQQEALRAELVKTSRAKPAVSTPSLLLRVLFCAVCGEPAYKFVGGGRKHPRYRCRSMGFPKHCGNGTVVMAEWDAFCEEQVLALLGDAERLEKVWVVGSDSAVELAEVNAELVDLTSLIGSPAYRAGSPQREALGARIAALAARQEELEGLEARPSGWEWRETGQRFGDWWREQDTAAKNTWLRSMNVRLTFDVRGGLTRTIDFGDLQEYGQHLRLGSVVERLHTRMS

SEQ ID NO: 8775 - protein, 500 aa, synthetic construct
MRALVVIRLSRVTDATTSPERQLESCQQLCAQRGWDVVGVAEDLDVSGAVDPFDRKRRPNLARWLAFEEQPFDVIVAYRVDRLTRSTRHLQQLVRWAEDHKKLVVSATEAHFDTTTPFAAVVIALMGTVAQMELEAIKERIRSAAHFNIRAGKYRGSLPPWGYLPTRVDGGWRLVPDPVQRERILEVYHRVVDDHEPLHLVAHDLNRRGVLSPKDYFAQLRGREPQGRKWSATALRRSMTSEAMLGYATLNGKTVRDDDGAPLVRAEPILTREQQEALRAELAKTSRAKPAVSTPSLLLRVLFCAVCGEPAYKFAGGGRKHPRYRCRSMGFPEHCGNGTVVMAEWDALCEEQVLNLLGDAERLEKVWVAGSDSAVELAAVNAELVDLTSLIGSPAYRAGSPQREALDARIAALAARQEELEGLEARPSGWGWRETGQRFGDWWREQDTAAKNTWLRSMNVRLTFDVRGGLVRTIDFGDLQEYEQHLRLGGAVKRLHTGMS

SEQ ID NO: 8776 - protein, 500 aa, synthetic construct
MRALVVIRLSRVTDATTSPERQLESCQQLCAQRGWDVVGVAEDMDVSGAVDPFDRKRRPNLARWLAFEEQPFDVVVAYRVDRLTRSVRHLQQLVHWAEDHKKLVVSATEAHFDTTTPFAAVVIALMGTVAQMELEAIKERNRSAAHFNIRAGKYRGSLPPWGYLPTRVDGEWRLVPDPVQRERILEVYHRVVDNHEPLHLVAHDLNRRGVLSPKDYFAQLQGREPQGRKWSATALKRSMISVAMLGYATLNGKTVRDDDGAPLVRAEPILTREQLEALRAELVKTSRAKPAVSTPSLLLRVLFCAVCGEPAYKFAGGGRKHPRYRCRSMGFPKHCGNGTVVMAEWDAFCEEQVLDLLGDAERLEKVWVAGSDSAVELAEVNAELVDLTSLIGSPAYRAGSPQREALDARIAALAARQEELEGLEARPSGWEWRETGQRFGDWWREQDTAAKNTWLRSMNVRLTFDVRGGLTRTIDFGGLQEYEQHLRLGSVVERLHTGMS

SEQ ID NO: 8777 - protein, 500 aa, synthetic construct
MRALVVIRLSRVTDATTSPERQLESCQQLCAQRGWDVVGVAEDLDVSGAVDPFDRKRRPNLARWLAFEEQPFDVIVAYRVDRLTRSTRHLQQLVHWAEDHQKLVVSATEAHFDTTTPFAAVVIALMGTVAQMELEAIKERNRSAAHFNIRAGKYRGSLPPWGYLPTRVDGEWRLVPDPVQRERILEVYHRVIDNHEPLHLVAHDLNRRGVLSPKDYFAQLRGREPQGRKWSATALKRSMISEAMLGYATLNGKTVRDDDGAPLVRAEPILTRKQLEALRAELVKTSRAKPAVSTPSLLLRVLFCVVCGEPAYKFAGGGRKHPRYRCRSMGFPKHCGNGTVAMAEWDAFCEEQVLDLLGDAERLEKVWVAGSDSAVELAEVDAELVDLTSLIGSPAYRTGSPQREALDARIAALAARQEELEGLGARPSGWEWRGTGQRFGDWWREQDTAAKNTWLRSMNVRLTFDVRGGLTRTIDFGELQEYVQHLRLGSVVERLHAGMS

SEQ ID NO: 8778 - protein, 500 aa, synthetic construct
MRALVVIRLSRVTDATTSPERQLESCQQLCAQRGWDVVGVAEDLDVSGAVDPFDSKRRPNLARWLAFEEQPFDVIVAYRVDRLTRSVRHLQQLVHWAEDHKKLVVSATEAHFDTTTPFAAVVIALMGTVAQMELEAIKERNRSAAHFNIRAGKYRGSLPPWGYLPTRVDGEWRLVPDPVQRERILEVYHRVVDNHEPLHLVAHDLNRRGVLSPKDYFAQLRGREPQGRKWSATALKRSMISEAMLGYATLNGKTVRDDDGAPLVRAEPILTREQLGALRAELVKTSRAKPAVSTPSLLLRVLFCAVCGEPAYKFAGGGRKHPRYRCRSMGFPKHCGNGTVAMAEWDAFCEEQVLDLLGDAERLEKVWVAGSDSAAELAEVNAELVDLTSLIGSPAYRADSPQREALDARIAALAARQEELEGLGARPSGWEWRETGQRFGDWWREQDTAAKNTWLRSMNVRLTFDVRGGLTRTIDFGDLQEYEQHLRLGSVVVRLHTGMS

SEQ ID NO: 8779 - protein, 500 aa, synthetic construct
MRALVVIRLSRVTDATTSPERQLESCQQLCAQRGWDVVGVAEDLDVSGAVDPFDRKRRPNLARWLAFEEQPFDAIVAYRVDRLTRSVRHLQQLVRWAEDHKKLVVSATEAHFDTTTPFAAVVIALMGTVAQMELEAIKERIRSAVRFNIRAGKYRGSLPPWGYLPTRVDGEWRLVPDPVQRERILEVYHRVVDNHEPLHLVAHDLNRRGVLSPKDYFAQLRGREPQGRKWSATALKRSMTSEAMLGYATLNGMTVRDDDGAPLVRAEPILTREQLEALRAELAKTSRAKPAVTAPSLLLRVLFCAVCGEPAYKFVGGGRKHPRYRCRSMGFPKHCGNGTVVMAEWDAFCEEQVLSLLGDVERLEKVWVAGSDSVVELAEVNAELVDLTSLIGSPAYRAGSPQREALDARIAALAARQEELEGLEARPSGWEWRETGQRFGDWWCEQDTAAKNTWLRAMNVRLTFDVRGGLTRTIDFGDLREYEQHLRLGSVVERLHTGMS

SEQ ID NO: 8780 - protein, 500 aa, synthetic construct
MRALVVIRLSRVTDATTSPERQLESCQQLCAQRGWDVVGVAEDLDVSGAVDPFDRKRRPNLARWLAFEEQPFDVIVAYRVDRLTRSTRHLQQLVRWAEDHKKLVVSATEAHFDTTTPFAAVVIALMGTVAQMELEAIKERIRSATHFNIRAGKYRGSLPPWGYLPTRVDGEWRLVPDPVQRERILEVYHRVVDNHEPLHLVAHDLNRRGVLSPKDYFAQLRGREPQGRKWSATALKRSMTSVAMLGYATLNGKTVRDDDGAPLARAEPILTREQQEALRAELAKTSRAKPAVSTPSLLLRVLFCAVCGEPAYKFVGGGRKHPRYRCRSMGLPEHCGNGTVVMAEWDAFCEEQVLDLLGDAERLEKVWVAGSDSAVELAEVNAELVDLTSLIGSPAYRTDTPQREALDARIAALAARQGELEGLEARPSGWEWRETGQRFRDWWREQDTAAKNTWLRSMNVRLTFDVRGGLTRTIDFGDLQEYERHLRLGSVAERLRTGMS

SEQ ID NO: 8781 - protein, 500 aa, synthetic construct
MRALVVIRLSRVTDATTSPERQLESCQQLCAQRGWDVVGVAEDLDVSGAVDPFDRKRRPNLARWLAFEEQPFDVIVAYRVDRLTRSVRHLQQLVHWAEDHKKLVVSATEAHFDTTTPFAAVVVALMGTVAQMELEAIKERIRSAVHFNIRAGKYRGSLPPWGYLPTRVDGEWRLVPDPVQRERILEVYHRVVDNHEPLHLVAYDLNRRGVLSPKDYFAQLQGREPQGRKWSATALKRSMISGAMLGYATLNGKTVRDDDGAPLVRAEPILTREQQEALRAELAKTSRAKPAVSTPSLLLRVLFCAVCGEPAYKFVGGGRKYPRYRCRSMGFPKHCGNGTVVMAEWDAFCEEQVLNLLGDAERLEKVWVAGSDSAVELAEVNAELADLTSLIGSPAYRAGSPQREALDARIVALAARQEELEGLEARPSGWEWRGTGQRFGDWWREQDTAAKNTWLRSMNVRLTFDVRGGPTRTIDFGDLQEYGQRLRLGSVAERLHTGMS

SEQ ID NO: 8782 - protein, 500 aa, synthetic construct
MRALIVIRLSRVTDATTSPERQLESCRQLCAQRGWDVVGVAEDLDVSGAVDPFDRKRRPNLARWLAFEEQPFDVIVAFRVDRLTRSTRHLQQLVHWAEDHKKLVVSATEAHFDTTTPFAAVVIALMGTVAQMELEAIRERNRSAAHFNIRAGKYRGSLPPWGYLPTRVDGEWRLVPDPVQRERILEVYHRVVDNHEPLHWVAHDLNRRGVLSPKDYFAQLQGREPQGRKWSATALKRSMISEAMLGYATLNGKTVRDDDGAPLVRAEPILTRVQLEALRVELVKTSRAKPAVSTPSLLLRVLFCAVCGEPAYKFAGGGRKHPRYRCRSMGFPKHCGNGTVAMAEWDAFCEERVLDLLGDAERLEKVWVAGSDSAVELAEVNAELVDLTSLIGSPAYRAGSPQREALDARIAALAARQKELEGLEARPSGWEWRETGQRFGDWWREQDTAAKNTWLRSMNVRLTFDVRGGLTRTIDLGDLQEYEQHLRLGSVVERLHTGMS

SEQ ID NO: 8783 - protein, 500 aa, synthetic construct
MRALVVIRLSRVTDTTTSPERQLESCQQLCAQRGWDVVGVAEDLDVSGAVDPFDRRRRPNLARWLAFEEQPFDVIVAYRVDRLTRSTRHLQQLVHWAEDHKKLVVSATEAHFDTTTPFAAVVIALMGTVAQMELEAIKERIRSALHFNIRAGKYRGSLPPWGYLPMRVDGEWRLVPDPVQRERILEVYHRVVDNHEPLHLVAYDLNRRGVLSPKDYFAQLRGREPQGRKWSATALKRSMISVAMLGYATLNGKTVRDDDGAPLVRAEPILTREQLEALRAELVKTSRAKPAVSTPSLLLRVLFCAVCGEPAYKFVGGGRKHPRYRCRSMGFPKHCGNGTVVMTEWDTFCEEQVLGLLGDAERLERVWVAGSDSAVELAEVNAELVDLTSLIGSPAYRTGSPQREALDARIAALAARQEELEGLEARPSGWEWRGTGQRFGDWWREQDTAAKNTWLRSMNVRLTFDVRGGLTRTIDFGELQGYVQHLRLGSVVERLHTGMP

SEQ ID NO: 8784 - protein, 500 aa, synthetic construct
MRALVVIRLSRVTDATTSPERQLESCQQLCAQRGWDVVGVAEDLDVSGAVDPFDRKRRPNLARWLAFEEQPFDAIVAYRVDRLTRSIRHLQQLVRWAEDHKKLVVSATEAHFDTTTPFAAVVIALMGTVAQMELEAIKERIRSAAHFNIRAGKYRGSLPPWGYLPARVDGEWRLVPDPVQRERILEVYHRVVDNHEPLHLVAHDLNRRGVLSPKDYFAQLRGREPQGRKWSATALKRSMTSVAMLGYATLNGKTVRDDDGAPLVRAEPILTREQQEALRAELAKTSRAKPAVSTPSLLLRVLFCAVCGEPAYKFVGGGRKHPRYRCRSMGFPEHCGNGTVALAEWDAFCEKQVLDLLGDAERLEKVWVAGSDSAVELAEVNAELVDLTSLIGSPAYRAGSPQREALDARIAALAAHQEELEGLEARPSGWEWRGTGQRFGDWWREQDTAAKNTWLRSMNVRLTFDVRGGLTRTIDFGDLQEYEQRLRLGSAVERLHAGMS

SEQ ID NO: 8785 - protein, 500 aa, synthetic construct
MRALVVIRLSRVTEATTSPERQLESCRQLCAQRGWDVVGVAEDLDVSGAVDPFDRKRRPNLARWLAFEEQPFDVIVAYRVDRLTRSTRHLQQLVHWAEDHKKLVVSATEAHFDTTTPFAAVVIALMGTVAQMELEAIKERIRSAAHFNIRAGKYRGSLPPWGYLPARVDGEWRLVPDPVQRERILEVYHRVVDDHEPLHLVARDLNRRGVLSPKDYFAQLQGREPQGRKWSATALKRSMISVAMLGYATLNGKTVRGDDGAPLVRAEPILTREQLEALRAELAKTSRAKPAVSTPSLLLRVLFCAVCGEPAYKFVGGGRKHPRYRCRSMGFPKHCGNGTVVMAEWDAFCEEQVLDLLGDAERLEKVWVAGSDSAVELAEVNAELVDLTSLIGSPAYRAGSPQREALDARIAALAARQEELEGSEARPSGWEWRGTGQRLGDWWREQDTSAKNTWLRSMNVRLTFDVRGGLARTIDFGDLQEYEQHLRLGSVVERLHTGVS

SEQ ID NO: 8786 - protein, 500 aa, synthetic construct
MRALVVIRLSRVTDATTSPERQLESCQQLCAQRGWDVVGVAEDLDVSGAVNPFDRKRRPSLARWLAFEEQPFDVLVAYRVDRLTRSVRHLQQLVHWAEDHKKLVVSATEAHFDTTTPFAAVVIALMGTVAQMELEAIKERIRSAAHFNVRAGKYRGSLPPWGYLPTRVDGEWRLVPDPVQRERILEVYHRVVDNHEPLHLVAHDLNRRGVLSPKDYFAQLQGREPQGRKWSATALKRSMTSVAMLGYATLNGKIVRDDDGAPLVRAEPILTRGQQEALRAELAKTSRAKPAASTPSLLLRVLFCAVCGEPAYKFVGGGRKHPRYRCRSMGFPEHCGNGTVVMAEWDAFCEEQVLDLLGDAERLEKVWVAGSDSAVELAEVNAELMDLTSLIGSPAYRAGSPQREALDARIAALATRQEELEGLEARPSGWEWRETGQCFGDWWREQDTAAKNTWLRSMNVRLTFDVRGGLTRTIDFGDLQEYEQHLRLGSVVERLHTGMS

SEQ ID NO: 8787 - protein, 500 aa, synthetic construct
MRALVVIRLSRVTDATTSPERQLESCQQLCAQRGWDVVGVAEDLDVSGAVDPFDRKRRPNLARWLAFEEQPFDVIVAYRVDRLTRSTRHLQQLVHWAEDHKKLVVSATEAHFDTTTPFAAVVIALMGTVAQMELEAIKERIRSAAHFNIRAGKYRGSLPPWGYLPTRVDGEWRLVPDPVQRERILEVYHRVVDNHEPLHLVAHDLNQRGVLSPKDYFAQLRGREPQGRKWSATALRRSMISKAMLGYATLSGKTVRDDDGAPLVRAEPILTREQQEALRAELAKTSRAKPAVSTPSLLLRVLFCAVCGEPAYKFVGGGRKHPRYRCRSMGFPEHCGNGTVVMAEWDAFCEEQVLDLLGDAEHLEKVWVAGSDSSVELAEVNAELVDLTSLIGSPAYRAGSPQREALDARIAALAARQEELGGLEARPSGWEWRGTGQRFGDWWREQDTAAKNTWLRSMNVRLTFDVRGGLTRTIDFGDLQEYVQHLRSGSVVERLHTGMS

SEQ ID NO: 8788 - protein, 500 aa, synthetic construct
MRALIVIRLSRVTDATTSPERQLESCQQLCAQRGWDVVGVAEDLDVSGAVDPFDRKRRPNLARWLAFEEQPFDAIVAYRVDRLTRSIRHLQQLVRWAEDHRKLVVSATEAHFDTTTPFAAVVIALMGTVAQMELEAIKERIRSAVRFNIRAGKYRGSLPPWGYLPTRVNGEWRLVPDPVQRERILEVYHRVVDNHEPLHLVAHDLNRRGVLSPKDYFAQLRGREPQGRKWSATALKRSMISGAMLGYATLNGKIVRGDDGAPLVRAEPILTRGQLEALRAELAKTSRAKPAVSTPSLLLRVLFCAVCGEPAYKFVGGGRKHPRYRCRSMGFPEHCGNGTVVMAEWDAFCEEQVLDLLGDAERLEKVWVAGSDSAVELAEVNAELVDLTSLIGSPAYRTGSPQREALDARIAALAARQEELEGLEARPSGWEWRETGQRFGDWWREQDTAAKNTWLRSMNVRLTFDVRGRLTRTIDFGDLQGYEQHLRLGSVVERSHTGMS

SEQ ID NO: 8789 - protein, 500 aa, synthetic construct
MRALVVVRLSRVTDATTSPERQLESCQQLCAQRGWDVVGVAEDLDVSGAVDPFDRKRRPNLARWLAFEEQPFDVIVAYRVDRLTRSTRHLQQLVHWAEDHKKLVVSATEAHFDTTTPFAAVVIALMGTVAQMELEAIKERNRSAAHFNIRAGKYRGSLPPWGYLPTRVDGEWRLAPDPVQRERILEVYHRVVDNREPLHLVAHDLNRRGVLSPKDYFAQLQGREPQGRKWSATALKRSMISEAMLGYATLNGKTVRDDDGAPLVRAEPILTREQLEASRAELAKTSRAKPAVSTPSLLLRVLFCAVCGEPAYKFAGGGRKHPRYRCRSMGFPKHCGNGTAVMAEWDAFCEEQVLGLLGDAEHLEKVWVAGSDSAVELAEVNAELVDLTSLIGSPAYRAGSPQREALDARIAALAARQEELEGLEARPSGWEWRETGQRFRDWWREQDTAAKNTWLRSMNVRLTFDVRGGLTRTIDLGDLQEYEQHLRLGSVVERLHTGMS

SEQ ID NO: 8790 - protein, 500 aa, synthetic construct
MRALVVIRLSRVTDATTSPERQLESCQQLCAQRGWDVVGVAEDLDVSGAVDPFDRKRRPNLARWLAFEEQPFDVIVAYRVDRLTRSVRHLQQLVHWAEDHKKLVVSATEAHFDTTTPFAAVVIALMGTVAQMELEAIKERNRSAAHFNIRAGKYRGSLPPWGYLPARVDGEWRLVPDPVQRERILEVYHRVVDDHEPLHLVAHDLNRRGVLSPKDYFAQLQGREPQGRKWSATALKRSMISEAMLGYATLNGKTVRDDDGAPLVRTEPILTREQQEALRAELVRTSRAKPAVSTPSLLLRVLFCAVCGEPAYKFAGGGRKHPRYRCRSMGFPKHCGNGTVAMAEWDAFCEEQVLDLLGDAERLEKVWVVGSDSAVELAEVNAELVDLTSLIGSPAYRAGSPQREALDARIAALAARQEELEGLEARPSGWEWRETGQRFGDWWREQDTAAKNTWLRSMNVRLTFDVRGGLTRTIDFGGLQEYEQHLRLGSAVERLHTGMS

SEQ ID NO: 8791 - protein, 500 aa, synthetic construct
MRALVVIRLSRVTDATTSPERQLESCQQLCAQRGWNVVGVAEDLDVSGAVDPFDRKRRPNLARWLAFEEQPFDVIVAYRVDRLTRSTRHLQQLVHWAEDHKKLVVSATEAHFDTTTPFAAVVIALMGTVAQMELEAIKERNRSAAHFNIRAGKYRGSLPPWGYLPTRVDGEWRLAPDPVQRERILEVYHRVVDNHEPLHLVAHDLNRRGVLSPKDYFAQLQGREPQGRKWSATALKRSMTSEAMLGYATLNGKTVRDDDGAPLVRAEPILTREQLEALRAELVKTSRAKPAVSTPSLLLRVLFCAVCGEPAYKFAGGGRKHPRYRCRSMGFPKHCGNGTVVMAEWDAFCEEQVLDLLGDAERLEKVWVAGSDSAVELAEVNAELVDLTSLIGSPVYRAGSPQREALDARIAALAARQEELEGLEARPSGWEWRETGQRFGDWWREQDTAAKNTWLRSMNVRLTFDVRGGLTRTIDFGDLQGYEQHLRLGSVVERLHTGMS

SEQ ID NO: 8792 - protein, 500 aa, synthetic construct
MRVLVVIRLSRVTDATTSPERQLESCQQLCAQRGWDVVGVAEDLDVSGAVDPFDRKRRPNLARWLAFEEQPFDVIVAYRVDRLTRSTRHLQQLVHWAEDHKKLVVSATEAHFDTTTPFAAVVIALMGTVAQMELEAIKERNRSAAHFNIRAGKYRGSLPPWGYLPTRVDGEWRLVPDPVQRERILEVYHRVVDNREPLHLVAHDLNRRGVLSPKDYFAQLRGREPQGRKWSATALKRSMISEAMLGYATLNGKTVRDDDGAPLVRAEPILTREQLEALRAELVKTSRAKPAVSTPSLLLRVLFCAVCGEPAYKFAGGGRKHPRYRCRSMGFPKHCGNGTVAMAEWDAFCEEQVLNLLGDAERLEKVWVAGSDSAVELAEVNAELVDLTSLIGSPAYRAGSPQREALDARIAALAARQEELEGLEARPSGWEWRGTGQRFGDWWREQDPAAKNTWLRSMNVRLTFDVRGGLTRTIDFGDLHEYEQYSRLGGVVERLHTGMS

SEQ ID NO: 8793 - protein, 500 aa, synthetic construct
MRALVVIRLSRVTDATTSPERQLESCQQLCAQRGWDVVGVAEDLDVSGAVDPFDRKRRPNLARWLAFEEQPFDAIVAYRVDRLTRSVRHLQQLVRWAEDHKKLVVSATEAHFDTTTPFAAVVIALVGTVAQMELEAIKERIRSAVRFNIRAGKYRGSLPPWGYLPARVDGEWRLVPDPVQRERILEVYHRVVDNHEPLHLVAHDLNRRGVLSPKDYFAQLQGREPQGRKWSATALKRSMISKAMLGYATLNGKTVRDDDGAPLVRAEPILTREQQEALRAELAKTSRAKPAVSTPSLLLRVLFCAVCGEPAYKFVGGGRKHPRYRCRSMGFPKHCGNGTVVMTEWDAFCEEQVLNLLGDAERLEKVWVAGSDSVVELAEANAELMDLTSLIGSPAYRAGSPQREALDARIAVLAARQEELEGLEARPSGWEWRETGQRFGDWWREQDTAAKNTWLRSMNVRLTFDVRGGLSRTIDFGDLQKYEQHLRLGSAVGRLHTGMS

SEQ ID NO: 8794 - protein, 500 aa, synthetic construct
MRALVVIRLSRVTDATTSPERQLESCQQLCAQRGWDVVGVAEDLDVSGAVDPFDRKRRPNLARWLAFEEQPFDVIVAYRVDRLTRSTRHLQQLVHWAEDHKKLVVSATEAHFDTTTPFAAVVIALMGTVAQMELEAIKERNRSAAHFNIRAGKYRGSLPPWGYLPTRVDGEWRLAPDPVQRECILEVYHRVVDKHEPLHLVAHDLNRRGVLSPKDYFAQLQGREPQGRKWSATALKRSMISEAMLGYATLNGKTVRDDDGAPLVRAEPILTREQLEALRAELVKTSRAKPAVSTPSLLLRVLFCEVCGEPAYKFAGGGRKHPRYRCRSMGFPKHCGNGTVAMAEWDAFCEEQVLDLLGDTERLEKVWVAGSDSAVELAEVNAELVDLTSLIGSPAYRTGSPQREALDARIAALAARQEELEGLEARPSGWEWRGTGERFGDWWREQDTAAKNTWLRSMNVRLTFDVRGGLTRTIDFGDLQEYEQHLRLGSVVERLHTGMS

SEQ ID NO: 8795 - protein, 500 aa, synthetic construct
MRALVVIRLSRVTDATTSPERQLESCQQLCAQRDWDVVGVAEDLDVSGAVDPFDRKRRPNLARWLAFEEQPFDVIVAYRVDRLTRSTRHLQQLVHWAEDHKKLVVSATEAHFDTTTPFAAVVIALMGTVAQMELEAIKERARSAAHFNIRAGKYRGSLPPWGYLPARVDGEWRLVPDPVQRERILEVYHRVVDNHEPLHLVAYDLNRRGVLSPKDYFAQLRGREPRGRKWSATALRRSMTSEAMLGYATLNGKIVRDDDGAPLVRAEPILTREQQEALRAELAKTSRAKPAVSTPSLLLRVLFCAVCGEPAYKFAGGGRKHPRYRCRSMGFPKHCGNGTVVMAEWDAFCEEQVLNLLGDAERLEKVWLAGSDSAAELAEVNAELVDLTSLIGSPDYRVGSPQREALDARIAALAARQEELEGLEARTSGWEWRVTGQRLGDWWREQDTAAKNTWLRSMNVRLTFDVRGGLTRTIDFGELQEYEQHLRLGSVAKRLHTGMS

SEQ ID NO: 8796 - protein, 500 aa, synthetic construct
MRALVVIRLSRVTEATTSPKRQLESCQQLCAQRGWDVVGVAEDLDVSGAVDPFDRKRRPNLARWLAFEEQPFDVIVAYRVDRLTRSVRHLQQLVHWAEDHKKLVVSATEAHFDTTTPFAAVVIALMGTVAQMELEAIKERIRSAAHFNIRAGKYRGSLPPWGYLPTRVDGEWRLAPDPVQRERILEVYHRVVDNHEPLHLVAYDLNRRGVLSPKDYFAQLRGREPQGRKWSATALKRSMISVAMLGYATLNGKTARGDDGAPLVRAEPILTREQQEALRAELAKTSRAKPAVSTPSLLLRVLFCAVCGEPAYKFVGGGRKHPRYRCRSMGFPKHCGNGTVVMAEWDAFCEEQVLDLLGDAERLEKVWVAGSDSAVELAEVNAELVDLTSLIGSPAYRVGSPQREALDARIAALAARQEELEGLEARPSGWEWRGTGQRFGDWWREQDTAAKNTWLRSMNVRLTFDVRGGPTRTIDFGDLREYEQHLRLGSVAERSHTGTS

SEQ ID NO: 8797 - protein, 500 aa, synthetic construct
MRALVVIRLSRVTDATTSPERQLESCQQLCAQRGWDVVGVAEDLDVSGAVDPFDRKRRPNLARWLAFEEQPFDVIVACRVDRLTRSTRHLQQLVRWAEDHKKLVVSATEAHFDTTTPFAAVVIALMGTVAQMELEAIKERIRSAVHFNIRAGKYRGSLPPWGYLPTRVDGEWRLVPDPVQRERILEVYHRVVDNHEPLHSVAYDLNRRGVLSPKDYFAQLQGREPQGRKWSATALKRSMTSEAMLGYATLNGKTVRGDDGAPLVRAEPILTRGQLEALRAELAKTSRAKPAVSTPSLLLRVLFCAVCGEPAYKFVGGGRKHPRYRCRSMGFPEHCGNGTVVLAEWDAFCEEQVLNLLGDAERLEKVWVAGSDSAVELAEVSAELVDLTSLIGSPAYRAGSPQREALDARIAALAARQEELEGLEVCPSGWEWRETGQRFGDWWREQGTAAKNTWLRSMNVRLTFDVRGGLTRTIDFGDLLEYEQHLRLGSVAERLHTGMS

SEQ ID NO: 8798 - protein, 500 aa, synthetic construct
MRALVVIRLSRVTDATTSPERQLESCQQLCAQRGWDVVGVAEDLDVSGAVDPFDRKRRPNLARWLAFEEQPFDVIVAYRVDRLTRSTRHLQQLVHWAEDHKKLVVSATEVHFDTTTPFAAVVIALMGTVAQMELEAIKERNRSAAHFNIRAGKYRGSLPPWGYLPTRVDGEWRLVPDPVQRERILEVYHRVVDNHEPLHLVAHDLNRRGVLSPKDYFAQLRGREPQGRKWSATALKRSMISEAMLGYATLNGKTVRDDDGAPLVRAEPILTREQLEALRAELVKTSRAKPAVSTPSLLLRVLFCAVCGEPAYKFAGGGRKHPRYRCRSMGSPKHCGNGTVAMAEWDAFCEEQVLDLLGDAERLEKVWVAGSDSAVELAEVNEELVDLTSLIGSPAYRAGSPQREALDARIAALAACQEELEGLGARPSGWGWRETGQRFGDWWREQDTAAKNTWLRSMNVRLTFDVRGGLTRTIDFGELQEYEQHLRLGGVVERLHTGMS

SEQ ID NO: 8799 - protein, 500 aa, synthetic construct
MRALVVIRLSRVTDATTSPERQLESCQQLCAQRGWDVVGVAEDLDVSGAVDPFDRKRRPNLARWLAFGEQPFDVIVAYRVDRLTRSVRHLQQLVHWAEDHKKLVVSATEAHFDTTTPFAAVVIALMGTVAQMELEAIKERIRSAVHFNIRAGKYRGSLPPWGYLPTRVEGEWRLVPDPVQRERILEVYHRVVDTHEPLHLVAHDLNRRGVLSPKDYFAQLQGREPQGRKWSATALKRSMTSEAMLGYATLNGRTVRDDDGAPLVRAEPILTREQQEALRVELARTSRAKPAVSTPSLLLRVLFCAVCGEPAYKFVGGGRKHPRYRCRSMGFPKHCGNGTVVMAEWDAFCEKQVLGLLGDAERLEKVWVAGSDSAVELAEVNAELVDLTSLIGSPAYRAGSPQREALDARIAALAARQEELEGLEARPSGWEWRETGQRFGDWWREQDIAVKNTWLRSMNVRLTFDVRGGPTRTIDFGDLPEYEQHLRLGSVAERLHTGMS

SEQ ID NO: 8800 - protein, 500 aa, synthetic construct
MRALVVIRLSRVTDATTSPERQLESCQQLCAQRGWDVVGVAEDLDVSGAVDPFDRKRRPNLARWLAFEEQPFDVIVAYRVDRLTRSTRHLQQLVRWAEDHKKLVVSATEAHFDTTTPFAAVVIALMGTVAQMELEAIKERIRSAVHFNIRAGKYRGSLPPWGYLPTRVDGEWRLVPDPVQRERILEVYRRVVDNHEPLHLVAHDLNRRGVLSPKDYFAQLRGREPQGRKWSATALKRSMISVAMLGYATLNGKTVRDDDGAPLVRAEPILTREQQEALRAELAKTSRAKPAVSTPSLLLRVLFCAVCGEPAYKFVGGGRKHPRYRCRSMGSPKHCGNGTVVMTEWDAFCEEQVLGLLGDAERLEKVWLAGSDSAAELAEVNAELVDLTSLIGSPAYRAGSPQREALDARIAALAARQEELEGLEACPPGWEWRETGQRFGDWWREQDTAAKNTWLRSMNVRLTFDVRGGLTRTIDFGELQEYKHHLRLGSADERLHTGML

SEQ ID NO: 8801 - protein, 500 aa, synthetic construct
MRALVVIRLSRVTDATTSPERQLESCQQLCAQRGWDVVGVAEDLDVSGAVDPFDRKRRPNLARWLAFEEQPFDVIVAYRVDRLTRSTRHLQQLVHWAEDHKKLVVSATEAHFDTTTPFAAVVVALMGTVAQMELEAIKERNRSAAHFNIRAGKYRGSLPPWGYLPTRVDGEWRLVPDPVQRERILEVYHRVVDNHEPLHLVAHDLNRRGVLSPKDYFAQLQGREPQGRKWSATALKRSMISVAMLGYATLNGKTVRDDDGAPLVRAEPILTREQLEALRAELVKTSRAKPAVSTPSLLLRVLFCAVCGEPAYKFAGGGRKHPRYRCRSMGFPKHCGNGTVAMAEWDAFCEEQVLDLLGDAERLEKVWVAGSDSAIELAEVNAELVDLTSLIGSPAYRAGSPQREALDARIAALAARQEELEGLEARPSGWEWRETGQRFGDWWREQDTAAKNTWLRSMNVRLTFDVRGGLTRTIDFGDLQEYEQHLRLGSVVERLHTGMS

SEQ ID NO: 8802 - protein, 500 aa, synthetic construct
MRALVVIRLSRVTDATTSPERQLESCQQLCAQRGWDVVGVAEDLDVSGAVDPFDRKRRPNLARWLAFGEQPFDVIVAYRVDRLTRSVRHLQQLVHWAEDHKKLVVSATEAHFDTTTPFAAVVIALMGTVAQMELEAIKERNRSAAHFNIRAGKYRGSLPPWGYLPTRVDGEWRLAPDPVQRERILEVYHRVVDNHEPLHLVAHDLNRRGVLSPKDYFAQLQGREPQGRKWSATALKRSMISEAMLGYATLNGKTVRDDDGAPLVRAEPILTREQLEALRAELVKTSRAKPAVSTPSLLLRVLFCAVCGEPAYKFAGGGRKHPRYRCRSMGFPKHCGNGTVAMAEWDAFCEEQVLDLLGDTERLEKVWVAGSDSAVELAEVNAELVDLTSLIGSPAYRAGSPQREALDARIAALAARQEELEGLEARPPGWEWRGTGQRFGDWWREQDTAAKNTWLRSMNVRLTFDVRGGLTRTIDFGDLQEYEQHLRLGSVVERLHTGVP

SEQ ID NO: 8803 - protein, 500 aa, synthetic construct
MRALVVIRLSRVTDATTSPERQLASCQQLCAQRGWDVVGVAEDLDVSGAVDPFDRKRRPNLARWLAFEEQPFDVIVAYRVDRLTRSTRHLQQLVRWAEDHKKLVVSATEAHFDTTTPFAAVVIALMGTVAQMELEAIKERIRSAVRFNIRAGKYRGSLPPWGYLPTRVDGEWRLVPDPVQRERILEVYHRVVDNHEPLHLVAHDLNRRGVLSPKDYFAQLQGREPQGRKWSATALKRSMTSVAMLGYATLNGKTVRGDDGAPLVRAEPILTRGQQEALRAELAKTSRAKPAVSTPSLLLRVLFCAVCGEPAYKFVGGGRKHPRYRCRSMGFPKHCGNGTVVMAEWDAFCEEQVLGLLGDAERLEKVWVAGSDSAVELAEVNAELVDLTSLIGSPAYRAGSPQREALDARIAALAARQGELEGLEARSSGWEWRETGQRLGDWWREQDTAAKNTWLRSMNVRLTFDARGGLTRTIDFGDLREYEQHLRLGSVVERLHTGMS

SEQ ID NO: 8804 - protein, 500 aa, synthetic construct
MRALVVIRLSRVTDATTSPERQLESCQQLCAQRGWDVVGVAEDLDVSGAVDPFDRKRRPNLARWLAFEEQPFDVIVAYRVDRLTRSTRHLQQLVHWAEDHKKLVVSATEAHFDTTTPFAAVVIALMGTVAQMELEAIKERNRSAAHFNIRAGKYRGSLPPWGYLPTRVDGEWRLVPDPVQRERILEVYHRVVDNHEPLHLVAHDLNRRGVLSPKDYFAQLQGREPRGRKWSATALKRSMVSEAMLGYATLNGKTVRDDDGAPLVRAEPILTREQLEALRAVLVKTSRAKPAVSTPSLLLRVLFCAVCGEPAYKFAGGGRKHPRYRCRSMGFPKHCGNGTVAMAEWDAFCVEQVLDLLGDAERLERVWVAGSDSAVELAEVNAELVDLTSLIGSPAYRAGSPQREALGARIAALAARQEELEGLGARPSGWEWRGTGQRFGDWWHEQDTAAKNTWLRSMNVRLTFDVRVGLARTIDFGDLQEYEQHLRLGSVVERLHTGMS

SEQ ID NO: 8805 - protein, 500 aa, synthetic construct
MRALVVIRLSRVTDATTSPERQLKSCRQLCAQRGWDVVGVAEDLDVSGAVDPFDRKRRPNLARWLAFEEQPFDVIVAYRVDRLTRSTRHLQQLVHWAEDHKKLVVSATEAHFDTTTPFAAVVIALMGTVAQMELEAIKERNRSAAHFNIRAGKYRGSLPPWGYLPTRVDGEWRLAPDPVQRERILEVYHRVVDNHEPLHLVAHDLNRRGVLSPKDYFAQLQGREPQGRKWSATALKRSMTSEAMLGYATLNGKTVRDDDGAPLVRAEPILTREQLEALRAELVETSRVKPAVSTPSLLLRVLFCAVCGEPAYKYAGGGRKHPRYRCRSMGFPKHCGNGTVAMAEWDAFCEEQVLGLLGDAKRLEKVWVAGSDSAVELAEVSAELVDLTSLIGSPAYRAGSPQREALDARIAALAARQEELEGLEARPSGWEWRETGQRFRDWWREQDTAAKNTWLRSMNVRLTFDVRGGPTRTIDFGDLREYEQHLRLGSVVEPLHTGMS

SEQ ID NO: 8806 - protein, 500 aa, synthetic construct
MRALVVIRLSRVTDATTSPERQLESCQQLCAQRGWDVVGVAEDLDVSGAVDPFDRKRRPNLARWLAFEEQPFDVIVAYRVDRLTRSTRHLQQLVHWAEDHKKLVVSATEAHFDTTTPFAAVVIALMGTVAQMELEAIKERIRSAAHFNIRAGKYRGSLPPWGYLPTRVDGEWRLVPDPVQRERILEVYHRVVDNHEPLHLVAHDLNRRGILSPKDYFAQLRGREPQGRKWSATALKRSMISVAMLGHATLNGKTVRDDDGAPLVRAEPILTREQQEALRAELVKTSRAKPAVSTPSLLLRVLFCAVCGEPAYKFVGGGRKHPRYRCRSMGFPKHCGNGTVALAEWDAFCEEQVLNLLGDAERLEKVWVAGSDSAVELAEVNAELVDLTSLIGSPAYRAGSPQREALDARIAALAARQEELEGLEARPSGWEWRETGQRFGDWWREQNTAAKNTWLRSMNVRLTFDARGGLTRTIDFGDLQEYEQHLRLGSVVERLHTGMP

SEQ ID NO: 8807 - protein, 500 aa, synthetic construct
MRALVVIRLSRVTDATTSPERQLESCQQLCAQRGWDVVGVAEDLDVSGAVNPFDRKRRPNLARWLAFEEQPFDVIVAYRVDRLTRSTRHLQQLVHWAEDHKKLVVSATEAHFDTTTPFAAVVIALMGTVAQMELEAIKERIRSAVRFNIRAGKYRGSLPPWGYLPARVDGEWRLVPDPVQRERILEVYHRVVDNHEPLHLVAYDLNRRGVLSPKDYFAQLRGREPQGRKWSATALKRSMTSGAMLGYATLNGKTVRDDDGAPLVRAEPILTRGQQEALRAELAKTSRAKPAVSTPSLLLRVLFCAVCGEPAYKFVGGGRKHPRYRCRSMGFPKHCGNGTVVMAEWDVFCEERVLNLLGDAEHLERVWVAGSDSAVELAEVNAELMDLTSFIGSPAYRAGSPQREALDARIAALAARQEELEGLEARPSGWEWRGTGQRFGDWWREQDTAAKNTWLRSMNVRLTFDVRGGLTRTIDFGDLQEYEQHLRLGGVVERLHTGMS

SEQ ID NO: 8808 - protein, 500 aa, synthetic construct
MRALVVIRLSRVTDATTSPERQLESCQQLCAQRGWDVVGVAEDLDVSGAVDPFDRKRRPNLARWLAFEEQPFDVIVAYRVDRLTRSTRHLQQLVRWAEDHKKLVVSATEAHFDTTTPFAAVVIALMGTVAQMELEAIKERIRSAAHFNIRAGKYRGSLPPWGYLPTRVDGEWRLVPDPVQRERILEVYRRVVDNHEPLHLVAHDLNRRGILSPKDYFAQLQGREPRGRKWSATALKRSMTSVAMLGYATLNGKTVRDDDGAPLVRAEPILTREQQEALRAELVKTSRAKPAVSTPSLLLRVLFCAVCGEPAYKFVGGGRKHPRYRCRSMGFPKHCGNGTVVMAECDAFCEEQVLNLLGNAERLEKVWLAGSDSAAELAEVNAELVDLTSLIGSPAYRAGSPQREALDARIAVLAARQEELESLEARPSGWEWRGTGQRLGDWWREQDTAAKNTWLRSMNVRLTFDVRGGLTRTIDFGDLQEYERHLRLGSVVERLRTGMS

SEQ ID NO: 8809 - protein, 500 aa, synthetic construct
MRALVVIRLSRVTDATTSPERQLASCQQLCARRGWDVVGVAEDLDVSGAVDPFDRKRRPNLARWLASEEQPFDVIVAYRVDRLTRSTRHLQQLVHWAEDHKKLVVSATEAHFDTTTPFAAVVIALMGTVAQMELEAIKERSRSAAHFNIRAGKYRGSLPPWGYLPTRVDGEWRLVPDPVQRERILEVYHRVVDNHEPLHLVAHDLNRRGVLSPKDYFAQLRGREPQGREWSATALKRSMISKAMLGYATLNGKIVRDDDGAPLVRAEPILTREQQEALRAELAKTSRVKPAVSTPSLLLRVLFCAVCGEPAYKFVGGGRKHPRYRCRSMGFPKHCGNGTVVMAEWDAFCEEQVLDLLGDAERLEKVWVAGSDSAVELAEVNAELVDLTSLIGSPAYRAGSPQREALDARIAALAARQEELEGLEARPSGWEWRGTGQRFGDWWREQDTTAKNTWLRSMNVRLTFDVRGGLARTIDFGDLQEYERHLRLGSVVERLHTGMS

SEQ ID NO: 8810 - protein, 500 aa, synthetic construct
MRALVVIRLSRVTDATTSPERQLKSCQQLCAQRGWDVVGVAEDLDVSGAVDPFDRKRRPNLARWLAFEQQPFDVLVAYRVDRLTRSTRHLQQLVHWAEDHKKLVVSATEAHFDTTTPFAAVVIALMGTVAQMELEAIKERSRSAAHFNIRAGKYRGSLPPWGYLPTRVDGEWRLVPDPVQRERILEVYHRVVDNHEPLHLVAHDLNRRGVLSPKDYFAQLRGRELQGRKWSATALKRSMTSVAMLGYATLNGKTVRDDDGAPLVRAEPILTREQQEALRAELVKTSRAKPAVSTPSLLLRVLFCAVCGEPAYKFVGGGRKHPRYRCRSMGFPKHCGNGTVVMAEWDAFCEEQVLGLLGNAERLEKVWIAGSDSAVELAEVNAELVDLTSLIGSPAYRAGSPQREVLDARIAALAARQKELEGLEAHPSGWEWRGTGQRFGDWWREQDTAAKNTWLRSMNVRLTFDARGGLTRTIDFGDLQEYEQHLRLGSVVERLHTGMS

SEQ ID NO: 8811 - protein, 500 aa, synthetic construct
MRALVVIRLSRVTDATTSPERQLESCQQLCAQRGWDVVGVAEDLDVSGVVDPFDRKRRPSLARWLAFEEQPFDVIVAYRVDRLTRSVRHLQQLVRWAEDHKKLIVSATEAHFDTTTPFAAVVIALMGTVAQMELEAIKERIRSAVHFNIRAGKYRGSLPPWGYLPTRVDGEWRLVPDPVQRERILEVYHRVVDNHEPLHLVAHDLNRRGVLSPKDYFAQLRGREPRGRKWSATALRRSMTSVAMLGYATLNGKTVRDDNGVPLVRAEPILTREQLEALRAELVKTSRAKPAVSTPSLLLRVLFCAVCGEPAYKFVGGGRKHPRYRCRSMGFPEHCGNGTVVMAEWDAFCEKQVLGLLGDAERLEKVWVAGSDSAVELAEVNAELVDLTSLIGSPAYRAGSPQREALDARIAALAARQEELEGLEARPSGWEWRETGQRFGDWWREQDTAAKNTWLRSMNVRLTFDVRGGLTRAIDFGDLQEYERHLRLDSVVERLHTGMS

SEQ ID NO: 8812 - protein, 500 aa, synthetic construct
MRALVVIRLSRVTEATTSPERQLESCRQLCAQRGWDVVGVAEDLDVSGAVDPFDRKRRPNLARWLAFDEQPFDVIVAYRVDRLTRSTRHLQQLVHWAEDHKKLVVSATEAHFDTTTPFAAVVIALMGTVAQMELEAIKERSRSAAHFNIRAGKYRGSLPPWGYLPTRVEGEWRLVPDPVQRERILEVYHRVVDNHEPLHLVAHDLNRRGVLSPKDYFAQLQGREPQGRKWSATALKRSMTSAAMLGYATLNGKIVRDDVGAPLVRAEPILTREQQEALRAELVKTSRAKPAVSTPSLLLRVLFCAVCGEPAYKFTGGGRKHPRYRCRSLGSPKHCGNGTVVMAEWDAFCEEQVLNLLGDAERLEKVWVAGSDSAVELAEVNAELVDLTGLIGSPAYRAGSPQREALDARIAALAARQEELEGLEARPSGWEWRETGQRFGDWWREQDTAAKNTWLRSMNVRLTFDVRGGLTRTIDFGDLQEYERHLRSGSAVERLYNGMS

SEQ ID NO: 8813 - protein, 500 aa, synthetic construct
MRALVVIRLSRVTDATTSPERQLESCQQLCAQRGWVVVGVAEDLDVSGAVDPFDRKRRPNLARWLAFEEQPFDVIVAYRVDRLTRSTRHLQQLVRWAEDHKKLVVSATEAHFDTTTPFAAVVIALMGTVAQMELEAIRERSRSAAHYNIRAGKYRGSLPPWGYLPTRVDGEWRLVPDPVQRERILEVYHRVVDNHEPLHLVAHDLNRRGVLSPKDYFAQLRGREPQGRKWSATALKRSMVSVTMLGYATLNGKTVRDDDGAPLVRAEPILTREQQEALRAELVKSSRAKPAVSTPSLLLRVLFCAVCGEPAYKFVGGGRKHPRYRCRSMGFPKHCGNGTVVMAEWDAFCEEQVLDLLGDTERLEKVWVAGSDSAVELAEVNAELVDLTSLIGSPAYRAGSPQREALDARIAALAARQEELEGLEARPSGWGWRETGQRFGDWWREQDTAAKNTWLRSMNVRLTFDVRGGLARTIDFGDLQEYEQHLRSGSVAERLHTGMS

SEQ ID NO: 8814 - protein, 500 aa, synthetic construct
MRALVVIRLSRVTDATTSPKRQLESCQQLCAQRGWDVVGVAEDLDVSGAVDPFDRKRRPNLARWLAFEEQPFDVIVAYRVDRLTRSTRHLQQLVRWAEDHKKLVVSATEAHFDTTTPFAAVVIALMGTVAQMELEAIKERIRSAVHFNIRAGKYRGSLPPWGYLPTRVDGEWRLAPDPVQRERVLEVYHRVVDNHEPLHLVAHDLNRRGVLSPKDYFAQLQGREPQGRKWSATALRRSMTSEAMLGYATLNGKIVRDDNGAPLVRAEPILTREQQEALRAELVKTTRAKPAVSTPSLLLRVLFCAVCGEPAYKFVGGGRKHPRYRCRSMGFPKHCGNGTVVMAEWDAFCEEQVLNLLGDAERLEKVWVAGSDSAVELAEVNAELVDLTSLIGSPAYRAGSPQREALDTRIAALAARQEELEGLEARPSGWEWRETGQRFGDWWREQDTAAKNTWLRSMNVRLTFDVRGGLTRTIAFGDLQEYKQHLRLGGVVERSHTGTS

SEQ ID NO: 8815 - protein, 500 aa, synthetic construct
MRALVVIRLSRVTDATTSPERQLESCRQLCAQRGWDVVGVAEDLDVSGAVDPFDRKRRPNLARWLAFEEQPFDVIVAYRVDRLTRSIRHLQQLVHWAEDHKKLVASATEAHFDMTTPFAAVVIALMGTVAQMELEAIKERNRSAAHFNIRAGKYRGSLPPWGYLPTRVDGEWRLVPDPVQRERILEVYHRVVDNHEPLHSVAHDLNRRGVLSPKDYFAQLQGREPQGRKWSATALKRSMISVAMLGYATLNGKTVRDDDGAPLVRAEPILTREQLEALRAELVTTSRAKPAVSTPSLLLRVLFCAVCGEPAYKFAGGGRKHPRYRCRSMGFPKHCGNGTVVMAEWDSFCEEQVLGLLGDAERLEKVWVAGSDSAVELAEVNAELMDLTSLIGSPAYRAGSPQREALDARIAALAARQEELEGLEARPSGWEWRETGQRFGDWWREQDTAAKNTWLRSMNVRLTFDVRGGLTRTIDFGDLQEYEQHLRLGSVVEHLHTGMS

SEQ ID NO: 8816 - protein, 500 aa, synthetic construct
MRALVVIRLSRVTDATTSPERQLESCQQLCAQRGWDVVGVAEDLDVSGAVDPFDRKRRPNLARWLAFEEQPFDVIVAYRVDRLTRSTRHLQQLVHWAEDHKRLVVSATEAHFDTTTPFAAVVIALMGTVAQMELEAIKERNRSAAHFNIRAGKYRGSLPPWGYLPARVDGEWRLVPDPVQRERILEVYHRVVDNHEPLHLVAHDLNRRGVLSPKDYFAQLQGREPQGRKWSATALKRSMISEAMLGYATLNGKTVRDDSGAPLVRAEPILTREQLEALRAELVKTSRAKPAVSTPSLLLRVLFCAVCGEPAYKFAGGGRKHPRYRCRSMGFPKHCGNGTVAMAEWDAFCEEQVLDLLGDVERLEKVWVAGSDSAVELAEVNAELVDLTGLIGSPAYRAGSPQREALDARIAALAARQEELEGLGARPSGWEWRETGQRFGDWWREQDTAAKNAWLRSMNVRLTFDVRGGLTRTIDFGDLQEYEQHLRLGSVVERLHTGMS

SEQ ID NO: 8817 - protein, 500 aa, synthetic construct
MRALVVIRLSRVTDATTSPERQLESCQQLCAQRGWDVVGVAEDLDVSGAVDPFDRKRRPNLARWLAFEEQPFDVIVAYRVDRLTRSTRHLQQLVHWAEDHKKLVVSATEAHFDTTTPFAAVVIALMGTVAQMELEAIKERNRSAAHFNIRAGKYRGSLPPWGYLPTRVDGEWRLVPDPVQRERILEVYHRVVDNHEPLHLVAHDLNRRGVLSPKDYFAQLRGREPQGREWSATALKRSMTSEAMLGYATLNGKTVRDDDGAPLVRAEPILTREQLEALRAVLVKTSRAKPAVSTPSLLLRVLFCAVCGEPAYKFAGGGRKHPRYRCRSRGFPKHCGNGTVVMAEWDAFCEEQVLDLLGDAERLEKVWVAGSDSAVELAEVNAELVDLTSLIGSPTYRAGSPQREALDSRIAALAARQEELEGLEARPSGWEWRETGQRFGDWWREQDTAAKNTWLRSMNVRLTFDVRGGLTRTIDLGELQEYEQHLRLGSVVERLHTGMS

SEQ ID NO: 8818 - protein, 500 aa, synthetic construct
MRALVVIRLSRVTDATTSPERQLESCQQLCAQRGWDVVGVAEDLDVSGAVDPFDRKRRPNLARWLAFEEQPFDVIVAYRVDRLTRSTRHLQQLVHWAEDHKKLVVSATEAHFDTTTPFAAVVIALMGTVAQMELEAIKERIRSAVHFNIRAGKYRGSLPPWGYLPTRVDGEWRLAPDPVQRERILEVYHRVVDNHEPLHLVAHDLNRRGVLSPKDYFAQLRGREPQGREWSATALRRSMTSEAMLGYATLNGKTVRDNDGAPLVRAEPILTRGQLEALRAELVKTSRAKPAVSTPSLLLRVLFCAVCGEPAYKFVGGGRKHPRYRCRSMGSPKHCGNGTVVMAEWDVFCEEQVLNLLGDAERLEKVWVAGSDSAVELAEVNAELVDLTGLIGSPAYRAGSPQREALDARIAALAARQEELEGLEARPSGWEWRGTGQRLGDWWHEQDTAAKNTWLRSMNIRLTFDVRGGLTRTIDFGDLQEYEQHLRSGSVVERLHTGMS

SEQ ID NO: 8819 - protein, 500 aa, synthetic construct
MRALVVIRLSRVTDATTSPERQLESCQQLCAQRGWDVVGVAEDLDVSGAVDPFDRKRRPNLARWLAFEEQPFDAIVAYRVDRLTRSVRHLQRLVRWAEDHKKLVVSATEAHFDMTTPFAAVVIALMGTVAQMELEAIKERIRSAARFNIRAGKYRGSLPPWGYLPTRVEGEWRLVPDPVQRERILEVYHRVVDNHEPLHLVAHDLNQRGVLSPKDYFAQLRGREPQGRKWSATALKRSMTSGAMLGYATLNGKIVRDDDGAPLVRAEPILTREQQEALRAELAKTSRAKPAVSTPSLLLRVLFCAVCGEPAYRFVGGGRKHPRYRCRSMGFPEHCGNGTVVMAEWDAFCEEQVLNLLGDAERLEKVWVAGSDSAVELAEVNAELVDLTSLISSPAYRAGSPQRGALDARIAALAARQEELEGLEARPSGWEWRETGQRFGDWWREQDTAAKNTWLRSMNVRLTFDVRGGLTRTIDFGDLQEYEQHLRLGSVAERLHTGMS

SEQ ID NO: 8820 - protein, 500 aa, synthetic construct
MRALVVIRLSRVTDATTSPERQLESCQQLCAQRGWDVVGVAEDLDVSGAVDPFDRKRRPNLARWLAFEEQPFDVVVAYRVDRLTRSTRHLQQLVRWAEDHKKLVVSATEAHFDMTTPFAAVVIALMGTVAQMELEAIRERIRSAVHFNIRAGKYRGSLPPWGYLPTRVDGEWRLVPDPVQRERILEVYRRVVDNHEPLHLVAHDLNRRGVLSPKDYFAQLRGREPRGRKWSATALRRSMTSEAMLGYATLNGKIVRGDDGAPLVRAEPILTREQQEALRAELARTSRAKPAVSTPSLLLRVLFCAVCGEPAYKFVGGGRKHPRYRCRSMGFPEHCGNGTVVMAEWDAFCEEQVLNLWGDAERLEKVWVAGSDSAVELAEMNAELVDLTSLIGSPAYRAGSQQREALDARIAALAARQEELEGLEARPSGWEWRGTGQRFGDWWREQDTAAKNTWLRSMNVRLTFDARGGLTRTVDFGELQEYVQHLRLGGVVERLHTGMS

SEQ ID NO: 8821 - protein, 500 aa, synthetic construct
MRAIIVIRLSRVTDATTSPERQLESCQQLCAQRGWDVVGVAEDLDVSGAVDPFDRKRRPNLARWLAFEEQPFDVIVAYRVDRLTRSTRHLQQLVRWAEDHKKLVVSATEAHFDTTTPFAAVVIALMGTVAQMELEAIKERIRSAAHFNIRAGKYRGSLPPWGYLPTRVDGEWRLVPDPVQRERILEVYHRVVDNHEPLHLVAYDLNRRGVLSPKDYFAQLQGREPQGRKWSATALKRSMTSVAMLGYATLNGKIVRGDDGAPLVRAEPILTREQQEALRAELAKTSRAKPAVSTPSLLLRVLFCAVCGEPAYKFVGGGRKHPRYRCRSMGFPEHCGNGTVVMAEWDAFCEEQVLDLLGDAERLEKVWVAGSDSAVELAEVNAELVDLTSLIGSPAYRAGSSQREALDARIAALAARQEELEGLEARPSGWGWRETGQRFGDWWREQDTAAKNTWLRAMNVRLTFDVRGGLTRTIDFGDLLEYERHLRLGSVVERLHTGMS

SEQ ID NO: 8822 - protein, 500 aa, synthetic construct
MRALVVIRLSRVTDATTSPERQLESCLQLCAQRGWDVVGVAEDLDVSGAVDPFDRKRRPNLARWLASEEQPFDVIVAYRVDRLTRSVRHLQQLVHWAEDHKKLVVSATEAHFDTTTPFAAVVIALMGTVAQMELEAIKERIRSAAHFNIRAGKYRGSLPPWGYLPTRVDGEWRLVPDPVQRERILEVYHRVVDNHEPLHLVAHDLNRRGVLSPKDYFAQLRGREPRGRKWSATALRRSMTSEAMLGYATLNGKIVRGDDGAPLVRAEPILTRGQQEALRAELAKTSRAKPAVSTPSLLLRVLFCAVCGEPAYKFVGGGRKHPRYRCRSMGFPKHCGNGTVVMAEWDAFCEEQVLNLLGDAERLEKVWVAGSDSAVELAEVNAELVDLTSLIGSPAYRAGSPQREALDARIAALAARQEELEGLEARPSGWEWRGTGQRLGDWWREQDTAAKNTWLRSMNVRLTFDVRGGLTRTIDFGELQEYEQHLRLGSMAERLHTGMS

SEQ ID NO: 8823 - protein, 500 aa, synthetic construct
MRALVVIRLSRVTEATTSPERQLESCQQLCAQRGWDVAGVAEDLDVSGAVDPFDRKRRPNLARWLAFEEQPFDVIVAYRVDRLTRSTRHLQRLVHWAEDHKKLVVSATEAHFDTTTPFAAVVIALMGTVAQMELEAIKERSRSAAHFNIRAGKYRGSLPPWGYLPTRVDGEWRLVPDPAQRERILEVYHRVVDNHEPLHLVAHDLNRRGVLSPKDYFAQLRGREPRGRKWSATALKRSMISKAMLGYATLSGKIVRDDDGAPLVRAEPILTREQLEALRAELAKTSRAKPAVSTPSLLLRVLFCAVCGEPAYKFVGGGRKHPRYRCRSMGFPEHCGNGTVVMAEWDAFCEEQVLGLLGDAERLEKVWVAGSDSAVELAEVNAELVDLTSLIGSPAYRAGSPQREALDARIAALAARQGELEGLEARPSGWEWRETGQRFGDWWREQDTAAKNTWLRSMNVRLTFDVRGGLTRTIDLGDLQEYGQRLRLGSVAERLHTGMS

SEQ ID NO: 8824 - protein, 500 aa, synthetic construct
MRALVVIRLSRVTDTTTSPERQLESCQQLCAQRGWDVVGVAEDLDVSGAVDPFDRKRRPNLARWLASEEQPFDAIVAYRVDRLTRSIRHLQQLVHWAEDHKKLVVSATEAHFDTTTPFAAVVIALMGTVAQMELEAIKERIRSAAHFNIRAGKYRGSLPPWGYLPARVDGVWRLVPDPVQRERILEVYHRVVDSHEPLHLVAHDLNRRGVLSPKDYFAQLRGREPQGRKWSATALKRSMTSVAMLGYATLNGKIVRDGDGAPLVRAEPILTREQLEALRAELAKTSRAKPAVSTPSLLLRVLFCAVCGEPAYKFVGGGRKHPRYRCRSMGFPEHCGNGTVVMAEWDAFCEEQVLDLLGDAERLEKVWVAGSNSAVELAEVNAELVDLTSLIGSPAYRAGSPQREALDARIAALAARQEELEGLEARPSGWEWRGTGQRLGDWWREQDTAAKNTWLRSMNVRLTFDVRGGLTRAIDFGDLQEYGQHLRLGSVVERLHTGMS

SEQ ID NO: 8825 - protein, 500 aa, synthetic construct
MRALVVIRLSRVTDATTSPERQLESCQQLCAQRGWDVVGVAEDLDVSGAVDPFDRKRRPNLARWLAFEEQPFDVIVAYRVDRLTRSTRHLQQLVHWAEDHKKLVVSATEAHFDTTTPFAAVVIALMGTVAQMELEAIKERNRSAAHFNIRAGKYRGSLPPWGYLPTRVDGEWRLEPDPVQRERILEVYHRVVDNHEPLHLVAHDLNRRGVLSPKDYFAQLQGREPQGRKWSATALKRSMISEAMLGYATLNGKTVRDDDGAPLVRAEPILTREQLGALRAELVKTSRAKPAVSTPSLLLRVLFCAVCGEPAYKFAGGGRKHPRYRCRSMGFPKHCGNGTVAMAEWDAFCEEQVLNLLGDAERLEKVWVAGSDSAVELAEVNAELVDLTRLIGSPAYRAGSPQREALDARIAALAARQEELEGLGARPSGWEWRETGQRFGDWWREQDTAAKNSWLRSMNVRLTFDIRGGLTRTIDFGDLQEYEQHLRLGSVVERLHTGMS

SEQ ID NO: 8826 - protein, 500 aa, synthetic construct
MRALVVIRLSRVTDATTSPERQLESCQQLCAQRGWDVVGVAEDLDVSGAVDPFDRKRRPNLARWLAFEEQPFDVIVAYRVDRLTRSTRHLQQLVHWAEDHKKLVVSATEAHFDTTTPFAAVVIALMGTVAQMELEAIKERNRSAAHFNIRAGKYRGSLPPWGYLPTRVDGEWRLVPDPVQRERILEVYHRVVDNHEPLHLVAHDLNRRGVLSPKDYFAQLQGREPQGRKWSATALKRSMTSEAMLGYATLNGKTVRDDDGAPLVRAEPILTRGQLEALRAELVKTSRAKPAVSTPSLLLRVLFCAVCGEPAYKFAGGGRKHPRYRCRSMGFPKHCGNGTVAMGEWDAFCEEQVLDLLGDAERLEKVWVAGSDSAVELEEVNAELVDLTSLIGSPAYRAGSPQREALDARIAALAARQEELEGLEARPSGWEWRETGQRFGDWWREQDTAAKNTWLRSMNVRLTFDVRGGLTRTIDFGDLQEYEQHLRLGSVVERLHTGMS

SEQ ID NO: 8827 - protein, 500 aa, synthetic construct
MRALVVIRLSRVTDATTSPERQLESCQQLCAQRGWDVVGVAEDLDVSGAVDPFDRKRRPNLARWLAFEEQPFDVIVAYRVDRLTRSTRHLQQLVHWAEDHKKLVVSATEAHFDTTTPFAAVVIALMGTVAQMELEAIKERIRSAVRFNIRAGKYRGSLPPWGYLPTRVDGEWRLVPDPVQRERILEVYHRVVDNHEPLHLVAYDLNRRGVLSPKDYFAQLRGREPRGRKWSATALRRSMISVAMLGYATLNGKTVRDDDGAPLVRAEPILTREQQEALRAELAKTSRAKPAVSTPSLLLRVLFCAVCGEPAYKFVGGGRKHPRYRCRSMGFPKHCGNGTVVTAEWDAFCEEQVLDLLGDAERLEKVWVAGSDSSVELAEVNAELVDLTSLIGSPAYRAGSPQREALDARIAALAARQEELEGLEAHPSGWEWRGTGQRFGDWWREQDTAAKNTWLRSMNVRLTFDVRGGLTRTIDFGDLPEYEQHSRLGSVVVRLHTGMS

SEQ ID NO: 8828 - protein, 500 aa, synthetic construct
MRALVVIRLSRVTDATTSPKRQLESCQQLCAQRGWDVVGVAEDLDVSGAVDPFDRKRRPNLARWLAFERQPFDAIVAYRVDRLTRSIRHLQQLVRWAEDHKKLVVSATEAHFDTTTPFAAVVIALMGTVAQMELEAIKERIRSAVHFNIRAGKYRGSLPPWGYLPTRVDGEWRLVPDPVQRERILEVYHRVVDNHEPLHLVAHDLNRRGVLSPKDYFAQLQGREPQGRKWSATALKRSMISKAMLGYATLNGKTVRDDDGAPLVRAEPILTREQQEALRAELAKTSRAKPAVSTPSLLLRVLFCAVCGEPAYKFAGGGRKHPRYRCRSMGSPKHCGNGTVVMAEWDAFCEEQVLGLLGGAERLEKVWVAGSDSAVELAEVNSELVDLTSLIGSPAYRAGSPQREALDVRIAALAARQEELEGFEARPSGWEWRETGQRFRDWWREQDTAAKNTWLRSMNVRLTFDVRGGLTRTIDFGELQEYEQHLRSGSVAERLHTGMS

SEQ ID NO: 8829 - protein, 500 aa, synthetic construct
MRALAVIRLSRVTDATTSPERQLESCLQLCAQRGWDVVGVAEDLDVSGAVDPFDRKRRPNLARWLAFEEQPFDVVVAYRVDRLTRSTRHLQQLVRWAEDHKKLVVSATEAHFDTTTPFAAVVIALMGTVAQMELEAIKERIRSAAHFNIRAGKYRGSLPPWGYLPTRVDGEWRLVPDPVQRERILEVYHRVVDNHEPLHLVAHDLNRRGVLSPKDYFAQLRGREPRGRKWSATALRRSMTSEAMLGYATLNGKTVRDDDGAPLVRAEPILTREQQEALRAELAKTSRAKPAVSTPSLLLRVLFCAVCGEPAYKFVGGGRKHPRYRCRSMGFPEHCGNGTVVMAEWDVFCEEQVLNLLGDAERLEKVWVAGSDSGVELAEVNAELVDLTSLIGSPAYRAGSPQREALDARIAALAARQEELESLEARPSGWEWRETGQRFGDWWREQDTAAKNTWLRSMNVRLTFDVRGGLTRTIDFGDLQEYEQHLRSGGVVERLHTGMS

SEQ ID NO: 8830 - protein, 500 aa, synthetic construct
MRALVVIRLSRVTDATTSPERQLESCQQLCAQRGWDVVGVAEDLDVSGAVDPFDRKRRPNLARWLALEEQPFDVIVAYRVDRLTRSTRHLQQLVHWAEDHKKLVVSATEAHFDTTTPFAAVVIALMGTVAQMELEAIKERNRSAAHFNIRAGKYRGSLPPWGYLPTRVDGEWRLVPDPVQRERILEVYHRVVVNHEPLHLVAHDLNRRGVLSPKDYFAQLQGREPQGRKWSATALKRSMISGAMLGYATLNGKTVRDDDGAPLVRAEPILTREQLEALRAELVKTSRAKPAVSTPSLLLRVLFCAVCGEPAYKFAGGGRKHPRYRCRSMGFPKHCGNGTVAMAEWDAFCEEQVLDLLGDAERLEKVWVVGSDSAVELAEANAELVDLTSLIGSPAYRAGSPQREALDARIAALAARQEELEGLEARPSGWEWRETGQRFGDWWREQDTAAKNTWLRSMNVRLSFDVRGGLTRTIDFGDLLEYEQLLRSGSVVERLHTGMS

SEQ ID NO: 8831 - protein, 500 aa, synthetic construct
MRALVVIRLSRVTDATTSPERQLESCQQLCAQRGWDVVGVAEDLDVSGAVDPFDRKRRPNLARWLAFGEQPFDVIVAYRVDRLTRSVRHLQQLVHWAEDHKKLVVSATEAHFDTTTPFAAVVIALMGTVAQMELEAIRERSRSAAHFNIRAGKYRGSLPPWGYLPTRVDGEWRLVPDPVQRERILEVYRRVVDNHEPLHLVAHDLNRRGVLSPKDYFAQLQGREPQGRKWSATALKRSMISEAMLGYATLNGKTVRDDDGAPLVRAEPILTREQLEALRAELVKTSRAKPAVSTPSLLLRVLFCAVCGEPAYKFAGGGRKHPRYRCRSMGFPKHCGNGTVAMAEWDAFCEEQVLNLLGDAVRLEKVWVAGSDSAVELAEVNAELVDLTSLIGSPAYRAGSPQREALDARIAALAARQEELEGLGARPSGWEWRETGQRFGDWWREQGTAAKNTWLRSMNVRLTFDARGGLTRTIDFGDLQEYEQHLRLGSVVERSHTGMS

SEQ ID NO: 8832 - protein, 500 aa, synthetic construct
MRALVVIRLSRVTDATTSPERQLESCQQLCTQRGWDVVGVAVDLDVSGAVDPFDRKRRPNLARWLAFEEQPFDVIVAYRVDRLTRSVRHLQQLVHWAEDHKKLVVSATEAHFDTTTPFAAVVIALMGTVAQMELEAIKERNRSAAHFNIRAGKYRGSLPPWGYLPTRVDGEWRLVPDPVQRERILEVYHRVVDNHEPLHLVAHDLNRRGVLSPKDYFAQLRGREPQGRKWSATALKRSMISEAMLGYATLNGKTVRDDGGAPLVRAEPILTRGQLEALRAVLVKTSRAKPAVSTPSLLLRVLFCAVCGEPAYKFAGGGRKHPRYRCRSMGFPKHCGNGTVAMAEWDAFCEEQVLGLLGDAKRLEKVWVAGSDSAVELAEVSAELVDLTSLIGSPAYRAGSPQREALDARIAALAARQEELEGLEARPSGWEWRETGQRFGDWWREQDTAAKNTWLRSMNVRLTFDVRGGLTRTIDFGELQEYEQHLRLGSVVERLHTGMS

SEQ ID NO: 8833 - protein, 500 aa, synthetic construct
MRALVVIRLSRVTDATTSPERQLESCRQLCAQRGWDVVGVAEDLDVSGAVDPFDRKRRPNLARWLAFEEQPFDVIVAYRVDRLTRSTRHLQELVRWAGDHKKLVVSATEAHFDTTTPFAAVVIALMGTVAQMELEAIKERSRSAVRFNIRAGKYRGSLPPWGYLPTHVEGEWRLVPDPVQRERILEVYHRVVDNHEPLHLVAYDLNRRGVLSPKDYFAQLQGREPQGRKWSATALRRSMTSVAMLGYATLNGKTVRGDDGAPLVRAEPILTRGQLEALRAELAKTSRAKPAVSTPSLLLRVLFCAVCGEPAYKFVGGGRKHPRYRCRSMGFPEHCGNGTVVMAEWDAFCEEQVLDLLGDAERLEKVWVAGSDSAVELAEVNAELVDLTSLIGSPAYRAGSPQREALDARIAALAARQEELEGLEARPSGWEWRGTGQRLGDWWREQDTAAKNTWLRSMNVRLSFDTRGGLTRTIDFGDLQEYERHLRSGSVVERLHTGMP

SEQ ID NO: 8834 - protein, 500 aa, synthetic construct
MRALVVIRLSRVTDATTSPERQLESCQQLCAQRGWDVVGVAEDLDVSGAVNPFDRKRRPNLARWLAFEEQPFDVIVAHRVDRLTRSTRHLQQLVHWAEDHKKLVVSATEAHFDTTTPFAAVVIALMGTVAQMELEAIKERNRSAAHFNIRAGKYRGSLPPWGYLPTRVDGEWRLVPDPVQRERILEVYHRVVDNHEPLHLVAHDLNRRGVLSPKDYFAQLQGREPRGRKWSATALKRSMISEAMLGYATLNGKTVRGDDGAPLVRAEPILTRAQLEALRAELVKTSRAKPAVSTPSLLLRVLFCAVCGEPAYKFAGGGRKHPRYRCRSMGFPKHCGNGTVAMAEWDAFCEEQVLDLLGDAERLEKVWVAGSDSAVELAEVSAELVDLTSSIGSPAYRAGSPQREALDARIAALAARQEELEGLEARPSGWKWRETGQRFGDWWREQDTAAKNTWLRSMNVRLTFDVRGGLTRTIDLGDLQEYEQHLRLGSVVGRLHTGMS

SEQ ID NO: 8835 - protein, 500 aa, synthetic construct
MRALVVIRLSRVTDATTSPERQLESCQQLCAQRGWDVVGVAEDLDVSGAVDPFDRKRRPNLARWLAFEEQPFDVIVAYRVDRLTRSTRHLQQLVHWAEDHKKLVVSATEAHFDTTTPFAAVVIALMGTVAQMELEAIKERIRSAAHFNIRAGKYRGSLPPWGYLPARVDGEWRLVPDPEQRERILEVYHRVVDDHEPLHLVAYDLNRRGVLSPKDYFAQLQGREPQGRKWSATALKRSMISVAMLGYATLNGKIVRDDGGAPLVRAEPILTREQQEALRAELAKTSRAKPAVSTPSLLLRVLFCAVCGEPAYKFVGGGRKHPRYRCRSMGFPKHCGNGTVVMTEWDTFCEEQVLDLLGDAERLEKVWVAGSDSAVELAEVNAELMDLTSLIGSPAYRAGSPQREALDARIAALAARQGELEGLEARPSGWEWRETGQRFGDWWREQDTAAKNTWLRSMNVRLTFDVRGGLTRTIDFGELQEYEQHLRLGSVAERLHTGMS

SEQ ID NO: 8836 - protein, 500 aa, synthetic construct
MRALVVIRLSRVTDATTSPERQLESCQQLCAQRGWDVVGVAEDLGVSGAVDPFDRKRRPNLARWLAFEEQPFDVIVAYRVDRLTRSIRHLQQLVHWAEDHKKLVVSATEAHFDTTTPFAAVVIALMGTVAQMELEAIKERNRSAAHFNIRAGKYRGSLPPWGYLPTRVDGEWRLVPDPVQRERILEVYHRVVDNHEPLHWVAHDLNRRGVLSPKDYFAQLQGREPQGRKWSATALKRSMISVAMLGYATLNGKTVRDNDGAPLVRAEPILTREQLEALRAELVKTSRAKPAVSTPSLLLRVLFCAVCGEPAYKFAGGGRKHPRYRCRSMGFPKHCGNGTVAMAEWDAFCEEQVLGLLGDAERLEKVWVAGSDSAVELAEVNAELVDLTSLISSPAYRAGSPQREALDARIAALAARQVELEGLEARPSGWEWRETGQRFGDWWREQDTAAKNTWLRSMNVRLTFDARGGLTRTIDFGDLQEYEQHLRLGSVVERLHTGMS

SEQ ID NO: 8837 - protein, 500 aa, synthetic construct
MRALVVIRLSRVTDTTTSPERQLESCQQLCAQRGWDVVGVAEDLDVSGAVDPFDRKRRPNLARWLAFEEQPFDAIVAYRVDRLTRSVRYLQQLVHWAEDHKKLVVSATEAHFDTTTPFAAVVIALMGTVAQMELEAIKERNRSAAHFNIRAGKYRGSLPPWGYLPTRVDGEWRLVPDPVQRERILEVYHRVVDNHEPLHLVAHDLNRRGVLSPKDYFAQLQGREPQGRKWSATALKRSMTSEAMLGYATLNGKTVRDDDGAPLVRAEPILTREQLEALRAELVKTSRAKPAVSTPSLLLRVLFCAVCGEPAYKFAGGGRKHPRYRCRSMGFPKHCGNGTVVMAEWDAFCEEQVLDLLGDAERLEKVWVAGSDSAVELAEVNAELVDLTSLIGSPVYRAGSPQREALDARIAALAARQEELEGLEARPSGWEWRETGQRFGDWWREQNTAAKNTWLRSMNVRLTFDVRGGLTRTIDFGDLREYEQHLRLGSVVKRLHTGMS

SEQ ID NO: 8838 - protein, 500 aa, synthetic construct
MRALVVIRLSRVTDATTSPERQLESCQRLCAQRGWDVVGVAEDLDVSGAVDPFDRKRRPNLARWLAFEEQPFDVIVAYRVDRLTRSTRHLQQLVHWAEDHKKLVVSATEAHFDTTTPFAAVVIALMGTVAQMELEAIKERIRSAVHFNIRAGKYRGSLPPWGYLPTRVDGEWRLVPDPVQRERILEVYHRVVENHEPLHLVAHDLNRRGVLSPKDYFAQLQGREPQGRKWSATALKRSMISVAMLGYATLNGKTVRDDDGAPLVRAEPILTREQLEALRAELAKTSRAKPAVSAPSLLLRVLFCAVCGEPAYKFVGGGRKHPRYRCRSMGFPEHCGNGTVVMTEWDAFCEEQVLNLLGDAERLEKVWVAGSDSAVELTEVSAELVDLTSLIGSPAYRAGSPQREALDARIAALAARQEELEGLETRPSGWEWRETGQRFRDWWREQDTAARNTWLRSMNVRLSFDVRGGLTRTIDFGDLQEYEQHLRLGNMAERLHTGMS

SEQ ID NO: 8839 - protein, 500 aa, synthetic construct
MRALVVIRLSRVTDATTSPERQLESCQQLCAQRGWDVVGIAEDLDVSGAVNPFDRKRRPNLARWLAFEEQPFDVIVAYRVDRLTRSTRHLQRLVHWAEDHKKLVVSATEAHFDTTTPFAAVVIALMGTVAQMELEAIKERIRSAAHFNIRAGRYRGSLPPWGYLPTRVDGEWRLVPDPVQRERILEVYHRVVDNHEPLHLVAYDLNRRGILSPKDYFAQLQGREPQGRKWSATALKRSLISVAMLGYATLNGKIVRNDDGAPLVRAEPILTREQQEALRAELAKTSRAKPAVSTPSLLLRVLFCAVCGEPAYKFTGGGRKHPRYRCRSMGFPEHCGNGTVVMAEWDAFCEEQVLDLLGDAERLEKVWVAGSDSAVELAEVNAELVDLTSLIGSPAYRAGSPQREALDARIAALAARQEELEGLEARPSGWEWRETGQRFRDWWREQDTAAKNTWLRSMNVRLTFDVRGGLTRTIDFGDLQEYEQHLRSGSVAERLYTGKS

SEQ ID NO: 8840 - protein, 500 aa, synthetic construct
MRALVVIRLSRVTDATTSPERQLESCQQLCAQRGWDVVGVAEDLDVSGAVDPFDRKRRPYLARWLAFEEQPFDVIVAYRIDRLTRSVRHLQQLVHWAEDHKKLVVSATEAHFDTTTPFAAVVVALMGTVAQMELEAIKERNRSAAHFNIRAGKYRGSLPPWGYLPARVDGEWRLVPDPVQRERILEVYHRVVDNHEPLHLVAHDLNRRGVLSPKDYFAQLQGREPQGRKWSATALKRSMISKAMLGYATLGGKTVRDDGGAPLVRAEPILTREQQEALRAELVKTSRAKPVVSTPSLLLRVLFCAVCGEPAYKFAGGGRKHPRYRCRSMGFPKHCGNGTVAMAEWDAFCEEQVLDLLGDAERLEKVWVAGSDSAVELAEVNAELVDLTSLISSPAYRAGSPQREALDARIAALAARQEELEGLGARPSGWEWRETGQRFGDWWREQDTAAKNTWLRSMNVRLTFDVRGGLTRTIDFGNPQEYEQHLRLGSVVGRLHTGMS

SEQ ID NO: 8841 - protein, 500 aa, synthetic construct
MRALVVIRLSRVTDATTSPERQLESCQQLCAQRGWDVVGVAEDLDVSGAVDPFDRKRRPNLARWLAFEEQPFDVIVAYRVDRLTRSVRHLQQLVHWAEDHKKLVVSATEAHFDTTTPFAAVVIALMGTVAQMELEAIKERIRSAVHFNIRAGKYRGSLPPWGYLPARVDGEWRLVPDPVQRERILEVYHRVVDNHEPLHLVAYDLNRRGVLSPKDYFAQLQGREPQGRKWSATALKRSMISVAMLGYATLNGKTVRDDAGAPLVRAEPILTREQQEALRAELAKTSRAKPAVSTPSLLLRVLFCAVCGEPAYKFVGGGRKHPRYRCRSMGFPEHCGNGTVVMAEWDAFCEEQVLDLLGDAERLEKVWVAGSDSAVELAEVNAELADLTSLIGSPAYRAGSPQREALDTRIAALAARQEELEGLEARPSGWEWRGTGQRLGDWWREQDTAAKNTWLRSMNVRLTFDVRGGLTRTIDFGELQEYEQHLRLGSAVERLHTGMS

SEQ ID NO: 8842 - protein, 500 aa, synthetic construct
MRALVVIRLSRVTDATTSPERQLESCQQLCAQRGWDVVGVAEDLDVSGAVDPFDRKRRPNLARWLAFEEQPFDVIVAYRVDRLTRSVRHLQQLVHWAEDHKKLVVSATEAHFDTTTPFAAVVIALMGTVAQMELEAIKERNRSTAHFNIRAGKYRGSLPPWGYLPTRVDGEWRLVPDPVQRERILEVYHRVVDNHESLHLVAHDLNRRGVLSPKDYFAQLRGREPQGREWSATALKRSMVSVAMLGYATLNGKIVRDDDGAPLVRAEPILTREQLEVLRAELVKTSRAKPAVSTPSLLLRVLFCAVCGEPAYKFAGGGRKHPRYRCRSMGFPKHCGNGTVVMAEWDAFCEEQVLNLLGDAERLEKVWVAGSDSAVELAEVNAELVDLTSLIGSPAYRAGSPQREALDSRIAVLAARQEELEGLEARPSGWEWRETGQRFGDWWREQDTAAKNTWLRSMNVRLTFDVRGGLTRTIDFGDLQECEQHLRLGSVVERSHTGKS

SEQ ID NO: 8843 - protein, 500 aa, synthetic construct
MRALVVIRLSRVTDATTSPERQLESCQQLCAQRGWNVVGVAEDLDVSGAVDPFDRKRRPNLARWLAFEEQPFDAIVAYRVDRLTRSVRHLQQLVHWAEDHKKLVVSATEAHFDTTTPFAAVVIALMGTVAQMELEAIKERNRSAAHFNIRAGKYRGSLPPWGYLPARVDGEWRLVPDPVQRERILEVYHRVVDNHEPLHLVAHDLNRRGVLSPKDYFAQLQGREPQGRKWSATALKRSMISEAMLGYATLNGKTVRGDDGAPLVRAEPILTREQLEALRAELVKTSRAKPAVSTPSLLLRALFCAVCGEPAYKFAGGGRKHPRYRCRSMGFPRHCGNGTVAMAEWDAFCEEQVLNLLGDAERLEKVWVAGSDSAVELAEVNAELVDLTSLIGSPAYRAGSPQREALDARIAALAARQEELEGLEARPSGWEWRETGQRFGDWWREQDTAAKNTWLRSMNVRLTFDVRGGLTRTIDFGDLQEYEQHLRLGSVVERLHTGMS

SEQ ID NO: 8844 - protein, 500 aa, synthetic construct
MRALVVIRLSRVTEATTSPERQLESCQQLCAQRGWDVVGVAEDLDVSGAVDPFDRKRRPNLARWLAFEGQPFDVIVAYRVDRLTRSVRHLQQLVRWAEDHKKLVVSATEAHFDTTTPFAAVVIALMGTVAQMELEAIRERIRSAAHFNIRAGKYRGSLPPWGYLPTRVDGEWRLVPDPVQRERILEVYHRVVDNHEPLHLVAHDLNRRGVLSPKDYFAQLRGREPRGREWSATALKRSMTSEAMLGYATLNGKTVRDDDGAPLVRAEPILTREQQEALRAELAKTSRAKPAVSTPSLLLRVLFCAVCGEPAYKFVGGGRKHPRYRCRSMGFPKHCGNGTVVMAEWDAFCEEQVLNLLGNAVRLEKVWVAGSDSAAELAEVNAELVDLTSLIGSPAYRAGSPQREALDVRIAALAARQEELESLEARPSGWEWRETGQRLRDWWREQDTAAKNTWLRSMNIRLTFDVRGGLTRTIDFGDLQEYEQHLRLGSVVERLHTGMS

SEQ ID NO: 8845 - protein, 500 aa, synthetic construct
MRALVVIRLSRVTDATTSPERQLESCQQLCAQRGWDVVGVAEDLDVSGAVDPFDRKRRPNLARWLAFEEQPFDVIVAYRVDRLTRSTRHLQQLVHWAEDHKKLVVSATEAHFDTTTPFAAVVIALMGTVAQMELEAIKERNRSAAHFNIRAGKYRGSLPPWGYLPTRVDGEWRLVPDPVQRERILEVYHRVVDNHEPLHLVAHDLNRRGVLSPKDYFAQLRGREPQGRKWSATALKRSMISEAMLGYATLNGKAVRDDDGAPLVRAEPILTRGQLEALRAELVKTSRAKPAVSTPSLLLRVLFCAVCGEPAYKFAGGGRKHPRYRCRSMGFPKHCGNGTVATAEWDAFCEEQVLDLLGDAERLEQVWVAGSDSAVELAEVNAELVDLTSLIGSPAYRAGSPQREALDARIAALAARQGELEGLEARPSGWEWRGTGQRFRDWWREQDTAAKNTWLRSMNVRLTFDVRGGLTRTIDFGDLQEYEQHLRLGSVVERLHTGMS

SEQ ID NO: 8846 - protein, 500 aa, synthetic construct
MRALVVIRLSRVTDATTSPERQLASCQQLCAQRGWDVVGVAEDLDVSGAVDPFDRKRRPNLARWLAFEEQPFDVIVAYRVDRLTRSTRHLQQLVRWAEDHKKLVVSATEAHFDTTTPFAAVVIALMGTVAQMELEAIKERSRSAAHFNIRAGKYRGSLPPWGYLPTRVDGEWRLVPDPVQRERILEVYHRVVDNHEPLHLVAHDLNRRGVLSPKDYFAQLQGREPQGRKWSATALKRSMISGAMLGYATLSGKIVRGDDGAPLVRAEPILTREQLEALRAELVKTSRAKPAVSTPSLLLRVLFCAVCGEPAYKFVGGGRKHPRYRCRSMGFPEHCGNGTVVMAEWDAFCEEQVLDLLGDAERLEKVWVAGSDSAVELAEVNTELMDLTSLIGSPAYRAGSPQREALDARIAALAARQEELEGLEARPSGWEWRGTGQRFGDWWREQDTAAKNIWLRSMNVRLTFDVRGGLTRTIDFGDLQEYEQHLRSGSVVERLHTGMS

SEQ ID NO: 8847 - protein, 500 aa, synthetic construct
MRALVVIRLSRVTDATTSPERQLESCQQLCTQRGWDVVGVAEDLDVSGAVDPFDRKRRPNLARWLAFEEQPFDVIVAYRVDRLTRSVRHLQRLVRWAEDHKKLVVSATEAHFDTTTPFAAVVIALMGTVAQMELEAIKERIRSAVHFNIRAGRYRGSLPPWGYLPTRVDGEWRLVPDPVQRERILEVYHRVVDNHEPLHLVAHDLNRRGVLSPKDYFAQLRGREPQGRKWSATALKRSMTSVTMLGYATLNGKTVRDDDGAPLVRAEPILTREQLEALRAELAKTSRAKPAVSTPSLLLRVLFCEVCGEPAYKFVGGGRKHPRYRCRSMGSPKHCGNGTVVMAEWDAFCEEQVLGLLGDAERLEKVWVAGSDSAVELAEVNAELVDLTSLIGSPAYRAGSPQREALEARIAALAARQEELESLEARPSGWEWRGTGQRFGDWWCEQDTAAKNSWLRSMNVRLTFDVRGGLTRTVDFGYLQEYEQHLRLGSVVERLHTGMS

SEQ ID NO: 8848 - protein, 500 aa, synthetic construct
MRALVVIRLSRVTDATTSPERQLESCQQLCAQRGWDVVGVAEDLDVSGAVDPFDRKRRPNLARWLAFEEQPFDVIVAYRVDRLTRSVRHLQQLVRWAEDHKKLVVSATEAHFDTTTPFAAVVIALMGTVAQMELEAIKERIRSAVRFNIRAGKYRGSLPPWGYLPTRVDGEWRLVPDPVQRERILEVYHRVVDNHEPLHLVAHDLNRRGVLSPKDYFAQLRGREPQGRKWSATALKRSMTSEAMLGYATLNGKIVRDDDGAPLVRAEPILTREQQEALRAELVKTSRAKPAVSTPSLLLRVLFCAVCGEPAYKFTGGGRKHPRYRCRSMGFPKHCGNGTVVMDEWDAFCEEQVLDLLGDAERLEKVWVAGSDSAIELAEVNAELVDLTSLIGSPAYRAGSPQREALDARIAALAARQEELEGLEARPSGWEWRGTGQRFGDWWREQDTAAKNTWLRSMNVRLTFDVRGGLTRTIDFGDLREYEQHLRLGSAVERLHAGMS

SEQ ID NO: 8849 - protein, 500 aa, synthetic construct
MRALVVIRLSRVTDATTSPERQLASCQQLCAQRGWDVVGVAEDLDVSGAVDPFDRERRPNLARWLAFEEQPFDVIVAYRVDRLTRSTRHLQQLVRWAEDHKKLVVSATEAHFDTTTPFAAVVIALMGTVAQMELEAIKERIRSAAHFNIRAGKYRGSLPPWGYLPTRVDGEWRLVPDPVQRERILEVYHRVVDNHEPLHLVAHDLNRRGVLSPKDYFAQLRGREPQGREWSATALKRSMTSVAMLGYATLNGKIVRDDDGAPLVRAEPILTREQQEALRAELAKTSRAKPAVSTPSLLLRVLFCAVCGEPAYKFVGGGRKHPRYRCRSMGFPKHCGNGTVVMTEWDAFCEEQVLGLLGDAERLEKVWVAGSDSAVELAEVNAELVDLTSLIGSPAYRAGSPQREALDARIAALAARQEELESLEARPSGWEWRGTGQRLGDWWREQDTAAKNTWLRSMNVRLTFDVRGGLTRTIDFGDLQEYGQHLRLGSVVERQHTGTP

SEQ ID NO: 8850 - protein, 500 aa, synthetic construct
MRALVVIRLSRVTDATTSPERQLESCQRLCAQRGWDVVGVAEDLDVSGAVDPFDRKRRPNLARWLAFEEQPFDVIVAYRVDRLTRSTRHLQQLVHWAEDHKKLVVSATEAHFDTTTPFAAVVIALMGTVAQMELEAIKERIRSAAHFNIRAGKYRGSLPPWGYLPARVDGEWRLVPDPVQRERILEVYHRVVDNHEPLHLVAHDLNRRGVLSPKDYFAQLRGREPRGRKWSATALRRSMTSEAMLGYATLNGKIVRDDDGAPLVRAEPILTREQLEALRAELAKTSRAKPAVSTPSLLLRVLFCAVCGEPAYKFVGGGRKHPRYRCRSMGFPKHCGNGTVVLAEWDAFCEEQVLDLLGDAERLEKVWVAGSDSAVELAEVNAELVDLASLIGSPAYRAGSPQREALDARIAALAARQEELEGLEARPSGWGWRETGQRFRDWWREQDTAAKNTWLRAMNVRLTFDVRGGLTRAIDFGDLQEYEQHLRLGSVVERSHTGVP

SEQ ID NO: 8851 - protein, 500 aa, synthetic construct
MRALVVIRLSRVTDATTSPERQLESCQQLCAQRGWDVVGVAEDLDVSGAVDPFDRKRRPNLARWLAFEEQPFDVIVAYRVDRLTRSTRHLQQLVHWAEDHKKLVVSATEAHFDTTTPFAAVVIALMGTVAQMELEAIKERNRSAAHFNIRAGKYRGSLPPWGYLPTRVDGEWRLVPDPVQRERILEVYHRVVDNHEPLHSVAHDLNRRGVLSPKDYFAQLQGREPQGCEWSATALKRSMTSEAMLGYATLNGKTVRDDDGAPLVRAEPILTRGQLEALRAELAKTSRAKPAVSTPSLLLRVLFCAVCGEPAYKFAGGGRKHPRYRCRSMGFPKHCGNGSVVMAEWDAFCEEQVLDLLGDTERLEKVWVAGSDSAIELAEVDAELVDLTSLIGSPAYRAGSPQREALDARIAALAARQEELEGLEARPPGWEWRETGQRFGDWWREQDTAAKNTWLRSMNVRLTFDVRGGLTRTIDFGDLQEYEQYLRLGSAVKRLHTGMS

SEQ ID NO: 8852 - protein, 500 aa, synthetic construct
MRALVVIRLSRVTDATTSPERQLESCRQLCAQRGWDVVGVAEDLDVSGAVDPFDRKRRPNLARWLAFEEEPFDVIVAYRVDRLTRSTRHLQQLVHWAEDHKKLVVSATEAHFDTTTPFAAVVIALMGTVAQMELEAIKERNRSAAHFNIRAGKYRGSLPPWGYLPTCVDGEWRLAPDPVQRERILEVYHRVVDDHEPLHLVAHDLNRRGVLSPKDYFAQLQGREPQGRKWSATALKRSMISEAMLGYATLNGKTVRDDDGAPLVRAEPILTREQLEALRAELVKTSRAKPAVSTPSLLLRVLFCAVCGEPAYKFAGGGRKHPRYRCRSMGFPKHCGNGTVAMAEWDAFCEEQVLNLLGDAERLEKVWVAGSDSAVELAEVNAELVDLTSLIGSPAYRAGSLQREALDARIAALAARQEELEGLEARPSGWGWRETGQRFGDWWREQDIAAKNTWLRSMNVRLTFDVRGGLTRTIDFGDLQEYEQHLRLGSAVERLRTGMS

SEQ ID NO: 8853 - protein, 500 aa, synthetic construct
MRVLVVIRLSRVTDATTSPERQLESCQQLCAQRGWDVVGVAEDLDVSGAVNPFDRKRRPNLARWLAFEEQPFDVIVAYRVDRLTRSVRHLQQLVHWAEDHKKLVVSATEAHFDTTTPFAAVVIALMGTVAQMELEAIKERNRSAAHFNIRAGKYRGSLPPWGYLPARVDGEWRLVPDPVQRERILEVYHRVVDNHEPLHLVAHDLNRRGVLSPKDYFAQLQGREPQGRKWSATALKRSMISGAMLGYATLNGKTVRDDDGAPLVRAEPILTREQLEALRAELVKTSRAKPAVSAPSLLLRVLFCAVCGEPAYKFAGGGRKHPRYRCRSMGFPEHCGNGTVAMAEWDAFCEEQVLDLLGDAERLEKVWVAGSDSAVELAEVNAELVDLTSLIGSPAYRAGSPQREALGARIAALAARQEELEGLGARPPGWEWRETGQRFGDWWRVQDTAAKNTWLRSMNVRLTFDARGGLTRTIDFGDLQEYEQHLRLGSVVERLHTGMS

SEQ ID NO: 8854 - protein, 500 aa, synthetic construct
MRALVVIRLSRVTDATTSPERQLESCQQLCAQRGWDVVGVAEDLDVSGAVDPFDRKRRPNLARWLAFEEQPFDVIVAYRVDRLTRSTRHLQQLVHWAEDHKKLVVSATEAHFDTTTPFAAVVIALMGTVAQMELEAIKERIRSAVHFNIRAGKYRGSLPPWGYLPTRVDGEWRLVPDPVQRERILEVYHRVVDNHEPLHLVAYDLNRRGVLSPKDYFAQLQGREPQGRKWSATALKRSMISGAMLGYATLNGKTVRDDDGAPLVRAEPILTRGQQEALRAELAKTSRAKPAVSTPSLLLRVLFCAVCGEPAYKFVGGGRKHPRYRCRSMGFPKHCGNGTVVMAEWDAFCEEQVLDLLGDAERLEKVWVAGSYSAVELAEVDAELVDLTSLIGSPAYRAGSPQREALDARIAALAARQEELEGLEARPPGWGWRETGQRFRDWWREQDTAAKNTWLRSMNVRLTFDVRGGLTRTINFGDLQEYKQHLRSGGVVERLHTGMS

SEQ ID NO: 8855 - protein, 500 aa, synthetic construct
MRALIVIRLSRVTEATTSPERQLESCQQLCAQRGWDVVGVAEDLDVSGAVDPFDRKRRPNLARWLAFEEQPFDVIVAYRVDRLTRSTRHLQQLVHWAEDHKKLVVSATEAHFDTTTPFAAVVIALMGTVAQMELEAIKERIRSAAHFNIRAGKYRGSLPPWGYLPTRVDGEWRLVPDPVQRERILEVYHRVVDNHEPLHLVAHDLNRRGVLSPKDYFAQLRGREPQGRKWSATALKRSMTSVAMLGYATLNGKTVRDDDGAPLVRAEPILTREQLEALRAELVKTSRAKPAVSAPSLLLRVLFCAVCGEPAYKFVGGGRKHPRYRCRSMGFPKHCGNGTVAMAEWDAFCEEQVLNLLGDAERLEKVWVAGSDSAVELAEVSAELVDLTSLIGSPAYRAGSPQREALDARIAALAARQEELEGLEARPSGWEWRETGQRFGDWWREQDTAAKNTWLRSMNVRLTFDVRGGQTRTIDFGDLQEYEQHLRSGSVVERLHTGMS

SEQ ID NO: 8856 - protein, 500 aa, synthetic construct
MRALVVIRLSRVTDATTSPERQLESCQLLCAQRGWDVVGVAEDLDVSGAVDPFDRKRRPNLARWLAFEEQPFDVIVAYRVDRLTRSTRHLQQLVRWAEDHRKLVVSATEAHFDTTTPFAAVVIALMGTVAQMELEAIKERSRSAAHFNIRAGKYRGSLPPWGYLPTRVDGEWRLVPDPVQRERILEVYHRVVDNHEPLHLVAHDLNRRGVLSPKDYFAQLRGREPQGRKWSATALKRSMISVAMLGYATLNGKTVRGDDGAPLVRAEPILTREQQEALRAELAKTSRAKPAVSTPSLLLRVLFCAVCGEPAYKFVGGGRKHPRYRCRSMGFPKHCGNGTVVMAEWDAFCEEQVLDLLGDAERLEKVWVAGSDSAVELAEVNAELVDLTSLIGSPAYRAGSPQREALDARIAALAARQEELEGLEARPSGWGWRETGQRFGDWWREQDTAAKNTWLRSMNIRLTFDVRGGLTRTIDFGELQEYVQHLRLGNVVERLHTGMS

SEQ ID NO: 8857 - protein, 500 aa, synthetic construct
MRALVVIRLSRVTDATTSPERQLESCQQLCAQRGWDVVGVAEDLDVSGAVDPFDRKRRPNLARWLAFEEQPFDVIAAYRVDRLTRSVRHLQQLVHWAEDHKKLVVSATEAHFDTTTPFAAVVIALMGTVAQMELEAIKERNRSAAHFNIRAGKYRGSLPPWGYLPTRVDGEWRLVPDPVQRERILEVYHRVVDNHEPLHLVAHDLNRRGVLSPKDYFAQLQGREPQGRKWSATALKRSMTSEAMLGYATLNGTIVRDDDGAPLVRAEPILTREQLEALRAELVKASRAKPAVSTPSLLLRVLFCAVCGEPAYRFAGGGRKHPRYRCRSMGFPKHCGNGTVVMAEWDAFCEEQVLDLLGDAERLEKVWVAGSDSAVELAEVNAELVDLTSLIGSPAYRAGSPQREALDARIAALAARQEELEGLGARPSGWEWRETGQRFGDWWREQDTAAKNTWLRSMNVRLTFDVRGGLTRTIDFGDLREYEQHLRSGSVVERLHTGMS

SEQ ID NO: 8858 - protein, 500 aa, synthetic construct
MRALVVIRLSRVTDATTSPERQLESCQQLCAQRGWDVVGVAEDLDVSGAVDPFDRKRRPNLARWLAFEEHPFDVIVAHRVDRLTRSTRHLQQLVHWAQDHKKLVVSATEAHFDTTTPFAAVVIALMGTVAQMELEAIRERSRSAAHFNIRAGKYRGSLPPWGYLPTRVEGEWRLVPDPVQRERILEVYHRVVDNHEPLHLVAHDLNRRGVLSPKDYFAQLRGREPQGRRWSATALRRSMTSEAMLGYATLNGKTVRDDDGAPLVRAEPILTREQQEALRAELAKTSRAKPAVSTPSLLLRVLFCAVCGEPAYKFVGGGRKHPRYRCRSMGFPKHCGNGTVVMAEWDAFCEEQVLDLLGDAERLEKVWVAGSDSAVELAEVSAELVDLTSLIGSPAYRAGSPQREALDARITALAARQEELEGLEARPSGWEWRETGQRFGDWWREQDTAAKNTWLRAMNVRLTFDVRGGLTRTIDFGDLQEYEQHLRLGSVVERLHTGMS

SEQ ID NO: 8859 - protein, 500 aa, synthetic construct
MRALVVIRLSRVTDATTSPERQLASCQQLCAQRGWDVVGVAEDLDVSGAVDPFDRKRRPNLARWLAFEEQPFDVIVAYRVDRLTRSTRHLQQLVRWAEDHKKLVVSATEAHFDTTTPFAAVVIALMGTVAQMELEAIKERIRSAAHFNIRAGKYRGSLPPWGYLPTRVDGEWRLVPDPVQRERILEVYRRVVDNHEPLHLVAHDLNRRGVLSPKDYFAQLRGREPQGRKWSATALKRSMTSGAMLGYATLNGKTVRDDDGAPLVRAEPILTREQLEALRAELVKTSRAKPAVSTPSLLLRVLFCAVCGEPAYKFVGGGRKHPRYRCRSMGFPEHCGNGTVVMAEWDAFCEGQVLDLLGDAERLEKVWVAGSDSAVELAEVNAELVDLTSLIGSPAYRAGSPQREVLGARIAALAARQEELEGLEARPSGWEWRETGQRFGDWWREQDTAAKNTWLRSMNVRLTFDVRGGLTRTIDFGDLHEYERHLRLGSVVERLRTGMS

SEQ ID NO: 8860 - protein, 500 aa, synthetic construct
MRALVVIRLSRVTDATTSPERQLESCQQLCAQRGWDVVGVAEDLDVSGAVDPFDRKRRPNLARWLAFEEQPFDVIVAYRVDRLTRSTRHLQQLVHWAEDHKKLVVSATEAHFDTTTPFAAVVIALMGTVAQMELEAIKERIRSAVHFNIRAGKYRGSLPPWGYLPTRVDGEWRLVPDPVQRERILEVYHRVVDNHEPLHLVAHDLNRRGVLSPKDYFAQLRGREPQGRKWSATALRRSMTSGAMLGYATLNGKTVRGDDGAPLVRAEPILTREQQEALRAELAKSSRAKPAVSAPSLLLRVLFCAVCGEPAYKFVGGGRKHPRYRCRSMGFPKHCGNGTVVMAEWDAFCEEQVLGLLGDAERLEKVWVAGSDSAVELAEVNAELVDLTSLIGSPAYRAGSPQREALDARITALAVRQEGLEGLGALPSGWGWRETGQRFRDWWREQDTAAKNTWLRSMNVRLTFDVRGGLTRTIDFGDLQEYEQHLRSGGVVERLRTGMS

SEQ ID NO: 8861 - protein, 500 aa, synthetic construct
MRALVVIRLSRVTDATTSPERQLESCQQLCAQRGWDVVGVAEDLDVSGAVDPFDRKRRPNLARWLAFEEQPFDVIVAYRVDRLTRSVRHLQQLVHWAEDHKKLVVSATEAHFDTTTPFAAVVIALMGTVAQMELEAIKERIRSAAHFNIRAGKYRGSLPPWGYLPTRVDGEWRLVPDPVQRERILEVYHRVVDNHESLHSVAHDLNQRGVLSPKDYFAQLRGREPQGRKWSATALKRSMTSVAMLGYATLNGKTVRDDNGAPLVRAEPILTREQQEALRAELVKASRAKPAVSTPSLLLRVLFCAVCGEPAYKFVGGGRKHPRYRCRSMGSPKHCGNGTVVMAEWDAFCEEQVLDLLGDAERLERVWVAGSDSAVELAEVNAELVDLTSLIGSPAYRAGSPQREALDARIAALAARQEELEGLEARPSGWEWRETGQRFGDWWHEQDTAAKNAWLRSMNVRLTFDVRGGLTRTIDFGDLQEYEQHLRLGSVVERLHTGMS

SEQ ID NO: 8862 - protein, 500 aa, synthetic construct
MRALVVIRLSRVTDATTSPERQLESCQQLCAQRGWDVVGVAEDLDVSGAVDPFDRKRRPNLARWLAFEEQPFDAIVAYRVDRLARSVRHLQQLVHWAEDHKKLVVSATEAHFDTTTPFAAVVIALMGTVAQMELEAIKERNRSAAHFNIRAGKYRGSLPPWGYLPTRVDGEWRLVPDPVQRERILEVYHRVVDNHEPLHWVAHDLNRRGVLSPKDYFAQLQGREPQGRKWSATALKRSMISEAMLGYATLNGKTVRDNDGAPLVRAEPILTREQLEALRAELVKTSRAKPAVSTPSLLLRVLFCAVCGEPAYKFAGGGREHPRYRCRSMGFPKHCGNGTVAMAEWDAFCEEQVLDLLGDAERLEKVWVAGSDSAVELADVNAELVDLTSLIGSPTYRAGSPQREALDARIAVLAARQEELEGLEARPSGWEWRETGQRFGDWWREQDTAAKNTWLRSMNVRLTFDVRGGLTRTIDFGDLRAYERHLRLGSVVKRLHTGMS

SEQ ID NO: 8863 - protein, 500 aa, synthetic construct
MRALVVIRLSRVTDGTTSPERQLESCQQLCAQRGWDVVGVAEDLDVSGAVDPFDRRRRPNLARWLAFEEHPFDVIVAYRVDRLTRSTRHLQQLVHWAEDHKKLVVSATEAHFDTTTPFAAVVIALMGTVAQMELEAIKERIRSAAHFNIRAGKYRGSLPPWGYLPTRVDGEWRLAPDPVQRERILEVYHRVVHNHEPLHLVAHDLNRRGVLSPKDYFAQLRGREPQGRKWSATALKRSMISVAMLGYATLNGKIVRDDDGAPLVRAEPILTREQLEALRAELVKTSRAKPAVSTPSLLLRVLFCAVCGEPAYKFVGGGRKHPRYRCRSMGFPKHCGNGTVVMAEWDAFCEEQVLDLLGDAERLEKVWVAGSDSAVELAEVNAELVDLTSLIGSPAYRVGSPQREALDARIAALAARQEELEGLEARPSGWEWRETGQRFRDWWREQDTAAKNTWLRSMNVRLTFDVRGGPTRTIDFGDLQEYEQHLRLGSVVERLHTGMS

SEQ ID NO: 8864 - protein, 500 aa, synthetic construct
MRALVVIRLSRVTDATTSPERQLESCQQLCAQRGWDVVGIAEDLDVSGAVDPFDRKRRPNLARWLAFEEQPFDVIVAYRVDRLTRSTRHLQQLVHWAEDHKKLVVSATEAHFDTTTPFAAVVIALMGTVAQMELEAIKERIRSAAHFNIRAGKYRGSLPPWGYLPARVDGEWRLVPDPVQRERILEVYHRVVDNHEPLHLVANDLNRRGVLSPKDYFAQLRGREPRGRKWSVTALKRSMTSVAMLGYATLNGKTVRDDNGAPLVRAEPILTREQLEALRAELVKTSRAKPAVSTPSLLLRVLFCAVCGEPAYKFVGGGRKHPRYRCRSIGFPKHCGNGTVAMDEWDAFCEEQVLNLLGDAERLEKVWVAGSDSAVELAEVNAELVDLTSLIGSPAYRAGSPQREALDARIAALAARQEELESLEARPSGWEWRGTGQRFGDWWREQDVAAKNTWLRTMNVRLTFDVRGGLTRTIDFGDLQEYEQHLRSGSVVERLHTGMP

SEQ ID NO: 8865 - protein, 500 aa, synthetic construct
MRALVVIRLSRVTDATTSPERQLESCQQLCAQRGWDVVGVAEDLDVSGAVDPFDRKRRPNLARWLAFEEQPFDAIVAYRVDRLTRSTRHLQQLVLWAEDHKKLVVSATEAHFDTTTPFAAVVIALMGTVAQMELEAIKERIRSAVRFNIRAGKYRGSLPPWGYLPTRVDGEWRLAPDPVQRERILEVYRRVVDNHEPLHLVAYDLNRRGVLSPKDYFAQLRGREPQGRKWSATALKRSMISVAMLGYATLNGKTVRDDDGAPLVRAEPILTREQQEALRAELVRTSRAKPAVSTPSLLLRVLFCAVCGEPAYKFVGGGRKHPRYRCRSMGFPKHCGNGTVAMAEWDAFCEEQVLNLLGDAERLEKVWVAGSDSAVELAEVNAELVDLTSLIGSPAYRAGSPQREALDTRIAALAARQEELEGLGARPSGWEWRGTGQRLGNWWREQDTAAKNTWLRSMNVRLTFDVRGGLTRTIDFGDLQEYEQHLRLGSVVERLHTGMP

SEQ ID NO: 8866 - protein, 500 aa, synthetic construct
MRALVVIRLSRVTDATTSPERQLESCQQLCAQRGWDVVGVAEDLDVSGAVDPFDRKRRPNLARWLAFEEQPFDVIVAYRVDRLTRSTRHLQQLVHWAEDHKKLVVSATEAHFDTTTPFAAVVIALMGTVAQMELEAIKERNRSAAHFNIRAGKYRGSLPPWGYLPTRVDGEWRLVPDPVQRERILEVYHRVVDNHEPLHLVAHDLNRRGVLSPKDYFAQLQGREPQGRKWSATALKRSMTSEAMLGYATLDGQTVRDDDGAPLVRAEPILTREQLEALRAELVKTSRAKPAVSTPSLLLRVLFCAVCGEPAYKFAGGGRKHPRYRCRSMGFPKHCGNGTVAMAEWDAFCEEQVLNLFGDAERLEKVWVAGSDSAVELTEVNAELVDLTSLIGSPAYRAGSPQREALDARIAALAVRQEELEGLEARPPGWGWRETGQRFGDWWREQDTVVKNTWLRSMNVRLTFDVRGGLTRTIDFGDLQEYEQHLRLGSVAERLHTGTS

SEQ ID NO: 8867 - protein, 500 aa, synthetic construct
MRALVVIRLSRVTDATTSPERQLESCQQLCAQRGWDVVGVAVDLNVSGAVDPFDRKRRPNLARWLAFEEQPFDVIVAYRVDRLTRSTRHLQQLVRWAEDHKKLVVSATEAHFDTTTPFAAVVIALMGTVAQMELEAIKERIRSAAHFNIRAGKYRGSLPPWGYLPTRVDGEWRLVPDPVQRERILEVYHRVVDNHEPLHLVAHDLNRRGVLSPKDYFAQLRGREPRGRKWSATALKRSMTSEAMLGYATLNGKTVRDDDGAPLVRAEPILTREQLEALRAELVRTSRAKPAVTTPSLLLRVLFCAVCGEPAYKFVGGGRKHPRYRCRSMGFPKHCGNGTVVMAEWDTFCEEQVLNLLGDAERLEKVWVAGSDSAVELAEVSAELVDLTSLIGSPAYRAGSPQREALDARIAALATRQEELEGSEARPSGWEWRETGQRFGDWWREQDTAAKNTWLRSMNVRLTFDVRGGLTRTIDFGDLQEYEQHLRLASVVERLHTGMS

SEQ ID NO: 8868 - protein, 500 aa, synthetic construct
MRALVVIRLSRVTDATTSPERQLESCQQLCAQRGWDVVGVAEDLDVSGAVDPFDRKRRPNLARWLAFEEQPFDVIVAYRVDRLTRSTRHLQQLVHWAEDHKKLVVSATEAHFDTTTPFAAVVTALMGTVAQMELEAIKERNRSAAHFNIRAGKYRGSLPPWGYLPTRVDGEWRLVPDPVQRERILEVYHRVVDNHEPLHLVAHDLNRRGVLSPKDYFAQLQGREPQGRKWSATALKRSMTSEAMLGYATLNGKTVRDDDGAPLVRAEPILTREQLEALRAELVKTSRAKPAVSTPSLLLRVLFCAVCGEPAYKFAGGGRKHPRYRCRSMGFPKHCGNGTVVMAEWDAFCEEQVLGLLGDAERLEKVWVAGSDSVVELAEVNAELVDLMSLIGSPAYRAGSPQREALDARIAALAARQEELEGLEARPSGWEWRETGQRFGDWWREQDTAAKNTWLRSMNVRLTFDVRGGLTRTIDFGDLQEYEQHSRLGSVVERLHTGMS

SEQ ID NO: 8869 - protein, 500 aa, synthetic construct
MRALVVIRLSRVTDATTSPERQLESCQQLCAQRGWDVVGVAEDLDVSGAVDPFDRKRRPNLARWLAFEVHPFDVIVAYRVDRLTRSVRHLQQLVHWAEDHKKLVVSATEAHFDTTTPFAAVVIALMGTVAQMELEAIKERIRSAVRFNIRAGKYRGSLPPWGYLPTRVDGEWRLAPDPVQRERILEVYHRVVDNHEPLHLVAHDLNRRGILSPKDYFAQLQGREPRGRKWSATALRRSMTSEAMLGYATLNGKIVRDDDGAPLVRAEPILTREQQEALRAELAKTSRAKPAVSTPSLLLRVLFCAVCGEPAYKFVGGGRKHPRYRCRSMGFPEHCGNGTVVMAEWDAFCEEQVLDLLGDAERLEKVWVAGSDSAVELAEVNAELVDLTSLIGSPAYRAGSPQREAIDARIAALAARQEELEGLEARPSGWEWRGTGQRFGDWWREQDTAAKNTWLRSMNVRLTFDVRGGPTRTIDFGDLQEYERHLRLGSQVERLHTGMS

SEQ ID NO: 8870 - protein, 500 aa, synthetic construct
MRALVVIRLSRVTDATTSPERQLESCQQLCAQRGWDVVGVAEDLDVSGAVDPFDRKRRPNLARWLAFEEQPFDVIVAYRVDRLTRSTRHLQQLVHWAEDHKKLVVSATEAHFDTTTPFAAVVIALMGTVAQMELEAIKERIRSATHFNIRAGKYRGSLPPWGYLPTRVDGEWRLVPDPVQRERILEVYHRVVDNHEPLHLVAHDLNRRGVLSPKDYFAQLQGREPQGRKWSATALRRSMTSEAMLGYATLNGKTVRDDDGAPLVRAEPILTREQQEALRAELVKTSRAKPAVSTPSLLLRVLFCAVCGEPAYKFAGGGRKHPRYRCRSMGFPKHCGNGTVVMAEWDAFCEEQVLDLLGDAVRLEKVWVAGSDSAVELAGVNAELVDLTSLIGSPAYRAGSPQREALDARIAALAARQEELEGLEARPSGWEWRGTGQRFGDWWREQDTAAKNTWLRSMNVRLTFDVRGGLTRTIDFGDLLEYEQHLRLGSVVERLHTGMS

SEQ ID NO: 8871 - protein, 500 aa, synthetic construct
MRALVVIRLSRVTDATTSPERQLESCQQLCAQRGWDVVGVAEDLDVSGAVDPFDRRRRPNLARWLAFEEQPFDVIVAYRVDRLTRSTRHLQQLVHWAEDHKKLVVSATEAHFDTTTPFAAVVIALMGTVAQMELEAIKERIRSAAHFNIRAGKYRGSLPPWGYLPTRVDGEWRLAPDPVQRERILEVYHRVVDNHEPLHLVAHDLNRRGVLSPKDYFAQLQGREPQGRKWSATALKRSMISVAMLGYATLNGKIVRDDDGAPLVRAEPILTRGQQEALRAELAKTSRAKPAVSTPSLLLRVLFCAVCGEPAYKFVGGGRKHPRYRCRSMGFPEHCGNGTVVMTEWDTFCEERVLNLLGDAERLEKVWVAGSDSAVELAEVNAELVDLTSLIGSPAYRAGSPQREALDARIAALAARQEELEGLEARPSGWGWRETGQRFGDWWREQDTAAKNAWLRSMNVRLTFDVRGGLTRTIDFGDLQEYEQLLRLGSVAERLDTGMS

SEQ ID NO: 8872 - protein, 500 aa, synthetic construct
MRALVVIRLSRVTDATTSPERQLESCQQLCTQRGWDVVGVAEDLDVSGAVDPFDRKRRPNLARWLAFEEQPFDVIVAYRVDRLTRSTRHLQQLVHWAEDHKKLVVSATEAHFDTTTPFAAVVIALMGTVAQMELEAIKERIRSAAHFNIRAGKYRGSLPPWGYLPTRVDGEWRLVPDPVQRERILEVYHRVVDNHEPLHLVAHDLNRRGVLSPKDYFAQLQGREPRGRKWSATALKRSMTSVAMLGYATLNGKTVRDDDGAPLVRAEPILTREQQEALRAELDKTSRAKPAVSTPSLLLRVLFCAVCGEPAYKFAGGGRKHPRYRCRSMGFPKHCGNGTVVMAEWDAFCEEQVLNLLGDAERLEKVWVAGSDSAVELAEVNAELVDLTSLIGSPAYRAGSPQREALDARIAALAARQEELEGLEARPSGWEWRETGQRFGDWWREQDTAAKNTWLRSMNVRLTFDVRGGLTRTIDFGELQEYEQHLRSGSVAERLYTGMS

SEQ ID NO: 8873 - protein, 500 aa, synthetic construct
MRALVVIRLSRVTDATTSPKRQLESCQQLCAQRGWDVVGVAEDLDVSGAVDPFDRKRRPNLARWLAFEEQPFDVIVAYRVDRLTRSTRHLQQLVHWAEDHKKLVVSATEAHFDTTTPFAAVVIALMGTVAQMELEAIKERNRSAAHFNIRAGKYRGSLPPWGYLPARVDGEWRLVPDPVQRERILEVYHRVVDNHEPLHLVAHDLNRRGVLSPKDYFAQLRGREPQGRKWSATALKRSMTSEAMFGYATLNGKAVRDDDGAPLVRAEPILTRGQLEALRAELAKTSRAKPAVSTPSLLLRVLFCAVCGEPAYKFAGGGRKHPRYRCRSMGFPKHCGNGTVVMAEWDAFCEEQVLNLLGDAERLEKVWVAGSDSAVELAEVNAELVDLTSLIGSPAYRAGSPQREALDARIAALAARQEELEGLEARPSGWEWRETGQRFGDWWREQDTAAKNTWLRSMNVRLTFDVRGGLTRTIDFGDLQEYEQHLRLGGVVERLHTGMS

SEQ ID NO: 8874 - protein, 500 aa, synthetic construct
MRALVVIRLSRVTDATTSPERQLESCQQLCAQRGWDVVGVAEDLNVSGAVDPFDRKRRPNLARWLAFEEQPFDVIVAYRVDRLTRSIRHLQQLVHWAEDHKKLVASATEAHLDTTTPFAAVVFALMGTVAQMELEAIKERNRSAAHFNIRAGKYRGSLPPWGYLPTRVDGEWRLVPDPVQRERILEVYHRVVDNHEPLHLVAHDLNRRGVLSPKDYFAQLQGREPQGRKWSATALKRSMVSVAMLGYATLNGKIVRDDDGAPLVRAEPILTREQLEVLRAEFVKTSRAKPAVSTPSLLLRVLFCAVCGEPAYKFAGGGRKHPRYRCRSMGFPKHCGNGTVVMAEWDAFCEEQVLNLLGDAERLEKVWVAGSDSAVELAEVNAELVDLTSLIGSPAYRAGSPQREALDARIAALAARQEELEGSEARPSGWEWRETGQRFGDWWREQDTAAKNTWLRSMNVRLTFDVRGGLTRTIDFGDLQEYEQHLRLGGVVERLHTGMS

SEQ ID NO: 8875 - protein, 500 aa, synthetic construct
MRALVVIRLSRVTDATTSPKRQLESCQQLCAQRGWDVVGVAEDLDVSGAVDPFDRKRRPNLARWLAFEEQPFDVIVAYRVDRLTRSVRHLQRLVRWAEDHKKLVVSATEAHFDTTTPFAAVVIALMGTVAQMELEAIRERIRSAVRFNIRAGKYRGSLPPWGYLPTRVDGEWRLVPDPVQRERILEVYHRVVDNHEPLHLVAYDLNRRGVLSPKDYFAQLQGREPQGRKWSATALKRSMTSVAMLGYATLNGKTVRDDDGAPLVRAEPILTREQLEALRAELVKTSRAKPAVSTPSLLLRVLFCAVCGEPAYKFAGGGRKHPRYRCRSMGSPKHCGNGTVVMTEWDAFCEEQVLDLLGDAERLEKVWVAGSDSAVELAEVNAELVDLTSLIGSPAYRAGSLQREALDARIAALAARQEELEGLEARPSGWEWRGTGQRFGDWWREQDTAAKNTWLRSMNVRLTFDVRGGLTRTIDFGDLQEYEQHSRLGSVVERLHTGMS

SEQ ID NO: 8876 - protein, 500 aa, synthetic construct
MRALVVIRLSRVTDATTSPERQLESCQQLCAQRGWDVVGVAEDLDVSGAVDPFDRKRRPNLARWLAFEEQPFDVIVAYRVDRLTRSTRHLQQLVHWAEDHKKLVVSATEAHFDTTTPFAAVVIALMGTVAQMELEAIKERNRSAAHFNIRAGKYRGSLPPWGYLPARVDGEWRLVPDPVQRERILEVYHRVVDNHEPLHLVAHDLNRRGVLSPKDYFAQLQGREPRGREWSATALKRSMISVAMLGYATLNGKTVRDDDGAPLVRAEPILTREQLEALRAELVKTSRAKPAVSTPSLLLRVLFCAVCGEPAYKFAGGGRKHPRYRCRSMGFPKHCGNGTVVMAEWDAFCEEQVLDLLGDAERLEKVWVAGSDSAVELAEVSAELVDLTSLIGSPAYRAGSLQREALDARIAALAARQEELEGLEARPSGWEWRETGQRFGDWWREQDTAAKNTWLRSMNVRLTFDVRGGLTRTIDFGDLQEYEQHLRLGNVVERLHTGMS

SEQ ID NO: 8877 - protein, 500 aa, synthetic construct
MRVLVVIRLSRVTDATTSPVRQLESCQQLCAQRGWDVVGVAEDLDVSGAVDPFDRKRRPNLARWLAFEEQPFDVIVAYRVDRLSRSTRHLQQLVRWAEDHKKLVVSATEAHFDTTTPFAAVVIALMGTVAQMELEAIKERSRSATHFNIRAGKYRGSLPPWGYLPARVDGEWRLAPDPVQRERILEVYHRVVDNHEPLHLVAYDLNRRGVLSPKDYFAQLRGREPQGRKWSATALKRSMTSVAMLGYATLNGKTVRDDDGAPLVRAEPILTRGQLEALRAELVKTSRAKPAVSTPSLLLRVLFCAVCGEPAYKFVGGGRKRPRYRCRSMGFPKHCGNGTVVMAEWDAFCEEQVLNLLGDAERLEKVWVAGSDSAVELAEVNAELVDLTSLIGSPAYRTGSPQREALDARIAALAARQEELEGLEARPSGWEWRETGQRFGDWWREQDTAAKNAWLRSMNVRLTFDVRGGLTRTIDFGDLQEYEQHLRLGSAAERLHTGMS

SEQ ID NO: 8878 - protein, 500 aa, synthetic construct
MRALVVIRLSRVTDATTSPERQLESCQQLCAQRGWDVVGVAEDLDVSGAVDPFDRKRRPNLARWLAFEEQPFDVIVAYRVDRLTRSTRHLQQLVHWAEDHKKLVVSATEAHFDTTTPFAAVVIALMGTVAQMELEAIKERNRSAAHFNIRAGKYRGSLPPWGYLPTRVDGEWRLVPDPVQRERILEVYHRVVDNHEPLHLVAHDLNRRGVLSPKDYFAQLQGREPQGRKWSATALKRSMISEAMLGYATLNGKTVRDDDGAPLVRAEPILTREQLGALRAELVKTSRAKPAVSTPSLLLRVLFCAVCGEPAYKFAGGGRKHPRYRCRSMGFPKHCGNGTVVMAEWDAFCEEQVLDLLGDAERLEKVWVAGSDSAVELAEVNAELVDLTSLIGSPAYRAGSPQREALDARIAALAARQGELEGLEARPSGWEWRETGQRFGDWWREQDTASKNTWLRLMNVRLTFDVRGGLTRTIDFGVLQEYEQHLRLGSVVERLHTGMS

SEQ ID NO: 8879 - protein, 500 aa, synthetic construct
MRALVVIRLSRVTDATTSPERQLESCQQLCAQRGWNVVGVAEDLDVSGAVDPFDRKRRPNLARWLAFEEQPFDVIVAHRVDRLTRSTRHLQRLVRWAEDHKKLVVSATEAHFDTTTPFAAVVIALMGTVAQMELEAIKERIRSAAHFNIRAGKYRGSLPPWGYLPTRVEGEWRLVPDPVQRERILEVYHRVVDNHEPLHLVAYDLNRRGVLSPKDYFAQLQGREPQGRKWSATALKRSMTSVAMLGHATLNGKTVRDDDGAPLVRAEPILTREQLEALRAELAKTSRAKPAVSSPSLLLRVLFCAVCGEPAYKFVGGGRKHPRYRCRSMGFPKHCGNGTVVMAEWDVFCEEQVLNLLGDAERLEKVWVAGSDSAAELAEVNAELVDLTSLIGSPAYRAGSPQREALDARIAALAARQEELEGLEARPSGWEWRETGQRFGDWWREQDTAAKNTWLRAMNVRLTFDVRGGLTRTIDFGDLQEYEQHLRLGGAVERLHTGTS

SEQ ID NO: 8880 - protein, 500 aa, synthetic construct
MRALIVVRLSRVTDATTSPERQLESCQQLCAQRGWDVVGVAEDLDVSGAVDPFDRKRRPNLARWLAFEEQPFDVIVAYRVDRLTRSTRHLQQLVHWAEDHKKLVVSATEAHFDTTTPFAAVVIALMGTVAQMELEAIKERSRSAAHFNIRAGKYRGSLPPWGYLPARVDGEWRLVPDPVQRERILEVYHRVVVNHEPLHLVAHDLNRRGVLSPKDYFAQLRGREPRGRKWSATALKRSMISKAMLGYATLNGKTVRDDDGAPLVRAEPILTREQLEALRAELVKTSRAKPAVSTPSLLLRVLFCAVCGGPAYKFVGGGRKHPRYRCRSMGFPKHCGNGTVVMAEWDAFCEKQVLNLLGDAERLEKVWVAGSDSAVELAEVNAELVDLTSLIGSPAYRAGSPQREALDARIAALAARQEELEGLEARPPGWEWRGTGQRFGDWWREQDTAAKNTWLRSMNVRLTFDVRGGLTRTIDFGELQEYGQHLHLGSVVERLHPGVS

SEQ ID NO: 8881 - protein, 500 aa, synthetic construct
MRALIVIRLSRVTEATTSPERQLESCQQLCAQRGWNVVGVAEDLDVSGAVDPFDRKRRPNLARWLAFEEQPFDAIVAYRVDRLTRSVRHLQQLVRWAEDHKKLVVSATEAHFDTTTPFAAVVIALMGTVAQMELEAIKERIRSAVHFNIRAGKYRGSLPPWGYLPTRVEGEWRLVPDPVQRERILEVYHRVVDNHEPLHLVAHDLNRRGVLSPKDYFAQLRGREPRGRKWSATALKRSMTSVAMLGYATLNGKIVRDDDGAPLVRAEPILTREQQEALRAELAKTSRAKPAVSTPSLLLRVLFCAVCGEPAYKFTGGGRKLPRYRCRSMGFPKHCGNGTVVMAEWDVFCEEQVLNLLGDAERLEKVWVAGSDSAAELAEVNAELVDLTSLIGSPAYRAGSQQREALDARIAALAARQEELEGLEARPSGWEWRETGQRFGDWWREQDTAAKNTWLRSMNVRLTFDVRGGLTRTIDFGDLQEYERHLRLGSVAERLRTGMP

SEQ ID NO: 8882 - protein, 500 aa, synthetic construct
MRALVVIRLSRVTDATTSPERQLESCQQLCAQRGWDVVGVAEDLDVSGAVDPFDRKRRPNLARWLAFEEQPFDVIVAYRVDRLTRSTRHLQQLVHWAEDHKKLVVSATEAHFDTTTPFAAVVIALMGTVAQMELEAIKERNRSAAHFNIRAGKYRGSLPPWGYLPTRVDGEWRLVPDPVQRERILEVYHRVVDNHEPLHLVAHDLNRRGVLSPKDYFAQLRGREPQGRKWSATALKRSMISEAMLGYATLNGRTVRNDDGAPLVRAEPILTRGQLEALRAELVKTSRAKPAVSTPSLLLRVLFCAVCGEPAYKFAGGGRKHPRYRCRSMGFPKHCGNGTVVMAEWDAFCEEQVLDLLGDAECLEKVWVAGSDSAVELAEVNAELVDLMSLIGSPAYRAGSPQREALDARIAALAARQEELEGLEARPSGWEWRETGQRFGDWWREQDTATKNTWLRSMNVRLTFDVRGGLTRTIDFGDLQEYEQHLRLGSVVERLHTGMS

SEQ ID NO: 8883 - protein, 500 aa, synthetic construct
MRALVVIRLSRVTDATTSPERQLESCQQLCSQRGWDVVGVAEDLDVSGAVDPFDRKRRPNLARWLAFEEQPFDVIVAYRVDRLTRSIRHLQQLVHWAEDHKKLVVSATEAHFDTTTPFAAVVIALMGTVAQMELEAIKERIRSAVRFNIRAGKYRGSLPPWGYLPTRVDGEWRLVPDPVQRERILEVYHRVVDNHEPLHLVAYDLNRRGVLSPKDYFAQLQGREPQGRKWSATALRRSMTSVAMLGYATLNGKTVRDDDGAPLVRAEPILTREQQEALRAELAKTSRAKPAVSTPSLLLRVLFCAVCGEPAYKFVGGGRKHPRYRCRSMGFPKHCGNGTVVMAEWDAFCEEQVLDLLGDAERLEKVWVAGSDSAVELAEVNAELVDLTSLIGSPAYRAGSPQREALDARIAALAARQEELEGLEARPSGWEWRETGQRFGDWWREQDTAAKNTWLRSMNVRLTFDVRGGPTRTIDFGDLREYEQHLRLGSVAERLHTGMS

SEQ ID NO: 8884 - protein, 500 aa, synthetic construct
MRALVVIRLSRVTDATTSPKRQLESCRQLCAQRGWDVVGVAEDLDVSGAVDPFDRKRRPNLARWLAFEEQSFDAIVAYRVDRLTRSVRHLQQLVRWAEDHKKLVVSATEAHFDTTTPFAAVVIALMGTVAQMELEAIKERIRSAAHFNIRAGKYRGSLPPWGYLPTRVDGEWRLVPDPVQRERILEVYRRVVDNHEPLHLVAHDLNRRGVLSPKDYFAQLQGREPQGRKWSATALKRSMISVAMLGYATLNGKIVRDDDGAPLVRAEPILTREQLEALRAELAKTSRAKPAVSTPSLLLRVLFCAVCGEPAYKFVGGGRKHPRYRCRSMGFPEHCGNGTVVMAEWDAFCEKQVLNLLGDAERLEKVWVAGSDSAVELAEVNAELVDLTSLIGSPAYRAGSPQREALDARIAALTARQEELEGLEARPSGWEWRETGQRFGDWWREQDTAAKNTWLRSMNVRLTFDVRGRLTRTIDFGDLQEYEQHLRSGSVVERLHTGMS

SEQ ID NO: 8885 - protein, 500 aa, synthetic construct
MRALVVIRLSRVTDATTSPERQLESCQQLCAQRGWDVVGVAEDLDVSGAADPFDRKRRPNLARWLAFEEQPFDVIVAYRVDRLTRSTRHLQQLVHWAEDHKKLVVSATEAHFDTTTPFAAVVIALMGTVAQMELEAIKERIRSAAHFNIRAGKYRGSLPPWGYLPTRVDGEWRLVPDPVQRERILEVYHRVVDNHESLHLVAHDLNRRGVLSPKDYFAQLQGREPQGRKWSATALKRSMTSVAMLGYATLNGKTVRDDDGAPLVRAEPILTREQQEALRAELAKTSRAKPAVSTPSLLLRVLFCAVCGEPAYKFAGGGRKHPRYRCRSMGFPEHCGNGTVVMTEWDAFCEEQVLDLLGDAECLEKVWVAGSDSSVELAEVNAELVDLTSLIGSPVYRAGSPQREALDARIAALAARQGELEGLEARPSGWEWRETGQRFGDWWREQDTAAKNTWLRSMNVRLTFDVRGGLTRTIDFGDLHEYEQHLRLGSVVERLHTGMS

SEQ ID NO: 8886 - protein, 500 aa, synthetic construct
MRALVVIRLSRVTDATTSPERQLESCQQLCAQRGWDVVGVAEDLDVSGAVDPFDRKRRPNLARWLAFEEQPFDVIVAYRVDRLTRSTRHLQQLVHWAEDHKKLVVSATEAHFDTTTPFAAIVIALMGTVAQMELEAIKERIRSAVRFNIRAGKYRGSLPPWGYLPTRVDGEWRLVPDPVQRERILEVYHRVVDNHEPLHLVAHDLNRRGVLSPRDYFAQLRGREPQGRKWSATALKRSMTSVAMLGYATLNGKIVRDDDGAPLVRAEPILTREQQEALRTELVRTSRAKPAVSTPSLLLRVLFCAVCGEPAYKFVGGGRKHPRYRCRSMGFPEHCGNGTVVMAEWDAFCEEQVLDLLGDAERLEKVWVAGSDSAVELAEVNAELVDLTSLIGSPAYRAGSPQREALGTRIAALAARQEELEGLEARPSGWEWRGTGQRFGDWWRKQDTAAKNTWLRSMNVRLTFDVRGGPTRTIDFGDLQEYEQHLRLGSVVECLHTGMS

SEQ ID NO: 8887 - protein, 500 aa, synthetic construct
MRALVVIRLSRVTDATTSPERQLESCQQLCAQRGWDVVGVAEDLDVSGAVDPFDRKRRPNLARWLAFGEQPFDVIVAYRVDRLTRSVRHLQQLVHWAEDHKKLVVSATEAHFDTTTPFAAVVIALMGTVAQMELEAIKERNRSAAHFNIRAGKYRGSLPPWGYLPTRVDGEWRLVPDPVQRERILEVYHRVVDNHEPLHWVAHDLNRRGVLSPKDYFAQLQGREPQGRKWSATALKRSMISEAMLGYATLNGRTVRDDDGAPLVRAEPILTREQLEAIRAELVKTSRAKPAVSTPSLLLRVLFCAVCGKPAYKFAGGGRKHPRYRCRSMGFPKHCGNGTVVMAEWDAFCEEQVLDLLGDAERLEKVWVAGTDSAVELAEVNAELVDLTSLIGSPAYRAGSPQREALDARIAALAARQEELEGLGARPSGWEWRETGQRFGDWWREQNTAAKNTWLRSMNVRLTFDVRGGLTRTIDYGDLQEYEQHSRLASVVERLHTGMS

SEQ ID NO: 8888 - protein, 500 aa, synthetic construct
MRALVVIRLSRVTDATTSPERQLESCQQLCAQRGWDVVGVAEDLDVSGAVDPFDRKRRPNLARWLAFEEQPFDVVVAYRVDRLTRSTRHLQQLVHWAEDHKKLVVSATEAHFDTTTPFAAVVIALTGTVAQMELEAIKERNRSAAHFNIRAGKYRGSLPPWGYLPTRVDGEWRLVPDPVQRERILEVYHRVVDNHEPLHWVAHDLNRRGVLSPKDYFAQLQGREPQGRKWSATALKRSMISEAMLGYATLNGKTVRDDDGAPLVRAEPILTREQLEALRAELVKTSRAKPAVSTPSLLLRVLFCAVCGEPAYKFAGGGRKHPRYRCRSMGFPKHCGNGTVAMAEWDAFCEEQVLDLLGDAERLEKVWVAGSDSAVELAEVNAELVDLTSLVGSPAYRAGSPQREALDARIAALAARQEELEGLEARPSGWEWRGTGQRFGDWWREQDTAAKNTWLRSMNVRLTFNVRGGPTRTVDFGNLREYEQHLRLGSVVERLHTGMS

SEQ ID NO: 8889 - protein, 500 aa, synthetic construct
MRALVVIRLSRVTEATTSPERQLESCQQLCAQRGWDVVGVAEDLDVSGAVDPFDRKRRPSLARWLAFEERPFDVIVAYRVDRLTRSVRHLQQLVHWAEDHKKLVVSATEAHFDTTTPFAAVVIALMGTVAQMELEAIKERNRSAAHFNIRAGKYRGSLPPWGYLPTRVDGEWRLVPDPVQRERILEVYHRVVVNHEPLHIVAHDLNRRGVLSPKDYFAQLQGREPQGRKWSATALKRSMISEAMLGYATLNGRIVRDDDGAPLVRAEPILTRGQLEALRAELVKTSRAKPAVSTPSLLLRVLFCAVCGEPAYKFAGGGRKHPRYRCRSMGFPKHCGNGTVAMAEWDAFCEEQVLDLLGDAERLEKVWVTGSDSAVELAEVNAELVDLTSLIGSPAYRAGSPQREALDARIAALATRQEELESLEARPPGWEWRETGQRFGDWWREQDTAAKNTWLRSMNVRLTFDVRGGLTRTIDFGDLQEYEQHLRLGSVVERLHTGMS

SEQ ID NO: 8890 - protein, 500 aa, synthetic construct
MRALVVIRLSRVTDATTSPERQLESCQQLCAQRAWDVVGVAEDLDVSGAVDPFDRKRRPNLARWLAFEEQPFDVIVAYRVDRLTRSVRHLQQLVHWAEDHKKLVVSATEAHFDTTTPFAAVVIALMGTVAQMELEAIKERIRSAVHFNIRAGKYRGSLPPWGYLPTRVDGEWRLVPDPVQRERILEVYHRVVDNHEPLHLVAHDLNRRGVLSPKDYFAQLQGREPRGRKWSATALRRSMISVAMLGYATLNGKTVRDDDGAPLVRAEPILTREQQEALRAELAKTSRAKPAVSTPSLLLRVLFCAVCGEPAYKFAGGGRKHPRYRCRSMGFPEHCGNGTVVMAEWDAFCEEQVLNLLGNAERLEKVWVAGSDSAVELAEVNAELVDLTSLIGSPAYRAGSPQREALDARIAALAARQGELKGLEARPSGWEWRETGQRFGDWWREQDAAAKNTWLRSMNVRLTFDVRGGLTRTVDFGDLQEYEQHLRLGSVVERLHTGMS

SEQ ID NO: 8891 - protein, 500 aa, synthetic construct
MRALVVIRLSRVTDATTSPERQLESCQQLCAQRGWDVVGVAEDLDVSGAVDPFDRKRRPNLARWLAFEERPFDAIVAYRVDRLTRSVRHLQQLVHWAEDHKKLVVSATEAHFDTTTPFAAVVIALMGTVAQMELEAIKERIRSAAHFNIRAGKYRGSLPPWGYLPTRADGEWRLVPDPVQRERILEVYHRVVDNHEPLHLVAHDLNRRGVLSPKDYFAQLRGREPRGRRWSATALKRSMTSVAMLGYATLNGKTVRDDDGAPLVRAEPILTREQQEALRAELAKTSRAKPAVSTPSLLLRVLFCAVCGEPAYKFVGGGRKHPRYRCRSMGFPKHCGNGTVVIAEWDAFCEEQVLDLLGDAERLEKVWVAGSDSAVELAEVNAELVDLTSLIGSPAYRAGSPQREALDARIAALAARQEELEGLEVRPSGWEWRGTGQRFGDWWREQDTAAKNAWLRSMNVRLAFDVRGGLTRTIDFGDLQEYGQHLRLGSVAGRLHTGMS

SEQ ID NO: 8892 - protein, 500 aa, synthetic construct
MRALVVIRLSRVTDATTSPERQLASCQQLCAQRGWNVVGVAEDLDVSGAVDPFDRKRRPNLARWLAFDEQPFDVIVAYRVDRLTRSTRHLQQLVRWAEDHKKLVVSATEAHFDTTTPFAAVVIALMGTVAQMELEAIKERCRSAARFNIRAGKYRGSLPPWGYLPTRVDGEWRLVPDPVQRERILEVYHRVVDNHEPLHLVAHDLNRRGILSPKDYFAQLRGREPRGRKWSATALRRSMTSEAMLGYATLSGKIVRDDDGAPLVRAEPILTREQQEALRAVLAKTSRAKPAVSTPSLLLRVLFCAVCGEPAYKFTGGGRKHPRYRCRSMGSPEHCGNGTVAMAEWDAFCEEQVLDLLGDAERLEKVWVAGSDSAVELAEVNAELVDLTSLIGSPAYRAGSPQREALDARIAALAARQEELEGLEARPSGWEWRETGQRFGDWWREQDTAAKNTWLRSMNVRLTFDVRGGLTRTIDFGDLQEYERHLRLGSVAERLRTGMP

SEQ ID NO: 8893 - protein, 500 aa, synthetic construct
MRALVVIRLSRVTDATTSPERQLKSCQQLCAQRGWDVVGVAEDLDVSGAVDPFDRKRRPNLARWLAFEEQPFDVIVAYRVDRLTRSVRHLQQLVHWAEDHKKLVVSATEAHFDTTTPFAAVVIALMGTVAQMELEAIKERNRSAAHFNIRAGKYRGSLPPWGYLPMRVDGEWRLVPDPVQRERILEVYHRVVDNHEPLHLVAHDLNRRGVLSPKDYFAQLRGREPQGRKWSATALKRSMISEAMLGYATLNGKTVRDDDGAPLVRAEPILTREQLEALRAELVKTSRAKPAVSTPSLLLRVLFCAVCGEPAYKFAGGGRKHPRYRCRSMGFPKHCGNGTVAMAEWDAFCEEQVLDLLGDAERLEKVWVAGSDSAVELAEVNAELVDLTSLISSPAYRAGSPQREALDARIAALAARQEELEGLEARPSGWGWRETGQCFGDWWREQDTATKNTWLRSMNVRLTFDVRGGLTRTIDFGDLQEYEQHLRLGSVVERLHTGMS

SEQ ID NO: 8894 - protein, 500 aa, synthetic construct
MRALVVIRLSRVTDATTSPERQLASCQQLCAQRGWDVVGVAKDLDVSGAVDPFDRKRRPNLARWLAFEEQPFDVIVAYRVDRLTRSVRHLQRLVHWAEDHKKLVVSATEAHFDTTTPFAAVVIALMGTVAQMELEAIKERIRSAARFNIRAGKYRGSLPPWGYLPTRVDGEWRLVPDPVQRERILEVYHRVVDNHEPLHLVAHDLNRRGVLSPKDYFAQLRGREPRGRKWSATALKRSMTSVAMLGYATLNGKTVRDDDGAPLVRAEPILTREQLEALRAELAKTSRAKPAVSAPSLLLRVLFCAVCGEPAYKFVGGGRKHPRYRCRSMGFPKHCGNGTVVMTEWDAFCEEQVLDLLGDAERLEKVWVAGSDSAVELAEVNAELVDLTSLIGSPAYRAGSPQREALDTRIAALAARQEELEGLEARPSGWEWRETGQRFVDWWREQDTAAKNTWLRSMNVRLSFDVRGGPTRTIDFGDLREYEQHLRLGSVVERLHTGMS

SEQ ID NO: 8895 - protein, 500 aa, synthetic construct
MRALVVIRLSRVTDATTSPERQLESCQQLCAQRGWDVAGVAEDLDVSGAVDPFDRKRRPNLARWLAFEEQPFDVIVAHRVDRLTRSVRHLQQLVHWAEDHKKLVVSATEAHFDTTTPFAAVVIALMGTVAQMELEAIKERNRSAAHFNIRAGKYRGSLPPWGYLPTRVDGEWRLVPDPVQRERILEVYRRVVDNHEPLHLVAHDLNRRGVLSPKDYFAQLRGREPQGRKWSATALKRSMTSEAMLGYATLNGKTVRDDDGAPLVRAEPILTREQLEALRAELVKTSRAKPAVSTPSLLLRVLFCAVCGEPAYRFAGGGRKHPRYRCRSMGFPRHCGNGTVVMAEWDAFCEKQVLNLLGDTERLEEVWVAGSDSAVELSEVNAELVDLTSLTGSPAYRAGSPQREALDARIAALAARQEELEGLEARPSGWEWRGTGQRFGDWWREQDTAAKNTWLRSMNVRLTFDVRGGLTRTIDFGDLLEYEQHLRPGSVVERLHTGMS

SEQ ID NO: 8896 - protein, 500 aa, synthetic construct
MRALVVIRLSRVTDATTSPERQLESCQQLCAQRGWDVVGVAEDLDVSGAVDPFDRKRRPNLARWLAFEEQPFDVIVAYRVDRLTRSTRHLQQLVHWAEDHKKLVVSATEAHFDTTTPFAAVVIALMGTVAQMELEAIKERNRSAAHFNIRAGKYRGSLPPWGYLPTRVDGEWRLVPDPVQRERILEVYHRVVDNHESLHLVAHDLNRRGVLSPKDYFAQLQGREPQGRKWSATALKRSMISEAMLGYATLNGKTVRNDDGAPLVRAEPILTRGQLEALRAELVKTSRAKPAVSTPSLLLRVLFCAVCGEPAYKFAGGGRKHPRYRCRSMGFPKHCGNGTAVMAEWDAFCEEQVLGLLGDAECLEKVWVAGSDSAVELAEVNAELVDLTSLIGSPAYRAGSPQREALDARIAALAARQEELEGLEARPSGWEWRETGQRFGDWWREQDTAAKNTWLRSMNVRLTFDVRGGLTRTIDFGDLQEYGQHLRSGSVVERLHTGMS

SEQ ID NO: 8897 - protein, 500 aa, synthetic construct
MRALVVIRLSRVTDATTSPERQLESCQQLCAQRGWDVVGVAEDLDVSGAVDPFDRKRRPNLARWLAFEEQPFDVIVAYRVDRLTRSTRHLQRLVHWAEDHKKLVVSATEAHFDTTTPFAAVVIALMGTVAQMELEAIKERIRSAVHFNIRAGKYRGSLPPWGYLPTRVDGEWRLVPDPVQRERILEVYHRVVDNHESLHLVAYDLNRRGVLSPKDYFARLQGREPRGRKWSATALKRSMTSVAMLGYATLNGMTVRDDDGAPLVRAEPILTREQQEALRAELVRTSRAKPAVSTPSLLLRVLFCAVCGEPAYKFVGGGRKHPRYRCRSMGFPKHCGNGTVVMAEWDAFCEEQVLDLLGDAERLEKVWVAGSDSAVELAEVNAELVDLTSLIGSPAYRAGSPQREALDARIAALAARQEELEGLEARPSGWEWRETGQRFGDWWREQDSAAKNTWLRSMNVRLTFDVRGGLTRTIDFGDLQEYEQHLRLGSVVGRLHTGMP

SEQ ID NO: 8898 - protein, 500 aa, synthetic construct
MRALVVIRLSRVTDATTSPERQLESCQQLCAQRGWDVVGVAEDLNVSGAADPFDRKRRPNLARWLAFEEQPFDVIVAYRVDRLTRSIRHLQQLVHWAEDHKKLVVSATEAHFDTTTPFAAVVVALMGTVAQMELEAIKERNRSAAHFNIRAGKYRGSLPPWGYLPTRVDGEWRLVPDPVQRERILEVYHRVVDNHEPLHLVAHDLNRRGVLSPKDYFAQLQGREPQGRKWSATALKRSMISEAMLGYATLNGKTVRDDDGAPLVRAEPILTREQLEAIRAELVKTSRAKPAVSTPSLLLRVLFCAVCGEPAYKFAGGGRKHPRYRCRSMGYPKHCGNGTVVMAEWDAFCEEQVLDLLGDAERLEKVWVAGSDSAVELAEVNAELVDLTSLIGSPAYRAGSPQREALDARIAALAARQEELEGLEARLSGWEWRETGQRFEDWWREQDTTAKNTWLRSMNVRLTFDVRGGLTRTIDFGGLQEYEQLLRLGSVVERIHAGMS

SEQ ID NO: 8899 - protein, 500 aa, synthetic construct
MRALVVIRLSRVTDATTSPERQLESCQQLCAQRGWDVVGVAEDLDVSGAVDPFDRKRRPNLARWLAFEEQPFDVIVAYRVDRLTRSTRHLQQLVHWAEDHKKLVVSATEAHFDTTTPFAAVVIALMGTVAQMELEAIKERNRSATHFNIRAGKYRGSLPPWGYLPTRVDGDWRLVPDPVQRERILEVYHRVVDNHEPLHLVAHDLNRRGVLSPKDYFAQLQGREPQGRKWSATALKRSMISEAMLGYATLNGKTVRGDDGAPLVRAEPILTRGQLEALRAELVKTSRAKPAVSTPSLLLRVLFCAVCGEPAYKFAGGGRKHPRYRCRSMGFPKHCGNGTVAMAEWDAFCEEQVLNLLGDAERLEKVWVAGSDSAVELAEVNAELVDLTSLIGSPAYRAGSPQREALDARVAALAARQEELEGLGARPSGWEWRETGQRFGDWWREQDTAAKNAWLRSMNVRLTFDVRGGLTRTIDFGDLQEYEQHLRSGSVVERLHPGMS

SEQ ID NO: 8900 - protein, 500 aa, synthetic construct
MRALVVIRLSRVTDATTSPERQLESCQQLCAQRGWDVVGVAEDLDVSGAVDPFDRKRRPNLARWLAFEEQPFDVIVAYRVDRLTRSTRHLQQLVRWAEDHKKLVVSATEAHFDTTTPFAAIVIALMGTVAQMELEAIKERIRSAAHFNIRAGKYRGSLPPWGYLPTRVDGEWRLVPDPVQRERILEVYHRVVDNHEPLHLVAHDLNRRGVLSPKDYFAQLRGREPQGREWSATALKRSMTSVAMLGYATLNGKTVRDDDGAPLVRAEPILTREQQEALRAELAKTSRAKPAVSAPSLLLRVLFCAVCGEPAYKFVGGGRKHPRYRCRSMGFPKHCGNGTVVMAEWDAFCEEQVLDLLGDAERLEKVWVVGSDSSVELAEVNAELVDLTSLIGSPAYRVGSPQREALDARIAALAARQEELEGLEARPSGWEWRETGQRFGDWWREQDTAAKNTWLRSMNVRLTFDVRGGLTRTIDFGDLLEYERHLRLGGVAERLHTGMS

SEQ ID NO: 8901 - protein, 500 aa, synthetic construct
MRALVVIRLSRVTDATTSPVRQLESCQQLCAQRGWDVVGVAEDLDVSGAVDPFDRKRRPNLARWLAFEEQPFDVIVAYRVDRLTRSTRHLQQLVRWAEDHKKLVVSATEAHFDTTTPFAAVVIALMGTVAQMELEAIKERIRSAVRFNIRAGKYRGSLPPWGYLPTRVDGEWRLVPDPVQRERILEVYRRVVDNHEPLHLVAYDLNRRGVLSPKDYFAQLQGREPQGRKWSATALKRSMTSVAMLGYATLNGKTVRDDDGTPLVRAEPILTREQLGALRAELAKTSRAKPAVSTPSLLLRVLFCAVCGEPAYKFVGGGRKHPRYRCRSMGSPKHCGNGTVMMAEWDVFCEEQVLNLLGDAERLEKVWLAGSDSAVELAEVNAELVDLTSLIGSPAYRAGSPQREALDARIAALAARQEELEGLEARPSGWEWRGTGQRLGDWWREQDTAAKNTWLRSMNVRLTFDVRGGLTRTIDFGELQEYEQHLRLGSVVKRLHTGMS

SEQ ID NO: 8902 - protein, 500 aa, synthetic construct
MRALVVIRLSRVTDATTSPVRQLESCQQLCAQRGWDVAGVAEDLDVSGAVDPFDRKRRPNLARWLAFEEQPFDVIVAYRVDRLTRSTRHLQQLVRWAEDHKKLVVSATEAHFDTTTPFAAVVIALMGTVAQMELEAIKERIRSAAHFNIRAGKYRGSLPPWGYLPARVDGEWRLVPDPVQRERILEVYHRVVDNHEPLHLVAHDLNRRGVLSPKDYFAQLQGREPQGRKWSATALKRSMTSKAMLGYATLSGKIVRDDDGAPLVRAEPILTRGQQEALRAELAKTSRAKPAVSTPSLLLRVLFCAVCGEPAYKFVGGGRKHPRYRCRSMGFPKHCGNGTVVMTEWDAFCEEQVLDLLGDAERLEKVWLAGSDSAAELAEVSAELVDLTSLIGSPAYRAGSPQREALDARIAALAARQEELEGLEARPSGWEWRETGQRFGDWWREQDTAAKNTWLRSMNVRLTFDVRGGLTRTIDFGDLREYEQHLRLGSVVERLHTEMS

SEQ ID NO: 8903 - protein, 500 aa, synthetic construct
MRALVVIRLSRVTDATTSPERQLESCQQLCAQRGWDVVGVAEDLDVSGAVDPFDRKRRPNLARWLAFEEQPFDVIVAYRVDRLTRSTRHLQQLVRWAEDHKKLVVSATEAHFDTTTPFAAVVIALMGTVAQMELEAIKERIRSAVRFNIRAGKYRGSLPPWGYLPTRVDGEWRLVPDPVQRERILEVYHRVVGNHEPLHLVAHDLNRRGVLSPKDYFAQLRGREPQGRKWSATALKRSMTSEAMLGYATLNGKTVRGDDGAPLVRAEPILTRGQQEALRAELAKTSRAKPAVSTPSLLLRVLFCAVCGEPAYKFTGGGRKHPRYRCRSMGFPEHCGNGTVVMAEWDAFCEEQVLDLLGDAERLEKVWLAGSDSAVELAEVNAELVDLTSLIGSPAYRAGSPQREALDARIAALAARQEELEGLEARPSGWEWRETGQRLGDWWREQDTAAKNTWLRSMNVRLTFDVRGGLTRTIDFGDLQVYEQHLRLGSVAERLRTGVS

SEQ ID NO: 8904 - protein, 500 aa, synthetic construct
MRALVVIRLSRVTDATTSPERQLGSCQQLCAQRGWDVVGVAEDLDVSGAVDPFDRKRRPNLARWLAFEEQPFDAIVAHRVDRLARSIRHLQQLVHWAEDHKKLVVSATEAHFDTTTPFAAVVIALMGTVAQMELEAIKERNRSAAHFNIRAGKYRGSLPPWGYLPTRVDGEWRLVPDPVQRERILEVYHRVVDNHEPLHLVAHDLNRRGVLSPKDYFAQLQGREPQGRKWSATALKRSMTSEAMLGYATLNGKTVRDDDGAPLARAEPILTREQLEALRAVLVKTSRAKPAVSTPSLLLRVLFCAVCGEPAYKFAGGGRKHPRYRCRSMGFPKHCGNGTVAMAEWDAFCEEQVLGLLGDADRLEKVWVAGSDSAVELAEVNAELVDLTNLIGSPAYRAGSPQREALDARIAALAARQEELEGLEVRPSGWEWRETGQRFGDWWREQDTAAKNTWLRSMNVRLTFDARGGLTRTIDFGDLQEYVQHLRLGSVVERLHTGMS

SEQ ID NO: 8905 - protein, 500 aa, synthetic construct
MRALVVIRLSRVTDATTSPERQLESCQQLCAQRGWDVVGVAEDLNVSGAVDPFDRKRRPNLARWLAFEEQPFDVIVAYRVDRLTRSIRHLQQLVHWAEDHKKLVVSATEAHFDTTTPFAAVVIALMGTVAQMELEAIKERNRSAAHFNIRAGRYRGSLPPWGYLPTRVDGEWRLVPDPVQRERILEVYHRVVDNHEPLHLVAHDLNRRGVLSPKDYFAQLQGREPQGRKWSATALKRSMISGAMLGYATLNGKTVRDDDGAPLVRAEPILTREQLEALRAELVKTSWAKPAVSTPSLLLRVLFCAVCGEPAYKFAGGGRKHPRYRCRSMGFPKHCGNGTVVMAEWDAFCEEQVLDLLGDAERLEKVWVAGSDSAVELAEVNAELVDLTSLIGSPAYRAGSQQREALDARIAALAARQEELEGLGARPSGWEWRETGQRFGDWWREQDTAAKNTWLRSMNVRLTFDVRGGLTRTIDLGDLQEYEQHLRLGSVVERLHTGMS

SEQ ID NO: 8906 - protein, 500 aa, synthetic construct
MRALVVIRLSRVTDATTSPERQLESCQQLCAQRGWDVVGVAEDLDVSGAVDPFDRKRRPNLARWLAFEEQPFDVIVAYRVDRLTRSTRHLQQLVHWAEDHKKLVVSATEAHFDTTTPFAAVVIALMGTVAQMELEAIKERNRSAAHFNIRAGKYRGSLPPWGYLPTRVDGEWRLVPDPVQRERILEVYHRVVDNHESLHLVAHDLNRRGVLSPKDYFAQLRGREPQGRKWSATALKRSMISEAMLGYATLNGKTVRDDDGAPLVRAEPILTREQLGALRAELVKTSRAKPAVSTPSLLLRVLFCAVCGEPAYKFAGGGRKHPRYRCRSMGFPKHCGNGTVAMAEWDAFCEEQVLDLLGDAERLEKVWVAGSDSAVELAEVSAELVDLTGLIGSPAYRAGSPQREALDARIAALAARQEELEGLEVRPSGWEWRGTGQRFGDWWREQDTAAKNTWLRSMNIRLTFDVRGGLTRTIDFGDLQEYEQHLRLGSVVERLHTGMS

SEQ ID NO: 8907 - protein, 500 aa, synthetic construct
MRALVVIRLSRVTDATTSPERQLESCQQLCAQRGWDVVGVAEDLDVSGAVNPFDRKRRPNLARWLAFEEQPFDVIVAYRVDRLTRSVRHLQQLVRWAEDHKKLVVSATEAHFDTTTPFAAVVIALMGTVAQMELEAIKERIRSAVRFNIRAGKYRGSLPPWGYLPTRVDGEWRLVPDPVQRERILEVYHRVVDNREPLHLVAHDLNRRGVPSPKDYFAQLQGREPQGRKWSVTALKRSMISVAMLGYATLNGKTVRDDDGAPLVRAEPILTREQQEALRAELAKTSRAKPAVSTPSLLLRVLFCAVCGEPAYKLAGGGRKHPRYRCRSMGFPEHCGNGTVVMAEWDAFCEEQVLNLLGDAERLEKVWLAGSDSAVELAEVDAELVDLTSLVGSPAYRAGSPQREALDARIAALATRQEELEGLEARPSGWEWRKTGQRFGDWWREQGTAAKNTWLRSMNVRLTFDVRGGLTRTIDFGDLREYEQHLRLGSVVERIHTGMS

SEQ ID NO: 8908 - protein, 500 aa, synthetic construct
MRALVVIRLSRVTDATTSPERQLESCQQLCAQRGWDVVGVAEDLDVSGAVDPFDRKRRPNLARWLAFEEQPFDVIVAYRVDRLTRSVRHLQQLVHWAEDHKKLVVSATEAHFDTTTPFAAVVIALMGTVAQMELEAIKERIRSAVHFNIHAGKYRGSLPPWGYLPMRVDGEWRLVPDPVQRERILEVYHRVVDNHEPLHLVAHDLNRRGVLSPKDYFAQLRGREPQGRKWSATALKRSMTSVAMLGYATLNGKIVRDDDGAPLVRAEPILTREQQEALRAELVKTSRARPAVSTPSLLLRVLFCAVCGEPAYKFVGGGRKHPRYRCRSMGFPKHCGNGTVVMAEWDAFCEEQVLDLLGDAERLEKVWVAGSDSSVELAEVNAELVDLTSLIGSPAYRAGSPQREALDARIAALAARQEELEGLEARPSGWEWRETGQRFGDWWREQDTAAKNTWLRSMNVRLTFDVRGGLTRTIDFGELQEYEQHLRLGSVVERLHTGMS

SEQ ID NO: 8909 - protein, 500 aa, synthetic construct
MRALVVIRLSRVTDATTSPERQLASCQQLCAQRGWDVVGVAEDLDVSGAVDPFDRKRRPNLARWLAFEEQPFDVIVAYRVDRLTRSVRHLQRLVRWAEDHKKLVVSATEAHFDTTTPFAAVVIALMGTVAQMELEAIKERIRSAVHFNIRAGKYRGSLPPWGYLPTRVDGEWRLVPDPVQRERILEVYRRVVDNHEPLHLVAHDLNRRGVLSPKDYFAQLQGREPQGRKWSATALKRSMISGAMLGYATLSGKTVRGDDGAPLVRAEPILTREQQEALRAELAKTSRAKPAVSTPSLLLRVLFCAVCGEPAYKFVGGGRKHPRYRCRSMGFPKHCGNGTVVMAEWDAFCEEQVLNLLGDAERLEKVWVAGSDSAVELAEVNAELMDLTSLIGSPAYRAGSPQREALDARIAALVARQEELEGLEARPAGWEWRETGQRFGDWWREQDTAAKNTWLRSMNVRLTFDVRGGLTRTIDFGDLQEYEQHLRLGSVVERLHTGMS

SEQ ID NO: 8910 - protein, 500 aa, synthetic construct
MRALVVIRLSRATDATTSPERQLESCQQLCAQRGWDVVGVAEDLDVSGAVDPFDCKRRPNLARWLAFEEQPFDVVVAYRVDRLTRSTRHLQQLVHWAEDHKKLVVSATEAHFDTTTPFAAVVVALMGTVAQMELEAIKERNRSAAHFNIRAGKYRGSLPPWGYLPARVDGEWRLVPDPVQRERILEVYRRVVDNHEPLHLVAHDLNRRGVLSPKDYFAQLQGREPQGRKWSATALKRSMISEAMLGYATLNGKTVRDDDGAPLVRAEPILTREQLEALRAELVKTSRARPAVSTPSLLLRVLFCAVCGEPAYKFAGGGRKHPRYRCRSMGFPKHCGNGTVAMAEWDAFCEEQVLDLLGDAERLEKVWVAGSDSAVELAEVNAELVDLTSLIGSPAYRAGSPQREALDARIAALAARQEELEGLGARPSGWEWRGTGQRFGDWWREQDTAAKNTWLRSMNVRLTFDVRGGLTRTIDFGDLQECAQHLRLGSVAERLCTGMS

SEQ ID NO: 8911 - protein, 500 aa, synthetic construct
MRALVVIRLSRVTDATTSPERQLESCQQLCAQRGWDVVGVAEDLDVSGAVDPFDRKRRPNLARWLAFEEQPFDVIVAYRVDRLTRSVRHLQQLVHWAEDHKKLVVSATEAHFDTTTPFAAVVIALMGTVAQMELEAIKERNRSAAHFNIRAGKYRGSLPPWGYLPTRVDGEWRLAPDPVQRERILEVYHRVVDNHEPLHLVAHDLNRRGVLSPKDYFAQLRGREPQGREWSATALKRSMTSEAMLGYATLNGKTVRDDDGAPLVRAEPILTREQLEALRAELVKTSRVKPAVSTPSLLLRVLFCAVCGEPAYKFAGGGRKYPRYRCRSMGFPKHCGNGTVAMAEWDAFCEEQVLNLLGDAERLEEVWVAGSDPAVELAEVNAELVDLTSLIGSPAYRAGSPQREALEARIAALAARQEELEGLGARPPGWEWRETGQRFGDWWREQDTAAKNSWLRSMNVRLTFDVRGGLTRTIDFGDLQEYEQHLRLGSVVERLHTGKS

SEQ ID NO: 8912 - protein, 500 aa, synthetic construct
MRALVVIRLSRVTDATTSPERQLESCQQLCAQRGWDVVGVAEDLDVSGAVDPFDRKRRPNLARWLAFEEQPFDVIVAYRVDRLTRSTRHLQQLVHWAEDHKKLVVSATEAHFDTTTPFAAVVIALMGTVAQMELEAIKERNRSAAHFNIRAGKYRGSLPPWGYLPARVDGEWRLVPDPVQRERILEVYHRVVDNREPLHWVAHDLNRRGVLSPKDYFAQLQGREPQGRKWSATALKRSMISEAMLGYATLNGKTVRDDDGAPLVRAEPILTREQLEALRAELVKTSRAKPAVSTPSLLLRVLFCAVCGEPAYKFAGGGRKHPRYRCRSMGFPKHCGNGTVAMAEWDAFCEEQVLNLLGDAERLEKVRVAGSDSAVELAEVNAELVDLTSLIGSPAYRAGSPQREALDARIAALAARQEELEGLEARPSGWEWRETGQRFEDWWREQDTATKNTWLRSMNVRLTFDVRGGLTRTIDFGDLQEYEQHLRLGSMVECLRTGMS

SEQ ID NO: 8913 - protein, 500 aa, synthetic construct
MRALVVIRLSRVTDATTSPERQLGSCQQLCAQRGWDVVGVAEDLDVSGAVDPFDRKRRPNLARWLAFEEQPFDAIVAYRVDRLTRSIRHLQQLVRWAEDHKKLVVSATEAHFDTTTPFAAVVIALMGTVAQMELDAIKERIRSAMHFNIRAGKYRGSLPPWGYLPTRVDGEWRLAPDPVQRERILEVYHRVVDNHEPLHLVAHDLNRRGVLSPKDYFAQLRGREPRGRKWSATALKRSMISGAMLGYATLNGKTVRGDDGAPLVRAEPILTREQLEALRAELVKTSRAKPAVSTPSLLLRVLFCAVCGEPAYKFVGGGRKHPRYRCRSMGFPKHCGNGTVVMTEWDAFCEEQVLNLLGDAERLEKVWVAGSDSAVELAEVNAELVDLTSLIGSPAYRAGSPQREALDARIAALAARQEELEGLEARPSGWEWRGAGQRFGDWWREQDTAAKNTWLRSMNVRLTFDVRGGLARTIDFGDLREYEQHLRLGSVVERLHTGMP

SEQ ID NO: 8914 - protein, 500 aa, synthetic construct
MRALVVIRLSRVTDATTSPERQLESCQQLCAQRGWDVVGVAEDLDVSGAVDPFDRKRRPNLARWLAFEEQPFDVIVAYRVDRLTRSVRHLQQLVHWAEDHKKLVVSATEAHFDTTTPFAAVVIALMGTVAQMELEAIKERIRSATHFNIRAGKYRGSLPPWGYLPTRVDGEWRLAPDPVQRERILEVYHRVVDNHEPLHLVAHDLNRRGVLSPKDYFAQLRGREPRGRRWSATALKRSMTSVAMLGYATLNGKTVRDDDGAPLVRAEPILTREQLEALRAELVKTSRAKPAVSTPSLLLRVLFCAVCGEPAYKFVGGGRKHPRYRCRSMGFPKHCGNGTVVVADWDTFCEEQVLGLLGDAERLEKVWVAGSDSAVELAEVNAELVDLTSLIGSPAYRAGSPQREALDARIAALVARQEELEGLEARPSGWEWRETGQRFGDWWREQDTAAKNTWLRSMNVRLTFDVRGGLTRTIDFGDLQEYEQHLRLGSVVERLRTGVS

SEQ ID NO: 8915 - protein, 500 aa, synthetic construct
MRALVVIRLSRVTDATTSPERQLESCQQLCAQRGWDVVGVAEDLDVSGAVDPFDRKRRPNLARWLAFEEQPFDVIVAYRVDRLTRSTRHLQQLVHWAEDHKKLVVSATEAHFDTTTPFAAVVIALMGTVAQMELEAIKERNRSAAHFNIRAGKYRGSLPPWGYLPTRVDGEWRLVPDPVQRERILEVYHRVVDNHEPLHLVAHDLNRRGVLSPKDYFAQLQGREPQGRKWSATALKRSMISEAMLGYATLNGKTVRDDDGAPLVRAEPILTRGQLEALRAELVKTSRAKPAVSTPSLLLRVLFCAVCGEPAYKFAGGGRKHPRYRCRSMGFPKHCGNGTVVMAEWDAFCEEQVLDLLGDAERPEKVWVAGSDSAVELAEVNAELVDLTSLIGSPAYRAGSPQRGALDARIAALAARQEGLEGLEARPSGWEWRGTGQRFGDWWREQDTAAKNTWLRSMNVRLTFDVRGGLTRTIDFGDLQEYEQHLRLGSVVERLHTGMS

SEQ ID NO: 8916 - protein, 500 aa, synthetic construct
MRALVVIRLSRVTDGTTSPERQLESCQQLCAQRGWDVVGVAEDLDVSGAVDPFDRKRRPNLARWLAFEEQPFDVIVAYRVDRLTRSIRHLQQLVHWAEDHKKLVVSATEAHFDTTTPFAAVVIALMGTVAQMELEAIKERIRSAVRFNIRAGKYRGSLPPWGYLPTHVDGEWRLVPDPVQRERILEVYHRVVDNHEPLHLVAHDLNRRGVLSPKDYFAQLRGREPRGRKWSATALKRSMTSGAMLGYATLSGKTVRGDDGAPLVRAEPILTREQQEALRAELAKTSRAKPAVSTPSLLLRVLFCAVCGEPAYKFVGGGRKHPRYRCRSMGFPKHCGNGTVAMAEWDAFCEEQVLNLLGDAERLEKVWVAGSDSAVELAEVNAELVDLTSLIGSPAYRAGSPQREALDARIAALAARQEELEGLEARPPGWKWRETGQCFGDWWREQDTAAKNTWLRSMNVRLTFDVRGGLTRTIDFGDLQEYAQHLRLGSVVERLHTGMS

SEQ ID NO: 8917 - protein, 500 aa, synthetic construct
MRALVVIRLSRVTDATTSPERQLESCQQLCAQRGWDVVGVAEDLDVSGAVDPFDRKRRPNLARWLAFEEQPFDVIVAYRVDRLTRSTRHLQQLVHWAEDHKKLVASATEAHFDTTTPFAAVVIALMGTVAQMELEAIKERIRSAVHFNIRAGKYRGSLPPWGYLPTRVDGEWRLVPDPVQRERILEVYHRVVDNHEPLHLVAHDLNRRGVLSPKDYFAQLQGREPQGRKWSATALKRSMISVAMLGYATLNGRIVRDDDGAPLVRAEPILTRGQQEALRAELAKTSRAKPAVSTPSLLLRVLFCAVCGEPAYKFVGGGRKHPRYRCRSMGLPEHCGNGTVVMAEWDAFCEEQVLDLLGDAERPEKVWVAGSDSSVELAEVNAELVDLTSLIGSPAYRAGSPQREALDARIAALAARQEELEGLEARPSGWGWRETGQRFGDWWREQDTAAKNTWLRSMNVRLTFDARGGLTRTIDFGDLQEYEQHLRLGSVVERLHTGTP

SEQ ID NO: 8918 - protein, 500 aa, synthetic construct
MRALVVIRLSRVTDATTSPERQLESCQQLCAQRGWDVVGVAEDLDVSGAVDPFDRKRRPNLARWLAFEEQPFDVIVAYRVDRLTRSVRHLQELVHWAEDHKKLVVSATEAHFDTTTPFAAVVIALMGTVAQMELEAIKERNRSAAHFNIRAGKYRGSLPPWGYLPTRVDGEWRLVPDPVQRERILEVYRRVVDNHEPLHLVAHDLNRRGVLSPKDYFAQLQGREPQGRKWSATALKRSMTSVAMLGYATLNGRTVRDDDGAPLVRAEPILTREQLEALRAELAKTSRAKPAVSTPSLLLRVLFCGVCGEPAYKFAGGGRKHPRYRCRSMGSPKHCGNGTVAMAEWDAFCKEQVLDLLGDAERLEKVWVAGSDSAVELAEVNAELVDLTSLIGSPAYRTGSPQREALDARIAALAARQEELEGLEARPSGWEWRGTGQRFGDWWREQDTAAKNTWLRSMNVRLTFDVRGGLTRTIDLGDLQEYEQHLRLGSVVERLRTGMS

SEQ ID NO: 8919 - protein, 500 aa, synthetic construct
MRALVVIRLSRVTDATTSPERQLESCQQLCAQRGWDVVGVAEDLNVSGAVDPFDRKRRPNLARWLAFEEQPFDVIVAYRVDRLTRSIRHLQQLVHWAEDHKKLVVSATEAHFDTTTPFAAVVIALMGTVAQMELEAIKERNRSAAHFNIRAGKYRGSLPPWGYLPTRVDGEWRLVPDPVQRERILEVYHRVVDNHEPLHLVAHDLNRRGVLSPKDYFAQLQGREPQGRKWSATALKRSMISEAMLGYATLNGRIVRDDDGAPLVRAEPILTREQLEALRAELVKTPRAKPAVSTPSLLLRVLFCAVCGEPAYKFAGGGRKHPRYRCRSMGFSKHCGNGTVAMAEWDAFCEEQVLNLLGDAERLEKVWVAGSDSAVELAEVNAELVDLASSIGSPAYRAGSPQREALDARIAALAARQEELEGLEARPSGWEWRETGQRFGDWWREQDTAAKNTWLRSMNVRLTFDVRGGLTRTIDFGDLQEYEQHLRLGGVVERLDTGMS

SEQ ID NO: 8920 - protein, 500 aa, synthetic construct
MRALVVIRLSRVTDATTSPERQLESCQQLCAQRGWDIVGVAEDLDVSGAVDPFDRKRRPNLARWLAFEEQPFDVIVAYRVDRLTRSTRHLQQLVRWAEDHKKLVVSATEAHFDTTTPFAAVVIALMGTVAQMELEAIKERSRSAAHFNIRAGKYRGSLPPWGYLPMRVDGEWRLVPDPVQRERILEVYHRVVVNHEPLHLVAHDLNRRGVLSPKDYFAQLQGREPQGRKWSATALKRSMTSVAMLGYATLNGKIVRDDDGAPLVRAEPILTREQQGALRAELVKTSRAKPAVSTPSLLLRVLFCAVCGEPAYKFVGGGRKHPRYRCRSMGFPKHCGNGTVVMAEWDAFCEEQVLDLLGDAERLEKVWVAGSDSAVELAEVNAELVDLTSLIGSPAYRAGSPQREALDARIAALAARQEELEGLEARPSGWECRGTGQRFGDWWREQDTAAKNTWLRSMNIRLTFDVRGGLTRTIDFGDLQEYEQHLRLGSVVERSHTGMS

SEQ ID NO: 8921 - protein, 500 aa, synthetic construct
MRALVVIRLSRVTDATTSPKRQLESCQQLCAQRGWGVVGVAEDLDVSGAVDPFDRKRRPNLARWLAFEEQPFDVIVAYRVDRLTRSVRHLQQLVHWAEDHKKLVVSATEAHFDTTTPFAAVVIALMGTVAQMELEAIKERNRSAAHFNIRAGKYRGSLPPWGYLPTRVDGEWRLVPDPVQRERILEVYHRVVDNHEPLHLVAHDLNRRGVLSPKDYFAQLQGREPQGRKWSATALKRSMISGAMLGYATLNGKIVRDDDGAPLVRAEPILTREQQEALRAELAKTSRAKPAVSTPSLLLRVLFCAVCGEPAYKFVGGGRKHPRYRCRSMGFPKHCGNGTVVMTEWDAFCEEQVLDLLGDAERLEKVWLAGSDSAVELAEVDAELVDLTSLIGSPAYRAGSPQREALDARIAALAARQGELEGLGAHPSGWEWRGTGQRFGDWWREQDTAAKNTWLRSMNVRLTFDVRGGLTRTIDFGELQEYEQHLRSGSAVERLHAGMS

SEQ ID NO: 8922 - protein, 500 aa, synthetic construct
MRALVVIRLSRVTDATTSPERQLESCQQLCAQRGWNVVGVAEDLDVSGAVDPFDRKRRPNLARWLAFEEQPFDVIVAYRVDRLTRSVRHLQQLVHWAEDHKKLVVSATEAHFDTTTPFAAVVIALMGTVAQMELEAIKERSRSAAHFNIRAGKYRGSLPPWGYLPTRVNGEWRLAPDPVQRERILEVYRRVVDNHEPLHLVAHDLNRRGVLSPKDYFAQLRGRELQGRKWSATALKRSMISVAMLGYATLNGKIVRDDGGAPLVRAEPILTREQQEALRAELAKTSRAKPAVSTPSLLLRVLFCAVCGEPAYKFTGGGRKHPRYRCRSMGFPKHCGNGTVVMAEWDVFCEEQVLNLLGDAERLEKVWVAGSDSAVELAEVSAELVDLTSLIGSPAYRAGSPQREALDARIAALAARQEELEGLEARPSGWEWRETGQRFGDWWREQDTAAKNAWLRSMNVRLTFDARGGLTRTIDFGELQEYEQHLRLSSVAERLHTGTS

SEQ ID NO: 8923 - protein, 500 aa, synthetic construct
MRALVVIRLSRVTDATTSPERQLESCQQLCAQRGWDVVGVAEDLDVSGAVDPFDRKRRPNLARWLAFEEQPFDVIVAYRVDRLTRSTRHLQQLVHWAEDHKKLVVSATEAHFDTTTPFAAVVIALMGTVAQMELEAIKERNRSAAHFNIRAGKYRGSLPPWGYLPTRVDGEWRLVPDPVQRERILEVYHRVVDNHEPLHLVAHDLNRRGVLSPKDYFAQLRGREPQGRKWSATALKRSMISEAMLGYATLNGKTVRDDDGAPLVRAEPILSREQLGALRAELVKTSRAKPAVSTPSLLLRVLFCAVCGEPAYKFAGGGRKHPRYRCRSMGFPKHCGNGTVAMAEWDAFCEEQVLDLLGDAERLEKVWVAGSDSAVELAEVNAELVDLTSLIGSPAYRAGSPQREALDARIAALAARQEELEGSEARPSGWEWRETGQRFGDWWREQDTAAKNTWLRSMNVRLTFDVRGGLTRTIDFGELQECEQHLRLGSVVERLHTGMS

SEQ ID NO: 8924 - protein, 500 aa, synthetic construct
MRALVVIRLSRVTDATTSPERQLESCKQLCAQRGWDVVGVAEDLDVSGAVDPFDRKRRPNLARWLAFEEQPFDVIVAYRVDRLTRSVRHLQQLVHWAEDHKKLVVSATEAHFDTTTPFAAVVIALMGTVAQMELEAIKERNRSAAHFNIRAGKYRGSLPPWGYLPTRVDGEWRLAPDPVQRERILEVYHRVVDNHEPLHLVAHDLNRRGVLSPKDYFAQLQGREPQGRKWSATALKRSMISVAMLGYATLNGKTVRDDDGAPLVRAEPILTREQLEALRTELVKTSRAKPAVSTPSLLLRVLFCAVCGEPAYKFAGGGRKHPRYRCRSMGFPKHCGNGTVVMAEWDAFCEEQVLDLLGDAERLEKVWVAGSDSAVELAEVNAELVDLTSLIGSPAYRAGSPQREALDARIAALAARQEELEGLEARPPGWEWRETGQRFGDWWREQDTAAKNTWLRSMNVRLTFDVRGGLTRTIDFGDLQEYEQHLRLGSAVERLHTGMS

SEQ ID NO: 8925 - protein, 500 aa, synthetic construct
MRALVVIRLSRVTDATTSPERQLASCQQLCVQRGWDVVGVAEDLDVSGAVDPFDRKRRPNLARWLAFGEQPFDVIVAYRVDRLTRSIRHLQQLVHWAEDHKKLVVSATEAHFDTTTPFAAVVIALMGTVAQMELEAIKERIRSAVRFNIRAGRYRGSLPPWGYLPTRVDGEWRLVPDPVQRERILEVYHRVVDNHEPLHLVAHDLNRRGVLSPKDYFAQLRGREPQGRKWSATALKRSMTSVAMLGYATLNGKTVRGDDGAPLVRAEPILTREQQEALRAELAKTSRAKPAVSTPSLLLRVLFCAVCGEPAYKFVGGGRKHPRYRCRSTGLPKHCGNGTVVMAEWDVFCEEQVLSLLGDAERLERIWVAGSDSAVELAEVNAELVDLTSLIGSPSYRAGSPQREALDARIAALAARQEELEGLEARPSGWEWRGTGQRLGDWWREQDTAAKNTWLRSMNVRLTFDVRGGLTRTIDFGDLQEYERHLRLGSVVERLHTGTS

SEQ ID NO: 8926 - protein, 500 aa, synthetic construct
MRALVVIRLSRVTDATTSPERQLESCQQLCAQRGWDVVGVAEDLDVSGAVDPFDRKRRPNLARWLAFEEQPFDVIVAYRVDRLTRSTRHLQQLVHWAEDHKKLVVSATEAHFDTTTPFAAVVIALMGTVAQMELEAIKERNRSAAHFNIRAGKYRGSLPPWGYLPTRVDGEWRLVPDPVQRERILEVYHRVVDNHEPLHLVAHDLNRRGVLSPKDYFAQLRGREPQGRKWSATALKRSMTSEAMLGYATLNGKTVRDDDGAPLARAEPILTREQLEALRAVLVKTSRAKPAVSTPSLLLRVLFCAVCGEPAYKFAGGGRKHPRYRCRSMGFPKHCGNGTVAMAEWDAFCEEQVLDLLGDAERLEKVWVAGSDSAVELAEVNAELVDLASLIGSPAYRAGSPQREALDARIAALAARQEELEGLEARPSGWEWRETGQRFGDWWREQDTAAKNSWLRSMNVRLTFDVRGGPTRTIDFGDLREYEQHLRLGGVVKRLHTGMS

SEQ ID NO: 8927 - protein, 500 aa, synthetic construct
MRALVVIRLSRVTDATTSPERQLESCQQLCAQRGWDVVGVAEDLDVSGAVDPFDRKRRPNLARWLAFEEQPFDVIVAYRVDRLTRSTRHLQQLVHWAEDHEKLVVSATEAHFDTTTPFAAVVIALMGTVAQMELEAIKERNRSAAHFNIRAGKYRGSLPPWGYLPTRVDGEWRLVPDPVQRERILEVYHRVVDNHEPLHLVAHDLNRRGFLSPKDYFAQLQGREPQGRKWSATALKRSMISEAMLGYATLNGKTVRDDNGAPLVRAEPILTREQLEALRAELVKTSRAKPAVSTPSLLLRVLFCAVCGEPAYKFAGGGRKHPRYRCRSMGFPKHCGNGAVVMAEWDAFCEEQVLDLLGDAERLEKVWVAGSDSAAELAEVNAELVDLTSLIGSPAYRAGSPQREALDARIAALAARQEELEGLGARPSGWEWRETGQRFGDWWREQDTAAKNAWLRSMNVRLTFDVRGGLTRMIDFGDLQEYEQHLRLGSVVERLHTGMS

SEQ ID NO: 8928 - protein, 500 aa, synthetic construct
MRALVVIRLSRVTDATTSPERQLESCQQLCAQRGWDVVGVAEDLDVSGAVDPFDRKRRPNLARWLAFEERPFDVIVAYRVDRLTRSTRHLQQLVHWAEDHKKLVVSATEAHFDTTTPFAAVVIALMGTVAQMELEAIKERNRSAARFNIRAGKYRGSLPPWGYLPTRVDGEWRLAPDPVQRERILEVYHRVVDNHEPLHLVAHNLNRRGVLSPKDYFAQLRGREPQGRKWSATALKRSMISEAMLGYATLNGKTVRDDDGAPLVRAEPILTREQLEALRAELVKTSRAKPAVSTPSLLLRVLFCAVCGEPAYKFAGGGRKHPRYRCRSMGFPKHCGNGTVAMAEWDAFCEEQVLNLLGDAERLEKVWVAGSDSAVELAEVNAELVDLTSLISSPAYRAGSPQREALDARIAALAARQEELGGLEARPSGWEWRGTGQRFGDWWREQDTAAKNAWLRSMNVRLTFDARGGLTRTIDFGDLREYEQLSRLGSVVERLHTGMS

SEQ ID NO: 8929 - protein, 500 aa, synthetic construct
MRALVVIRLSRVTDATTSPERQLESCQQLCAQRGWDVVGVAEDLDVSGAVDPFDRKRRPNLARWLAFEEQPFDVIVAYRVDRLTRSVRHLQQLVHWAEDHKKLVVSATEAHFDTTTPFAAVVIALMGTVAQMELEAIKERNRSAAHFNIRAGKYRGSLPPWGYLPTRVDGEWRLVPDPVQRERILEVYHRVVDNHEPLHLVAHDLNRRGVLSPKDYFAQLQGREPQGRKWSATALKRSMLSKAMLGYATLNGKIVRDDDGAPLVRAEPILTREQLEALRAELVKTSRAKPAVSTPSLLLRVLFCAVCGEPAYKFAGGGRKHPRYRCRSMGFPKHCGNGTVAMAEWDAFCEEQVLDLLGDVERQEKVWVAGSDSAVELAEVNAELVDLTSLIGFPAYRAGSPQREALDARIAALAARQEELEGLEARPSGWEWRGTGQRFGDWWREQDTAAKNTWLRSMNVRLTFDVRGGLTRTIDFGDLQGFEQHLRLGNVVERLHTGMS

SEQ ID NO: 8930 - protein, 500 aa, synthetic construct
MRALVVIRLSRVTDATTSPERQLESCRQLCAQRGWDVVGVAEDLDVSGAVDPFDRKRRPNLARWLALEEQPFDVIVAYRVDRLTRSVRHLQQLVHWAEDHGKLVVSATEAHFDTTTPFAAVVIALMGTVAQMELEAIKERIRSAAHFNIRAGKYRGSLPPWGYLPARVDGEWRLVPDPVQRERILEVYHRVVDDHEPLHLVAYDLNRRGVLSPKDYFAQLQGREPQGRKWSATALKRSMISVAMLGYATLNGKIVRDDDGAPLVRAEPILTRGQQEALRAELAKTSRAKPAVSTPSLLLRVLFCAVCGEPAYKFIGGGRKHPRYRCRSMGFPKHCGNGTVAMAEWDAFCEEQVLDLLGDAERLEKVWVAGSDSAVELAEVNAELVDLTSLIGSPAYRAGSPQREALDARIAALAARQEELEGIETRPSGWEWRETGQRFGDWWREQDTAAKNTWLRSMNIRLTFDVRGGLTRTIDFGELQEYEQHLRLGSVAERLHTGMS

SEQ ID NO: 8931 - protein, 500 aa, synthetic construct
MRALVVIRLSRVTDATTSPERQLESCQQLCAQRGWDVVGVAEDLDVSGAVDPFDRKRRPNLARWLAFEEQPFDVIVAYRVDRLTRSTRHLQQLVHWAEDHKKLVVSATEAHFDTTTPFAAVVIALMGTVAQMELEAIKERNRSAAHFNIRAGKYRGSLPPWGYLPTRVDGEWRLVPDPVQRERILEVYHRVVDNHEPLHLVAHDLNRRGVLSPKDYFAQLRGREPQGRKWSATALKRSMTSEAMLGCATLNGKTVRDDDGAPLVRAEPILTREQLEALRAELVKTSRAKPAVSTPSLLLRVLFCAVCGEPAYKFAGGGRKHPRYRCRSMGFPKHCGNGTVAMAEWDAFCEEQVLDLLGDAERLEKVRVAGSDSAVELAEVNAELVDLTSLIGSPVYRAGSPQREALDARIAALAARQEELEGLGARPSGWEWRGTGQRFGDWWREQDTAAKNTWLRSMNVRLTFDVRGGLTRTIDFGDLQEYEQHLRLGSVAERLHTGVS

SEQ ID NO: 8932 - protein, 500 aa, synthetic construct
MRALVVIRLSRVTDATTSPERQLESCQQLCAQRGWDVVGVAEDLDVSGAVDPFDRKRRPNLARWLAFEEQPFDVIVAYRVDRLTRSVRHLQQLVHWAEDHKKLVVSATEAHFDTTTPFAAVVIALMGTVAQMELEAIKERNRSAAHFNIRAGKYRGSLPPWGYLPTRVDGEWRLVPDPVQRERILEVYHRVVDNHEPLHLVAHDLNRRGVLSPKDYFAQLQGREPQGRKWSATALKRSMISKAMLGYATLNGRTVRDDDGAPLVRAEPILTREQLEALRAELAETSRAKPAVSTPSLLLRVLFCAVCGKPAYKFAGGGRKHPRYRCRSMGFPKHCGNGTVVMAEWDTFCEKQVLDLLGDAERLEKVWVAGSDSAVELAEVNAELVDLTSLIGSPAYRAGSPQREALDARIAALTARQEELEGLEARPSGWEWRGTGRRFGDWWREQDTAAKNTWLRSMNVRLTFDVRGGLTRTIDFGDLQEYEQHLRLGSVVERLHTGMS

SEQ ID NO: 8933 - protein, 500 aa, synthetic construct
MRALVVIRLSRVTDATTSPERQLESCQQLCAQRGWNVVGVAEDLDVSGAVDPFDRRRRPNLARWLAFEEQPFDAIVAYRVDRLTRSIRHLQQLVHWAEDHKKLVVSATEAHFDMTTPFAAVVIALMGTVAQMELEAIKERIRSATHFNIRAGKYRGSLPPWGYLPTRVDGEWRLVPDPVQRERILEVYHRVVDNHEPLHLVAHDLNRRGVLSPKDYFAQLQGREPQGRKWSATALKRSMISGAMLGYATLNGKTVRDDDGAPLVRAEPILTREQQEALRAELAKTSRAKPAVSTPSLLLRVLFCAVCGEPAYKFVGGGRKHPRYRCRSMGFPKHCGNGTVVMAEWDAFCEEQVLDLLGDAERLEKVWVAGSDSAVELAEVNAELVDLTSLIGSPAYRAGSPQREALDARIAALAARQEVLEGLEVRPSGWEWRETGQRFVDWWREQDTAAKNTWLRSMNVRLTFDVRGGLTRTIDFGDLREYEQHLRLGGVVERSNAGMS

SEQ ID NO: 8934 - protein, 500 aa, synthetic construct
MRALVVIRLSRVTDATTSPERQLESCQQLCAQRGWDVVGVAEDLDVSGAVDPFDRKRRPNLARWLAFEEQPFDVIVAYRVDRLTRSTRHLQQLVRWAEDHKKLVVSATEAHFDTTTPFAAVVIALMGTVAQMELEAIKERIRSAAQYNIRAGKYRGSLPPWGYLPARVDGEWRLVPDPVQRERILEVYHRVVDNHEPLHLVAHDLNRRGVLSPKDYFAQLQGREPQGRKWSATALKRSMISVAMLGYATLNGKIVRDDDGAPLVRAEPILTRGQQEALRAELAKTSRAKPAVSTPSLLLRVLFCAVCGEPAYKFAGGGRKHPRYRCRSMGFPKHCGNGTVVMTEWDAFCEEQVLDLLGDAERLEKVWVAGSDSSVELAEVNAELVDLTSLIGSPAYRAGSPQREALDARIAALAARQEKLEGLEARPSGWEWRGTGQRFGDWWREQDTAAKNTWLRSMNVRLTFDVRGGLTRAIDFGDLQEYKQHLRSGGVVERLHAGMS

SEQ ID NO: 8935 - protein, 500 aa, synthetic construct
MRALVVIRLSRVTDATTSPERQLESCRQLCAQRGWDVVGVAEDLDVSGAVDPFDRKRRPSLARWLAFEEQQFDVIVAYRVDRLTRSTRHLQQLVHWAEDHKKLVVSATEAHFDTTTPFAAVVIALMGTVAQMELEAIKERNRSAAHFNIRAGKYRGSLPPWGYLPTRVDGEWRLVPDPVQRERILEVYHRVVDNHEPLHWVAHDLNRRGVLSPKDYFAQLQGREPQGRKWSATALKRSMISEAMLGHATLNGKTVRGDDGAPLVRAEPILTREQLEALRAELVKTSRAKPAVSTPSLLLRVLFCAVCGEPAYKFAGGGRKHPRYRCRSMGFPKHCGNGTVAMAEWDAFCEERVLDLLGDAERLEKVWVAGSDSAVELAEVNAELVDLTSLIGSPAYRAGSPQREALDARIAALAARQEELEGLEARPSGWEWRETGQRFGDWWREQDTAAKNTWLRSMNVRLTFDVRGGLTRSIDFGDLQEYEQHLRLGSVVERLHTGMS

SEQ ID NO: 8936 - protein, 500 aa, synthetic construct
MRALVVIRLSRVTDATTSPERQLESCQQLCARRGWDVVGVAEDLGVSGAVNPFDHKRRPNLARWLAFEEQPFDVIVAYRVDRLTRSVRHLQQLVHWAEDHKKLVVSATEAHFDTTTPFAAVVIALMGTVAQMELEAIKERNRSAAHFNIRAGKYRGSLPPWGYLPARVDGEWRLVPDPVQRERILEVYHRVVDNHEPLHWVAHDLNRRGVLSPKDYFAQLQGREPQGRKWSATALKRSMISEAMLGYATLNGKTVRNDDGAPLVRAEPILTRGQLEALRAELVKTSRAKPAVSTPSLLLRVLFCAVCGEPAYKFAGGGRKHPRYRCRSMGFPKHCGNGTVVMAEWDAFCEEQVLDLLGDAERLEKVWVAGSDSADELAEVNAELVDLTSLIGSPAYRAGSPQREALDARIAALAARQEELEGLEARPSGWEWRETGQRFGDWWREQDTVAKNTWLRSMNVRLTFDVRGGLTRTIDFGDLQEYEQHLRLGSVVERLHTGMS

SEQ ID NO: 8937 - protein, 500 aa, synthetic construct
MRALVVIRLSRVTDATTSPERQLESCQQLCAQRGWDVVGVAEDLDVSGAVDPFDRKRRPNLARWLAFEEQPFDVIVAYRVDRLTRSTRHLQQLVHWAEDHKKLVVSATEAHFDTTTPFAAVVIALMGTVAQMELEAIKERNRSAAHFNIRAGKYRGSLPPWGYLPTRVDGEWRLAPDPVQRERILEVYHRVVDNREPLHLVAHDLNRRGVLSPKDYFAQLQGREPQGRKWSATALKRSMISEAMLGYATLNGKTVRDDDGAPLVRAEPILTREQLEALRAELVKTSRAKPAVSTPSLLLRVLFCAVCGEPAYKFAGGGRKHPRYRCRSMGFPKHCGNGTVVMVEWDAFCEEQVLDLLGDAERLEKVWVAGSDSAVELAEVNAELVDLTSLVGSPAYRAGSPQREALDARIAALAARQEELEGSEARPSGWEWRGTGQRFGDWWREQDTAAKNTWLRSMNVRLTFDVRGGLTRTIDFGDLQEYEQHLRLGGVVERLHTGMS

SEQ ID NO: 8938 - protein, 500 aa, synthetic construct
MRALVVIRLSRVTDATTSPERQLESCQQLCAQRGWDVVGVAEDLDVSGAVDPFDRKRRPNLARWLAFEEQPFDVIVAYRVDRLTRSTRHLQQLVRWAEDHKKLVVSATEAHFDTTTPFAAVVIALMGTVAQMELEAIKERIRSAAHFNIRAGKYRGSLPPWGYLPTRVDGEWRLVPDPVQRERILEVYHRVVINHESLHSVAHDLNRRGVLSPKDYFAQLQGRKPRGRKWSATALRRSMTSEAMLGYATLNGKTVRGGDGAPLVRAEPILTREQQEALRAELAKTSRTKPAVSTPSLLLRVLFCAVCGEPAYKFVGGGRKHPRYRCRSMGFPEHCGNGTVVMAEWDVFCEEQVLNLLGDVERLEKVWVAGSDSAVELAEVNAELVDLTSLIGSPAYRAGSPQREALDARIAALAARQEELEGLEARPSGWEWRGTGQRFGDWWREQDTAAKNTWLRSMNVRLTFDVRGGLTRTINFGDLQEYEQHLRSGSVVERLHTGMS

SEQ ID NO: 8939 - protein, 500 aa, synthetic construct
MRALVVIRLSRVTDATTSPERQLESCLQLCAQRGWDVVGVAEDLDVSGAVDPFDRKRRPNLARWLAFGEQPFDVIVAYRVDRLTRSTRHLQQLVRWAEDHKKLVVSATEAHFDTTTPFAAVVIALMGTVAQMELEAIKERIRSAAHFNIRAGKYRGSLPPWGYLPTRVDGEWRLVPDPVQRERILEVYHRVVDNHEPLHLVAHDLNRRGVLSPKDYFAQLQGREPQGRKWSATALKRSMTSEAMLGYATLNGKIVRDDDGAPLVRAEPILTRKQLEALRAELAKTSRAKPAVSTPSLLLRVLFCAVCGEPAYKFVGGGRKHPRYRCRSMGSPKHCGNGTVVVAEWDAFCEEQVLNLLGDAERLEKVWVAGSDSAVELAEVNAELVDLTSLIGSPAYRAGSPQREALDTRIAALAARQEELEGLEARPPGWEWRGTGQRFGDWWREQDTAAKNTWLRSMNVRLTFDVRGGLTRTIDFGDLQEYEQHLRLGNVVERLRTGMS

SEQ ID NO: 8940 - protein, 500 aa, synthetic construct
MRALVVIRLSRVTDATTSPERQLESCQQLCAQRGWDVVGVAEDLDVSGAVDPFDRKRRPNLARWLAFEEQPFDVIVAYRVDRLTRSTRHLQQLVHWAEDHRKLVVSATEAHFDTTTPFAAVVIALMGTVAQMELEAIKERIRSAAHFNIRAGKYRGSLPPWGYLPTRVDGEWRLAPDPVQRERILEVYHRVVDNHEPLHLVAHDLNRRGVLSPKDYFAQLRGREPRGRKWSATALRRSMTSVAMLGYATLNGKVVRDEDGAPLVRAEPILTREQQEALRAELAKTSRAKPAVSTPSLLLRVLFCAVCGEPAYKFVGGGRKHPRYRCRSMGFPEHCGNGTVVMAEWDAFCEEQVLNLLGDAERLEKVWVAGSDSAVELAEVNAELVDLTSLIGSPAYRAGSPQREALDARIAALAARQEELEGLEARPSGWEWRGTGQRLRDWWREQDTAAKNTWLRSMNVRLTFDVRGGLTRTIDFGDLQEYEQHLRLGSVAERLHTGMS

SEQ ID NO: 8941 - protein, 500 aa, synthetic construct
MRALVVIRLSRVTDATTSPERQLESCQQLCAQRGWDVVGVAEDLDVSGAVDPFDRKRRPNLARWLAFEEQPFDVIVAYRVDRLTRSTRHLQQLVRWAEDRKKLVVSATEAHFDTTSPFAAVVIALMGTVAQMELEAIKERIRSAAHFNIRAGKYRGSLPPWGYLPTRVDGEWRLVPDPVQRERIFEVYHRVVDNHEPLHLVAYDLNRRGVLSPKDYFAQLRGREPRGRKWSATALRRSMISGAMLGYATLNGKIVRDDDGAPLVRAEPILTREQQEALRAELAKTSRAKPAVSTPSLLLRVLFCAVCGEPAYKFAGGGRKHPRYRCRSMGFPKHCGNGTVAMAEWDAFCEEQVLNLLGDAERLEKVWLAGSDSAVELAEVNAELVDLTSLIGSPAYRAGSPQREALDARIAALAARQEELEGLEARPSGWEWRGTGQRFRDWWRKQDIAAKNTWLRSMNVRLTFDVRGGLTRAIDFGELQEYEQHLRLGSVAERLHAGMS

SEQ ID NO: 8942 - protein, 500 aa, synthetic construct
MRALVVIRLSRVTDATTSPERQLASCQQLCAQRGWDVVGVAEDLDVSGAVDPFDRKRRPNLARWLAFEEQPFDVIVAYRVDRLTRSVRHLQQLVRWAEDHKKLVVSATEAHFDTTTPFAAVVIALMGTVAQMELEAIKERIRSAVRFNIRAGKYRGSLPPWGYLPTRVDGEWRLVPDPVQRERILEVYHRVVDNHEPLHLVAHDLNRRGVLSPKDYFAQLQGREPQGRKWSATALKRSMISVAMLGYATLNGKTVRGDDGAPLVRAEPILTREQQEALRAELAKTSRAKPAVSTPSLLLRVLFCAVCGEPAYKFVGGGRKHPRYRCRSMGFPKHCGNGTVVMAEWDAFCEEQVLNLLGDAERLEKVWVAGSDSAVELAEVNAELVDLTSLLGSPAYRAGSPQREALDARIAALAARQEELEGLEARPSGWEWRGTGQRFGDWWREQGTAAKNTWLRSMNVRLTFDVRGGLTRAIDFGDLQEYKQHLRLGSVAERLRTGTS

SEQ ID NO: 8943 - protein, 500 aa, synthetic construct
MRALVVIRLSRVTDATTSPERQLESCQQLCAQRGWDVVGVAEDLDVSGAVNPFDRKRRPNLARWLAFEEQPFDVIVAYRVDRLTRSTRHLQQLVHWAEDHKKLVVSATEAHFDTTTPFAAVVIALMGTVAQMELEAIKERIRSAAHFNIRAGKYRGSLPPWGYLPTRVDGEWRLVPDPVQRERILEVYHRVVDNHEPLHLVAHDLNRRGVLSPKDYFAQLQGREPQGHKWSATALKRSMISVAMLGYATLNGKTVRDDVGAPLVRAEPILTREQQEALRAELAKTSRAKPAVSTPSLLLRVLFCAVCGEPAYKFVGGGRKHPRYRCRSMGSPKHCGNGTVVMAEWDTFCEEQVLGLLGDAERLEKVWVAGSDSTVELAEVNAELVDLTSLIGSPAYRAGSPQREALDARIAALAARQEELEGLETRPPGWEWRETGQRFGDWWREQDTAAKNTWLRSMNVRLTFDVRGGLTRTIDFGELQEYEQHLRLGSMVERLHTGMS

SEQ ID NO: 8944 - protein, 500 aa, synthetic construct
MRVLVVIRLSRVTDATTSPERQLESCQQLCAQRGWDVVGVAEDLDVSGAVDPFDRKRRPNLARWLAFEEQPFDVIVAYRVDRLTRSTRHLQQLVHWAEDHKKLVVSATEAHFDTTTPFAAVVIALMGTVAQMELEAIRERNRSAAHFNIRAGKYRGSLPPWGYLPTRVDGEWRLVPDPVQRERILEVYHRVVDSHEPLHLVAHDLNQRGVLSPKDYFAQLRGREPQGRKWSATALKRSMISEAMLGYATLNGKTVRDDDGAPLVRAEPILTREQLGALRAELVKTSRAKPAVSTPSLLLRVLFCAVCGEPAYKFAGGGRKHPRYRCRSMGFPKHCGNGTVVMAEWDAFCEEQVLDLLGDAERLEKVWVAGSDSAVELAEVNAELVDLTSLIGSPAYRAGSPQREALDARIAALAARQEELEGLEARPSGWEWRETGQRFGDWWREQDTAAKNTWLRSMNVRLTFDVRGGLTRTIDFGDLLEYEQHLRLGSVVERLHTGMS

SEQ ID NO: 8945 - protein, 500 aa, synthetic construct
MRALVVIRLSRVTDATTSPERQLESCQQLCAQRGWGVVGVAEDLDVSGAVDPFDRKRRPNLARWLAFEEQPFDAIVAYRVDRLTRSVRHLQQLVRWAEDHKKLVVSATEAHFDTTTPFAAVVIALMGTVAQMELEAIKERIRSAAHFNIRAGKYRGSLPPWGYLPTRVDGEWRLVPDPVQRERILEVYHRVVDNHEPLHLVAHDLNRRGVLSPKDYFAQLQGREPQGRKWSATALRRSMTSKAMLGYATLNGKTVRDDDGAPLVRAEPILTREQQEALRAELVKTSRAKPAVSTPSLLLRVLFCAVCGEPAYKFVGGGRKHPRYRCRSMGLPEHCGNGTVVMAEWDAFCEEQVLNLLGDAERLEKVWVAGSDSAAELAEVNTELVDLTSLIGSPAYRTGSPQREALGARIAALVARQEELEGLEARPSGWEWRETGQRFGDWWREQDTAAKNTWLRSMNVRLTFDVRGGLTRTIDFGDLQEYEQHLRLGSAVERLHTGML

SEQ ID NO: 8946 - protein, 500 aa, synthetic construct
MRALVVIRLSRVTDATTSPERQLESCQQLCAQRGWDVVGVAEDLDVSGAVDPFDRKRRPNLARWLAFEEQPFDVIVAYRVDRLTRSTRHLQQLVRWAEDHKKLVVSATEAHFDTTTPFAAVVIALMGTVAQMELEAIKERIRSATHFNIRAGKYRGSLPPWGYLPTRVDGEWRLVPDPVQRERILEVYHRVVDNHEPLHLVAYDLNRRGVLSPKDYFAQLQGREPQGREWSATALRRSMTSVAMLGYATLNGKTVRDDDGAPLVRAEPILTREQLEALRAELAKTSRAKPAVSTPSLLLRVLFCAVCGEPAYKFVGGGRKHPRYRCRSMGFPKHCGNGTVVMAEWDTFCEEQVLNLLGDAERLERVWVAGSDSAVELAEVNAELMDLTSSIGSPAYRAGSPQREALDARIAALAARQEELEGLGARPSGWEWRETGQRFRDWWREQNTAAKNTWLRSMNVRLTFDVRGGLTRTIDFGDLWEYEQHLRSGSVAERLYTGTS

SEQ ID NO: 8947 - protein, 500 aa, synthetic construct
MRALVVIRLSRVTDATTSPERQLESCQQLCAQRGWDVVGVAEDLDVSGAVDPFDRKRRPNLARWLAFEEQPFDVIVAYRVDRLTRSTRHLQQLVHWAEDHKKLVVSATEAHFDTTTPFAAVVTALMGTVAQMELEAIKERNRSAAHFNIRAGKYRGSLPPWGYLPARVDGEWRLVPDPVQRERILEVYRRVVDNHEPLHLVAHDLNRRGVLSPKDYFAQLQGREPQGRKWSATALKRSMISEAMLGYATLNGKTVRDDDGAPLVRAEPILTRKQLEALRAELVKTSRAKPAVSTPSLLLRVLFCAVCGEPAYKFAGGGRKHPRYRCRSMGFPKHCGNGTVVMAEWDAFCEEQVLNLLGDAERLEKVWVAGSDSAVELAEVNAELVDLTSLIGSPAYRAGSPQREALDARIAALAARQEELKGLGARPSGWEWRETGQRFGDWWREQDTAAKNTWLRSMNVRLTFDVRGGLTRTINFGDLQEYEQHLRLGSVVERLHTGMS

SEQ ID NO: 8948 - protein, 500 aa, synthetic construct
MRALVVIRLSRVTDATTSPERQLESCQQLCAQRGWDVVGVAEDLDVSGAVDPFDRKRRPSLARWLAFEEQPFDAIVAYRVDRLTRSVRHLQQLVRWAEDHKKLVVSATEAHFDTTTPFAAVVIALMGTVAQMELEAIKERIRSAVHFNIRAGKYRGSLPPWGYLPTRVDGEWRLVPDPVQRERILEVYHRVVDNHEPLHLVAHDLNRRGVLSPKDYFAQLQGREPRGRKWSATALKRSMISEAMLGYATLNGKTVRGDDGAPLVRAEPILTREQQGALRAELAKTSRAKPAVSTPSLLLRVLFCAVCGEPAYKFTGGGRKHPRYRCRSTGFPEHCGNGTVVMAEWDAFCEEQVLDLLGDAERLEKVWVAGSDSAVELAEVNAELVDLTSLIGSPAYRAGSPQREALDARIAALAARQEELKGLEARPSGWEWRETGQRFGDWWREQDTAARNTWLRSMNVRLTFDVRGGLTRTIDFGDLQEYEQHLRLGSVVERLHTGMS

SEQ ID NO: 8949 - protein, 500 aa, synthetic construct
MRALVVIRLSRVTDATTSPERQLESCQQFCAQRGWDVVGVAEDLDVSGAVDPFDRKRRPNLARWLAFEEQPFDVIVAYRVDRLTRSTRRLQQLVHWAEDHKKLVVSATEAHFDTTTPFAAVVIALMGTVAQMELEAIKERNRSAAHFNIRAGKYRGSLPPWGYLPARVDGEWRLVPDPVQRERILEVYHRVVDNHEPLHLVAHDLNRRGVLSPKDYFAQLQGREPQGREWSATALKRSMISEAMLGYATLDGKTVRDDDGAPLVRAEPILTREQLEAVRAELVKTSRAKPAVSTPSLLLRVLFCAVCGEPAYKFAGGGRKHPRYRCRSMGFPKHCGNGTVVMAEWDAFCEEQVLDLLGDAERLEKVWVAGSDSAVELAEVNAELVDLTSLIGSPAYRAGSPQREALDARIAALAARQEELEGLGTRPSGWEWRETGQRFGDWWREQDTAAKNTWLRSMNVRLTFDARGGLTRTIDFGDLQEYEQHIRLGGVVERLHTGMS

SEQ ID NO: 8950 - protein, 500 aa, synthetic construct
MRALVVIRLSRVTDATTSPERQLESCQQLCAQRGWDVIGVAEDLDVSGAVDPFDRKRRPNLARWLAFEEQPFDVIVAYRVDRLTRSTRHLQQLVHWAEDHKKLVVSATEAHFDTTTPFAAVVIALMGTVAQMELEAIKERNRSAAHFNVRAGKYRGSLPPWGYLPTRVDGEWRLVPDPVQRERILEVYHRVVDHHEPLHLVAHDLNRRGVLSPKDYFAQLQGREPQGRKWSATALKRSMISEAMLGYATLNGKTVRDDDGAPLVRAEPILTREQLEALRAELVKTSRAKPAVSTPSLLLRVLFCAVCGEPAYKFAGGGRKHPRYRCRSMGFPKHCGNGTVVMAEWDAFCEEQVLDLLGDAECLEKVWVAGSDSAVELAEVNAELVDLTSLIGSPAYRAGSPQREALDARIAALAARQEELEGLGARPSGWEWRETGQRFGDWWREQDTAAKNTWLRSMNVRLTFDVRGGLARTIDFGDLQEYEQHLRLGSVVQRLHTGMS

SEQ ID NO: 8951 - protein, 500 aa, synthetic construct
MRALVVVRLSRVTDATTSPERQLESCQQLCAQRGWDVVGVAEDLDVSGAVNPFDRKRRPNLARWLAFEEQPFDAIVAYRVDRLTRSTRHLQQLVHWAEDHKKLVVSATEAHFDTTTPFAAVVIALMGTVAQMELEAIKERIRSAVHFNIRAGKYRGSLPPWGYLPTRVDGEWRLVPDPVQRERILEVYHRVVDSHEPLYLVAHDLNRRGVLSPKDYFAQLQGREPRGRKWSATALRRSMISVAMLGYATLNGKTVCDDDGAPLVRAEPILTREQLEALRAELAKTSRAKPAVSTPSLLLRVLFCAVCGEPAYKFAGGGRKHPRYRCRSMGFPKHCGNGTVVMTEWDAFCEEQVLDLLGDAERLEKVWVAGSDSTIELAEVNAELVDLTSLIGSPAYRAGSPQREALDARIAALAARQEELEGLEARPSGWEWRGTGQRFGDWWREQDTAAKNTWLRAMNVRLTFDVRGGLTRTIDFGDLQEYEQHLRLGSAVERLHAGMS

SEQ ID NO: 8952 - protein, 500 aa, synthetic construct
MRALVVIRLSRVTDATTSPERQLESCRQLCAQRGWDVVGVAEDLDVSGAVDPFDRKRRPNLARWLAFEEQPFDVIVAYRVDRLTRSVRYLQQLVHWAEDHKKLVVSATEAHFDTTTPFAAVVIALMGTVAQMELEAIKERNRSAAHFSIRAGKYRGSLPPWGYLPTRVDGEWRLVPDPVQHERILEVYHRVVNNHEPLHLVAHDLNRRGVLSPKDYFAQLQGREPQGRKWSATALKRSMTSEAMLGYATLNGKTVRDDDGAPLVRAEPILTRGQLEALRAELVKTSRAKPAVSTPSLLLRVLFCAVCGEPAYKFAGGGRKHPRYRCRSMGFPKHCGNGTVVMAEWDAFCEEQVLDLLGDTERLEKVWVAGSDSAVELAEVNAELADLTSLIGSPAYRAGSPQREVLDARIAALAARQEELEGLGARPSGWEWREAGQRFGDWWREQDTAAKNTWLRSMNVRLTFDVRGGLTRTIDLGDLQGYEQHLRLGSVVERLHTGMS

SEQ ID NO: 8953 - protein, 500 aa, synthetic construct
MRALVVIRLSRVTDATTSPERQLESCQQLCAQRGWDVVGVAKDLDVSGAVDPFDRKRRPNLARWLAFEEQPFDVIVAYRVDRLTRSTRHLQQLVHWAEDHKKLVVSATEAHFDTTTPFAAVVIALMGTVAQMELEAIKERIRSAVRFNIRAGKYRGSLPPWGYLPARVNGEWRLVPDPVQRERILEVYHRVVDNHEPLHLVAYDLNRRGVLSPKDYFAQLQGREPRGRKWSATALKRSMTSEAMLGYATLNGKIVRDDDGAPLVRAEPILTREQLEALRAELVKTSLAKPAVSTPSLLLRVLFCAVCGEPAYKFVGGGRKHPRYRCRSMGFPKHCGNGTVVMTEWDAFCEEQVLDLLGDAERLEKVWVAGSDSAVELAEVNAELMDLTSSIGSPAYRAGSPQREALDARIAALAARQEVLEGLEARPSGWEWRETGQRFGDWWREQDTAAKNTWLRSMNVRLTFDVRGGLTRTIDFGELREYEQHLRLGSVVERLRTGMS

SEQ ID NO: 8954 - protein, 500 aa, synthetic construct
MRALVVIRLSRVTDATTSPERQLESCQQLCAQRGWDVVGVAEDLDVSGAVDPFDRKRRPNLARWLAFEEQPFDVVVAYRVDRLTRSVRYLQQLVHWAEDHKKLVVSATEAHFDTTTPFAAVVIALMGTVAQMELEAIKERNRSAAHFNIRAGKYRGSLPPWGYLPTRVDGEWRLVPDPVQRERILEVYHRVVDNHEPLHLVAHDLNRRGVLSPKDYFAQLQGREPQGRKWSATALKRSMISEAMLGYATLNGKTVRDDDGAPLVRAEPILTREQLEALRAELVKTSRAKPAVSTPSLLLRVLFCAVCGEPAYKFAGGGRKHPRYRCRSMGFPKHCGNGTVVMAEWDAFCEEQVLDLLGDTERLEKVWVAGSDSAVELAEVNAELADLTSLIGSPAYRAGSPQREALDARIAALAARQEELEGLGARPSGWEWRETGQRLGDWWREQDTAAKNTWLRSMNVRLTFDVRGGLTRTIDFGELQEYEQHLRIGSVVERLHTGMS

SEQ ID NO: 8955 - protein, 500 aa, synthetic construct
MRALVVIRLSRVTDATTSPERQLESCHQLCAQRGWDVVGVAEDLDVSGAVDPFDRKRRPNLARWLAFMEQPFDVIVAYRVDRLTRSVRHLQQLVHWAEDHKKLVVSATEAHFDTTTPFAAVVIALMGTVAQMELEAIKERIRSAVRFNIRAGKYRGSLPPWGYLPARVDGEWRLAPDPTQRERILEVYHRVVDNHEPLHLVAHDLNRRGILSPKDYFAQLRGREPRGRKWSATALKRSMTSVAMLGYATLNGKTVRDDDGAPLVRAEPILTREQLEALRAELVKTSRAKPAVSTPSLLLRVLFCAVCGEPAYKFVGGGRKHPRYRCRSMGFPKHCGNGTVVMAEWDAFCERQVLGLLGDAERLEKVWVAGSDSAVELAEVNAELVDLMSLIGSPAYRAGSPQREALDARIAALAARQEELEGLEARPSGWEWRKTGQRFGDWWREQDTAAKNTWLRSMNVRLTFDVRGGLTRTIDFGELQEYEQHLRLGNVAERLHTGMS

SEQ ID NO: 8956 - protein, 500 aa, synthetic construct
MRALVVIRLSRVTDATTSPERQLESCRQLCAQRGWDVVGVAEDLDVSGAVDPFDRKRRPNLARWLAFEEQPFDVIVAYRVDRLTRSTRHLQQLVHWAEDHKKLVVSATEAHFDTTTPFAAVVIALMGTVAQMELEAIKERNRSAAHFNIRAGKYRGSLPPWGYLPTRVDGEWRLAPDPVQRERILEVYHRVVDNHEPLHLVAHDLNRRGVLSPKDYFARLQGREPRGRKWSATALKRSMISEAMLGYATLNGKTVRDDDGAPLVRAEPILTREQLEALRAELVKASRAKPAVSTPSLLLRVLFCAVCGEPAYKFAGGGRKHPRYRCRSMGFPKHCGNGTVVMAEWDAFCEEQVLDLLGDAERLERVWVAGSDSAVELAEVNAELVDLTSLIGSPAYRAGSPQREALDARIAALAARQEELEGLEARPSGWEWRETGQRFGDWWREQDTAAKNTWLRSMNVRLTFDVRGELTRTIDFGDLQEYEQQLRLGSVVERLHDGMS

SEQ ID NO: 8957 - protein, 500 aa, synthetic construct
MRALVVIRLSRVTEATTSPERQLESCQQLCAQRGWDVVGVAEDLDVSGAVDPFDRKRRPNLARWLAFEEQPFDVIVAYRVDRLTRSVRHLQQLVHWAEDHKKLVVSATEAHFDTTTPFAAVVIALMGTVAQMELEAIKERIRSAAHFNIRAGKYRGSLPPWGYLPTRVDGEWRLVPDPVQRERILEVYHRVVDNHEPLHSVAHDLNRRGVLSPKDYFAQLRGREPQGRKWSATALKRSMTSVAMLGYATLNGRIVRDDDGAPLVRAEPILTREQLEALRAELAKTSRAKPAVSTPSLLLRVLFCAVCGEPAYKFVGGGRKHPRYRCRSMGFPKHCGNGTVVMAEWDAFCEEQVLDLLGDAERLEKVWVAGSDSAVELAEVNAELVDLTSLIGSPAYRVGSPQREALDARIAALAARQEELEGLEARPSGWEWRETGQRFGDWWREQDTAAKNTWLRSMNVRLTFDARGGLTRTIDFGDLQEYGQHLRLGSVVERLHTGMS

SEQ ID NO: 8958 - protein, 500 aa, synthetic construct
MRALVVIRLSRVTDATTSPERQLESCRQLCAQRGWDVVGVAEDLDVSGAVNPFDRKRRPNLARWLAFEEQPFDVIVAHRVDRLTRSVRYLQQLVHWAEDHKKLVVSATEAHFDTTTPFAAVVIALMGTVAQMELEAIKERNRSAAHFNIRAGKYRGSLPPWGYLPTRVDGEWRLVPDPVQRERILEVYHRVVDNHEPLHLVAHDLNRRGVLSPKDYFAQLQGREPQGRKWSATALKRSMISEAMLGYATLNGKTVRDDDGAPLVRAEPILTREQQEALRAELVKTSRVKPAVSTPSLLLRVLFCAVCGEPAYKFAGGGRKHPRYRCRSMGFPKHCGNGTVAMAEWDAFCEEQVLDLLGDAERLEKVWVAGSDSAVELAEVNAELVDLTSLIGSPAYRAGSPQREALDARIAALAARQEELEGLEARPSGWEWRETGQRFGDWWREQDTAAKNTWLRSMNVRLTFDARGGLTRTIDFGGLQEYEQHLRLGSVVERLHTGMS

SEQ ID NO: 8959 - protein, 500 aa, synthetic construct
MRALVVIRLSRVTDATTSPERQLESCQRLCAQRGWDVVGVAEDLDVSGAVDPFDRKRRPNLARWLAFEEQPFDVIVAYRVDRLTRSVRHLQQLVHWAEDHKKLVVSATEAHFDTTTPFAAVVIALMGTVAQMELEAIKERNRSAAHFNIRAGKYRGSLPPWGYLPTRVDGEWRLMPDPVQRERILEVYHRVVDNHEPLYLVAHDLNRRGVLSPKDYFARLQGREPQDRKWSATALKRSMTSEAMLGYATLNGKTVRNDDGAPLVRAEPILTRDQLEALRAELVKTSRAKPAVSTPSLLLRVLYCAVCGEPAYKFAGGGRKHPRYRCRSMGFPKHCGNGTVVMAEWDAFCEEQVLDLLGDAERLEKVWVVGSDSAVELAEVNAELVDLTSLIGSPAYRTGSPQREAIDARIAALAARQEELEGLEARPSGWEWRETGQRFGDWWREQDTAAKNAWLRSMNVRLTFDVRGGLTRTIDFGDLQEYEQRLRLGSVVGRLHTGMS

SEQ ID NO: 8960 - protein, 500 aa, synthetic construct
MRALVVIRLSRVTEATTSPERQLESCQQLCAQRGWDVVGVAEDLDVSGAVDPFDRKRRPNLARWLAFEEQPFDVIVAYRVDRLTRSTRHLQQLVRWAEDHKKLVVSATEAHFDTTTPFAAVVIALMGTVAQMELEAIRERIRSAAHFNIRAGKYRGSLPPWGYLPTRVEGEWRLVPDPVQRERILEVYHRVVDNHEPLHLVAHDLNRRGVLSPKDYFAQLQGREPQGREWSATALKRSMTSAAMLGYATLNGKIVRDDDGAPLVRAEPILTREQQEALRAELAKTSRTKPAVSTPSLLLRVLFCAVCGEPAYKFVGGGRKHPRYRCRSTGSPKHCGNGTVVMAEWDAFCEEQVLDLLGDAERLEKVWVAGSDSAVELAEVNAELVDLTSLIGSPAYRAGSPQRKALDTRIAALAARQEELESLEARPSGWEWRGTGQRLGDWWREQNTAAKNTWLRSMNVRLTFDVRGGLTRTIDFGDLREYEQHLRLGSVVERLHTGTS

SEQ ID NO: 8961 - protein, 500 aa, synthetic construct
MRALVVIRLSRVTDATTSPERQLESCQQLCAQRGWDVVGVAEDLNVSGAVDPFDRKRRPNLARWLAFEEQPFDVIVAYRVDRLTRSIRHLQQLVHWAEDHKKLVVSATEAHFDTTTPFAAVVIALMGTVAQMELEAIKERNRSAAHFNIRAGKYRGSLPPWGYLPTRVDGEWRLVPDPVQRERILEVYHRVVDNHEPLHWVAHDLNRRGVLSPKDYFAQLQGREPQGRKWSATALKRSMISEAMLGYATLNGKTVRDDDGAPLVRAEPILTREQLESLRAELVKTSRAKPAVSTPSLLLRVLFCAVCGEPAYKFAGGGRKYPRYRCRSMGFPKHCGNGTVAMAEWDAFCEEQVLGLLGDAERLEKVWVAGSDSAVELAEVNAELVDLTSLIGSPAYRAGSPQREALDARIAALAARQEELEGLGARPSGWEWRETGQRFGDWWREQDTAAKNTWLRSMNVRLTFDVRGGLTRTIDFGDLREYGQHLRLGSGVERLRTGMS

SEQ ID NO: 8962 - protein, 500 aa, synthetic construct
MRALVVIRLSRVTDATTSPERQLESCQQLCAQRGWDVVGVAEDLDVSGAVDPFDRKRRPNLARWLAFEEQPFDVIVAYRVDRLTRSTRHLQQLVHWAEDHKKLVVSATEAHFDTTTPFAAVVIALMGTVAQMELEAIKERIRSAVRFNIRAGKYRGSLPPWGYLPTRVDGEWRLVPDPVQRERILEVYHRVVDNHEPLHLVAHDLNRRGVLSPKDYFAQLRGREPQGRKWSATALKRSMISVAMLGYATLKGKIVRDDDGAPLVRAEPILTRGQLEALRAELAKTSRAKPAVSTPSLLLRVLFCAVCGEPAYKFVGGGRKHPRYRCRSMGFPKHCGNGTVTMAEWDAFCEEQVLDLLGDAERLEKVWVAGSDSAVELAEVNAELMDLTSLIGSPAYRAGSPQREALDARIAALAARQEELEGLEARPSGWEWRETGQRFGDWWREQDTAAKNTWLRSMGVRLTFDVRGGLTRTIDFGDLQGYEQHLRSGSVAERLHTGVS

SEQ ID NO: 8963 - protein, 500 aa, synthetic construct
MRALVVIRLSRVTDATTSPERQLESCQQLCAQRGWDVVGVAEDLDVSGAVDPFDRKRRPNLARWLAFEEQPFDVIVAYRVDRLTRSTRHLQQLVHWAEDHKKLVVSATEAHFDTTTPFAAVVIALMGTVAQMELEAIKERNRSAAHFNIRAGKYRGSLPPWGYLPTRVDGEWRLVPDPVQRERILEVYHRVVDNHEPLHLVAHDLNRRGVLSPKDYFAQLQGREPQGRKWSATALKRSMTSVAMLGYVTLNGKTVRDDDGAPLVRAEPILTREQLEALRAELVKTSRAKPAVSTPSLLLRVLFCAVCGEPAYKFAGGGRKHPRYRCRSMGFPKHCGNGTVVMAEWDAFCEEQVLDLLGDAERLEKVWAAGSDSAVELAEVNAELVDLTSLIGSPAYRAGSPQREALDARIAALAARQEELESLEARPSGWEWRETGQRFGDWWREQDTAARNTWLRSMNVRLTFDVRGGLTRTIDFGDLQEYEQQLRLGSVVERLHAGMS

SEQ ID NO: 8964 - protein, 500 aa, synthetic construct
MRALVVIRLSRVTDATTSPERQLESCQQLCAQRGWDVVGVAEDLDVSGAVDPFDRKRRPNLARWLAFEEQPFDVIVAYRVDRLTRSTRHLQQLVRWAEDHKKLVVSATEAHFDTTTPFAAVVIALMGTVAQMELEAIKERIRSAVHFNIRAGKYRGSLPPWGYLPTRVDGEWRLVPDPVQRERILEVYHRVVDNHEPLHLVAHDLNRRGVLSPKDYFAQLQGREPQGRKWSATALRRSMTSEAMLGYATLNGKTVRDDDGAPLVRAEPILTREQQGALRAELAKTSRAKPAVSTPSLLLRVLFCAVCGEPAYKFTGGGRKHPRYRCRSMVFPKHCGNGTVVMAEWDAFCEEQVLDLLGDAERLEKVWVVGSDSVVELAEVNAELVDLTSLIGSPAYRAGSPQREALDARIAALAARQEELEGLEARPSGWEWRETGQRFGDWWREQDTAAKNAWLRSMNVRLTFDVRGELTRTIDFGDLQEYEQHLHSGSVVERLHTGMS

SEQ ID NO: 8965 - protein, 500 aa, synthetic construct
MRALVVIRLSRVTDATTSPERQLESCQQLCAQRGWDVVGVAEDLDVSGAVDPFDRKRRPNLARWLAFEEQPFDVIVAYRVDRLTRSTRHLQQLVHWAEDHKKLVVSATEAHFDTTTPFAAVVIALMGTVAQMELEAIKERNRSAVHFNIRAGKYRGSLPPWGYLPTRVDGEWRLVPDPVQRERILEVYRRVVDNHEPLHLVAHDLNRRGVLSPKDYFAQLRGREPQGRKWSATALKRSMISEAMLGYATLNGKTVRDEDGAPLVRAEPILTREQLEALRAELVKTSRAKPAVSTPSLLLRVLFCAVCGEPAYKFAGGGRKHPRYRCRSMGFPKHCGNGTVVMAEWDAFCEEQVLNLLGDAERLEKVWVAGSDSAVELAVVNAELVDLTSLIGSPAYRAGSPQREALDARIAALAARQEELEGLGARPSGWEWRETGQRFGDWWREQDTAAKNTWLRSMNVRLTFDVRGGLTRTIDFGDLQEYEQHLRLGSVVERLHTGMS

SEQ ID NO: 8966 - protein, 500 aa, synthetic construct
MRALVVIRLSRVTDATTSPERQLESCQQLCAQRGWDVVGVAEDLDVSGAVDPFDRKRRPNLARWLAFEEQPFDVIVSYRVDRLTRSTRHLQQLVHWAEDHKKLVVSATEAHFDTTTPFAAVVIALMGTVAQMELEAIKERNRSAAHFNIRAGKYRGSLPPWGYLPARVDGEWRLAPDPVQRERILEVYHRVVDNHEPLHLVAHDLNRRGVLSPKDYFAQLQGREPQGRKWSATALKRSMISVAMLGYATLNGKIVRDDDGAPLERAEPILTREQLEALRAELVKTSRAKPAVSTPSLLLRVLFCAVCGEPAYKFAGGGRKHPRYRCRSMGFPKHCGNGTVAMAEWDAFCEEQVLGLLGDAERLEKVWVAGSDTAAELAEVNAELVDLTSLIGSPAYRAGSLQREALDARIAALAARQEELEGLEARPSGWEWRGTGQHFRDWWREQDTAAKNTWLRSMNVRLTFDARGGLIRTIDLGDLQEYEQHLRLGSVVERLHSGMS

SEQ ID NO: 8967 - protein, 500 aa, synthetic construct
MRALVVIRLSRVTDATTSPERQLESCQQLCAQRGWDVVGVAEDLDVSGAVDPFDRKCRPNLARWLAFEEQPFDVIVAYRVDRLTRSTRHLQQLVHWAEDHKKLVVSATEAHFDTTTPFAAVVIALMGTVAQMELEAIKERNRSAAHYNIRAGKYRGSLPPWGYLPTRVDGEWRLAPDPVQRERILEVYHRVVDDHEPLHLVAHDLNRRGVLSPKDYFAQLQGREPQGRKWSATAIKRSMISVAMLGYATLNGKTVRDDDGAPLVRAEPILTREQLEALRAELVKTSRTKPAVSTPSLLLRVLFCAVCGEPAYKFAGGGRKHPRYRCRSMGFPKHCGNGTVAMAEWDAFCEEQVLDLLGDAEHLEKVWVTGSDSAAELAEVNAELVDLTSLIGSPAYRAGSPQREALDARIAALAARQEELEGLEARPSGWEWRETGQRFGDWWREQDTAAKNTWLRSMNVRLTFDVRGGLTRTIDFGVLQEYVQHLRLGSVVERLHTGMS

SEQ ID NO: 8968 - protein, 500 aa, synthetic construct
MRALVVIRLSRVTDATTSPERQLESCRQLCAQRGWDVVGVAEDLDVSGAVDPFDRKRRPNLARWLAFEEQPFDAIVAYRVDRLTRSIRHLQQLVHWAEDHKKLVVSATEAHFDTTTPFAAVVIALMGTVAQMELEAIKERIRSAVHFNIRAGKYRGSLPPWGYLPTRVDGEWRLVPDPVQRERILEVYRRVVDNHEPLHLVAHDLNRRGVLSPKDYFAQLRGREPQGRKWSATALRRSMTSVAMLGYATLNGKIVRDDAGAPLVRAEPILTREQQEALRAELAKTSRAKPAVPTPSLLLRVLFCAVCGEPAYKFVGGGRKHPRYRCRSMGFPEHCGNGTVVMAEWDAFCEEQVLDLLGDAERLEKVWVAGSDSVVELAEVNAELVDLTSLIGSPAYRAGSPQREALDTRIAALAARQGELEGLEARPSGWEWRETGQRFGDWWREQDTAAKNTWLRAMNVRLTFDVRGGLTRTIDFGDLQEYERHLRLGSVIERLRTGMS

SEQ ID NO: 8969 - protein, 500 aa, synthetic construct
MRALVVIRLSRVTDATTSPERQLESCQRLCAQRGWDVVGVAEDLDVSGAVDPFDRKRRPNLARWLAFEQQPFDAIVAYRVDRLTRSTRHLQQLVRWAEDHKKLVVSATEAHFDTTTPFAAVVIALMGTVAQMELEAIKERIRSAAHFNIRAGKYRGSLPPWGYLPTRVDGEWRLVPDPVQRERILEVYHRVVDSHEPLHLVAHDLNRRGVLSPKDYFAQLRGREPQGRRWSATALKRSMTSVAMLGYATLNGKTVRDDDGAPLVRTEPILTREQQEALRAEIAKTSRAKPAVSTPSLLLRVLFCAVCGEPAYKFVGGGRKHPRYRCRSMGFPEHCGNGTVVMAEWDAFCEEQVLDLLGDAERLEKVWVAGSDFTVELAEVNAELVDLTSLIGSPAYRAGSPQREALDARIAALAARQEELEGLEARPSGWEWRATGQRFGDWWREQDTAAKNTWLRSMNVRLTFDVRGGLTRTIDFGDLREYEQHLRLGSVVERLHTGMS

SEQ ID NO: 8970 - protein, 500 aa, synthetic construct
MRALVVIRLSRVTDATTSPERQLESCQQLCAQRGWDVVGVAEDLDVSGAVDPFDRKRRPNLARWLAFEEQPFDAIVAHRVDRLTRSVRHLQQLVHWAEDHKKLVVSATEAHLDTTTPFAAVVIALMGTVAQMELEAIKERIRSAVRFNIRAGKYRGSLPPWGYLPTRVDGEWRLVPDPVQRERILEVYHRVVDNHEPLHLVAHDLNRRGVLSPKDYFAQLRGREPQGRKWSATALKRSMTSVAMLGYATLNGKIVRDDDGAPLVRAEPILTREQLEALRAELGKTSRAKPAVSTPSLLLRVLFCAVCGEPAYKFVGGGRKHPRYRCRSMGFPKHCGNGTVVMAEWDAFCEEQVLNLLGDAERLEKVWVAGSDSAIELAEVNAELVDLTSLIGSPAYRAGSPQREALDARIAALAARQEELEGLEARPSGWEWRETGQSLGDWWREQDTAAKNTWLRSMNVRLTFDVRGGLTRAIDFGDLQEYEQHLRLGGVAERLRTGMS

SEQ ID NO: 8971 - protein, 500 aa, synthetic construct
MRALVVIRLSRVTDATTSPERQLESCQQLCAQRGWDVVGVAEDLDVSGAVDPFDRKRRPNLARWLAFEEQPFDVIVAYRVDRLTRSTRHLQQLVRWAEDHKKLVVSATEAHFDTTTPFAAVVIALMGTVAQMELEAIKERIRSAVHFNIRAGKYRGSLPPWGYLPTRVDGEWRLVPDPVQRERILEVYHRVVDNHEPLHLVAHDLNRRGVLSPKDYFAQLQGREPQGRKWSATALKRSMISAAMLGYATLNGKIVRDDDGAPLVRAEPILTREQLEALRAELVKTPRAKPAVSTPSLLLRVLFCAVCGEPAYKFVGGGRKHPRYRCRSMGFPKHCGNGTVVMAEWDAFCEEQVLNLLGDAERLEKVWLAGSDSAAELAEVNAELVDLTSLIGSPAYRAGSPQREALDARIAALAARQEELGGLEARPSGWEWRGTGQRLGDWWREQDTAAKNTWLRSMNVRLTFDVRGGLTRTIDFGELQEYEQHLRLGSVVGRLHTGTS

SEQ ID NO: 8972 - protein, 500 aa, synthetic construct
MRALVVIRLSRVTEATTSPERQLESCRQLCAQRGWDVVGVAEDLDVSGAVDPFDRKRRPNLARWLAFEEQPFDAIVAYRVDRLTRSIRHLQQLVHWAEDHKKLVVSATEAHFDMTTPFAAVVIALMGTVAQMELEAIKERIRSATHFNIRAGKYRGSLPPWGYLPTRVDGEWRLVPDPVQRERILEVYHRVVDNHEPLHLVAHDLNRRGVLSPKDYFAQLRGREPRGRKWSATALRRSMTSVAMLGYATLNGKTVRDDDGAPLVRAEPILTREQLETLRAELVKTSRAKPAVSTPSLLLRVLFCAVCGEPAYKFVGGGRKHPRYRCRSMGFPEHCGNGTVVMAEWDAFCEEQVLDLLGDAERLEKVWVAGSDSAVELAEVNAELVDLTSLIGSPAYRAGSPQREALDVRIAALAARQEGLEGLEARPSGWEWRGTGQRFGDWWREQDTAAKNAWLRSMNVRLTFDVRGGLTRTIDFGELQEYEQHLRSGSVVERLHTGMS

SEQ ID NO: 8973 - protein, 500 aa, synthetic construct
MRALVVIRLSRVTDATTSPERQLESCQQLCAQRGWAVVGVAEDLDVSGAVDPFDRKRRPNLARWLAFEEQPFDVIVAYRVDRLARSTRHLQQLVHWAEDHQKLVVSATEAHFDTTTPFAAVVIALMGTVAQMELEAIKERNRSAAHFNIRAGKYRGSLPPWGYLPTRVDGEWRLVPDPVQRERILEVYHRVVDNHEPLHLVAHDLNRRGVLSPKDYFAQLQGREPQGRKWSATALKRSMISEAMLGYATLNGRTVRDDDGAPLVRAEPILTREQLEALRAELVKTTRAKPAVSTPSLLLRVLFCAVCGEPAYKFAGGGRKHPRYRCRSMGFPKHCGNGTVVMAEWDAFCEEQVLDLLGDAERLEKVWVAGSDSAVELAEVNAELVDLTSLIGSPAYRAGSPQREALDARIAALAARQEELEGLGASPSGWEWRETGQRFGDWWREQDTAAKNAWLRSMNVRLTFDVRGGQTRTIDFGDLQEYEQHLRSGSVVERLHTGMS

SEQ ID NO: 8974 - protein, 500 aa, synthetic construct
MRALVVIRLSRVTDATTSPERQLESCQQLCAQRGWDVVGVAEDLDVSGAVDPFDRKRRPNLARWLAFEEQPFDAIVAYRVDRLTRSTRHLQQLVHWAEDHKKLVVSATEAHFDTTTPFAAVVIALMGTVAQMELEAIKERNRSAAHFNIRAGKYRGSLPPWGYLPTRVDGEWRLVPDPVQRERILEVYHRVVDNHEPLYLVAHDLNRRGVLSPKDYFAQLQGREPQGRKWSATALRRSMISEAMLGYATLNGKTVRDDDGAPLVRAEPILTREQLEALRAELVKTSRAKPAVSTPSLLLRVLFCAVCGEPAYKLAGGGRKHPRYRCRSMGFPKHCGNGTVAMAEWDAFCEEQVLDLLGDAEHLEKVWVTGSDSAAELAEVNAELVDLTSLIGSPAYRAGSPQREALDARIAALAARQEELEGLEARPSGWEWRETGQRFGDWWREQDAAAKNTWLRSMNVRLTFDVRGGLTRTIDFGVLQEYVQHLRLGSVVERLHTGMS

SEQ ID NO: 8975 - protein, 500 aa, synthetic construct
MRALVVIRLSRVTDATTSPVRQLESCQQLCAQRGWDVVGVAEDLDVSGAVDPFDRKRRPNLARWLAFEEQPFDVIAAYRVDRLTRSVRHLQRLVRWAEDHKKLVVSATEAHFDTTTPFAAVVIALMGTVAQMELEAIKERIRSAAHFNIRAGKYRGSLPPWGYLPTRVDGEWRLVPDPVQRERILEVYHRVVDNHEPLHLVAHDLNRRGVLSPKDYFAQLRGREPRGRKWSATTLKRSMTSVAMLGYATLNGKTVRDDDGAPLVRAEPILTREQQEALRAELAKTSRAKPAVSTPSLLLRVLFCAVCGEPAYKFVGGGRKHPRYRCRSMGFPKHCGNGTVTMAEWDAFCEEQVLGLLGDAERLEKVWVAGSDSAVELAEVNAELVDLTSLIGSPAYRTGSPQREALDARIAALAARQEELEGLEARPSGWEWRGTGQRFGDWWREQDTAAKNTWLRSMNVRLTFDVHGGLTRTIDFGDLQEYEQHLRLGGVVKRLRTGMS

SEQ ID NO: 8976 - protein, 500 aa, synthetic construct
MRALVVIRLSRVTDATTSPERQLESCQQLCAQRGWDVVGVAEDLDVSGAVDPFDRKRRPNLARWLAFEEQPFDVIVAYRVDRLTRSTRHLQRLVHWAEDHKKLVVSATEAHFDTTTPFAAVVIALMGTVAQMELEAIKERNRSAAHFNIRAGKYRGSLPPWGYLPTRVDGEWRLVPDPVQRERILEVYHRVVDNHEPLHLVAHDLNRRGVLSPKDYFAQLQGREPQGRKWSATALKRSMISEVMLGYATLNGKTVRDDDGAPLVRAEPILTREQLEALRAELVKTSRAKPAVSTPSLLLRVLFCAVCGEPAYKFAGGGRKHPRYRCRSMGFPKHCGNGTVVMAEWDAFCEEQVLGLLGDTERLEKVWVAGSDSAVELAEVNAELVDLTSLIGSPAYRAGSPQREALDARIVALAARQEELEGLEARPSGWEWRETGQRFGDWWREQDTAARNAWLRSMNVRLTFDVRGGLTRTIDFGDLQEYEQHLRLGSVVERLHTGMS

SEQ ID NO: 8977 - protein, 500 aa, synthetic construct
MRALIVIRLSRVTDATTSPERQLESCQQLCAQRGWDVVGVAEDLDVSGAVDPFDRKRRPNLARWLAFEEQPFDVIVAYRVDRLTRSTRHLQQLVRWAEDHKKLVVSATEAHFDTTTPFAAVVIALMGTVAQMELEAIKERIRSAAHFNIRAGKYRGSLPPWGYLPTRVDGEWRLVPDPVQRERILEVYHRVVDNHEPLHLVAHDLNRRGVLSPKDYFAQLRGREPQGRKWSATALKRSMTSGAMLGYATLNGKTVRDDDGAPLVRAEPILTREQQEALRVELAKTSRAKPAVSTPSLLLRVLFCAVCGEPAYKFVGGGRKHPRYRCRSMGFPKHCGNGTVVMAEWDAFCEEQVLGLLGDAERLEKVWVAGSDSSVELAEVNAELVDLTSLIGSPAYRAGSPQREALDARIAALAARQGELEGLEARPSGWEWRGTGQRFGDWWREQDTAAKNTWLRSMNIRLTFDVRGGLTRTIDFGELQEYEQHLRLGSVAERLHTGMS

SEQ ID NO: 8978 - protein, 500 aa, synthetic construct
MRALVVIRLSRVTDATTSPERQLESCQQLCAQRGWDVVGVAEDLDVSGAVDPFDHKRRPNLARWLAFKEQPFDVIVACRVDRLTRSVRHLQQLVHWAEDHKKLVVSATEAHFDTTTPFAAVVIALMGTVAQMELEAIKERNRSAAHFNIRAGKYRGSLPPWGYLPTRVDGEWRLVPDPVQRERILEVYRRVVDNHEPLHLVAYDLNRRGVLSPKDYFAQLRGREPQGRKWSATALKRSMISVAMLGYATLNGKTVRDDDGAPLVRAEPILTREQLEALRAELVKTSRAKPAVSTPSLLLRVLFCAVCGEPAYKFAGGGRKHPRYRCRSMGFPKHCGNGTVAMAEWDAFCEEQVLDLLGDVERLEKVWVAGSDSAVELAEVNAELVDLTGLIGSPAYRASSPQREALDARIAALAARQEELEGLGARPPGWEWRETGQRFGDWWREQDTAAKNTWLRSMNVRLTFDVRGGLTRTIDFGDLQEYEQHLRLDSVAERLHTGMS

SEQ ID NO: 8979 - protein, 500 aa, synthetic construct
MRALVVIRLSRVTDATTSPERQLESCQQLCAQRGWDVVGVAEDLDVSGAVDPFDRKRRPNLARWLAFEEQPFDVIVAYRVDRLTRSTRHLQQLVHWAEDHKKLVVSATEAHFDTTTPFAAVVIALMGTVAQMELEAIKERSRSAVHFNIRAGKYRGSLPPWGYLPTRVDGEWRLVPDPVQRERILEVYHRVVDNHEPLHLVAHDLNRRGVLSPKDYFAQLRGREPRGRRWSATALRRSMTSEAMLGYATLNGKTVRDDDGAPLVRAEPILTREQQEALRTELVRTSRAKPAVSTPSLLLRVLFCAVCGEPAYKFVGGGRKHPRYRCRSMGFPKHCGNGTVVMAEWDAFCEEQVLDLLGDAERLEKVWVAGSDSAVELAEVNAELVDLTSLIGSPAYRAGSPQREALDARIAALAARQEELEGLEARPSGWEWRETGQRFGDWWREQDTAAKNTWLRSMNVRLAFDVRGGLTRTIDFGDLQEYKQHLRSGSVVERLHTGMS

SEQ ID NO: 8980 - protein, 500 aa, synthetic construct
MRALVVIRLSRVTDATTSPERQLESCQQLCAQRGWDVVGVAEDLDVSGAVNPFDRKRRPNLARWLAFEEQPFDVIVACRVDRLTRSTRHLQQLVHWAEDHKKLVVSATEAHFDTTTPFAAVVIALMGTVAQMELEAIKERNRSAAHFNIRAGKYRGSLPPWGYLPTRVDGEWRLVPDPVQRERILEVYHRVVDNHEPLHLVAHDLNRRGVLSPKDYFAQLRGREPQGRKWSATALKRSMISEAMLGYATLNGKTVRDDDGAPLVRAEPILTREQLGALRAELVRTSRAKPAVSAPSLLLRVLFCAVCGEPAYKFAGGGRKHPRYRCRSMGFPKHCGNGTVAMAEWDAFCEEQVLNLLGDAERLEKVWVAGSDSAVELAEVNAELVDLTSLIGSPAYRAGSPQREALDARIAALAARQEELEGLEARPPGWEWRETGQRFGDWWREQDTAAKNTWLRSMSVRLTFDVRGGLTRTIDFGDLQEYEQHLRLGSVVKRLHTGMS

SEQ ID NO: 8981 - protein, 500 aa, synthetic construct
MRALVVIRLSRVTEATTSPERQLESCQQLCAQRGWDVVGVAEDLDVSGAVDPFDRKRRPNLARWLAFEEQPFDVIVAYRVDRLTRSTRHLQQLVHWAEDHKKLVVSATEAHFDTTTPFAAVVIALMGTVAQMELEAIKERIRSAVHFNIRAGKYRGSLPPWGYLPTRVDGEWRLVPDPVQRERILEVYHRVVDNHEPLHLVAHDLNRRGVLSPKDYFAQLQGREPQGREWSATALKRSLISKAMLGYATLNGKTVRGDDGAPLVRAEPILTREQQEALRAELVKTSRAKPAVSTPSLLLRVLFCAVCGEPAYKFVGGGRKHPRYRCRSMGFPKHCGNGTVVMAEWDAFCEEQVLNLLGDAERLERVWVAGSDSVVELAEVNAELVDLTSLIGSPAYHAGSPQREALDARIAALAARQEELEGLEARPSGWEWRETGQRLGDWWREQDTAAKNAWLRSMNVRLTFDVRGGLTRTIDFGDLQEYEQHLRLGSVVGRYHTGMS

SEQ ID NO: 8982 - protein, 500 aa, synthetic construct
MRALVVIRLSRVTDATTSPERQLESCHQLCAQRGWDVVGVAEDLGVSGAVDPFDRKRRPNLARWLAFEEQPFDVIVVYRVDRLTRSIRHLQQLVHWAEDHKKLVVSATEAHFDTTTPFAAVVIALMGTVAQMELEAIKERNRSAAHFNIRAGKYRGSLPPWGYLPTRVDGEWRLVPDPVQRERILEVYHRVVDNHEPLHLVAHDLNRRGVLSPKDYFAQLRGREPQGRKWSATALKRSMISEAMLGYATLNGKTVRDDDGAPLVRAEPILTREQLEALRTELVKTSRAKPAVSTPSLLLRVLFCAVCGEPAYKFAGGGRKHPRYRCRSMGFPKHCGNGTVVMAEWDAFCEEQVLDLLGDAERLEKVWVAGSDSAVELAEVNAELVDLTSLIGSPAYRAGSPQREALDARIAALAARQEELEGLEARPSGWEWRETGQRFGDWWREQDTAAKNTWLRSMNVRLTFDVRGGLTRTIDFGDLQEYEQHLRLGSVVERLHAGMS

SEQ ID NO: 8983 - protein, 500 aa, synthetic construct
MRALVVIRLSRVTDATTSPERQLESCQQLCAQRGWDVVGVAEDLDVSGAVDPFDRKRRPNLARWLAFEEQPFDVIVAYRVDRLARSTRHLQQLVRWAEDHKKLVVSATEAHFDTTTPFAAVVIALMGTVAQMELEAIKERIRSASHFNIRAGKYRGSLPPWGYLPTRVDGEWRLVPDPVQRERILEVYHRVVDDHEPLHLVAHDLNRRGVLSPKDYFAQLQGREPQGRKWSATALKRSMISVAMLGYATLNGKIVRDDDGAPLVRAEPILTREQLEALRAELVKTSRAKPAVSTPSLLLRVLFCAVCGEPAYKFVGGGRKHPRYRCRSMGFPEHCGNGTVVMTEWDAFCEEQVLNLLGDTERLEKVWVAGSDSAVELAEVNAELVDLTSLIGSPAYRAGSPQRGALDARIAALAARREELEGLEARPSGWEWRETGQRFGDWWREQDTAAKNTWLRSMNVRLTFDVRGGLTRTIDFGDLQEYEQHLRSDSVVERLRTGMS

SEQ ID NO: 8984 - protein, 500 aa, synthetic construct
MRALVVIRLSRVTDATTSPERQLESCQQLCAQRGWDVVGVAEDLDVSGAVDPFDRKRRPNLARWLAFEEQPFDVIVAYRVDRLTRSTRHLQQLVHWAEDHKKLVVSATEAHFDTTTPFAAVVIALMGTVAQMELEAIKERNRSAAHFNIRAGKYRGSLPPWGYLPARVDGEWRLVPDPVQRERILEVYHRVVDDHVPLHLVAHDLNRRGVLSPKDYFAQLQGREPRGRKWSATALKRSMISEAMLGYATLNGKTVRDDDGAPLVRAEPILTREQLEALRAELVKTSRAKPAVSTPSLLLRVLFCAVCGEPAYKFAGGGRKHPRYRCRSMGFPKHCGNGTVAMAEWDAFCEEQVLDLLGDAERLERVWVAGSDSAVELAEVNAELVDLTSLIGSPAYRAGSPQREALDARVAALAARQEELEGLEARPSGWEWRETGQRFGDWWREQDTAAKNTWLRSMNVRLTFDARGGLTRTIDFGDLQEYEQHLRLGSVVERLHTGMS

SEQ ID NO: 8985 - protein, 500 aa, synthetic construct
MRALVVIRLSRVTEATTSPERQLESCQQLCAQRGWDVVGVAEDLDVSGAVDPFDRKRRPNLARWLAFEEQPFDVIVAYRVDRLTRSTRHLQQLVHWAEDHKKLVVSATEAHFDTTTPFAAVVVALMGTVAQMELEAIKERIRSAVHFNIRAGKYRGSLPPWGYLPTRVDGEWRLVPDPVQRERILEVYHRVVDNHEPLHLVAHDLNRRGVLSPKDYFARLQGREPQGRKWSATALRRSMTSEAMLGYATLNGKIVRDDDGAPLVRAEPILTREQQEALRAELVKTSRAKPAVSTPSLLLRVLFCAVCGEPAYKFVGGGRKHPRYRCRSMGFPKHCGNGTVVMAEWDAFCEEQVLDLLGDAERLEKVWVAGSDSAVELAEVNAELVDLTSLIGSPAYRVGSPQREALDARIAALAARQEELEGLEACPSGWEWRGTGQRFRDWWREQDTAARNAWLRSMNVRLTFDVRGGLTRAIDFGDLQEYKRHLRLGSVVERSHTGMS

SEQ ID NO: 8986 - protein, 500 aa, synthetic construct
MRALVVIRLSRVTEATTSPERQLESCQQLCAQRGWDVVGVAEDLDVSGAVDPFDRKRRPNLARWLAFEEQPFDAIVAYRVDRLTRSVRHLQQLVHWAEDHKKLVVSATEAHFDTTTPFAAVVIALMGTVAQMELEAIKERIRSAAHFNIRAGKYRGSLPPWGYLPTRVNGEWRLVPDPVQRERILEVYHRVVDNHEPLHLVAYDLNRRGVLSPKDYFAQLRGREPQGRRWSATALRRSMTSGAMLGYATLNGKIVRDDDGAPLVRAEPILTREQQEALRAELAKTSRAKPAVSTPSLLLRVLFCAVCGEPAYKFVGGGRKHPRYRCRSMGFPEHCGNGTVVMTEWDAFCEEQVLDLLGDAERLEKVWVAGSDSTVELAEVNAELVDLTSLIGSPAYRAGSPQREALDARIAALAARQEVLEGLEVRPSGWEWRGTGQRFGDWWREQDTAAKNTWLRSMNVRLTFDVRGGLTRTIDFGDLQEYGQHLRSGSVVERLHTGMS

SEQ ID NO: 8987 - protein, 500 aa, synthetic construct
MRALVVIRLSRVTDATTSPERQLESCQQLCAQRGWDVVGVAEDLDVSGAVDPFDRKRRPNLARWLAFEEQPFDVIVAYRVDRLTRSVRHLQQLVHWAEDHKKLVVSATEAHFDTTTPFAAVVIALMGTVAQMELEAIKERNRSAAHFNIRAGKYRGSLPPWGYLPTRVDGEWRLVPDPVQRERILEVYHRVVDNHEPLHLVAHDLNRRGVLSPKDYFAQLRGREPQGRKWSATALKRSMISEAMLGYATLNGKTVRDDDGAPLVRAEPILTREQLEALRAELVKTSRAKPAVSTPSLLLRVLFCAVCGEPAYKFAGGGRKYPRYRCRSMGFPKHCGNGTVAMAEWDAFCEEQVLDLLGDTERLEKVWVAGSDSAVELAEVNAELVDLTSLIGSPAYRAGSPQREALDARIAALAARQEELEGLGARPSGWEWRETGQRFGDWWREQDTAAKNTWLRSMNVRLTFDVRGGLTRTIDFGDLQEYEQHLRLGSVVERLHTGMS

SEQ ID NO: 8988 - protein, 500 aa, synthetic construct
MRALVVIRLSRVTDATTSPERQLESCQQLCAQRGWDVVGVAEDLDVSGAVDPFDRKRRPNLARWLAFEEQPFDVIVAYRVDRLTRSTRHLQQLVHWAEDHKKLVVSATEAHFDTTTPFAAVVIALMGTVAQMELEAIRERNRSAAHFNIRAGKYRGSLPPWGYLPTRVDGEWRLVPDPVQRERILEVYHRVVDNHEPLHLVAHDLNRRGVLSPKDYFAQLQGREPQGRKWSATALKRSMISEAMLGYATLNGKIVRDDDGAPLVRAEPILTREQLEALRAELVKTSRTKPAVSTPSLLLRVLFCAVCGEPAYKFAGGGRKHPRYRCRSMGFPKHCGNGTVAMAEWDAFCEEQVLGLLGDAERLEKVWVAGSDSAVELAEVNAELVDLTSLIGSPAYRAGSPQREVLDARIAALAARQEELEGLEARPSGWEWRGTGRRFGDWWREQDTAAKNTWLRSMNVRLTFDVRGGLTRTIDFGDLQECEQQLRLGSVVERLHTGMS

SEQ ID NO: 8989 - protein, 500 aa, synthetic construct
MRALVVIRLSRVTDATTSPERQLESCQQLCAQRGWDVVGVAEDLDVSGAVDPFDRKRRPNLARWLAFEEQLFDVIVAYRVDRLTRSTRHLQQLVRWAEDHKKLVVSATEAHFDMTTPFAAVVIALMGTVAQMELEAIKERSRSAVHFNIRAGKYRGSLPPWGYLPARVDGEWRLVPDPVQRERILEVYHRVVDNHEPLHLVAYDLNRRGILSPKDYFAQLQGREPRGRKWSATALRRSMTSVAMLGYATLNGKTVRDDDGAPLVRAEPILTREQLEALRAELAKTSRAKPAVSTPSLLLRVLFCAVCGEPAYKFVGGGRKHPRYRCRSMGFPEHCGNGTVVMAEWDAFCEEQVLDLLGDAECLEKVWVAGSDSAVELAEVNAELVDLTSLIGSPAYRAGSPQREALDARIAALAARQEELEGLEARPSGWEWRETGQRFGDWWREQDTAAKNTWLRSMNVRLTFDVRGGLTRTIDFGDLQEYEQHLRLGSVVERLHAGMS

SEQ ID NO: 8990 - protein, 500 aa, synthetic construct
MRALVVIRLSRVTDATTSPERQLESCQQLCAQRGWDVVGVAEDLDVSGAVDPFDRKRRPNLARWLAFEEQPFDVIVAYRVDRLTRSTRHLQQLVHWAEDHKKLVVSATEAHFDTTTPFAAVVIALMGTVAQMELEAIKERNRSAAHFNIRAGKYRGSLPPWGYLPTRVDGEWRLVPDPVQRERILEVYHRVVDNHEPLHLVAHDLNRRGVLSPKDYFAQLRGREPQGRKWSATALKRSMISEAMLGYATLGGKTVRDDDGAPLVRAEPILTREQLEALRAELVKTPRVKPAVSTPSLLLRVLFCAVCGEPAYKFAGGGRKHPRYRCRSMGFPKHCGNGTVVMAEWDAFCEEQVLDLLGDAERLEKVWVAGSDSAAELAEVNAELVDLTSLIGSPAYRAGSPQREALDARIAALAARQEGLEGLEARPSGWEWRETGQRFGDWWREQDTAAKNTWLRSMNVRLTFDVRGGLTRTIDLGDLQEYEQHLRLGSVVERLHTGMS

SEQ ID NO: 8991 - protein, 500 aa, synthetic construct
MRALVVIRLSRVTDATTSPERQLESCQQLCAQRGWDVVGVAEDLDVSGAVDPFDRKRRPNLARWLAFEEQPFDVIVAYRVDRLTRSTRHLQQLVRWAGDHKKLVVSATEAHFDTTTPFAAVVIALMGTVAQMELEAIKERIRSAVRFNIRAGKYRGSLPPWGYLPTHVDGEWRLVPDPVQRERILEVYHRVVDNHEPLHLVAHDLNRRGVLSPKDYFAQLRGREPRGRKWSATALRRSMTSEAMLGYATLNGETVRDDDGAPLVRAEPILTREQLEALRAELAKTSRAKPAVSTPSLLLRVLFCAVCGEPAYKFAGGGRKHPRYRCRSMGFPEHCGNGTVVMAEWDAFCEEQVLNLLGDAERLEKVWVAGSDSAVELAEVNAELVDLTSLVGSPAYRAGSPQREALDARIAALAARQEELEGLEARPSGWEWRGTGQRFGDWWREQNTAAKNTWLRSMNVRLTFDVRGGLTRTIDFGDLQEYKQHLRLSSVVERLHTGMS

SEQ ID NO: 8992 - protein, 500 aa, synthetic construct
MRALVVIRLSRVTDATTSPERQLESCQQLCAQRGWDVVGVAEDLDVSGAVDPFDRKRRPSLARWLAFEEQPFDVIVAYRVDRLTRSTRHLQQLVRWAEDHKKLVVSATEAHFDTTTPFAAVVIALMGTVAQMELEAIKERIRSAVRFNIRAGKYRGSLPPWGYLPARVDGEWRLVPDPVQRERILEVYHRVVDNHEPLHLVAHDLNRRGVLSPKDYFAQLQGREPRGRKWSATALKRSMISKAMLGYATLNGKTVRDGDGAPLVRAEPILTREQLEALRAELVKTSRAKPAVSTPSLLLRVLFCAVCGEPAYKFAGGGRKHPRYRCRSMGFPEHCGNGTVVMAEWDAFCEEQVLDLLGDAERLEKVWVAGSDSAVELAEVNAELVDLTSLIGSPAYRAGSPQREALDARIVALAARQEELEGLEAHPSGWEWRGTGQRFRDWWREQDTAAKNTWLRSMSVRLTFDVRGGLTRTIDFGDLQEYEQHLRLGSVVERLHTGMS

SEQ ID NO: 8993 - protein, 500 aa, synthetic construct
MRALVVIRLSRVTDATTSPERQLESCQQLCAQRGWDVVGVAEDLDVSGAVDPFDRKRRPNLARWLAFEEQPFDVIVAYRVDRLTRSIRHLQQLVRWAEDHKKLVVSATEAHFDTTTPFAAVVIALMGTVAQMELEAIKERIRSAVHFNIRAGKYRGSLPPWGYLPTRVDGEWRLVPDPVQRERILEVYHRVVDNHEPLHLVAHDLNRRGVLSPKDYFAQLRGREPQGRKWSATALKRSLISGAMLGYATLNGKTVRGDDGAPLVRAEPILTRGQQEALRAELAKTSRTKPAVSTPSLLLRVLFCAVCGEPAYKFVGGGRKHPRYRCRSMGFPEHCGNGTVVMTEWDAFCEEQVLDLLGDAERLEKVWVAGSDSAVELAEVNAELVDLTSLIGSPAYRAGSPQREALDARIAALVARQEELEGLEARPSGWEWRETGQRFGDWWREQDTAAKNTWLRSMNVRLTFDVRGGLTRTIDFGDLQEYEQYLRLGGVVERLHTGMS

SEQ ID NO: 8994 - protein, 500 aa, synthetic construct
MRALIVIRLSRVTDATTSPIRQLESCQQLCAQRGWDVVGVAEDLDVSGAVDPFDRKRRPNLARWLAFEEQPFDVIVAYRVDRLTRSVRHLQQLVRWAEDHKKLVVSATEAHFDTTTPFAAVVIALMGTVAQMELEAIKERIRSAAHFNIRAGKYRGSLPPWGYLPTRVDGEWRLVPDPVQRERILEVYHRVVDNHEPLHSVAHDLNRRGVLSPKDYFAQLRGREPQGRKWSATALKRSMISVAMLGYATLNGKIVRGDDGVPLVRAEPILTREQLEALRAELVKTSRAKPAVSTPSLLLRVLFCAVCGEPAYKFVGGGRKHPRYRCRSMGFPEHCGNGTVAMAEWDAFCEEQVLDLLGDAERLEKVWVVGSDSAVELAEVNAELVDLTSLIGSPAYRVGSPQREALDARIAALAARQEELESLEARPSGWEWRGTGQRLGDWWREQDTAAKNTWLRSMNVRLTFDVRGGLTRTIDLGDLREYEQHLRLGSVVERLHTGMS

SEQ ID NO: 8995 - protein, 500 aa, synthetic construct
MRALVVIRLSRVTDATTSPERQLESCQQLCAQRGWDVVGVAEDLDVSGAVDPFDRKRRPNLARWLAFEEQPFDVIVAYRVDRLTRSVRHLQQLVHWAEDHKKLVVSATEAHFDTTTPFAAVVIALMGTVAQMELEAIRERNRSAAHFNIRAGKYRGSLPPWGYLPTRVDGEWRLVPDPVQRERILEVYHRVVDNHEPLHLVAHDLNRRGVLSPKDYFAQLRGREPQGRKWSATALKRSMISEAMLGYATLNGKTVRDDDGAPLVRAEPILTREQLEALRAELAKTSRAKPAVSTPSLLLRVLFCAVCGEPAYKFAGGGRKHPRYRCRSMGFPKHCGNGTVVMAEWDAFCEEQVLNLLGDTERLEKVWIAGSDSAVELAEVNAELVDLTSLIGSPAYRAGSPQREALDARIAALAARQEELEGLEARPSGWVWRETGQRFGDWWRERDTAARNTWLRSMNVRLTFDVRGGLTRTIDFGDLQEYEQHLRLGSVVERLHTGMS

SEQ ID NO: 8996 - protein, 500 aa, synthetic construct
MRALVVIRLSRVTEATTSPERQLESCRQLCAQRGWDVVGVAEDLDVSGAVDPFDRKRRPNLARWLAFEEQPFDVIVAYRVDRLTRSTRHLQQLVHWAEDHKKLVVSATEAHFDTTTPFAAVVIALMGTVAQMELEAIKERIRSAAHFNIRAGKYRGSLPPWGYLPARVDGEWRLVPDPVQRERILEVYHRVVDNHEPLHLVAHDLNRRGVLSPKDYFAQLRGREPQGREWSATALRRSMTSVAMLGYATLNGKTVRDDDGAPLVRAEPILTRGQQEALRVELAKTSRAKPAVSTPSLLLRVLFCAVCGEPAYKFVGGGRKHPRYRCRSMGFPKHCGNGTVVMAEWDAFCEEQVLDLLGDAERLEKVWVAGSDSAVELAEVNAELVDLTSLIGSPAYRAGSSQREALDARIAALAARQEELEGLEARPSGWEWRGTGQRFGDWWRVQDTAAKNTWLRSMNVRLTFDVRGGLTRTIDFGDLQEYEQHLRLGSVAERSHTGMS

SEQ ID NO: 8997 - protein, 500 aa, synthetic construct
MRALVVIRLSRVTDATTSPERQLESCQQLCAQRGWDVVGVAEDLDVSGAVDPFDRKRRPNLARWLAFEEQPFDVIVAYRVDRLTRSVRHLQQLVHWAEDHKKLVISATEAHFDTTTPFAAVVIALMGTVAQMELEAIKERNRSAAHFNIRAGKYRGSLPPWGYLPTRVDGEWRLAPDPVQRERILEVYHRVVDSHESLHLVAHDLNRRGVLSPKDYFAQLQGREPQGRKWSATALKRSMISEAMLGYATLNGKTVRDDYGAPLVRAEPILTREQLEALRAELVKTSRAKPAVSTPSLLLRVLFCAVCGEPAYKFAGGGRKHPRYRCRSMGFPKHCGNGTVVMAEWDAFCEEQVLDLLGDAERLEKVWVAGSDSAVELAEVNAELVDLTSLIGSLAYRAGSPQREALDARIAALAARQEELEGLEARPSGWEWRETGQRFGDWWREQDTAAKNTWLRSMNVRLTFDARGGLTRTIDFGDLQEYEQHLRLGSAVEHLHTGMS

SEQ ID NO: 8998 - protein, 500 aa, synthetic construct
MRALVVIRLSRVTDATTSPERQLASCQQLCAQRGWDVVGVAEDLDVSGAVDPFDRKRRPNLARWLASEEQPFDVIVAYRVDRLTRSTRHLQQLVRWAEDHKKLVVSATEAHFDTTTPFAAVVIALMGTVAQMELEAIKERIRSAVRFNIRAGKYRGSLPPWGYLPTRVDGEWRLVPDPVQRERILEVYHRVVDNHEPLHLVAYDLNRRGVLSPKDYFAQLQGREPQGRKWSATALRRSMTSVAMLGYATLSGKIVRDDDGAPLVRAEPILTREQQEALRAELAKTSRAKPAVSTPSLLLRVLFCAVCGGPAYKFAGGGRKHPRYRCRSMGFPKHCGNGTVTMAEWDAFCEEQVLDLLGDAERLEKVWIAGSDSAVELAEVNAELVDLTSLIGSPAYRAGSPQREALDVRIATLAARQVELEGLEARPSGWEWRETGQRFGDWWRRQDTAAKNTWLRSMNVRLTFDTRGGLTRTIDFGDLQEYERHLRLGSVVERLHTGMS

SEQ ID NO: 8999 - protein, 500 aa, synthetic construct
MRALVVIRLSRVTDTTTSPERQLESCQQLCAQRGWDVVGVAEDLDVSGAVDPFDRKRRPNLARWLAFEEQPFDVIVAYRVDRLTRSVRHLQQLVHWAEDHKKLVVSATEAHFDTTTPFAAVVIALMGTVAQMELEAIKERNRSAAHFNIRAGKYRGSLPPWGYLPTRVDGEWRLAPDPVQRERILEVYHRVVDDHEPLHLVAHDLNRRGVLSPKDYFAQLRGREPQGREWSATALKRSMTSEAMLGYATLNGKTVRDDDGAPLVRAEPILTREQLEALRAELVKTSRAKPAVSTPSLLLRVLFCAVCGEPAYKFAGGGRKHPRYRCRSMGFPKHCGNGTVAMAEWDAFCEEQVLDLLGDAERLEKVWVAGSDSAVELAEVNAELVDLTSLTGSPAYRAGSPQRGALDARIAALAARQEELEGLEARPSGWEWRGTGQRFGDWWREQDTVAKNTWLRSMNVRLTFDVRGGLTRTIDFGGLQEYEQHLRLGSVVERLHTGMS

SEQ ID NO: 9000 - protein, 500 aa, synthetic construct
MRALVVIRLSRVTDATTSPERQLESCQQLCAQRGWDVVGVAEDLDVSGAVDPFDRKRRPNLARWLAFEEQSFDAIVAYRVDRLTRSVRHLQQLVHWAEDHKKLVVSATEAHFDTTTPFAAVVIALMGTVAQMELEAIKERSRSAAHFNIRAGKYRGSLPPWGYLPTRVDGEWRLVPDPVQRERILEVYHRVVDNHEPLHWVAHDLNRRGVLSPKDYFAQLQGREPQGRKWSATALKRSVISEAMLGYATLNGKIVRDDDGAPLVRAEPILTREQLEALRAELIKTSRAKPAVSTPSLLLRVLFCAVCGEPAYKFAGGGRKHPRYRCRSMGFPKHCGNGTVVMAEWDAFCEEQVLDLLGDAERLEKVWIAGSDSAVELAEVNAELVDLTSLIGSPAYRAGSPQREALDARIAALTARQGELEGLEARPSGWEWRETGQRFGDWWREQDTAAKNTWLRSMNVRLTFDVRGGLTRTIDFGDLQEYEQHLRSDSVVERLHTRMS

SEQ ID NO: 9001 - protein, 500 aa, synthetic construct
MRALVVIRLSRVTDATTSPERQLESCQQLCAQRGWDVVGVAEDLDVSGAVDPFDRKRRPNLARWLAFEEQPFDVIVAYRVDRLTRSTRHLQQLVRWAEDHKKLVVSATEAHFDTTTPFAAVIIALMGTVAQMELEAIKERIRSAAHFNIRAGKYRGSLPPWGYLPTRVDGEWRLVPDPVQRERILEVYHRVVDNHEPLHLVAHDLNQRGVLSPKDYFAQLQGREPQGRKWSATALKRSMTSVAMLGYATLNGKIVRDDDGAPLVRAEPILTREQQEALRAELAKTSRAKPAVSTPSLLLRVLFCAVCGEPAYKFVGGGRKHPRYRCRSMGFPKHCGNGTVVMAEWDAFCEEQVLDLLGDAERLEKVWVAGSDSAVELAEVNAELVDLTSLIGSPAYRAGSPQREALDARIAALAARQEELEGLEARPSGWEWRETGQRFGDWWREQDTAAKNTWLRSMNVRLTFDARGGLTRTIDFGDLQEHERHLRSGSVVERLHARMS

SEQ ID NO: 9002 - protein, 500 aa, synthetic construct
MRALVVIRLSRVTDATTSPERQLESCRRLCAQRGWNVAGVAEDLDVSGAVDPFDRKRRPNLARWLAFEEQPFDVIVAYRVDRLARSTRHLQQLVRWAEDHKKLVVSATEAHFDTTTPFAAVVIALMGTVAQMELEAITERIRSAVHFNIRAGKYRGSLPPWGYLPARVDGEWRLVPDPVQRERILEVYHRVVDNHEPLHLVAHDLNRRGVLSPKDYFAQLQGREPQGRKWSATALKRSMTSEAMLGYATLSGKIVRDDDGAPLVRAEPILTREQLGALRVELAKTSRAKPAVSTPSLLLRVLFCAVCGEPAYKFVGGGRKHPRYRCRSMGFPEHCGNGTVVMTEWDAFCEEQVLDLLGDAERLEKVWVAGSDSAVELAEVNAELVDLTSLIGSPAYRAGSPQREALDTRIAALAARQGELEGLEARPSGWEWRETGQRFGDWWREQDTSAKNAWLRSMNVRLTFDVRGGLTRTIDFGELQGYKHHLRSGSVDERLHTGMS

SEQ ID NO: 9003 - protein, 500 aa, synthetic construct
MRALVVIRLSRVTDATTSPERQLESCQQLCAQRGWNVVGVAEDLDVSGAVDPFDRKRRPNLARWLAFEEQPFDVIVAYRVDRLTRSTRHLQRLVHWAEDHKKLVVSATEAHFDTTTPFAAVVIALMGTVAQMELEAIKERIRSAVRFNIRAGKYRGSLPPWGYLPTRVDGEWRLVPDPVQRERILEVYHRVVDNHEPLHLVAHDLNRRGVLSPKDYFAQLRGREPQGRKWSATALKRSMTSVAMLGYATLNGKTVRDDDGAPLVRAEPILTREQLEALRAELAKTSRAQPAVSSPSLLLRVLFCAVCGEPAYKFVGGGRKHPRYRCRSMGFPKHCGNGTVVMAEWDAFCEEQVLDLLGDAERLEKVWVAGSDSAVELAEVNAELVDLMSLIGSPAYRAGSPQREALDARIAALAVRQGELEGLEARPSGWEWRETGQRFGDWWREQDTASKNTWLRSMNVRLTFDVRGGLTRTIDFGDLQEYEQHLRSGSAAERLHTGMP

SEQ ID NO: 9004 - protein, 500 aa, synthetic construct
MRALVVIRLSRVTDATTSPERQLESCQQLCAQRGWDVVGVAEDLDVSGAVDPFDRKRRPNLARWLAFGEQAFDVIVAYRVDRLTRSTRHLQQLVHWAEDHKKLIVSATEAHFDTTTPFAAVVIALMGTVAQMELEAIKERNRSAAHFNIRAGKYRGSLPPWGYLPTRADGEWRLVPDPVQRERILEVYHRVVDNHESLHLVAHDLNRRGVLSPKDYFAQLQGREPQGRRWSATALKRSMISVAMLGYATLNGKTVRDDDGAPLVRAEPILTREQLEALRAELVKTSRAKPAVSTPSLLLRVLFCAVCGEPAYKFAGGGRKHPRYRCRSMGFPKHCGNGTVAMAEWDAFCEEQVLGLLGDAERLEKVWVAGSDSAVELAEVNAELVDLTSLIGSPAYRAGSPQREALDARIAALAARQEELESLEARLSGWEWRETGQRFGDWWREQDTAAKNTWLRSMNVRLTFDVRGGLTRTIDFGDLQEYEQHLRLGSVVERLHTGMP

SEQ ID NO: 9005 - protein, 500 aa, synthetic construct
MRALVVIRLSRVTDATTSPERQLESCKQLCAQRGWDVVGIAEDLDVSGAVDPFDRKRRPNLARWLEFEEQPFDVIVAYRVDRLTRSTRHLQQLVHWAEDHKKLVVSATEAHFDTTTPFAAVVIALMGTVAQMELEAIKERIRSAAHFNIRAGKYRGSLPPWGYLPTRVDGEWRLVPDPVQRERILEVYRRVVDNHEPLHLVAHDLNRRGVLSPKDYFAQLRGREPQGRKWSATALKRSMISVAMLGYATLNGKTVRGDDGAPLVRAEPILTREQQEALRAELAKTSRAKPAVSTPSLLLRVLFCAVCGEPAYKFVGGGRKHPRYRCRSMGFPKHCGNGTVVMAEWDAFCEKQVLDLLGDAERLEKVWVAGSDSSVELAAVNAELVDLTSLIGSPAYRAGSPQREALDARIAALAARQEELEGLEARPSGWEWRETGQRFGDWWREQDTAAKNTWLRSMNVRLTFDVRGGLTRTIDFGDLQEYEQHLRLGSVVERLHTGMS

SEQ ID NO: 9006 - protein, 500 aa, synthetic construct
MRALVVIRLSRVTDATTSPERQLESCQKLCAQRGWDVVGVAEDLDVSGAVDPFDRKRRPNLARWLAFEEQPFDVIVAYRVDRLTRSVRHLQQLVHWAEDHKKLVVSATEAHFDTTTPFAAVVIALMGTVAQMELEAIKERIRSAAHFNIRAGKYRGSLPPWGYLPTRVDGEWRLVPDPVQRERILEVYHRVVDNHEPLHLVAYDLNRRGVLSPKDYFAQLRGREPQGRKWSATALKRSMISAAMLGYATLNGETVRDDDGAPLVRAEPILTRGQQEALRAELAKTSRAKPAVSTPSLLLRVLFCAVCGEPAYKFVGGGRKRPRYRCRSMGFPKHCGNGTVVMAEWDAFCEERVLHLLGDAERLEKVWVAGSDSAVELAEVNAELVDLTSLIGSPAYRAGSPQREALDARIAALAARQEELEGLEARPSGWEWRGTGQRLGDWWREQDTAAKNTWLRSMNVRLTFDVRGGLTRTIDFGDLQEYERHLRLGSVVERLHTGMS

SEQ ID NO: 9007 - protein, 500 aa, synthetic construct
MRALVVIRLSRVTDATTSPERQLESCQQLCAQRGWDVVGVAEDLDVSGAVDPFDRKRRPNLARWLAFEEQPFDVIVAYRVDRLTRSVRHLQQLVHWAEDHKKLVVSATEAHFDMTTPFAAVVIALMGTVAQMELEAIKERNRSAAHFNIRAGKYRGSLPPWGYLPTRVDGEWRLVPDPVQRERILEVYHRVVDNHEPLHLVAHDLNRRGVLSPKDYFAQLQGREPQGRKWSATALKRSMISKAMLGYATLNGKIVRDDDGAPLVRAEPILTCEQLEALRAELVKTSRAKPAVSTPSLLLRVLFCAVCGEPAYKSAGGGRKHPRYRCRSMGFPKHCGNGMVAMAEWDAFCEEQVLDLLGDVERLEKVWVAGSDSAVELAEVNAELADLTSLIGSPAYRAGSPQREALDARIAALAARREELEGLGARPSGWEWRETGQRFGDWWREQDTAAKNTWLRSMNVRLTFDVRGGLTRTIDFGDLQEYEQHLRLGSVVERLHTGMS

SEQ ID NO: 9008 - protein, 500 aa, synthetic construct
MRALVVIRLSRVTDATTSPERQLESCQQLCAQRGWDVVGVAEDLDVSGAVDPFDRKRRPNLARWLAFEEQPFDVIVAYRVDRLTRSTRHLQQLVHWAEDHKKLVVSATEAHFDTTTPFAAVVIALMGTVAQMELEAIKERIRSATHFNIRAGKYRGSLPPWGYLPTRVDGEWRLVPDPVQRERILEVYHRVVGNHEPLHLVAHDLNRRGVLSPKDYFAQLRGREPQGRKWSATALKRSMTSEAMLGYATLDGKTVRDDDGAPLVRAEPILTREQQEALRAELAKTSRAKPAVSTPSLLLRVLFCAVCGEPAYKFVGGGRKHPRYRCRSMGFPKHCGNGTVVMAEWDAFCEEQVLNLLGDAERLEKVWVAGSDSAVELAEVNTELVDLTSLIGSPAYRAGSPQREALDARIAALAARQEELGGLEARPSGWEWRGTGQRFGDWWREQDTAAKNAWLRLMNVRLTFDARGGLTRTIDFGELQEYEQHLRLGSVAERLHTGMS

SEQ ID NO: 9009 - protein, 500 aa, synthetic construct
MRALVVIRLSRVTDATTSPERQLESCQQLCAQRGWDVVGVAEDLDVSGAVDPFDRKRRPNLARWLAFEEQPFDVIVAYRVDRLTRSTRHLQQLVRWAEDHKKLVVSATEAHFDTTTPFAAVVIALMGTVAQMELEAIKERIRSATHFNIRAGKYRGSLPPWGYLPARVDGEWRLVPDPVQRERILEVYHRVVDNHEPLHLVAHDLNRRGVLSPKDYFAQLRGREPQGRKWSATALRRSMTSEAMLGYATLNGKTVRDDDGAPLVRAEPILTRGQLEALRAELAKTSRAKPAVSTPSLLLRVLFCAVCGEPAYKFAGGGRKHPRYRCRSMGSPEHCGNGTVVMAEWDAFCEEQVLDLLGDAERLEKVWVAGSDSAVELTEVNAELVDLTSLIGSPAYRAGSPQREALDARIAALAARQEELEGLEARPSGWEWRETGQRFGDWWREQDTAAKNTWLRSMNVRLTFDVRGGLTRTIDYGDLQEYEQHLRLGSVVKRLHTGMS

SEQ ID NO: 9010 - protein, 500 aa, synthetic construct
MRALVVIRLSRVTEATTSPERQLESCQQLCAQRGWDVVGVAEDLDVSGAVDPFDRKRRPNLARWLAFEEQPFDVIVAYRVDRLTRSTRHLQQLVHWAEDHKKLVVSATEAHFDTTTPFAAVVIALMGTVAQMELEAVKERIRSAAHFNIRAGKYRGSLPPWGYLPTRVDGEWRLVPDPVQRERILEVYHRVVDNHEPLHLVAYDLNRRGVLSPKDYFAQLQGREPQGRRWSATALKRSMISVAMLGHATLNGRTVRGDDGAPLVRAEPILTREQQEALRAELAKTSRAKPAVSTPSLLLRVLFCAVCGEPAYKFVGGGRKHPRYRCRSMGFPEHCGNGTVVMAEWDAFCEEQVLDLLGDAERLEKVWVAGSDSAVELAEVNAELVDLTSLIGSPAYRAGSPQREALDARIAALAARQEQLESLEARPSGWEWRGTGQHFGDWWREQDTAAKNAWLRSMGVRLTFDVRGGLTRTIDFGELQEYEQHLRLGSVAERLHTGMS

SEQ ID NO: 9011 - protein, 500 aa, synthetic construct
MRALVVIRLSRVTDATTSPERQLESCQQLCAQRGWDVVGVAEDLDVSGAVDPFDRKRRPNLARWLAFEEQPFDVIVAYRVDRLTRSTRHLQQLVHWAEDHKKLVVSATEAHFDTTTPFAAVVIALMGTAAQMELEAIKERNRSAAHFNIRAGKYRGSLPPWGYLPARVDGEWRLVPDPVQRERILEVYHRVVDNHEPLHLVAHDLNRRGVLSPKDYFAQLQGREPQGRKWSATALKRSMTSEAMLGYATLNGKTVRDEDGAPLVRAEPILTREQLEALRAELAKTSRAKPAVSTPSLLLRVLFCAVCGEPAYKFAGGGRKHPRYRCRSMGFPKHCGNGTVVMAEWDAFCEEQVLNLLGDAERLEKVWVAGSDSAVELAEVNAELVDLTSLIGSPAYRAGSPQREALDARIVALAARQEELEGLEARPSGWEWRETGQRFGDWWREQDTAAKNTWLRSMSVRLTFDIRGGLTRTIDFGDLQEYEQHLRLGSVVERLHTGMS

SEQ ID NO: 9012 - protein, 500 aa, synthetic construct
MRALVVIRLSRVTDTTTSPERQLESCQQLCAQRGWDVVGVAEDLDVSGAVDPFDRKRRPNLARWLAFEEQPFDVIVAYRVDRLTRSTRHLQQLVHWAEDHKKLVVSATEAHFDTTTPFAAVVIALMGTVAQMELEAIKERIRSATHFNIRAGKYRGSLPPWGYLPAHVEGEWRLVPDPVQRERILEVYHRVVDNHEPLHLVAHDLNRRGVLSPKDYFAQLQGREPRGRKWSATALRRSMTSVAMLGYATLNGKTVRDDDGAPLVRAEPILTREQQEALRAELAKTSRAKPAVSTPSLLLRVLFCAVCGEPAYRFVGGGRKHPRYRCRSMGFPKHCGNGTVVMAEWDAFCEEQVLNLLGDAERLEKVWVAGSDSAVELAEVNAELVDLTSLIGSPAYRAGSPQREALDARIAALAARQEELEGLEARPSGWEWRETGQRFGDWWREQNTAAKNTWLRSMNVRLTFDVRGGLTRTIDFGDLHEYERHLRLGSVAERLRTGMS

SEQ ID NO: 9013 - protein, 500 aa, synthetic construct
MRALVVIRLSRVTDATTSPERQLESCQQLCAQRGWDVVGVAEDLDVSGAVDPFDRKRRPNLARWLAFEEQPFDVIVAYRVDRLTRSTRHLQQLVHWAEDHKKLVVSATEAHFDTTTPFAAVVIALMGTVAQMELEAIKERNRSAAHFNIRAGKYRGSLPPWGYLPSRVDGEWRLAPDPVQRERILEVYHRVVDNHEPLHWVAHDLNRRGVLSPKDYFAQLQGREPQGRKWSATALKRSMISEAMLGYATLNGKTVRDDDGAPLVRAEPILTREQLEALRAELVKTSRAKPAVSAPSLLLRVLFCAVCGEPAYKFAGGGRKHPRYRCRSMGFPKHCGNGTVVMAEWDAFCEEQVLDLLGDAERLEKVWVAGSDSAVELAEVNAELVDLTSLIGSPAYRAGSPQREALDARIATLAARQEELEGLEARPSGWEWRETGQRFGDWWHEQDTAAKNTWLRSMNVRLTFDVRGGLTRTIDFGDLQEYEQHLRLGSVVERLHTGMS

SEQ ID NO: 9014 - protein, 500 aa, synthetic construct
MRALVVIRLSRVTDATTSPERQLESCQQLCAQRGWDVVGVAEDLDVSGAVDPFDRKRRPNLARWLAFEEQPFDVIVAYRVDRLTRSTRHLQQLVHWAEDHKKLVVSATEAHFDTTTPFAAVVIALMGTVAQMELEAIKERIRSAAHFNIRAGKYRGSLPPWGYLPTRVDGEWRLAPDPVQRERILEVYHRVVDNHEPLHLVAHDLNRRGVLSPKDYFAQLRGREPRGRKWSATALKRSMTSEAMLGYATLNGKTVRDNDGAPLVRAEPILTREQQEVLRAELAKTSRAKPAVSTPSLLLRVLFCAVCGEPAYKFVGGGRKHPRYRCRSMGFPKHCGNGTVAMAEWDAFCEEQVLDLLGDAERLEKVWVAGSDSAVELAEVNAELVDLTSLIGSPAYRAGSPQREALDARIAALAARQEELEGLEARPSGWEWRETGQRFGDWWREQDTAAKNTWLRSVNVRLTFDVRGGLTRTIDFGDLQEYEQHLRLGSVVKRLHTGTS

SEQ ID NO: 9015 - protein, 500 aa, synthetic construct
MRALVVIRLSRVTDATTSPERQLESCQQLCAQRGWDVVGVAEDLDVSGAVDPFDRKRRPNLARWLAFEEQPFDVIVAYRVDRLTRSTRHLQQLVHWAEDHKKLVVSATEAHFDTTTPFAAVVIALMGTVAQMELEAIKERNRSAAHFNIRAGKYRGSLPPWGYLPTRVDGEWRLVPDPVQRERILEVYHRVVDNHEPLHLVAHDLNRRGVLSPKDYFAQLQGREPQGRKWSATALKRSMISEAMLGYATLNGKTVRDDDGAPLVRAEPILTRGQLEALRAELVKTSRAKPAVSTPSLLLRVLFCAVCGEPAYKFAGGGRKHPRYRCRSMGFLKHCGNGTVVMAEWDAFCEEQVLDLLGDAERLEKVWVAGSDSAVELAEVSAELVDLTSLIGSPAYRAGSPQREALDARIAALAARQEELEGLGARPSGWEWRETGQRFGDWWREQDTVAKNTWLRSMNVRLTFDVRGGLTRTIDFGDLQEYVQHLRLDSVVERLLTGMP

SEQ ID NO: 9016 - protein, 500 aa, synthetic construct
MRTLVVIRLSRVTDATTSPERQLESCQQLCAQRGWDVVGVAEDLDVSGAVDPFDRKRRPSLARWLAFEEQPFDVIVAYRVDRLTRSVRHLQRLVHWAEDHKKLVVSATEAHFDTTTPFAAVVIALMGTVAQMELEAIKERNRSAAHFNIRAGKYRGSLPPWGYLPTRVDGEWRLAPDPVQRERILEVYHRVVDNHEPLHLVAHDLNRRGVLSPKDYFAQLQGREPQGRKWSATALKRSMISGAMLGYATLNGKTVRDDDGAPLVRAEPILTREQLEALRAELVKTSRAKPAVSTPSLLLRVLFCAVCGEPAYKFAGGGRKHPRYRCRSVGFPKHCGNGTVAMAEWDAFCEEQVLNLLGDAERLEKVWVTGSDSAVELAEVNAELVDLTSLIGSPAYRAGSPQREALDARIAALAARQEELEGLEARPSGWEWRETGRRFGDWWREQDTAAKNTWLRSMNVRLTFDVRGGLTRTIDFGDLQGYEQHLRLGSVVERLHTGMS

SEQ ID NO: 9017 - protein, 500 aa, synthetic construct
MRALVVIRLSRVTDATTSPERQLESCQQLCAQRGWDVVGVAEDLDVSGAVDPFDRKRRPHLARWLAFEEQPFDVIVAYRVDRLTRSTRHLQQLVHWAEDHKKLVVSATEAHFDTTTPFAAVVIALMGTVAQMELEAITERNRSAAHFNIRAGKYRGSLPPWGYLPTRVDGEWRLAPDPEQRERILEVYHRVVDNHEPLHLVAHDLNRRGVLSPKDYFAQLQGREPQGRKWSATALKRSMISEAMLGYATLNGKTVRDDDGAPLVRAEPILTRGQLEALRAVLVKTSRAKPAVSTPSLLLRVLFCAVCGEPAYKFAGGGRKHPRYRCRSMGFPKHCGNGTVAMAEWDAFCEEQVLNLLGDAERLERVWVAGSDSAVELAEVNAELVDLTSLIGSPAYRAGSPQREALDARIAALAARQEELEGVEARPSGWGWRETGQRFGDWWRGQDTAAKNTWLRSMNVRLTFDVRGGLTRTIDFGDLQEYEQHLRLGSVVERLHTGMS

SEQ ID NO: 9018 - protein, 500 aa, synthetic construct
MRALVVIRLSRVTEATTSPERQLESCQQLCAQRGWDVVGVAEDLDVSGAVDPFDRKRRPNLARWLAFEEQPFDAIVAYRVDRLTRSIRHLQQLVHWAEDHKKLVVSATEAHFDTTTPFAAVIIALMGTVAQMELEAIKERIRSAVRFNIRAGKYRGSLPPWGYLPTRVDGEWRLAPDPVQRERIFEVYHRVVDNHEPLHLVAHDLNRRGVLSPKDYFAQLQGREPRGRKWSATALKRSMTSEAMLGYATLNGKTVRDDDGAPLVRAEPILTREQQEALRAELAKTSRAKPAVSTPSLLLRVLFCAVCGEPAYKFVGGGRKHPRYRCRSMGFPEHCGNGTVVMTEWDAFCEEQVLGLLGDAERPEKVWVAGSDSAVELAEVNAELVDLTSSIGSPAYRAGSPQREALDARIAALAARQEELEGLEARPSGWEWRGTGQRLGDWWREQDTAAKNTWLRSMNVRLTFDVRGGLTRTIDFGDLQEYEQHLRLGSVVKRLHTGMS

SEQ ID NO: 9019 - protein, 500 aa, synthetic construct
MRALVVIRLSRVTDATTSPERQLESCQQLCAQRGWDVVGVAEDLDVSGAVDPFDRKRRPNLARWLALEEQPFDVIVAYRVDRLTRSVRHLQQLVHWAEDHEKLVVSATEAHFDTTTPFAAVVIALMGTVAQMELEAIKERNRSAAHFNIRAGKYRGSLPPWGYLPTRVDGEWRLAPDPVQRERILEVYHRVVDNHEPLHLVAHDLNRRGVLSPKDYFAQLQGREPQGRKWSATALKRSMISEAMLGYATLNGKTVRGDDGAPLVRAEPILTREQLEALRAELVKTSRAKPAVSTPSLLLRVLFCAVCGEPAYKFAGGGRKHPRYRCRSMGFPKHCGNGTVAMAEWDAFCEEQVLDLLGGVERLEKVWVAGSDSAAELAEVNAELVDLTSLIGSPAYRAGSPQREALDVRIAALAARQEELEGLGARPSGWEWRETGQRFGDWWREQDTAAKNTWLRSMNVRLTFDVRGGLTRTIDFGDLQEYEQHLRLGSVVERLHTGMS

SEQ ID NO: 9020 - protein, 500 aa, synthetic construct
MRALVVIRLSRVTDATTSPERQLESCQQLCAQRGWDIVGVAEDLDVSGAVDPFDRKRRPNLARWLAFEEQPFDVIVAYRVDRLTRSTRHLQQLVHWAEDHKKLVVSATEAHFDTTTPFAAVVIALMGTVAQMELEAIKERNRSAAHFNIRAGKYRGSLPPWGYLPTRVDGEWRLVPDPVQRERILEVYHRVVDNHEPLHLVAHDLNRRGVLSPKDYFAQLQGREPQGRKWSATALKRSMISEAMLGYATLNGKTVRDDDGAPLVRAEPILTREQLEALRAELVKTSRAKPAVSTPSLLLRVLFCAVCGEPAYKFAGGGRKHPRYRCRSMGFPKHCGNGTVVMAEWDAFCEEQVLDLLGDAERLEKVWVVGSDSAVELAEVNAELVDLTSLIGSPAYRAGSPQREAIDARIAALAARQEELEGSEARPSGWEWRGTGQRFGDWWREQDTATKNTWLRSMNVRLTFDVHGGLTRTIDFGDLQEYEQHLRLGSVVERLHAGMS

SEQ ID NO: 9021 - protein, 500 aa, synthetic construct
MRALVVIRLSRVTEATTSPERQLESCQQLCAQRGWDVVGVAEDLDVSGAVDPFDRKRRPNLARWLAFEEQPFDVIVAYRVDRLTRSTRHLQQLVRWAEDHKKLVVSATEAHFDTTTPFAAVVIALMGTVAQMELEAIKERIRSAAHFNIRAGKYRGSLPPWGYLPTRVDGEWRLVPDPVQRERILEVYHRVVDNHEPLHLVAYDLNRRGVLSPKDYFAQLQGREPRGRKWSATALRRSMISVAMLGYATLNGKIVRDDDGAPLVRAEPILTREQQEALRAELAKTSRAKPAVSTPSLLLRVLFCAVCGEPAYKFVGGGRKHPRYRCRSTGFPKHCGNGTVVMAEWDAFCEEQVLDLLGDAERLEKVWVAGSDSAVELAEVNAELMDLTSLIGSPAYRAGSPQREALDARIAALAARQEELEGLEARPSGWEWRGTGQRFRDWWREQDTAAKNTWLRSMSVRLTFDVRGGLTRTIDFGDLQEYEQHSRLGSVVERLHTGMS

SEQ ID NO: 9022 - protein, 500 aa, synthetic construct
MRALIVIRLSRVTDATTSPERQLESCQQLCAQRGWDVVGVAEDLNVSGAVDPFDRRRRPNLARWLAFEEQPFDAIVAYRVDRLTRSIRHLQQLVHWAEDHKKLVVSATEAHFDTTTPFAAVVIALMGTVAQMELEAIKERNRSAAHFNIRAGKYRGSLPPWGYLPTRVDGEWRLVPDPVQRERILEVYHRVVDNHEPLHLVAHDLNRRGVLSPKDYFAQLQGREPQGRKWSATALKRSMISEAMLGYATLSGKIVRDDDGAPLVRAEPILTREQLEALRAELVKTSRAKPAVSTPSLLLRVLFCAVCGEPAYKFAGGGRKHPRYRCRSMGFPKHCGNGTVAMAEWDAFCEEQVLDLLGDAERLEKVWVAGSDSAVELAEVNAELVDLASLIGSPAYRAGSPQREALDARIAALAARQEELEGLEARPSGWEWRETGQRFGDWWREQDTAAKNTWLRSMNVRLTFDVRGGLTRTIDFGDLPEYEQHLRLGSVVERLHTGMS

SEQ ID NO: 9023 - protein, 500 aa, synthetic construct
MRALVVIRLSRVTDATTSPERQLESCQQLCAQRGWDVVGVAEDLDVSGAVDPFDRKRRPNLARWLAFEEQPFDVIVAYRVDRLTRSVRHLQQLVHWAEDHKKLVVSATEAHFDTTTPFAAVVIALMGTVAQMELEAIKERNRSAAHFNIRAGKYRGSLPPWGYLPTRVDGEWRLVPDPVQRERILEVYHRVVDNHEPLHLVAHDLNRRGVLSPKDYFAQLRGREPQGRKWSATALKRSMTSVAMLGYATLNGKTIRDNDGAPLVRAEPILTRGQLEALRTELVKTSRAKPAVSTPSLLLRVLFCAVCGEPAYKFAGGGRKHPRYRCRSMGFPKHCGNGTVVMAEWDAFCEEQVLGLLGGAERLEKVWVAGSDSAVELAEVNAELVDLTSLIGSPAYRAGSPQREALDARIAALAARQEELEGLGARPSGWERRETGQRFGDWWREQDTAAKNTWLRSMNVRLTFDARGGLTRTIDFGDLQEYEQHLRLGGVVERLHTGMS

SEQ ID NO: 9024 - protein, 500 aa, synthetic construct
MRALVVIRLSRVTDATTSPERQLESCQQLCTQRGWDVVGVAEDLDVSGAVDPFDRKRRPNLARWLAFEEQPFDVIVAYRVDRLTRSTRHLQQLVHWAEDHKKLVVSATEAHFDTTTPFAAVVIALMGTVAQMELEAIKERNRSAAHFNIRAGKYRGSLPPWGYLPTRVDGEWRLVPDPVQRERILEVYHRVVDNHESLHLVAHDLNRRGVLSPKDYFAQLQGREPQGRKWSATALKRSMISEAMLGYATLNGKTVRDDNGAPLVRAEPILTREQLEALRAELVKTSRAKPAVSTPTLLLRVLFCAVCGEPAYKFAGGGRKHPRYRCRSMGFPKHCGNGTVTMAEWDAFCEEQVLNLLGDTERLEKVWVAGSDSAVELAEVNAELVDLTSLIGSPAYRAGSPQREALDARIAALAARQEELEGLEARPSGWEWRETGQRFGDWWRGQDTAAKNTWLRSMNVRLTFDVRGGLARTIDFGELQEYEQHLRLGSVVERLHTGMS

SEQ ID NO: 9025 - protein, 500 aa, synthetic construct
MRALVVIRLSRVTDATTSPERQLESCQQLCAQRGWDVVGVAEDLNVSGAVDPFDRKRRPNLARWLAFEEQPFDAIVAYRVDRLTRSIRHLQQLVHWAEDHKKLVVSATEAHFDTTTPFAAVVIALMGTVAQMELEAIKERNRSAAHFNIRAGKYRGSLPPWGYLPTRVDGEWRLVPDPVQRERILEVYHRVVDNHEPLHLVAHDLNRRGVLSPKDYFAQLQGREPQGRKWSATALKRSMISEAMLGYATLNGKTVRDDDGAPLVRAEPILTREQLEALRAELARSSRAKPAVSTPSLLLRVLFCAVCGEPAYKFAGGGRKHPRYRCRSMGFPKHCGNGTVVMAEWDAFCEEQVLDLLGDAERLEKVWVAGSDSAVELAEVNAELVDLTSLIGSPAYRASSPQREALDARIAALAARQEELEGLGARPSGWEWRETGQRFGDWWREQDTAAKNTWLRSMNVRLTFDVRGGLTRTIDFGDLQEYEQHLRLGSVVERLHTGMS

SEQ ID NO: 9026 - protein, 500 aa, synthetic construct
MRALVVTRLSRVTDATTSPERQLESCQRLCAQRGWDVVGVAEDLDVSGAVDPFDRKRRPNLARWLAFEEQPFDVIVAYRVDRLTRSTRHLQQLVRWAEDHKKLVVSATEAHFDTTTPFAAVVIALMGTVAQMELEATKERIRSAVHFNIRAGKYRGSLPPWGYLPTRVDGEWRLVPDPVQRERILEVYHRVVDNHEPLHLVAHDLNRRGVLSPKDYFAQLQGREPQGRRWSATALKRSMISVAMLGYATLNGKTVRDDDGAPLVRAEPILTREQQEALRAELVKTSRAKPAVSTPSLLLRVLFCAVCGEPAYKFTGGGRKHPRYRCRSTGFPKHCGNGTVVMAEWDAFCEEQVLNLLGDAERLEKVWVAGSDSAIELAEVNAELVDLTSLIGSPAYRAGSPQREALDARIAALAARQEELEGLEARPSGWEWRETGQRFGDWWREQGTAAKNTWLRSMNVRLTFDVRGGLTRTIDFGDLQEYEQHLRSGSVVERLHTGMS

SEQ ID NO: 9027 - protein, 500 aa, synthetic construct
MRALVVIRLSRVTDATTSPERQLESCQQLCAQRGWDVAGVAEDLDVSGAVDPFDRKRRPNLARWLAFEEQPFDVIVAYRVDRLTRSTRHLQRLVHWAEDHKKLVVSATEAHFDTTTPFAAVVIALMGTVAQMELEAIKERNRSAAHFNIRAGKYRGSLPPWGYLPTRVDGEWRLAPDPVQRERILEVYHRVVDNHEPLHLVAHDLNRRGVLSPKDYFAQLRGREPQGREWSATALKRSMTSEAMLGYATLNGKTVRNDDGAPLVRAEPILTREQLEALRAELVKTSRAKPAVSTPSLLLRVLFCAVCGEPAYKFAGGGRKHPRYRCRSMGFPKHCGNGTVAMAEWDAFCEEQVLDLLGDAERLEKVWVAGSDSAVELAEVNAGLVDLTSLIGSPAYRAGSPQREALDARIATLAARQEELEGLGARPSGWEWRGTGQRFGDWWREQDTAAKNTWLRSMNVRLTFDVRGGLTRTIDFGDLQEYEQHLRLGSVVERLHTGMS

SEQ ID NO: 9028 - protein, 500 aa, synthetic construct
MRALVVIRLSRVTDATTSPERQLESCQQLCAQRGWDVVGVAEDLDVSGAVDPFDRKRRPNLARWLAFEEQPFDVIVAYRVDRLTRSTRHLQQLVRWAEDHKKLVVSATEAHFDTTTPFAAVVIALMGTVAQMELEAIKERIRSAAHFNIRAGKYRGSLPPWGYLPTRVDGEWRLVPDPVQRERILEVYHRVVDNHEPLHLVAHDLNRRGVLSPKDYFAQLRGREPQGRKWSATALRRSMTSGAMLGYATLNGETVRDDDGAPLVRAEPILTREQQEALRAELAKTSRAKPAVSTPSLLLRVLFCAVCGEPAYKFVGGGRKHPRYRCRSMGFPKHCGNGTVAMAEWDAFCEEQVLDLLGDAERLEKVWVAGSDSAVELAEVNAELVDLTSLIGSPAYRAGSPQREALDARIAALAARQEELEGLEARPSGWKWRETGQRFGDWWREQDTAAKNTWLRSMNVRLTFDVRGGLTRTIDFGDLQEYERHLRLGSVVERLRAGMS

SEQ ID NO: 9029 - protein, 500 aa, synthetic construct
MRALVVIRLSRVTDATTSPGRQLESCQQLCAQRGWDVVGVAEDLDVSGAVDPFDRKRRPNLARWLAFEEQPFDVIVAYRVDRLTRSTRHLQQLVHWAEDHKKLVVSATEAHFDTTTPFAAVVIALMGTVAQMELEAIKERIRSAVRFNIRAGKYRGSLPPWGYLPTRVDGEWRLVPDPVQRERILEVYHRVVDNHEPLHLVAHDLNRRGVLSPKDYFAQLRGREPQGREWSATALKRSMTSVAMLGYATLNGKIVRDDDGAPLVRAEPILTREQQEALRAELAKTSRAKPAVSTPSLLLRVLFCAVCGEPAYKFTGGGRKHPRYRCRSMVFPKHCGNGTVVMAEWDAFCEEQVLDLLGDAERLEKVWVAGSDSAVELVEVNAELVDLTSLIGSPAYRAGSPQREALDARIAALAARQEELEGLEARPSGWEWRETGQRFGDWWREQDTAAKNTWLRSMNLRLTFDVRGGLTRTIDFGDLQEYERHLRLGSVVERLRTGVS

SEQ ID NO: 9030 - protein, 500 aa, synthetic construct
MHALVVIRLSRVTDATTSPERQLESCQQLCAQRGWDVVGVAEDLDVSGAVDPFDRKRRPNLARWLAFEEQPFDVIVAYRVDRLTRSTRHLQQLVRWAEDHKKLVVSATEAHFDTTTPFAAVVIALMGTVAQMELEAIKERIRSAAHFNIRAGKYRGSLPPWGYLPTRVNGEWRLVPDPVQRERILEVYHRVVDNHEPLHLVAHDLNRRGVLSPKDYFAQLRGREPRGRKWSATALKRSMTSVAMLGYATLNGKTVRDDDGAPLVRAEPILTRGQQEALRAELAKTSRAKPAVSTPSLLLRVLFCAVCGEPAYKFVGGGRKHPRYRCRSMGFPKHCGNGTVVMTEWDTFCEEQVLNLLGDAERLEKVWVAGSDSAVELAEVNAELVDLTRLIGSPAYRAGSPQREALDARIAALAARQEELEGLEARPSGWEWRETGQRFGDWWREQDTAAKNTWLRSMNVRLTFDVRGGLTRTIDFGDLQEYEQHLRLGSVVERLHTGMS

SEQ ID NO: 9031 - protein, 500 aa, synthetic construct
MRALVVIRLSRVTDATTSPERQLESCQRLCAQRGWDVVGVAEDLDVSGAVDPFDRKRRPSLARWLAFEEQPFDVIVAYRIDRLTRSVRHLQQLVHWAEDHKKLVVSATEAHFDTTTPFAAVVIALMGTVAQMELEAIKERNRSAAHFNIRAGKYRGSLPPWGYLPTRVDGEWRLAPDPVQRERILEVYHRVVDNHEPLHLVAHDLNRRGVLSPKDYFAQLQGREPQGRKWSATALKRSMISEAMLGHATLNGKTVRDGDGAPLVRAEPILTREQLEALRAELVKTPRAKPAVSTPSLLLRVLFCAVCGEPAYKFAGGGRKHPRYRCRSMGFPKHCGNGTVVMAEWDAFCEEQVLGLLGDAERLEKVWVAGSDSAVELAEVNAELADLTGLVGSPAYRAGSPQREALDARIAALAARQEELEGLEARPSGWEWRETGQRLGDWWREQDTAAKNTWLRSMNVRLTFDVRGGLTRTIDFGDLQEYEQHSRLGSVVERLHTGMS

SEQ ID NO: 9032 - protein, 500 aa, synthetic construct
MRALVVIRLSRVTDATTSPERQLESCQQLCAQRGWDVVGVAEDLDVSGAVDPFDRKRRPNLARWLAFEEQPFDAIVAYRVDRLARSIRHLQQLVHWAEDHKKLVVSATEAHFDTATPFAAVVIALMGTVAQMELEAIKERNRSAAHFNIRAGKYRGSLPPWGYLPTRVDGEWRLVPDPVQRERILEVYHRVVDNHEPLHLVAHDLNRRGVLSPKDYFAQLRGREPQGRKWSATALKRSMISEAMLGYATLNGKTVRDDDGAPLVRAEPILTREQLEALRAELDKTSRAKPAVSTPSLLLRVLFCAVCGEPAYKSAGGGRKHPRYRCRSMGFPKHCGNGTVAMSEWDAFCEEQVLDLLGDAERLEKVWVAGSDSAVELAEVNAELVDLTSLIGSPAYRAGSPQREALDARIAALAARQEELEGLEARPSGWEWRETGQRFGDWWREQDTAAKNTWLRSMNVRLTFDVRGGLTRTIDFGDLQEYEQHLRLGSVVERLHTGMS

SEQ ID NO: 9033 - protein, 500 aa, synthetic construct
MRALVVIRLSRVTDATTSPERQLESCQQLCAQRGWDVVGVAEDLDVSGAVDPFDRKRRPNLARWLAFEEQPFDVIVAYRVDRLTRSTRHLQQLVHWAEDHEKLVVSATEAHFDTTTPFAAVVIALMGTVAQMELEAIRERNRSAAHFNIRAGKYRGSLPPWGYLPARVDGEWRLVPDPVQRERILEVYHRVVDNHEPLHWVAHDLNRRGVLSPKDYFAQLRGREPQGREWSATALKRSMTSEAMLGYATLNGKTVRDDDGAPLVRAEPILTRGQLEALRAELVKTSRAKPAVSTPPLLLRVLFCAVCGEPAYKFAGGGRKHPRYRCRSMGYPKHCGNGTVVMAEWDAFCEEQVLDLLGDAERLEKVWVAGSDSAVELAEVNAELVDLTSLIGSPAYRAGSPQREALDARIAALAARQEELEGLEARLSGWEWRETGQRFEDWWREQDTTAKNTWLRSMNVRLTFDVRGGLTRTIDFGGLQEYEQLLRLGSVVERIHTGMS

SEQ ID NO: 9034 - protein, 500 aa, synthetic construct
MRALVVIRLSRVTDATTSPERQLESCQQLCAQRGWDVVGVAEDLDVSGVVDPFDRKRRPSLARWLAFEEQPFDVIVAYRVDRLTRSTRHLQQLVHWAEDHKKLVVSATEAHFDTTTPFAAVVIALMGTVAQMELEAIRERCRSAAHFNIRAGKYRGSLPPWGYLPTRVDGEWRLAPDPVQRERILEVYHRVVDNHEPLHLVAHDLNRRGVLSPKDYFAQLRGREPQGRKWSATALKRSMISVAMLGYATLNGKTVRDDDGAPLVRAEPILTREQQEALRAEFAKTSRAKPAVSTPSLLLRVLFCAVCGEPAYKFVGGGRKHPRYRCRSMGFPKHCGNGTVVMAEWDAFCEEQVLNLLGDAERLEKVWVAGSDSAVELAEVNAELVDLTSLIGSPAYRAGSPQREALDARIAALAARQEELEGLEARPSGWEWRETGQRFGDWWRGQDTAAKNAWLRSMSVRLTFDVRGGLARTIDFGDLQEYEQHLRLGSVVERLHTRTP

SEQ ID NO: 9035 - protein, 500 aa, synthetic construct
MRALVVIRLSRVTDATTSPERQLESCQQLCAQRGWDVVGVAEDLDVSGAVDPFDRKRRPNLARWLAFEEQPFDVIVAYRVDRLTRSTRHLQQLVHWAEDHRKLVVSATEAHFDTTTPFAAVVIALMGTVAQMELEAIKERNRSAAHFNIRAGKYRGSLPPWGYLPARVDGEWRLVPDPVQRERILEVYHRVVDNHEPLHLVAHDLNRRGVLSPKDYFAQLRGREPQGRKWSATALKRSMISEAMLGYATLNGKTVRDDDGAPLVRAEPILTREQLEALRAELVKTSRVKPAVTTPSLLLRVLFCAVCGEPAYKFAGGGRKHPRYRCRSMGFPKHCGNGTVAMAEWDAFCEGQVLDLLGDAERLEKVWVAGSDSAVELAEVNAELVDLTSLIGSPAYRAGSPQREALDARIAALAARQEELEGLEARPSGWEWRGTGQRFGDWWREQDTAAKNTWLRSMNVRLTFDVRGGLTRTIDFGDLQEYEQHLRLGSVVECLHTGMS

SEQ ID NO: 9036 - protein, 500 aa, synthetic construct
MRALVVIRLSRVTDATTSPERQLESCQQLCAQRGWDVVGVAEDLDVSGAVDPFDRKRRPNLARWLAFEEQPFDVIVAYRVDRLTRSTRHLQQLVHWAEDHKKLVVSATEAHFDTTTPFAAVVIALMGTVAQMELEAIKERNRSAAHFNIRAGKYRGSLPPWGYLPTRVDGEWRLVPDPVQRERILEVYRRVVDNHESLHLVAHDLNRRGVLSPKDYFAQLQGREPQGRKWSATALKRSMTSEAMLGYATLNGKTVRDDDGAPLVRAEPILTREQLEALRAELVKTSRAKPAVSTPSLLLRVLFCAVCGEPAYKFAGGGRKHPRYRCRSMGFPKHCGNGTVAVAEWDAFCEEQVLELLGDAERLEKVWVAGSDSAVELAEVNAELVDLTSLIGSPAYRAGSPQREALDARIAALAARQEELEGLEARPSGWGWRETGQRFGDWWREQDTAAKNTWLRSVNVRLTFDTRGGLTRTIDFGDLQEYGQHLRLGSVVERLRTGMS

SEQ ID NO: 9037 - protein, 500 aa, synthetic construct
MRALVVIRLSRVTDATTSPERQLESCRQLCAQRGWDVVGVAEDLDVSGAVDPFDRKRRPNLARWLASEEQPFDVIVAYRVDRLTRSVRHLQRLVRWAEDHKKLVVSATEAHFDTTTPFAAVVIALMGTVAQMELEAIKERIRSAVRFNIRAGKYRGSLPPWGYLPTRVDGEWRLVPDPVQRERILEVYHRVVDNHEPLHLVAHDLNRRGVLSPKDYFAQLRGREPQGRKWSATALKRSMISVAMLGYATLNGKTVRGDDGAPLVRAEPILTREQQEALRAELVKTSRAKPAVSTPSLLLRVLFCAVCGEPAYKFVGGGRKHPRYRCRSMGFPEHCGNGTVVMAEWDAFCEEQVLDLLGDAERLEKVWVAGSGSAVELAEVNAELVDLTSLIGSPAYRAGSPQREALDARIAALAARQEELEGLEARPPGWEWRETGQRFGDWWREQDTAAKNIWLRSMNVRLTFDVRGGLTRTIDFGDLQEYEQHLRLGSGVERLHTGMS

SEQ ID NO: 9038 - protein, 500 aa, synthetic construct
MRALVVIRLSRVTDATTSPERQLESCQQLCAQRGWDVIGVAEDLDVSGAVDPFDRKRRPNLARWLAFEEQPFDVIVAYQVDRLTRSARHLQQLVHWAEDHKKLVVSATEAHFDTTTPFAAVVIALMGTVAQMELEAIKERNRSAAHFNIRAGKYRGSLPPWGYLPTRVDGEWRLVPDPVQRERILEVYHRVVDNHEPLHLVAHDLNRRGVLSPKDYFAQLRGREPQGRKWSATALKRSMISEAMLGYATLNGKTVRDDDGAPLVRAEPILTREQLEALRAVLVKTSRAKPTVSTPSLLLRVLFCAVCGEPAYKFARGGRKHPRYRCRSMGFQKHCGNGTVAMAEWDAFCEEQVLNLLGDAERLEKVWVAGSDSAVELAEVNAELVDLTSLIGSPAYRAGSPQREALDARIAALAARQEELEGLGARPSGWGWRETGQRFGDWWREQDTAAKNTWLRSMNIRLTFDVRGGLTRTIDFGDLQGHGQHLRLGSVVERLHTGMS

SEQ ID NO: 9039 - protein, 500 aa, synthetic construct
MRALVVIRLSRVTDATTSPERQLESCQQLCAQRGWDVVGVAEDLDVSGTVDPFDRKRRPNLARWLAFEEQPFDVIVAYRVDRLTRSTRHLQQLVHWAEDHKKLVVSATEAHFDTTTPFAAVVIALMGTVAQMELEAIKERNRSAAHFNIRAGKYRGSLPPWGYLPTRVDGEWRLVPDPVQRERILEVYHRVVDNHEPLHWVAHDLNRRGVLSPKDYFAQLQGREPQGRKWSATALKRSMISEAMLGYATLNGETVRDDDGAPLVRAEPILTREQLEALRAELVKTSRAKPAVSTPSLLLRVLFCAVCGEPAYKFAGGGRKHPRYRCRSMGFPKHCGNGTVAMAEWDAFCEEQVLDLLGDAERLEKVWVAGSDSAIELAEVNAELVDLTSLIGSPAYRAGSPQREALDARIAALAARQEELEDLEARPSGWGWRGTGQRFGDWWRGQDTAAKNTWLRSMNVRLTFDVRGGLTRTIDFGDLQEYEQHLRLGSVVERLHTGMS

SEQ ID NO: 9040 - protein, 500 aa, synthetic construct
MRALVVIRLSRVTDATTSPERQLESCQQLCAQRGWDVVGVAEDLDVSGAVDPFDRKRRPNLARWLAFEEQPFDVIVAYRVDRLTRSTRHLQQLVRWAEDHKKLVVSATEAHFDTTTPFAAVVIALMGTVAQMELEAIRERSRSAAHFNIRAGKYRGSLPPWGYLPTRVDGEWRLVPDPVQRERILEVYHRVVDNHEPLHLVAYDLNQRGVLSPKDYFAQLRGREPQGRKWSATALKRSMISGAMLGYATLNGKIVRDDDGAPLVRAEPILTREQLEALRAELAKTSRAKPAVSTPSLLLRVLFCAVCGEPAYKFVGGGRKHPRYRCRSMVFPKHCGNGTVALAEWDAFCEKQVLDLLGDAERLERVWVAGSDSAVELAEVNAELVDLTSLIGSPVYRAGSPQREALDARIAALAARQGVLEGLEVRPSGWEWRGTGQRFGDWWREQDTAAKNTWLRSMNVRLTFDVRGGLTRTIDFGDLQEYEQHLRLGSVVERLRTGMS

SEQ ID NO: 9041 - protein, 500 aa, synthetic construct
MRALVVIRLSRVTDATTSPERQLESCQQLCAQRSWDVVGVAEDLDVSGAVDPFDRKRRPNLARWLAFEEQPFDVIVAYRVDRLTRSTRHLQQLVHWAEDHKKLVVSATEAHFDTTTPFAAVVIALMGTVSQMELEAIKERNRSAAHFNIRAGKYRGSLPPWGFLPARVDGEWRLVPDPVQRERILEVYHRVVDNHEPLYLVAHDLNRRGVLSPKDYFAQLQGREPQGRKWSATALKRSMISEAMLGYATLNGKTVRDNDGAPLVRAEPILTREQLEALRAELVKTSRAKPAVSTPSLLLRVLFCAVCGEPAYKFAGGGRKHPRYRCRSMGFPKHCGNGTVVMAEWDAFCEEQVLDLLGDAKRLEKVWVAGSDSAVELAEVNAELVDLTSLIGSPAYRAGSPQREALDARIAALAARQGELEGLEARPSGWEWRETGQRFGDWWREQDTAAKNAWLRSMNVRLTFDVRGGLTRTIDFGELQEYEQHLRLGSVVERLHTGRS

SEQ ID NO: 9042 - protein, 500 aa, synthetic construct
MRALVVIRLSRVTDATTSPERQLESCQQLCAQRGWDVVGVAEDLDVSGAVDPFDRKRRPNLARWLAFEEQPFDVIVAYRVDRLTRSTRHLQQLVRWAEDHKKLVVSATEAHFDTTTPFAAVVIALMGTVAQMELESIKERIRSAAHFNIRAGKYRGSLPPWGYLPTRVDGEWRLAPDPVQRERILEVYHRVVDNHEPLHSVAHDLNRRGVLSPKDYFAQLQGREPQGRKWSATALKRSMISVAMLGYATLNGKIVRDDDGAPLVRAEPILTREQQEALRAELVKTSRAKPAVSTPSLLLRVLFCAVCGEPAYKFVGGGRKHPRYRCRSMGFPKHCGNGTVVMTEWDVFCEEQVLDLLGDAERLEKVWVAGSDSAVELAEVNTELVDLTSLIGSPAYRAGSPQREALDVRIAALAARQEELEGLEARPSGWEWRGTRQRFRDWWREQDTAAKNTWLRAMNVRLTFDVRGGLTRTIDFGELQEYEQHLRLGSAVERLHSGTS

SEQ ID NO: 9043 - protein, 500 aa, synthetic construct
MRALVVIRLSRVTDATTSPERQLESCQQLCAQRGWDVVGVAEDLDVSGAVDPFDRKRRPNLARWLAFEEQPFDVIVAYRVDRLTRSTRHLQQLVHWAEDHKKLVVSATEAHFDTTTPFAAVVIALMGTVAQMELEAIKERNRSTAHFNIRAGKYRGSLPPWGYLPARVDGEWRLVPDPVQRERILEVYHRVVDNHEPLHLVAHDLNRRGVLSPKDYFAQLQGREPQGRKWSATALKRSMISGAMLGYATLNGKTVRDDDGAPLVRAEPILTREQLEALRAELVKTSRAKPAVSTPSLLLRVLFCAVCGEPAYKFAGGGRKHPRYRCRSMGFPKHCGNGTAAMAEWDAFCEEQVLDLLGDAERLEKVWVAGSDSAVELAEVNAELVDLTSLIGSPAYRAGSPQREALDARIAALAARQEELEGLEARPSGWEWRETGQRFGDWWREQDTAAKNTWLRSMNVRLTFDVRGGLTRTIDFGDLQEYEQHLRLGSVVERLHTGMS

SEQ ID NO: 9044 - protein, 500 aa, synthetic construct
MHALIVIRLSRVTDATTSPERQLESCQQLCAQRGWDVVGVAEDLDVSGAVDPFDRKRRPNLARWLAFEEQPFDVIVAYRVDRLTRSTRHLQQLVHWAEDHKKLVVSATEAHFDTTTPFAAVVIALMGTVAQMELEAIKERIRSAAHFNIRAGKYRGSLPPWGYLPTRVDGEWRLVPDPVQRERILEVYHRVVDNHEPLHLVAHDLNRRGVLSPKDYFAQLRGREPQGRKWSATALKRSMTSVAMLGYATLNGKIVHDDDGAPLVRAEPILTREQQEALRAELVKTSRAKPAVSTPSLLLRVLFCAVCGEPAYKFVGGGRKHPRYRCRSMGFPKHCGNGTVVMTEWDAFCEEQVLDLLGDAERLEKVWVAGSDSAIELAEVNAELVDLTSLIGSPAYRAGSPQREALDARIAALAARQEELEGLEARPSGWEWRETGQRFGDWWREQDTAAKNAWLRSMNVRLTFDVRGGLTRTIDFGDLQEYERHLRLGSAVERLHTGTS

SEQ ID NO: 9045 - protein, 500 aa, synthetic construct
MRALVVIRLSRVTDATTSPERQLESCQQLCAQRGWDVVGVAEDLDVSGAVDPFDRKRRPNLARWLAFEEQPFDVIVAYRVDRLTRSVRHLQQLVHWAEDHKKLVVSATEAHFDTTTPFAAVVIALMGTVAQMELEAIRERNRSAAHFNIRAGKYRGSLPPWGYLPTRVDGEWRLVPDPVQRERILEVYHRVVDNHEPLHLVAHDLNRRGVLSPKDYFAQLRGREPQGRKWSATALKRSMISEAMLGYATLHGKTVRDDDGVPLVRAEPILTREQLEVLRAELVKTSRAKPAVSTPSLLLRVLFCAVCGEPAYKFAGGGRKHPRYRCRSMGFPKHCGNGTVVMAEWDAFCEEQVLDLLGDAERLEKVWVAGSDSAVELAEVNAELVDLTGLIGSPTYRTGSPQREALDARIAALAARQEELEGLEARLSGWEWRGTGQRFGDWWREQDTAAKNAWLRSMNVRLTFDVRGGLTRTIDFGDLQEYEQHLRLGSVVERLHTGMP

SEQ ID NO: 9046 - protein, 500 aa, synthetic construct
MRALVVIRLSRVTDGTTSPERQLESCQQLCAQRGWDVVGVAEDLDVSGAVDPFDRKRRPNLARWLAFEEQPFDVIVAYRVDRLTRSVRHLQQLVRWAEDHKKLVVSATEAHFDTTTPFAAVVIALMGTVAQMELEAIKERIRSAAHFNIRAGKYRGSLPPWGYLPARVDGEWRLVPDPVQRERILEVYHRVVADHEPLHLVAHDLNRRGVLSPKDYFAQLQGREPQGRKWSATALKRSMTSKAMLGYATLNGKTVRGDDGAPLVRAEPILTREQLEALRAELAKTSRAKPVVSTPSLLLRVLFCAVCGEPAYKFVGGGRKHPRYRCRSMGFPKHCGNGTVVMTEWDAFCEEQVLDLLGDAERLEKVWVAGSDSSVELAEVNAELVDLTSLIGSPAYRAGSPQREALDARIAALAARQEELEGLEARPSGWEWRGTGQRFRDWWREQDTAAKNAWLRAMNVRLTFDVRGGLTRTIDFGDLQEYEQLLRLGSVVERLHTGMS

SEQ ID NO: 9047 - protein, 500 aa, synthetic construct
MRALVVIRLSRVTDATTSPERQLESCQQLCAQRGWDVVGVAEDLDVSGAVDPFDRKRRPNLARWLAFEEQPFDVIVAYRVDRLTRSTRHLQQLVHWAEDHKKLVVSATEAHFDTTTPFAAVVIALMGTVAQMELEAIKERNRSAAHFNIRAGKYRGSLPPWGYLPARVDGEWRLVPDPVQRERVLEVYHRVVDNHEPLHLVAHDLNRRGVLSPKDYFAQLRGREPQGRKWSATALKRSMISEAMLGYATLNGKTVRDDDGAPLVRAEPILTREQLEALRAELVKTSRAKPAVSTPSLLLRVLFCAVCGEPAYKFAGGGRKHPRYRCRSMGFPKHCGNGTVVMAEWDAFCEEQVLGLLGDAERLEKVWVVGSDSVVELAEVNAELVDLMSLIGSPAYRAGSPQREALDARIAALAARQEELEGLEARPSGWEWRETGQRFGDWWREQDTAAKNTWLRSMNVRLTFDVRGGLTRTIDFGDLREYEQYLRLGSVVERLHTGMS

SEQ ID NO: 9048 - protein, 500 aa, synthetic construct
MRALVVIRLSRVTDATTSPERQLESCQQLCAQRGWGVVGVAEDLDVSGAVDPFDRKRRPNLARWLAFEEQPFDVIVAYRVDRLTRSTRHLQQLVRWAEDHKKLVVSATEAHFDTTTPFAAVVIALMGTVAQMELEAIKERIRSAAHFNIRAGKYRGSLPPWGYLPTRVDGEWRLVPDPVQRERILEVYHRVVDNHEPLHLVAHDLNRRGVLSPKDYFAQLQGREPRGRKWSATALKRSMISGAMLGYATLSGKTVRGDDGAPLVRAEPILTREQQEALRAELAKTSRAKPAVTTPSLLLRVLFCAVCGEPAYKFVGGGRKHPRYRCRSMGFPEHCGNGTVALVEWDAFCEEQVLNLLGDAERLEKAWVAGSDSAVELAEVNAELVDLTSLIGSPAYRAGSPQREALDARIAALAARQEELEGLEARPPGWEWRRTEQRFGDWWREQDTAAKNTWLRSMNVRLTFDVRGGLTRTIDFGDLQEYEQHLRSGSVVERLHTGMS

SEQ ID NO: 9049 - protein, 500 aa, synthetic construct
MRALVVIRLSRVTDATTSPERQLESCQQLCAQRGWDVVGVAEDLDVSGAVDPFDRKRRPNLARWLAFEEQPFDVIVAYRVDRLTRSTRHLQQLVHWAEDHKKLVVSATEAHFDTTTPFAAVVIALMGTVAQMELEAIKERNRSAAHFNIRAGKYRGSLPPWGYLPTRVDGEWRLVPDPVQRERILEVYHRVVDNHEPLHLVAHDLNRRGVLSPKDYFAQLQGREPQGRKWSATALKRSMISEAMLGYATLNGKIVRDDDGAPLVRAEPILTREQLEALRAELVKTPRAKPAVSTPSLLLRVLFCAVCGEPAYKFAGGGRKYPRYRCRSMGFPKHCGNGTVAMAEWDAFCEEQVLDLLGDAERLEKVWVAGSDSAVELAEVNAELVDLTSLVGSPAYRAGSPQREALDARIAALAARQGELEGLGARPSGWEWRETGQRFGDWWREQDTAAKNTWLRSMNVRLTFDVRGGLTRTIDFGDLQEYEQHLRLGSVVERIHTGMS

SEQ ID NO: 9050 - protein, 500 aa, synthetic construct
MRALVVIRLSRVTDATTSPERQLESCQQLCAQRGWDVVGVAEDLDVSGAVDPFDRKRRPNLARWLAFEEQPFDVIVAYRVDRLTRSVRHLQQLVHWAEDHKKLVVSATEAHFDTTTPFAAVVIALMGTVAQMELEAIKERNRSAAHFNIRAGKYRGSLPPWGYLPTRVDGEWRLVPDPVQRERILEVYHRVVDNHEPLHLVAHDLNRRGVLSPKDYFAQLRGREPQGRKWSATALKRSMISEAMLGYATLNGKTVRDDDGAPLVRAEPILTREQLEALRAELVKTSRAKPAVSTPSLLLRVLFCAVCGEPAYKFAGGGRKHPRYRCRSMGFPKHCGNGTVAMAEWDAFCEEQVLNLLGDAERLEKVWVAGSDSAVELAEVNAELVDLTSLIGSPAYRAGSPQREALDARIAALAARQEELEGLEARPSGWEWRETGQRFGDWWCEQDIAAKNTWLRSMNVRLTFDVRGGLTRTIDFGGLLEHEQHLRLGGVVERLHTGMS

SEQ ID NO: 9051 - protein, 500 aa, synthetic construct
MRALIVTRLSRVTDATTSPERQLESCQQLCAQRGWDVVGVAEDLDVSGAVDPFDRKRRPNLARWLAFEEQPFDVIVAYRVDRLTRSVRHLQQLVRWAEDHKKLVVSATEAHFDTTTPFAAVVVALMGTVAQMELEAIKERIRSAVRFNIRAGKYRGSLPPWGYLPTRVDGEWRLVPDPVQSERILEVYHRVVDNHEPLHSVAHDLNRRGVLSPKDYFAQLQGREPQGRKWSATALKRSMISVAMLGYATLNGKIVRDDDGAPLVRAEPILTREQQEALRAELAKTSRAKPAVSTPSLLLRVLFCAVCGEPAYKFTGGGRKHPRYRCRSMGSPKHCGNGTVVMAEWDVFCEKQVLDLLGDAERLEKVWVAGSDSAVELAEVNAELVDLTSLIGSPAYRVGSPQREALDARIAALAARQEELEGLEARPSGWEWRGTGQRFGDWWREQDTAAKNTWLRSMNVRLTFDVRGGLTRTIDFGDLQEYEQHLRLGSVVERLHTGMS

SEQ ID NO: 9052 - protein, 500 aa, synthetic construct
MRALVVIRLSRVTDATTSPERQLESCRQLCAQRGWDVVGVAEDLDVSGAVDLFDRKRRPNLARWLAFEEQPFDVIVAYRVDRLARSTRHLQQLVHWAEDHKKLVVSATEAHFDTTTPFAAVVIALMGTVAQMELEAIKERNRSAAHFNIRAGKYRGSLPPWGYLPARVDGEWRLVPDPVQRERILEVYHRVVDDHEPLHLVAHDLNRRGVLSPKDYFAQLQGREPQGRKWSATALKRSMTSGAMLGYATLNGKTVRDDDGAPLVRAEPILTREQLEAIRAELVKTSRAKPAVSTPSLLLRVLFCAVCGEPAYKYAGGGRKHPRYRCRSMGFPKHCGNGTVAMAEWDAFCEEQVLDLLGDAERLEKVWVAGSDSAVELAEVNAELVDLTSLIGSPAYRAGSPQREALDARIAALAARQEELEGLEARPPGWEWRGTGQRFGDWWREQDTAAKNTWLRSMNVRLTFDVRGGLTRTIDFGDLQEYEQHLRLGSVVERLHTGMS

SEQ ID NO: 9053 - protein, 500 aa, synthetic construct
MRALVVIRLSRVTDTTTSPERQLESCQQLCAQRGWDVVGVAEDLDVSGAVDPFDRKRRPNLARWLAFEEQPFDVIVAYRVDRLSRSIRHLQQLVHWAEDHKKLVVSATEAHFDTTTPFAAVVIALMGTVAQMELEAIKERIRSAAHFNIRAGKYRGSLPPWGYLPTRVDGEWRLVPDPVQRERILEVYHRVVDNHEPLHLVAHDLNRRGVLSPKDYFAQLRGREPRGRKWSATALKRSMTSVAMLGYATLNGKIVRDDDGAPLVRAEPILTCEQLEALRAELAKTSRAKPAVSTPSLLLRVLFCAVCGEPAYKFVGGGRKHPRYRCRSMGFPKHCGNGTVVMAEWDVFCEEQVLGLLGDAERLEKVWLAGSDSAVELAEVNAELVDLVSLIGSPAYRAGSPQREALDARIAALAARQEELEGLEARPSGWEWRGTGQRLGDWWREQDTAAKNTWLRSMNIRLTFDVRGGLTRTIDFGDLLEYEQHLRLGSVVERLHTGMS

SEQ ID NO: 9054 - protein, 500 aa, synthetic construct
MRALVVIRLSRVTDATTSPERQLESCQQLCAQRGWDVVGVAEDLDVSGAVDPFDRKRRPNLARWLAFEEQPFDVIVAYRVDRLTRSSRHLQQLVHWAEDHKKLVVSATEAHFDTTTPFAAVVIALMGTVAQMELEAIKERNRSAAHFNIRAGKYRGSLPPWGYLPTRVDGEWRLVPDPVQRERILEVYHRVVDNHEPLHLVAHDLNRRGVLSPKDYFAQLRGREPQGRKWSATALKRSMISEAMLGYATLNGKTVRDDDGAPLVRAEPILTREQLEALRAELAKTSRAKPAVSTPSLLLRVLFCAVCGEPAYKFAGGGRKHPRYRCRSMGFPKHCGNGTVVMAEWDAFCEEQVLDLLGDAERLEKVWVAGSDSAVELAEVNAELVDLTSLIGSPAYRAGSPQREALDARIAALAARREELEGLEARPSGWEWRETGQRFGDWWREQDTAAKNTWLRSMNVRLTFDARGGLTRTIDFGDLQEYEQQLRLGSVVERLRTGMS

SEQ ID NO: 9055 - protein, 500 aa, synthetic construct
MRALVVIRLSRVTDATTSPERQLGSCQQLCAQRGWDVVGVAEDLDVSGAVDPFDRKRRPNLARWLAFEEQPFDVIVAYRVDRLTRSTRHLQQLVHWAEDHKKLVVSATEAHFDTTTPFAAVVIALMGTVAQMELEAIKERIRSAAHFNIRAGKYRGSLPPWGYLPTRVDGEWRLVPDPVQRERILEVYHRVVDNHEPLHLVAYDLNRRGVLSPKDYFAQLRGREPQGRKWSATALKRSMTSEAMLGYATLNGKTVRGDDGAPLVRAEPILTREQQEALRAELVKTSRAKPAVSTPSLLLRVLFCAVCGEPAYKFVGGGRKYPRYRCRSMGFPEHCGNGTVVMAEWDAFCEEQVLNLLGDTERLEKVWVAGSDSAVELAEVNAELVDLTSLIGSPAYRTGSPQREALDARIAALAARQEELEGLEARPSGWEWRGTGQRFGDWWRGQDTAAKNTWLRSMNVRLTFDVRGGLTRTIDFGELQVYEQHLRLGSVVERLHTGTS

SEQ ID NO: 9056 - protein, 500 aa, synthetic construct
MRALVVIRLSRVTDATTSPERQLESCQRLCAQRGWDVVGVAEDLDVSGAVDPFDRKRRPNLARWLAFEEQSFDVIVAYRVDRLARSIRHLQQLVHWAEDHKKLVVSATEAHFDTTTPFAAVVIALMGTVAQMELEAIKERNRSAAHFNIRAGKYRGSLPPWGYLPTRVDGEWRLVPDPVQRERILEVYHRVVDNHEPLHLVAHDLNRRGVLSPKDYFAQLQGREPQSRKWSATALKRSMISVAMLGYATLNGKTVRDDDGAPLVRAEPILTREQLEALRAELVKTSRAKPAVSTPSLLLRVLFCAVCGEPAYKFAGGGRKHPRYRCRSMGFPKHCGNGTVVMAEWDAFCEEQVLDLLGDTERLEKVWVAGSDSAVELAEVNAELVDLTSLIGSPAYRAGSPQREALDARIAALAARQEELEGLEARPSGWEWRGTGQRFGDWWREQDTAAKNTWLRSMNVRLTFDVRGGLTRTIDFGDLQEYEQHLRLGSVVVRLHTGMS

SEQ ID NO: 9057 - protein, 500 aa, synthetic construct
MRALVVIRLSRVTDATTSPERQLESCRQLCAQRGWDVVGVAEDLDVSGAVDPFDRKRRPNLARWLAFEEQPFDVIVAYRVDRLTRSTRHLQQLVRWAEDHKKLVVSATEAHFDTTTPFAAVVIALMGTVAQMELEAIKERIRSAVRFNIRAGKYRGSLPPWGYLPTRVDGEWRLVPDPVQRERILEVYHRVVGNHEPLHLVAYDLNRRGVLSPKDYFAQLRGREPRGRKWSATALRRSMTSEAMLGYATLNGKTVRGDDGAPLVRAEPILTREQLEALRAELAKTSRAKPAVSTPSLLLRVLFCAVCGEPAYKFVGGGRKHPRYRCRSMGFPKHCGNGTVVMAEWDAFCEKQVLDLLGDAERLEKVWVAGSDSAVELAEVNAELVDLTSLIGSPVYRVGSPQREALDARIAALAARQEELEGLEARPSGWEWRETGQRFGDWWREQDTAAKNTWLRSMNVRLTFDVRGGRTRTIDFGDLQEYGQHLRSGSVAERLHTGMS

SEQ ID NO: 9058 - protein, 500 aa, synthetic construct
MRALVVIRLSRVTDATTSPERQLESCQQLCAQRGWDVVGVAEDLDVSGAVDPFDRKRRPNLARWLAFEEQPFDVIVAYRVDRLTRSTRHLQQLVRWAEDHKKLVVSATEAHFDTTTPFAAVVIALMGTVAQMELEAIKERIRSAVRFNIRAGKYRGSLPPWGYLPTRADGEWRLVPDPVQRERILEVYHRVVDNHEPLHLVAYDLNRRGVLSPKDYFAQLQGREPQGRKWSATALRRSMTSVAMLGYATLNGKIVRGDDGAPLVRAEPILTREQLEALRAELAKTSRAKPAVSTPSLLLRVLFCAVCGEPAYKFAGGGRKHPRYRCRSTGFPKHCGNGTVVMAEWDAFCEEQVLNLLGDAERLEKVWVAGSDSAVELAEVNAELVDLTSLIGSPAYRAGSPQREALDARIAALAARQEELEGIEARPPGWEWRETGQRFGDWWREQDTAAKNTWLRSMNVRLTFDVRGGLTRTIDLGDLQEYVQHLRLGSVVERLHTGMS

SEQ ID NO: 9059 - protein, 500 aa, synthetic construct
MRALVVIRLSRVTDATTSPERQLESCQQLCTQRGWDVVGVAEDLDVSGAVDPFDRKRRPNLARWLAFEEQPFDAIVAYRVDRLARSIRHLQQLVHWAEDHKKLVVSATEAHFDTTTPFAAVVIALMGTVAQMELEAIKERNRSAAHFNIRAGKYRGSLPPWGYLPTRVDGEWRLAPDPEQRERILEVYHRVVDNHEPLHLVAHDLNRRDVLSPKDYFAQLQGREPRGRKWSATALKRSMISEAMLGYATLNGKTVRDDNGAPLVRAEPILTRVQLEALRAELVKASRAKPAVSTPSLLLRVLFCAVCGEPAYKFAGGGRKHPRYRCRSMGFPKHCGNGTVVMAEWDAFCEEQVLNLLGDAERLEKVWVAGSDSAVELAEVNAELVDLTSLIGSPAYRAGSPQREALDARIAALAARQEELEGLEARPSGWEWRETGQRFGDWWREQDTAARNTWLRSMNVRLTFDVRGGLTRTIDFGDLQEYEQHLRLGGVVERLDTGMS

SEQ ID NO: 9060 - protein, 500 aa, synthetic construct
MRALVVIRLSRVTDATTSPERQLESCQQLCAQRGWDVVGVAEDLGVSGAVDPFDRKRRPNLARWLAFEEQPFDAIVAYRVDRLARSIRHLQQLVHWAEDHKKLVVSATETHFDTTTPFAAVVIALMGTVAQMELEAIKERNRSAAHFNIRAGKYRGSLPPWGYLPARVDGEWRLVPDPVQRERILEVYHRVVDNHEPLHLVAHDLNRRGVLSPKDYFAQLQGREPQGRKWSATALKRSMISEAMLGYATLNGKTVRDDDGAPLVRAEPILTREQLEALRAELVKTSRAKPAVSTPSLLLRVLFCAVCGGPAYKFAGGGRKHPRYRCRSMGFPKHCGNGTVVMAEWDAFCEEQVLDLLGDAERLEKVWVAGSDSAAELAEVNAELMDLTSLIGSPAYRAGSPQREALDARIAALAARQEELEGLGARSSGWEWRETGQRFGDWWREQDTAAKNTWLRSMNVRLTYDVRGGLTRTIDFGDLRGYEQHLRLGSVVERLHTGMS

SEQ ID NO: 9061 - protein, 500 aa, synthetic construct
MRALVVIRLSRVTDTTTSPERQLESCQQLCAQRGWDVVGVAEDLDVSGAVDPFDRKRRPNLARWLAFEEQPFDVIVAYRVDRLTRSTRHLQQLVHWAEDHKKLVVSATEAHFDTTTPFAAVVIALMGTVAQMELEAIKERNRSAAHFNIRAGKYRGSLPPWGYLPTRVDGEWRLMPDPVQRERILEVYHRVVDNHEPLYLVAHDLNRRGVLSPKDYFAQLQGREPQDRKWSATALKRSMTSEAMLGYATLNGKTVRNDDGAPLVRAEPILTRGQLEALHAELAKTSRAKPAVSTPSLLLRVLFCAVCGEPAYKFAGGGRKHPRYRCRSMGFPKHCGNGTVAMAEWDAFCEEQVLGLLGDAERLEKVWVAGSDSAVELAEVNAELVDLTSLIGSPAYRADSPQREALDARIAALAARQEELEGLGARPSGWEWRETGQRFGDWWREQDTAAKNTWLRSMNVRLTFDVRGGLTRTIDFGDLREYERHLRLGSVVERLHTGMS

SEQ ID NO: 9062 - protein, 500 aa, synthetic construct
MRALAVIRLSRVTDATTSPERQLESCQQLCAQRGWDVVGVAEDLDVSGAVDPFDRKRRPNLARWLAFEEQPFDVIVAYRVDRLTRSVRHLQQLVHWAEDHKKLVVSATEAHFDTATPFAAVVVALMGTVAQMELEAIKERNRSAAHFNIRAGKYRGSLPPWGYLPTRVDGEWRLVPDPVQRERILEVYHRVVDNHEPLHLVAHDLNRRGVLSPKDYFAQLRGREPQGRKWSATALKRSMTSEAMLGYATLNGKTVRDDDGAPLVRAEPILAREQLEALRAELVKTSRAKPAVSTPSLLLRVLFCAVCGEPAYKFAGGGRKYPRYRCRSMGFPKHCGNGTVVMAEWDAFCEEQVLNLLGDAERLEKVWVAGSDSAVELAEVNAELVDLTSLIGSPAYRAGSPQREALDARIAVLAARQEELEGLEARPSGWEWRETGQRFGDWWREQDTATKNTWLRSMNVRLTFDVRGGLTRTIDFGDLQEYEQHLRLGSVVERSHTGMS

SEQ ID NO: 9063 - protein, 500 aa, synthetic construct
MRALVVIRLSRVTDATTSPERQLESCQQLCAQRGWDVVGVAEDLDVSGAVDPFDRKRRPNLARWLAFEEQPFDVIVAYRVDRLTRSTRHLQQLVHWAEDHKKLVVSATEAHFDTTTPFAAVVIALMGTVAQMELEAIKERNRSAAHFNIRAGKYRGSLPPWGYLPARVGGEWRLVPDPVQRERILEVYHRVVVNHEPLHLVAHDLNRRGVLSPKDYFAQLQGREPQGRKWSATALKRSMISEAMLGYATLNGKTVRDDDGAPLVRAEPILTREQLEALRAELVKTSRAKPAVSTPSLLLRVLFCAVCGEPAYKFAGGGRKHPRYRCRSMGFPKHCGNGTVVMAEWDAFCEEQVLDMLGDAERLEKVWVAGSDSAVELAEVNAELVDLTSLIGSPAYRAGSPQREALDARIAALAARQEELEGLEARPSGWEWRETGQRFGDWWREQDTAAKNTWLRSMNVRLTFDVRGGLTRTIDFGDLQEYEQHLRLGSVAKRLHTGMS

SEQ ID NO: 9064 - protein, 500 aa, synthetic construct
MRALVVIRLSRVTDATTSPERQLESCQQLCAQRGWDVVGVAEDLDVSGAVDPFDRKRRPNLARWLAFEEQPFDVIVAYRVDRLTRSTRHLQQLVHWAEDHKKLVVSATEAHFDTTTPFAAVVIALMGTVAQMELEAIKERIRSAVHFNIRAGKYRGSLPPWGYLPTRVDGEWRLVPDPVQRERILEVYRRVVDNHEPLHLVAHDLNRRGVLSPKDYFAQLRGREPRGRKWSATALRRSMTSEAMLGYATLNGKIVRDDVGAPLVRAEPILTREQQEALRAELAKTSRAKPAVSTPSLLLRVLFCAVCGEPAYKFVGGGRKHPRYRCRSMGFPKHCGNGTVVMTEWDAFCEEQVLGLLGDAERLEKVWVAGSDSAVELAEVNAELVDLTSLIGSPAYRAGSPQREALDARIAALAARQEELEGLEARPSGWEWRETGQRLGDWWREQDTAAKNTWLRSMNVRLTFDVRGGLTRTIDFGDLHEYEQHLRSGSVVGRLHTGMS

SEQ ID NO: 9065 - protein, 500 aa, synthetic construct
MRALVVIRLSRVTDATTSPERQLESCQQLCAQRGWDVVGVAEDLDVSGAVDPFDRKRRPNLARWLAFEEQPFDVIVAYRVDRLTRSTRHLQQLVHWAEDHKKLVVSATEAHFDTTTPFAAVVIALMGTVAQMELEAIKERNRSAAHFNIRAGKYRGSLPPWGYLPTRVDGEWRLVPDPVQRERILEVYHRVVDNHEPLHLVAHDLNRRGVLSPKDYFAQLQGREPQGRKWSATALKRSMTSEAMLGYATLSGKTVRGDDGAPLVRAEPILTREQLEALRAELVKTSRAKPAVSTPSLLLRVLFCAVCGEPAYKFAGGGRKHPRYRCRSMGFPKHCGNGTVAMAEWDAFCEEQVLDLLGGAERLEKVWVTGSDSAVELVEVNAELVDLTSLIGSPAYRAGSPQREALDARIAALTARQEELEGLEARPSGWEWRGTGQRFGDWWREQDTAAKNTWLRSMNVRLTFDVRGGLTRTIDFGDLQEYEQHLRLGSVVERLHTGMS

SEQ ID NO: 9066 - protein, 500 aa, synthetic construct
MRALVVIRLSRVTDATTSPERQLESCRQLCAQRGWDVVGVAEDLDVSGAVDPFDRKRRPNLARWLAFEEQPFDVIVAYRVDRLTRSTRHLQQLVRWAEDHKKLVVSATEAHFDTTTPFAAVVIALMGTVAQMELEAIKERIRSAAHFNIRAGKYRGSLPPWGYLPTRVDGEWRLAPDPVQRERILEVYRRVVDNHEPLHLVAHDLNRRGVLSPKDYFAQLQGREPQGRKWSATALKRSMTSVAMLGYATLNGKTVRDDDGAPLVRAEPILTREQLEALRAELVKTSRAKPAVSTPSLLLRVLFCAVCGEPAYKFVGGGRKHPRYRCRSMGFPEHCGNGTVVMAEWDAFCEEQVLNLLGDAEHLERVWVAGSDSAVELAEVNAELVDLTSLIGSPAYRAGSPQREALDARIAALAARQEELEGLEARPSGWEWRETGQRFGDWWREQDTAAKNTWLRSMNVRLTFDVRGGPTRTIDFGDLQEYEQHLRLGSVVERLHTGMS

SEQ ID NO: 9067 - protein, 500 aa, synthetic construct
MRALVVIRLSRVTDTTTSPERQLESCQQLCAQRGWNVVGVAEDLDVSGAVDPFDRKRRPNLARWLAFEEQPFDVIVAYRVDRLTRSVRHLQQLVHWAEDHKKLVVSATEAHFDTTTPFAAVVIALMGTVAQMELEAIKERNRSAAHFNIRAGKYRGSLPPWGYLPTRVDGEWRLVPDPVQRERILEVYHRVVNNHEPLHLVAHDLNRRGVLSPKDYFAQLQGREPQGRKWSATALKRSMISVAMLGHATLNGKTVRDDDGAPLVRAEPILTREQLEALRAVLVKTSRAKPAVSTPSLLLRVLFCAVCGEPAYKFAGGGRKHPRYRCRSMGFPKHCGNGTVAMAEWDAFCEEQVLNLLGDAERLEKVWVAGSDSAVELAEVNAELVDLTSLIGSPAYRAGSPQREALDARVAALTARQEELEGLEARPSGWEWRETGQRFGDWWREQDTAAKNTWLRSMNVRLTFDVRGGLTRTIDLGELQEYVQHLRLGSVVERLHTGMS

SEQ ID NO: 9068 - protein, 500 aa, synthetic construct
MRALVVIRLSRVTDATTSPERQLESCQQLCAQRGWDVVGVAEDLDVSGAVDPFDRKRRPNLARWLAFEEQPFDVIVAYRVDRLTRSTRHLQQLVLWAEDHKKLVVSATEAHFDTTTPFAAVVIALMGTVAQMELEAIRERSRSAAHFNIRAGKYRGSLPPWGYLPARVDGEWRLVPDPVQRERILEVYHRVVDNHEPLHLVAYDLNRRGVLSPKDYFAQLRGREPQGRKWSATALKRSMISVAMLGYATLDGKTVRDDDGAPLVRAEPILTREQQEALRAEFTKTSRAKPAVSTPSLLLRVLFCAVCGEPAYKFVGGGRKHPRYRCRSMGFPKHCGNGTVVMAEWDAFCEEQVLDLLGDAERLEKVWVAGSDSAVELAEVNAELVDLTSLIGSPAYRAGSPQREALDARIAALAARQEELESLEARPSGWEWRETGQRFGDWWRGQDTAAKNTWLRSMNVRLTFDVRGGLTRTIDFGDLQKYGQHLRLGSVAERLHTGMS

SEQ ID NO: 9069 - protein, 500 aa, synthetic construct
MRALVVIRLSRVTDATTSPKRQLESCQQLCAQRGWDVVGVAEDLDVSGAVDPFDRKRRPNLARWLAFEEQPFDVIVAYRVDRLTRSVRHLQRLVRWAEDHKKLVVSATEAHFDTTTPFAAVVIALMGTVAQMELEAIKERIRSAAHFNIRAGKYRGSLPPWGYLPTRVDGEWRLAPDPVQRERILEVYHRVVDNHEPLHLVAYDLNRRGVLSPKDYFAQLQGREPQGRKWSATALKRSMISVAMLGYATLNGKIVRDDDGAPLVRAEPILTREQQEALRAELAKTSRAKPAVSTPSLLLRVLFCAVCGEPAYKFVGGGRKHPRYRCRSMGFPKHCGNGTAAMAEWDAFCEEQVLGLLGDAERLEKVWVAGSDSAVELAEVNAELVDLTSLIGSPAYRAGSPQREALDTRIAALAARQGELEGLEARPSGWEWRGTGQRLGDWWREQDTAARNTWLRSMNVRLTFDVRGGLTRTIDFGDLQEYEQHLRSGSVVERLHTGMS

SEQ ID NO: 9070 - protein, 500 aa, synthetic construct
MRALVVIRLSRVTDATTSPERQLESCQQLCAQRGWDVVGVAEDLDVSGAVDPFDRKRRPNLARWLAFEEQPFDVIVAYRVDRLTRSTRHLQQLVHWAEDHKKLVVSATEAHFDTTTPFAAVVIALMGTVAQMELEAIKERNRSAAHFNIRAGKYRGSLPPWGYLPARVDGEWRLVPDPVQRERILEVYHRVVDNHEPLHLVAHDLNRRGVISPKDYFAQLQGREPQGRKWSATALKRSMISEAMLGYATLNGKTVRDDDGAPLVRAEPILTREQQEALRAELVKTSRAKPAVSTPSLLLRVLFCAVCGEPAYKFAGGGRKHPRYRCRSMGSPKHCGNGTVVMAEWDAFCEEQVLDLLGDAERLEKVWVAGSDSAVELAEVNAELVDLTSLIGSPAYRAGSPQREALDARIAALAARQEELEGLEARPSGWEWCETGQRFGDWWREQDTAAKNTWLRSMNVRLTFDVRGGLTRTIDFGDLQEYEQHLRLGSVVERLYTGMS

SEQ ID NO: 9071 - protein, 500 aa, synthetic construct
MRALVVIRLSRVTEATTSPERQLESCQQLCAQRGWDVVGVAEDLDVSGAVDPFDRKRRPNLARWLAFEEQPFDVIVAYRVDRLTRSTRHLQQLVHWAEDHKKLVVSATEAHFDTTTPFAAVVIALMGTVAQMELEAIKERIRSAAHFNIRAGKYRGSLPPWGYLPTRVDGEWRLVPDPVQRERILEVYHRVVDNHEPLHLVAHDLNRRGVLSPKDYFAQLQGREPQGRKWSATALKRSMISVAMLGYATLNGKTVRDDDGAPLVRAEPILTREQQEALRAELAKTSRAKPAVSTPSLLLRVLFCAVCGEPAYKFVGGGRKHPRYRCRSMGFPEHCGNGTVTMAEWDAFCEEQVLDLLGDAERLEKVWVAGSDSAVELAEVNAELVDLTSLIGSPAYRAGSPQREALDARIAALAARQEELEGLEARPSGWEWRATGQRFRDWWREQDTASKNTWLRSMNVRLTFDVRGGLTRTIDFGDLQEYERHLRLGDVVERSHTGMS

SEQ ID NO: 9072 - protein, 500 aa, synthetic construct
MRALVVIRLSRVTDATTSPERQLESCQQLCAQRGWDVVGVAEDLDVSGAVDPFDRKRRPNLARWLAFEEQPFDAIVAYRVDRLTRSVRHLQQLVHWAEDHKKLIVSATEAHFDTTTPFAAVVIALMGTVAQMELEAIKERNRSAAHFNIRAGKYRGSLPPWGYLPTRVDGEWRLVPDPVQRERILEVYHRVVDNHEPLHLVAHDLNRRGVLSPKDYFAQLQGREPQGRKWSATALKRSMISEAMLGHATLNGKTVRDDDGAPLVRAEPILTREQLEALRAELVKTSRVKPAVSTPSLLLRVLFCAVCGEPAYKFAGGGRKHPRYRCRSMGFPKHCGNGTVAMAEWDAFCEEQVLDLLGDAECLEKVWVAGSDSAVELAEVNAELVDLTSLIGSPAYRAGSPQREALDARIAALAARQEGLEGLEARPSGWEWRETGQRFGDWWREQGTAAKNAWLRSMNVRLTFDVRGGLTRTIDFGDLQEYERHLRLGSVVERLHTGMS

SEQ ID NO: 9073 - protein, 500 aa, synthetic construct
MRALVVIRLSRVTDATTSPERQLESCQQLCAQRGWDVVGVAEDLDVSGAVDPFDRKRRPSLARWLAFEEQPFDVIVAYRVDRLTRSTRHLQQLVHWAEDHKKLVVSATEAHFDTTTPFAAVVTALMGTVAQMELEAIKERIRSAVRFNIRAGKYRGSLPPWGYLPTRVDGEWRLVPDPVQRERILEVYHRVVDNHESLHLVAHDLNRRGVLSPKDYFAQLQGREPRGRKWSATALKRSMISVAMLGYATLNGKTVRDDDGAPLVRAEPILTREQLEALRAELVKTSRAKPAVSTPSLLLRVLFCAVCGEPAYKFAGGGRKHPRYRCRSMGFPKHCGNGTVAMTEWDAFCEEQVLDLLGDAERLEKVWVAGSDSAVELAEVNAELVDLTSLIGSPAYRAGSPQREALDARIAALAARQEELEGLEARPSGWGWRETGQRFGDWWREQDTAAKNAWLRSMNVRLTFDVRGGLTRTIDFGDLQEYGQHLRLGSVVERLHTGMS

SEQ ID NO: 9074 - protein, 500 aa, synthetic construct
MRALVVIRLSRVTDATTSPERQLESCQQLCAQRGWDVVGVAEDLDVSGAVDPFDRKRRPNFARWLAFEEQPFDVIVAYRVDRLTRSTRHLQQLVHWAEDHKKLVVSATEAHFDTTTPFAAVVIALMGTVAQMELEAIKERNRSAAHFNIRAGKYRGSLPPWGYLPTRVDGEWRLVPDPVQRERILEVYHRVVDNHESLHLVAHDLNRRGVLSPKDYFAQLRGREPQGRKWSATALKRSMISEAMLGYATLNGKTVRDDDGAPLVRAEPILTREQLEALRAELVKTSRAKPAVSTPSLLLRVLFCAVCGEPAYKFAGGGRKHPRYRCRSMGFPKHCGNGTVVMAEWDAFCEEQVLDLLGDAERLEKVWVAGSDSAVELAEVNAELVDLTSLIGSPAYRAGSPQREALDARIAALAARQEELGGLEARPSGWEWRETGQRFGDWWREQDTAAKNTWLRSMNVRLTFDVRGGLTRTIDFGDLQEYGQHLRLGSVVERLHTGMS

SEQ ID NO: 9075 - protein, 500 aa, synthetic construct
MRALVVIRLSRVTDATTSPERQLESCQQLCAQRGWDVVGVAEDLDVSGAVDPFDRKRRPNLARWLAFEQQPFDVIVAYRVDRLTRSVRHLQQLVHWAEDHKKLVVSATEAHFDTTTPFAAVVIALMGTVAQMELEAIKERIRSAVHFNIRAGKYRGSLPPWGYLPTRVEGEWRLVPDPVQRERILEVYHRVVDNHEPLHLVAHDLNRRGVLSPKDYFAQLQGREPQGRKWSATALKRSMISEAMLGYATLNGKTVRDNDGAPLVRAEPILTRGQLEALRAELVKTSRAKPAVSTPSLLLRVLFCAVCGEPAYKFAGGGRKHPRYRCRSMGFPKHCGNGTVAMAEWDAFCEEQVLNLLGDAERLEKVWVAGSDSAVELAEVNAELVDLTSLIGSPAYRAGSPQREALVARIAALAARQEELEGLEARPSGWEWRGTGQRFGDWWREQDTAAKNTWLRSMNVRLTFDVRGGLTRTIDFGDLPEYEQHLRLGSVVERLRTGMS

SEQ ID NO: 9076 - protein, 500 aa, synthetic construct
MRALVVIRLSRVTDATTSPERQLESCQQLCAQRGWDVVGVAEDLDVSGAVDPFDRKRRPNLARWLAFEEQPFDVIVAYRVDRLTRSTRHLQQLVHWAEDHKKLVVSATEAHFDTTTPFAAVVIALMGTVAQMELEAIKERNRSAAHFNIRAGKYRGSLPPWGYLPTRVDGEWRLVPDPVQRERILEVYRRVVDNHEPLHLVAHDLNRRGVLSPKDYFAQLQGREPQGRKWSATALKRSMTSEAMLGYATLNGKTVRDDDGAPLVRAEPILTREQLEALRAELVKTSRAKPAVSTPSLLLRVLFCAVCGEPAYKFAGGGRKHPRYRCRSMGFPKHCGNGTVAMAEWDAFCEDQVLDLLGDAERLEKVWVAGSDSAAELAEVNAELVDLTSLIGSPAYRAGSPQREALDARIAALAARQEELEGLGARPSGWEWRETGQRFGDWWREQDTAAKNTWLRSMNVRLTFDVRGGLTRTIDFGDLQEYEQHLRLGSVVERLHTGMS

SEQ ID NO: 9077 - protein, 500 aa, synthetic construct
MRALVVIRLSRVTDATTSPERQLESCQQLCAQRDWDVVGVAEDLDVSGAVDPFDRKRRPNLARWLAFEEQPFDVIVAYRVDRLTRSVRHLQQLVHWAEDHKKLVVSATEAHFDTTTPFAAVVIALMGTVAQMELEAIKERNRSAAHFNIRAGKYRGSLPPWGYLPTRVDGEWRLVPDPVQRERILEVYHRVVDNHEPLHWVAHDLNRRGVLSPKDYFAQLQGREPQDRKWSATALKRSMTSEAMLGYATLNGKIVRDDDGAPLVRAEPILTREQLEALRAELVKTSRAKPAVSTPSLLLRVLFCAVCGEPAYKFAGGGRKHPRYRCRSMGFPKHCGNGTAAMAEWDAFCEEQVLNLLGDAERLEKVWVAGSDSAVELAEVNAELVDLTSLIGSPAYRAGSPQREALDARIAALAARQEELEGLGARPPGWEWRETGQRFGDWWREQDTAAKNTWLRSMNVRLTFDARGGLTRTIDFGDLQEYEQHLRLGSVVGRLHTGMS

SEQ ID NO: 9078 - protein, 500 aa, synthetic construct
MRALVVIRLSRVTDATTSPERQLESCQQLCAQRGWDVVGVAEDLDVSGAVDPFDRKRRPNLARWLAFEEQPFDVIVAYRVDRLTRSTRHLQQLVHWAEDHKKLVVSATEAHFDTTTPFAAVVIALMGTVAQMELEAIKERSRSAAHYNIRAGKYRGSLPPWGYLPTRVDGEWRLVPDPVQRERILEVYHRVVDNHEPLYLVAHDLNQRGVLSPKDYFAQLRGREPQGRKWSATALKRSMISGAMLGCATLNGKIVRDDDGAPLVRAEPILTREQQEALRAELAKTSRAKPAVSTPSLLLRVLFCAVCGEPAYRFVGGGRKHPRYRCRSMGFPKHCGNGTVVMAEWDAFCEEQVLNLLGDAERLEKVWVAGSDSAVELAEVNAELVDLTSLIGSPAYRAGSPQREALDARIAALAARQEELEGLEARPSGWEWRGTGQRFGDWWREQDTAAKNTWLRSMNIRLTFDVRGGLTRTIDFGELHEYEQHLRSGSVVERLHTGMS

SEQ ID NO: 9079 - protein, 500 aa, synthetic construct
MRALVVIRLSRVTDATTSPERQLESCQQLCAQRGWDVVGVAEDLDVSGAVDPFDRKRRPNLARWLASEEQPFDAIVAYRVDRLTRSIRHLQQLVHWAEDHKKLVVSATEAHFDMATPFAAVVIALMGTVAQMELEAIKERIRSAVHFNIRAGKYRGSLPPWGYLPTRVDGEWRLVPDPVQRERILEVYHRVVDNHEPLHLVAYDLNRRGVLSPKDYFAQQQGREPQGRKWSATALKRSMISVAMLGYATLNGKIVRDDDGAPLVRAEPILTREQQEALRAELAKTSRAKPAVTTPSLLLRVLFCAVCGEPAYKFAGGGRKHPRYRCRSMGFPKHCGNGTVVMTEWDAFCEEQVLDLLGDAERLEKVWVAGSDSAVELAEVNAELVDLTSLIGSPAYRAGSPQREALDARIAALAARQEELEGLEARPSGWEWRETGQRFGDWWREQDTAAKNTWLRSMNVRLTFDVRGGLTRTIDFGDLREYEQHLRLGSAVERLYTGGS

SEQ ID NO: 9080 - protein, 500 aa, synthetic construct
MRALVVIRLSRVTDATTSPERQLESCQQLCAQRGWDVVGVAEDLNVSGAVDPFDRKRRPNLARWLAFEEQPFDVIVAYRVDRLTRSIRHLQQLVHWAEDHKKLVVSATEAHFDTTTPFAAVVIALMGTVAQMELEAIKERNRSAAHFNIRAGKYRGSLPPWGYLPTRVDGEWRLVPDPVQRERILEVYHRVVDNHEPLHLVAHDLNRRGVLSPKDYFAQLQGREPQGRKWSATALKRSMISKAMLGYATLNGKTVRDDNGAPLVRAEPILTREQLEALRAELVKTSRAKPAVSTPSLLLRVLFCAVCGEPAYKFAGGGRKHPRYRCRSMGFPKHCGNGTVVMAEWDAFCEEQVLNLLGDTEHLEKVWVAGSDSAVELAEVNAELVDLTSLISSPAYRAGSPQREALDARIAALAARQEELEGLEARPPGWERRETGQRFGDWWREQDTAAKNTWLRSMNVRLTFDVRGGLTRTIDFGDLQEYEQHLRLGSVVERLHTGMS

SEQ ID NO: 9081 - protein, 500 aa, synthetic construct
MRALVVIRLSRVTDATTSPERQLESCQQLCAQRGWDVVGVAEDLDVSGAVDPFDRKRRPNLARWLAYEEQPFDAIVAYRVDRLTRSTRHLQQLVLWAEDHKKLVVSATEAHFDTTTPFAAVVIALMGTVAQMELEAIKERIRSAAHFNIRAGKYRGSLPPWGYLPARVDGEWRLVPDPVQRKRILEVYHRVVDNHEPLHLVAHDLNRRGVLSPKDYFAQLQGREPRGRKWSATALKRSMISVAMLGYATLNGKTVRDDDGAPLVRAEPILTREQQEALRAELVKTSRAKPAVSTPSLLLRVLFCAVCGEPAYKFVGGGRKHPRYRCRSMGFPEHCGNGTVVMTEWDAFCEEQVLNLLGDVERLEKVWVAGSDSAVELAEVNAELVDLTGLIGSPAYRAGSPQREALDARIAALAARQEELEGLEARPSGWEWRGSGQRFGDWWREQDTAAKNTWLRSMNVRLTFDVRGGLTRTIDFGDLLEYEQHLRLGSVAERLHTGMP

SEQ ID NO: 9082 - protein, 500 aa, synthetic construct
MRALVVIRLSRVTDATTSPERQLESCQQLCAQRGWDVVGVAEDLDVSGAVDPFDRKRRPNLARWLAFEEQPFDVIVAYRVDRLTRSTRHLQQLVHWAEDHRKLVVSATEAHFDTTTPFAAVVIALMGTVAQMELEAIKERNRSAAHFNIRAGKYRGSLPPWGYLPTRVDGEWRLVPDPVQRERILEVYHRVVDNHEPLHLVAHDLNRRGVLSPKDYFAQLQGREPQGRKWSATALKRSMTSEAMLGYATLNGKTVRDDDGAPLVRAEPILTREQLEALRAELVKTSRAKPAVSTPSLLLRVLFCAVCGEPAYKFAGGGRKHPRYRCRSMGFPKHCGNGTVAMAEWDAFCEEQVLNLLGGVERLEKVWVAGSDSAVELAEVNAELVDLTSLIGSQAYRAGSPQREALDARIAALAARQEELEGLEARPSGWEWRGTGQRFRDWWCEQDTAAKNTWLRSVNVRLTFDVRGGLTRTIDFGDLQEYEQHLRLGSVVERLHTGMS

SEQ ID NO: 9083 - protein, 500 aa, synthetic construct
MRALVVIRLSRVTDATTSPERQLESCQRLCAQRGWDVVGVAEDLDVSGAVDPFDRKRRPNLARWLAFEEQPFDVIVAYRVDRLTRSTRHLQQLVHWAEDHKKLVVSATEAHFDTTTPFAAVVIALMGTVAQMELEAIKERIRSAVRFNIRAGKYRGSLPPWGYLPTRVDGEWRLVPDPVQRERILEVYHRVVDNHEPLHLVAYDLNRRGVLSPKDYFAQLQGREPRGRKWSATALKRSMTSVAMLGYATLNGKTVRDDDGAPLVRAEPILTREQLEALRAELVKTSRAKPAVSTPSLLLRVLFCAVCGEPAYKFVGGGRKHPRYRCRSMGFPKHCGNGTVVMAEWDAFCEEQVLDLLGDAERLEKVWVAGSDSAVELAEVNAELVDLTSLIGSPAYRAGSPQREALDARIAALAARQEELEGLEARPSGWGWRETGQRLGDWWREQDTASKNTWLRSMNVRLTFDVRGGLTRTIDFGDLQEYEQHLRLGSVVERLHTGMS

SEQ ID NO: 9084 - protein, 500 aa, synthetic construct
MRALVVIRLSRVTDATTSPERQLESCQQLCAQRGWDVVGVAEDLDVSGAVDPFDRKRRPNLARWLAFEEQPFDVIVAYRVDRLTRSTRHLQQLVHWAEDHKKLVVSATEAHFDTTTPFAAVVIALMGTVAQMELEAIKERIRSAVRFNIRAGKYRGSLPPWGYLPTRVDGEWRLVPDPVQRERILEVYHRVVDNHEPLHLVAHDLNRRGVLSPKDYFAQLRGREPRGRKWSATALKRSMISVAMLGYATLNGKIVRDDDGAPLVRAEPILAREQQEALRAELAKTSRAKPAVSTPSLLLRVLFCAVCGEPAYKFVGGGRKHPRYRCRSMGLPEHCGNGTVVMAEWDAFCEEQVLALLGDAERLERVWVAGSDSAVELAEVNAELVDLTSLIGSPTYRTGSPQREALDARIAALAARQEELESLEARPSGWEWRGTGQRLGDWWREQDTAAKNTWLRSMNIRLTFDVRGGLTRTIDFGELQEYEQHLRLGSVVERLHTGMS

SEQ ID NO: 9085 - protein, 500 aa, synthetic construct
MRALVVIRLSRVTDATTSPERQLESCQQLCAQRGWDVVGVAEDLDVSGAVDPFDRKRRPNLARWLAFEEQPFDAIVAYRVDRLARSTRHLQQLVHWAEDHKKLVVSATEAHFDTTTPFAAVVIALMGTVAQMELEAIKERNRSAAHFNIRAGKYRGSLPPWGYLPTRADGEWRLVPDPVQRERILEVYHRVVDNHEPLHLVAHDLNRRGVLSPKDYFAQLQGREPQGRRWSATALKRSMTSEAMLGYATLNGKTVRDDDGAPLVRAEPILTREQLEALRAELVKTSRAKPAVSTPSLLLRVLFCAVCGEPAYKFAGGGRKHPRYRCRSMGFPKHCGNGTVAMAEWDAFCEEQVLDLLGDSERLEKVWVAGSDSAVELAEMNAELVDLTSLIGSPAYRAGSPQREALDARIAALAARQEELEGLGARPSGWEWRETGQRFGDWWREQDTAAKNTWLRSMNVRLTFDVRGGLTRTIDFGDLQEYEQHLHLGSVVERLHTGMS

SEQ ID NO: 9086 - protein, 500 aa, synthetic construct
MRALVVIRLSRVTDATTSPERQLESCQQLCAQRGWDVVGVAEDLDVSGAVDPFDRKRRPNLARWLAFEEQPFDVIVAYRVDRLTRSTRHLQQLVHWAEDHKKLVVSATEAHFDTTTPFAAVVIALMGTVAQMELEAIKERNRSAAHFNIRAGKYRGSLPPWGYLPTRVDGEWRLVPDPVQRERILEVYHRVVDNHESLHLVAHDLNRRGVLSPKDYFAQLRGREPQGRKWSATALKRSMISEAMLGYATLNGKTVRDDDGAPLVRAEPILTRGQLEALRAELVKTSRAKPTVSTPSLLLRVLFCAVCGEPAYKFAGGGRKHPRYRCCSMGLPKHCGNGTVVMAEWDAFCEEQVLNLLGDAERLEKVWVAGSDSAVELAEVNAELVDLTSLIGPPAYCAGSPQREALDARIAALAARQEELEGLEARPSGWEWRGTGQRFGDWWREQDTAAKNTWLRSMNVRLTFDVRGGLTRTIDFGDLQEYEQHLRLGNVVERLHTGMS

SEQ ID NO: 9087 - protein, 500 aa, synthetic construct
MRALVVIRLSRVTDATTSPERQLESCQQLCAQRGWDVVGVAEDLDVSGAVDPFDRKRRPNLARWLAFEEQPFDVIVAYRVDRLTRSTRHLQQLVHWAEDHKKLVVSATEAHFDTTTPFAAVVIALMGTVAQMELEAIKERNRSAAHFNIRAGRYRGSLPPWGYLPTRVDGEWRLVPDPVQRERILEVYHRVVDNHEPLHLVAHDLNRRGVLSPKDYFAQLQGREPQGRKWSATALKRSMIAEAMLGYVTLNGKTVRDDDGAPLVRAEPILTRGQLEALRAELVKTSRAKPAVSTPSLLLRVLFCAVCGEPAYKFAGGGRKHPRYRCRSMGFPKHCGNGTVAMAEWDAFCEEQVLDLLGDAERLEKVWVAGSVSAVELAEVNAELVDLTSLIGSPAYRAGSPQREALDARIAALAARQEELESLGARPSGWEWRETGQRFGDWWREQDTAAKNTWLRSMNVRLTFDVRGGLTRTIDLGDLQGYEQHLRLGSAVERLHTGMS

SEQ ID NO: 9088 - protein, 500 aa, synthetic construct
MRALVVIRLSRVTDATTSPERQLESCQQLCAQRGWNVVGVAEDLDVSGAVDPFDRKRRPNLARWLAFEEHPFDVIVAYRVDRLTRSTRHLQQLVHWAEDHKKLVVSATEAHFDTTTPFAAVVIALMGTVAQMELEAIKERNRSAAHFNIRAGKYRGSLPPWGYLPTRVDGEWRLAPDPVQRERILEVYHRVVDNHEPLHLVAHDLNRRGVLSPKDYFAQLRGREPQGREWSATALKRSMTSEAMLGYATLNGKTVRDDDGAPLVRAEPILTRGQLEALRAELVKTSRAKPAVSAPSLLLRVLFCAVCGEPAYKFAGGGRKHPRYRCRSMGFPKHCGNGTVAMAEWDAFCEEQVLDLLGDAKRLEKVWVAGSDSAVELAEVNAELVDLTSLISSPAYRAGSPQREALDARIAALATRQEELEGLEARPSGWEWRETGQRFGDWWREQDTAAKNTWLRSMNVRLTFDVRGGLTRTIDFGDLQEYEQHLRSGSVVERLHTGMS

SEQ ID NO: 9089 - protein, 500 aa, synthetic construct
MRALVVIRLSRVTDATTSPERQLESCQQLCAQRGWDVVGVAEDLDVSGAVDPFDRKRRPNLARWLAFEEQPFDAIVAYRVDRLTRSTRHLQQLVRWAEDHKKLVVSATEAHFDTTTPFAAVVIALMGTVAQMELEAIKERSRSAAHFNIRAGKYRGSLPPWGYLPTRVDGEWRLVPDPVQRERILEVYHRVVNNHEPLHLVAHDLNRRGILSPKDYFAQLRGREPRGRKWSATALRRSMTSEAMLGYATLNGKTVRDDDGAPLVRAEPILTREQQEALRAELIKTSRAKPAVSTPSLLLRVLFCAVCGEPAYKFVGGGRKHPRYRCRSMGFPKHCGNGTVVMAEWDAFCEEQVLDLLGDAERLERVWVAGSDSAVELAEVNAELVDLTSLIGSPAYRAGSPQREALDARIAALAARQEELEGLEARPSGWEWRETGQRFGDWWREQDTAARNTWLRSMNVRLTFDARGGLTRTIDFGDLQEYERHLRLGSAVERLHAGMS

SEQ ID NO: 9090 - protein, 500 aa, synthetic construct
MHALVVIRLSRVTDATTSPERQLESCQQLCAQRGWDVVGVAEDLDVSGAVDPFDRKRRPNLARWLAFEEQPFDVIVAYRVDRLTRSVRHLQQLVHWAEDHKKLVVSATEAHFDTTTPFAAVVIALMGTVAQMELEAIKERNRSAAHFNIRAGKYRGSLPPWGYLPARVDGEWRLVPDPVQRERILEVYHRVVDNHEPLHLVAHDLNRRGVLSPKDYFAQLQGREPQGRKWSATALKRSMISVAMLGYATLNGKIVRDDDGAPLVRAEPILTREQLEALRAELVKTSRAKPAVSTPSLLLRVLFCAVCGEPAYKFAGGGRKHPRYRCRSMGFPKHCGNGTVAMAEWDAFCEEQVLDLFGDAERLEKVWVAGSDSAVELAEVNAELVDLTSLIGSPAYRAGSPQREALDARIAALAARQEELEGLEARPSGWEWRETGQRFGDWWREQSTAAKNTWLRSMNVRLTFDVRGGLTRTIDFGDLQEYRQHLRLGSVVERSHTGMS

SEQ ID NO: 9091 - protein, 500 aa, synthetic construct
MRALVVIRLSRVTDATTSPERQLESCQQLCAQRGWDVVGVAEDLDVSGAVDPFDRKRRPNLARWLAFEEQPFDVIVAYRVDRLTRSTRHLQQLVHWAEDHKKLVVSATEAHFDTTTPFAAVVVALMGTVAQMELEAIKERNRSAAHFNIRAGKYRGSLPPWGYLPTRVDGEWRLVPDPVQRERILEVYHRVVDNHEPLHLVAHDLNRRGVLSPKDYFAQLQGREPRGRKWSATALKRSMISAAMLGYATLNGKTVRDDDGAPLVRAEPILTREQLEALRAELVKTSRAKPAVSAPSLLLRVLFCAVCGEPAYKFAGGGRKHPRYRCRSMGFPKHCGNGTVAMAEWDAFCEEQVLGLLGDAERLEKVWVAGSDSAVELAEVSAELVDLTSLIGSPAYRAGSPQREALDARIAALAARQEELEGLEARPSGWEWRGTGQRFGDWWREQDTAAKNTWLRSMNVRLTFDVRGGLTRTIDFGDLQEYGQHLRLGSVVERLHTGMP

SEQ ID NO: 9092 - protein, 500 aa, synthetic construct
MRALVVIRLSRVTDATTSPKRQLESCQQLCAQRGWDVVGVAEDLDVSGAVDPFDRKRRPNLARWLAFEELPFDVIVAYRVDRLTRSTRHLQQLVRWAEDHKKLVVSATEAHFDTTTPFAAVVIALMGTVAQMELEAIKERIRSAAHFNIRAGKYRGSLPPWGYLPTRVDGEWRLVPDPVQRERILEVYHRVVDNHEPLHLVAYDLNRRGVLSPKDYFAQLRGREPQGRKWSATALKRSMTSEAMLGYATLNGKTVRGDDGTPLVRAEPILTREQQEALRAELVKTSRAKPAVSTPSLLLRVLFCAVCGEPAYKFVGGGRKHPRYRCRSMGFPKHCGNGTVVMAEWDAFCEEQVLDLLGDAERLEKVWVAGSDSAVELAEVNAELVDLTSLIGSPAYRAGSPQREALDARVAALAARQGELESLEARPSGWEWRETGQRFGDWWREQDTAAKNTWLRSMNVRLTFDIRGGLTRTIDFGDLQEYKQHLRSGSVVERSHTGMS

SEQ ID NO: 9093 - protein, 500 aa, synthetic construct
MRALVVIRLSRVTDATTSPERQLESCQQLCAQRGWDVVGVAEDLDVSGAVDPFDRKRRPSLARWLAFEEQPFDAIVAYRVDRLTRSVRHLQQLVRWAEDHKKLVVSATEAHFDTTTPFAAVVIALMGTVAQMELEAIKERIRSAVHFNIRAGKYRGSLPPWGYLPTRVDGEWRLVPDPVQRERILEVYHRVVDNHEPLHLVAHDLNRRGVLSPKDYFAQLQGREPQGRKWSATALKRSMISGAMLGYATLNGKIVRDDDGAPLVRAEPILTREQQEALRAELAKTSRAKPAVSTPSLLLRVLFCAVCGEPAYKFVGGGRKHPRYRCRSMGFPKHCGNGTVVMAEWDAFCEEQVLNLLGDAERLERVWVAGSDSAVELAEVNAELVDLMSIIGSPAYRAGSPQREALDVRIAALAARQEELEGLEARPSDWEWRETGQRFGDWWREQDTAVKNAWLRSMNVRLTFDVHGGLTRTIDFGDLREYEQHLRSGSVVERLHSGMS

SEQ ID NO: 9094 - protein, 500 aa, synthetic construct
MRALVVIRLSRVTDATTSPERQLESCRQLCAQRGWDVVGVAEDLDVSGAVDPFDRKRRPNLSRWLAFEEQPFDVIVAYRVDRLTRSTRHLQQLVRWAEDHKKLVVSATEAHFDTTTPFAAVVIALMGTVAQMELEAIKERSRSAAHFNIRAGKYRGSLPPWGYLPTRVNGEWRLVPDPVQRERILEVYHRVVDNHEPLHLVAHDLNRRGVLSPKDYFAQLQGREPRGRKWSATALKRSMISVAMLGYATLNGKIVRDDDGAPLVRAEPILTREQQEALRAELAKTSRAKPAVSTPSLLLRVLFCAVCGEPAYKFTGGGRKRPRYRCRSMGFPKHCGNGTVVMAEWDAFCEEQVLGLLGDAERLEKVWVVGSDSAVELAEVNAELVDLTSLIGSPAYRAGSPQREALDARIAALAARQEELEGLEARPSGWEWRETGQRFGDWWREQDTAAKNTWLRSMNVRLTFDVRGGLTRTIDFGDLQEYEQHLRLGSVVERLHTGTS

SEQ ID NO: 9095 - protein, 500 aa, synthetic construct
MRALVVIRLSRVTEATTSPERQLESCQQLCAQRGWDVVGVAEDLDVSGAVDPFDRKRRPNLARWLAFEEQPFDVIVAYRVDRLTRSTRHLQQLVHWAEDHKKLVVSATEAHFDTTTPFAAVVIALMGTVAQMELEAIKERNRSAAHFNIRTGKYRGSLPPWGYLPTRVDGEWRLVPDPVQRERILEVYHRVVVNHEPLHLVAHDLNRRGVLSPKDYFAQLRGREPQGREWSATALKRSMTSEAMLGYATLNGKTVRGDDGAPLVRAEPILTRVQLEALRAELVKTSRAKPAVSTPSLLLRVLFCAVCGEPAYKFAGGGRKHPRYRCRSMGFPRHCGNGTVVMAEWDAFCEEQVLDLLGDAERLERVWVAGSDSAVELAEVNAELVDLTSLIGSPAYRAGSPQREALDARIAALAARQEELEGLEARPSGWEWRETGQRFGDWWREQDTAAKNTWLRSMNVRLTFDVRGGLTRTIDFGNLQEYEQHLRLGSVVERLHTGMS

SEQ ID NO: 9096 - protein, 500 aa, synthetic construct
MRALVVIRLSRVTDATTSPVRQLESCQQLCALRGWDVVGVAEDLDVSGAVDPFDRKRRPNLARWLAFEEQPFDVIVAYRVDRLTRSTRHLQQLVRWAEDHKKLVVSATEAHFDTTTPFAAVVIALMGTVAQMELEAIKERIRSAVHYNIRAGKYRGSLPPWGYLPARVEGEWRLVPDPVQRERILEVYHRVVDNHEPLHLVAHDLNRRGVLSPKDYFAQLRGREPRGRKWSATALRRSMTSEAMLGYATLNGKTVRDDDGAPLVRAEPILTREQLEALRAELAKTSRAKPAVSTPSLLLRVLFCAACGEPAYKFVGGGRKHPRYRCRSMGFPKHCGNGTVAMVEWDAFCEEQVLDLLGDAERLEKVWVAGSDSAVELAEVNAELVDLTSLIGSPAYRTGSPQREALDARIAALAARQEELEGLEARPSGWEWRETGQRFGDWWREQDTAAKNTWLRSMNVRLTFDVRGGLTRTIDFGDLRGYEQHLRLGSVVERLHAGMS

SEQ ID NO: 9097 - protein, 500 aa, synthetic construct
MRALVVIRLSRVTDATTSPERQLESCQQLCAQRGWDVAGVAEDLDVSGAVDPFDRKRRPNLARWLAFEEQPFDVIVAYRVDRLTRSTRHLQQLVHWAEDHKKLVVSATEAHFDTTTPFAAVVIALMGTVAQMELEAIKERNRSAAHFNIRAGKYRGSLPPWGYLPTRVDGEWRLVPDPVQRERILEVYHRVVDNHEPLHLVAHDLNRRGVLSPKDYFAQLQGREPQGRKWSATALKRSMTSVAMLGYVTLNGKTVRDDDGAPLVRAEPILTREQLEALRAELVKTSRAKPAVPTPSLLLRVLFCAVCGEPAYKFAGGGRKHPRYRCRSMGFPKHCGNGTVAMAEWDAFCEEQVLGLLGDAECLEKVWVAGSDSAVELAEVNAELVDLTSLIGSPAYRAGSPQREALDARIAALAARQEELEGLEARPSGWEWRETGQRFGDWWREQDTAAKNTWLRSMNVRLTFDVRGGLTRTIDFGDLQVYEQHLRLGSVVKRLHTGMS

SEQ ID NO: 9098 - protein, 500 aa, synthetic construct
MRALVVIRLSRVTDATTSPERQLESCQQLCAQRGWDVVGVAEDLDVSGAVDPFDRKRRPNLARWLAFEEQPFDVIVAYRVDRLTRSVRHLQQLVHWAEDHKKLVVSATEAHFDTTTPFAAVVIALMGTVAQMELEAIKERIRSAAHFNIRAGKYRGSLPPWGYLPTRVDGEWRLVPDPVQRERILEVYHRVVDNHEPLHLVAHDLNRRGVLSPKDYFAQLRGREPQGRKWSATALKRSMTSLAMLGYATLNGKTVRDDDGAPLVRAEPILTREQLEALRAELVKTSRARPAVSTPSLLLRVLFCAVCGEPAYKFVGGGRKHPRYRCRSMGFPKHCGNGTVAMAEWDAFCEEQVLDLLGDAEHLEKVWVAGSDSAGELAEVNAELVDLTSLIGSPAYRAGSPQREALDARIATLAARQGELEGLEARPSGWEWRETGQRFGDWWREQDTAAKNTWLRSMNVRLTFDVRGGLTRTIDFGDLREYEQHLRSGSAVERLRTGMS

SEQ ID NO: 9099 - protein, 500 aa, synthetic construct
MRALVVIRLSRVTDATTSPERQLESCQQLCAQRGWDVVGVAEDLDVSGAVDPFDRKRRPYLARWLAFEEQPFDVIVAYRVDRLTRSVRHLQQLVHWAEDHKKLVVSATEAHFDTTTPFAAVVIALMGTVAQMELEAIKERNRSAAHFNIRAGKYRGSLPPWGYLPTRVDGEWRLVPDPVQRERILEVYRRVVDNHESLHLVAHDLNRRGVLSPKDYFAQLRGREPQGRKWSATALKRSMISEAMLGYATLNGKIVRDDDGAPLVRAEPILTRVQLEALRAELVKTSRAKPAVSTPSLLLRVLFCAVCGEPAYKFAGGGRKHPRYRCRSMGFPKHCGNGTVVMAEWDAFCEEQVLNLLGDAERLEKVWVAGSDSAVELAEVNAELVDLTSLIGSPAYRAGSPQREALDARIAALAARQEELEGLEARPSGWEWRETGQRFGDWWREQDTAAKNTWLRSMNVRLTFDVRGGLTRTIDFGDLQEYEQHLRLGGVVERLHTGMS

SEQ ID NO: 9100 - protein, 500 aa, synthetic construct
MRALVVVRLSRVTDATTSPERQLESCQQLCAQRGWDVVGVAEDLDVSGAVDPFDRKRRPNLARWLAFEEQPFDAIVAYRVDRLTRSTRHLQQLVRWAEDHKKLVVSATEAHFDTTTPFAAVVIALMGTVAQMELEAIKERIRSAVHFNIRAGKYRGSLPPWGYLPTRVDGEWRLAPDPVQRERILEVYHRVVDNHEPLHLVAHDLNRRGVLSPKDYFAQLRGREPRGRKWSATALRRSMTSEAMLGYATLNGKTVRGDDGAPLVRAEPILTREQLEALRAELAKTSRAKPAVSTPSLLLRVLFCAVCGEPAYKFVGGGRKHPRYRCRSMGFPEHCGNGTVVMAEWDAFCEEQVLDLLGDAERLEKVWVAGSDSAVELAEVNAELVDLTSLIGSPAYRAGSPQREALDARIAALAARQEELEGLEACPSGWEWRETGQRFGDWWREQDTAVKNAWLRSMNVRLTFDVRGGLTRTIDFGDLREYEQRLRLGSVAERLHTGMS

SEQ ID NO: 9101 - protein, 500 aa, synthetic construct
MRALVVIRLSRVTDATTSPERQLESCQQLCAQRGWGVIGVAEDLDVSGAVDPFDRKRRPNLARWLAFEEQPFDVIVAYRVDRLTRSVRYLQQLVHWAEDHKKLVVSATEAHFDTTTPFAAVVIALMGTVAQMELEAIKERNRSAAHFNIRAGKYRGSLPPWGYLPTRVDGEWRLVPDPVQRERILEVYHRVVDNHESLHLVAHDLNRRGVLSPKDYFAQLQGREPQGRKWSATALKRSMISEAMLGYATLNGKTVRDDDGAPLVRAEPILTRGQLEALRAELAKTSRAKPAVSTPSLLLRVLFCAVCGEPAYKFAGGGRKHPRYRCRSMGFPKHCGNGTVVMAEWDAFCEEQVLNLLGDAERLEKVWVAGSDSAVELAEVNAELVDLTSLICSPAYRAGSPQREALDARIAALAARQEELEGLEARPSGWEWRGTGQRFGDWWREQDTTAKNTWLRSMNVRLTFDVRGGLTRTVDFGGLQEYEQHLRLGGVVERLHTGMS

SEQ ID NO: 9102 - protein, 500 aa, synthetic construct
MRALVVIRLSRVTDATTSPERQLESCQQLCAQRGWDVVGVAEDLDVSGAVDPFDRKRRPNLARWLAFEERPFDAIVAYRVDRLTRSTRHLQQLVRWAEDHKKLVVSATEAHFDTTTPFAAVVIALMGTVAQMELEAIKERIRSAVRFNIRAGKYRGSLPPWGYLPTRVEGEWRLVPDPVQRERILEVYHRVVDNHEPLHLVAHDLNRRGVLSPKDYFAQLRGREPRGRKWSATALKRSMISEAMLGYATLNGKTVRDDDGAPLVRAEPILTRVQLEALRAELVKTSRAKPAVTTPSLLLRVLFCAVCGEPAYKFTGGGRKHPRYRCRSMGFPKHCGNGTVVMAEWDVFCEEQVLNLLGDAERLEKVWVAGSDSAVELAEVNAELVDLTSLIGSPAYRAGSPQREALDARIAALAARQEELEGLEARPSGWEWRETGQRFGDWWREQDTAAKNTWLRSMNVRLTFDVRGGLTRTIDFGDLQEYEQHLRLGCVVERLHTGMS

SEQ ID NO: 9103 - protein, 500 aa, synthetic construct
MRALVVVRLSRVTDATTSPERQLESCKQLCAQRGWDVVGVAEDLDVSGAVDPFDRKRRPNLARWLAFEEQPFDAIVAYRVDRLTRSTRHLQQLVHWAEDHKKLVVSATEAHFDTTTPFAAVVIALMGTVAQMELEAIKERIRSAVRFNIRAGKYRGSLPPWGYLPTRVDGEWRLVPDPVQRERILEVYHRVVDNHEPLHLVAHDLNRRGVLSPRDYFAQLQGREPQGRKWSATALKRSMISGAMLGYATLNGKTVRGDDGAPLVRAEPILTREQLEALRAELAKTSRAKPAVSTPSLLLRVLFCAVCGEPAYKFTGGGRKHPRYRCRSMGFPKHCGNGTVVMAEWDAFCEEQVLDLLGDAERLEKVWVAGSDSAVELAEVNAELVDLTSLIGSPAYRAGSPQRETLDARIAALAARQEELEGLEVRPSGWEWRGTGQRFGDWWREQDTAARNAWLRSMNVRLTFDVRGGLTRTIDFGDLQEYERHLRLGSVAERLRTGMS

SEQ ID NO: 9104 - protein, 500 aa, synthetic construct
MRALVVIRLSRVTDATTSPERQLESCQQLCAQRGWDVVGVAEDLDVSGAVDPFDRKRRPNLARWLAFEEQPFDVIVAYRVDRLTRSTRHLQQLVRWAEDHKQLVVSATEAHFDTTTPFAAVVIALMGTVAQMELEAIKERIRSAVRFNIRAGKYRGSLPPWGYLPTRVDGEWRLVPDPVQRERILEVYHRVVDNHEPLHLVAHDLNRRGVLSPKDYFAQLQGREPRGRKWSATALKRSMISGAMLGYATLNGKIVRDDDGTPLVRAEPILTREQQGALRTELAKTSRAKPAVSTPSLLLRVLFCAVCGEPAYKFVGGGRKHPRYRCRSMGFPEHCGNGTVVMAEWDAFCEEQVLDLLGDAERLERVWVAGSDSTVELAEVNAELVDLTGLIGSPAYRVGSPQRKALDARIAALAARQEELEGLEARPPGWELRGTGQRFGDWWREQDTAAKNTWLRSMNVRLTFDVRGGLTRTIDFGELQEYEQHLRLGGVVERLHTGMS

SEQ ID NO: 9105 - protein, 500 aa, synthetic construct
MRALVVIRLSRVTDATTSPERQLESCQQLCAQRGWDVVGVAEDLDVSGAVDPFDRKRRPNLARWLAFEEQPFDAIVAYRVDRLTRSVRHLQQLVHWAEDHKKLVVSATEAHFDTTTPFAAVVIALMGTVAQMELEAIKERNRSAAHFNIRAGKYRGSLPPWGYLPTRVDGEWRLVPDPVQRERILEVYHRIVDNHEPLHLVAHDLNRRGVLSPKDYFAQLQGREPQGRKWSATALKRSMTSEAMLGYATLNGKTVRDDDGAPLVRAEPILTRGQLEALRAELVKTSRAKPAVSTPSLLLRVLFCAVCGEPAYKFAGGGRKHPRYRCRSMGFPKHCGNGTVAMAEWDAFCEEQVLDLLGDAERLEKVWVAGSDSAVELAEVNAELADLTSLIGSPAYRAGSPQREALDARIAALAARQEELEGLEARPSGWEWRGTGQRFGDWWREQDTAAKNTWLRSMNVRLTFDVRGGLTRTIDFGDLQEYEQHLRSGSVVERLYTGMS

SEQ ID NO: 9106 - protein, 500 aa, synthetic construct
MRALVVIRLSRVTDATTSPERQLESCQQLCAQRGWDVVGVAEDLDVSGAVDPFDRKRRPNLARWLAFKEQPFDAIVAYRVDRLTRSVRHLQQLVRWAEDHKKLVVSVTEAHFDTTTPFAAVVIALMGTVAQMELEAIKERIRSAVRFNIRAGKYRGSLPPWGYLPARVDGEWRLVPDPVQRERILEVYHRVVDNHEPLHLVAHDLNRRGVLSPKDYFAQLQGREPQGRKWSATALKRSMISVAMLGYATLNGKTVRDDDGAPLVRAEPILTREQQEALRAELAKTSRAKPAVSTPSLLLRVLFCAVCGEPAYKFVGGGRKHPRYRCRSMGFPKHCGNGTVAMAEWDAFCEEQVLDLLGDAERLEKVWVAGSDSAVELAEVNAELVDLTSLIGSPAYRAGSPQREALDARIAALAARQEELESLEARPSGWGWRETGQRFGDWWREQDTAAKNTWLRSMNVRLTFDVRGGLTRTIDFGDLQEYVQHLRLGSVDDRLHAGML

SEQ ID NO: 9107 - protein, 500 aa, synthetic construct
MRALVVIRLSRVTDTTTSPERQLESCQQLCAQRGWDVVGVAEDLDVSGAVNPFDRKRRPNLARWLAFEEQPFDVIVAYRVDRLTRSTRHLQQLVHWAEDHKKLVVSATEAHFDTTTPFAAVVIALMGTVAQMELEAIKERNRSAAHFNIRAGKYRGSLPPWGYLPTRVDGEWRLVPDPVQRERILEVYHRVVDNHESLHLVAHDLNRRGVLSPKDYFAQLQGREPQGRKWSATALKRSMTSEAMLGYATLNGKTVRDDDGAPLVRAEPILTREQLEALRAELVKTSRAKPAVSTPTLLLRVLFCAVCGEPAYKFAGGGRKHPRYRCRSMGFPKHCGNGTVAMAEWDAFCEEQVLGLLGDAERPEKVWVAGSDSAVELAEVNAELVDLTSLIGSPAYRAGSPQREALDARIAALAARQEELEGLEARPSGWEWRGTGQRFGDWWREQDTAAKNTWLRSMNVRLTFDVRGGLTRTIDFGDLQEYEQHLRLGSVVERLHTGMS

SEQ ID NO: 9108 - protein, 500 aa, synthetic construct
MRALVVIRLSRVTDATTSPERQLESCQQLCAQRGWDVVGVAEDLNVSGAVDPFDRKRRPNLARWLAFEEQPFDVIVAYRVDRLTRSIRHLQQLVHWAEDHKKLVVSATEAHFDTTTPFAAVVIALMGTVAQMELEAIKERNRSAAHFNIRAGKYRGSLPPWGYLPTRVDGEWRLVPDPVQRERILEVYRRVVDNHEPLHLVAHDLNRRGVLSPKDYFAQLQGREPQGRKWSATALKRSMISEAMLGYATLNGKTVRDDDGAPLVRAEPILTREQLEALRAVLVETSRAKPAVSTPSLLLRVLFCAVCGEPAYKFAGGGRKHPRYRCRSMGFPKHCGNGTVAMAEWDAFCEEQVLDLLEDAERLEKVWVAGSDSAVELAEVNAELVDLTSLIGSPAYRAGSPQREALDARIAALAARQEELEGLGARPSGWEWRETGQRFGDWWREQDTAAKNTWLRSMNVRLTFDVRGGLTRTIDFGDLQEYEQHLRLGSVIERLHTGMS

SEQ ID NO: 9109 - protein, 500 aa, synthetic construct
MRALVVIRLSRVTDATTSPERQLESCQQLCAQRGWDVVGVAEDLDVSGAVDPFDRKRRPNLARWLAFEEQPFDVIVAYRVDRLTRSTRHLQQLVHWAEDHKKLVVSATEAHFDTTTPFAAVVIALMGTVAQMELEAIKERNRSAAHFNIRAGKYRGSLPPWGYLPARVDGEWRLVPDPVQRERILEVYHRVVDNHEPLHLVAHDLNRRGVLSPKDYFAQLRGREPQGRKWSATALKRSMISEAMLGYATLNGKTVRDDDGAPLVRAEPILTREQLEALRAELVKTSRAKPAVSTPSLLLRVLFCAVCGEPAYKFAGGGRKHPRYRCRSMGFPKHCGNGTVVMAEWDAFCEEQVLNLLGDAERLEKVWVAGSDSAVELAEVNAELVDLTSLIGSPAYRAGSPQRGALDARIAALTARQEELEGLEARPSGWEWRETGQRFGDWWREQDTAAKNTWLRSMNVRLTFDVRGGLTRTIDFGVLQGYEQRLRLGSVVERIHTGTS

SEQ ID NO: 9110 - protein, 500 aa, synthetic construct
MRALVVIRLSRVTDATTSPERQLESCQQLCAQRGWDVVGVAEDLDVSGAVDPFDRKRRPNLARWLAFEEQPFDVIVAYRVDRLTRSTRHLQQLVHWAEDHKKLVVSATEAHFDTTTPFAAVVIALMGTVAQMELEAIKERIRSAVRFNIRAGKYRGSLPPWGYLPARVDGEWRLVPDPVQRERILEVYHRVVDNHEPLHLVAYDLNQRGVLSPKDYFAQLQGREPQGRKWSATALKRSMTSVAMLGYATLNGKTVRDDDGAPLVRAEPILTREQQEALRAELVKTSRAKPAVSTPSLLLRVLFCAVCGEPAYKFVGGGRKHPRYRCRSMGFPKHCGNGTVVMAEWDAFCEEQVLGLLGDAERLEKVWVAGSDSAVELAEVNAELVDLTSLIGSPAYRAGSPQREALDARVAALAARQEELEGLEARPSGWEWRETGQRFRDWWHEQDTAAKNTWLRSMNVRLTFDVRGGLTRTIDFGDLQEYEQHFRSGSVVERLHTGMP

SEQ ID NO: 9111 - protein, 500 aa, synthetic construct
MRALVVIRLSRVTDATTSPERQLESCQQLCAQRGWDVVGVAEDLDVSGAVDPFDRKRRPNLARWLAFEEQPFDVIVAYRVDRLTRSTRHLQQLVHWAEDHKKLVVSATEAHFDTTTPFAAVVIALMGTVAQMELEAIKERSRSAAHFNIRAGKYRGSLPPWGYLPTRVDGEWRLAPDPVQCERILEVYHRVVDNHEPLHLVAHDLNRRGVLSPKDYFAQLQGREPQGRKWSATALKRSMISEAMLGYATLNGKTVRDDNGAPLVRAEPILTREQLEALRAELVKTSRAKPAVSTPSLLLRVLYCAVCGEPAYKFAGGGRKHPRYRCRSMGFPKHCGNGTVAMAEWDAFCEEQVLDLLGDAERLEKVWVAGSDSAVELAEVNAELVDLTSLIGSPVYRAGSPQREALDARIAALAARQVELEGLGARPSGWEWRETGQRFGDWWREQDTAAKNTWLRSMNIRLTFDVRGGLTRTIDFGDLQEYEQHLRLGSVVERLHTGMS

SEQ ID NO: 9112 - protein, 500 aa, synthetic construct
MRALVVIRLSRVTDATTSPERQLESCQQLCAQRGWDVVGVAEDLDVSGAVDPFDRKRRPNLARWLAFEEQPFDVIVAYRVDRLTRSTRHLQQLVHWAEDHKKLVVSATEAHFDTTTPFAAVVIALMGTVAQMELEAIKERIRSAVHFNIRAGKYRGSLPPWGYLPTRVGGEWRLVPDPVQRERILEVYHRVVDNHEPLHLVAHDLNRRGVLSPKDYFAQLQGREPRGRKWSATALKRSMISAAMLGYATLNGKTVRGDDGAPLVRAEPILTRGQLEALRAELAKTSRAKPAVSTPSLLLRVLFCAVCGEPAYKFVGGGRKHPRYRCRSMGFPEHCGNGTVVMAEWDAFCEEQVLNLLGDAERLEKVWVAGSDSAVELAEVSAELVDLTSLIGSPAYRAGSPQRGALDARIAALAARQEELEGLEARPSGWEWRGTGQRLGDWWREQDTAAKNTWLRSMNVRLTFDVRGGLTRAIDFGDLQEYEQRLRLGSVDERLHTGMS

SEQ ID NO: 9113 - protein, 500 aa, synthetic construct
MRTLVVIRLSRVTEATTSPERQLESCQQLCAQRGWDVVGVAEDLDVSGAVDPFDRKRRPNLARWLAFEEQPFDVIVAYRVDRLTRSIRHLQQLVHWAEDHKKLVVSATEAHFDTTTPFAAVVIALMGTVAQMELEAIKERIRSAVHFNIRAGKYRGSLPPWGYLPTRVDGEWRLVPDPVQRERILEVYHRVVDNHEPLHLVAHDLNRRGVLSPKDYFAQLRGREPQGREWSATALRRSMTSVAMLGYATLNGKTVRDDDGAPLVRAEPILTREQQEALRAELVKTSRAKPAVSTPSLLLRVLFCAVCGEPAYKFAGGGRKHPRYRCRSMGFPEHCGNGTVVMAEWDAFCEEQVLDLLGDAERLEKVWVAGSDSAVELAEVNAELVDLTSLIGSPAYRAGSPQRDALDARIAALAARQEELEGLEARPSGWEWRETGQRFGDWWREQDTAAKNAWLRSMNVRLTFDVRGGLTRTIDFGELQEYGQHSHLGSVVERLHTGMP

SEQ ID NO: 9114 - protein, 500 aa, synthetic construct
MRALVVIRLSRVTDATTSPERQLESCHQLCAQRGWDVVGVAEDLDVSGAVDPFDRKRRPNLARWLAFEQQPFDAIVAYRVDRLTRSIRHLQQLVHWAEDHKKLVVSATEAHFDMTTPFAAVVIALMGTVAQMELEAIKERIRSAVRFNIRAGKYRGSLPPWGYLPTRVDGEWRLAPDPVQRERILEVYHRVVDNHEPLHLVAHDLNRRGVLSPKDYFAQLQGREPRGRKWSATALKRSMISGAMLGYATLNGKTVRGDDGAPLVRAEPILTREQLEALRAELAKTSRAKPAVSTPSLLLRVLFCAVCGEPAYKFVGGGRKHPRYRCRSMGFPKHCGNGTVVMTEWDTFCEEQVLGLLGDAERLEKVWVAGSDSAVELVEVNAELVDLTSLIGSPAYRAGSPQREALDARIAALAARQEKLEGLEARPSGWEWRETGQRFGDWWREQDTAAKNTWLRSMNVRLTFDVRGGLTRTIDLGELQEYEQHLRLGSVVKRLHTGMS

SEQ ID NO: 9115 - protein, 500 aa, synthetic construct
MRALVVIRLSRVTDATTSPERQLESCQQLCVQRGWDVVGVAEDLDVSGAVDPFDRKRRPNFARWLAFEEQPFDVIVAYRVDRLTRSTRHLQQLVHWAEDHKKLVVSATEAHFDTTTPFAAVVIALMGTVAQMELEAIKERIRSAVRFNIRAGKYRGSLPPWGYLPTRVDGEWRLVPDPVQRERILEVYHRVVDNHEPLHLVAHDLNRRGVLSPKDYFAQLRGREPRGRKWSATALKRSMTSEAMLGYATLNGKTVRDGDGAPLVRAEPILTREQLEALRTELVRTSRAKPAVSTPSLLLRVLFCAVCGEPAYKFVGGGRKHPRYRCRSMGLPKHCGNGTVVMAEWDAFCEEQVLNLLGDAERLEKVWVAGSDSAVELAEVNAELVDLTSLIGSPAYRAGSPQREALDARIAALAARQEELEGLEACPSGWEWRGTGQRFGDWWREQDTAAKNTWLRSMNVRLTFDVRGGLTRTIDFGDLREYEQHLCLGSVVERLHAGMS

SEQ ID NO: 9116 - protein, 500 aa, synthetic construct
MRALVVIRLSRVTDATTSPERQLESCQQLCAQRGWDVVGVAEDLDVSGAVDPFDRKRRPNLARWLAFEEQPFDVIVAYRVDRLTRSTRHLQQLVHWAEDHKKLVVSATEAHFDTTTPFAAVVIALMGTVAQMELEAIKERNRSAAHFNIRAGKYRGSLPPWGYLPTRVDGEWRLVPDPVQRERILEVYHRVVDNHESLHLVAHDLNRRGVLSPKDYFAQLQGREPQGRKWSATALKRSMISEAMLGYATLSGKTVRDDDGAPLVRAEPILTREQLEALRAELVKTSRAKPAVSTPSLLLRVLFCAVCGEPAYKFAGGGRKHPRYRCRSMGFPKHCGNGTVVMAEWDAFCEEQVLDLLGDAERLEKVWVVGSDSAVELAEVNAELVDLTSLIGSPAYRTGSPQREAIDARIAALAARQEELEGLEARPSGWEWRETGQRFGDWWREQDTAAKNAWLRSMNVRLTFDVRGGLTRTIDFGELQEYEQHLRLGSVVERLHTGRS

SEQ ID NO: 9117 - protein, 500 aa, synthetic construct
MHALVVIRLSRVTDATTSPERQLESCQQLCAQRGWVVVGVAEDLDVSGAVDPFDRKRRPNLARWLAFEEQPFDAIVAYRVDRLTRSVRHLQQLVHWAEDHKKLVVSATEAHFDTTTPFAAVVIALMGTVAQMELEAIKERNRSAAHFNIRAGKYRGSLPPWGYLPTRVDGEWRLVPDPEQRERILEVYHRVVDNHEPLHLVAHDLNRLGVLSPKDYFAQLQGREPQGCKWSATALKRSMISEAMLGYATLNGRTVRDDDGAPLVRAEPILTREQLEALRAELVKTSRAKPAVSTPSLLLRVLFCAVCGEPAYKFAGGGRKHPRYRCRSMGFPKHCGNGTVVMAEWDAFCEEQVLDLLGDAERLEKVWVAGSDSAVELAEVNAELVDLTSLVGSPAYRVGSPQREALDARIAALAARQEELEGLEARPSGWEWRETGQRFGDWWREQDTAAKNTWLRSMNVRLTFDVRGGLTRTIDFGDLQEYNQHLRLGSVVERLHTGMS

SEQ ID NO: 9118 - protein, 500 aa, synthetic construct
MRALVVIRLSRVTDATTSPERQLESCQQLCSQRGWDVVGVAEDLDVSGAVDPFNRKRRPNLARWLAFEEQPFDVIVAYRVDRLTRSTRHLQQLVRWAEDHKKLVVSATEAHFDTTTPFAAVVIALMGTVAQMELEAIKERIRSAVHFNIRAGKYRGSLPPWGYLPTRVDGEWRLVPDPVQRERILEVYHRVVDNHEPLHLVAHDLNRRGVLSPKDYFAQLRGREPQGRKWSATALKRSMTSVAMLGYATLNGKIVRDDDGAPLVRAEPILTREQQEALRAELVKTSRAKPAVSAPSLLLRVLFCAVCGEPAYKFVGGGRKHPRYRCRSIGSPKHCGNGTVVMAEWDAFCERQVLGLLGDAERLEKVWVAGSDSAVELAEVNAELVDLTSLIGSPAYRAGSPQREALDARIVALAARQEELEGLEARPSGWEWRETGQSFGDWWREQDIAAKNTWLRSMNVRLTFDVRDGPTRTIDFGDLQEYEQHLRLSSAVERLHTGIP

SEQ ID NO: 9119 - protein, 500 aa, synthetic construct
MRALVVIRLSRVTDATTSPERQLESCQQLCAQRGWDVVGVAEDLDVSGAVDPFDRKRRPNLARWLAFEERPFDVIVAYRVDRLTRSTRHLQQLVHWAEDHKKLVVSATEAHFDTTTPFAAVVIALMGTVAQMELEAIKERNRSAAHYNIRAGKYRGSLPPWGYLPTRVDGEWRLVPDPVQRERILEVYHRVVDDHEPLHLVAHDLNRRGVLSPKDYFAQLRGREPQGREWSATALKRSMTSEAMLGYATLNGKTVRDDGGAPLVRAEPILTREQLEALRAELVRTSRAKPAVSTPSLLLRVLFCAVCGEPAYKFAGGGRKHPRYRCRSMGFPKHCGNGTVAMAEWDAFCEEQVLDLLGDTKRLEKVWVAGSDSAVELAEVNAELVDLTSLIGSPAYRAGSPQREALDARIAALAARQEELEGLEARPSGWEWRETGQRFGDWWREQDTAAKNTWLRSMNVRLTFDVRGGLTRTIDFGDLQEHEQHLRLGGVVERLHTGMS

SEQ ID NO: 9120 - protein, 500 aa, synthetic construct
MRALVVIRLSRVTDATTSPERQLESCQQLCAQRGWDVVGVAGDLDVSGAVDPFDRKRRPNLARWLAFEEQPFDAIVAYRVDRLTRSVRHLQQLVHWAEDHKKLVVSATEAHFDTTTPFAAVVIALMGTVAQMELEAIKERNRSAAHFNIRAGKYRGSLPPWGYLPTRVDGEWRLVPDPVQRERILEVYHRVVDNHEPLHLVAHDLNRRGVLSPKDYFAQLRGREPQGRKWSATALKRSMISEAMLGYATLNGKTVRDDDGAPLVRAEPILTREQLEALRAVLVKTSRAKPAVSTPSLLLRVLFCAVCGEPAYKFAGGGRKHPRYRCRSMGFPKHCGNGTVAMAEWDAFCEEQVLDLLGDAERLEKVWVAGSDSAVELAEVNAELVDLTSLIGSPAYRAGSPQREALDARIAALAARQEELEGLGARPSGWVWRETGQRFGDWWREQDTAAKNTWLRSMNVRLTFDVRGGLARTIDFGDLQKYEQHLRLGSVVERLHTGMS

SEQ ID NO: 9121 - protein, 500 aa, synthetic construct
MRALVVTRLSRVTDATTSPERQLESCQQLCAQRGWDVVGIAEDLDVSGAVDPFDRKRRPNLARWLAFEEQPFDVIVAYRVDRLARSTRHLQQLVHWAEDHKKLVVSATEAHFDTTTPFAAVVIALMGTVAQMELEAIKERNRSAAHFNIRAGKYRGSLPPWGYLPTRVDGEWRLVPDPVQRERILEVYHRVVDNHEPLHWVAHDLNRRGVLSPKDYFAQLQGREPQGRKWSATALKRSMISEAMLGYATLNGKTVRDDDGAPLVRAEPILTREQLEALRAELVRTSRAKPAVSTPSLLLRVLFCAVCGEPAYKFAGGGRKHPRYRCRSMGFPKHCGNGTVAMAEWDAFCEEQVLDLLGDAERLERVWVAGSDSAVELAEVNAELVDLTSLIGSPAYRAGSPQREALDARIAALAARQEELEGLEARPSGWEWRETGQRFGDWWREQDTAAKNTWLRSMNVRLTFDVRGGLTRTIDFGDLQGYEQRLRLGSVVERLHTGMS

SEQ ID NO: 9122 - protein, 500 aa, synthetic construct
MRALVVIRLSRVTDATTSPERQLESCQQLCARRGWDVVGVAEDLDASGAVDPFDRKRRPNLARWLAFEEQPFDVIVAYRVDRLTRSTRHLQQLVHWAEDHKKLVVSATEAHFDTTTPFAAVVIALMGTVAQMELEAIKERNRSAAHFNIRAGKYRGSLPPWGYLPTRVDGEWRLVPDPVQRERILEVYHRVVDNHEPLHRVAHDLNRRGVLSPKDYFAQLQGREPQGRKWSATALKRSMTSEAMLGYATLNGKTVRDDDGAPLVRAEPILIRGQLEALRAELVKTSRAKPAVSTPSLLLRVLFCAVCGEPAYKFAGGGRKHPRYRCRSMGFPKHCGNGTVVMAEWDAFCEEQVLNLLGDAERLEKVWVAGSDSAVELSEVNAELVDLTSLIGSPAYRAGSPQREALDARIAALAARQKELEGLEARPSGWEWRETGQRFGDWWREQDTAAKNTWLRSMNVRLTFDVRGGLTRTIDFGNLQEYEQHLRLGSVVERLHTGMS

SEQ ID NO: 9123 - protein, 500 aa, synthetic construct
MRALVVIRLSRVTDATTSPERQLESCQQLCAQRGWDVVGVAEDLDVSGAVDPFDRKRRPNLARWLAFEEQPFDAIVAYRVDRLTRSIRHLQQLVHWAEDHKKLVVSATEAHFDTTTPFAAVVIALMGTVAQMELEAIKERHRSAAHFNIRAGKYRGSLPPWGYLPTRVDGEWRLVPDPVQRERILEVYRRVVDNHEPLHLVAHDLNRRGVLSPKDYFAQLRGREPRGRKWSATALKRSMTSVAMLGYATLNGKTVRDDDGAPLVRAEPILTREQQEALRAELAKTSRAKPAVSTPSLLLRVLFCAVCGEPAYKFVGGGRKHPRYRCRSMGFPKHCGNGTVVMAEWDAFCEEQVLDLLGDAERLEKVWVAGSDSAVELAEVNAELVDLTSLIGSPAYRAGSPQREALDARIAALAARQEELEGLEARPSGWEWRETGQRFGDWWREQDTAAKNAWLRSMNVRLTFDVRGGLTRSIDLGELQEYEQYLRLGSVVGRLHTGMS

SEQ ID NO: 9124 - protein, 500 aa, synthetic construct
MRALVVIRLSRVTDATTSPERQLKSCQQLCAQRGWDVVGVAEDLDVSGAVDPFDRKRRPNLARWLAFEEQPFDVIVAYRVDRLTRSTRHLQQLVLWAEDHKKLVVSATEAHFDTTTPFAAVVIALMGTVAQMELEAIKERIRSAAHFNIRAGKYRGSLPPWGYLPTRVDGEWRLALDPVQRERILEVYHRVVDNHEPLHLVAHDLNRRGVLSPKDYFAQLRGREPQGRKWSATALRRSMTSVAMLGYATLNGKTVRDDDGAPLVRAEPILTREQQEALRAELAKTSRAKPAVSTPSLLLRVLFCAVCGEPAYKFVGGGRKHPRYRCRSMGFPEHCGNGTVVMAEWDAFCEEQVLDLLGDAERLEKVWVAGSDSTVELAEVNAELVDLTSLIGSPAYRAGSPQREALDARIAALAARQEELEGLEARPSGWEWRGTGQRLGDWWREQDTAAKNTWLRSMNVRLTFDVRGGLIRAIDFGDLREYERHLRLGSVVERLHTGMS

SEQ ID NO: 9125 - protein, 500 aa, synthetic construct
MRALVVIRLSRVTDATTSPERQLESCQQLCAQRGWDVVGVAEDLDVSGAVDPFDRKRRPNLARWLAFEEQPFDVIVAYRVDRLTRSVRHLQQLVHWAEDHKKLVASATEAHFDTTTPFAAVVIALMGTVAQMELEAIKERIRSAVRFNIRAGKYRGSLPPWGYLPTRADGEWRLVPDPVQRERILEVYHRVVDNHEPLHLVAYDLNRRGVLSPKDYFAQLRGREPQGRKWSATALKRSMISGAMLGYATLNGKTVRDDNGAPLVRAEPILTREQQEALRAELAKTSRAKPAVSTPSLLLRVLFCAVCGEPAYKFVGGGRKHPRYRCRSMGFPRHCGNGTVVMTEWDAFCEEQVLNLLGDAERLEKVWVAGSDSAVELAEVNAELVDLTSLIGSSAYRAGSPQREALDARIAALAARQEELEGLEACPSGWEWRETGQRFGDWWREQDTSTKNTWLRSMNVRLTFDVRGGLTRTIDFGELQEYEQHLRSGSVVERLHTGMT

SEQ ID NO: 9126 - protein, 500 aa, synthetic construct
MRALVVIRLSRVTDATTSPERQLESCQQLCAQRGWDVVGVAEDLDVSGAVDPFDRKRRPNLARWLAFEEQPFDVIVAYRVDRLTRSTRHLQQLVRWAEDHKKLVVSATEAHFDTTTPFAAVVIALMGTVAQMELEAIKERIRSAVHFNIRAGKYRGSLPPWGYLPTRVDGEWRLVPDPVQRERILEVYHRVVDNHEPLHLVAYDLNRRGVLSPKDYFAQLRGREPRGRKWSATALKRSMISVAMLGYATLNGMTVRDDDGAPLVRAEPILTREQQEALRAELAKTSRAKPAVSTPSLLLRVLFCAVCGEPAYKFVGGGRKHPRYRCRSMGFPKHCGNGTVVMAEWDAFCEEQVLNLLGDAERLEKVWVAGSDSAVELAEVNAELVDLTSLIGSPAYRAGSPQRGALDARIAALAARQEELEDLEARPSGWEWRETGQRFGDWWREQNTAAKNTWLRSMNVRLTFDVRGGLTRTIDFGDLREYEQRLRLGSVVERPHTGMS

SEQ ID NO: 9127 - protein, 500 aa, synthetic construct
MRALVVIRLSRVTDATTSPERQLESCQQLCAQRGWDVVGVAEDLDVSGAVDPFDRKRRPNLARWLAFEEQPFDAIVAYRVDRLTRSTRHLQQLVHWAEDHKKLVVSATEAHFDTTTPFAAVVIALMGTVAQMELEAVKERNRSAAHFNIRAGKYRGSLPPWGYLPARVDGEWRLVPDPVQRERILEVYHRVVDNHEPLHLVAHDLNRRGVLSPKDYFAQLQGREPQGRKWSATALKRSMISEAMLGYATLNGKTVRDDDGAPLVRAEPILTREQQEALRAELVKTSRVKPAVSTPSLLLRVLFCAVCGEPAYKFAGGGRKHPRYRCRSMGFPKHCGNGTVVMAEWDAFCEEQVLDLLGDAERLEKVWVAGSDSAVELAEVNAELVDLTSLIGSPAYRTGSPQREALDTRIAALAARQEELEGLEARPSGWEWRETGQRFGDWWREQDTAAKNTWLRSMNVRLTFDVRGGLTRTIDFGDLQEYEQHLRLGSVVEHLHTGMS

SEQ ID NO: 9128 - protein, 500 aa, synthetic construct
MRALVVIRLSRVTEATTSPERQLESCQQLCAQRGWNVVGVAEDLDVSGAVDPFDRKRRPNLARWLAFEERPFDVIVAYRVDRLTRSTRHLQQLVRWAEDHKKLVVSATEAHFDTTTPFAAVVIALMGTVAQMELEAIKERIRSAAHFNIRAGKYRGSLPPWGYLPTRVDGEWRLVPDPVQRERILEVYHRVVDNHEPLHLVAHDLNRRGVLSPKDYFAQLRGREPQGRKWSATALKRSMTSEAMLGYATLNGKTVRGDDGAPLVRAEPILTRVQLEALRAELAKTSRAKPAVSTPSLLLRVLFCAVCGEPAYKFTGGGRKHPRYRCRSMGFPEHCGNGTVVMTEWDAFCEEQVLNLLGDVERLERVWVAGSDSAVELAEVNAELVDLTSLIGSQAYRAGSPQREALDARIAALAARQEELEGLEARPSGWEWRKTGQRFGDWWREQDTAAKNTWLRSMNVRLTFDVRGGLTRTIDFGDLQEYEQHLRLGSVVERLHTGMS

SEQ ID NO: 9129 - protein, 500 aa, synthetic construct
MRALVVIRLSRVTDATTSPERQLESCQQLCAQRGWDVVGVAEDLDVSGAVDPFDRKRRPNLARWLAFEEQPFDVIVAYRVDRLTRSTRHLQQLVHWAEDHKKLVVSATEAHFDTTTPFAAVVIALMGTVAQMELEAIKERIRSAVRFNIRAGKYRGSLPPWGYLPARVDGEWRLVPDPVQRERILEVYHRVVDNHEPLHLVAHDLNRRGVLSPKDYFAQLQGREPQGRKWSATALRRSLISEAMLGYATLNGKTVRDGDGAPLVRAEPILTREQQEALRAELVKTSRAKPAVSTPSLLLRVLFCAVCGEPAYKFVGGGRKHPRYRCRSIGSPKHCGNGTVAMAEWDAFCEEQVLDLLGDAECLEKVWVAGSDSAVELAEVNTELMDLTSLIGSPAYRAGSPQREALDARIAALAARQEELEGLEARPSGWEWRETGQRFRDWWREQDTAAKNTWLRSMNVRLTFDVRGGLTRTIDFGDLQEYEQHLRLGSVVERLHTGMS

SEQ ID NO: 9130 - protein, 500 aa, synthetic construct
MRALVVIRLSRVTDATTSPERQLESCQQLCAQRGWDVVGVAEDLDVSGAVDPFDRKRRPNLARWLAFEEQPFDAIVAYRVDRLTRSIRHLQQLVHWAEDHKKLVVSATEAHFDTTTPFAAVVIALMGTVAQMELEAIKERNRSAAHFNIRAGKYRGSLPPWGYLPTRVDGEWRLVPDPVQRERILEVYHRVVDNHEPLHLVAHDLNRRGVLSPKDYFAQLRGREPQGRKWSATALKRSMISEAMLGYATLNGKTVRDDDGAPLVRAEPILTREQLEALRAELTKTSRAKPAVSTPSLLLRVLFCAVCGEPAYKFAGGGRKHPRYRCRSMGFPKHCGNGTVVMAEWDAFCEEQVLNLLGDAERLEEVWVAGSDSAVELAEVNAELVDLTSLIGSPAYRAGSPQREALDARIAALAARQEELEGLGARPSGWEWRVTGQRFGDWWREQDTAAKNTWLRSMNVRLTFDVRGGLTRTIDFGDLQEYEQHLRLGGVVERLHTGMS

SEQ ID NO: 9131 - protein, 500 aa, synthetic construct
MRALVVIRLSRVTDTTTSPERQLESCQQLCAQRGWDVVGVAEDLDVSGAVNPFDRKRRPNLARWLAFEEQPFDVIVAYRVDRLTRSTRHLQQLVHWAEDHKKLVVSATEAHFDTTTPFAAVVIALMGTVAQMELEAIKERIRSAAHFNIRAGKYRGSLPPWGYQPTRVDGEWRLVPDPVQRERILEVYHRVVDNHEPLHLVAHDLNRRGVLSPKDYFAQLRGREPQGRKWSATALKRSMTSVAMLGYATLNGKTVRGDDGVPLVRAEPILTREQQGALRAELAKTSRAKPAVPTPSLLLRVLFCAVCGEPAYKFVGGGRKHPRYRCRSMGFPEHCGNGTVVMAEWDAFCEELVLDLLGDAERLEKVWVAGSDTAVELAEVNAELVDLTSLIGSPAYRAGSPQREALDARIAALAARQEELEGLEARPSGWEWRGTGQRFGDWWREQDIAAKNTWLRSVNVRLTFDARGGLTRTIDFGELQEYEQHLRLGSVVKRLHTGMS

SEQ ID NO: 9132 - protein, 500 aa, synthetic construct
MRALVVIRLSRVTDATTSPERQLESCQQLCAQRGWDVVGVAEDLDVSGAVDPFDRKRRPNLARWLASEEQPFDVIVAYRVDRLTRSIRHLQQLVHWAEDHKKLVVSATEAHFDTTTPFAAVVIALMGTVAQMELEAIKERNRSAAHFNIRAGKYRGSLPPWGYLPTRVDGEWRLVPDPVQRERILEVYHRVVDNHEPLHWVAHDLNRRGVLSPKDYFAQLQGREPQGRRWSATALKRSMISEAMLGHATLNGKTVRDDDGAPLVRAEPILTREQLEALRAELVKTSRAKPAVSTPSLLLRVLFCAVCGEPAYKFAGGGRKHPRYRCRSMGFPKHCGNGTVVMAEWDAFCEEQVLDLLGDAERLEKVWVAGSDSAVELAEVNAELVDLTSLIGSPAYRAGSPQREALDARIAALAARQEELEGLEARPSGWEWRETGQRFGDWWREQDTTAKNTWLRSMNVRLTFDVRGGLTRTIDFGDLQEYEQHSRLCSVVERLHTGRS

SEQ ID NO: 9133 - protein, 500 aa, synthetic construct
MRALVVIRLSRVTDATTSPERQLESCQQLCAQRGWDVVGVAEDLDVSGAVDPFDRKRRPNLARWLAFEERPFDVIVAYRVDRLTRSTRHLQQLVHWAEDHKKLVVSATEAHFDTTTPFAAVVIALMGTVAQMELEAIRERNRSAAHFNIRAGKYRGSLPPWGYLPTRVDGEWRLVPDPVQRERILEVYHRVVDNHEPLHLVAHDLNRRGVLSPKDYFAQLQGREPQGRKWSATALKRSMISEAMLGYATLNGRTVRDDDGAPLVRAEPILTREQLEALRAELVKTTRAKPAVSTPSLLLRVLFCAVCGEPAYKFAGGGRKHPRYRCRSMGFPKHCGNGTVVMAEWDAFCEEQVLDLLGDAERLEKVWVAGSDSAVELAEVNAELVDLTSLIGSPAYRAGSPQREALDARIVALAARQEELEGLGASPSGWEWRETGQRFGDWWREQDTAAKNAWLRSMNVRLTFDVRGGQTRTIDFGDLQEYEQHLRSGSVVERLHTGMS

SEQ ID NO: 9134 - protein, 500 aa, synthetic construct
MRALVVIRLSRVTDATTSPERQLESCQQLCAQRGWDVVGVAEDLDVSGAVDPFDRKRRPNLARWLAFEEQPFDAIVAYRVDRLTRSVRHLQQLVHWAEDHKKLVVSATEAHFDTTTPFAAVVIALMGTVAQMELEAIKERNRSAAHFNIRAGKYRGSLPPWGYLPTRVDGEWRLVPDPVQRERILEVYHRVVDNHEPLHLVAHDLNRRGVLSPKDYFAQLQGREPQGRKWSATALKRSLISETMLGYATLNGKTVRDDDGAPLVRAEPILTREQLEALRAELVKTSRAKPAVSTPSLLLRVLFCAVCGEPAYKFAGGGRKHPRYRCRSVGFPKHCGNGTVAMAEWDAFCEEQVLDLLGDAERLEKVWVAGSDSAVELAEVNAELVDLTSLIGSPAYRAGSPQREALDARIAALAARQEELEGLEARPSGWEWRETGQRFGDWWREQDTAAKNTWLRSMNVRLTFDVRGGLTRTIDFGDLQEYEQHLRLGSVVERLHTGMS

SEQ ID NO: 9135 - protein, 500 aa, synthetic construct
MRALVVIRLSRVTDATTSPERQLESCQQLCAQRGWDVVGVAEDLDVSGAVDPFDRKRRPNLARWLAFEEQPFDVIVAYRVDRLTRSVRYLQQLVHWAEDHKKLVVSATEAHFDTTTPFAAVVIALMGTVAQMELEAIKERNRSAAHFNIRAGKYRGSLPPWGYLPTRVDGEWRLVPDPVQRERILEVYRRVVDNHEPLHLVAHDLNRRGVLSPKDYFAQLRGREPQGRKWSATALKRSMISEAMLGYATLNGKTVRDEDGAPLVRAEPILTRGQLEALRAELAKTSRAKPAVSTPSLLLRVLFCAVCGEPAYKFAGGGRKHPRYRCRSMGFPKHCGNGTVVMAEWDAFCEEQVLDLLGDAERPERVWVAGSDSAVELAEVNAELVDLASLIGSPAYRAGSPQREALDARIAALTARQEELEGLEARPSGWEWRGTGQRFGDWWHEQDTAAKNTWLRSMNVRLTFDVRGGLTRTIDFGGLREYEQHLRLGSVVERLHTGTS

SEQ ID NO: 9136 - protein, 500 aa, synthetic construct
MRALVVIRLSRVTDATTSPERQLTSCQQLCAQRGWEVVGVAEDLDVSGAVDPFDRKRRPNLARWLAFEEQPFDVIVAYRVDRLTRSTRHLQQLVLWAEDHKKLVVSATEAHFDTTTPFAAVVIALMGTVAQMELEAIKERSRSATHFNIRAGKYRGSLPPWGYLPTRVDGEWRLVPDPVQRERILEVYHRVVDNHEPLHLVAHDLNRRGVLSPKDYFAQLRGREPQGRKWSATALKRSMTSVAMLGYATLNGKTVRDDDGAPLVRAEPILTREQLEALRAELAKTSRAKPAVSTPSLLLRVLFCAVCGEPAYKFVGGGRKRPRYRCRSMGFPEHCGNGTVVMAEWDAFCEEQVLNLLGDAERLEKVWLAGSDSAAELAEVNAELVDLTSLIGSPAYRACSPQREALDARVAALAARQEELEGLEARPSGWEWRETGQRFGDWWREQDTAAKNAWLRSMNVRLTFDVRGELTRTIDFGDLRGYEQHLRLGSAVERLHTGMS

SEQ ID NO: 9137 - protein, 500 aa, synthetic construct
MRVLIVIRLSRVTDATTSPVRQLESCQQLCAQRGWDVVGVAEDLDVSGAVDPFDRKRRPNLARWLAFEEQPFDAIVAYRVDRLTRSVRHLQQLVHWAEDHKKLVVSATEAHFDTTTPFAAVVIALMGTVAQMELEAIKERNRSAAHFNIRAGKYRGSLPPWGYLPARVDGEWRLVPDPVQRERILEVYRRVVDNHEPLHLVAYDLNRRGVSSPKDYFAQLQGREPQGRKWSATALKRSMISGAMLGYATLNGKTVRGDDGAPLVRAEPILTREQLEALRAELVRTSRAKPAVPTPSLLLRVLFCAVCGEPAYKFAGGGRKHPRYRCRSMGFPKHCGNGTVAMAEWDAFCEEQVLDLLGDAERLEKVWVAGSDSAVELAEVNAELVDLTGLIGSPAYRAGSPQREALDARIAALAARQEELEGLGARPSGWEWRGTGQRFGDWWREQDTAAKNAWLRSMNVRLTFDVRGELTRTIDFGDLQEYERHLRLGSAVERLHAGMS

SEQ ID NO: 9138 - protein, 500 aa, synthetic construct
MRALVVIRLSRVTDATTSPERQLESCQQLCAQRGWDVVGVAEDLDVSGAVDPFDRKRRPNLARWLAFEEQPFDVIVAYRVDRLTRSTRHLQQLVRWAEDHKKLVVSATEAHFDTTTPFAAVVIALMGTVAQMELEAIKERIRSAVRFNIRAGKYRGSLPPWGYLPTRVDGEWRLVPDPVQRERILEVYRRVVDNHESLHSVAHDLNRRGVLSPKDYFAQLRGREPQGREWSATALKRSMISGAMLGYATLNGKTVRDDDGAPLVRAEPILTREQQEALRAELAKTSRAKPAVSTPSLLLRVLFCAVCGEPAYKFVGGGRKHPRYRCRSMGFPEHCGNGTVVMAEWDAFCEEQVLDLLGDAERLEKVWVAGSDSAVELAEVNAELVDLTSLIGSPAYRAGSPQREALDARIAALAARQEELEGLEARPSGWEWRGTGQRFGDWWREQDTAAKNTWLRSMNVRLTFDVRGGLTRTIDFGDLQEYEQHLRLGSVVERLHTGMS

SEQ ID NO: 9139 - protein, 500 aa, synthetic construct
MRALVVIRLSRVTDATTSPERQLESCQQLCAQRGWDVVGVAEDLDVSGAVDPFDRKRRPNLARWLAFEEQPFDVIVAYRVDRLTRSTRHLQQLVRWAEDHKKLVVSATEAHFDTTTPFAAVVIALMGTVAQMELEAIKERIRSAVRFNIRAGKYRGSLPPWGYLPTRVDGEWRLVPDPVQRECILEVYHRVVDNHEPLHLVAHDLNRRGVLSPKDYFAQLRGREPRGRKWSATALKRSMISGAMLGYATLNGKTVRDDDGAPLVRAEPILTREQLEALRAELAKTSRAKPAVSTPSLLLRVLFCAVCGEPAYKFVGGGRKHPRYRCRSMGFPEHCGNGTVVMAEWDAFCEEQVLDLLGDVERLEKVWVAGSDSAVELAEVNAELVDLTSLIGSPAYRAGSPQREALDARIAALAARQEELEGLETRPSGWEWRGTGQRFGDWWREQDTAAKNTWLRAMNVRLTFDVRGGLTRTIDFGDLQEYEQHIRLGSVAERLRTGMS

SEQ ID NO: 9140 - protein, 500 aa, synthetic construct
MRALVVIRLSRVTEATTSPERQLESCQQLCAQRGWDVVGVAEDLDVSGAVDPFDRKRRPNLARWLAFEEQPFDAIVAYRVDRLARSIRHLQQLVHWAEDHKKLVVSATEAHFDTTTPFAAVVVALMGTVAQMELEAIKERNRSAAHFNIRAGKYRGSLPPWGYLPTRVDGEWRLVPDPVQRERILEVYHRVVDNHEPLHLVAHDLNRRGVLSPKDYFAQLQGREPQGRKWSATALKRSMISEAMLGHATLSGKTVRDDDGAPLVRAEPILTRVQLEALRAELVKTSRAKPAVSTPSLLLRVLFCAVCGEPAYKFAGGGRKHPRYRCRSMGFPKHCGNGTVAMAEWDAFCEEQVLDLLGDAERLEKVWVAGSGSAVELSEVNAELVDLTSLIGSPAYRAGSPQREALDARIAALTARQEELEGLEARPSGWEWRGTGQRLGDWWHEQDTAAKNTWLRSMNVRLTFDVRGGLTRTIDFGDLQEYEQHLRLGSVVERLHAGMS

SEQ ID NO: 9141 - protein, 500 aa, synthetic construct
MRALVVIRLSRVTDATTSPERQLESCQQLCAQRGWDVVGVVEDLDVSGAVDPFDRKRRPNLARWLAFEEQPFDAIVAHRVDRLTRSTRHLQQLVRWAEDHKKLVVSATEAHFDTTTPFAAVVIALMGTVAQMELEAIKERIRSAVHFNIRAGKYRGSLPPWGYLPTRVDGEWRLVPDPVQRERILEVYHRVVDNHEPLHLVAYDLNRRGVLSPKDHFAQLQGREPQGRKWSATALKRSLTSVAMLGYATLNGKVVRDDDGAPLVRAEPILTREQLEALRAELARTSRAKPAVSTPSLLLRVLFCAVCGEPAYKFAGGGRKHPRYRCRSMGFPKHCGNGTVTMAEWDAFCEEQVLDLLGDAERLEKVWVAGSDSAVELAEVNAELVDLTSLIGSPAYRAGSPQREALDARIAALAARQGELEGLEARPSGWEWRGTGQRFRDWWREQDTAAKNTWLRSMNVRLTFDVRGGLTRTVDFGDLQEYGQHLRSGSVAERLYTGMS

SEQ ID NO: 9142 - protein, 500 aa, synthetic construct
MRALVVIRLSRVTDATTSPERQLESCQQLCAQRGWDVVGVAEDLDVSGAVDPFDRKRRPNLARWLAFEEQPFDVIVAYRVDRLTRSTRHLQQLVRWAEDHKKLVVSATEAHFDTTTPFAAVVIALMGTVAQMELEAIKERIRSAVRFNIRAGKYRGSLPPWGYLPTRVDGEWRLVPDPVQRERILEVYHRVVDDHEPLHLVAHDLNRRGVLSPKDYFAQLQGREPQGRKWSATALKRSMTSGAMLGYATLNGKTVRDDDGAPLVRAEPILTREQQEALRAELAKTSRAKPAVSTPSLLLRVLFCAVCGEPAYKFVGGGRKHPRYRCRSMGFPKHCGNGTVVMAEWDAFCEEQVLDLLGDAERLEKVWIAGSDSAVELAEVNAELVDLTSLIGSPAYRAGSPQREALDARIAALAARQEELEGLEARPSGWEWHGTGQRFGDWWREQDTAAKNTWLRSMNVRLTFDVRGGLTRTIDFGELQEYEWHLRSGSVVERLHTGMP

SEQ ID NO: 9143 - protein, 500 aa, synthetic construct
MRALVVIRLSRVTDATTSPERQLESCQQLCAQRGWDVVGVAEDLDVSGAVDPFDRKRRPNLARWLAFEEQPFDVIVAYRVDRLTRSTRHLQQLVHWAEDHKKLVVSATEAHFDTTTPFAAVVIALMGTVAQMELEAIKERIRSAAHFNIRAGKYRGSLPPWGYLPTRVDGEWRLVPDPVQRERILEVYHRVVDNHEPLHLVAYDLNRRGVLSPKDYFAQLRGREPRGRRWSATALKRSMTSVAMLGYATLNGKTVRDDDGAPLVRAEPILTREQQEALRAELAKTSRAKPAVSTPSLLLRVLFCAVCGEPAYKFVGGGRKHPRYRCRSMGFPKHCGNGTVAMAEWDTFCEEQVLNLLGDAERLEKVWVAGSDSAVELAEVNAELVDLTSLIGSPAYRAGSPQREALDARIAALAARQEELEGLEARPSGWEWRGTGQRLGDWWREQDTAAKNAWLRSMNVRLTFDVRGGLTRTIDFGDLQEYEQHLRLGSVVERLHTGTS

SEQ ID NO: 9144 - protein, 500 aa, synthetic construct
MRALVVIRLSRVTDATTSPERQLESCQQLCAQRGWDVVGVAEDLDVSGAVDPFDRKRRPNLARWLAFEEQPFDVIVAYRVDRLTRSTRHLQQLVLWAEDHKKLVVSATEAHFDTTTPFAAVVIALMGTVAQMELEAIKERIRSAAHFNIRAGKYRGSLPPWGYLPTRVDGEWRLAPDPVQRERILEVYHRVVDNHEPLHLVAHDLNRRGVLSPKDYFAQLRGREPQGRKWSATALKRSMTSVAMLGYATLNGKTVRDDDGAPLVRAEPILTREQQEALRAELVKTSRAKPAVSTPSLLLRVLFCAVCGEPAYKFVGGGRKHPRYRCRSMGFPKHCGNGTVVMAEWDAFCEEQVLNLLGDAERLEKVWVAGTDSAVELAEVNAELVDLTSLIGSPAYRAGSPQREALDARIAALAARQEELEGLEARPSGWEWRETGQRFGDWWREQDTAAKNTWLRSMNVRLTFDVRGGLTRTIDFGDLQEYEQHLRLGSVVERSRTGMS

SEQ ID NO: 9145 - protein, 500 aa, synthetic construct
MRALVVIRLSRVTDATTSPERQLESCQQLCAQRGWDVVGVAEDLDVSGAVDPFDRKRRPNLARWLAFGEQPFDVIVAYRVDRLTRSTRHLQQLVHWAEDHKKLVVSATEAHFDTTTPFAAVVIALMGTVAQMELEAIKERNRSAAHFNIRAGKYRGSLPPWGYLPARVDGEWRLVPDPVQRERILEVYHRVVDNHEPLHLVAHDLNRRGVLSPKDYFAQLQGREPQGRKWSATALKRSMISEAMLGYATLNGKTVRDDDGAPLVRAEPILTREQQEALRAELVKTSRVKPAVSTPSLLLRVLFCAVCGEPAYKFAGGGRKHPRYRCRSMGFPKHCGNGTVAMAEWDAFCEEQVLDLLGDAERLEKVWVAGSDSAVELAEVNAELVDLTSLIGSPAYRAGSPQREALDARIAALAARQEELEGLEARPSGWEWRETGQRFGDWWREQDTAAKNTWLRSMNVRLTFDARGGLTRTIDFGGLQEYEQHLRLGSVVERLHTGMS

SEQ ID NO: 9146 - protein, 500 aa, synthetic construct
MRALVVIRLSRVTDATTSPERQLESCRQLCAQRGWDVVGVAEDLDVSGAVDPFDRKRRPNLARWLAFEEQPFDAIVAYRVDRLTRSVRYLQQLVHWAEDHKKLVVSATEAHFDTTTPFAAVVIALMGTVAQMELEAIKERNRSAAHFNIRAGKYRGSLPPWGYLPTRVDGEWRLVPDPVQRERILEVYHRVVDNHEPLHLVAHDLNRRGVLSPKDYFAQLQGREPQGREWSATALKRSMISKAMLGYATLNGRTVRDDDGAPLVRAEPILTREQQEALRAELVKTSRAKPAVSTPSLLLRVLFCAVCGEPAYKFAGGGRKHPRYRCRSMGFPKHCGNGTVVMAEWDAFCEEQVLDLLGDAERLEKVWVAGSDSAVELAEVNAELVDLTSLIGSPAYRAGSPQREALDARIAALVARQEELEGLEARPSGWEWRETGQRFGDWWREQDTAAKNTWLRSMNVRLTFDVRGGLTRTIDFGDLQEYEQHLRLGSVVGRLHTGVS

SEQ ID NO: 9147 - protein, 500 aa, synthetic construct
MRALVVIRLSRVTDATTSPERQLESCQQLCAQRGWDVVGVAEDLDVSGAVDPFDRKRRPNLARWLAFEEQPFDVIVAYRVDRLTRSTRHLQQLVHWAEDHKKLVVSATEAHFDTTTPFAAVVIALMGTVAQMELEAIKERIRSAVRFNIRAGKYRGSLPPWGYLPTRVDGVWRLVPDPVQRERILEVYHRVVDNHEPLHLVAHDLNRRGVLSPRDYFAQLQGREPQGRKWSATALKRSMISKAMLGYATLNGKTVRDDDGAPLVRAEPILTHEQQEALRAELVRTSRAKPAVSTPSLLLRVLFCAVCGEPAYKFVGGGRKHPRYRCRSMGFPEHCGNGTVVMAEWDAFCEERVLDLLGDAERLEKVWVAGSDSAVELAEVNAELVDLTSLIGSPAYRAGSPQREALDARIAALAARQEELEGLEARPSGWEWRETGQRFGDWWREQDTAAKNTWLRSMNVRLTFDVRGGLTRTIDFGELQEYEQHLRLGSAAERLHTGMS

SEQ ID NO: 9148 - protein, 500 aa, synthetic construct
MRALVVIRLSRVTDATTSPERQLESCQQLCAQRGWDVVGVAEDLDVSGAVDPFDRKRRPNLARWLAFEEQPFDAIVAYRVDRLARSIRHLQQLVHWAEDHKKLVVSATEAHFDTTTPFAAVVIALMGTVAQMELEAIKERNRSAAHFNIRAGKYRGSLPPWGYLPTRVDGEWRLVPDPVQRERILEVYHRVVDSHEPLHLVAHDLNRRGVLSPKDYFAQLRGREPQGRKWSATALKRSMISEAMLGYATLNGKTVRDDDGAPLVRAEPILTREQLEALRAELVKTSRAKPAVSTPSLLLRVLFCAVCGEPAYKFAGGGRKHPRYRCRSMGFPKHCGNGTVAMAEWDAFCEEQVLDLLGDAVRLEKVWVAGSDSAVVLAEVNAELVDLTSLIGSPAYRAGSPQREALDARIAALAARREELEGLEARPPGWEWRETGQRFGDWWREQDTAAKNTWLRSMNVRLTFDVRGGLTRTIDFGDLQEYVQHLRSGSVVERLHTKMS

SEQ ID NO: 9149 - protein, 500 aa, synthetic construct
MRALVVIRLSRVTDATTSPERQLESCQQLCAQRGWDVVGVAEDLDVSGAVDPFDRKRRPNLARWLAFEEQPFDVIVAYRVDRLTRSTRHLQQLVHWAEDHMKLVVSATEAHFDTTTPFAAVVIALMGTVAQMELEAIKERNRSAAHFNIRAGKYRGSLPPWGYLPARVDGEWRLVPDPVQRERILEVYHRVVVNHEPLHLVAHDLNRRGVLSPKDYFAQLQGREPQGRKWSATALKRSMISVAMLGYATLNGKTVRDDDGAPLVRAEPILTREQLEALRAELVKTSRAKPAVSTPSLLLRVLFCAVCGEPAYKFAGGGRKHPRYRCRSMGFPKHCGNGTVAMAEWDAFCEEQVLDLLGDAERLEKVWVAGSDSAVELAEVNAELVDLTSLIGSPAYRAGSPQREALDARIAALAARQEELEGLDARPSGWEWRETGQRFGDWWRGQDTAAKNTWLRSMNVRLTFDARGGLTRTIDFGDLQEYEQHLRLGSVVERLHTGMS

SEQ ID NO: 9150 - protein, 500 aa, synthetic construct
MRALVVIRLSRVTDATTSPERQLESCQQLCARRGWDVVGVAEDLDVSGAVDPFDRKRRPNLARWLAFEEQPFDVIVAYRVDRLTRSVRHLQQLVHWAEDHKKLVVSATEAHFDTTTPFAAVVIALMGTVAQMELEAIRERNRSAAHFNIRAGKYRGSLPPWGYLPTRVDGEWRLVPDPVQRERILEVYHRVVDNHEPLHLVAHDLNRRGVLSPKDYFAQLRGREPQGREWSATALKRSMTSEAMLGYATLNGKTVRDDDGAPLVRAEPILTRGQLEALRAELVKTSRAKPAVSTPSLLLRVLFCAVCGEPAYRFAGGGRKHPRYRCRSMGFPKHCGNGTVVMAEWDAFCEEQVLNLLGDAERLEEVWVAGSDSAVELAEVNAELVDLTSLIGSPAYRAGSPQREALDARIAALAARQEELEGLEARPSGWEWRETGQRFGDWWREQDTAAKNTWLRSMNVRLTFDVRGGLTRTIDFGDLQEYEQHLRLGSVVERLHTGMS

SEQ ID NO: 9151 - protein, 500 aa, synthetic construct
MRALVVIRLSRVTDATTSPERQLESCQQLCAQRGWDVVGVAEDLDVSGAVDPFDRKRRPNLARWLAFEEQPFDVIVAYRVDRLTRSTRHLQQLVHWAEDHKKLVVSATEAHFDTTTPFAAVVIALMGTVAQMELEAIKERNRSAAHFNIRAGKYRGSLPPWGYLPTRVDGEWRLVPDPVQRERILEVYRRVVDNHEPLHLVAHDLNRRGVLSPKDHFAQLRGREPQGRKWSATALKRSMTSEAMLGYATLNGKTVRDDDGAPLVRAEPILTREQLEALRAELVKTSRAKPAVSTPSLLLRVLFCAVCGEPAYKFAGGGRRHPRYRCRSMGFPKHCGNGTVAMAEWDAFCEEQVLDLLGDAERLEKVWVAGSDSAVELAEVNAELVDLTSLIGSPAYRAGSPQREALDARIAALAARQEELEGLEARPSGWEWRETGQRFGDWWREQDTAAKNTWLRSMNVRLTFDVRGGLTRTIDFGDLQGYERHLRLGSVVERLHTAMS

SEQ ID NO: 9152 - protein, 500 aa, synthetic construct
MRALVVIRLSRVTDATTSPERQLESCQQLCAQRGWDVVGVAEDLNVSGAVDPFDRKRRPNLARWLAFEEQPFDVIVAYRIDRLTRSIRHLQQLVHWAEDHKKLVVSVTEAHFDTTTPFAAVVIALMGTVAQMELEAIKERNRSAAHFNIRAGKYRGSLPPWGYLPTRVDGEWRLVPDPVQRERILEVYHRVVDNHEPLHLVAHDLNRRGVLSPKDYFAQLRGREPQGRKWSATALKRSMISEAMLGYATLNGRTVRDDDGAPLVRAEPILTREQLEALRAELAKTSRAKPAVSTPSLLLRVLFCAVCGEPAYKFAGGGRKHPRYRCRSMGFPKHCGNGTVAMAEWDAFCEEQVLDLLGDAERLEKVWVAGSDSAVELAEVNAELVDLTSLIGSPAYRAGSPQREALDARIAALAARQEELEGLGARPSGWEWRETGQRFGDWWREQDTAAKNTWLRSMNVRLTFDVRGGLTRTIDFGDLQEYEQHLRLGSVVERLHTGMS

SEQ ID NO: 9153 - protein, 500 aa, synthetic construct
MRALVVIRLSRVTDATTSPERQLESCQQLCAQRGWDVAGVAEDLDVSGAVDPFDRKRRPNLARWLAFEEQPFDVIVAYRVDRLTRSTRHLQQLVRWAEDHKKLVVSATEAHFDTTTPFAAVVIALMGTVAQMELEAIKERIRSAAHFNIRAGKYRGSLPPWGYLPTRVDGEWRLVPDPVQRERILEVYHRVVDDHESLHSVAHDLNRRGVLSPKDYFAQLRGREPRGRKWSATALKRSMISGAMLGYATLNGKIIRDDDGAPLVRAEPILTREQQEALRAELAKTSRAKPAVSTPSLLLRVLFCAVCGEPAYKFAGGGRKHPRYRCRSMGSPKHCGNGTVVMTEWDAFCEEQVLNLLGDAERLEKVWVAGSDSAVELAEVSAELVDLTSLIGSPAYRAGSPQREALDARIAALAARREELEGLEARPSGWEWRGTGQRFGDWWREQDTAAKNTWLRSMNVRLTFDVRGGLTRTIDFGDLQEYEQRLRLGSVVERSHTGMS

SEQ ID NO: 9154 - protein, 500 aa, synthetic construct
MRALVVIRLSRVTDATTSPERQLESCQQLCAQRGWDVVGVAEDLDVSGAVDPFDRKRRPNLARWLAFEEQPFDVIVAHRVDRLTRSVRHLQQLVHWAEDHKKLVVSATEAHFDTTTPFAAVVIALMGTVAQMELEAIKERNRSAAHFNIRAGKYRGSLPPWGYLPARVDGEWRLVPDPVQRERILEVYHRVVDNHEPLHWVAHDLNRRGVLSPKDYFAQLQGREPQGRKWSATALKRSMISEAMLGYATLNGKTVRDDDGAPLVRAEPILTREQLEALRAELVKTSRAKPAVSTPSLLLRVLFCAVCGEPAYKFAGGGRKHPRYRCRSMGFPKHCGNGTVAMAEWDAFCEEQVLDLLGDAERLEKVWVVGSDSAVELAEVNAELVDLTSLIGSPAYRAGSPQREALDARIAALAARQEELEGLEARPSGWEWRETGQRFGDWWREQDTAAKNTWLRSMNVRLTFDVRGGLTRTIDFGGLQEYEQHLRLGGVVERLHTGMS

SEQ ID NO: 9155 - protein, 500 aa, synthetic construct
MRALVVIRLSRVTDATTSPERQLESCQQLCAQRGWDVVGVAEDLDVSGAVDPFDRKRRPNLARWLAFEEQPFDVIVAYRVDRLTRSVRHLQLLVHWAEDHKKLVVSATEAHFDMTTPFAAVVIALMGTVAQMELEAIKERNRSAAQFNIRAGKYRGSLPPWGYLPTRVDREWRLVPDPVQRERILEVYRRVVDNHEPLHLVAHDLNRRGVLSPKDYFAQLQGREPQGRKWSATALKRSMISEAMLGYATLNGKTVRGDDGAPLVRAEPILTREQLETLRAVLVKTSRAKPAVSTPSLLLRVLFCAVCGEPAYKLAGGGRKHPRYRCRSMGFPKHCGNGTVAMAEWDAFCEEQVLDLLGDAECLEKVWVAGSDSAVELAEVNAELVDLTSLIGSPAYRAGSPQREALDARIAALAARQEELEGLGARPSGWEWRETGQRFGDWWRGQDTAAKNTWLRSMNVRLTFDARGGLTRTIDFGDLQEYEQHLRLGSVVERLHTGMS

SEQ ID NO: 9156 - protein, 500 aa, synthetic construct
MRALVVIRLSRVTDATTSPERQLESCQQLCAQRGWDVVGVAEDLDVSGAVDPFDRKRRPNLARWLAFEEQPFDVIVAYRVDRLTRSTRHLQQLVHWAEDHKKLVVSATEAHFDTTTPFAAVVIALMGTVAQMELEAIKERIRSAVRFNIRAGKYRGSLPPWGYLPARVDGEWRLVPDPVQRERILEVYHRVVDNHEPLHLVAHDLNRRGVLSPKDYFAQLRGREPQGRKWSATALKRSMISVAMLGYATLNGKTVRDDDGAPLVRAEPILTREQLEALRVELAKTSRAKPAVSTPSLLLRVLFCAVCGEPAYKFVGGGRKHPRYRCRSMGFPKHCGNGTVVMAEWDAFCEEQVLDLLGDAERLEKVWVAGSDSVVELAEVNAELVDLTSLIGSPAYRAGSPQREALNARIAALAARQEELEGLEARPSGWEWRETGQRFGDWWREQGTAAKNAWLRSMNVRLTFDVRGGLTRTIDFGDLQEYVQHLRSGSVVERLHTGMP

SEQ ID NO: 9157 - protein, 500 aa, synthetic construct
MRALVVIRLSRVTDATTSPERQLESCRQLCAQRGWDVVGVAEDLDVSGAVDPFDRKRRPNLARWLAFEEQPFDVIVAYRVDRLTRSTRHLQQLVHWAEDHKKLVVSATEAHFDTTTPFAAVVIALMGTVAQMELEAIRERNRSAAHFNIRAGKYRGSLPPWGYLPTRVDGEWRLVPDPVQRERILEVYHRVVDNHEPLHLVAHDLNRRGVLSPKDYFAQLQGREPQGRKWSATALKRSMISEAMLGYATLNGKIVRDDDGAPLVRAEPILTREQLEALRAELVKTSRAKPAVSTPSLLLRVLFCAVCGEPAYKFAGGGRKHPRYRCRSMGFPKHCGNGTVAMAEWDAFCEEHVLNLLGNAERLEKVWVAGSDSAVELAEVNAELVDLTSLIGSPAYRAGSPQREALDARIAALAARQEELEGLEARPSGWEWRETGQRFGDWWREQDIAAKNTWLRSMNIRLTFDVRGGLTRTIDFGDLQEYGQHLRLGSVVERLHTGMS

SEQ ID NO: 9158 - protein, 500 aa, synthetic construct
MRALVVIRLSRVTDATTSPERQLESCQQLCSQRGWDVVGVAEDLDVSGAVDPFDRKRRPNLARWLAFEEQRFDVIVAYRVDRLTRSTRHLQQLVHWAEDHKKLVVSATEAHFDTTTPFAAVVIALMGTVAQMELEAIKERIRSAVHFNIRAGKYRGSLPPWGYLPARVDGEWRLVPDPVQRERILEVYHRVVDNHEPLHLVAHDLNRRGVLSPKDYFAQLRGREPQGRKWSATALRRSMTSGAMLGYATLSGKTVRDDDGAPLVRAEPILTREQLEAVRAELAKTSRAKPAVSTPSLLLRVLFCAVCGEPAYKFTGGGRKHPRYRCRSMGSPKHCGNGTVVMAEWDAFCEEQVLDLLGDAERLEKVWVAGSDSAVELAEVNAELVDLTSLIGSPAYRAGSPQREALDTRIAALAARQEELEGLEARPSGWEWRETGQRFGDWWREQDTAAKNTWLRSMNVRLTFDVRGGLTRTIDFGDLQEYEQHLRSGSVVERLHTGMP

SEQ ID NO: 9159 - protein, 500 aa, synthetic construct
MRALVVIRLSRVTEATTSPERQLESCRQLCAQRGWDVVGVAEDLDVSGAVDPFDRKRRPNLARWLAFEEQPFDVIMAYRVDRLTRSIRHLQQLVRWAEDHKKLVVSATEAHFDTTTPFAAVVIALMGTVAQMELEAIKERIRSAVHYNIRAGKYRGSLPPWGYLPTRVDGEWRLAPDPVQRERILEVYHRVVDNHEPLHLVAHDLNRRGVLSPKDYFAQLQGREPQGRKWSATALKRSMISGAMLGYATLSGKIVRDDDGAPLVRAEPILTREQLEALRAELVRTSRAKPAVSTPSLLLRVLFCAVCGEPAYKFVGGGRKHPRYRCRSMGFPKHCGNGTVVMAEWDAFCEKQVLDLLGDAERLEKVWVAGSDSSVELAEVSAELVDLTSLIGSPAYRAGSPQREALDARIAALAARQEELEGLEARPSGWEWRETGQRFGDWWREQDTAAKNTWLRSMNVRLAFDVRGGLTRTIDFGDLQEYEQHLRQGSVVERLHTGMS

SEQ ID NO: 9160 - protein, 500 aa, synthetic construct
MRALVVIRLSRVTDATTSPERQLESCQQLCAQRGWDVVGVAEDLDVSGAVDPFDRKRRPNLARWLTFEEQPFDVIVAYRVDRLTRSTRHLQQLVHWAEDHKKLVVSATEAHFDTTTPFAAVVIALMGTVAQMELEAIKERNRSAAHFNIRAGKYRGSLPPWGYLPTRVDGEWRLVPDPVQRERILEVYHRVVDNHESLHLVAHDLNRRGVLSPKDYFAQLRGREPQGRKWSATALKRSMISEAMLGYATLNGKTVRDDDGAPLVRAEPILTREQLEALRAELVKTPRAKPAVSTPSLLLRVLFCAVCGEPAYKFAGGGRKHPRYRCRSMGFPKHCGNGTVAIAEWDAFCEEQVLNLLGDAERLEKVWVAGSDSAVELAEVNAELVDLTSLIGSPAYRAGSPQREALDARIAALAARQEELEGLEARPSGWEWRETGQRFGDWWREQDTAAKNTWLRSMNVRLTFDVRGGLTRTIDFGNLQEYVQHSRLGSVVVRLHTGMS

SEQ ID NO: 9161 - protein, 500 aa, synthetic construct
MRALVVIRLSRVTDATTSPERQLESCQQLCAQRGWDVVGIAEDLDVSGAVDPFDRKRRPNLARWLASEEQPFDVIVAYRVDRLTRSTRHLQQLVHWAEDHKKLVVSATEAHFDTTTPFAAVVIALMGTVAQMELEAIKERSRSAVHFNIRAGKYRGSLPPWGYLPTRVDGEWRLVPDPVQRERILEVYHRVVDDHEPLHLVAHDLNRRGVLSPKDYFAQLQGREPQGRKWSATALKRSMISKAMLGYATLSGKIVRDDDGAPLVRAEPILTREQQEALRAELAKTSRAKPAVSTPSLLLRVLFCAVCGEPAYKFVGGGRKHPRYRCRSMGFPEHCGNGTVVVAEWDAFCEEQVLGLLGDAERLEKVWVAGSDSAVELAEVNAELVDLTSLIGSPAYRAGSPQREALDARIAALAARQGELEGLEARPSGWEWRETGQRFGDWWREQDTAAKNTWLRSMNVRLTFDVRGGRTRTIDFGELQEYEQHLRLGSVVERLHTGMS

SEQ ID NO: 9162 - protein, 500 aa, synthetic construct
MHALVVIRLSRVTDATTSPERQLESCRQLCAQRSWDVVGVAEDLDVSGAVDPFDRKRRPNLARWLAFEEQPFDVIVAYRVDRLTRSIRHLQQLVHWAEDHKKLVVSATEAHFDTTTPFAAVVIALMGTVAQMELEAIKERIRSAVHFNIRAGKYRGSLPPWGYLPTRVDGEWRLVPDPVQRERILEVYHRVVDNHEPLHLVAHDLNRRGVLSPKDYFAQLRGREPQGRKWSATALKRSMTSVAMLGYATLNGRTVRDDDGAPLVRAEPILTRGQQEALRAELVKTSRAKPAVSTPSLLLRVLFCAVCGEPAYKFVGGGRKHPRYRCRSMGFPEHCGNGTVVMAEWDAFCEEQVLELLGDAERLGKVWVAGSDSAVELAEVNAELVDLTSLIGSPAYRAGSPQREALDARIAALAARQEELEGLEARPSGWEWRETGQRFGDWWREQDTAAKNAWLRSMNVRLTFDVRGGLTRTIDFGDLQEYEQHLRLGSGVERLHTGTS

SEQ ID NO: 9163 - protein, 500 aa, synthetic construct
MRALVVIRLSRVTDATTSPERQLESCQQLCAQRGWVVVGVAEDLDVSGAVDPFDRKRRPNLARWLAFEEQPFDAIVAYRVDRLTRSTRHLQQLVRWAEDHKKLVVSATEAHFDTTTPFAAVVIALMGTVAQMELEAIRERIRSAVRFNIRAGKYRGSLPPWGYLPTRVDGEWRLVPDPVQRERILEVYRRVVDNHEPLHLVAHDLNRRGVLSPKDYFAQLRGREPQGREWSATALKRSMTSEAMLGYATLNGKIVRDDDGAPLVRAEPILTREQLEALRAVLVKTSRAKPAVSTPSLLLRVLFCAVCGEPAYKFVGGGRKHPRYRCRSMGFPEHCGNGTVVMAEWDAFCEEQVLDLLGDAERLEKVWVAGSDSAVELAEVNAELVDLTSLIGSPAYRAGSPQRETLDARIAALAARQEELEGLEARPSSWEWRGTGQRFEDWWRVQDTAAKNTWLRSMNVRLTFDVRGGLTRAIDFGDLREYEQHLRLGSVAKRLHTGMS

SEQ ID NO: 9164 - protein, 500 aa, synthetic construct
MRALVVIRLSRVTDATTSPVRQLESCQQLCAQRGWDVVGVAEDLDVSGAVDPFDRKRRPNLARWLAFEEQPFDVIVAYRVDRLTRSTRHLQQLVRWAEDHKKLVVSATEAHFDTTTPFAAIVIALMGTVAQMELEAIKERIRSAVHFNIRAGKYRGSLPPWGYLPTRVDGEWRLVPDPVQRERILEVYHRVVDNHEPLHLVAHDLNRRGVLSPKDYFAQLQGREPQGRKWSATALRRSMTSEAMLGYATLNGKTVRDDDGAPLVRAEPILTREQQEALRAELAKTSRAKPAVSTPSLLLRVLFCAVCGEPAYKFVGGGRKHPRYRCRSMGFPKHCGNGTVVMTEWDAFCEEQVLDLLGDAERLERVWVAGSDSAIELAEVNAELVDLTSLIGSPAYRTGSPQREALGARIAALAARQEELEGLEARPSGWEWRGTGQRFGDWWREQDTAAKNTWLRSMNVRLTFDVRGGLTRTIDFGDLQEYERHLRLGSVVERLHTGMS

SEQ ID NO: 9165 - protein, 500 aa, synthetic construct
MRALVVIRLSRVTDATTSPERQLESCQRLCAQRGWDVVGVAEDLDVSGAVDPFDRKRRPNLARWLAFEEQPFDVIVAYRVDRLTRSTRHLQQLVHWAEDHKKLVVSATEAHFDTTTPFAAVVIALMGTVAQMELEAIKERSRSAAHFNIRAGKYRGSLPPWGYLPTRVDGEWRLVPDPVQRERILEVYHRVVDNHEPLHLVAHDLNRRGVLSPKDYFAQLRGREPQGREWSATALRRSMTSVAMLGYATLNGKIVRDDVGAPLVRAEPILTREQLEALRAELAKTSRAKPAVSTPSLLLRVLFCAVCGEPAYKFVGGGRKHPRYRCRSMGFPEHCGNGTVVMTEWDTFCEEQVLGLLGDAERLEKVWVVGSDSSVELAEVNAELVDLTSLIGSPAYRAGSPQREALDARIAALAARQEELEGLEARPSGWEWRETGQRLGDWWREQDTAAKNTWLRSMNVRLTFDVRGGLTRTIDFGDLREYEQHLRLGSVVERLHTGMS

SEQ ID NO: 9166 - protein, 500 aa, synthetic construct
MRALVVIRLSRVADATTSPERQLESCQQLCAQRGWDVVGVAEDLDVSGAVDPFDRKRRPNLARWLAFEEQPFDVIVAYRVDRLTRSTRHLQQLVHWAEDHKKLVVSATEAHFDTTTPFAAVVIALMGTVAQMELEAIKERIRSAVRFNIRAGKYRGSLPPWGYLPTRVDGEWRLVPDPVQRERILEVYHRVVDNHEPLHLVAHDLNRRGVLSPKDYFAQLRGREPRGRKWSATALRRSMTSVAMLGYATLNGKTVRDDDGAPLVRAEPILTREQQEALRAELAKTSRAKPAVSTPSLLLRVLFCAVCGEPAYKFAGGGRKHLRYRCRSMGFPKHCGNGTVVMAEWDAFCEEQVLGLLGDAERLERVWVAGSDSAVELAEVNAELVDLTSLIGSPAYRAGSPQREALDARIAALAARQEELEGLEARPSGWEWRGTGQRLGDWWREQDTAAKNTWLRSMNIRLTFDVRGGLTRTIDFGELQEYEQHLRLGSVAERLHTGMS

SEQ ID NO: 9167 - protein, 500 aa, synthetic construct
MRALVVIRLSRVTDATTSPERQLESCQQLCAQRGWDVVGVAEDLDVSGAVDPFDRKRRPNLARWLAFEEQPFDVIVAYRVDRLTRSTRHLQQLVHWAEDHKKLVVSATEAHFDTTTPFAAVVIALMGTVAQMELEAIKERIRSAAHFNIRAGKYRGSLPPWGYLPTRVDGEWRLVPDPVQRERILEVYHRVVNNHEPLHLVAHDLNQRGVLSPKDYFAQLQGREPQGRKWSATALKRSMISVAMLGYATLSGKTVRGDDGAPLVRAEPILTRGQQEALRAELAKTSRAKPAVSTPSLLLRVLFCAVCGEPAYKFVGGGRKHPRYRCRSMGFPEHCGNGTVVMAEWDAFCEEQVLDLLGDAERLEKVWVAGSDSAVELAEVNAELVDLTSLIGSPAYRAGSPQREALDARIAALAARQEELEGLEARPSGWEWRETGQRFGDWWREQDTAAKNTWLRSMNVRLTFDVRGGLTRTIDFGDLQEYEQHLRLDGVAERLHTGMS

SEQ ID NO: 9168 - protein, 500 aa, synthetic construct
MRALVVIRLSRVTDATTSPERQLESCQQLCARRGWDVVGVAEDLDVSGAVDPFDRKRRPNLARWLAFEEQPFDVIVAYRVDRLTRSTRHLQQLVHWAEDHKKLVVSATEAHFDTTTPFAAVVIALMGTVAQMELEAIKERNRSAAHFNIRAGKYRGSLPPWGYLPTRVDGEWRLVPDPVQRERILEVYHRVVDNHEPLHWVAHDLNRRGVLSPKDYFAQLQGREPQGRKWSATALKRSITSEAMLGYATLNGKTVRNDDGAPLVRAEPILTRGQLEALRAELVKTSRAKPAVSTPSLLLRVLFCAVCGEPAYKFAGGGRKHPRYRCRSMGFPKHCGNGTVVMAEWDAFCEEQVLDLLGDAECLEKVWVAGSDSAVELAEVNAELVDLSSLIGSPAYRAGSPQREALDARIAALAARQEELEGLETRPSGWEWRETGQRFGDWWREQDTAAKNTWLRSMNVRLTFDVRGGLIRTIDFGDLQEYEQHLRLGSVVECLHTGMP

SEQ ID NO: 9169 - protein, 500 aa, synthetic construct
MRALVVIRLSRVTDATTSPERQLESCQQLCAQRGWDVVGVAEDLDVSGAVDPFDRKRRPNLARWLAFEEQPFDVIVAYRVDRLTRSVRHLQRLVHWAEDHKKLVVSATEAHFDTTTPFAAVVIALMGTVAQMELEAIRERNRSAAHFNIRAGKYRGSLPPWGYLPTRVDGEWRLVPDPVQRERILEVYHRVVDNHEPLHLVAHDLNRRGVLSPKDYFAQLRGREPQGREWSATALKRSMTSEAMLGYATLNGKTVRDDDGAPLVRAEPILTRGQLEALRAELVKTSRAKPAVSTPSLLLRVLFCAVCGEPAYKFAGGGRKHPRYRCRSMGFPKHCGNGTVVMAEWDAFCEEQVLNLLGDAERLEKVWVAGSDSAVELSEVNAELVDLTSLIGSPAYRAGSPQREALDARIAALAARQGELEGLEARPSGWEWRGTGQRFGDWWREQDTAAKNTWLRSMNVRLTFDARGGLTRTIDFGDLQEYEQHLRLGSVAERLHTGMS

SEQ ID NO: 9170 - protein, 500 aa, synthetic construct
MRALVVIRLSRVTEATTSPERQLESCQQLCAQRGWDVVGVAEDLDVSGAVDPFDRKRRPNLARWLAFEEQPFDVIVAYRVDRLTRSVRHLQQLVHWAGDHKKLVVSATEAHFDTTTPFAAVVIALMGTVAQMELEAIKERIRSAVRFNIRAGKYRGSLPPWGYLPTRVDGEWRLVPDPVQRERILEVYHRVVDNHEPLHLVAYDLNRRGVLSPKDYFAQLQGREPQGRKWSATALKRSMISKAMLGYAILNGKIVRDDDGAPLVRAEPILTREQQEVLRAELVKTSRAKPAVSTPSLLLRVLFCAVCGEPAYKFVGGGRKHPRYRCRSMGFPKHCGNGTVVMAEWDVFCEEQVLNLLGDAERLEKVWVAGSDSAVELAEVNAELVDLTSLVGSPAYRAGSPQREALDARIAALAARQKELEGLEARPSGWEWRETGQRFGDWWREQDTAAKNTWLRSMNVRLTFDVRGGLTRTIDFGELQEYEQHLRLGSVVERLHTGMS

SEQ ID NO: 9171 - protein, 500 aa, synthetic construct
MRALVVIRLSRVTDATTSPERQLESCQQLCAQRGWDVVGVAEDLDVSGAVDPFDRKRRPNFARWLAFEEQPFDVIVAYRVDRLTRSVRHLQQLVHWAGDHKKLVVSATEAHFDTTTPFAAVVIALMGTVAQLELEAIKERSRSAAHFNIRAGKYRGSLPPWGYLPARVGGEWRLVPDPVQRERILEVYHRVVGNHEPLHLVAHDLNRRGVLSPKDYFAQLRGREPQGRKWSATALKRSMTSVAMLGYATLNGKIVRDDGGAPLVRAEPILTREQQEALRAELAKTSQAKPAVSTPSLLLRVLFCAVCGEPAYKFVGGGRKHPRYRCRSMGFPEHCGNGTVVMAEWDAFCEEQVLGLLGDVERLEKVWVAGSDSAVELAEVNAELMDLTSLIGSPAYRAGSPQREALDARIAALAARQEELEGLEARPSGWEWRGTGQRFGDWWREQDTAAKNTWLRSMNIRLTFDVRGGLTRTIDFGELQEYEQHLRLGSVAERLHSGMS

SEQ ID NO: 9172 - protein, 500 aa, synthetic construct
MRALVVIRLSRVTDATTSPERQLESCQQLCAQRGWDVVGVAEDLDVSGAVDPFDRKRRPNLARWLAFEEQPFDVIVAYRVDRLARSTRHLQQLVHWAEDHKKLVVSATEAHFDTTTPFAAVVIALMGTVAQMELEAIKERNRSAAHFNIRAGKYRGSLPPWGYLPTRVDGEWRLVPDPVQRERILEVYRRVVDNHEPLHLVAHDLNRRGVLSPKDYFAQLQGREPQGRKWSATALKRSMISEAMLGYATLNGKIVRDDDGAPLVRAEPILTREQLEALRAVLVKTSRAKPAVSAPSLLLRVLFCAVCGEPAYKFAGGGRKHPRYRCRSMGFSKHCGNGTVATAEWDAFCEGQVLDLLGDAGCLEKVWVAGSDSAVELAEVNAELVDLTSLIGSPAYRAGSPQRGALDARIAALAARQEELEGLEARPSGWELRETGQRFGDWWREQDTAAKNTWLRSMNVRLTFDVRGGLTRTIDFGDLQEYEQHLRLGGVVERLHTGMS

SEQ ID NO: 9173 - protein, 500 aa, synthetic construct
MRALVVIRLSRVTDATTSPERQLESCQQLCAQRGWVVVGVAEDLNVSGAVDPFDRRRRPNLARWLAFEEQPFDVIVAYRVDRLTRSIRHLQQLVHWAEDHKKLVVSATEAHFDTTTPFAAVVIALMGTVAQMELEAIKERNRSAAHFNIRAGKYRGSLPPWGYLPTRVDGEWRLAPDPVQRERILEVYHRVVDNHEPLHLVAHDLNRRGVLSPKDYFAQLQGREPQGRKWSATALKRSMTSEAMLGYATLNGKTVRDDDGAPLVRAEPILTREQLEALRAELVKTSRAKPAVSTPSLLLRVLFCAVCGEPAYRFAGGGRKHPRYRCRSMGFPKHCGNGTVAVAEWDAFCEEQVLDLLGDAERLEKVWVAGSDSAVELAEVNAELVDLTSLIGSPAYRAGSPQREALDARIAALAARQEELEGLGARPSGWEWHETGQRFGDWWREQDTAAKNAWLRSTNVRLTFDVRGGLARTIDFGDLQEYEQHLRLSSVVERLHTGMS

SEQ ID NO: 9174 - protein, 500 aa, synthetic construct
MRALVVIRLSRVTDATTSPERQLESCQQLCAQRGWNVVGVAEDLDVSGAVNPFDRKRRPNLARWLAFEEQPFDVIVAYRVDRLTRSVRHLQQLVHWAEDHKKLVVSATEAHFDTTTPFAAVVIALMGTVAQMELEAIRERNRSAAHFNIRAGKYRGSLPPWGYLPTRVDGEWRLVPDPVQRERILEVYHRVVDNHEPLHLVAHDLNRRGVLSPKDYFAQLQGREPQGRKWSTTALKRSMISKAMLGYATLNGKTVRNDDGAPLVRAEPILTREQLEALRAELVKTSRAKPAVSTPSLLLRVLFCAVCGEPAYKFAGGGRKHPRYRCRSMGFPKHCGNGTVAMAEWDAFCDEQVLNLLGDAERLEKVWVAGSDSAVELAEVNAELVDLTSLIGSPAYCAGSPQREALDARIAALAARQEELEGLEARPSGWEWRGTGQRFGDWWREQDTAAKNTWLRSMNVRLTFDVRGGLTRTIDFGDLQEYEQHLRLGSVVERLHTGMS

SEQ ID NO: 9175 - protein, 500 aa, synthetic construct
MRALVVIRLSRVTDATTSPERQLESCQQLCAQRGWDVVGVAEDLDVSGAVDPFDRKRRPNLARWLAFEEQPFDVIVAYRVDRLTRSTRYLQQLVHWAEDHKKLVVSATEAHFDTTTPFAAVVIALMGTVAQMELEAIKERNRSAAHFNIRAGKYRGSLPPWGYLPTRVDGEWRLVPDPVQRERILEVYRRVVDNHEPLHLVAHDLNRRGVLSPKDYFAQLQGREPQGRKWSATALKRSMISEAMLGYATLNGKTVRDDDGAPLVRAEPILTRVQLEALRAELAKTSRAKPAVSTPSLLLRVLFCAVCGEPAYKFAGGGRKHPRYRCRSMGFPKHCGNGTVVMAEWDAFCEEQVLNLLGDAERLEKVWVAGSDSAVELTEVSAELVDLTSLIGSPAYRAGSPQREALDARIAALAARQEELEGLEARPSGWEWRETGQRFGDWWREQDTAAKNTWLRSMNVRLTFDVRGGLTRTIDFGDLQEYEQHLRLGSVVERLHTGMS

SEQ ID NO: 9176 - protein, 500 aa, synthetic construct
MRALVVIRLSRVTDATTSPERQLESCRQLCAQRGWDVVGVAEDLDVSGAVDPFDRKRRPNLARWLAFEEQPFDAIVAYRVDRLTRSVRHLQQLVRWAEDHKKLVVSATEAHFDTTTPFAAVVIALMGTVAQMELEAIRERIRSAARFNIRAGKYRGSLPPWGYLPTRVDGEWRLEPDPVQRERILEVYHRVVDNHEPLHLVAHDLNRRGVLSPKDYFAQLQGREPQGRKWSATALKRSMISVAMLGYATLNGKIVRDDDGAPLVRAEPILTREQQEALRAELAKTSRAKPAVSTPSLLLRVLFCAVCGEPAYKFVGGGRKHPRYRCRSMGFPEHCGNGTVVLAEWDAFCEEQVLDLLGDAERLEKVWLAGSDSAAELAEVNAELVDLTSLIGSPAYRAGSPQREALDARIAALAARQEELEGLEARPSGWGWRETGQRFGDWWREQDTAAKNTWLRSMNVRLTFDVRGGLTRTIDFGDLREYEQHLRLGGVVERLHTGIS

SEQ ID NO: 9177 - protein, 500 aa, synthetic construct
MRALVVIRLSRVTDATTSPERQLESCQQLCAQRGWDVVGVAEDLDVSGAVDPFDRKRRPNLARWLTFEEQPFDVIVAYRVDRLTRSARHLQRLVHWAEDHKKLVVSATEAHFDTTTPFAAVVIALMGTVAQMELEAIKERVRSAVRFNIRAGKYRGSLPPWGYLPTRVDGEWRLVPDPVQRERILEVYHRVVDNHEPLHLVAHDLNRRGVLSPKDYFAQLRGREPQGREWSATALKRSMISKAMLGYATLNGKTVRDDDGAPLVRAEPILTREQQEALRAELAKTSRAKPAVSTPSLLLRVLFCAVCGEPAYKFVGGGRKHPRYRCRSMGFPKHCGNGTVAMAEWDAFCEEQVLGLLGDAERLEKVWVAGSDSAVELAEVNAELVDLTSLIGSPAYRAGSPQREALDARIAALAARQEELEGLEARPSGWEWRETGQRFGDWWREQDTAAKNTWLRSMNVRLTFDVRGGLTRTIDYGDLQEYEQHLRSGSVVERLHTGVS

SEQ ID NO: 9178 - protein, 500 aa, synthetic construct
MRALVVIRLSRVTDATTSPERQLESCQQLCAQRGWDVVGVAEDLDVSGAVDPFDRKRRPNLARWLAFEEQPFDVIVAYRVDRLTRSTRHLQQLVHWAEDHKKLVVSATEAHFDTTTPFAAVVIALMGTVAQMELEAIRERNRSAAHFNIRAGKYRGSLPPWGYLPTRVDGVWRLVPDPVQRERILEVYHRVVDNHEPLHLVAHDLNRRGVLSPKDYFAQLQGREPQGRKWSATALKRSMISEAMLGYATLNGKTVRDDDGAPLVRAEPILTREQLEALRAELVKTSRAKPAVSTPSLLLRVLFCAVCGEPAYKFAGGGRKHPRYRCRSMGFPKHCGNGTVVMAEWDAFCEEQVLDLLGDAKRLEKVWVAGSDSAVELAEVNAELVDLTSLIGSPAYRAGSPQREALDARIAALAARQEELEGLGARPSGWEWRETGQRFGDWWREQDTAAKNTWLRSMNVRLTFDVRGGLTRTIDFGDLQEYEKHLRLGSVVERLHTGMS

SEQ ID NO: 9179 - protein, 500 aa, synthetic construct
MRALVVIRLSRVTDATTSPERQLESCQQLCAQRGWDVVGVAEDLDVSGAVDPFDRKRRPNLARWLAFEEQPFDVIVAYRVDRLTRSTRHLQQLVHWAEDHKKLVVSATEAHFDTTTPFAAVVIALMGTVAQMELEAIKERNRSAVHFNIRAGKYRGSLPPWGYLPTRVDGEWRLVPDPVQRERILEVYHRVVDNHEPLHLVAHDLNRRGVLSPKDYFAQLQGREPQGRKWSATALKRSMISEAMLGYATLNGKTVRDEDGAPLVRAEPILTREQLEALRAELVKTSRAKPAVPTPSLLLRVLFCAVCGEPAYKSAGGGRKHPRYRCRSMGFPKHCGNGTVAMAEWDAFCEEQVLDLLGDAERLEKVWVVGSDSAVELAEVNAELVDLTSLIGSPAYRAGSPQREALDARIAALAARQEELEGLEARPSGWEWRGTGQRFGDWWREQDTAAKNAWLRSMNVRLTFDVRGGLTRTIDFGNLQEYEQHLRLGSVVGRLHTGMS

SEQ ID NO: 9180 - protein, 500 aa, synthetic construct
MRALVVIRLSRVTDATTSPERQLASCQQLCAQRGWDVVGVAEDLDVSGAVDPFDRKRRPNLARWLASEEQPFDVIVAYRVDRLTRSTRHLQQLVHWAEDHKKLVVSATEAHFDTTTPFAAVVIALMGTVAQMELEAIKERIRSAAHFNIRAGKYRGSLPPWGYLPARVDGEWRLVPDPVQRERILEVYHRVVDNHEPLHLVAHDLNRRGVLSPKDYFAQLRGREPQGRKWSATALKRSMISVAMLGYATLNGKTVRDDDGAPLVRAEPILTREQQEALRAELVKTSRAKPAVSTPSLLLRVLFCAVCGEPAYKFVGGGRKHPRYRCRSMGFPKHCGNGTVAMAEWDAFCEEQVLDLLGDAERLEKVWVAGSDSTVELAEVNAELVDLTSLIGSPAYRAGSPQREALDARIAALAARQEELESLEARPSGWEWRGTGQRFGDWWREQDTAAKNTWLRSMNIRLTFDARGGLTRTIDFGDLQEYERHLRLGSVVERLRAGMS

SEQ ID NO: 9181 - protein, 500 aa, synthetic construct
MRALVVIRLSRVTDATTSPERQLESCQQLCAQRGWDVVGVAEDLDVSGAVDPFDRKRRPNLARWLAFEEQPFDAIVAYRVDRLTRSVRHLHQLVHWAEDHKMLVVSATEAHFDTTTPFAAVVIALMGTVAQMELEAIKERNRSAAHFNIRAGKYRGSLPPWGYLPTRVDGEWRLVPDPVQRERILEVYHRVVDNHEPLHLVAHDLNRRGVLSPKDYFAQLRGREPQGRKWSATALKRSMISVAMLGYATLNGKTVRDDDGAPLVRAEPILTRGQLEALRAELVKTSRAKPAVSTPSLLLRVLFCAVCGEPAYKFAGGGRKHPRYRCRSMGFPKHCGNGTVVMAEWDAFCEEQVLNLLGDAERLEKVWVAGSDSAVELAEVNTELVDLTSLIGSPAYRAGSPQREALDARIAALAARQEELEGLEARPSGWEWRETGQRFGDWWREQDTAAKNTWLRSMNVRLTFDVRGGLTRTIDFGELQEYERHLRSGSMVERLHTGRS

SEQ ID NO: 9182 - protein, 500 aa, synthetic construct
MRALVVIRLSRVTDATTSPERQLESCQQLCAQRGWDVVGVAEDLDVSGAVDPFDRKRRPNLARWLAFEEQPFDVIVAYRVDRLTRSTRHLQQLVHWAEDHKKLVVSATEAHFDTTTPFAAVVIALMGTVAQMELEAIKERNRSAAHFNIRAGKYRGSLPPWGYLPTRVDGEWRLVPDPVQRERILEVYHRVVDNHESLHLVAHDLNRRGVLSPKDYFAQLRGREPQGREWSATALKRSMVSVAMLGYATLNGKIVRDDDGAPLVRAEPILTREQLEVLRAELVKTSRAKPAVSTPSLLLRVLFCAVCGEPAYKFAGGGRKHPRYRCRSMGFPKHCGNGTVVMAEWDAFCEEQVLNLLGDAERLEKVWVAGSDSAVELAEVNAELVDLTSLIGSPAYRAGSPQREALDARIAVLAARQEELEGLEARPSGWEWRETGQRFGDWWREQDTAAKNTWLRSMNVRLTFDVRGGLTRTIDFGDLQEYEQHLRLGSVVGRLHTGMS

SEQ ID NO: 9183 - protein, 500 aa, synthetic construct
MRALVVIRLSRVTDATTSPERQLESCQQLCAQRGWDVVGVAEDLDVSGAVDPFDRKRRPNLARWLAFEEQPFDAIVAYRVDRLTRSTRHLQQLVLWAEDHKKLVVSATEAHFDTTTPFAAVVIALMGTVAQMELEAIKERIRSAAHFNIRAGKYRGSLPPWGYLPTRVDGEWRLVPDPVQRERILEVYHRVVDNHEPLHLVAHDLNRRGVLSPKDYFAQLRGREPRGRKWSATALRRSMTSEAMLGYATQDGKIVRDDDGAPLVRAEPILTREQQEALRAELAKTSRAKPAVSTPSLLLRVLFCAVCGEPAYKFVGGGRKHPRYRCRSMGFPEHCGNGTVVMAEWDAFCEEQVLDLLGDAERLEKVWVAGSDSAVELAEVNAELVDLTSLIGSPAYRAGSPQREALDARIAALAARQEELGGLEARPSGWEWRETGQRFRDWWREQDTAAKNTWLRSMNVRLTFDVRGGLTRTIDFGDLQEYERHLRSGSVVERLHTGMS

SEQ ID NO: 9184 - protein, 500 aa, synthetic construct
MRALVVIRLSRVTDATTSPERQLESCQQLCAQRGWDVVGVAEDLDVSGAVDPFDRKRRPNLARWLAFEEQPFDVIVAYRVDRLTRSTRHLQQLVHWAEDHKKLVVSATEAHFDTTTPFAAVVIALMGTVAQMELEAIKERNRSAAHFNIRAGKYRGSLPPWGYLPARVDGEWRLVPDPVQRERILEVYRRVVDNHEPLHLVAHDLNRRGVLSPKDYFAQLQGREPQGRKWSATALKRSMISEAMLGHATLNGETVRDDDGAPLVRAEPILTRGQLEALRAELVRTSRAKPAVSTPSLLLRVLFCAVCGEPAYKFAGGGRKHPRYRCRSMGFPKHCGNGTVAMAEWDAYCEEQVLNLLGDAERLEKVWVAGSDSAVELAEVNAELVDLTSLIGSPAYRAGSPQRVALDARIAALAARQEELEGLEARPSGWEWRETGQRFGDWWREQDTAAKNTWLRSMNVRLTFDVRGGPTRTIDFGDLQEYEQHLRLGSVVERLHTGTS

SEQ ID NO: 9185 - protein, 500 aa, synthetic construct
MRVLVVIRLSRVTDATTSPERQLESCQQLCAQRGWDVVGVAEDLDVSGAVDPFDRKRRPNLARWLAFEEQPFDAIVAYRVDRLTRSIRHLQQLVHWAEDHKKLVISATEAHFDMTTPFAAVVIALMGTVAQMELEAIKERNRSAAHFNIRAGKYRGSLPPWGYLPTRVDGEWRLVPDPVQRERILEVYHRVVDNHEPLHLVAHDLNRRGVLSPKDYFAQLQGREPQGRKWSATALKRSMISVAMLGYATLNGKTVRDDDGAPLVRAEPILTRKQLEALRAELVKTSRAKPAVSTPSLLLRVLFCAVCGEPAYKFAGGGRKHPRYRCRSMGFPKHCGNGTVAMAEWDAFCEEQVLDLLGDAERLEKVWVAGSDSAIELAEVNAELADLTSLIGSPAYRAGSPQREALDARIAALVARQEELGGLEARPPGWEWRETGQRFGDWWREQDTAAKNTWLRSMNVRLTFDVRGGLTRTIDFGELQGYVQRLRLGSVVERLHTGVS

SEQ ID NO: 9186 - protein, 500 aa, synthetic construct
MRALVVIRLSRITDATTSPERQLESCQQLCAQRGWDVVGVAEDLDVSGAVDPFDRKRRPNLARWLAFEEQPFDAIVAYRVDRLTRSVRHLQQLVHWAEDHKKLVVSATEAHFDTTTPFAAVVIALMGTVAQMELEAIKERNRSAAHFNIRAGRYRGSLPPWGYLPTRVDGEWRLVPDPVQRERILEVYHRVVDNHESLHSVAHDLNRRGVLSPKDYFAQLQGREPQGRKWSATALKRSMISEAMLGYATLNGKTVRDDNGAPLVRAEPILTREQLEALRAELVKTSRAKPAVSTPSLLLRVLFCAVCGEPAYKFAGGGRKHPRYRCRSMGFPKHCGNGTVAMAEWDAFCEEQVLDLLGDAERLEKVWVAGSDSAVELAEVNAELVDLTSLISSPAYRAGSPQREALDARIAALAARQEELEGLGARPPGWEWRETGQRFGDWWREQDTAAKNTWLRSMNVRLTFDVRGGLTRTIDFGNLQEYEQHLRLGSVVGRLHTGMS

SEQ ID NO: 9187 - protein, 500 aa, synthetic construct
MRALVVIRLSRVTDATTSPERQLESCQQLCAQRGWDVVGVAEDLDVSGAIDPFDRKRRPNLARWLAFEEQPFDVIVAYRVDRLTRSTRHLQQLVHWAEDHKKLVVSATEAHFDTTTPFAAVVIALMGTVAQMELEAIKERIRSAVHFNIRAGKYRGSLPPWGYLPTRVDGEWRLVPDPVQRERILEVYHRVVDNHEPLHLVAHDLNRRGILSPKDYFAQLRGREPQGRKWSATALKRSMTSEAMLGYAILNGKTVRDDDGAPLVRAEPILTREQLEALRAELAKTSRAKPAVSTPSLLLRVLFCAVCGEPAYKFVGGGRKHPRYRCRSMGFPKHCGNGTVVMAEWDAFCEEQVLDLLGDAERLERVWVAGSDSAVELAEVNAELVDLTSLIGSPAYRAGSPQREALDARIAALATRQEELEGLEARPSGWEWRGTGQRLGDWWREQDTAAKNTWLRAMNVRLTFDVRGGLTRTIDFGDLQEYEQHLRLGSVVERLHTGLS

SEQ ID NO: 9188 - protein, 500 aa, synthetic construct
MRALVVIRLSRVTDATTSPERQLESCQQLCAQRGWDVVGVAEDLDVSGAVDPFDRKRRPNLARWLAFEEQPFDVIVAYRVDRLTRSTRHLQQLVHWAEDHKKLVVSATEAHFDTTTPFAAVVIALMGTVAQMELEAIKERIRSAVHFNIRAGKYRGSLPPWGYLPTRVDGEWRLVPDPVQRERILEVYHRVVDNHEPLHLVAHDLNRRGVSSPKDYFAQLRGREPRGRKWSATALRRSMTSVAMLGYATLNGKIVRDDDGAPLVRAEPILTREQLEALRTELVRTSRAKPAVSTPSLLLRVLFCAVCGEPAYKFAGGGRKHPRYRCRSMGFPKHCGNGTVVMAEWDAFCEEQVLNLLGDAERLERVWVAGSDSAVELAEVNAELADLTSLIGSPAYRAGSPQREALDARIAALAARQEELEGLEARPSGWEWRETGQRFGDWWREQDTAAKNTWLRSMNVRLTFDVRGGLTRTIDFGDLQECAQHLRSGSVVERLHTGMS

SEQ ID NO: 9189 - protein, 500 aa, synthetic construct
MRALVVIRLSRVTDATTSPERQLESCQQLCAQRGWDVVGVAEDLDVSGAVDPFDRKRRPDLARWLAFEEQPFDVIVAYRVDRLTRSIRHLQQLVHWAEDHKKLVISATEAHFDMTTPFAAVVIALMGTVAQMELEAIKERNRSAAHFNIRAGKYRGSLPPWGYLPARVDGEWRLVLDPVQRERILEVYHRVVDNHEPLHLVAHDLNRRGVLSPKDYFAQLQGREPQGRKWSATALKRSMISEAMLGYATLNGKTVRDDDGAPLVRAEPILTREQQEALRAELVKTSRVKPAVSTPSLLLRVLFCAVCGEPAYKFAGGGRKHPRYRCRSMGFPKHCGNGTVAMAEWDAFCEEQVLDLLGDAERLEKVWVAGSDSAVELAEVNAELVDLTSLIGSPAYRAGSPQREALDARIAALAARQEELEGLEARPSGWEWRETGQRFGDWWREQDTAAKNTWLRSMNVRLTFDVRGGLTRTIDFGVLQEYEQHLRLSSVVERLHTGMP

SEQ ID NO: 9190 - protein, 500 aa, synthetic construct
MRALVVIRLSRVTDATTSPERQLESCQQLCAQRGWDVVGVAEDLDVSGAVDPFDRKRRPNLARWLAFGEQPFDAIVAYRVDRLTRSVRHLQQLVHWAEDHKKLVVSATEAHFDTTTPFAAVIIALMGTVAQMELEAIKERNRSAAHFNIRAGKYRGSLPPWGYLPTRVDGEWRLVPDPVQRERILEVYHRVVDNHEPLHLVAHDLNQRGVLSPKDYFAQLRGREPQGRRWSATALKRSMISEAMLGYATLNGKTVRDDDGAPLVRAEPILTREQLEALRAELVKTSRAKPVVSTPSLLLRVLFCAVCGEPAYKFAGGGRKHPRYRCRSMGFPKHCGNGTVAMAEWDAFCEEQVLDLLGDAERLEKVWVAGSDSAVELAEVNAELVDLTSLIGSPAYRAGSPQREALDARIAALAARQEELEGLEARPSGWEWRESGQRFGDWWREQDTAAKNTWLRSMNVRLTFDVRGGLTRTIDFGDLQEYEQHLRLGSVVERLQTGMS

SEQ ID NO: 9191 - protein, 500 aa, synthetic construct
MRALVVIRLSRVTDATTSPERQLASCQQLCAQRGWDVVGVAEDLDVSGAVDPFDRKRRPNLARWLAFEEQPFDVIVAYRIDRLTRSIRHLQQLVHWAEDHKKLVVSATEAHFDTTTPFAAVVIALMGTVAQMELEAIKERIRSAAHFNIRAGKYRGSLPPWGYLPARVDGEWRLVPDPVQRERILEVYHRVVDNHEPLHLVAHDLNRRGVLSPKDYFAQQQGREPQGRKWSATALKRSMISGAMLGYATLNGKIVRDDDGAPLVRAEPILTREQQEALRAELAKTSRAKPAVSTPSLLLRVLYCAVCGEPAYKFVGGGRKHPRYRCRSMGFPEHCGNGTVVMAEWDAFCEEQVLDLLGDAERLEKVWVAGSDSAVELAEVNAELVDLTSLIGSPAYRASSPQREALDARIAALAARQEELESLEARPSGWEWRGTGQRLGDWWREQDTAAKNTWLRSMNVRLTFDVRGGLTRTIDFGDLQEYGQRLRLGGVVERFHTGMS

SEQ ID NO: 9192 - protein, 500 aa, synthetic construct
MRALVVIRLSRVTDATTSPERQLESCQQLCAQRGWDVVGVAEDLDVSGAVDPFDRKRRPNLARWLAFEEQPFDVIVAYRVDRLTRSTRHLQQLVHWAEDHKKLVVSATEAHFDTTTPFAAVVIALMGTVAQMELEAIKERIRSAAHFNIRAGKYRGSLPPWGYLPTRVDGEWRLAPDPVQRERILEVYHRVVDNHEPLHLVAYDLNRRGVLSPKDYFAQLRGREPQGRKWSATALRRSMISVAMLGYATLNGKIVRDDDGAPLVRAEPILTSEQQEALRAELAKTSRAKPAVSTPSLLLRVLFCAVCGEPAYKFVGGGRKHPRYRCRSIGFPKHCGNGTVAMAEWDAFCEEQVLDLLGDAERLEKVWVAGSDSAVELAEVNAELVDLTSLIGSPAYRVGSPQREALDARIAALAARQEELEGLEARPSGWEWRGTGQRFGDWWREQDTAAKNTWLRSMNVRLTFDVRGGLTRTIDFGDLQEYEQHLRSGSVVERLHTGMS

SEQ ID NO: 9193 - protein, 500 aa, synthetic construct
MRVLVVIRLSRVTDATTSPERQLESCQQLCAQRGWDVVGVAEDLDVSGAVDPFDRKRRPNLARWLAFEEQPFDVIVAYRVDRLTRSTRHLQQLVHWAEDHRKLVVSATEAHFDTTTPFAAVVIALMGTVAQMELEAIKERIRSAVRFNIRAGKYRGSLPPWGYLPTRVDGEWRLVPDPVQRERILEVYHRVVDNHEPLHLVAYDLNRRGVLSPKDYFAQLQGREPQGRKWSATALKRSMISVAMLGYATLNGKTVRDDDGAPLVRAEPILTREQQEALRAELAKTSRAKPAVSTPSLLLRVLFCAVCGEPAYKFAGGGRKHPRYRCRSMGFPKHCGNGTVVMTEWDAFCEEQVLDLLGDAERLERVWVAGSDSAAELAEVNAELVDLTSLIGSPAYRAGSPQREALDARIAALAARQEELEGLEARQSGWEWRETGQRFGDWWREQDTAAKNTWLRSMNVRLTFDARGGLTRTIDFGDLQEYEQQLRLGSVVERLHTGMS

SEQ ID NO: 9194 - protein, 500 aa, synthetic construct
MRALVVIRLSRVTDATTSPERQLESCQQLCAQRGWDVVGVAEDLDVSGAVDPFDRKRRPNLARWLAFEDQPFDVIVAYRVDRLTRSTRHLQQLVHWAEDHKKLVVSATEAHFDTTTPFAAVVVALMGTVAQMELEAIKERNRSAAHFNIRAGKYRGSMPPWGYLPTRVDGEWRLVPDPVQRERILEVYHRVVDNHEPLHLVAHDLNRRGVLSPKDYFAQLQGREPQGRKWSATALKRSMISGAMLGYATLNGKIVRDDDGAPLVRAEPILTREQLEALRAELVKTSRAKPAVSTPSLLLRVLFCAVCGEPAYKFAGGGRKHPRYRCRSMGFPKHCGNGTVVMAEWDAFCEEQVLDLLGDAERLEKVWVAGSDSAVELAEVNAELVDLTSLIGSPTYRAGSPQREALDARIAALAARQEELEGLVARPSGWEWRETGQRFGDWWREQDTAAKNTWLRSMNVRLTFDVRGGLTRTIDFGDLQEYEQHLRFGSVVERLHTGMS

SEQ ID NO: 9195 - protein, 500 aa, synthetic construct
MRALVVIRLSRVTDATTSPERQLESCQQLCAQRGWDVVGVAEDLDVSGAVDPFDRKRRPNLARWLAFEEQPFDVIVAYRVDRLTRSTRHLQQLVHWAEDHKKLVVSATEAHFDTTTPFAAVVIALMGTVAQMELEAIKERNRSAAHFNIRAGKYRGSLPPWGYLPTRVDGEWRLVPDPVQRERILEVYHRVVDNHESLHLVAHDLNRRGVLSPKDYFAQLRGREPQGRKWSATALKRSMISEAMLGYATLNGKTVRDDDGAPLVRAEPILTREQLEALRAELVKTSRAKPAVSTPSLLLRVLFCAVCGEPAYKFAGGGRKHPRYRCRSMGFPKHCGNGTVTMAEWDAFCEEQVLDLLGDAERLEKVWVAGSDSAVELAEVNAELVDLASLIGSPAYRAGSPQREALDARIAALAARQEELEGLEARPSGWEWRGTGQRFGDWWREQDTAAKNTWLRSMNVRLTFDVRGELTRTIDFGDLQKYEQHLRLDSVVERLHTGMS

SEQ ID NO: 9196 - protein, 500 aa, synthetic construct
MRALVVIRLSRVTDATTSPERQLESCQQLCAQRGWDVVGVAEDLDVSGAVDPFDRKRRPNLARWLAFEEQPFDVIVAYRVDRLTRSTRHLQRLVHWAEDHKKLVVSATEAHFDTTTPFAAVVIALMGTVAQMELEAIKERIRSAAHFNIRAGKYRGSLPPWGYLPTRVDGEWRLVPDPVQRERILEVYHRVVDNHEPLHLVAHDLNRRGVLSPKDYFAQLQGREPQGRKWSATALKRSMISVAMLGHATLNGKIVRDDDGAPLVRAEPILTREQQEAFRAELAKTSRAKPAVSTPSLLLRVLFCAVCGEPAYKFVGGGRKHPRYRCRSMGFPKHCGNGTVVMTEWDAFCEEQVLDLLGDAERLEKVWVAGSDSAVELAEVNAELVDLTSLIGSPAYRAGSPQRGALDARIAALAARQEELEGLEARPSGWEWRGTGQRFGDWWREQDTAAKNTWLRSMNVRLTFDVRGGLTRTIDFGDIREYEQHLRLGSVAERLHTGMS

SEQ ID NO: 9197 - protein, 500 aa, synthetic construct
MRALVVIRLSRVTDATTSPERQLESCQQLCTQRGWDVVGVAEDLDVSGAADPFDRKRRPNLARWLAFEEQPFDAIVAYRVDRLTRSVRHLQQLVHWAEDHKKLVVSATEAHFDTTTPFAAVVIALMGTVAQMELEAIKERNRSAAHFNIRAGKYRGSLPPWGYLPTRVDGEWRLVPDPVQRERILEVYHRVVDNHEPLHWVAHDLNRRGVLSPKDYFAQLQGREPQGRKWSATALKRSMISEAMLGYATLNGKTVRDDDGAPLVRAEPILTREQLEAVRAELVKTSRAKPAVSTPSLLLRVLFCAVCGEPAYKFAGGGRKHPRYRCRSMGFPKHCGNGTVAMAEWDAFCEEQVLDLLGDAERLEKVWVAGSDSAVELAEVNAELVDLTSLIGSPAYRAGSPQREALDARIAALAARQEELEGLEARPSGWEWRETGQRFGDWWREQDTAAKNAWLRSMNVRLTFDVRGGLTRTIDLGDLQEYEQHLRLGSVVGRLRTGMS

SEQ ID NO: 9198 - protein, 500 aa, synthetic construct
MRALVVIRLSRVTDATTSPERQLESCQQLCAQRGWDVVGVAEDLDVSGAVDPFDRKRRPNLARWLAFEEQPFDVIVAYRVDRLTRSTRHLQQLVHWAEDHKKLVVSATEAHFDTTTPFAAVVIALMGTVAQMELEAIKERIRSAVRFNIRAGKYRGSLPPWGYLPTRVDGEWRLVPDPVQRERILEVYHRVVDNHEPLHLVAYDLNRRGVLSPKDYFAQLQGREPQGRKWSATALKRSMTSVAMLGYATLNGKTVRDDDGAPLVRAEPILTREQQEALRAELAKTSRAKPAVSTPSLLLRVLFCAVCGEPAYKFVGGGRKHPRYRCRSMGFPKHCGNGTVVMAEWDAFCEEQVLSLLGDAERLEKVWLAGSDSAVELAEVNAELMDLTSLIGSPAYRVGSPQREALDARIAALAARQEELEGLEARPSGWEWRETGQRFGDWWREQDTAAKNTWLRSMNVRLTFDVRGGLTRTIDFGDLQEYEQHLRSGSVVGRLHTGMS

SEQ ID NO: 9199 - protein, 500 aa, synthetic construct
MRALVVIRLSRVTDATTSPERQLESCQQLCAQRGWDVVGVAEDLDVSGAVDPFDRKRRPNLARWLAFEERPFDVIVAYRVDRLTRSTRHLQQLVHWAEDHKKLVVSATEAHFDTTTPFAAVVIALMGTVAQMELEAIKERNRSAAHFNIRAGKYRGSLPPWGYLPARVDGVWRLVPDPVQRERILEVYHRVVDNHEPLHLVAHDLNRRGVLSPKDYFAQLRGREQQGRKWSATALKRSMISEAMLGYATLNGKTVRDDDGAPLVRAEPILTREQLEALRAELVKTSRAKPAVSTPSLLLRVLFCAVCGEPAYKFAGGGRKHPRYRCRSMGFPKHCGNGTVAMAEWDAFCEEQVLDLLGDAERLEKVWVAGSGSAVELAEVNAELVDLTSLIGSPAYRAGSPQREALDARIAALAARQEELEALEARPSGWEWRGTGQRFRDWWREQDTAAKNTWLRSMNVRLTFDVRGGLTRTIDFGDLQEYEQHLRLGSVVERLHTGMS

SEQ ID NO: 9200 - protein, 500 aa, synthetic construct
MRALVVIRLSRVTDATTSPERQLESCQQLCAQRGWDVVGVAEDLDVSGAVDPFDRKRRPNLARWLAFEEQPFDVIVAYRVDRLTRSIRHLQQLVHWAEDHKKLVVSATEAHFDTTTPFAAVVIALMGTVAQMELEAIKERIRSAAHFNIRAGKYRGSLPPWGYLPTRVDGEWRLVPDPVQRERILEVYHRVVDDHEPLHLVAHDLNRRGVLSPKDYFAQLRGREPQGRKWSATALKRSMISVAMLGYATLNGKTVRGDDGAPLVRAEPILTRGQQEALRAELAKTSRAKPAVSTPSLLLRVLFCAVCGEPAYKFVGGGRKHPRYRCRSMGFPKHCGNGTVAMAEWDAFCEEQVLNLLGDAERLEKVWVAGSDSAVELAEVNAELVDLTSLIGSPAYRAGSPQREALDARIAALAARQEELESLEARPSGWEWRGTGQRLGDWWREQDTAAKNTWLRSMNVRLTFDVRGGLTRTIDFGDLQEYEQHLRSGSVVERLHTGMS

SEQ ID NO: 9201 - protein, 500 aa, synthetic construct
MRALVVIRLSRVTDATTSPERQLESCQQLCAQRGWDVVGVAEDLDVSGAVDPFDRKRRPNLARWLAFEEQPFDAIVAYRVDRLARSIRHLQQLVHWAEDHKKLVVSATEAHFDTTTPFAAVVIALMGTVAQMELEAIKERNRSAAHFNIRAGKYRGSLPPWGYLPTRVDGEWRLVPDPVQRERILEVYHRVIDNHEPLHLVAHDLNRRGVLSPKDYFAQLQGREPQGRKWSATALKRSMTSEAMLGYATLNGKTVRDDDGAPLVRAEPILTREQLEALRAELVKTSRVKPAVSTPSLLLRVLFCAVCGEPAYKFAGGGRKHPRYRCRSMGFPKHCGNGTVVMAEWDAFCEEQVLNLLGDAERLEKVWVAGSDSAAELAEVNAELVDLTSLIGSPAYRAGSPQREALDARIAALAARQEELEGLEARPSGWEWRETGQRFGDWWREQDTAAKNTWLRSVNVRLTFDVRGGLTRTIDFGDLQEYEQRLRLGSVVERLHTGMS

SEQ ID NO: 9202 - protein, 500 aa, synthetic construct
MRALVVIRLSRVTDATTSPERQLESCQQLCAQRGWDVVGVAEDLDVSGAVNPFDRKRRPNLARWLAFEEQPFDVIVAYRVDRLTRSTRHLQQLVHWAEDHKKLVVSATEAHFDTTTPFAAVVIALMGTVAQMELEAIRERNRSAAHFNIRAGKYRGSLPPWGYLPTRVDGEWRLVPDPVQRERILEVYHRVVDNHEPLHLVAHDLNRRGVLSPKDYFAQLQGREPQGRKWSATALKRSMTSEAMLGYATLNGKTVRDDDGAPLVRAEPILTREQLEALRAVLVKTSRAKPAVSTPSLLLRVLFCAVCGEPAYKFAGGGRKHPRYRCRSMGFSKHCGNGTVAVAEWDVFCEEQVLNLLGDAERLEKVWVAGSDSAVELAEVNAELVDLTSLIGSPAYRVGSPQREALDARIAALAARQEELEGLEARPSGWEWRETGQRFGDWWREQDTAAKNTWLRSMNVRLTFDVRGGLTRTIDFGDLQEYEQLLRLGSVVERLHTGMS

SEQ ID NO: 9203 - protein, 500 aa, synthetic construct
MRALVVIRLSRVTDATTSPERQLESCQQLCAQRGWDVVGVAEDLDVSGAVDPFDRKRRPNLARWLAFEEQPFDVIVAYRVDRLTRSTRHLQQLVHWAEDHKKLVVSATEAHFDTTTPFAAVVVALMGTVAQMELEAIKERNRSAAHFNIRAGKYRGSLPPWGYLPTRVDGEWRLVPDPVQRERILEVYHRVVDNHEPLHLVAHDLNRRGVLSPKDYFAQLQGREPLGRKWSATALKRSMVSEAMLGYATLNGKTVRDDGGAPLVRAEPILTREQLEALRAELVKTSRAKPAVSTPSLLLRVLFCAVCGEPAYKFAGGGRKHPRYRCRSMGFPKHCGNGTVVMAEWDTFCEEQVLELLGDAERLEKVWVAGSDSAVELAEVNAELVDLTSLIGSPAYRAGSPQREALDARIVALAARQEELEGLEARPSGWEWRGTGQRFGDWWREQDTAAKNTWLRSMNVRLTFDVRGGLTRTVDFGDLQEYEQHLRLGSVVERLHTGMS

SEQ ID NO: 9204 - protein, 500 aa, synthetic construct
MRALVVIRLSRVTDATTSPERQLESCQQLCAQRGWDVVGVAEDLDVSGAVDPFDRKRRPNLARWLAFEEQPFDVIVAYRVDRLTRSARHLQQLVHWAEDHKKLVVSATEAHFDTTTPFAAVVIALMGTVAQMELEAIKERIRSAAHFNIRAGKYRGSLPPWGYLPTRVDGEWRLVPDPVQRERILEVYHRVVDNHEPLHLVAHDLNRRGVLSPKDYFAQLQGREPQGRKWSATALKRSMTSVAMLGYATLNGKTVRDDEGAPLVRAEPILTREQQEALRAELVKTSRAKPAVSTPSLLLRVLFCAVCGEPAYKFVGGGRKHPRYRCRSMGFPEHCGNGTVVTAEWDAFCEEQVLDLLGDAERLEKVWVAGSDSAVELAEVNAELVDLTSLIGSPAYRTGSPQREALDSRIAALAARQEELEGLEARPSGWEWRGTGQRFGDWWREQDTAAKNTWLRSMNVRLTFDARGGLTRTVDFGDLQEYERHLRLGSVAERLRTGMP

SEQ ID NO: 9205 - protein, 500 aa, synthetic construct
MRTLVVIRLSRVTDATTSPERQLESCQQLCAQRGWDVVGVAEDLDVSGAVDPFDRKRRPNLARWLAFEEQPFDAIVAYRVDRLTRSVRHLQQLVHWAEDHKKLVVSATEAHFDTTTPFAAVVIALMGTVAQMELEAIKERNRSAAHFNIRAGKYRGSLPPWGYLPTRVDGEWRLVPDPVQRERILEVYHRVVDNHESLHLVAHDLNRRGVLSPKDYFAQLRGREPQGREWSATALKRSMVSVAMLGYATLNGKIVRGDDGAPLVRAEPILTREQLEVLRAELVKTSRAKPAVSTPSLLLRVLFCAVCGEPAYKFAGGGRKHPRYRCRSMGFPKHCGNGTVVMAEWDAFCEEQVLNLLGDAERLEKVWVAGSDSAVELAEVNAELVDLTSLIGSPAYRAGSPQREALDARIAALAARQEELEGLEARPSGWEWRETGQRFGDWWREQDTAAKNTWLRSMNVRLTFDVRGGLTRTIDFGDLQEYEQHLRLGGVVERLHTGMS

SEQ ID NO: 9206 - protein, 500 aa, synthetic construct
MRALVVIRLSRVTDATTSPERQLESCQQLCAQRGWDVVGVAEDLDVSGAVDPFDRKRRPNLARWLAFEEQPFDAIVAYRVDRLARSIRHLQQLVHWAEDHKKLVVSATEAHFDTTTPFAAVVIALMGTVAQMELEAIKERNRSAAHFNIRAGKYRGSLPPWGYLPTRVDGEWRLVPDPVQRERILEVYHRVVVNHEPLHLVAHDLNRRGVLSPKDYFAQLQGREPQGRKWSATALKRSMVSEAMLGYATLNGKTVRDDDGAPLVRAEPILTREQLEALRAELVKTSRAKPAVSTPSLLLRVLFCAVCGEPAYKFAGGGRKHPRYRCRSMGFPKHCGNGTVVMAEWDAFCEEQVLDLLGDAERLEKVWVAGSDSAVELAEVNAELVDLTSLIGSPVYRAGSPQREALDARIAALAARQEELEGLEARPSGWEWRETGQRFGDWWREQDTAAKNTWLRSMNVRLTFDVRGGLVRTIDFGDLQEYEPHLRLGSVAERLHSGMS

SEQ ID NO: 9207 - protein, 500 aa, synthetic construct
MRALVVIRLSRVTDATTSPERQLESCQQLCAQRGWDVVGVAEDLDVSGAVDPFDRKRRPNLARWLAFEEQPFDVIVAYRVDRLTRSARHLQQLVRWAEDHKKLVVSATEAHFDTTTPFAAVVIALMGTVAQMELEAIKERIRSAVRFNIRAGKYRGSLPPWGYLPTRVDGEWRLVPDPVQRERILEVYRRVVVNHEPLHLVAHDLNRRGVLSPKDYFAQLQGREPQGRKWSATALKRSMISGAMLGYATLNGKTVRDDDGAPLVRAEPILTREQLEALRAELAKTSRAKPAVSTPSLLLRVLFCAVCGEPAYKFTGGGRKHPRYRCRSMGFPEHCGNGTVVMAEWDAFCEEQVLDLLGDAERLEKVWVVGSDSSVELAEVNAELVDLTSLIGSPAYRTGSPQREALDARIAALVARQEELEGLEARPSGWEWRETGQRFGDWWREQDTAAKNTWLRSMNVRLTFDVRGGLTRTIDFGDLREYEQRLRLGGVVERLHTGMS

SEQ ID NO: 9208 - protein, 500 aa, synthetic construct
MRALVVIRLSRVTDATTSPERQLESCQQLCAQRGWDVVGVAEDLDVSGAVDPFDRKRRPNLARWLAFEEQPFDVIVAYRVDRLTRSTRHLQQLVHWAEDHKKLVVSATEAHFDTTTPFAAVVIALMGTVAQMELEAIKERNRSAAHFNIRAGKYRGSLPPWGYLPTRVDGEWRLVPDPVQRERILEVYHRVVVNHEPLHLVAHDLNRRGVLSPKDYFAQLQGREPQGRKWSATALKRSMVSEAMLGYATLNGKTVRDDDGAPLVRAEPILTREQLEALRAELVKTSRAKPAVSTPSLLLRVLFCAVCGEPAYKFAGGGRKHPRYRCRSMGFPKHCGNGTVVMAEWDAFCEEQVLGLFGDAERLEKVWVAGSDSAVELAEVNAELVDLTSLIGSPAYRAGSPQREALDARIAALAARQEELEGLEARPSGWEWRETGQRFGDWWREQDTAAKNTWLRSMNVRLTFDVRGGLTRTVDFGDLHEYEQHLRLGSVVERLHTGMS

SEQ ID NO: 9209 - protein, 500 aa, synthetic construct
MRALVVIRLSRVTDATTSPERQLESCQQLCAQRGWDVVGVAEDLDVSGAVDPFDRKRRPNLARWLALEEQPFDVIVAYRVDRLTRSTRHLQQLVRWAEDHKKLVVSATEAHFDTTTPFAAVVIALMGTVAQMELEAIKERIRSAVHFNIRAGKYRGSLPPWGYLPTRVDGEWRLVPDPVQRERILEVYHRVVDNHEPLHLVAHDLNRRGVLSPKDYFAQLRGREPQGREWSATALKRSMISVAMLGYATLNGKTVRDDDGVPLVRAEPILTREQLEALRAELAKTSRAKPAVSTPSLLLRVLFCAVCGEPAYKFVGGGRKHPRYRCRSMGFPKHCGNGTVAMAEWDAFCEEQVLDLLGDAERLEKVWVAGSDSAVELAEVNAELVDLTSLIGSPAYRAGSPQREALDARIAALAARQGELEGLEARPSGWEWRGTGQHFGDWWREQDTAAKNTWLRSMNIRLTFDVRGGLTRTIDFGELQEYEQHLRLGSAAGRLHTGMS

SEQ ID NO: 9210 - protein, 500 aa, synthetic construct
MRALVVIRLSRVTDATTSPERQLESCQQLCAQRGWDVVGVAEDLNVSGAVDPFDRKRRPNLARWLAFEEQPFDVIVAYRVDRLTRSIRHLQQLVHWAEDHKKLVVSATEAHFDTTTPFAAVVIALMGTVAQMELEAIKERNRSAAHFNIRAGKYRGSLPPWGYLPARVDGEWRLVPDPVQRERILEVYHRVVDNHESLHLVAHDLNRRGVLSPKDYFAQLQGREPQGRKWSATALKRSMISEAMLGYATLNGKTVRDDDGAPLVRAEPILTRVQLEALRAELVRTSRAKPAVSTPSLLLRVLFCAVCGEPAYKFAGGGRKHPRYRCRSMGFPKHCGNGTVAMAEWDAFCEEQVLDLLGDAERLEKVWVAGSDSAVELAEVNAELVDLTSLIGSPAYRAGSPQREALDARIAALAARQEELEGLEARPPGWEWRETGQRFRDWWREQDTVAKNTWLRSMNVRLTFDVRGGLTRTIDFGDLQEYERHLRLGSVVEHLHTGMS

SEQ ID NO: 9211 - protein, 500 aa, synthetic construct
MRALVVIRLSRVTDATTSPERQLESCQQLCAQRGWDVVGVAEDLDVSGAVDPFDRKRRPNLARWLAFEEQPFDVIVAYRVDRLTRSTRHLQQLVHWAEDHKKLVVSATEAHFDTTTPFAAVVIALMGTVAQMELEAIKERNRSAAHFNIRAGKYRGSLPPWGYLPTRVDGEWRLVPDPVQRERILEVYHRVVDNHEPLHLVAHDLNRRGVLSPKDYFAQLQGREPQGRKWSATALKRSMISEAMLGYTTLNGKTVRDGDGAPLVRAEPILTRGQLEALRAELVKTSRAKPAVSTPSLLLRVLFCAVCGEPAYKFAGGGRKHPRYRCRSMGFPKHCGNGTVAMAEWDAFCEEQVLGLLGDAERLEKVWVAGSDSAVELAEVNAELVDLTSLIGSPAYRTGSPQREALDARIAALAARQEELEGLGARPSGWEWRETGQRFGDWWREQDTAAKNTWLRSMNVRLTFDVRGGLTRTIDFGDLQEYEQHLRIGRVVERSHTGMS

SEQ ID NO: 9212 - protein, 500 aa, synthetic construct
MRALVVIRLSRVTDATTSPERQLESCQQLCAQRGWDVVGVAEDLDVSGAVDPFDRKRRPNLARWLAFEEQPFDVIVAYRVDRLTRSTRHLQQLVHWAEDHKKLVVSATEAHFDTTTPFAAVVIALMGTVAQMELEATKERNRSAAHFNIRAGKYRGSLPPWGYLPTRVDGEWRLVPDPVQRERILEVYHRVVDNHEPLHLVAHDLNRRGVLSPKDYFAQLRGREPQGRKWSATALKRSMISEAMLGYATLNGKTVRDDDGAPLVRAEPILTREQLEALRAVLVKTSRAKPAVSTPSLLLRVLFCAVCGEPAYKFAGGGRKHPRYRCRSMGFPKHCGNGTVAMAEWDAFCEEQVLDLLGDAERLEKIWVAGSDSAVELAEVNAELVDLTSLIGSPAYRAGSPQREALDARIAALAARQEELEGLEARPSGWEWRETGQRFGDWWREQDTAAKNTWLRLMNVRLTFDVRGGLTRTIDFGDLQENERHLRLGSVVGHLHTGMS

SEQ ID NO: 9213 - protein, 500 aa, synthetic construct
MRALVVIRLSRVTDATTSPERQLESCRQLCAQRGWDVVGVAEDLDVSGAVDPFDRRRRPNLARWLAFEEQPFDAIVAYRVDRLTRSVRHLQQLVHWAEDHKKLVVSATEAHFDTTTPFAAVVIALMGTVAQMELEAIKERNRSAAHFNIRAGKYRGSLPPWGYLPARVDGEWRLVPDPVQCERILEVYHRVVNNHETLHLVAHDLNRRGVLSPKDYFAQLQGREPQGRKWSATALKRSMISEAMLGYATLNGKTVRDDDGAPLVRAEPILTREQLEALRAELVKTSRAKPAVSTPSLLLRVLFCAVCGEPAYKFAGGGRKHPRYRCRSMGFPKHCGNGTVAMAEWDAFCEEQVLDLLGDAERLGKVWVAGSDSAVELAEVNAELVDLTSLIGSPAYRAGSPQREALDARIAALAARQEELEGLEARPSGWEWRETGQRFGDWWREQDTAAKNTWLRSKNVRLTFDVRGGLTRTIDFGNLQEYEQHLRLGGVVERLRTGMS

SEQ ID NO: 9214 - protein, 500 aa, synthetic construct
MRALVVIRLSRVTDTTTSPERQLESCQQLCAQRGWDVVGVAEDLDVSGAVDPFDRKRRPNLARWLAFEEQPFDVIVAHRVDRLTRSVRHLQQLVHWAEDHKKLVVSATEAHFDTTTPFAAVVIALMGTVAQMELEAIKERNRSATHFNIRAGKYRGSLPPWGYLPTRVNGEWRLAPDPVQRERILEVYHRVVDNHEPLHLVAHDLNRRGVLSPKDYFAQLQGREPQGRKWSATALKRSMTSEAMLGYATLNGKTVRDDDGAPLVRAEPILTREQLEALRAELVKTSRVKPAVSTPSLLLRVLFCAVCGGPAYKFAGGGRKHPRYRCRSMGFPKHCGNGTVAMAEWDAFCEEQVLGLLGDAERLEKVWVAGSDSAVELAEVNAELVDLTSLIGSPAYRAGSPQREALDARIAALAARQEELEGLEARPSGWEWREAGQRFGDWWREQDTAAKNTWLRSMNVRLTFDARGGLTRTIDFGDLQEYEQHLRLGSVVERLHTGMS

SEQ ID NO: 9215 - protein, 500 aa, synthetic construct
MRALVVIRLSRVTDATTSPERQLESCQRLCAQRGWDVVGVAEDLDVSGAVDPFDRKRRPSLARWLAFEEQPFDAIVAYRVDRLTRSIRHLQQLVHWAEDHKKLVVSATEAHFDTTTPFAAVVIALMGTVAQMELEAIKERNRSAAHFNIRAGKYRGSLPPWGYLPTRVDGEWRLAPDPVQRERILEVYHRVVDNHEPLHLVAHDLNRRGVLSPKDYFAQLQGREPQGRKWSATALKRSMISEAMLGYATLNGKTVRDDDGAPLVRAEPILTREQLEALRAELVKTSRAKPAVSTPSLLLRVLFCAVCGEPAYKFAGGGRKHPRYRCRSMGFPKHCGNGTAAMAEWDAFCEEQVLNLLGDAERLEKVWVAGSDSAVELAEVNAELVDLTSLIGSPAYRAGSPQREALDARIATLAARQEELEGLEARPSGWGWRRTGQRFGDWWREQDTAAKNTWLRSMNVRLTFDVRGGLTRTIDFGDLQEYEQHLRLGSVVERLRTGAS

SEQ ID NO: 9216 - protein, 500 aa, synthetic construct
MRALVVIRLSRVTDATTSPERQLESCHQLCAQRGWDVVGVAEDLDVSGAVDPFDRKRRPNLARWLAFEEQPFDVIVAYRVDRLTRSTRHLQQLVHWAEDHKKLVVSATEAHFDTTTPFAAVVIALMGTVAQMELEAIKERIRSAVHFNIRAGKYRGSLPPWGYMPTRADGEWRLVPDPVQRERILEVYHRVVDNHEPLHLVAHDLNRRGVLSPKDYFAQLRGREPRGRKWSATALKRSMTSEAMLGYATLDGKIVRDDDGAPLVRAEPILTRGQLEALRAELAKTSRAKPAAPTPSLLLRVLFCAVCGEPAYKFIGGGRKHPRYRCRSMGFPKHCGNGTVVMAEWDAFCEEQVLNLLGDAERLEKVWVAGSDSAVELAEVNAELVDLTSLIGSPAYRTGSPQREALDARIAALAARQEELGSLEARPSGWEWRGTGQRFGDWWREQDTAAKNTWLRSMNVRLTFDARGGLTRTIDFGDLQEYEQHLRLGSVIERLRTGVS

SEQ ID NO: 9217 - protein, 500 aa, synthetic construct
MRALVVIRLSRVTDATTSPERQLESCQQLCAQRGWDVVGVAEDLDVSGAVDPFDRKRRPNLARWLAFEEQPFDVIVAYRVDRLTRSVRHLQQLVHWAEDHKKLVVSATEAHFDTTTPFAAVVIALMGTVAQMELEAIKERNRSAAHFNIRAGKYRGSLPPWGYLPTRVDGEWRLVLDPVQRERILEVYHRVVDNHEPLHQVAHDLNRRGVLSPKDYFAQLRGREPQGRKWSATALKRSMISEAMLGYATLNGKTVRDDDGAPLVRAEPILTREQLEALRAELVKTSRAKPAVSTPSLLLRVIFCAVCGEPAYKFAGGGRKHPRYRCRSMGFPKHCGNGTVAMAEWDAFCEEQVLDLIGDTERLEKVWVAGSDSAVELAEVNAELVDLTSLIGSPAYRAGSPQREALDARIAALAARQEELEGLEARPSGWEWRETGQCFGDWWREQDTAAKNTWLRSMNVRLMFDVRGGLTRTIDFGDLQEYEQHLRLGSVVERLHTGMS

SEQ ID NO: 9218 - protein, 500 aa, synthetic construct
MRALIVVRLSRVTDATTSPERQLESCRQLCAQRGWGVVGVAEDLDVSGAVDPFDRKRRPNLARWLAFEEQPFDVIVAYRVDRLTRSTRHLQQLVHWAEDHKKLVVSATEAHFDTTTPFAAVVIALMGTVAQMELEAIKERNRSAARFNIRAGKYRGSLPPWGYLPTRVDGEWRLAPDPVQRERILEVYHRVVDNHEPLHLVAHDLNRRGVLSPKDYFAQLQGREPQGRKWSATALKRSMTSEAMLGYATLNGKTVRDDNGAPLVRAEPILTREQLEALRAELVKTSRAKPAVSTPSLLLRVLFCAVCGEPAYKFAGGGRKHPRYRCRSMGFPKHCGNGTVAMAEWDALCEEQVLDLLGDAERLEKVWVAGSDSAVELAEVNSELVDLTSLIGSPAYRAGSPQREALDARIAALVARQEELEGLEARPSGWEWRETGQRFGDWWREQDTAAKNTWLRSMNVRLTFDVRGGLTRTIDLGDLQEYEQHLRLGSVVERLHTGMS

SEQ ID NO: 9219 - protein, 500 aa, synthetic construct
MRALVVIRLSRVTDATTSPERQLESCQQLCAQRGWDVVGVAEDLDVSGAVDPFDRKRRPNLARWLASEEQPFDVIVAYRVDRLTRSTRHLQQLVRWAEDHKKLVVSATEAHFDTTTPFAAVVIALMGTVAQMELEAIKERIRSAVHFNIRAGKYRGSLPPWGYLPTRVDGEWRLVPDPVQRERILEVYHRVVDSHEPLHLVAHDLNRRGVLSPKDYFAQLRGREPQGRKWSATALKRSMTSEAMLGYATLNGKTVRDDDGAPLVRAEPILTREQLEALRAELAKTSRAKPAVSTPSLLLRVLFCAVCGEPAYKFVGGGRKHPRYRCRSMGFPKHCGNGTVVMAEWDAFCEEQVLNLLGDAERLEKVWVAGSDSAVELAEVNAELVDLTGLIGSPAYRAGSPQREALDARIAALAARQEELEGLEARPSGWEWRETGQRFGDWWREQDTAAKNTWLRSMNVRLTFDVRGGLTRTIDFGDLQEYEQHLRLGGVVERLHTGMS

SEQ ID NO: 9220 - protein, 500 aa, synthetic construct
MRALVVIRLSRVTDATTSPERQLESCRQLCAQRGWDVVGVAEDLDVSGAVDPFDRKRRPNLARWLAFEEQPFDVIVAYRVDRLTRSTRHLQQLVRWAEDHKKLVVSATEAHFDTTTPFAAVVIALMGTVAQMELEAIKERIRSATHFNIRAGKYRGSLPPWGYLPTRVDGEWRLVPDPVQRERILEVYHRVVDNHEPLHLVAYDLNRRGVLSPKDYFAQLQGREPQGRKWSATALKRSMVSKAMLGYATLNGKTVRGDDGAPLVRAEPILTREQQEALRAELAKTSRAEPAVSTPSLLLRVLFCAVCGEPAYKFVGGGRKHPRYRCRSMGFPEHCGNGTVVMAEWDAFCEEQVLDLLGDAERLEKVWVAGSDSAVELAEVNAELVDLTSLIGSPVYRTGSPQREALDARIAALAARQEELEGLEARPSGWEWRETGQRFGDWWREQDTAAKNTWLRLMNVRLTFDVRGGLTRTIDFGDLQEYEQHLRLGSVVERLHTGMS

SEQ ID NO: 9221 - protein, 500 aa, synthetic construct
MRALVAIRLSRVTDATTSPERQLESCQQLCAQRGWNVVGVAEDLDVSGAVDPFDRKRRPNLARWLAFEEQPFDVIVAYRVDRLTRSTRHLQQLVRWAEDHKKLVVSATEAHFDTTTPFAAVVIALMGTVAQMELEAIKERIRSAVRFNIRAGKYRGSLPPWGYMPTRVDGEWRLVPDPVQRERILEVYHRVVDNHEPLHLVAYDLNRRGVLSPKDYFAQLRGREPQGRKWSATALKRSMISAAMLGYATLNGKIVRDNDGAPLMRAEPILTREQQEALRAELAKTSRAKPAVSTPSLLLRVLFCAVCGEPAYKFVGGGRKHPRYRCRSMGFPKHCGNGTVVMAEWDAFCEGQVLDLLGDAERLEKVWVAGSDSAVELAEVNAELVDLTSLIGSPAYRAGSPQREALDARIAALAARQEELEGLEARPSGWEWRETGQRFGDWWREQGTAAKNTWLRSMNVRLTFDVRGGLTRTIDFGDLQEYVQHLRLGSEVERLHAGMS

SEQ ID NO: 9222 - protein, 500 aa, synthetic construct
MRALVVIRLSRVTDATTSPERQLESCQQLCAQRGWDVVGVAEDLDVSGAVDPFDRKRRPNLARWLAFEEQPFDAIVAYRVDRLTRSIRHLQQLVHWAEDHKKLVVSATEAHFDTTTPFAAVVIALMGTVAQMELEAIKERIRSAVRFNIRAGKYRGSLPPWGYLPTRVDGEWRLVPDPVQRERILEVYHRVVDSHEPLHLVAHDLNRRGVLSPKDYFAQLRGREPRGRKWSATALKRSMISGAMLGYATLNGKTVRGDDGAPLVRAEPILTREQQEALRAALVKTSRAKPAVSTPSLLLRVLFCAVCGEPAYKFVGGGRKHPRYRCRSMGSPKHCGNGTVAMAEWDAFCEEQVLDLLGDAERLEKVWVAGSDYAVELAEVSAELVDLTSLIGSPAYRAGSPQREALDARIAALAARQEELEGSEARPSGWGWRGTGQRFRDWWREQDTAAKNTWLRSMNVRLTFDVRGGLTRTIDFGDLLEYGQHLRSGSVVERLHTGMS

SEQ ID NO: 9223 - protein, 500 aa, synthetic construct
MRALVVIRLSRVTDATTSPERQLESCQQLCTQRGWDVVGVAEDLDVSGAVDPFDRKRRPNLARWLAFEEQPFDVIVAYRVDRLTRSTRHLQQLVHWAEDHKKLVVSATEAHFDTTTPFAAVVIALMGTVAQMELEAIKERIRSAVHFNIRAGKYRGSLPPWGYLPTRVDGEWRLVPDPVQRERILEVYHRVVDNHEPLHLVAYDLNRRGVLSPKDYFAQLQGREPQGRKWSATALKRSMISGAMLGYATLNGKIVRDDDGAPLVRAEPILTREQLEALRAELVKTSRAKPAVSTPSLLLRVLFCAVCGEPAYKFTGGGRKHPRYRCRSMGFPEHCGNGTVVMAEWDAFCEEQVLNLLGDAERLEKVWVAGSDSAVELAEVNAELMDLTSLIGSPAYRAGSPQREALDARIAALAARQEELEGLEARPSGWEWRETGQRFGDWWREQDTAAKNTWLRSMNVRLTFDVRGGLTRAIDFGDLQEYEQHLRLDSAVKRLHTGMS

SEQ ID NO: 9224 - protein, 500 aa, synthetic construct
MRALVVIRLSRVTDATTSPERQLESCQQLCAQRGWDVVGVAEDLDVSGAVDPFDRKRRPNLARWLAFEEQPFDVIVAYRVDRLTRSTRHLQQLVHWAEDHEKLVVSATEAHFDTTTPFAAVVIALMGTVAQMELEAIRERNRSAAHFNIRAGKYRGSLPPWGYLPARVDGEWRLVPDPVQRERILEVYRRVVDNHEPLHLVAHDLNRRGVLSPKDYFAQLQGREPQGRKWSATALKRSMVSEAMLGYATLNGKTVRDDDGAPLVRAEPILTREQLEAIRAELVKTSRAKPAVSTPSLLLRVLFCAVCGEPAYKFAGGGRKHPRYRCRSMGFPKHCGNGTVAMAEWDAFCEEQVLDLLGDAERLEQVWVAGSDSAVELAEVNAELVDLTSLIGSPAYRAGSPQREALDARIAALAARQEGLEGLEARPSGWEWRGTGQRFGDWWREQDTAAKNTWLRSMNVRLTFDVRGGLTRTIDFGDLLEYKQHLRLGSVVERLHTGMS

SEQ ID NO: 9225 - protein, 500 aa, synthetic construct
MRALVVIRLSRVTDATTSPERQLESCQQLCAQRGWDVVGVAEDLDVSGAVDPFDRKRRPNLARWLAFEEQPFDVIVAYRIDRLTRSVRHLQQLVHWAEDHRKLVVSATEAHFDTTTPFAAVVIAVMGTVAQMELEAIKERNRSAAHFNIRAGKYRGSLPPWGYLPTRVDGEWRLVPDPVQHERILEVYHRVVDNHEPLHWVAHDLNRRGVLSPKDYFAQLQGREPQGRKWSATALKRSMISEAMLGYATLNGETVRDDDGAPLVRAEPILTREQLEALRAELVKTSRAKPAVSTPSLLLRVLFCAVCGEPAYKFAGGGRKHPRYRCRSMGFPKHCGNGTVAMAEWDAFCEEQVLDLLGDAERLEKVWVVGSDSAVELAEVNAELVDLTSLIGSPAYRAGSPQREALDARIAALAARQEELEGLGARPSGWEWRETGQRFGDWWREQDTAAKNTWLRSMNVRLTFDVRGELTRTIDFGKLQEYEQHLRLGSVVERLHTGMS

SEQ ID NO: 9226 - protein, 500 aa, synthetic construct
MRALVVIRLSRVTDATTSPERQLESCQQLCAQRGWDVVGVAEDLDVSGAVDPFDRKRRPNLARWLAFEEQPFDVIVAYRVDRLTRSTRHLQQLVHWAEDHKKLVVSATEAHFDTTTPFAAVVVALMGTVAQMELEAIKERNRSAAHFNIRAGKYRGSLPPWGYLPARVDGEWRLVPDPVQRERILEVYHRVVGNHEPLHLVAHDLNRRGVLSPKDYFAQLQGREPQGRKWSATALKRSMISEAMLGYATLNGKTVRDDDGAPLVRAEPILTRGQLEALRAELVKTSRAKPAVSAPSLLLRVLFCAVCGEPAYKFAGGGRKHPRYRCRSMGFPKHCGNGTVAMAEWDAFCEEQVLDLLGDAERLEKVWVAGSDSAVELAEVNAELVDLTSLIGSPAYRVGSPQREALDARIAALAARQEELEGLEARPSGWERRETGQRFGDWWREQDTAAKNTWLRSMNVRLTFDVRGGLTRTIDFGDLQEYEQHLRLGSVVERLHTGMS

SEQ ID NO: 9227 - protein, 500 aa, synthetic construct
MRALVVIRLSRVTDATTSPERQLESCQQLCAQRGWDVVGVAEDLDVSGAVDPFDRKRRPNLARWLAFEEQPFDAIVAYRVDRLTRSIRHLQQLVHWAEDHKKLIVSATEAHFDTTTPFAAVVIALMGTVAQMELEAIKERNRSAAHFNIRAGKYRGSLPPWGYLPTRVDGEWRLVPDPVQRERILEVYHRVVDDHEPLHLVAHDLNRRGVLSPKDYFAQLQGREPQGRKWSATALKRSMTSEAMLGYATLNGKTVRDDDGAPLVRAEPILTREQLEALRAELVKTSRAKPAVPTPSLLLRVLFCAVCGEPAYKFAGGGRKHPRYRCRSMGFPKHCGNGTVAMAEWDAFCEEQVLGLLGDAECLEKVWVAGSDSAVELAEVNAELVDLTSLIGSPAYRAGSPQREALDARIAALAARQVELEGLGARPSGWEWRETGQRFGDWWREQDTAAKNTWLRSMNVRLTFDVRGGLTRTIDFGDLREYEQHLRLGSVVERLRTGMS

SEQ ID NO: 9228 - protein, 500 aa, synthetic construct
MRALVVIRLSRVTDATTSPERQLESCQQLCAQRGWDVVGVAEDLDVSGAVDPFDRKRRPNLARWLAFEEQPFDVIVAYRVDRLTRSTRHLQQLVHWAEDHKKLVVSATEAHFDTTTPFAAVVIALMGTVAQMELEAIKERNRSAAHFNIRAGKYRGSLPPWGYLPTRVDGEWRLAPDPVQRERILEVYHRVVDNHEPLHLVAHDLNRRGVLSPKDYFAQLQGREPQGRKWSATALKRSMISEAMLGYATLNGKTVRDDDGAPLVRAEPILTREQLEALRAELVKTSRVKPAVSTPSLLLRVLFCAVCGEPAYKFAGGGRKHPRYRCRSMGFPKHCGNGTVAMAEWDAFCEEQVLNLLGDAERLEKVWVAGSDSAVELAEVNAELVDLTSLIGSPAYRVGSPQREALDARIAALAARQEELEGLEARPSGWVWRETGQRFGDWWREQDTAAKNTWLRSMNVRLTFDVRGGLTRTIDFGGLQEYEQHLRLGSVVERLHTGMS

SEQ ID NO: 9229 - protein, 500 aa, synthetic construct
MRALVVIRLSRVTDATTSPERQLESCQQLCAQRGWDVVGVAEDLDVSGAVDPFDCKRRPNLARWLAFEEQPFDAIVAYRVDRLTRSVRHLQQLVHWAEDHKKLVVSATEAHFDTTTPFAAVVIALMGTVAQMELEAIRERNRSAAHFNIRAGKYRGSLPPWGYLPTRVDGEWRLAPDPVQRERILEVYHRVVDNHEPLHLVAHDLNRRGVLSPKDYFAQLQGREPQGRKWSATALKRSMISEAMLGYATLNGKTVRNEDGAPLVRAEPILTRGQLEALRAELVKTSRAKPAVSTPSLLLRVLFCAVCGEPAYKFAGGGRKHPRYRCRSMGFPKHCGNGTVAMAEWDAFCEEQVLDLLGDAERLEKVWVAGSDSAVELAEVNAELVDLTSLIGSPAYRAGSPQREALDARIAALAARQGELEGLEARPPGWEWRETGQRFGDWWREQDTAAKNTWLRSMNVRLTFDVRGGLTRTIDFGDLREYEQHLRLGSVVERLHTGMS

SEQ ID NO: 9230 - protein, 500 aa, synthetic construct
MRALVVIRLSRVTDATTSPERQLESCRQLCAQRGWDVVGVAEDLDVSGAVDPFDRKRRPNLARWLAFEEQPFDVIVAYRVDRLTRSTRHLQQLVHWAEDHKKLVVSATEAHFDTTTPFAAVVIALMGTVAQMELEAIKERNRSAAHFNIRAGKYRGSLPPWGYLPTRVDGEWRLVPDPVQRERILEVYHRVVDNHEPLHLVAHDLNRRGVLSPKDYFAQLRGREPQGRKWSATALKRSMTSEAMLGYATLNGKTVRDDDGAPLVRAEPILTREQLEALRAELVKTSRVKPAVTTPSLLLRVLFCAVCGEPAYKFAGGGRKHPRYRCRSMGFPRHCGNGTVVMAEWDAFCEEQVLDLLGDAERLEKVWVAGSDSAVELAEVNAELVDLTSLISSPAYRAGSPQREALDARIAALAARQEELEGLEARPSGWEWRETGQRFGDWWREQDTAAKNSWLRSMNVRLTFDVRGGLTRTIDFGDLQEYEQHLRLGSMVERLHIGMS

SEQ ID NO: 9231 - protein, 500 aa, synthetic construct
MRALVVIRLSRVTDATTSPERQLESCQQLCAQRGWDVVGVAEDLDVSGAADPFDRKRRPSLARWLAFEEQPFDAIVAYRVDRLTRSVRHLQQLVHWAEDHKKLVVSATEAHFDTTTPFAAVVIALMGTVAQMELEAIKERNRSTAHFNIRAGKYRGSLPPWGYLPTRVGGEWRLVPDPVQRERILEVYHRVVGNHEPLHLVAHDLNRRGVLSPKDYFAQLRGREPQGREWSATALKRSMTSEAMLGYVTLNGKTVRDDDGAPLVRAEPILTREQLEALRAELVKTSRAKPAVSTPSLLLRVLFCAVCGEPAYKFAGGGRKHPRYRCRSMGFPKHCGNGTVVMAEWDAFCEEQVLDLLGDAERLEKVWVAGSDSAVELAEVNAELVDLTSLIGSPAYRAGSPQREALDARIAALAARQEELEGLGARPSGWEWRETGQRFGDWWREQDTAAKNTWLRSMNVRLTFDVRGGLTRTIDFGDLQEYEQHLRLGGVVERLHTGMS

SEQ ID NO: 9232 - protein, 500 aa, synthetic construct
MRALVVIRLSRVTDATTSPERQLESCQQLCAQRGWDVVGVAEDLDVSGAVDPFDRKRRPNLARWLAFEEQPFDVIVAYRVDRLTRSTRHLQQLVHWAEDHKKLVVSATEAHFDTTTPFAAVVVALMGTVAQMELEAIKERNRSAAHFNIRAGKYRGSLPPWGYLPTRVDGEWRLVPDPVQRERILEVYHRVVDDHEPLHLVAHDLNRRGVLSPKDYFAQLRGREPQGRKWSATALKRSMISEAMLGYATLNGKTVRDDDGAPLVRAEPILTRVQLEALRAELAKTSRAKPAVSTPSLLLRVLFCAVCGEPAYKFAGGGRKHPRYRCRSMGFPKHCGNGTVAMAEWDAFCEEQVLDLLGDAERLEKVWVAGSDSAVELAEVNAELAGLTSLIGSPAYRAGSPQREALDARIAALAARQEELEGLEARPSGWEWRETGQRFGDWWREQDTAAKNTWLRLMNVRLTFDVRGGLTRTIDFGDLQEYEQHLRLGSVVERLHTGMS

SEQ ID NO: 9233 - protein, 500 aa, synthetic construct
MRALVVIRLSRVTDATTSPERQLESCQQLCAQRGWVVVGVAEDLDVSGAVDPFDRKRRPNLARWLAFEEQPFDAIVAYRVDRLTRSVRHLQQLVHWAEDHKKLVVSATEAHFDTTTPFAAVVIALMGTVAQMELEAIKERNRSAAHFNIRAGKYRGSLPPWGYLPTRVDGEWRLVPDPVQRERILEVYHRVVDYHEPLHLVAHDLNRRGVLSPKDYFAQLQGREPQGRKWSATALKRSMISVAMLGYATLNGKTVRDDDGAPLVRAEPILTREQLEALRAELVKTSRAKPAVSTPSLLLRVLFCAVCGEPAYKFAGGGRKHPRYRCRSMGFPKHCGNGTVAMAELDAFCEEQVLDLLGDAERLEKVWVAGSDSAVELAEVNAELVDLTSLIGSPAYRAGSPQREALDARIAALAARQEELEGLKARPSGWEWRETGQRFGDWWREQDTAAKNTWLRSMNVRLTFDVRGGLTRTIDFGDLQEYERHLRLGSVVERLHTGMS

SEQ ID NO: 9234 - protein, 500 aa, synthetic construct
MRALVVIRLSRVTDATTSPERQLESCQQLCAQRGWDVVGVAEDLDVSGAVDPFDRKRRPNLARWLAFEEQPFDVIVAYRVDRLTRSTRHLQQLVHWAEDHKKLVVSATEAHFDTTTPFAAVVIALMGTVAQMELEAIKERIRSAVHFNIRAGKYRGSLPPWGYLPTRVDGEWRLVPDPVQRERILEVYHRVVDNHEPLHLVAYDLNRRGVLSPKDYFAQLRGREPRGRKWSATALRRSMISGAMLGYATLNGKIVRNDDGAPLVRAEPILTREQWEALRAELAKTSRAKPAVSTPSLLLRVLFCAVCGEPAYKFVGGGRKHPRYRCRSMGFPKHCGNGTVVMTEWDAFCEEQVLNLLGDAERLEKVWVAGSDSAVELAEVNAELVDLTSLIGSPAYRAGSPQREALDARIAALAARQEELEGLEARPSGWEWRETGQCFGDWWREQDTAARNTWLRSMNVRLTFDVRGGLTRTIDFGDLQEYERHLRLGSVAERLHTGMS

SEQ ID NO: 9235 - protein, 500 aa, synthetic construct
MRALVVIRLSRVTDATTSPERQLESCQQLCAQRGWDVVGVAEDLDVSGAVDPFDRKRRPNLARWLAFEEQPFDVIVAYRVDRLTRSVRHLQQLVHWAEDHEKLVVSATEAHFDTTTPFAAVVIALMGTVAQMELEAIKERNRSAAHFNIRAGKYRGSLPPWGYLPMRVNGEWRLVPDPVQRERILEVYHRVVNNHEPLHLVAHDLNRRGVLSPKDYFAQLQGREPQGRKWSATALKRSMISEAMLGYATLNGKTVRDDDGAPLVRAEPILTRGQLEALRAELVKTSRAKPAVSTPSLLLRVLFCAVCGEPAYKSAGGGRKHPRYRCRSMGFPKHCGNGTVAMAEWDAFCEEQVLDLLGDAERLEKVWVAGSDSAVELAEVNAELVDLTSLIGSPAYRAGSPQREALDARIAALAARQEELEGLEARPSGWERRGTGQRFRDWWREQDTAAKNTWLRSMNVRLTFDVRGGLTRTIDFGDLQEYEQHLRLGSVVERLHTGMS

SEQ ID NO: 9236 - protein, 500 aa, synthetic construct
MRALVVIRLSRVTDATTSPERQLESCQQLCAQRGWDVVGVAEDLDVSGAVDPFDRKRRPNLARWLALEEQPFDVIVAYRVDRLTRSVRHLQQLVHWAEDHKKLVVSATEAHFDTTTPFAAVVIALMGTVAQMELEAIKERNRSAAHFNIRAGKYRGSLPPWGYLPTRVDGEWRLVPDPVQRERILEVYHRVVDNHEPLHLVAHDLNRRGVLSPKDYFAQLQGREPQGRKWSATALKRSMISVAMLGYATLNGKTVRDDDGAPLVRAEPILTREQLEASRAELVKTSRAKPAVSTPSLLLRVLFCAVCGEPAYKFAGGGRKHPRYRCRSVGFPKHCGNGTVAMAEWDAFCEEQVLDLLGDAERLEKVWVAGSDSAAELAEVNAELVDLTSLIGSPAYRAGSPQREALDARIAALAARQEELEGLEARPSGWEWRGTGQRFGDWWREQDTAAKNTWLRSMNVRLTFDVRGGLTRTIDFGDLQEYEQHLRLGSVVERLHTGMS

SEQ ID NO: 9237 - protein, 500 aa, synthetic construct
MRALVVIRLSRVTDATTSPERQLESCQQLCAQRGWDVVGVAKDLDVSGAVDPFDRKRRPNLARWLAFEEQPFDVIVAHRVDRLTRSTRHLQQLVHWAEDHKKLVVSATEAHFDTTTPFAAVVIALMGTVAQMELEAIKERNRSAAHFNIRAGKYRGSLPPWGYLPTRVDGEWRLVPDPVQRERILEVYRRVVDNHEPLHLVAHDLNRRGVLSPKDYFAQLQGREPQGRKWSATALKRSMISEAMLGYATLNGKTVRDDDGAPLVRAEPILTREQLEALRAELVKTSRAKPAVSTPSLLLRVLFCAVCGEPAYKFAGGGRKHPRYRCRSMGFPKHCGNGTVVMAEWDAFCEEQVLDLLGDAERLEKVWVAGSDSAVELAEVSAELVDLTSLIGSPAYRAGSPQREALDARIAALAARQEELEGLEARPSGWEWRGTGQRFGDWWREQDTAAKNTWLRSMNIRLTFDVRGGLTRTIDFGDLQEYEQHLRLGSVVERLHTGMS

SEQ ID NO: 9238 - protein, 500 aa, synthetic construct
MRALVVIRLSRVTDATTSPERQLESCQQLCAQRGWDVVGVAEDLDVSGAVDPFDRKRRPNLARWLAFEEQPFDVIVAYRVDRLTRSTRHLQQLVHWAEDHKKLVVSATEAHFDTTTPFAAVVIALMGTVAQMELEAIKERNRSAAHFNIRAGKYRGSLPPWGYMPTRVDGEWRLVPDPVQRERILEVYHRVVDNHEPLHLVARDLNRRGVLSPKDYFAQLQGREPQGRKWSATALKRSMISKAMLGYATLNGKTVRGEDGTPLVRAEPILTREQLEALRAELVKTSRAKPAVSTPSLLLRVLFCAVCGEPAYKFAGRGRKHPRYRCRSMGFPKHCGNGTVVMAEWDAFCEEQVLDLLGDAERLEKVWVTGSDSAVELAEVNAELVDLTSLIGSPTYRTGSPQREALDARIAALAARQEELESLEARPSGWEWRETGQRFGDWWREQDTAAKNTWLRSMNVRLTFDVRGGLTRTIDFGDLQEYKQHLRLGSVVERLHTGMS

SEQ ID NO: 9239 - protein, 500 aa, synthetic construct
MRALVVIRLSRVTDATTSPERQLESCQQLCAQRGWDVVGVAEDLDVSGAVDPFDRKRRPNLARWLAFEEQSFDVIVAYRVDRLTRSVRHLQQLVHWAEDHKKLVVSATEAHFDTTTPFAAVVIALMGTVAQMELEAIKERNRSAAHFNIRAGKYRGSLPPWGYLPTRVDGEWRLVPDPVQRERILEVYHRVVDNHEPLHLVAHDLNRRGVLSPKDYFAQLRGREPQGRKWSATALKRSMISEAMLGYATLNGKTVRDDDGAPLVRAEPILTREQLEALRAELVKTSRAKPAVPTPSLLLRVLFCAVCGEPAYKFAGGGRKHPRYRCRSMGFPKHCGNGTVAMAEWDAFCEEQVLDLLGDAERLEKVWVAGSDSAVELAEVNAELVDLTSLIGSPAYRAGSPQREALDARIAALAARQEELEGLGARPPGWEWRETGQRFGDWWREQDTAAKNTWLRSMNVRLTFDVRGGLTRTIDFGDLQEYEQHLRLGSVVERLHTGMS

SEQ ID NO: 9240 - protein, 500 aa, synthetic construct
MRALVVIRLSRVTDATTSPERQLESCRQLCAQRGWDVVGVAEDLDVSGAVDPFDRKRRPNLARWLAFEEQPFDVIVAYRVDRLTRSTRHLQQLVHWAEDHKKLVVSATEAHFDTTTPFAAVVIALMGTVAQMELEAIKERIRSAVHFNIRAGKYRGSLPPWGYLPTRVDGEWRLVPDPVQRERILEVYHRVVDNHEPLHLVAHDLNRRGVLSPKDYFAQLRGREPRGRKWSATALRRSMTSVAMLGYATLNGKTVRDDDGAPLVRAEPILTREQLEALRAELVKTSRAKPAVSTPSLLLRVLFCAVCGEPAYKFVGGGRKHPRYRCRSMGSPEHCGNGTVAMAEWDTFCEEQVLNLLGDAERLEKVWVAGSDSAVELAEVNAELVDLTSLVGSPAYRAGSPQREALDARIAALAARQEELEGLKARPSGWEWRETGQRLGDWWREQDTAAKNTWLRAMNVRLTFDVRGGLTRTIDFGDLQEYEQHSRLGSVVERLHTGVS

SEQ ID NO: 9241 - protein, 500 aa, synthetic construct
MRALVVIRLSRVTDATTSPERQLESCQQLCAQRGWDVVGVAEDLDVSGAVDPFDRKRRPNLARWLAFEERPFDVIVAYRVDRLTRSTRHLQQLVHWAEDHKKLVVSATEAHFDTTTPFAAVVIALMGTVAQMELEAIKERIRSAVHFNIRAGKYRGSLPPWGYLPTRVDGEWRLVPDPVQRERILEVYHRVVDNHEPLHLVAHDLNRRGVLSPKDYFAQLQGREPQGRKWSATALKRSMISGAMLGYATLNGKIVRGDDGAPLVRAEPILTREQLEALRAELVKTSRAKPAVSTPSMLLRVLFCAVCGEPAYKFVGGGRKHPRYRCRSMRFPKHCGNGTVVMAEWDAFCEEQVLNLLGDAERLEKVWVAGSDSAVELAEVNAELVDLTSLIGSPAYRVGSPQREALDARIAALAARQEELEGLEARPSGWEWRETGQRFGDWWREQDTAAKNTWLRSMNVRLTFDVRGGLTRTIDFGELQEYKQHLRLGSVVERLHTGMS

SEQ ID NO: 9242 - protein, 500 aa, synthetic construct
MRALVVIRLSRVTDATTSPERQLESCQQLCAQRGWDVVGVAEDLDVSGAVNPFDRKRRPNLARWLAFEEQPFDVIVAHRVDRLTRSTRHLQQLVRWAEDHKKLVVSATEAHFDTTTPFAAVVIALMGTVAQMELEAIKERIRSAVHFNIRAGKYRGSLPPWGYLPTRVDGEWRLAPDPVQRERILEVYRRVVDNHEPLHLVAHDLNRRGVLSPKDYFAQLQGREPQGRKWSATALRRSMISGAMLGYATLNGKTVRDDDGAPLVRAEPILTREQQEALRAELAKTSRAKPAVSTPSLLLRVLFCAVCGEPAYKFAGGGRKHPRYRCRSMGFPKHCGNGTVTMAEWDAFCEERVLDLLGDAERLEKVWVAGSDSAVELAEVNAELVDLTCLIGSPAYRAGSPQREALDARIAALAARQEELEGLEARPSGWEWRETGQRFGDWWREQDTAAKNTWLRSMNVRLTFDVRGGLTRTIDFGDLQEYEQHLRLGSVVERLHTGVS

SEQ ID NO: 9243 - protein, 500 aa, synthetic construct
MRALVVIRLSRVTDATTSPERQLESCQQLCAQRGWDVVGVAEDLDVSGAVDPFDRKRRPNLARWLAFEERPFDVIVAYRVDRLTRSVRHLQQLVRWAEDHKKLVVSATEAHFDTTTPFAAVVIALMGTVAQMELEAIKERIRSTTHFNIRAGKYRGSLPPWGYLPTRVDGEWRLVPDPVQRERIIEVYRRVVDNHEPLHLVAHDLNRRGVLSPKDYFAQLQGREPQGRKWSATALKRSMISVAMLGYATLNGKIVRGDDGAPLVRAEPILTREQQEALRAELAKTSRAKPAVSTPSLLLRVLFCAVCGEPAYKFVGGGRKHPRYRCRSMGFPKHCGNGTVVMAEWDAFCEEQVLDLLGDAERLEKVWVAGSDSAVELAEVNAELVDLTSLIGSLAYRAGSPQREALDARIAALAARQEELEGLEARPSGWEWRGTGQRFGDWWREQDIAAKNTWLRSMNVRLTFDVRGGLTRTIDFGDLREYEQHLRLGSVVERLHTGMS

SEQ ID NO: 9244 - protein, 500 aa, synthetic construct
MRALVVIRLSRVTDATTSPERQLESCQQLCAQRGWDVVGVAEDLDVSGAVDPFDRKRRPNLARWLAFEEQPFDAIVAYRVDRLTRSIRHLQQLVHWAEDHRKLVVSATEAHFDTTTPFAAVVIALMGTVAQMELEAIKERIRSAAHFNIRAGKYRGSLPPWGYLPARVDGEWRLVPDPVQRERILEVYHRVVDNHEPLHLVAYDLNRRGVLSPKDYFAQLRGREPQGRKWSATALRRSMISVAMLGYATLNGKTVRDDGGAPLVRAEPILTREQQEALRAELVKTSRAKPAVSTPSLLLRVLFCAVCGEPAYKFVGGGRKHPRYRCRSMGFPEHCGNGTVVMTEWDAFCEEQVLDLLGDAERLEKVWVAGSDSAVELAEVNAELVDLTSLIGSPAYRAGSPQREALDARIAALAARQEELESLEARPSGWEWRETGQRFGDWWREQDTAAKNTWLRSMNVRLTFGVRGGLTRTIDFGDLQEYERHLRLGSVAERLRTGMS

SEQ ID NO: 9245 - protein, 500 aa, synthetic construct
MRTLVVIRLSRVTDATTSPERQLESCQQLCAQRGWDVVGVAEDLDVSGAVDPFDRKRRPNLARWLAFEEQPFDVIVAYRVDRLTRSIRHLQQLVHWAEDHKKLVVSATEAHFDTTTPFAAVVIALMGTVAQMELEAIKERIRSAVHFNIRAGKYRGSLPPWGYLPTRVNGEWRLVPDPVQRERILEVYHRVVDNHEPLHLVAYDLNRRGVLSPKDYFAQLRGREPQGRKWSATALKRSMISKAMLGYATLSGKTVRDDDGAPLVRAEPILTREQLEALRAELVKTSRAEPAVSAPSLLLRVLFCAVCGEPAYKFVGGGRKHPRYRCRSMGFPEHCGNGTVVMAEWDAFCEEQMLDLLGDAERLEKVWVAGSDSAVELAEVNAELVDLTSLIGSPAYRAGSPQREALDARIAALAARQEELEGLEARPSGWEWRETGQRFGDWWREQDTAAKNTWLRSMNVRLTFDVRGGLTRTIDFGDLQEYEQHLRLGSVVERLHTGMS

SEQ ID NO: 9246 - protein, 500 aa, synthetic construct
MRALVVIRLSRVTDATTSPERQLESCQQLCAQRGWDVVGVAEDLDVSGAVDPFDRKRRPNLARWLAFEEQPFDVIVAYRVDRLTRSTRHLQQLVHWAEDHKKLVVSATEAHFDTTTPFAAVVIALMGTVAQMELEAIKERNRSAAHFNIRAGKYRGSLPPWGYLPARVDGEWRLVPDPVQRERILEVYHRVVDNHEPLHLVAHDLNRRGVLSPKDYFAQLQGREPQGRKWSATALKRSMTSEVMLGYATLNGKTVRDDDGAPLVRAEPILTREQLEALRAELAKTSRAKPAVSTPSLLLRVLFCAVCGEPAYKLAGGGRKHPRYRCRSMGFPKHCGNGTVAMAEWDAFCEEQVLGLLGDAERLEKVWVAGSDSAVELAEVYAELVDLTSLIGSPAYRAGSPQREALDTRIAALAARQGELEGLEARPPGWEWRGTGQRFGDWWREQDTAAKNTWLRSMNVRLTFDVRGGLTRTIDFGDLQEYEQLLRLGSVVERLHTGMS

SEQ ID NO: 9247 - protein, 500 aa, synthetic construct
MRALVVIRLSRVTDATTSPERQLESCQQLCAQRGWDVVGVAEDLDVSGAVDPFDRKRRPNLARWLAFEEQPFDAIVAYRVDRLTRSVRHLQQLVHWAEDHKKLVVSATEAHFDTTTPFAAVVIALMGTVAQMELEAIKERNRSAAHFNIRAGKYRGSLPPWGYLPARVDGEWRLVPDPVQRERILEVYHRVADNHEPLHLVAHDLNRRGVLSPKDYFAQLQGREPQGRKWSATALKRSMISEAMLGYATLNGKTVRGDDGAPLVRAEPILTREQLEALRAELVKTSRTKPAVSTPSLLLRVLFCAVCGEPAYKFAGGGRKHPRYRCRSMGFPKHCGNGTVAMAEWDAFCEEQVLNLLGDAERLEKVWVAGSDSAVELAEVNAELVDLTSLIGSPAYRAGSPQREALGARIAALAARQEELEGLGARPPGWEWRGTGRCFGDWWREQDTAAKNTWLRSVNVRLTFDARGGLTRTIDFGDLQEYEQHLRLGSVVERLHTGMS

SEQ ID NO: 9248 - protein, 500 aa, synthetic construct
MRALVVIRLSRVTDATTSPERQLESCQQLCAQRGWDVVGVAEDLDVSGAVDPFDRKRRPNLARWLAFEEQPFDVIVAYRVDRLTRSVRHLQQLVRWAEDHKKLVVSATEAHFDTTTPFAAVVIALMGTVAQMELEAIKERIRSAVHFNIRAGKYRGSLPPWGYLPTRVDGEWRLAPDPVQRERILEVYHRVVDNHEPLHLVAHDLNRRGVLSPKDYFAQLRGREPQGRKWSATALKRSMISVAMLGYATLNGKTVRDDDGAPLVRAEPILTREQQEALRAELAKTSRAKPAVSTPSLLLRVLFCAVCGEPAYKFVGGGRKHPRYRCRSMGFPEHCGNGTVVMAEWDAFCEEQVLDLLGDAERLEKVWVAGSDSAVELAEVNAELVDLTSLIGSPAYRAGSPQREALDARIAALAARQEELEGLEARPSGWEWRGTGQRLGDWWREQNTAAKNTWLRSMNVRLTFDVRGGLTRTIDFGDLREYERHLRLGSVVERLHTRMS

SEQ ID NO: 9249 - protein, 500 aa, synthetic construct
MRALVVIRLSRVTDATTSPERQLESCQQLCAQRGWDVVGVAEDLDVSGAVDPFDRKRRPNLARWLAFEEQPFDVIVAYRVDRLTRSTRHLQQLVHWAEDHKKLVVSATEAHFDTTTPFAAVVIALMGTVAQMELEAIKERNRSAAHFNIRAGKYRGSLPPWGYLPTRVDGEWRLVPDPVQRERILEVYHRVVDNHEPLHWVAHDLNRRGVLSPKDYFAQLQGREPQGRKWSATALKRSMISEAMLGYATLNGKTVRDDDGAPLVRAEPILTREQLEALRAELVKTSRVKPAVSTPSLLLRVLFCAVCGEPAYKFAGGGRKHPRYRCRSMGFPKHCGNGTVAMAEWDAFCEEQVLYLLGDAERLEKVWVAGSDSAVELAEVNAELVDLTSLIGSPAYRASSPQREALDARIAALAARQEELEGLGARPSGWEWRETGQRFGDWWREQDTAAKNTWLRSMNVRLTFDVRGGLTRTIDFGDLQEYEQHLRLGSVVERLHTGMS

SEQ ID NO: 9250 - protein, 500 aa, synthetic construct
MRALVVIRLSRVTDATTSPERQLESCQQLCAQRGWDVVGIAEDLDVSGAVDPFDRKRRPNLARWLAFEEQPFDVIVAYRVDRLTRSTRHLQQLVHWAEDHKKLVVSATEAHFDTTTPFAAVVIALMGTVAQMELEAIKERNRSAAHFNIRAGKYRGSLPPWGYLPTRVDGEWRLAPDPAQRERILEVYHRVVDNHEPLHLVAHDLNRRGVLSPKDCFAQLQGREPQGRKWSATALKRSMISEAMLGYATLNGKTVRDDDGAPLVRAEPILTREQLEALRAELVKTSRAKPAVSTPSLLLRVLFCAVCGEPAYKFAGGGRKHPRYRCRSMGFPKHCGNGTVVMAEWDAFCEEQVLDLLGDAERLEKVWVAGSNSSVELAEVNAELVDLTSLIGSPAYRAGSPQREALDARIAALAARQEELEGLEARPSGWEWRGTGQRFGDWWREQDTAAKNTWLRSMNVRLTFDVRGGLTRAIDFGDLQEYEQHLRLGSVVERLHTGTS

SEQ ID NO: 9251 - protein, 500 aa, synthetic construct
MRALVVIRLSRVTDATTSPERQLESCQQLCAQRGWDVVGAAEDLDVSGAVDPFDRKRRPNLARWLAFEEQPFDVIVAYRVDRLTRSVRHLQQLVHWAEDHKKLVVSATEAHFDTTTPFAAVVIALMGTVAQMELEAIKERIRSAVRFNIRAGKYRGSLPPWGYLPTRVDGEWRLVPDPVQRERILEVYHRVVDNHEPLHLVAHDLNRRGVLSPKDYFAQLRGREPQGRKWSATALKRSMTSVAMLGYATLNGEIVRDDDGAPLVRAEPILTREQQEALRAELAKTSRAKPAVSTPSLLLRVLFCAVCGEPAYKFAGGGRKHPRYRCRSMGFPKHCGNGTVVMAEWDAFCEEQVLNLLGDAERLEKVWVVGSDSSVELAEVNAELVDLTSLIGSPAYRAGSPQREALDARIAALAARQEELVGLEARPSGWEWRETGQRFGDWWREQDTAAKNTWLRSMNVRLTFDVRGGLTRRIDFGDLQEYEQHLRLGSVAERLHTGMS

SEQ ID NO: 9252 - protein, 500 aa, synthetic construct
MRALVVIRLSRVTDATTSPVRQLESCQQLCAQRGWDVVGVAEDLDVSGAVDPFDRKRRPNLARWLAFEVQPFDAIVAYRVDRLTRSVRHLQQLVHWAEDHKKLVVSATEAHFDTTTPFAAVVIALMGTVAQMELEAIKERIRSATHFNIRAGKYRGSLPPWGYLPTRVDGEWRLVPDPVQRERILEVYHRVVDNHEPLHLVAYDLNRRGVLSPKDYFAQLQGREPRGRKWSATALKRSMTSVAMLGYATLSGEIVRDDDGAPLVRAEPILTREQQEALRAELAKTSRAKPAVSTPSLLLRVLFCAVCGEPAYKFVGGGRKHPRYRCRSMGFPEHCGNGTVVMAEWDAFCEEQVLNLLGDAERLEKVWVAGSDSAVELAEVNAELVDLTSLIGSPAYRAGSPQREALDARIAALAARQEELEGLEARPSGWEWRETGQRFGDWWREQDTAAKNTWLRSMNVRLTFDVRGGLTRTIDFGDLQEYERHLRLGSVVGRLHTGMS

SEQ ID NO: 9253 - protein, 500 aa, synthetic construct
MRALVVIRLSRVTEATTSPERQLESCQQLCAQRGWDVVGVAEDLDVSGAVDPFDRKRRPNLARWLAFEEQPFDVIVAYRVDRLTRSTRHLQQLVHWAEDHKKLVVSATEAHFDTTTPFAAVVIALMGTVAQMELEAIKERIRSAAHFNIRAGKYRGSLPPWGYLPTRVDGEWRLVPDPVQRERILEVYRRVVDNHEPLHLVAHDLNRRGVLSPKDYFAQLRGREPQGRKWSATALRRSMTSVAMLGYATLNGKIVRDDDGAPLVRAEPILTREQQEALRAELAKTSRAKPAVSTPSLLLRVLFCAVCGEPAYKFVGGGRKHPRYRCRSMVFPKHCGNGTVVMAEWDAFCEEQVLGLLGDAERLEKVWVAGSDSAVELAEVNAELVDLTSLIGSPAYRAGSPQREALDARIAALATRQEELEGLEARLSGWEWRGTGQRLGDWWREQDTAAKNTWLRSMNIRLTFDVRGGLTRTIDFGDLQEYEQHLRLGSVVERLHTGMS

SEQ ID NO: 9254 - protein, 500 aa, synthetic construct
MRALVVIRLSRVTDATTSPERQLESCQQLCAQRGWDVVGVAEDLDVSGAVDPFDRKRRPNLARWLAFEEQPFDVIVAYRVDRLTRSTRHLQQLVHWAEDHKKLVVSATEAHFDTTTPFAAVVIALMGTVAQMELEAIKERNRSAAHFNIRAGKYRGSLPPWGYLPTRVDGEWRLVPDPVQRERILEVYHRVVDNHEPLHWVAHDLNRRGVLSPKDYFAQLQGREPQGRKWSATALKRSMISEAMLGYATLNGKTVRDDDGAPLVRAEPILTREQLEALRAELVKTSRAKPAVSAPSLLLRVLFCAVCGEPAYKFAGGGRKHPRYRCRSMGFPKHCGNGTVVMAEWDAFCEEQVLDLLGDAERQEKVWVAGSDSAAELAEVNAELVDLTSLIGSPAYRAGSPQREALDARIAALAARQEELEGLEARPSGWEWRETGQRFGDWWREQDTAAKNTWLRSMNVRLTFDVRGGLTRTIDFGVLQEYEQHLRLGSAVERLHTGMS

SEQ ID NO: 9255 - protein, 500 aa, synthetic construct
MRALVVIRLSRVTDATTSPERQLESCQQLCAQRGWDVVGVAEDLDVSGAVNPFDRKRRPNLARWLAFEEQPFDVIVAYRVDRLTRSTRHLQQLVHWAEDHKKLVVSATEAHFDTTTPFAAVVIALMGTVAQMELEAIKERNRSAAHFNIRAGKYRGSLPPWGYLPTRVDGEWRLAPDPVQRERILEVYHRVVDNHEPLHSVAHDLNRRGVLSPKDYFAQLRGREPQGREWSATALKRSMISEAMLGYATLDGKIVRDDDGAPLVRAEPILTREQLEALRAELVKTSRAKPAVSTPSLLLRVLFCAVCGEPAYKFAGGGRKHPRYRCRSMGFPKHCGNGTVVMAEWDTFCEEQVLDLLGDAERLEKVWVAGSDSAVELAEVNAELVDLTSLIGSPAYRAGSPQREALDARIVALAARQEELEGLEARPPGWEWRETGQRFGDWWREQDTAAKNTWLRSMNVRLTFDVRGGLTRTIDFGDLQEYEQHLRLGSVVERLHTGMS

SEQ ID NO: 9256 - protein, 500 aa, synthetic construct
MRALVVIRLSRVTDATTSPERQLESCQQLCAQRGWDVVGVAEDLDVSGAVDPFDRKRRPNLARWLAFEEQPFDVIVAYRVDRLARSTRHLQQLVHWAEDHKKLVVSATEAHFDTTTPFAAVVIALMGTVAQMELEAIKERNRSAAHFNIRAGKYRGSLPPWGYLPTRVDGEWRLVPDPVQRERILEVYHRVVDNHEPLHLVAHDLNRRGVLSPKDYFAQLQGREPQGRKWSATALKRSMISEAMLGYATLNGKTVRDDDGAPLVRAEPILTREQLEALRAELVKTSRAKPAVSTPSLLLRVLFCAVCGEPAYKFAGGGRKHPRYRCRSMGFPKHCGNGTVAMTEWDAFCEEQVLDLLGNTERLEKVWVAGSDSAAELAEVNAELVDLTSLIGSPAYRAGSPQREALDARIAALAARQEELEGLEARPSGWEWRETGQRFGDWWREQDTAAKNTWLRSMNVRLTFDVRGRLTRTIDFGDLREYEQHLRLGSVVERLHTGMS

SEQ ID NO: 9257 - protein, 500 aa, synthetic construct
MRALVVIRLSRVTDATTSPERQLESCQQLCAQRGWDVAGVAEDLDVSGAVDPFDRKRRPNLARWLAFEEQPFDVIVAYRVDRLTRSTRHLQQLVHWAEDHKKLIVSATEAHFDTTTPFAAVVIALMGTVAQMELEAIKERIRSAVRFNIRAGKYRGSLPPWGYLPARVDGVWRLVPDPVQRERILEVYHRVVDNHEPLHLVAYDLNRRGVLSPKDYFAQLRGREPRGRKWSATALKRSMTSVAMLGYATLNGRIVRDDDGAPLVRAEPILTREQQEALRAELAKTSRAKPAVSTPSLLLRVLFCAVCGEPAYKFVGGGRKHPRYRCRSMGFPKHCGNGTVVMAEWDAFCEKQVLNLLGDAERLEKVWSAGSDSAVELAEVNAELVDLTSLIGSPAYRAGSPQREALDARIAALAARQEELEGLEARPSGWGWRETGQRFRDWWREQDTAAKNTWLRSMNVRLTFDVRGGPTRTIDFGDLQEYEQHLRLGSVTERLRTGMS

SEQ ID NO: 9258 - protein, 500 aa, synthetic construct
MRALVVIRLSRVTDATTSPERQLASCQQLCAQRGWDVVGVAEDLDVSGAVDPFDRKRRPNLARWLAFEEQPFDVMVAYRVDRLTRSIRHLQQLVHWAEDHKKLVVSATEAHFDMTTPFAAVVIALMGTVAQMELEAIKERIRSATHFNIRAGKYRGSLPPWGYLPTRVDGEWRLVPDPVQRERILEVYHRVVDNHEPLHLVAHDLNRRGVLSPKDYFAQLRGREPQGRKWSATALKRSMTSVAMLGYATLNGKTVRDDDGAPLVRAEPILTREQLEALRAELAKASRAKPAVSTPSLLLRVLFCAVCGEPAYKFVGGGRKHPRYRCRSMGFPEHCGNGTVVMAEWDAFCEEQVLDLLGDAERLEKVWVAGSDSAVELAEVNAELVDLTSLIGSPAYRAGSPQREALDARIAALAARQEELEGLEARPSGWEWRGTGQRFGDWWREQDTAAKNTWLRSMSVRLTFDVRGGLTRTIDFGDLQEYEQHLRLGTVVERLHTGMS

SEQ ID NO: 9259 - protein, 500 aa, synthetic construct
MRALVVIRLSRVTDATTSPERQLESCQQLCAQRGWDVVGVAEDLDVSGAVDPFDRKRRPNLARWLAFEERPFDAIVAYRVDRLTRSTRHLQQLVHWAEDHKKLVVSATEAHFDTTTPFAAVVIALMGTVAQMELEAIKERNRSAAHFNIRAGKYRGSLPPWGYLPTRVDGEWRLVPDPVQRERILEVYRRVVDDHEPLHLVAHDLNRRGVLSPKDYFAQLQGREPQGRKWSATALKRSMTSEAMLGYATLNGKTVRGDDGAPLVRAEPILTREQLEALRAELVKTSRAKPAVSTPSLLLRVLFCAVCGEPTYKFAGGGRKHPRYRCRSMGFPKHCGNGTVVMAEWDAFCEEQVLNLLGDAERLEKVWVAGSDSAVELAEVNAELVDLTGLIGSPAYRAGSPQREALDARIAALAARQEELEGLKARPSGWEWRETGQRFGDWWREQDTAAKNTWLRSMNVRLTFDVRGGLTRTIDFGDLQEYEQHLRLDSVVERLHTGMS

SEQ ID NO: 9260 - protein, 500 aa, synthetic construct
MRALVVIRLSRVTDATTSPERQLESCQQLCAQRGWDVVGVAEDLDVSGAVDPFDRKRRPNLARWLAFEEQPFDVIVAYRVDRLTRSTRHLQQLVHWAEDHKKLVVSATEAHFDTTTPFAAVVIALMGTVAQMELEAIRERNRSAAHFNIRAGRYRGSLPPWGYLPTRVDGEWRLVPDPVQRERILEVYHRVVDNHEPLHLVAHDLNRRGVLSPKDYFAQLQGREPRGRKWSATALKRSMISEAMLGYATLSGRTVRDDDGAPLVRAEPILTRAQLEALRAELVKTSRTKPAVSTPSLLLRVLFCAVCGEPAYKFAGGGRKRPRYRCRSMGFPKHCGNGTVAIAEWDAFCEEQVLGLLGDAERLEKVWVAGSDSAVELAEVNAELVDLTSLIGSPAYRAGSPQREALDARIAALAARQEELEGLEARPSGWEWRGTGQRFGDWWREQDTAAKNTWLRSMNVRLTFDVRGGLTRTIDFGDLQEYEQQLRLGSVAERLHTGMS

SEQ ID NO: 9261 - protein, 500 aa, synthetic construct
MRALVVIRLSRVTDATTSPERQLESCQQLCAQRGWVVVGVAEDLNVSGAVDPFDRKRRPNLARWLAFEEQPFDAIVAYRVDRLTRSIRHLQQLVRWAEDHKKLVVSATEAHFDTTTPFAAVVIALMGTVAQMELEAIKERIRSAVHFNIRAGKYRGSLPPWGYLPTRVDGEWRLAPDPVQRERILEVYHRVVDNHEPLHLVAYDLNRRGVLSPKDYFAQLQGREPQGREWSATALKRSMTSEAMLGYATLNGKIVRDDDGAPLVRAEPILTREQQEALRAELAKTSRAKPAVSTPSLLLRVLFCAVCGEPAYKFVGGGRKHPRYRCRSMGFPEHCGNGTVVMAEWDAFCEEQVLDLLGDAERLEKVWVAGSDSAVELAEVNAELVDLTSLIGSPAYRAGSPQREALDARIAALAARQEELEGLEARPSGWEWHETGQRFRDWWREQDTAAKNTWLRSMNVRLTFDVRGGLARTIDFGDLQEYEQHLRLGSVVECPHTGMS

SEQ ID NO: 9262 - protein, 500 aa, synthetic construct
MRALVVIRLSRVTDATTSPERQLESCQQLCAQRGWDVVGVAEDLDVSGAVDPFDRKRRPNLARWLAFEEQPFDVIVAYRVDRLTRSTRHLQQLVHWAEDHKKLVVSATEAHFDTTTPFAAVVIALMGTVAQMELEAIKERIRSAVHFNIRAGKYRGSLPPWGYLPTRVDGEWRLVPDPVQRERILEVYHRVVDNHEPLHSVAHDLNRRGVLSPKDYFAQLQGREPQGRKWSATALKRSMISVAMLGYAILNGKTVRDDDGAPLVRAEPILTREQLEALRAELVKTSRAKPAVSTPSLLLRVLFCAVCGEPAYKLAGGGRKHPRYRCRSMGFPEHCGNGTVVMAEWDAFCEEQVLDLLGDAERLEKVWLAGSDSAVELAEVNAELVDLTSLIGSPAYRAGSPQREALDARIAALAARQEELEGLEARPSGWEWRGTGQRFGDWWREQDTAAKNTWLRSMNVRLTFDVRGGLTRTIDFGDLQEYERHLRLGSVVERLHTGTS

SEQ ID NO: 9263 - protein, 500 aa, synthetic construct
MRALVVIRLSRVTDATTSPERQLESCQQLCAQRGWDVVGVAEDLDVSGAVDPFDRKRRPNLARWLAFEEQPFDAIVAYRVDRLTRSVRHLQQLVHWAEDHKKLVVSATEAHFDTTTPFAAVVIALMGTVAQMELEAIKERNRSAAHFNIRAGKYRGSLPPWGYLPTRVDGEWRLVPDPVQRERILEVYHRVVVNHEPLHLVAHDLNRRGVLSPKDYFAQLQGREPQGRKWSATALKRSMISEAMLGYATLNGKTVRDDDGAPLVRAEPILTREQLEALRAELVKTSRAKPAVSTPSLLLRVLFCAVCGEPAYKFAGGGRKHPRYRCRSMGFPRHCGNGTVAMVEWDTFCEEQVLDLLGDTERLEKVWVAGSDSAVELAEVNAELVDLTSLIGSPAYRAGSPQREALDARIAALAARQEELEGLEARPSGWEWRGTGQRFGDWWREQDTAAKNTWLRSMNVRLTFDVRGGLTRTIDFGDLQEYEQHLRLGSVVERLHTGMS

SEQ ID NO: 9264 - protein, 500 aa, synthetic construct
MRALVVIRLSRVTDATTSPERQLESCLQLCAQRGWDVVGVAEDLDVSGAVDPFDRKRRPNLARWLTSEEQPFDVIVAYRVDRLTRSTRYLQQLVHWAEDHKKLVVSATEAHFDTTTPFAAVVIALMGTVAQMELEAIKKRNRSAAHFNIRAGKYRGSLPPWGYLPTRVDGEWRLVPDPVQRERILEVYHRVVDNHEPLHWVAHDLNRRGVLSPKDYFAQLQGREPQGRKWSATALKRSMISEAMLGYATLNGKTVRDDDGAPLVRAEPILTREQLEALRAELVKTSRAKPAVSTPSLLLRVLFCAVCGEPAYKFAGGGRKHPRYRCRSMGFPKHCGNGTVAMAEWDAFCEEQVLDLLGDSERLEKVWVAGSDSAVELAEVNAELVDLTSLIGSPAYRAGSPQREALDARIAALAARQEELEGLEARPSGWEWRETGQRFGDWWREQDTAAKNTWLRSMNVRLTFDVRGGLTRTIDFGELQEYEQHLRLGSAVERLHTGMS

SEQ ID NO: 9265 - protein, 500 aa, synthetic construct
MRALVVIRLSRVTDATTSPERQLESCQQLCAQRGWDVVGVAEDLDVSGAVDPFDRKRRPNLARWLAFEEQPFDVIVAYRVDRLTRSVRHLQQLVRWAEDHKKLVVSATEAHFDTTTPFAAVVIALMGTVAQMELEAIKERIRSATHFNIRAGKYRGSLPPWGYLPTRVDGEWRLVPDPVQRERILEVYHRVVDNHEPLHLVAHDLNRRGVLSPKDYFAQLRGREPQGRKWSATALRRSMTSVAMLGYATLNGKIVRDDNGAPLVRAEPILTREQLEAVRAELVKTSRAKPAVSTPSLLLRVLFCAVCGEPAYKFVGGGRKHPRYRCRSMGFPKHCGNGTVVMAEWDAFCEEQVLDLLGDAERLEKVWVAGSDSVVELAEVNAELVDLTSLIGSPAYRAGSPQREALDARIAALAARQEELEGLEARPSGWEWRETGQRFGDWWREQNTAAKNTWLRSMNVRLTFDVRGGLTRTIDFGELQEYEQHLRSGSVAERLHTGIS

SEQ ID NO: 9266 - protein, 500 aa, synthetic construct
MRALVVIRLSRVTDATTSPERQLESCQQLCAQRGWDVVGVAEDLDVSGAVDPFDRKRRPNLARWLAFGEQPFDVIVAYRVDRLTRSVRHLQQLVHWAEDHKKLVVSATEAHFDTTTPFAAVVIALMGTVAQMELEAIKERNRSAAHFNIRAGKYRGSLPPWGYLPTRVDGEWRLVPDPVQRERILEVYHRVVDNHEPLHLVAHDLNRRGVLSPKDYFAQLRGREPQGRKWSATALKRSMISEAMLGYATLNGKTVRDDDGAPLVRAEPILTREQLEALRAELAKTSRAKPAVSTPSLLLRVLFCAVCGEPAYKFAGGGRKHPRYRCRSMGFPKHCGNGTVVMAEWDAFCEEQVLDLLGDAERLEKVWVAGSDSAVELAEVNAELVDLTSLIGSPAYRAGSPQREALDARIAALAARREELEGLEARPSGWEWRETGQRFGDWWREQDTAAKNTWLRSMNVRLTFDARGGLTRTIDFGDPQEYEQQLRLGSVVERLHTGMS

SEQ ID NO: 9267 - protein, 500 aa, synthetic construct
MRALVVIRLSRVTDATTSPERQLESCQQLCAQRGWDVVGVAEDLDVSGAVDPFDRKRRPNLARWLAFEEQPFDVIVAYRVDRLTRSTRHLQQLVHWAEDHKKLVVSATEAHFDTTTPFAAVVIALMGTVAQMELEAIKERNRSAAHFNIRAGKYRGSLPPWGYLPARVDGEWRLVPDPVQRERILEVYHRVVDNHESLHLVAHDLNRRGVLSPKDYFAQLRGREPQGREWSATALKRSMTSEAMLGYATLNGKTVRDDDGAPLVRAEPILTRGQLEALRAELVKTSRAKPAVSAPSLLLRVLFCAVCGEPAYKFAGGGRKHPRYRCRSMGYPKHCGNGTVAMAEWDAFCEEQVLELLGDAERLEKVWVAGSDSAVELAEVNAELVDLTSLIGSPDYRAGSPQREALDARIAALAARQEELEGLEARPSGWEWRETGQRFGDWWREQDTAAKNTWLRSMNVRLTFDVRGGLTRTIDFGDLQEYEQHLRLGSVVERLHTGMS

SEQ ID NO: 9268 - protein, 500 aa, synthetic construct
MRALVVIRLSRVTDATTSPKRQLESCQQLCAQRGWDVVGVAEDLDVSGAVDPFDRKRRPSLARWLAFEEQPFDVIVAYRVDRLTRSTRHLQQLVRWAEDHKKLVVSATEAHFDTTTPFAAVVIALMGTVAQMELEAIKERIRSAVHFNIRAGKYRGSLPPWGYLPTRVDGEWRLAPDPVQRERILEVYHRVVDNHEPLHLVAHDLNRRGVLSPKDHFAQLQGREPQGRKWSATALKRSMTSVAMLGYATLNGETVRDDDGAPLVRAEPILTREQLEALRAELVKTSRAKPAVSTPSLLLRVLFCAVCGEPAYKFVGGGRKHPRYRCRSMGFPKHCGNGTVVMAEWDAFCEEQVLNLLGDAERLEKVWVAGSDSAAELAEVNAELVDLASLIGSPAYRAGSPQREALDARIAALAARQEELEGLEARPSGWGWRETGQRFGDWWREQDTAAKNTWLRSMNVRLTFDARGGLTRTIDYGDLQEYEQHLRSGSVVERLHTGMP

SEQ ID NO: 9269 - protein, 500 aa, synthetic construct
MRALVVIRLSRVTDATTSPERQLESCQQLCAQRGWDVVGVAEDLDVSGAVDPFDRKRRPNLARWLAFEERPFDVIVAYRVDRLTRSVRHLQQLVHWAEDHKKLVVSATEAHFDTTTPFAAVVIALMGTVAQMELEAIKERNRSAAHFNIRAGKYRGSLPPWGYLPTRVDGEWRLVPDPVQRERILEVYRRVVDNHEPLHLVAHDLNRRGVLSPKDYFAQLQGREPQGRKWSATALKRSMISKAMLGYATLNGKIVRDDDGAPLVRAEPILTREQLEALRAELVKTSRAKPAVSTPSLLLRVLFCAVCGEPAYKFAGGGRKHPRYRCRSMGFPKHCGNGTVVMAEWDAFCEEQVLDLLGDAERLEKVWVAGSDSAVELAEVNAELVDLTSLIGSPAYRAGSPQRGALDARIAALTARQEELEGLEARPSGWEWRGTGQRFGDWWHEQDTAAKNAWLRSMNVRLTFDVRGGLTRTIDFGDLQEYEQHLRLGSVVGRLHTGMS

SEQ ID NO: 9270 - protein, 500 aa, synthetic construct
MRALVVIRLSRVTDATTSPERQLESCQQLCAQRGWDVVGVAEDLDVSGAVDPFDRKRRPNLARWLAFEEQPFEVIVAYRVDRLTRSVRHLQQLVHWAEDHKKLVVSATEAHFDTTTPFAAVVIALMGTVAQMELEAIKERNRSAAHFNIRAGKYRGSLPPWGYLPMRVDGEWRLVPDPVQRERILEVYHRVVDNHEPLHLVAHDLNRRGVLSPKDYFAQLQGREPQGRKWSATALKRSMISEAMLGYATLNGKIVRDDDGAPLVRAEPILTREQLEALRAELVKTSRAKPAVSTPSLLLRVLFCAVCGEPAYKFAGGGRKHPRYRCRSMGFPKHCGNGTVVMAEWDAFCEEQVLDLLGDAERLEKVWVAGSDFAVELAEVNAELVDLTSLIGSPAYRAGSPQREALDARIAALAARQEELEGLEARPSGWEWRETGQRFGDWWREQDTAAKNTWLRSMNVRLTFDVRGGLTRTIDFGDLQEYEQHLRLGGVVGRLHTGMP

SEQ ID NO: 9271 - protein, 500 aa, synthetic construct
MRALVVIRLSRVTDATTSPERQLESCQQLCAQRGWDVVGVAEDLDVSGAVDPFDRKRRPNLARWLAFEEQPFDVIVAYRVDRLTRSTRHLQQLVLWAEDHRKLVVSATEAHFDTTTPFAAVVIALMGTVAQMELEAIKERIRSAVHFNIRAGKYRGSLPPWGYLPTRVDGEWRLVPDPVQRERILEVYHRVVDNHEPLHLVAHDLNRRGVLSPKDYFAQLRGREPQGRRWSATALKRSMTSEAMLGYATLNGKTVRDDDGAPLVRAEPILTREQQEALRAELAKTSRAKPAVSTPSLLLRVLFCAVCGEPAYKFVGGGRKHPRYRCRSMGSPEHCGNGTVVMAEWDAFCEEQVLGLLGDAERLEKVWVVGSDSAVELAEVNAELVDLTSLIGSPAYRAGSPQREALDARIAALAARQEKLEGLEARPSGWEWRGTGQRFGDWWREQDTAAKNTWLRSMNVRLTFDVRGGLTRTIDFGDLREYEQHLRLGSMVERLHTGVS

SEQ ID NO: 9272 - protein, 500 aa, synthetic construct
MRALVVIRLSRVTDATTSPERQLESCQQLCAQRGWDVVGVAEDLDVSGAVDPFDRKRRPNLARWLAFEEQPFDVIVAYRVDRLTRSTRHLQQLVHWAEDHKKLVVSATEAHFDTTTPFAAVVIALMGTVAQMELEAIKERNRSAAHFNIRAGKYRGSLPPWGYLPTRVDGEWRLVPDPVQRERILEVYHRVVDNHESLHLVAHDLNRRGVLSPKDYFAQLQGREPQGRKWSATALKRSMISEAMLGYATLNGKTVRNDDGAPLVRAEPILTRGQLEALRAELVKTSRAKPAVSTPSLLLRVLFCAVCGEPAYKFAGGGRKHPRYRCRSMGFPKHCGNGTAVMAEWDAFCEEQVLGLLGDAECLERVWVAGSDSAVELAEVNAELVDLTSLIGSPAYRAGSPQREALDARIAALAARQEELEGLESRPSGWEWRETGQRFGDWWREQDTAAKNTWLRSMNVRLTFDVRGGLTRTIDFGDLQEYEQYLRLGSVVKRLHTGMS

SEQ ID NO: 9273 - protein, 500 aa, synthetic construct
MRALVVIRLSRVTDATTSPERQLESCQQLCAQRGWDVVGVAEDLDVSGAVDPFDRKRRPNLARWLAFEEQPFDVIVAYRVDRLARSTRHLQQLVHWAEDHKKLVVSATEAHFDTTTPFAAVVIALMGTVAQMELEAIKERNRSAAHFNIRAGKYRGSLPPWGYLPTRVDGEWRLVPDPVQRERILEVYHRVVVNHEPLHLVAHDLNRRGVLSPKDYFAQLQGREPQGRKWSATALKRSMISEAMLGYATLNGKTVRDDDGAPLVRAEPVLTRGQLEALRAELAKTSRAKPAVSTPSLLLRVLFCAVCGEPAYKFAGGGRKHPRYRCRSMGFPKHCGNGTVVMAEWDAFCEEQVLNLLGDAERLEKVWVAGSDSAVELAEVNAELVDLTSLIGSPAYRAGSPQREALDARIAALAARQEELEGLEARPSGWEWRGTGQRFGDWWREQDTTAKNTWLRSMNVRLTFDVRGGLTRTVDFGGLQEYEQHLRLGGVVERLHTGMS

SEQ ID NO: 9274 - protein, 500 aa, synthetic construct
MRALVVIRLSRVTDATTSPERQLGSCQQLCAQRGWDVVGVAEDLDVSGAVDPFDRKRRPNLARWLAFEEQPFDVIVAYRVDRLARSTRHLQQLVHWAEDHKKLVVSATEAHFDTTTPFAAVVIALMGTVAQMELEAIKERNRSAAHFNIRAGKYRGSLPPWGYLPTRVDGEWRLVPDPVQRERILEVYHRVVDNHEPLHLVAHDLNRRGVLSPKDYFAQLRGREPQGRKWSATALKRSMISEAMLGYATLNGKTVRDDDGAPLVRAEPILTREQLEALRAELVKTSRAKPAVSTPSLLLRVLFCAVCGEPAYKFAGGGRKHPRYRCRSMGFPKHCGNGTVVMAEWDAFCEEQVLDLLGDAERLEKVWIAGSDSAVELAEVSAELVDLTSLIGSPAYRAGSPQREALDARIAALAARQEELKGLGARPSGWEWRGTGQRFGDWWREQDTAAKNTWLRSMNVRLTFDVRGGLARTIDFGDLQEYEQHLRLGSVVERLHTGMS

SEQ ID NO: 9275 - protein, 500 aa, synthetic construct
MRALVVIRLSRVTDATTSSERQLESCQQLCAQRGWDVVGVAEDLDVSGAVDPFDRKRRPNLARWLAFEEQPFDVIVAYRVDRLTRSVRHLQHLVHWAEDHKKLVVSATEAHFDTTTPFAAVVIALMGTVAQMELEAIRERNRSAAHFNIRAGKYRGSLPPWGYLPARVDGEWRLVPDPVQRERILEVYHRVVDNHEPLHLVAHDLNRRGVLSPKDYFAQLQGREPQGRKWSATALRRSMISGAMLGYATLNGKTVRDDDGAPLVRAEPILTREQLEALRAELVKTSRAKPAVSAPSLLLRVLFCAVCGEPAYKFAGGGRKHPRYRCRSMGFPKHCGNGTVAMAEWDAFCEEQVLNLLGDVERLEKVWVAGSDSAVELAEVNAELVDLTSLIGSQAYRAGSPQREALDARIAALAARQEELEGLEARPSGWEWRGTGQRFRDWWCEQDTAAKNTWLRSVNVRLTFDVRGGLTRTIDFGNLHEYEQHLRLGSVVERLHPGMS

SEQ ID NO: 9276 - protein, 500 aa, synthetic construct
MRALVVIRLSRVTDATTSPERQLESCQQLCAQRGWDVVGVAEDLDVSGAVDPFDRKRRPNLARWLAFEEQPFDVIVAYRVDRLTRSVRHLQRLVRWAEDHKKLVVSATEAHFDTTTPFAAVVIALMGTVAQMELEAIKERIRSAAHFNIRAGKYRGSLPPWGYLPTRVDGEWRLVPDPVQRERILEVYHRVVDNHEPLHLVAHDLNRRGVLSPKDYFAQLRGREPRGRKWSATALKRSMTSVAMLGYATLNGRTVRGDDGAPLVRAEPILTREQQEALRAELAKTSRAKPAVSTPSLLLRVLFCAVCGEPAYKFVGGGRKHPRYRCRSMGFPEHCGNGTVVMAEWDAFCEEQVLNLFGDAERLEKVWVAGSDSAVELAEVNAELVDLTSLIGYTAYRAGSPQREALDARIAALAARQEELGGLEARPSGWEWRGTGQRFGDWWREQDTAAKNTWLRSMNVRLTFDVRGGLTRTIDFGDLQEYEQHLRLGSVAERLHTGMS

SEQ ID NO: 9277 - protein, 500 aa, synthetic construct
MRALVVIRLSRVTDATTSPERQLESCQQLCAQRGWDIVGVAEDLDVSGAVDPFDRKRRPNLARWLAFEEQPFDVIVAYRVDRLTRSTRHLQQLVHWAEDHKKLVVSATEAHFDTTTPFAAVVIALMGTVAQMELEAIKERNRSAAHFNIRAGKYRGSLPPWGYLPTRVDGEWRLVPDPVQRERILEVYHRVVDNHEPLHLVAHDLNRRGVLSPKDYFAQLQGREPQGRKWSATALKRSMTSEAMLGYATLDGKTVRGDDGAPLVRAEPILTREQLEALRAELVKTSRAKPAVSTPSLLLRVLFCAVCGEPAYKFAGGGRKHPRYRCRSMGFPKHCGNGTVVMAEWDAFCEEQVLGLLGDAERLEKVWVAGSDSAVELAEVNAELVDLTSLIGSPAYRAGFPQREALDARIAALAARQEELEGLEARPSGWEWRGTGQRFGDWWREQDTAAKNTWLRSMNVRLTFDVRGVLTRTIDFGGLQEYEQHLRLGSVVERLHTGMS

SEQ ID NO: 9278 - protein, 500 aa, synthetic construct
MRALVVTRLSRVTDATTSPERQLESCRQLCAQRGWDVVGVAEDLDVSGAVDPFDRKRRPNLARWLAFEERPFDVIVAYRVDRLTRSTRHLQQLVHWAEDHKKLVVSATEAHFDTTTPFAAVVIALMGTVAQMELEAIKERIRSAAHFNIRAGKYRGSLPPWGYLPARVDGEWRLVPDPVQRERILEVYHRVVDNHEPLHLVAHDLNRRGVLSPKDYFAQLQGREPQGRKWSATALKRSMTSEAMLGYATLNGKTVRDDDGAPLVRAEPILTREQQEALRAELAKTSRAKPAVSTPSLLLRVLFCAVCGEPAYKFVGGGRKHPRYRCRSMGFPKHCGNGTVVMAEWDAFCEEQVLDLLGDAERLEKVWVAGSDSAVELAEVNAELVDLTSLIGSPAYRAGSPQREALDARIAALAARQEELESLEARPSGWEWRGTGQRFRDWWREQDTAAKNTWLRSMNVRLTFDVRGGLTRTIDFGDLQEYEQHLRLDSVVERLHTGMS

SEQ ID NO: 9279 - protein, 500 aa, synthetic construct
MRALVVIRLSRVTDATTSPERQLESCQQLCAQRGWDVVGVAEDLDVSGAVDPFDRKRRPNLARWLAFEEQPFDVIVAYRVDRLTRSTRHLQQLVHWAEDHKKLVVSATEAHFDTTTPFAAVVIALMGTVAQMELEAIKERNRSAAHFNIRAGKYRGSLPPWGYLPTRVDGEWRLVPDPVQRERILEVYRRVVDNHEPLHLVAHDLNRRGVLSPKDYFAQLQGREPQGRKWSATALKRSMISEAMLGYATLNGRTVRDDSGAPLVRAEPILTREQLEALRAELVKTSRAKPAVSTPSLLLRVLFCAVCGGPAYKFAGGGRKHPRYRCRSMGFPKHCGNGTVAMAEWDAFCEEQVLDLLGDAERLEKVWVAGSDFAVELAEVNAELVDLTSLVGSPVYRAGSPQREALDARIAALAARQEELEGLGARPSGWEWRETGQRFGDWWREQDTAAKNTWLRSMNVRLTFDVRGGLTRTIDFGDLQEYEQHLRLGSVVERLHTGMS

SEQ ID NO: 9280 - protein, 500 aa, synthetic construct
MRALVVIRLSRVTDATTSPERQLESCQQLCAQRGWDVVGVAEDLDVSGAVDPFDRKRRPNLARWLAFEEQPFDVIVAYRVDRLTRSVRHLQLLVHWAEDHKKLVVSATEAHFDTTTPFAAVVIALMGTVAQMELEAIKERNRSAAHFNIRAGKYRGSLPPWGYLPTRVDGEWRLAPDPVQRERILEVYHRVVDNHEPLHLVAHDLNRRGVLSPKDYFAQLQGREPQGRKWSATALKRSMISEAMLGYATLNGKTVRDDDGAPLVRAEPILTRAQLEALRAELVKTSRAKPAVSTPSLLLRVLFCAVCGEPAYKFAGGGRKHPRYRCRSMGFPKHCGNGTVAMAEWDAFCEEQVLDLLGDAERLEKAWVAGSDSAVELAEVNAELVDLTSLIGTPAYRAGSPQREAIDARIAALAARQEELEGLGARPSGWEWRGTGQRFGDWWREQDTAAKNTWLRSMNVRLTFDVRGGLTRTIDFGDLQEYEQHLRLGSVVERLHAGMS

SEQ ID NO: 9281 - protein, 500 aa, synthetic construct
MRALVVIRLSRVTDATTSPERQLESCQQLCAQRGWDVVGVAEDLDVSGAVDPFDRKRRPNLARWLAFEEQPFDVIVAYRVDRLTRSVRHLQQLVHWAEDHKKLVVSATEAHFDTTTPFAAVVIALMGTVAQMELEAIKERNRSAAHYNIRAGKYRGSLPPWGYLPTRVDGEWRLVPDPMQRERILEVYRRVVDNHEPLHLVAHDLNRRGVLSPKDYFAQLRGREPQGRKWSATALKRSMISEAMLGYATLNGKTVRDDDGAPLVRAEPILTRGQLEALRAELVKTSRAKPAVSTPSLLLRVLFCAVCGEPAYKFAGGGRKHPRYRCRSMGFPKHCGNGTVAMAEWDAFCEEQVLDLLGDAERLEKVWVAGSDSAVELAEVNAELVDLTGLIGSPAYRTGSPQREALDARIAALAARQEELEGLGARPPGWEWRETGQRFGDWWREQGTAAKNTWLRSMNVRLTFDVRGGLTRTIDFGDLQEYEQHLRLGSVIERLHTGMS

SEQ ID NO: 9282 - protein, 500 aa, synthetic construct
MRALVVIRLSRVTDATTSPERQLESCQQLCAQRGWDVVGVAEDLDVSGAVDPFDRKRRPNLARWLAFEEQPFDVIVAYRVDRLTRSVRHLQQLVHWAEDHKKLVVSATEAHFDTTTPFAAVVIALMGTVAQMELEAIRERNRSAAHFNIRAGKYRGSLPPWGYLPTRVDGEWRLVPDPVQRERILEVYHRVVDNHEPLHLVAHDLNRRGVLSPKDYFAQLQGREPQGRKWSATALKRSMISVAMLGYATLNGKTVRDDGGAPLVRAEPILTREQLEALRAELVKTSRAKPAVSTPSLLLRVLFCAVCGEPAYKFAGGGRKHPRYRCRSMGFPKHCGNGTVAMAEWDAFCEEQVLDLLGDAERLEKVWVAGSDTAVELAEVNAELVDLTSLIGSPAYRAGSPQREALDARIAALAARQEELEGLGARPSGWEWRETGQRFGDWWREQDTAAKNTWLRSMNVRLTFDVRGGLTRTIDFGDLQEYEQHLRLGSVVERLHTGMS

SEQ ID NO: 9283 - protein, 500 aa, synthetic construct
MRALVVIRLSRVTDATTSPERQLESCQQLCAQRGWDVVGVAEDLDVSGAVDPFDRKRRPNLARWLAFEEQPFDVIVAYRVDRLTRSVRHLQQLVRWAEDHKKLVVSATEAHFDTTTPFAAVVIALMGTVAQMELEAIKERIRSAAHFNIRAGKYRGSLPPWGYLPTRVDGEWRLAPDPVQRERILEVYHRVVDNHEPLHLVAHDLNRRGVLSPKDYFAQLRGREPQGREWSATALRRSMTSVAMLGYATLNGKIVRDVDGAPIVRAEPILTRGQQEALRAELARTSRAKPAVSTPSLLLRVLFCAVCGEPAYKFVGGGRKHPRYRCRSMGFPKHCGNGTVVMAEWDAFCEKQVLGLLGDAERLEKVWVAGSDSAVELAEVNAELVDLTSLIGSPAYRAGSPQREALDARIAALAARQEELEGLEARPSGWEWRETGQRFGDWWREQDTAAKNTWLRSMNVRLTFDVRGGLTRTIDFGELQEYERHSRLGSVAERLHTGMS

SEQ ID NO: 9284 - protein, 500 aa, synthetic construct
MRALVVIRLSRVTDATTSPERQLESCQQLCAQRGWDVVGVAEDLDVSGAVDPFDRKRRPNLARWLAFEEQPFDVIVAYRVDRLTRSTRHLQQLVHWAEDHKKLVVSATEAHFDTTTPFAAVVIALMGTVAQMELEAIKERIRSAVHFNIRAGKYRGSLPPWGYLPTRVDGEWRLAPDPVQRERILEVYRRVVDNHEPLHLVAHDLNRRGVLSPKDYFAQLQGREPRGRKWSATALRRSMTSEAMLGYATLNGKTVRDDDGAPLVRAEPILTREQQEALRVELVKTSRAKPAVSTPSLLLRVLFCAVCGEPAYKFVGGGRKHPRYRCRSMGFPKHCGNGTVTMAEWDAFCEEQVLDLLGDAERLEKVWVAGSDSAVELAEVNAELVDLTSLIGSPAYRAGSPQREALDARIAALAARQEELEGLEARPSGWEWRETGQRFGDWWREQDTAAKNTWLRSMNVRLTFDVRGGLTRTIDFGDLQEYEQHLRSGSVVERLHSRMP

SEQ ID NO: 9285 - protein, 500 aa, synthetic construct
MRALVVTRLSRVTDATTSPERQLESCQQLCAQRGWDVVGVAEDLDVSGAVDPFDRKRRPSLARWLAFEEQPFDVIVAYRVDRLTRSTRHLQQLVRWAEDHKKLVVSATEAHFDTTTPFAAVVIALMGTVAQMELEAIKERIRSAVHFNIRAGKYRGSLPPWGYLPTRVDGEWRLVPDPVQRERILEVYHRVVDNHEPLHLVAYDLNRRGVLSPKDYFAQLRGREPQGRKWSATALRRSMTSEAMLGHATLNGKIVRDDDGTPLVRAEPILTREQQEALRAELAKTSRAKPAVSTPSLLLRVLFCAVCGEPAYKFVGGGRKHPRYRCRSMGFPKHCGNGTVVMTEWDAFCEEQVLGLLGDAERLEKVWVAGSDSAVELAEVNAELVDLTSLIGSPAYRAGSPQREALDARIAALAARQEELEGLEARPSGWEWRETGQRFGDWWREQDTAAKNTWLRSMNIRLTFDARGGLTRTIDFGDLQEYEQHLRLGSVVERLRTGMS

SEQ ID NO: 9286 - protein, 500 aa, synthetic construct
MRALVVIRLSRVTDATTSPERQLESCRQLCAQRGWDVVGVAEDLNVSGAVDPFDRKRRPNLARWLAFEEQPFDVIVAYRVDRLTRSIRHLQQLVHWAEDHKKLVVSATEAHFDTTTPFAAVVIALMGTVAQMELEAIKERNRSAAHFNIRAGKYRGSLPPWGYLPTRVDGEWRLVPDPVQRERILEVYHRVVDNHEPLHLVAHDLNRRGVLSPKDYFAQLQGREPQGRKWSATALKRSMISEAMLGYATLNGKTVRDDDGAPLVRAEPILTREQQEALRAELVKTSRAKPAVSTPSLLLRVLFCAVCGEPAYKFAGGGRKHPRYRCRSMGFPKHCGNGTVAMAEWDAFCEEQVLDLLGDAERLEKVWVTGSDSAVELAEVNAELVDLTSLIGSPAYRAGSPQREALDARIAALAARQEELEGLEARPSGWGWRETGQRFRDWWREQDTAAKNTWLRSMNVRLTFDVRGGLTRTIDFGDLQEYEQHLRLGSVVERLHTGMS

SEQ ID NO: 9287 - protein, 500 aa, synthetic construct
MRALVVIRLSRVTDATTSPERQLESCQQLCAQRGWDVVGVAEDLDVSGAVDPFDRKRRPNLARWLAFEEQPFDVIVAYRVDRLTRSTRHLQQLVHWAEDHKKLVVSATEAHFDTTTPFAAVVIALMGTVAQMELEAIKERNRSAAHFNIRAGKYRGSLPPWGYLPTRVDGEWRLVPDPVQRERILEVYRRVVDNHEPLHSVAHDLNRRGVLSPKDYFAQLQGREPQGRKWSATALKRSMISKAMLGYATLNGKTVRDDDGAPLVRAEPILTREQLEALRAELVKTPRAKPAASTPSLLLRVLFCAVCGEPAYKFAGGGRKHPRYRCRSMGFPKHCGNGTVVMAEWDAFCEEQVLDLLGDAERLEKVWVAGSDSAVELAEVNAELVDLTSLISSPAYRAGSPQREALDARIAALAARQEELEGLEARPSGWEWRETGQRFGDWWREQDTAAKNTWLRSMNVRLTFDVRGGLTRTIDFGDLQEYEQHLRLGSVVGRLHTGMS

SEQ ID NO: 9288 - protein, 500 aa, synthetic construct
MRALVVIRLSRVTDATTSPARQLESCQQLCAQRGWDVVGVAEDLDVSGAVDPFDRKRRPNLARWLAFEEQPFDVIVAYRVDRLTRSVRHLQQLVHWAEDHKKLVVSATEAHFDTTTPFAAVVIALMGTLAQMELEAIKERIRSAAHFNIRAGKYRGSLPPWGYLPTRVDGEWRLVPDPVQRERILEVYHRVVDNHEPLHLVAHDLNRRGVLSPKDYFAQLQGREPRGREWSATALKRSMISVAMLGYATLNGKTVRDDDGAPLVRAEPILTREQQEALRAELAKTSRAKPAVSTPSLLLRVLFCAVCGEPAYKFTGGGRKHPRYRCRSMVFPKHCGNGTVVMAEWDAFCEEQVLGLLGDAERLEKVWVAGSDSAVELAEVNAELVDLTSLIGSPVYRAGSPQREALDARIAALAARQEELEGLEARPSGWEWRETGQRFGDWWREQDTAAKNTWLRSMNVRLTFDVRGGLTRTIDFGDLQEYEQHLRLGGVVERLRTGMS

SEQ ID NO: 9289 - protein, 500 aa, synthetic construct
MRALVVIRLSRVTDATTSPERQLESCQQLCAQRGWDVVGVAEDLDVSGAVDPFDRKRRPNLARWLAFEEQPFDVIVAYRVDRLTRSTRHLQQLVHWAEDHKKLVVSATEAHFDTTTPFAAVVIALMGTVAQMELEAIKERIRSAVRFNIRAGKYRGSLPPWGYLPTRVDGEWRLVPDPVQRERILEVYHRVVDNHEPLHLVAHDLNRRGVLSPKDYFAQLQGREPQGRKWSATALRRSMISGAMLGYATLNGKIVRDDDGAPLVRAEPILTRKQQEALRAELAKTSRAKPAVSTPSLLLRVLFCAVCGEPAYKFVGGGRKHPRYRCRSMGFPEHCGNGTVVMAEWDTFCEEQVLDLLGDAERLEKVWVAGSDSAVELAEVNAELVDLTSSIGSPAYRAGSPQREALDARIAALAARQEELEGLEARPSGWEWRGTGQRLGDWWREQDTAAKNTWLRSMNIRLTFDVRGGPTRTIDFGELQEYEQHLRLGSVAERLHTGTP

SEQ ID NO: 9290 - protein, 500 aa, synthetic construct
MRTLVVIRLSRVTDATTSPERQLESCQQLCAQRGWDVVGVAEDLDVSGAVDPFDRKRRPNLARWLAFEEQPFDAIVAYRVDRLARSTRHLQQLVHWAEDHKKLVVSATEAHFDTTTPFAAVVIALMGTVAQMELEAIKERNRSAAHFNIRAGKYRGSLPPWGYLPTRVDGEWRLVPDPVQRERILEVYHRVVDNHEPLYLVAHDLNRRGVLSPKDYFAQLRGREPQGREWSATALKRSMTSEAMLGYATLNGKTVRDDDGAPLVRAEPILTRGQLEALRAELVKTSRAKPAVPTPSLLLRVLFCAVCGEPAHKFAGGGRKHPRYRCRSMGFPKHCGNGTVVMAEWDAFCEEQVLDLLGDAERLEKVWVAGSDSAVELAEVNAELVDLTSLIGSPAYRAGSPQREALDARIAALAARQEELEGLEARPSGWEWRGTGQRFGDWWREQDTAAKNTWLRSMNVRLTFDVRGGLTRTIDFGDLQEYEQHLRLGSVVERLHTGMS

SEQ ID NO: 9291 - protein, 500 aa, synthetic construct
MRALVVIRLSRVTDATTSPERQLESCQQLCAQRGWDVVGVAEDLDVSGAVDPFDRKRRPNLARWLAFEEQPFDVIVAYRVDRLTRSTRHLQQLVHWAEDHKKLVVSATEAHFDTTTPFAAVVIALMGTVAQMELEAIKERIRSAVHFNIRAGKYRGSLPPWGYLPTRVDGEWRLVPDPVQRERILEVYHRVVGNHEPLHLVAHDLNRRGVLSPKDYFAQLRGREPRGRKWSATALRRSMTSEAMLGYATLNGKTVRDDDGAPLVRAEPILTREQQEALRAELAKTSRAKPAVSTPSLLLRVLFCAVCGEPAYKFVGGGRKHPRYRCRSMGFPKHCGNGTVVMTEWDAFCEEQVLDLLGDAERLEKVWVAGSDSAVELAEVNAELVDLTSLIGSPAYRAGSPQREALDARIAALAARQEELEGLEARPSGWEWRETGQRFGDWWREQDTAAKNTWLRSMNVRLTFDVRGGLTRTIDFGDLQEYEQHLRLGSVIGRLHTGMS

SEQ ID NO: 9292 - protein, 500 aa, synthetic construct
MRALVVVRLSRVTDATTSPERQLESCQQLCAQRGWDVVGVAEDLDVSGAVDPFDRKRRPNLARWLAFEEQPFDVIVAYRVDRLTRSTRHLQQLVLWAEDHKKLVVSATEAHFDTTTPFAAVVIALMGTVAQMELEAIKERIRSAAHFNIRAGKYRGSLPPWGYLPARADGEWRLVPDPVQRERILEVYHRVVDNHEPLHLVAYDLNRRGVLSPKDYFAQLRGREPQGRKWSATALKRSMTSKAMLGYAILNGKIVRDDDGAPLVRAEPILTREQQEALRAELAKTSRAKPAVSTPSLLLRVLFCAVCGEPAYKFVGGGRKHPRYRCRSMGLPKHCGNGTVVMAEWDAFCEEQVLGLLGDAERLEKVWVAGSDSAVELAEVNAELVDLTCLIGSPAYRAGSPQREALDARIAALAARQEELEGLEARPSGWEWRGTGQRFGDWWREQDTAAKNTWLRSMNVRLTFDVRGGLTRTIDFGDLREYAQHLRLGSVVGRLHTGMP

SEQ ID NO: 9293 - protein, 500 aa, synthetic construct
MRALVVIRLSRVTDATTSPERQLESCQQLCAQRGWDVVGVAEDLDVSGAVDPFDRKRRPNLARWLAFEEQPFDVIVAYRVDRLTRSTRHLQQLVHWAEDHKKLVVSATEAHFDTTTPFAAVVIALMGTVAQMELEAIKERNRSAAHFNIRAGKYRGSLPPWGYLPARVDGEWRLVPDPVQRERILEVYHRVVDNHEPLHLVAHDLNRRGVLSPKDYFAQLQGREPQGRKWSATALKRSMVSEAMLGYATLNGKTVRDDDGAPLVRAEPILTRGQLEALRAELVKTPRAKPAVSTPSLLLRVLFCAVCGEPAYKFAGGGRKHPRYRCRSMGFPKHCGNGTVAMAEWDAFCEEQVLDLLGDTGRLEKVWVAGSDTAVELAEVNAELVDLTSLIGSPAYRAGSPQREALDARIAALAARQEELEGLEARPSGWEWRETGQRFGDWWREQDTAAKNTWLRSMNVRLTFDVRGGLTRTIDFGDLQEYEQHLRLGSVVERLRTGMS

SEQ ID NO: 9294 - protein, 500 aa, synthetic construct
MRALVVIRLSRVTDATTSPERQLESCQQLCAQRGWDVVGVAEDLDVSGAVDPFDRKRRPNLARWLAFEEQPFDVIVAYRVDRLTRSTRHLQQLVHWAEDHKKLVVSATEAHFDTTTPFAAVVIALMGTVAQMELEAIKERNRSAAHFNIRAGKYRGSLPPWGYLPTRVDGEWRLVPDPVQRERILEVYHRVVDNHEPLHLVAHDLNRRGVLSPKDYFAQLQGREPQGRKWSATALKRSMTSEAMLGYATLNGKTVRDDDGAPLVRAEPILTREQLEALRAELVKTSRAKPAVSTPSLLLRVLFCAVCGEPAYKFAGGGRKHPRYRCRSMGFPKHCGNGTVVMAEWDAFCEEQVLDLLGDAERRERVWVAGSGSAVELAEVNTELVDLTSLIGSPAYRAGSPQREALDARIAALAARQEELEGLEARPSGWEWRGTGQRFGDWWREQDTAAKNTWLRSMNVRLTFDVRGGLTRTIDFGDLQEYEQHLRLGSVVKRLHTGMS

SEQ ID NO: 9295 - protein, 500 aa, synthetic construct
MRALVVIRLSRVTDATTSPERQLESCQQLCAQRGWDVVGVAEDLDVSGAVDPFDRKRRPNLARWLAFEEQPFDAIVAYRVDRLTRSVRHLQQLVHWAEDHKKLVVSATEAHFDTTTPFAAVVIALMGTVAQMELEAIKERNRSAAHFNIRAGKYRGSLPPWGYLPTRVDGEWRLVPDPVQRERILEVYHRVVDNHEPLHLVAHDLNQRGVLSPKDYFAQLQGREPQGRKWSATALKRSMISETMLGYATLNGKIVRDDDGAPLVRAEPILTREQLEALRAELVKTSRAKPAVSTPSLLLRVLFCAVCGEPAYKFAGGGRKHPRYRCRSMGFPKHCGNGTVVMAEWDAFCEEQVLDLLGDAERLEKVWIAGSDSAVELAEVSAELVDLSSLIGSPAYRAGSPQREALDARIAALAARQEELEGLEARPSGWEWRETGQRFGDWWREQDTAAKNTWLRSMNVRLTFDVRGGLTRTIDFGGLLEYEQHFRLGSVVERLHTGMT

SEQ ID NO: 9296 - protein, 500 aa, synthetic construct
MRALVVIRLSRVTDATTSPERQLESCQQLCAQRGWDVVGVAEDLDVSGAVDPFDRKRRPNLARWLAFEEQPFDVIVAYRADRLARSTRHLQQLVHWAEDHKKLVVSATEAHFDTTTPFAAVVIALMGTVAQMELEAIKERNRSAAHYNIRAGKYRGSLPPWGYLPTRVDGEWRLVPDPAQRERILEVYHRVVDNHEPLHLVAHDLNRRGVLSPKDYFAQLQGREPQGCKWSATALKRSMVSEAMLGYATLNGKTVRDDDGAPLVRAEPILTREQLEALRAELVKTSRAKPAVSTPSLLLRVLFCAVCGEPAYKFAGGGRKHPRYRCRSMGFPKHCGNGTVAMAEWDAFCEEQVLDLLGDAERLEKVWVAGSDSAVELAEVNAELVDLTSLIGSPAYRAGSPQREALDARIAALAARQEELEGLGARPSGWEWRETGQRFGDWWREQDTAARNTWLRSMNVRLTFDVRGELTRTIDFGDLQEYEQHLRLGSVVERLRTGMS

SEQ ID NO: 9297 - protein, 500 aa, synthetic construct
MRALVVIRLSRVTDATTSPERQLESCQQLCAQRGWDVVGVAEDLDVSGAVDPFDRKRRPNLARWLAFEEQPFDVIVAYRVDRLTRSTRQLQQLVHWAEDHRKLVVSATEAHFDTTTPFAAVVIALMGTVAQMELEAIKERNRSAAHFNIRAGKYRGSLPPWGYLPTRVDGEWRLAPDPVQREHILEVYHRVVDNHEPLHLVAHDLNRRGVLSPKDYFAQLQGREPQGRKWSATALKRSMTSVAMLGYATLNGKTVRDDDGAPLVRAEPILTRGQLEALRAELVKTSRAKPAVSTPSLLLRVLFCAVCGEPAYKFAGGGRKHPRYRCRSMGFPKHCGNGTVAMDEWDAFCEEQVLDLLGDAERLEKVWVAGSDSAAELAEVNAELVDLTSLLGSPAYRAGSPQREALDARIAALAARQEELEGLGACPSGWEWRGTGQRFGDWWREQDTAAKNTWLRSMNVRLTFDVRGGPTRTIDFGDLQEYEQHLRLGSVVERLHTGMS

SEQ ID NO: 9298 - protein, 500 aa, synthetic construct
MRALVVIRLSRVTDATTSPERQLESCQQLCAQRGWDVVGVAEDLDVSGAVDPFDRKRRPNLARWLAFEEQPFDVIVAYRVDRLTRSVRHLQQLVRWAEDHKKLVVSATEAHFDTTTPFAAVVIALMGTVAQMELEAIKERSRSAAHFNIRAGKYRGSLPPWGYLPTRVDGEWRLVPDPVQRERILEVYHRVVDNHEPLHLVAHDLNRRGILSPKDYFAQLQGREPQGRKWSATALKRSMISGAMLGYATLNGKTVRGDDGAPLVRAEPILTREQQEALRAELAKTSRAKPAVSTPSLLLRVLFCAVCGEPAYKFVGGGRKHPRYRCRSMGFPEHCGNGTVVMAEWDAFCEGQVLDLLGDAERLEKVWVAGSDSAVELAEVNAELIDLTSLIGSPAYRAGSPQREALDARIAALAARQEELEGLEARPSGWEWRGTGQRLGDWWREQDTAAKNTWLRSMNVRLTFDVRGGLTRTIDFGELQEYEQHLRLGSVVERSHTGMS

SEQ ID NO: 9299 - protein, 500 aa, synthetic construct
MRALVVIRLSRVTDATTSPERQLESCQQLCAQRSWDVVGVAEDLDVSGAVDPFDRKRRPNLARWLAFEEQPFDAIVAYRVDRLTRSVRHLQQLVHWAEDHKKLVVSATEAHFDTTTPFAAVVIALMGTVAQMELEAIKERNRSAAHFNIRAGKYRGSLPPWGYLPTRVDGEWRLVPDPVQRERILEVYHRVVDNREPLHWVAHDLNRRGVLSPKDYFAQLQGREPQGRKWSATALKRSMISEAMLGYATLNGRTVRDDDGAPLVRAEPILTRGQLEALRAELVRTSRAKPAVSTPSLLLRVLFCAVCGEPAYKFAGGGRKHPRYRCRSMGFPEHCGNGTVAMAEWDAFCEEQVLNLLGDAERLEKVWVAGSDSAVELAEVNAELVDLTSLIGSPAYRAGSPQREALDARIAALAARQEELEGLGARPSGWEWRETGQRFGDWWREQDTAARNTWLRSMNVRLTFDVRGGPTRTIDFGDLQEYEQHLRLGSVVERLHTGMS

SEQ ID NO: 9300 - protein, 500 aa, synthetic construct
MRALVVIRLSRVTDATTSPERQLESCQQLCAQRGWGIVGVAEDLDVSGAVDPFDRKRRPNLARWLAFEEQPFDVVVAYRVDRLTRSTRHLQQLVHWAEDHKKLVVSATEAHFDTTTPFAAVVIALMGTVAQMELEAIKERIRSAVHFNIRAGKYRGSLPPWGYLPTRVDGEWRLVPDPVQRERILEVYHRVVDNHEPLHLVAYDLNRRGVLSPKDYFAQLQGREPQGRKWSATALKRSMISVAMLGYATLNGKIVRDDDGAPLVRAEPILTRGQQEALRAELVKTSRAKPAVSTPSLLLRVLFCAVCGEPAYKFVGGGRKHPRYRCRSMGFPKHCGNGTVVMAEWDAFCEEQVLDLLGGAERLEKVWVAGSDTAVELAEVNAELVDLTSLIGSPAYRTGSPQREALDARIAALAARQEELEGLEARPSGWEWRGTGQRFGDWWREQDTAAKNTWLRSMNVRLTFDVRGGLTRTIDFGDLQEYEQHLRLGSVVERLHTGMS

SEQ ID NO: 9301 - protein, 500 aa, synthetic construct
MRALVVIRLSRVTDATTSPERQLESCQQLCAQRGWDVVGVAEDLDVSGAVDPFDRKRRPNLARWLAFEEQPFDVVVAYRVDRLTRSTRHLQQLVHWAEDHKKLVVSATEAHFDTTTPFAAVVIALMGTVAQMELDAIKERNRSAAQFNIRAGKYRGSLPPWGYLPTRVDGEWRLAPDPVQRERILEVYHRVVDNHEPLHLVAHDLNRRGVLSPKDYFAQLQGREPQGRKWSATALKRSMISEAMLGYATLNGKTVRGDDGAPLVRAEPILTREQLEALRAEIVKTSRAKPAVSTPSLLLRVLFCAVCGEPAYKFAGGGRKHPRYRCRSMGFPKHCGNGTVVMAEWDAFCEEQVLDLLGDAECLEKVWVAGSDSAIELAEVNAELVDLTSLIGSPAYRAGSPQREALDARIAALAARQEELEGLEARSSGWEWRETGQRFGDWWRGQDTAAKNTWLRSMNVRLTFDVRGGLTRTIDLGDLQEYEQHLRLGSVVERLHIGMS

SEQ ID NO: 9302 - protein, 500 aa, synthetic construct
MRALVVIRLSRVTDATTSPERQLESCRQLCAQRGWDVVGVAEDLDVSGAVDPFDRKRRPNLARWLAFEEQPFDVIVAYRVDRLTRSTRHLQQLVHWAEDHKKLVVSATEAHFDTTTPFAAVVIALMGTVAQMELEAIKERIRSAVHFNIRAGKYRGSLPPWGYLPTRVDGEWRLVPDPAQRERILEVYHRVVDNHEPLHLVAHDLNRRGVLSPKDYFAQLQGREPQGRKWSATALKRSMISVAMLGYATLNGKTVRDDDGTPLVRAEPILTREQQEALRAELAKTSRAKPAVSTPSLLLRVLFCAVCGEPAYKFAGGGRKHPRYRCRSMGFPEHCGNGTVVMAEWDAFCEEQVLNLLGYAERLEKVWLAGSDSAVELAEVNAELVDLTSLIGSPAYRAGSPQREALDARIAALAARQEELEGLEARPSGWEWRGTGQRFEDWWREQDTAAKNTWLRSMNVRLTFDVRGGLTRTIDFGGLQEYEQHLRLGSVVGRLHTRTS

SEQ ID NO: 9303 - protein, 500 aa, synthetic construct
MRALVVIRLSRVTDATTSPERQLESCQQLCAQRGWDVVGVAEDLDVSGAVDPFDRKRRPNFARWLAFEEQPFDVIVAYRVDRLTRSTRHLQQLVHWAEDHKKLVVSATEAHFDTTTPFAAVVIALMGTVAQMELEAIKERNRSAAHYNIRAGKYRGSLPPWGYLPTRVDGEWRLVPDPVQRERILEVYHRVVDNHEPLHWVAHDLNRRGVLSPKDYFAQLQGREPQGRKWSATALKRSMISEAMLGYATLNGKTVRDDDGAPLVRAEPILTREQLEALRAELVRTSRAKPAVSTPSLLLRVLFCAVCGEPAYKFAGGGRKHPRYRCRSMGFPKHCGNGTVVMAEWDAFCEEQVLDLLGDAERLEKVWVAGSDSAAELAEVNAELVDLTSLIGSPAYRAGSPQREALDARIAALAARQEELKGLGARPSGWEWRETGQRFGDWWREQDTAAKNTWLRSMNVRLTFDVHGGLTRTIDFGDLQEYEQHLRLGSVVERLHTGMS

SEQ ID NO: 9304 - protein, 500 aa, synthetic construct
MRALVVIRLSRVTEATTSPERQLESCQQLCAQRGWDVVGVAEDLDVSGAVDPFDRKRRPNLARWLAFEEQPFDVIVAYRVDRLTRSTRHLQQLVHWAEDHKKLVVSATEAHFDTTTPFAAVVIALMGTVAQMELEAIKERIRSAVHFNIRAGKYRGSLPPWGYLPTRVDGEWRLVPDPVQRERILEVYHRVVDNHEPLHLVAHDLNRRGVLSPKDYFAQLRGREPQGRKWSATALKRSMISVAMLGYATLNGKTVRDDDGAPLVRAEPILTREQLEALHAELVKTSRAKPAVSTPSLLLRVLFCAVCGEPAYKFVGGGRKHPRYRCRSMGFPKHCGNGTVVMAEWDAFCEEQVLGLLGDAERLEKVWVAGSDSAVELAEVNAELVDLTSLIGSPAYRAGSPQREALDARIAALAARQEELEGLEARPSGWEWRETGQRFGDWWREQDTAAKNTWLRSMNVRLTFDVRGGLTRTIDFGDLQEYEQLLRSGSVVERLHTGMS

SEQ ID NO: 9305 - protein, 500 aa, synthetic construct
MRALVVIRLSRVTDATTSPGRQLESCQQLCAQRGWDVVGVAEDLDVSGAVDPFDRKRRPNLARWLAFGEQPFDVIVAYRVDRLTRSVRHLQQLVHWAEDHKKLVVSATEAHFDMTTPFAAVVIALMGTVAQMELEAIKERNRSAAHFNIRAGKYRGSLPPWGYLPARVDGEWRLVPDPVQRERILEVYHRVVDNHEPLHLVAHDLNRRGVLSPKDYFAQLQGREPQGRKWSATALKRSMISEAMLGYATLNGKTVRDDDGAPLVRAEPILTREQLEALRAELVKASRAKPAVSTPSLLLRVLFCAVCGEPAYKFAGGGRKHPRYRCRSMGFPKHCGNGTVAMAEWDAFCEEQVLDLLGDVERLEKVWVAGSDSAIELAEVNAELVDLTSLIGSPAYRAGSPQREALDARIAALAARQEELEGLEARPSGWEWRETGQRFGDWWREQDTAAKNAWLRSMNVRLTFDVRGGLTRTIDFGGLQEYEQHLRLGSLVERLHTGMS

SEQ ID NO: 9306 - protein, 500 aa, synthetic construct
MRALVVIRLSRVTDATTSPERQLESCQQLCAQRGWDVVGVAEDLDVSGAVDPFDRKRRPNLARWLAFEEQPFDVIVAYRVDRLTRSTRHLQQLVLWAEDHKKLVVSATEAHFDTTTPFAAVVIALMGTVAQMELEAIKERIRSAARFNIRAGKYRGSLPPWGYLPTRVDGEWRLVPDPVQRERILEVYHRVVDNHEPLHLVAHDLNRRGVLSPKDYFAQLQGREPRGRKWSATALKRSMTSVAMLGYATLNGKTVRDNDGAPLVRAEPILTREQQEALRAELAKTSRAKPAVSTPSLLLRVLFCAVCGEPAYKFVGGGRKHPRYRCRSTGFPKHCGNGTVVMAEWDAFCEEQVLDLLGDAERLEKVWVAGSDSAVELAEVNAELVDLTSLIGSPAYRAGSPQREALDARIAALAARQEELEGLEARPSGWEWRGTGQRLGDWWREQDTAAKNTWLRSMNIRLTFDVRGGLTRTIDFGDLQEYEQHLRSGSVAERLHTGMS

SEQ ID NO: 9307 - protein, 500 aa, synthetic construct
MRALVVIRLSRVTDATTSPERQLESCQQLCAQRGWDVVGVAEDLDVSGAVDPFDRKRRPNLARWLAFEELPFDVIVAYRVDRLTRSTRHLQQLVHWAEDHKKLVVSATEAHFDTTTPFAAVVIALMGTVAQMELEAIKERIRSAVRFNIRAGKYRGSLPPWGYLPTRVDGEWRLVPDPVQRERILEVYHRVVDNHEPLYLVAHDLNRRGVLSPKDYFAQLRGREPQGREWSATALKRSMTSVAMLGYATLNGKTVRDDDGAPLVRAEPILTREQQEALRAELAKTSWAKPAVSTPSLLLRVLFCAVCGEPAYKFAGGGRKHPRYRCRSMGFPEHCGNGTVVMAEWDAFCEEQVLDLLGDAERLEKVWVAGSDSAVELAEVNAELVDLTSLIGSPAYRAGSPQREALDARIAALAARQEELEGIEARPSGWEWRGTGQRLGDWWREQDTAAKNTWLRSMNIRLTFDVRGGLTRTIDFGELQEYVQHLRSGSVVERLHTGMS

SEQ ID NO: 9308 - protein, 500 aa, synthetic construct
MRALVVIRLSRVTDATTSPERQLESCQQLCAQRGWDVVGVAEDLDVSGAVDPFDRKRRPNLARWLAFEEQPFDVIVAYRVDRLTRSTRHLQQLVRWAEDHKKLVVSATEAHFDTTTPFAAVVIALMGTVAQMELEAIKERSRSAAHFNIRAGKYRGSLPPWGYLPTRVDGEWRLVPDPVQRERILEVYHRVVDNHEPLHLVAHDLNRRGVLSPKDYFAQLQGREPQGRKWSATALKRSMISVAMLGYATLNGKIVRDDDGAPLVRAEPILTREQQEALRAELAKTSRAKPAVSTPSLLLRVLFCAVCGGPAYKFAGGGRKHPRYRCRSMGFPKHCGNGTVVMAEWDAFCEEQVLDLLGDAERLEKVWVAGSDSAVELAEVNAELVDLTSLIGSPAYRAGSPQREALDARIAALAARQEELEGLEARPSGWEWRGTGQRFGDWWREQDTATKNAWLRSMNVRLTFDVRGGLARTIDFGDLQEYEQHSCLGGVVERLRIGMS

SEQ ID NO: 9309 - protein, 500 aa, synthetic construct
MRALVVIRLSRVTDATTSPERQLESCQQLCAQRGWDVVGVAEDLDVSGAVDPFDRKRRPNLARWLAFEEQPFDVIVAYRVDRLTRSVRHLQQLVHWAEDHKKLVVSATEAHFDTTTPFAAVVIALMGTVAQMELEAIKERIRSAVHFNIRAGKYRGSLPPWGYLPARVDGEWRLVPDPVQRERILEVYHRVVDSHEPLHLVAYDLNRRGVLSPKDYFAQLQGREPQGRKWSATALKRSMTSVAMLGYATLNGKTVRDDDGAPLVRAEPILTREQLEALRAELAKTSRAKPAVSTPSLLLRVLFCAVCGEPAYKFVGGGRKHPRYRCRSMGFPKHCGNGTVVMAEWDAFCEERVLDLLGDAERLEKVWAAGSDSSVELAEVNAELVDLTSLIGSPAYRAGSPQREALDARIAALAARQEELEGLEARPSGWEWRGTGQRFGDWWREQDTAAKNIWLRSMNVRLTFDVRGGLTRTIDFGDLREYEQHLRLGSVVERLHTGMS

SEQ ID NO: 9310 - protein, 500 aa, synthetic construct
MRALVVIRLSRVTDATTSPERQLESCQQLCAQRGWDVVGVAEDLDVSGAVDPFDRKRRPNLARWLAFEEQPFDVIVAYRVDRLTRSVRHLQQLVHWAEDHKKLVVSATEAHFDTTTPFAAVVIALMGTVAQMELEAIKERNRSAAHFNIRAGKYRGSLPPWGYLPTRVDGEWRLAPDPVQRERILEVYHRIVDNHEPLHLVAHDLNRRGVLSPKDYFAQLQGREPQGRKWSATALKRSMTSEAMLGYATLNGKTVRDDDGAPLVRAEPILTRGQLEALRAELVKTSRAKPAVSTPSLLLRVLFCAVCGEPAYKFAGGGRKHPRYRCRSMGFPKHCGNGTVAMAEWDAFCEEQVLDLLGDAERLEKVWVAGSDSAVELAEVNAELVDLTSLISSPAYRAGSPQREALDARIAALAARQEELEGLGARPSGWEWRETGQHFGDWWREQDTAAKNTWLRSMNVRLTFDVRGGLTRTIDFGNLQEYEQHLRLGSVVGRLHTGMS

SEQ ID NO: 9311 - protein, 500 aa, synthetic construct
MRALVVIRLSRVTDASTSPERQLESCQQLCAQRGWDVVGVAEDLNVSGAVDPFDRKRRPNLARWLTFEEQPFDVIVAYRVDRLTRSIRHLQQLVHWAEDHKKLVVSATEAHFDTTTPFAAVVIALMGTVAQMELEAIKERNRSAAHFNIRAGKYRGSLPPWGYLPARVDGEWRLVPDPVQRERILEVYHRVVDNHEPLHLVAHDLNRRGVLSPKDYFAQLQGREPQGRKWSATALKRSMISKAMLGYATLNGKTVRDDDGAPLVRAEPILTREQLEALRAELVKTSRAKPAVSTPSLLLRVLFCAVCGEPAYKFAGGGRKHPRYRCRSMGFPKHCGNGTVVMAEWDAFCEEQVLDLLGDAERLEKVWVAGSDSAVELAEVNAELVDLTSLIGSPAYRAGSLQREALDARIAALAARQEELEGLEARPSGWEWRETGQRFGDWWREQDTAAKNTWLRSMNVRLTFDVRGGLTRTIDFGNLQEYEQHLRLGSVVERLHTGMS

SEQ ID NO: 9312 - protein, 500 aa, synthetic construct
MRALVVIRLSRVTDATTSPERQLESCQQLCAQRGWDVVGIAEDLDVSGAVDPFDRKRRPNLARWLAFEEQPFDAIVAYRVDRLTRSVRHLQQLVHWAEDHKKLVVSATEAHFDTTTPFAAVVIALMGTVAQMELEAIKERIRSAVRFNIRAGKYRGSLPPWGYLPTRVDGEWRLVPDPVQRERILEVYHRVVDNHEPLHLVAYDLNRRGVLSPKDYFAQLRGREPRGRKWSATALRRSMTSEAMLGYATLNGKTVRDDDGAPLVRAEPILTREQQEALRAELAKTSRAKPAVSTPSLLLRVLFCAVCGEPAYKFVGGGRKHPRYRCRSMGFPEHCGNGTVVMTEWDAFCEEQVLNLLGDAERLEKVWVAGSDSAVELAEVNAELVDLTSLIGSPAYRAGSPQREALDARIAVLAARQEELEGLEARPSGWEWRETGQRLGDWWREQDTAAKNTWLRSMNVRLTFDVRGGLTRTIDFGDLLEYEQHLRLGSVVERLHTGMS

SEQ ID NO: 9313 - protein, 500 aa, synthetic construct
MRALVVIRLSRVTDATTSPERQLESCQQLCAQRGWDVVGVAEDLDVSGAVDPFDRKRRPNLARWLAFEEQPFDVVVAYRVDRLTRSTRHLQQLVHWAEDHKKLVVSATEAHFDTTTPFAAVVIALMGTVAQMELEGIKERIRSAVRFNIRAGRYRGSLPPWGYLPTRVDGEWRLVPDPVQRERILEVYHRVVDNHEPLHLVAHDLNRRGVLSPKDYFAQLRGREPQGREWSATALKRSMTSVAMLGYATLNGKTVRDDDGAPLVRAEPILTRGQLEALRAELVKTSRAKPAVSTPSLLLRVLFCAVCGEPAYKFVGGGRRHPRYRCRSMGFPKHCGNGTVVMTEWDAFCEEQVLNLLGDAERLEKVWVAGSDSAVELAEVNAELVDLTSLIGSPAYRAGSPQREALDARIAALAARQEELEGLEARPSGWEWRETGQRFGDWWHEQDTAAKNTWLRSMNIRLTFDVRGGLTRTIDFGELQEYEQHLRSGSVVERLHTGTS

SEQ ID NO: 9314 - protein, 500 aa, synthetic construct
MRALVVIRLSRVTDATTSPERQLESCQQLCAQRGWDVVGVAEDLDVSGAVDPFDRKRRPNLARWLAFEEQPFDVIVAYRVDRLTRSVRHLQQLVHWAEDHKKLVVSATEAHFDTTTPFAAVVIALMGTVAQMELEAIKERNRSAAHFNIRAGKYRGSLPPWGYLPTRVDGEWRLVPDPVQRERILEVYHRVVDNHEPLHWVAHDLNRRGVLSPKDYFAQLRGREPQGREWSATALKRSMISEAMLGYATLNGKTVRDDDGAPLVRAEPILTRGQLEALRAELVKTSRAKPAVSTPSLLLRVLFCAVCGEPAYKFAGGGRKHPRYRCRSMGFPKHCGNGTVTMAEWDAFCEEQVLDLLGDAERLEKVWVAGSDSAVELAEVNAELVDLTSLIGSPAYRAGSTQREALDARIAALAARQEELEGLGARPSGWEWRGTGQRFGDWWREQDTAAKNTWLRSMNVRLTFDVRGGLTRTIDFGDLQEYEQHLCSGSVVERLRTGMS

SEQ ID NO: 9315 - protein, 500 aa, synthetic construct
MRVLIVVRLSRVTDATTSPERQLESCQQLCAQRGWDVVGVAEDLDVSGAVDPFDRKRRPNLARWLAFEEQPFDVIVAYRVDRLTRSIRHLQQLVLWAEDHKKLVVSATEAHFDMTTPFAAVVIALMGTVAQMELEAIKERIRSAVHFNIRAGKYRGSLPPWGYLPTRVDGEWRLVPDPVQRERILEVYRRVVDNHEPLHLVAHDLNRRGVLSPKDYFAQLQGREPQGRKWSATALKRSMISVAMLGYATLNGKTVRDDDGAPLVRAEPILTREQLEALRAELVKTSRAKPAVSTPSLLLRVLFCAVCGEPAYKFVGGGRKHPRYRCRSMGFPKHCGNGTVVMAEWDVFCEEQVLNLLGDAERLEKVWVAGSDSAVELAEVNAELVDLTSLIGSPAYRAGSPQREALDARIAALAARQEELEGLEARPSGWEWRGTGQRFGEWWREQDTATKNTWLRSMNVRLTFDVRGGLTRTIDFGDLQEYEQHLRSGSVVERLHTGMS

SEQ ID NO: 9316 - protein, 500 aa, synthetic construct
MRALVVIRLSRVTDATTSPKRQLESCRQLCAQRGWDVVGVAEDLDVSGAVDPFDRKRRPNLARWLAFKEQPFDVIVAYRVDRLTRSVRHLQQLVRWAEDHKKLVVSATEAHFDTTTPFAAVVIALMGTVAQMELEAIKERIRSAVHFNIRAGKYRGSLPPWGYLPTRVDGEWRLVPDPVQRERILEVYHRVVDNHEPLHLVAHDLNRRGVLSPKDYFAHLRGREPQGRKWSATALKRSMISVAMLGYATLNGKIVRDDGGAPLVRAEPILTREQLEALRAELAKTSRAKPAVSTPSLLLRVLFCAVCGEPAYKFVGGGRKHPRYRCRSMGFPKHCGNGTVAMAEWDAFCEEQVLDLLGDVERLEKVWVAGSDSAVELAEVNAELVDLTSLIGSPAYRAGSPQREALDARIATLATRQEELEGLEARPSGWEWRGTGQRFRDWWREQDTAAKNTWLRSMNVRLTFDVRGGLTRTIDFGELQEYKHHLRLGSVDERLHTGMS

SEQ ID NO: 9317 - protein, 500 aa, synthetic construct
MRALVVIRLSRVTDATTSPERQLVSCQQLCAQRGWDVVGVAEDLDVSGAVDPFDRKRRPNLARWLAFEEQPFDVIVAYRADRLTRSARHLQQLVHWAEDHKKLVVSATEAHFDTTTPFAAVVIALMGTVAQMELEAIKERNRSAAHFNIRAGKYRGSLPPWGYLPARVDGEWRLVPDPVQRERILEVYHRVVDNHEPLHLVAHDLNRRGVLSPKDYFAQLQGREPQGRKWSATALKRSMISEAMLGYATLNGKTVRNDDGAPLVRAEPILTREQLEALRAELVKTSRAKPAVSTPSLLLRVLFCAVCGKPAYKFAGGGRKHPRYRCRSMGFPKHCGNGTVVMAEWDAFCEEQVLDLLGDAERLEKVWVAGTDSAVELAEVNAELVDLTSLIGSPAYRAGSPQREALDARIAALAARQEELEGLEARPSGWEWRGTGQRFGDWWREQDTAAKNTWLRSMNVRLTFDVRGGLTRTIDFGDLQEYEQHLRLGSVVERLHTGMS

SEQ ID NO: 9318 - protein, 500 aa, synthetic construct
MRALVVIRLSRVTDATTSPERQLESCRQLCAQRGWDVVGVAEDLDVSGAVDPFDRKRRPNLARWLAFEEQPFDVIVAYRVDRLTRSTRHLQQLVHWAEDHKKLVVSATEAHFDTTTPFAAVVIALMGTVAQMELEAIKERNRSAAHFNIRAGKYRGSLPPWGYLPTRVDGEWRLVPDPVQRERILEVYHRVVDNHEPLHLVAHDLNRRGVLSPKDYFAQLRGREPQGRKWSATALKRSMISEAMLGYATLNGKTVRDDDGAPLVRAEPILTREQLEALRVELVKTSRAKPAVSTPSLLLRVLFCAVCGEPAYKFAGGGRKHPRYRCRSMGFPKHCGNGTVAMAELDTFCEEQVLDLLGDAERLEKIWVAGSDSAIELAEVNAELVDLTSLIGSPAYRAGSPQREALDARIAALAARQEKLEGLEARPSGWEWRETGQRFGDWWREQDTAAKNTWLRSVNVRLTFDVRGGLTRTIDFGDLQEYEQHLRIGSVVERLHTGMS

SEQ ID NO: 9319 - protein, 500 aa, synthetic construct
MRALIVIRLSRVTDATTSPERQLESCQQLCAQRGWDVVGVAEDLDVSGAVDPFDRKRRPNLARWLAFEEQPFDVVVAYRVDRLTRSTRHLQQLVHWAEDHKKLVVSATEAHFDTTTPFAAVVIALMGTVAQMELEAIKERNRSAAHFNIRAGKYRGSLPPWGYLPTRVDGEWRLVPDPVQRERILEVYHRVVDNHEPLHLVAHDLNRRGALSPKDYFAQLQGREPQGRKWSATALKRSMTSEAMLGYATLNGKTVRDDDGAPLVRAEPILTREQLEAIRAELVKTSRAKPAVSTPSLLLRVLFCAVCGEPAYKFAGGGRKHPRYRCRSMGFPKHCGNGTVAMAEWDTFCEEQVLDLLGDTERLEKVWVAGSDSAAELAEVNAELVDLTSLIGSPAYRAGSPQREALDARIAALAARQEELEGLEARPSGWEWRETGQRFGDWWREQDTAAKNTWLRSMNVRLTFDVRGGLTRTIDFGDLQEYEQHLRLGSVVERLHTGMS

SEQ ID NO: 9320 - protein, 500 aa, synthetic construct
MRALVVIRLSRVTDATTSPERQLESCQQLCAQRGWDVVGVAEDLDVSGAVDPFDRKRRPNLARWLAFEEQPFDVIVAYRVDRLTRSTRHLQQLVHWAEDHKKLVVSATEAHFDTTTPFAAVVIALMGTVAQMELEAIKERNRSAAHFNIRAGKYRGSLPPWGYLPARVDGEWRLVPDPVQRERILEVYHRVVDNHEPLHLVAHDLNRRGVLSPKDYFAQLQGREPQGRKWSATALKRSMTSEAMLGYATLNGKIVRDDDGAPLVRAEPILTREQLEALRAELVKTSRAKPAVSTPSLLLRVLFCAVCGEPAYKFAGGGRKHPRYRCRSMGFPKHCGNGTVAMAEWDAFCEEQVLDLLGDAERLEKVWVAGSDSAVELAEVNAELVDLTSLIGSPAYRAGSPQREALDARIAALAARQEELEGLEARPSGWEWRETGQRFGDWWREQDTAAKNTWLRSMNVRLTFDVRGGLTRTIDFGDLQEYEQHLRLGSVVERLHTGMS

SEQ ID NO: 9321 - protein, 500 aa, synthetic construct
MRALVVIRLSRVTDATTSPERQLGSCQQLCAQRGWDVVGVAEDLDVSGAVDPFDRKRRPNLARWLAFEEQPFDVIVAYRVDRLTRSTRHLQQLVHWAEDHKKLVVSATEAHFDTTTPFAAVVIALMGTVAQMELEAIKERNRSAAHFNIRAGKYRGSLPPWGYLPTRVDGEWRLVPDPVQRERILEVYHRVVDNHEPLHLVAHDLNRRGVLSPKDYFAQLQGREPQGRKWSATALKRSMVSVAMLGYATLNGKIVRDDDGAPLVRAEPILTREQLEALRAELVKTSRAKPAASTPSLLLRVLFCAVCGKPAYKFAGGGRKHPRYRCRSMGFPKHCGNGTVAMAEWDAFCEEQVLNLLGDAERLEKVWVVGSDSAVELAEVNAELVDLTSLIGSPAYRVGSPQREALDARIAALAARQGELEGLEARPSGWEWRETGQRFGDWWREQDTAAKNTWLRSMNVRLTFDVRGGLTRTIDFGDLREYEQHLRLGSVVERLHTGMS

SEQ ID NO: 9322 - protein, 500 aa, synthetic construct
MRALVVIRLSRVTDATTSPERQLESCQQLCTQRGWDVVGVAEDLDVSGAVDPFDRKRRPSLARWLAFEEQPFDAIVAYRADRLARSIRHLQQLVHWAEDHKKLVVSATEAHFDTTTPFAAVVIALMGTVAQMELEAIKERNRSAAHFNIRAGKYRGSLPPWGYLPTRVDGEWRLAPDPVQRERILEVYYRVVDNHEPLHLVAHDLNRRGVLSPKDYFAQLQGREPQGRKWSATALKRSMISEAMLGYATLNGKTVRDDDGAPLVRAEPILTREQLGALRAELVKTSRAKPAVSTPSLLLRVLFCAVCGEPAYKFAGGGRKHPRYRCRSMGFPKHCGNGTVVMAEWDAFCEEQVLNLLGDAERLEKVWVAGSDSAVELSEVNAELVDLTSLIGSPAYRAGSPQREALDARIAALAARQEELEGLEARPSGWEWRETGRRFGDWWREQDTAAKNTWLRSMNVRLTFDVRGGLTRTIDFGNLQEYEQHLRLGSVVERLHTGMS

SEQ ID NO: 9323 - protein, 500 aa, synthetic construct
MRALVVIRLSRVTDATTSPERQLESCQQLCAQRGWDVVGVAEDLDVSGAVDPFDRKRRPNLARWLAFEEQPFDVIVAYRVDRLTRSTRHLQQLVHWAEDHKKLIVSATEAHFDTTTPFAAVVIALMGTVAQMELEAIKERNRSAAHFNIRAGKYRGSLPPWGYLPARVDGEWRLVPDPVQRERILEVYHRVVDNHEPLHLVAHDLNRRGVLSPKDYFAQLQGREPQGRKWSATALKRSMTSEAMLGYATLSGKTVRDDDGAPLVRAEPILTRGQLEALRAELVKTPRAKPAVSTPSLLLRVLFCAVCGEPAYKFAGGGRKHPRYRCRSMGFPKHCGNGTVAMAEWDAFCEEQVLDLLGDAERLEKVWVAGSDSAAELAEVNTELVDLTSLIGSPAYRAGSPQREALDARIAALAARQEELEGLEARPSGWEWRGTGQRFGDWWREQDTAAKNTWLRSMNVRLTFDVRGGLTRTIDFGGLQEYEQHLRLGSVVERLHTRMP

SEQ ID NO: 9324 - protein, 500 aa, synthetic construct
MRALVVIRLSRVTDATTSPERQLESCQQLCAQRGWDVVGVAEDLDVSGAVDPFDRKRRPNLARWLAFEEQPFDAIVAYRVDRLTRSTRHLQQLVHWAEDHKKLVVSATEAHFDTTTPFAAVVIALMGTVAQMELEAIKERNRSAARFNIRAGKYRGSLPPWGYLPTRVDGEWRLVPDPVQRERILEVYHRVVDNHEPLHLVAHDLNRRGVLSPKDYFAQLRGREPQGRKWSATALKRSMTSEAMLGYATLNGKTVCDDDGAPLVRAEPILTREQLEALRAELVKTSRAKPAVSTPSLLLRVLFCAVCEEPAYKFAGGGRKHPRYRCRSMGSPKHCGNGTVAMAEWDAFCEEQVLDLLGDAERLEKVWVAGSDSAVELAEVNAELVDLTSLIGSPAYRAGSPQREALDARIAALAARQEELEGLEARPSGWGWRETGQRFGDWWREQDTAAKNTWLRSMNVRLTFDVRGGLTRTIDFGELQEYEQHLRLGGVVERLHTGMS

SEQ ID NO: 9325 - protein, 500 aa, synthetic construct
MRALVVVRLSRVTDTTTSPERQLESCQQLCAQRGWDVVGVAEDLDVSGAVDPFDRKRRPNLARWLAFEEQPFDVIVAYRVDRLTRSTRHLQQLVRWAEDHKKLVVSATEAHFDTTSPFAAVVIALMGTVAQMELEAIKERIRSAVHFNIRAGKYRGSLPPWGYLPTRVDGEWRLVPDPVQRERILEVYHRVVDNHEPLHLVAHDLNRRGVLSPKDYFAQLRGREPRGRKWSATALKRSMTSVAMLGYATLNGKTVRDDDGAPLVRAEPILTREQLEALRAELVKTSRAKPAVSTPSLLLRVLFCAVCGEPAYKFVGGGRKHPRYRCRSMGFPKHCGNGTVALAEWDAFCEEQVLGLLGDAERLEKVWVAGSDSAVELAEVNAELVDLTSLIGSPAYRAGSPQREALDARIAALAARQEKLEGLEARPSGWEWRETGQRFGDWWREQDTAAKNTWLRAMNVRLTFDVRGGLTRTIDFGDLQEYEQRLRLGSVVERLHTGMS

SEQ ID NO: 9326 - protein, 500 aa, synthetic construct
MRALVVIRLSRVTDATTSPERQLESCQQLCAQRGWDVVGVAEDLDVSGAVDPFDRKRRPNLARWLALEEQPFDVIVAYRVDRLTRSVRHLQQLVHWAEDHKKLVVSATEAHFDTTTPFAAVVIALMGTVAQMELEAIKERNRSAAHFNIRAGKYRGSLPPWGYLPTRVDGEWRLVPDPVQRERILEVYHRVVDNHEPLHWVAHDLNRRGVLSPKDYFAQLQGREPQGREWSATALKRSMTSVAMLGYATLNGKTVRDDDGAPLVRAEPILTREQLEALRAELVKTSRAKPAVSTPSLLLRVLFCAVCGEPAYKFAGGGRKHPRYRCRSMGFPKHCGNGTVAMAEWDAFCEEQVLGLLGDAERLEKVWVAGSDSAVELAEVNAELVDLTSLIGSPAYRAGSPQREALDARIAALVARQEELEGLEARPSGWGWRGTGQRFGDWWREQDTAAKNTWLRSMNVRLTFDVRSGLTRTIDFGDLQEYEQHLRLGSVVERLHTGMS

SEQ ID NO: 9327 - protein, 500 aa, synthetic construct
MRALVVIRLSRVTDATTSPERQLESCQQLCAQRGWDVVGVAEDLDVSGAVDPFDRKRRPNLARWLSFEEQPFDVIVAYRVDRLTRSTRHLQQLVRWAEDHKKLVVSATEAHFDTTTPFAAVVIALMGTVAQMELEAIKERIRSAVHFNIRAGKYRGSLPPWGYRPTRVDGEWRLVPDPVQRERILEVYRRVVDNHEPLHLVAHDLNRRGVLSPKDYFAQLQGREPRGRKWSATALKRSMISVAMLGYATLNGKTVRDDDGAPLVRAEPILTREQLEALRAELAKTSRAKPAVSTPSLLLRVLFCAVCGEPAYKFVGGGRKHPRYRCRSMGFPKHCGNGTVVMAEWDAFCEEQVLNLLGDAERLERVWVAGSDSAVELAEVNAELIDLTSLIGSPAYRAGSPQREALDARIAALAARQEELESLEARPSGWEWRGTGQRFGDWWREQDTAAKNTWLRSMNVRLTFDVRGGLTRTIDFGDLQEYEQHLRLGSVAERLRTGMS

SEQ ID NO: 9328 - protein, 500 aa, synthetic construct
MRVLVVIRLSRVTDATTSPERQLESCQQLCAQRGWDVVGVAEDLDVSGAVDPFDRKRRPNLARWLAFEEQPFDVIVAYRVDRLTRSTRHLQQLVHWAEDHKKLVVSATEAHFDTTTPFAAVVIALMGTVAQMELEAIKERNRSAAHFNIRAGKYRGSLPPWGYLPTRVDGEWRLVPDPVQRERILEVYHRVVDNHEPLHLVAHDLNRRGVLSPKDYFAQLRGREPQGRKWSATALKRSMISEAMLGYATLNGKTVRDDDGAPLVRAEPILTREQLEALRAELVKSSRAKPAVSTPSLLLRVLFCAVCGEPAYKFAGGGRKHPRYRCRSMGFPKHCGNGTVVMAEWDAFCEEQVLDLLGDAGRLEKVWVAGSDSAVELAEVNAELVDLASLIGSPAYRAGSPQREALDARIAALAARQEELEGLEARPSGWEWRETGQRFGDWWREQDTAAKNTWLRSMNVRLTFDVRGGLTRTIDFGDLQEYEQHLRLGSVVERLHTGMP

SEQ ID NO: 9329 - protein, 500 aa, synthetic construct
MRALVVIRLSRVTDATTSPERQLESCQQLCAQRGWDVVGVAEDLNISGAVDPFDRKRRPNLARWLAFEERPFDVIVAYRVDRLTRSVRHLQQLVHWAEDHRKLVVSATEAHFDTTTPFAAVVIALMGTVAQMELEAIKERNRSAAHFNIRAGKYRGSLPPWGYLPTRVGGGWRLAPDPVQRERILEVYHRVVDNHEPLHLVAYDLNRRGVLSPKDYFAQLQGREPQGRKWSATALKRSMTSEAMLGYATLNGKTVRDDDGAPLVRAEPILTREQLEALRAELVKTSRAKPAVSTPSLLLRVLFCAVCGEPAYKFAGGGRKHPRYRCRSMGFPKHCGNGTVAMAEWDAFCEEQVLELLGDAERLEKVWVAGSDSAVELAEVNAELVDLTSLIGSPAYRAGSPQREALDARIAALAARQEELEGLGARPSGWEWRETGQRFGDWWREQDTAAKSTWLRSMNVRLTFDVRGGLTRTIDFGDLQEYEQLLRSGSVVERLHTGMS

SEQ ID NO: 9330 - protein, 500 aa, synthetic construct
MRALVVIRLSRVTDATTSPERQLESCQQLCAQRGWDVVGVAEDLDVSGAVDPFDRKRRPNLARWLAFEEQPFDVIVAYRVDRLTRSTRHLQQLVHWAEDHKKLVVSATEAHFDTTTPFAAVVIALMGTVAQMELEAIKERNRSAAHFNIRAGKYRGSLPPWGYLPTRVDGEWRLVPDPVQRERILEVYHRVVDNHEPLHLVAHDLNRRGVLSPKDYFAQLRGREPQGRKWSATALKRSMISEAMLGYATLNGKTVRDDDGAPLVRAEPILTREQLEALRAELVKTSRAKPAVSTPSLLLRVLFCAVCGEPAYKFAGGGRKHPRYRCRSMGFPKHCGNGTVVMAEWDAFCEEQVLDLLGDAERLEKVWVAGSDSAVELAEVNAELVDLTSLIGSPDYRAGSPQREALDARIAALAARQEELEGLEARPSGWGWRETGQRFGDWWREQDTAAKNTWLRSMNVRLTFDVRGGLTRTVDFGDLQEYEQHLRLGSVVVRSRTGMS

SEQ ID NO: 9331 - protein, 500 aa, synthetic construct
MRALVVIRLSRVTDATTSPERQLESCQQLCAQRGWDVVGVAEDLDVSGAVDPFDRKRRPNLARWLAFEEQPFDVIVAYRVDRLTRSTRHLQQLVHWAEDHKKLVVSATEAHFDTTTPFAAVVIALMGTVAQMELEAIRERNRSAAHFNIRAGKYRGSLPPWGYLPARVDGEWRLVPDPVQRERILEVYHRVVDNHEPLHLVAHDLNRRGVLSPKDYFAQLQGREPQGRKWSATALKRSMISEAMLGYATLNGKTVRDDDGAPLVRAEPILTREQLEALRAELVKASRAKPAVSTPSLLLRVLFCAVCGEPAYKFAGGGRKHPRYRCRSMGFPKHCGNGTVVMAKWDAFCEEQVLDLLGDAERLEKVWVAGSDSAVELAEVNAELVDLTSLIGSPAYRAGSPQRETLDARIAALAARQEELEGLEARPSGWEWRGTGQRFGDWWREQDTAAKNTWLRSMNVRLTFDVRGGLTRTIDFGDLPEYEQHSRLGCVVERLHTGMS

SEQ ID NO: 9332 - protein, 500 aa, synthetic construct
MRALVVIRLSRVTDATTSPERQLESCQQLCAQRGWDVVGVAEDLDVSGAVDPFDRKRRPNLARWLASEEQPFDVIVAYRVDRLTRSTRHLQQLVRWAEDHKKLVVSATEAHFDTTTPFAAVVIALMGTVAQMELEAIKERSRSATHFNIRAGKYRGSLPPWGYLPTRVDGEWRLVPDPVQRERILEVYHRVVDNHEPLHLVAHDLNRRGVLSPKDYFAQLRGREPQGRKWSATALKRSMTSVAMLGYATLNGKTVRGDDGVPLVRAEPILTREQLEALRAELVKTSRAKPAVSTPSLLLRVLFCAVCGGPAYKFVGGGRKHPRYRCRSMGFPEHCGNGTVVMAEWDAFCEEQVLNLLGDAERLEKVWLAGSDSAIELAEVNAELVDLTSLIGSPAYRAGSPQREALDARIAALAARQEELEGLEARPSGWEWRGTGQRFGDWWREQDTAAKNTWLRSMNVRLTFDVRGGLTRTIDFGDLQEYEQHLRLGSVAERLHTGMP

SEQ ID NO: 9333 - protein, 500 aa, synthetic construct
MRALVVIRLSRVTDATTSPERQLESCQQLCAQRGWDIVGVAEDLNVSGAVDPFDRKRRPNLARWLAFEEQPFDVIMAYRVDRLTRSIRHLQQLVHWAEDHKKLVVSATEAHFDTTTPFAAVVIALMGTVAQMELEAIKERNRSAAHFNIRAGKYRGSLPPWGYLPTRVDGEWRLVPDPVQRERILEVYHRVVDNHEPLHLVAHDLNRRGVLSPKDYFAQLRGREPQGRKWSATALKRSMSSEAMLGYATLNGKTVRDDDGAPLVRAEPILTREQLEALRAELVKTSRAKPAVSTPSLLLRVLFCAVCGEPAYKFAGGGRKHPRYRCRSMGFPKHCGNGTVVMAEWDAFCEEQVLDLLGDAECLEKVWVAGSDSAVELAEVNAELVDLTSLIGSPAYRAGSPQREALDARIAALAARQEELEGLEARPPGWEWRETGQRFGDWWREQDTAAKNTWLRSVNVRLTFDVRGGLTRTIDFGDLQEYEQHLRLGSAVERLHTGMS

SEQ ID NO: 9334 - protein, 500 aa, synthetic construct
MRALVVIRLSRVTDATTSPERQLESCQQLCAQRGWDVVGVVEDLDVSGAVDPFDRKRRPNLARWLAFEEQPFDVIVAYRVDRLTRSTRHLQQLVHWAEDHKKLVVSATEAHFDTTTPFAAVVIALMGTVAQMELEAIKERIRSAAHFNIRAGKYRGSLPPWGYLPTRVDGEWRLVPDPAQRERILEVYHRVVDNHEPLHLVAHDLNRRGVLSPKDYFAQLRGREPQGRKWSATALKRSMISVAMLGYATLNGKIVRDDDGAPLVRAEPILTREQQEALRAELAKTSRAKPAVSTPSLLLRVLFCAVCGEPAYKFVGGGRKHPRYRCRSMGFPKHCGNGTVVMAEWDAFCEEQVLDLLGDAERLEKVWVAGSDSAVELAEVNAELVDLTSLIGSPAYRAGSPQREALDARIAALAARQEELEGLEARPSGWEWRETGQRFGDWWREQDTAAKNTWLRSMNVRLTFDVRGGLTRTIDFGDLQEYEQHLRLGSVVERLHTGTT

SEQ ID NO: 9335 - protein, 500 aa, synthetic construct
MRALVVIRLSRVTDATTSPERQLESCQQLCAQRGWDIVGVAEDLDVSGAVDPFDRKRRPNLARWLAFEEQPFDAIVAYRVDRLARSIRHLQQLVHWAEDHKKLVVSATEAHFDTTTPFAAVVIALMGTVAQMELEAIKERNRSAAHFNIRAGKYRGSLPPWGYLPTRVDGEWRLVPDPVQRERILEVYHRVVDNHEPLHLVAHDLNRRGVLSPKDYFAQLRGREPQGREWSATALKRSMTSEAMLGYATLNGKTVCDDDGAPLVRAEPILTREQLEALRAELVKTSRAKPAVSTPSLLLRVLFCAVCGEPAYKFAGGGRKHPRYRCRSMGFPKHCGNGTVVMAEWDAFCEEQVLDLLGDAERLEKVWVAGSDSAVELAEVNAELVDLTSLIGSPAYRAGSPQREALDARIAALAARQEELEGLGARPSGWEWRETGQRFGDWWREQDTAAKNTWLRSMNVRLTFDVRGGLARTIDFGDLQEYEQHLRLGSVVERLRTGMS

SEQ ID NO: 9336 - protein, 500 aa, synthetic construct
MRALVVIRLSRVTDATTSPERQLESCQQLCAQRGWDVVGVAEDLDVSGAVNPFDRKRRPNLARWLAFEEQPFDVIVAYRVDRLTRSVRHLQQLVHWAEDHKKLVVSATEAHFDTTTPFAAVVIALMGTVAQMELEAIKERNRSAAHFNIRAGKYRGSLPPWGYLPTRVDGEWRLVPDPVQRERILEVYHRVVDNHEPLHLVAHDLNRRGVLSPKDYFAQLRGREPQGRKWSATALKRSMTSEAMLGYATLSGKTVRDDDGAPLVRAEPILTRMQLEALRAELVKTSRAKPAVSTPSLLLRVLFCAVCGEPAYKFAGGGRKHPRYRCRSMGFPKHCGNGTVAMAEWDAFCEEQVLDLLGDAERLEKVWVAGSDSAVELAEVNAELVDLTSLIGSPAYRAGSPQREALDARIAALAARQEELEGLEARPSGWEWRETGQRFGDWWREQDTAARNTWLRSMNVRLTFDVRGGLTRTIDFGDLQEYEQHLRLGSVVERLHTGMS

SEQ ID NO: 9337 - protein, 500 aa, synthetic construct
MRALVVIRLSRVTDATTSPERQLESCQQLCAQRGWDVVGVAEDLDVSGAVDPFDRKRRPNLARWLAFEEQPFDVIVAYRVDRLTRSTRHLQQLVHWAEDHKKLVVSATEAHFDTTTPFAAVVIALMGTVAQMELEAIKERNRSAAHFNIRAGKYRGSLPPWGYLPTRVDGEWRLVPDPVQRERILEVYHRVVDNHEPLHLVAHDLNRRGVLSPKDYFAQLRGREPQGRKWSATALKRSMISEAMLGYATLNGKTVRDDDGAPLVRAEPILTREQLEALRAELAKTSRAKPAVSTPSLLLRVLFCAVCGEPAYKFAGGGRKHPRYRCRSMGFPKHCGNGTVAMAEWDAFCEEQVLDLLGDAERLEKVWVAGSDSAVELAEVNAELVDLTSLIGSPAYRAGSPQREALDARIAALAARQEELEGLEARPSGWEWRGTGQRFGDWWREQDTAAKNTWLRSMNVRLTFDVRGGPTRMIDFGDLQEYEQHLRLGSVVERLHTGMS

SEQ ID NO: 9338 - protein, 500 aa, synthetic construct
MRALIVIRLSRVTDATTSPERQLESCQQLCAQRGWDVVGVAEDLDVSGAVDPFDRKRRPNLARWLAFEEQPFDVIAAYRVDRLTRSVRHLQRLVHWAEDHKKLVVSATEAHFDTTTPFAAVVIALMGTVAQMELEAIKERNRSAAHFNIRAGKYRGSLPPWGYLPTRVDGEWRLMPDPVQRERILEVYHRVVDYHEPLHLVAHDLNRRGVLSPKDYFAQLQGREPQGRKWSATALKRSMISGAMLGYATLNGKTVRDDDGAPLVRAEPILTREQLEALRAELVKTSRAKPAVSTPSLLLRVLFCAVCGEPAYKFAGGGRKHPRYRCRSMGFPKHCGNGTVAMAEWDAFCEEQVLGLLGDAERLEKVWVAGSDSAVELAEVNAELVDLTSLIGSPAYRAGSPQRGALDARIAALAARQEELEGLEARPSGWEWRETGQRFGDWWREQDTAAKNTWLRSKNVRLTFDARGGLTRTIDFGDLQEYEQHLRLGSVAERLHTGMS

SEQ ID NO: 9339 - protein, 500 aa, synthetic construct
MRALVVIRLSRVTDATTSPERQLESCQQLCAQRGWDVVGVAEDLDVSGAVDPFDRKRRPNLARWLAFEEQPFDVIVAYRVDRLTRSVRHLQELVHWAEDHKKLVVSATEAHFDTTTPFAAVVIALMGTVAQMELEAIKERNRSAAHFNIRAGKYRGSLPPWGYLPTRVDGEWRLVPDPVQRERILEVYRRVVDNHEPLHLVAHDLNRRGVLSPKDYFAQLQGREPQGRKWSATALKRSMTSVAMLGYATLNGKTVRDDDGAPLVRAEPILTREQLEALRAELVKTSRAKPAVSTPSLLLRVLFCAVCGEPAYKFAGGGRKHPRYRCRSMGFPKHCGNGTVAMAEWDAFCEEQVLDLLGDAERLEKVWVAGSDSAAELAEVNAELVDLTSLIGSPAYRAGSPQREALDARIVALAARQEELEGLEARPSGWEWRGTGQRFGDWWREQDTAAKNTWLRSMNVRLAFDVRGGLTRTTDFGDLQEYRQHLRLGSVVERLHTGMS

SEQ ID NO: 9340 - protein, 500 aa, synthetic construct
MRALVVIRLSRVTVATTSPERQLESCQQLCAQRGWDVVGVAEDLDVSGAVDPFDRKRRPNLARWLAFEEQPFDVIVTYRVDRLTRSTRHLQQLVRWAEDHKKLVVSATEAHFDTTTPFAAVVIALMGTVAQMELEAIKERIRSAVRFNIRAGKYRGSLPPWGYLPARVDGEWRLVPDPVQRERILEVYHRVVNNHEPLHLVAYDLNRRGVLSPKDYFAQLQGREPQGREWSATALKRSMTSEAMLGYATLNGKTVRDDDGAPLVRAEPILTREQQEALRAELAKTSRAKPAVSTPSLLLRVLFCAVCGEPAYKFVGGGRKHPRYRCRSMGFPKHCGNGTVVVAEWDAFCEEQVLDLLGDAERLEKVWVAGSDSVVELAEVNAELVDLTSLIGSQAYRAGSPQREALDARIAALAARQEVLEGLEARPSGWEWRGTGQRLGDWWREQDTAAKNTWLRSMNIRLTFDVRGGLTRTIDFGELQEYEQHLRLGSVAERLHTGMS

SEQ ID NO: 9341 - protein, 500 aa, synthetic construct
MRALVVIRLSRVTDATTSPERQLESCQQLCAQRGWDVVGVAEDLDVSGAVDPFDRKRRPNLARWLAFEEQPFDVIVAYRVDRLTRSTRHLQQLVRWAEDHKKLVVSATEAHFDTTTPFAAVVIALMGTVAQMELEAIKERIRSATHFNIRAGKYRGSLPPWGYLPTRVDGEWRLVPDPVQRERILEVYHRVVGNHEPLHLVAHDLNRRGVLSPKDYFAQLRGREPQGRKWSATALKRSMISVAMLGYATLNGKIVRDDDGAPLVRAEPILTRGQQEALRAELAKTSRAKPAVSTPSLLLRVLFCAVCGEPAYKFVGGGRKHPRYRCRSMGFPEHCGNGTVVMAEWDVFCEEQVLDLLGDAERLEKVWVAGSDSAVELAEVNAELVDLTGLIGSPAYRAGSPQREALDARIAALAARQEELEGLEARPSGWEWRETGQRFGDWWREQDTAAKNAWLRSMNVRLTFDVRSGLTRTIDFGDLQEYEQHLRSGSVAERLHTGMS

SEQ ID NO: 9342 - protein, 500 aa, synthetic construct
MRALVVIRLSRVTDATTSPERQLESCQQLCAQRGWDVVGVAEDLDVSGAVDPFDRKRRPNLARWLAFEERPFDVIVAYRVDRLTRSTRHLQQLVHWAEDHKKLVVSATEAHFDTTTPFAAVVIALMGTVAQMELEAIKERNRSAAHFNIRAGKYRGSLPPWGYLPTRVDGEWRLVPDPVQRERILEVYHRVVDNHESLHLVAHDLNRRGVLSPKDYFAQLQGREPQGRKWSATALKRSMTSEAMLGYATLNGKTVRDDDGAPLVRAEPILTRGQLEALRAELVKTSRAKPAVSTPSLLLRVLFCAVCGEPAYKFAGGGRKHPRYRCRSMGFPRHCGNGTVVMAEWDAFCEEQVLNLLGDAERLEKVWVAGSDSAVELAEVIAELVDLTSLIGSPAYRAGSPQREALDARIAALAARQEELEGLEARPSGWEWRETGQRFGDWWREQDTAAKNTWLRSMNVRLTFDVRGGLTRTIDFGSLQEYEQHLRSGSVVERLHTGMS

SEQ ID NO: 9343 - protein, 500 aa, synthetic construct
MRALVVIRLSRVTDATTSPERQLESCQQLCAQRGWDVVGVAEDLDVSGAVDPFDCKRRPNLARWLAFEERPFDVIVAYRVDRLTRSTRHLQQLVRWAEDHKKLVVSATEAHFDTTTPFAAVVIALMGTVAQMELEAIKERIRSAVRFNIRAGKYRGSLPPWGYLPARVDGEWRLAPDPVQRERILEVYRRVVDNHEPLHLVAYDLNRRGVLSPKDYFAKLQGREPRGRKWSATALKRSMTSEAMLGYATLNGKTVRDDDGAPLVRAEPILTREQLEALRAELVRTSRAKPAVSTPSLLLRVLFCAVCGEPAYKFAGGGRKHTRYRCRSMGFPEHCGNGTVVMAEWDAFCEEQVLDLLGDAERLEKVWVAGSDSAVELAEVNAELVDLTSLIGSPAYRAGSPQREALDTRIAALAARQGELEGLEARPSGWEWRKTGQRFGDWWREQDTAAKNTWLRSMNVRLTFDVRGGLTRTIDFGELQEYEQHLRLGSVVERLHTGTS

SEQ ID NO: 9344 - protein, 500 aa, synthetic construct
MRALVVIRLSRVTDATTSPERQLESCQQLCAQRGWDVVGVAEDLDVSGAVDPFDRKRRPNLARWLTFEEQPFDVIVAYRVDRLTRSTRHLQQLVRWAEDHKKLVVSATEAHFDTTTPFAAVVIALMGTVAQMELEAIKERIRSAVHFNIRAGKYRGSLPPWGYLPTRVDGEWRLVPDPVQRERILEVYHRVVDNHEPLHLVAHDLNRRGVLSPKDYFAQLRGREPRGRKWSATALRRSMTSEAMLGYATLNGKTVRGDDGVPLVRAEPILTREQQEALRAELVKTSRAKPAVSTPSLLLRVLFCAVCGEPAYKFVGGGRKHPRYRCRSMGLPEHCGNGTVAMAEWDAFCEEQVLDLLGDAERLEKVWVAGSDSAVELAEVNAELVDLTSLIGSPAYRAGSPQREALDARIAALAARQEELEGLEARPSGWEWRGTGQRLRDWWREQDTAAKNTWLRSMNVRLTFDVRGGLTRTIDFGDLQEYERHLRLGSVAERLRTGMS

SEQ ID NO: 9345 - protein, 500 aa, synthetic construct
MRALVVIRLSRVTDATTSPERQLESCQQLCAQRGWDVVGVAEDLDVSGAVDPFDRKRRPNLARWLAFEERPFDVIVAYRVDRLTRTIRHLQRLVHWAEDHKKLVVSATEAHFDTTTPFAAVVIALMGTVAQMELEAIKERNRSAAHFNIRAGKYRGSLPPWGYLPTRVDGEWRLVPDPVQRERILEVYHRVVVNHEPLHLVAHDLNRRGVLSPKDYFAQLQGREPQGRKWSATALKRSMISEAMLGYATLNGKTVRDDDGAPLVRAEPILTRVQLEALRAELVKTSRAKPAVSTPSLLLRVLFCAVCGEPAYKFAGGGRKHPRYRCRSMGFPKHCGNGTVAMAEWDAFCEEQVLDLLGDAERLEKVWVAGSDSAVELAEVNAELVDLTSLIGSPAYRAGSPQREALDARIAALAARQEELEGLEARPPGWEWRETGQRFGDWWREQDTAAKNAWLRSMNVRLTFDVRGGLTRTIDFGDLQEYEQLLRLGSVVERLHTGMS

SEQ ID NO: 9346 - protein, 500 aa, synthetic construct
MRALVVIRLSRVTDATTSPERQLESCQQLCAQRGWDVVGVAEDLDVSGAVDPFDRKRRPNLARWLAFEEQPFDVIVAYRVDRLTRSTRHLQQLVHWAEDHKKLVVSATEAHFDTTTPFAAVVIALMGTVAQMELEAIKERNRSAAHFNIRAGKYRGSLPPWGYLPTRVDGEWRLVPDPVQRERILEVYRRVVDDHEPLHLVAHDLNRRGVLSPKDYFAQLRGREPQGRKWSATALKRSMTSEAMLGYATLNGKTVRDDDGAPLVRAEPILTREQLEALRAELVKTSRAKPAVSAPSLLLRVLFCAVCGEPAYKFAGGGRKHPRYRCRSMGFPKHCGNGTVTMAEWDAFCEEQVLDLLGDAERLEKVWVAGSDSAVELAEVNAELVDLTSLIGSPAYRAGSPQREALDARIAALAARQEELEGLEARPSGWEWRETGQRFRDWWREQDTAAKNTWLRSMNVRLTFDVRGGLTRTIDFGDLQEYEQHLRLGSVVERLHTEMS

SEQ ID NO: 9347 - protein, 500 aa, synthetic construct
MRALVVIRLSRVTDATTSPERQLESCRQLCAQRDWDVVGVAEDLDVSGAVDPFDRKRRPNLARWLAFEEQPFDVIVAHRVDRLTRSVRHLQRLVRWAEDHKKLVVSATEAHFDMTTPFAAVVIALMGTVAQMELEAIKERIRSAAHFNIRAGKYRGSLPPWGYLPTRVDGEWRLVPDPVQRERILEVYRRVVDNHEPLHLVAHDLNRRGVLSPKDYFAQLQGREPQGRKWSATALKRSMISKAMLGYATLNGKTVRDDDGAPLVRAEPILTRGQLEALRAELVKTSRAKPAVSTPSLLLRVLFCAVCGEPAYKFVGGGRKHPRYRCRSMGFPEHCGNGTVVMAEWDAFCEKQVLGLLGDAERLEKVWVAGSDSAVELAEVNAELVDLTSLIGSPAYRAGSPQREALDARIAALAARQEELEGLEARPSGWEWRETGQRFGDWWREQDTAAKNTWLRSMNVRLTFDVRGGLTRTIDFGELQEYEQHLRLGSVVERLHTGMS

SEQ ID NO: 9348 - protein, 500 aa, synthetic construct
MRALVVIRLSRVTDATTSPERQLESCQQLCAQRGWDVVGVAEDLDVSGAVDPFDRKRRPNLARWLAFEEQPFDVIVAYRVDRLTRSTRHLQQLVHWAEDHKKLVVSATEAHFDTTTPFAAVVIALMGTVAQMELEAIKERNRSAAHFNIRAGKYRGSLPPWGYLPTRVDGEWRLVPDPVQRERILEVYHRAVDDHEPLHLVAHDLNRRGVLSPKDYFAQLQGREPQGRKWSATALKRSMISEAMLGHATLGGKTVRDDDGAPLVRAEPILTREQLEALRAELAKTSRAKPAVSTPSLLLRVLFCAVCGEPAYKFAGGGRKHPRYRCRSMGFPKHCGNGTVVMAEWDAFCEEQVLNLLGDAERLEKVWVAGSDSAVELAEVNAELVDLTSLIGSPAYRAGSPQREALDARIAALAARQVELEGLEARPSGWEWRGTGQRFGDWWREQDTAAKNTWLRSMNVRLTFDVRGGLTRTIDFGDLQVYEQHLRLGSAVERLHTGMS

SEQ ID NO: 9349 - protein, 500 aa, synthetic construct
MRALVVIRLSRVTDATTSPERQLESCQQLCAQRGWDVVGVAEDLDVSGAVDPFDRKRRPNLARWLAFEEQPFDVIVAYRVDRLTRSTRHLQQLVRWAEDHKKLVVSATEAHFDTTTPFAAVVIALMGTVAQMELEAIKERIRSAAHFNIRAGKYRGSLPPWGYLPTRVNGEWRLVPDPVQRERILEVYHRVVDNHEPLYLVAHDLNRRGVLSPKDYFAQLRGREPQGREWSATALKRSMTSVAMLGYATLNGKIVRDDDGAPLVRAEPILTRGQQEALCAELAKTSRAKPAVSTPSLLLRVLFCAVCGEPAYKFVGGGRKHPRYRCRSTGSPKHCGNGTVVMAEWDAFCEEQVLALLGDAERLEKVWVAGSDSAVELAEVNAELVDLTSLIGSPAYRAGSPQREALDARIAALAARQEELEGLEARPSGWGWRETGQRFGDWWREQDTAAKNTWLRSMNVRLTFDVRGGLTRTIDFGDLQEYEQHLRSGNEVERLHTGMP

SEQ ID NO: 9350 - protein, 500 aa, synthetic construct
MRALVVVRLSRVTDATTSPERQLESCQQLCAQRGWDVVGVAEDLDVSGAVDPFDRKRRPNLARWLAFEERPFDVIVVYRVDRLTRSTRHLQQLVHWAEDHKKLVVSATEAHFDTTTPFAAVVIALMGTVAQMELEAIKERIRSAVHFNIRAGKYRGSLPPWGYLPTRVDGEWRLVPDPVQRERILEVYHRVVDDHEPLHLVAHDLNRRGVLSPKDYFAQLQGREPQGRKWSATALRRSMTSVAMLGYATLNGKTVRDDDGAPLVRAEPILTREQLEALRAELVKTSRAKPAVSTPSLLLRVLFCAVCGEPAYRFVGGGRKHPRYRCRSMGFPEHCGNGTVAMAEWDAFCEEQVLDLLGDAERLEKVWVAGSDSAVELAEVNAELVDLTSLIGSPAYRAGSPQREALDARIAALAARQEELEGLEARPSGWEWRETGQRFGDWWREQDTAAKNTWLRSMNVRLTFDVRGGLTRTIDFGDLQEYERHLRLGSVAERLRTGMS

SEQ ID NO: 9351 - protein, 500 aa, synthetic construct
MRALVVIRLSRVTDATTSPERQLESCQQLCAQRGWDVVGVAEDLDVSGAVDPFDRKRRPNLARWLAFEEQPFDVIVVYRVDRLTRSTRHLQRLVRWAEDHKKLVVSATEAHFDTTTPFAAVVIALMGTVAQMELEAIKERIRSAAHFNIRAGKYRGSLPPWGYLPTRVDGEWRLVPDPVQRERILEVYHRVVVNHEPLHLVAYDLNRRGVLSPKDYFAQLRGREPRGRKWSATALKRSMTSKAMLGYATLNGKTVRDDDGAPLVRAEPILTREQQEALRAELAKTSRAKPAVSTPSLLLRVLFCAVCGEPAYKFVGGGRKHPRYRCRSMGLPKHCGNGTVVTAEWDAFCEEQVLALLGDAERLEKVWVAGSDSAVELAEVNAELVDLTSLIGSPAYRAGSPQREALDARIAALAARQEELEGLEARPSGWEWRGTGQRFGDWWREQDTAAKNTWLRSMNVRLTFDVRGGLTRTIDFGDLQVYEQHLRLGSVVERLHTGMS

SEQ ID NO: 9352 - protein, 500 aa, synthetic construct
MRALVVIRLSRVTDATTSPERQLESCQQLCAQRGWDVVGVAEDLDVSGAVDPFDRMRRPSLARWLAFEEQPFDVIVAYRVDRLTRSVRHLQQLVHWAEDHKKLVVSATEAHFDTTTPFAAVVIALMGTVAQMELEAIKERIRSAVRFNIRAGKYRGSLPPWGYLPTRVDGEWRLVPDPAQRERILEVYHRVVDNHEPLHLVAHDLNRRGVLSPKDYFAQLQGREPQGRKWSATALRRSMISGAMLGYATLNGKTVRGDDGAPLVRAEPILTREQQEALRAELAKTSRAKPAVSSPSLLLRVLFCAVCGEPAYKFVGGGRKHPRYRCRSMGSPKHCGNGTVVVAEWDAFCEEQVLDLLGDVERLEKVWVAGSDFAVELAEVNAELVDLTSLIGSPAYRAGSPQREALDARIAALAARQEELEGLEARPSGWEWRETGQRFGDWWREQDTAAKNTWLRSMNVRLTFDARGGLTRTIDFGDLQEYEQHLRLGGVVERLHTGMS

SEQ ID NO: 9353 - protein, 500 aa, synthetic construct
MRALVVIRLSRVTDATTSPERQLESCQQLCAQRGWDVVGIAEDLDVSGAVDPFDRKRRPNLARWLAFEEQPFDAIVAYRVDRLTRSIRHLQQLVHWAEDHKKLVVSATEAHFDTTTPFAAVVIALMGTVAQMELEAIKERIRSAVHFNIRAGKYRGSLPPWGYLPTRVDGEWRLVPDPVQRERILEVYHRVVDNREPLHLVAHDLNRRGVLSPKDYFAQLQGREPQGRKWSATALKRSMTSVAMLGYATLNGKIVRDDDGAPLVRAEPILTREQQEALRAELAKTSRAKPAVSAPSLLLRVLFCAVCGEPAYKFVGGGRKHPRYRCRSMGFPEHCGNGTVVMAEWDAFCEEQVLDLLGDAERLEKVWVAGSDSAVELAEVNAELVDLTSLIGSPAYRAGSPQREALDTRIAALAARQGELEGLEARPSGWEWRGTGQRLGDWWREQDTAAKNTWLRSMNVRLTFDVRGGLTRTIDFGDLQEYEQHLRLGSVVERLHTGTP

SEQ ID NO: 9354 - protein, 500 aa, synthetic construct
MRALVVIRLSRVTDATTSPERQLESCQQLCAQRGWDVVGVAEDLDVSGAVDPFDRKRRPNLARWLAFEEQPFDVIVAYRVDRLTRSTRHLQQLVHWAEDHKKLVVSATEAHFDTTTPFAAVVIALMGTVAQMELEAIKERSRSAAHFNIRAGKYRGSLPPWGYLPTRVDGEWRLVPDPVQRERILEVYHRVVDNHEPLHLVAHDLNRRGVLSPKDYFAQLRGREPQGRKWSATALKRSMTSVAMLGYATLNGKTVRDDDGAPLVRAEPILTREQLEALRAELVKTSRAKPAVPTPSLLLRVLFCAVCGEPAYKFVGGGRKHPRYRCRSMGSPKHCGNGTVVMTEWDAFCEEQVLDLLGDAERLEKVRVAGSDSAVELAEVNAELVDLTSLIGSPAYRAGSPQREALDARIAALAARQEELESLEARPSGWKWRGTGQRFGDWWREQDTAAKNAWLRSMNVRLTFDARGGLTRTIDFGELQEYEQHLRLGSVAERLHTGMS

SEQ ID NO: 9355 - protein, 500 aa, synthetic construct
MRALVVIRLSRVTDATTSPERQLESCQQLCAQRGWDVVGVAEDLDVSGAVDPFDRKRRPNLARWLAFEEQPFDVIVAYRVDRLTRSTRHLQQLVHWAEDHKKLVVSATEAHFDTTTPFAAVVIALMGTVAQMELEAIKERNRSAAHFNIRAGKYRGSLPPWGYLPTRVDGEWRLVPDPVQRERILEVYHRVVDNHEPLHWVAHDLNRRGVLSPKDYFAQLRGREPQGRKWSATALKRSMISEAMLGYATLNGKTVRDDDGAPLVRAEPILTREQLEALRAELVKTSRAKPAVSTPSLLLRVLFCAVCGEPAYKFAGGGRKHPRYRCRSMGFPKHCGNGTVVMAEWDAFCEEQVLDLLGDAERLEKVWVVGSDSAVELAEVNAELVDLTNLIGSPAYRAGSPQREALDARIAALAARQEELEGLEARPSGWEWRETGRRFGDWWREQDTAAKNAWLRTMNVRLTFDVRGGLTRTIDFGDLQEYEQHLRSGSVVERLDTGMS

SEQ ID NO: 9356 - protein, 500 aa, synthetic construct
MRALVVIRLSRVTDATTSPERQLESCQQLCAQRDWDVVGVAEDLDVSGAVDPFDRKRRPNLARWLAFEEQPFDVIVAYRVDRLTRSVRHLQQLVHWAEDHKKLVVSATEAHFDTTTPFAAVVIALMGTVAQMELEAIKERNRSAAHFNIRAGKYRGSLPPWGYLPARVDGEWRLVPDPVQRERILEVYLRVVDNHESLHLVAHDLNRRGVLSPKDYFAQLRGREPQGRKWSATALKRSMISEAMLGYATLNGKTVRDDDGAPLVRAEPILTRGQLEALRAELAKTSRAKPAVSTPSLLLRVLFCAVCGEPAYKFAGGGRKHPRYRCRSMGFPKHCGNGTVVMAEWDAFCEEQVLDLLGDAERLEKVWVAGSDSAVELAEVNAELVDLTSLIGSPAYRAGSPQREALDARIAALAARQEELEGLEARPSGWEWRGTGQRFGDWWREQDTAAKNTWLRSMNVRLTFDIRGGLTRTIDFGDLQEYEQHLRLGSVVERLHTGMS

SEQ ID NO: 9357 - protein, 500 aa, synthetic construct
MRALVVIRLSRVTDATTSPERQLESCQQLCAQRGWDVVGVAEDLDVSGAVDPFDHKRRPSLARWLAFEEQPFDVVVAYRVDRLTRSVRHLQQLVHWAEDHKKLVVSATEAHFDTTTPFAAVVIALMGTVAQMELEAIKERSRSAAHFNIRAGKYRGSLPPWGYLPTRVDGEWRLAPDPVQRERILEVYHRVVDDHEPLHLVAHDLNRRGVLSPKDYFAQLQGREPQGRKWSATALKRSMISEAMLGYATLNGKIVRDGDGTPLVRAEPILTREQLEALRAELVKTSRAKPAVSTPSLLLRVLFCAVCGEPAYKFAGGGRKHPRYRCRSMGFPKHCGNGTVAMAEWDAFCEEQVLDLLGDAERLERVWVAGSDSAVELAEVNAELVDLTSLIGSPAYRAGSPQREALDARIAALAARQEELEGLGARPSGWEWRETGQRFGDWWREQDTAAKNTWLRSMNVRLTFDARGGLTRTIDFGDLLEYEQHLRPGSVVERLHTGMS

SEQ ID NO: 9358 - protein, 500 aa, synthetic construct
MRALVVIRLSRVTDATTSPERQLESCQQLCAQRSWDVVGVAEDLDVSGAVDPFDRKRRPNLARWLAFEERPFDVIVAYRVDRLTRSVRHLQRLVRWAEDHKKLVVSATEAHFDMTTPFAAVVIALMGTVAQMELEAIKERIRSAAHFNIRAGKYRGSLPPWGYLPTRVDGEWRLVPDPVQRERILEVYHRVVDDHEPLYLVAHDLNRRGVLSPKDYFAQLRGREPQGRKWSATALKRSMTSEAMLGYATLNGKTVRDDDGAPLVRAEPILTREQLEALRAELAKTSRAKPAVSTPSLLLRVLFCAVCGEPAYKFAGGGRKHPRYRCRSIGSPKHCGNGTVAVAEWDAFCEEQVLDLLGDAERLEKVWVAGSDSAVELAEVNAELVDLTSLIGSPAYRAGSPQREALDARIAALAARQEELEGLEARPSGWEWRETGQRFRDWWREQDTAAKNAWLRSVNVRLTFDVRGGLTRTIDFGDLQEYEQHLRLGSVVEHLRIGMS

SEQ ID NO: 9359 - protein, 500 aa, synthetic construct
MRALVVIRLSRVTDATTSPERQLESCQQLCAQRGWDVVGVAEDLDVSGAVDPFDRKRRPSLARWLAFEEQPFDVIVAYRVDRLTRSTRHLQQLVRWAEDHKKLVVSATEAHFDTTTPFAAVVIALMGTVAQMELEAIKERIRSAVHFNIRAGKYRGSLPPWGYLPARVDGEWRLVPDPVQRERILEVYRRVVDNHEPLHLVAHDLNRRGILSPKDYFAQLQGREPQGRKWSATALKRSMTSVAMLGYATLNGKTVRDDDGAPLVRAEPILTREQLEALRAELAKTSRAKPAVSTPSLLLRVLFCAVCGEPAYKFVGGGRKHLRYRCRSMGFPEHCGNGTVVMAEWDAFCEEQVLDLLGDAERLEKVWVAGSDTSVELAEVNEELVDLTSLIGSPAYRAGSPQREALDARIAALAARQEELEGLEARPSGWEWRETGQRFGDWWREQDTAAKNTWLRSMNVRLTFDVRGGLTRTIDFGDLQEYKQHLRSGSVVKRLHTGMS

SEQ ID NO: 9360 - protein, 500 aa, synthetic construct
MRALVVIRLSRVTDATTSPERQLESCQQLCAQRGWDVVGVAEDLDVSGAVDPFDRKRRPNLARWLAFEEQPFDAIVAYRVDRLTRSVRHLQQLVHWAEDHKKLVVSATEAHFDTTTPFAAVVIALMGTVAQMELEAIKERNRSAAHFNIRAGKYRGSLPPWGYLPTRVDGEWRLVPDLVQRERILEVYHRVVDNHEPLHLVAHDLNRRGVLSPKDYFAQLRGREPQGRKWSATALKRSMISEAMLGYATLNGKTVRDDDGAPLVRAEPILTREQLEALRAVLVKTSRAKPAVSTPSLLLRVLFCAVCGEPAYKFAGGGRKHPRYRCRSMGFPKHCGNGTVAMAEWDAFCEEQVLDLLGDAERLEKVWVAGSDSAVELAEVNAELVDLTSLIGSPAYRAGSPQREALDARIAALAARQEELEGLEARPSGWGWRETGQRFGDWWREQDTAAKNTWLRSMNIRLTYDVRGGLTRTIDLGDLQEYEQHLRLGSVVERLHTGMS

SEQ ID NO: 9361 - protein, 500 aa, synthetic construct
MRALVVIRLSRVTDATTSPERQLESCQQLCAQRGWDVVGVAEDLDVSGAVDPFDRKRRPNLARWLAFEEQPFDVIVAHRVDRLTRSTRHLQQLVHWAEDHKKLVVSATEAHFDTTTPFAAVVIALMGTVAQMELEAIKERNRSAAHFNIRAGKYRGSLPPWGYLPTRVDGEWRLVPDPVQRERILEVYHRVVGNHEPLHLVAHDLNRRGVLSPKDYFAQLQGREPQGRKWSATALKRSLISEAMLGYATLNGKTVRDDDGAPLVRAEPILTREQLEALRAELAKTSRVKPAVSTPSLLLRVLFCAVCGEPAYKFAGGGRKHPRYRCRSVGFPKHCGNGTVAMAEWDAFCEEQVLGLLGDAERLEKVWVAGSDSAVELAEVNAELADLTSLIGSPAYRAGSPQREALDARIAALAARQEELEGLEARPSGWEWRGTGQRFGDWWRGQDTAAKNTWLRSMNVRLTFDVRGGLTRTIDFGGLQEYEQHLRLGSVVGRLHTRMS

SEQ ID NO: 9362 - protein, 500 aa, synthetic construct
MRALVVIRLSRVTDATTSPERQLESCQQLCAQRGWDVVGVAEDLDVSGAVDPFDRKRRPNLARWLAFEEQPFDVIVAYRVDRLTRSTRHLQQLVRWAEDHKKLVVSATEAHFDTTTPFAAVVIALMGTVAQMELEAIKERIRSAVHFNIRAGKYRGSLPPWGYLPTRVDGEWRLVPDPVQRERILEVYHRVVDNHEPLHLVAHDLNRRGVLSPKDYFAQLRGREPQGRKWSATALKRSMISGAMLGYATLNGKTVRDDDGAPLVRAEPILTREQLEALRAELVKTSRAKPAVSTPSLLLRVLFCAVCGEPAYKFVGGGRKHPRYRCRSMGFPEHCGNGTVVMAEWDAFCEEQVLNLLGDAERLEKVWVAGSGSAVELAEVNAELVDLMSLIGSPAYRAGSPQREALDARIAALAARQVELEGLEARPSGWGWRETGQRFGDWWREQDTAAKNTWLRSMNVRLTFDARGGLTRTIDFGDLQEYVQHLRLGSVVGRLHTGMS

SEQ ID NO: 9363 - protein, 500 aa, synthetic construct
MRALVVIRLSRVTDATTSPERQLESCRQLCAQRGWDVVGVAEDLDVSGAVDPFDRKRRPNLARWLAFEEQPFDVVVAYRVDRLTRSVRHLQQLVRWAEDHEKLVVSATEAHFDTTTPFAAVVIALMGTVAQMELEAIKERIRSAVRFNIRAGKYRGSLPPWGYLPTRVDGEWRLVPDPVQRERILEVYHRVVDNHEPLHLVAHDLNRRGVLSPKDYFAQLRGREPQGRKWSATALKRSMTSVAMLGHATLNGKTVRDDDGAPLVRAEPILTREQQEALRAELAKTSRAKPAVSTPSLLLRVLFCAVCGEPAYKFVGGGRKHPRYRCRSMGFPEHCGNGTVVMAEWDAFCEEQVLDLLGDAERLEKVWLAGSDSAAELAEVNAELVDLTSLIGSPAYRAGSPQREALDARIAALAARQEELESLEARPSGWEWRGTGQRFGDWWRVQDTAAKNTWLRSMSVRLTFDVRGGLTRTIDLGDLQEYEQHLRLDSVAERLHTGMS

SEQ ID NO: 9364 - protein, 500 aa, synthetic construct
MRALVVIRLSRVTDATTSPERQLESCQQLCAQRGWDVVGVAEDLDVSGAVDPFDRKRRPNLARWLAFEQQPFDVIVAYRVDRLTRSVRHLQRLVHWAEDHKKLVVSATEAHFDTTTPFAAVVIALMGTVAQMELEAIKERSRSAAHFNIRAGKYRGSLPPWGYLPTRVDGEWRLVPDPVQRERILEVYHRVVDNHEPLHLVAHDLNRRGVLSPKDYFAQLRGREPQGREWSATALKRSMVSKAMLGYATLSGKIVRDDDGAPLVRAEPILTREQQEALRAELAKTSRAKPAVSTPSLLLRVLFCAVCGEPAYKFVGGGRKHPRYRCRSMGFPRHCGNGTVVMAEWDAFCEEQVLDLLGDAERLEKVWVVGSDSSVELAEVNAELVDLTSLIGSPAYRAGSPQREALDARIAALAARQEELEGLEAHPSGWEWRGTGQRFGDWWREQDTAAKNTWLRSMNVRLTFDARGGLTRTIDFGDLQEYKHHLRLGSADERLHTGML

SEQ ID NO: 9365 - protein, 500 aa, synthetic construct
MRALVVIRLSRVTDATTSPERQLESCQQLCAQRGWDVVGVAEDLDVSGAVDPFDRKRRPNLARWLAFEEQPFDVIVAYRVDRLTRSTRHLQQLVHWAEDHEKLVVSATEAHFDTTTPFAAVVIALMGTVAQMELEAIKERNRSAAHFNIRAGKYRGSLPPWGYLPTRVDGEWRLVPDPVQRERILEVYHRVVDSHEPLHLVAHDLNRRGVLSPKDYFAQLRGREPQGRKWSATALKRSMISEAMLGYATLNGKTVRGDDGAPLVRAEPILTREQLEALRAELVKTSRAKPAVSTPSLLLRVLFCAVCGEPAYKFAGGGRKHPRYRCRSMGFPKHCGNGTAAMAEWDAFCEEQVLNLLGDAERLEKVWVAGSDSAVELAEVNAELVDLTSLIGSPAYRAGSPQREALDARIAALAARQEELEGLGARPSGWEWRETGQRFGDWWREQDTAAKNTWLRSMNVRLTFDVRGGLTRTIDFGDLQEYVQHLRLGSVVERLHTGML

SEQ ID NO: 9366 - protein, 500 aa, synthetic construct
MRALVVIRLSRVTDATTSPERQLESCQQLCAQRGWDVVGVAEDLDVSGAVDPFDRKRRPNLARWLAFEEQPFDVIVAYRVDRLTRSVRHLQELVHWAEDHKKLVVSATEAHFDTTTPFAAVVIALMGTVAQMELEAIKERNRSAAHFNIRAGKYRGSLPPWGYLPTRVDGEWRLMPDPVQRERILEVYRRVVDNHEPLHLVAHDLNRRGVLSPKDYFAQLQGREPQGRKWSATALKRSMTSVAMLGYATLNGKTVRDDDGAPLVRAEPILTREQLGALRAELVKTSRAKPAVSTPSLLLRVLFCAVCGEPAYKFAGGGRKHPRYRCRSMGFPKHCGNGTVAMAEWDAFCEEQVLDLLGDAERLEKVWVAGSDSAVELAEVNAELVDLTSLIGSPAYRAGSQQREALDARIAALAARQEELEGLEARPSGWEWRETGQRFGDWWREQDTAAKNTWLRSMNVRLTFDARGGPTRTIDFGDLQEYEQHLRLGSVVERLHTGMS

SEQ ID NO: 9367 - protein, 500 aa, synthetic construct
MRALVVIRLSRVTDATTSPERQLESCQQLCAQRGWDVVGVAEDLDVSGAVDPFDRKRRPSLARWLASEEQPFDVIVAYRVDRLTRSTRHLQQLVHWAEDHKKLVVSATEAHFDTTTPFAAVVIALMGTVAQMELEAIKERNRSAARFNIRAGKYRGSLPPWGYLPTRVDGEWRLVPDPVQRERILEVYHRVVDSHEPLHLVAHDLNRRGVLSPKDYFAQLRGRKPQGRKWSATALKRSMISEAMLGYATLNGKTVRDDDGAPLVRAEPILTREQLEALRAELVKTPRAKPAVSTPSLLLRVLFCAVCGEPAYKFAGGGRKHPRYRCRSMGFPKHCGNGTVVMAEWDAFCEEQVLGLLGDAERLEKVWVVGSDSVVELAEVNAELVDLMSLIGSPAYRAGSPQREALDARIAALAARQEELEGLEARPSGWEWRGTGQRFGDWWREQDTAAKNTWLRSMNVRLTFDVRGGLTRTIDFGDLQEYAQHLRLGSVVERLHTGMS

SEQ ID NO: 9368 - protein, 500 aa, synthetic construct
MRALVVIRLSRVTEATTSPERQLESCQRLCAQRGWDVVGVAEDLDVSGAVDPFDRKRRPNLARWLAFEEQPFDVIVAYRVDRLTRSVRHLQQLVHWAEDHRKLVVSATEAHFDTTTPFAAVVIALMGTVAQMELEAIKERNRSAAHFNIRAGKYRGSLPPWGYLPARVDGVWRLVPDPVQRERILEVYHRVVDNHEPLHLVAHDLNRRGVLSPKDYFAQLQGREPQGHKWSATALKRSMTSEAMLGYATLNGKTVRDDDGAPLVRAEPILTREQLEALRAELVKTSRAKPAVSTPSLLLRVLFCAVCGEPAYKFAGGGRKHPRYRCRSMGFPKHCGNGTVVMAEWDAFCEEQVLDLLGDAERLEKVWVAGSDSAVELAEVNAELVDLTSLIGSPVYRAGSPQREALDARIAALAARQEELEGLEARPSGWEWRETGQRFGDWWREQDTAAKNTWLRSMNVRLTFDVRGGLVRTIDFGDLQEYEPHLRLGSVAERLHSGMS

SEQ ID NO: 9369 - protein, 500 aa, synthetic construct
MRALVVIRLSRVTDATTSPERQLESCQQLCAQRGWDVVGVAEDLDVSGAVDPFDRKRRPNLARWLAFEEQPFDAIVAYRVDRLTRSVRHLQQLVHWAEDHKKLVVSATEAHFDTTTPFAAVVIALMGTVAQMELEAIKERNRSAAHFNIRAGKYRGSLPPWGYLPTRVDGEWRLVPDPVQRERILEVYHRVVDNHEPLHLVAHDLNRRGVLSPKDYFAQLRGREPRGRKWSATALKRSMISEAMLGYATLNGKTVRDDDGAPLVRAEPILTREQLEALRAVLVKTSRAKPAVSTPSLLLRVLFCAVCGEPAYKFAGGGRKHPRYRCRSMGFPKHCGNGTVAMAEWDAFCEEQVLDLLGDAERLEKVWVAGSDSAVELAEVNAELVDLTSLIGSPAYRAGSPQREALDARIAALAARQEELEGLEARPSGWGWRETGQRFGDWWREQDTAAKNTWLRSMNIRLTYDVRGGLTRTIDLGDLQEYEQHLRLGSVVERLHTGMS

SEQ ID NO: 9370 - protein, 500 aa, synthetic construct
MRALVVIRLSRVTDATTSPERQLESCQQLCAQRGWDVVGVAEDLDVSGAVDPFDRKRRPNLARWLAFEERPFDVIVAYRVDRLTRSTRHLQQLVHWAEDHKKLVVSATEAHFDTATPFAAVVIALMGTVAQMELEAIKERNRSAAHFNIRAGKYRGSLPPWGYLPTRVDGEWRLVPDPVQRERILEVYHRVVDNHEPLHLVAHDLNRRGVLSPKDYFAQLRGREPQGRKWSATALKRSMISEAMLGYATLNGKIVRDDDGAPLVRAEPILTREQLEAIRAELVKTSRAKPAVSTPSLLLRVLFCAVCGEPAYKFAGGGRKHPRYRCRSMGFPKHCGNGTVAMAEWDAFCEEQVLNLLGDAERLEKVWVAGSGSAVELAEVNAGLVDLTSLIGSPAYRAGSPQREALDARIAALAARQEELEGLEARPSGWEWRGTGQRFGDWWREQDTAAKNTWLRSMNVRLTFDVRGGLTRTVDFGDLQEYEQHLRLGSVVERLHTGMP

SEQ ID NO: 9371 - protein, 500 aa, synthetic construct
MRALVVIRLSRVTDATTSPERQLESCQQLCAQRGWDVVGVAEDLDVSGAVDPFDRKRRPNLARWLAFEEQPFDVIVAHRVDRLTRSTRHLQQLVRWAEDHKKLVVSATEAHFDTTTPFAAVVIALMGTVAQMELEAIKERNRSAAHFNIRAGKYRGSLPPWGYLPTRVDGEWRLVPDPVQRERILEVYHRVVDNHEPLHLVAHDLNRRGVLSPKDYFAQLRGREPRGRKWSATALKRSMISEAMLGYATLNGKTVRDDDGAPLVRAEPILTREQLEALRAELAKTSRAKPAVSTPSLLLRVLFCAVCGEPAYKFAGGGRKHPRYRCRSMGFPKHCGNGTVVMAEWDAFCEEQVLDLLGDAERLEKVWVAGSDSAVELAEVNAELVDLTSLIGSPAYRAGSPQREALDARIAALAARQEELEGLEARPSGWEWRGTGQRFGDWWREQDTAAKNTWLRSMNVRLTFDVRGGLTRTIDFGDLQECEQHLRSGSVVERLHIGMS

SEQ ID NO: 9372 - protein, 500 aa, synthetic construct
MRALVVIRLSRVTDATTSPERQLESCQQLCAQRGWDVIGVAEDLDVSGAVDPFDRKRRPNLARWLASEEQPFDVIVAYRVDRLTRSTRHLQQLVHWAEDHKKLVVSATEAHFDTTTPFAAVVIALMGTVAQMELEAIKERIRSAAHFNIRAGKYRGSLPPWGYLPTRVDGEWRLVPDPVQRERILEVYHRVVDNHEPLHLVAHDLNRRGVLSPKDYFAQLQGREPQGRKWSATALRRSMTSVAMLGYATLNGKIVRDDDGAPLVRAEPILTREQQEALRAELAKTSRAKPAVSTPSLLLRVLFCAVCGEPAYKFAGGGRKHPRYRCRSMGFPKHCGNGTVVMAEWDAFCEEQVLNLLGDAERLEKVWVAGSDSAVELAEVNAELVDLTSLIGSPAYRAGSPQREALDARIAALAARQGELEGLEARPSGWEWRGTGQRFEDWWREQDTAAKNTWLRSMNVRLTFDVRSGLTRTIDFGDLQEYEQHLRLGSVAERLRTGMS

SEQ ID NO: 9373 - protein, 500 aa, synthetic construct
MRALVVIRLSRVTDATTSPERQLESCQQLCAQRGWDVVGVAEDLDVSGAVDPFDRKRRPNLARWLAFEEQPFDVIVAYRVDRLTRSTRHLQQLVRWAEDHKKLVVSATEAHFDTTTPFAAVVIALMGTVAQMELEAIKERIRSAVHFNIRAGKYRGSLPPWGYLPTRVDGEWRLVPDPVQRERILEVYHRVVDNHEPLHLVAYDLNRRGVLSPKDYFAQLRGREPQGCKWSATALKRSMISVAMLGYATLNGKTVRDDNGAPLVRAEPILTREQLEALRAELVRTSRAKPAVSAPSLLLRVLFCAVCGEPAYKFVGGGRKHPRYRCRSMGFPEHCGNGTVVVAECDAFCEEQVLDLLGDAERLEKVWVAGSDSAIELAEVNAELVDLTSLIGSPAYRAGSPQREALDARIAALAARQEELEGLEARPSGWEWRETGQRFGDWWREQDTASKNTWLRSMNVRLTFDVRGGLTRTIDFGDLQEYEQHLRLGRVVERLHTGMS

SEQ ID NO: 9374 - protein, 500 aa, synthetic construct
MRALVVVRLSRVTDATTSPERQLESCQRLCAQRGWDVVGVAEDLDVSGAVNPFDRKRRPNLARWLAFEEQPFDVIVAYRVDRLTRSVRHLQQLVHWAEDHRKLVASATEAHFDTTTPFAAVVIALMGTVAQMELEAIKERNRSAAHFNIRAGKYRGSLPPWGYLPTRVDGEWRLVPDPVQRERILEVYHRVVDNHEPLHLVAHDLNRRGVLSPKDYFAQLRGREPQGRKWSATALKRSMISEAMLGYATLNGKTVRDDNGAPLVRAEPILTREQLGALRAELVRTSRAKPAVSTPSLLLRVLFCAVCGKPAYKSAGGGRKHPRYRCRSMGFPKHCGNGTVVMAEWDAFCEEQVLDLLGDAERLEKVWVAGSDSAVELAEVNAELVDLTSLIGSPAYRAGSPQREALDARIAALAARQEELEGLEARPPGWEWRETGQRFGDWWREQDTAAKNTWLRSMNVRLTFDVRGGLTRTIDFGDLQEYEQHLRLGGVVERLHTGMS

SEQ ID NO: 9375 - protein, 500 aa, synthetic construct
MRALIVIRLSRVTDATTSPVRQLESCQQLCAQRGWDVVGVAEDLDVSGAVDPFDRKRRPNLARWLAFEEQPFDAIVAYRVDRLTRSVRHLQQLVHWAEDHKKLVVSATEAHFDTTTPFAAVVIALMGTVAQMELEAIKERNRSAAHFNIRAGKYRGSLPPWGYLPARVDGVWRLVPDPVQRERIFEVYHRVVDNHEPLHLVAHDLNRRGVLSPKDYFAQLQGREPQGRKWSATALKRSMTSEAMLGYATLNGKTVRDDDGAPLVRAEPILTREQLEALRAELVKTSRAKPAVSTPSLLLRVLFCAVCGEPAYKFAGGGRKHPRYRCRSTGFPKHCGNGTVVMAEWDAFCEEQVLNLLGDAERLEKVWVAGSDSAVELAEVNAELVDLTSLIGSPAYHAGSPQREALDARIAALAARQEELEGLEARPSGWEWRETGQRLGDWWREQDTAAKNTWLRSMNVRLTFDVRGGLTRTIDFGDLQEYEQHLRLGSVVERLHAGMS

SEQ ID NO: 9376 - protein, 500 aa, synthetic construct
MRALVVIRLSRVTDATTSPERQLESCQQLCAQRGWDVVGVAEDLDVSGAVDPFDRKRRPNLARWLAFEEQPFDVIVAYRVDRLTRSTRHLQQLVHWAEDHKKLVVSATEAHFDTTTPFAAVVIALMGTVAQMELEAIKERNRSAAHFNIRAGKYRGSLPPWGYLPTRVDGEWRLAPDPVQRERILEVYHRVVVNHEPLHLVAHDLNRRGVLSPKDYFAQLRGREPQGRKWSATALKRSMISEAMLGYATLNGKTVRDDDGAPLVRAEPILTREQLEALRAELDKTSRAKPAVTTPPLLLRVLFCAVCGEPAYKFAGGGRKHPRYRCRSMGFPKHCGNGTVVMAEWDAFCEEQVLGLLGDAERLEKVWVAGSDSAVELAEVNAELVDLTSLIGSPAYRAGSPQREALDARIAALVARQEELEGLEARPSGWEWRGTGQRFGDWWREQDTAAKNAWLRSMNVRLTFDVRGGLTRAIDFGGLQEYEQHLRLGSVVERLHTGMS

SEQ ID NO: 9377 - protein, 500 aa, synthetic construct
MRALVVIRLSRVTDATTSPERQLESCQQLCAQRGWDVVGVAEDLDVSGAVDPFDRKRRPNLARWLAFEQQPFDVIVAYRVDRLARSIRHLQQLVHWAEDHKKLVVSATEAHFDTTTPFAAVVIALMGTVAQMELEAIKERNRSAAHFNIRAGKYRGSLPPWGYLPTRVDGEWRLVPDPVQRERILEVYHRVVDNHEPLHWVAHDLNRRGVLSPKDYFAQLRGREPQGRKWSATALKRSMISEAMLGYATLNGKTVRDDDGAPLVRAEPILTREQLEALRAELVKTSRAKPAVSTPSLLLRVLFCAVCGEPAYKFAGGGRKHPRYRCRSMGYPKHCGNGTVVMAEWDAFCEEQVLDLLGDAERLEKVWVAGSDSAVELAEVNAELVDLTSLIGSPAYRAGSPQREALDARIAALAARQEELEGLGARPSGWEWRETGQRFGDWWREQDTAAKNTWLRSMNVRLTFDVRGGLTRTIDFGDLQEYEQHLRLGSVVERLHTGMS

SEQ ID NO: 9378 - protein, 500 aa, synthetic construct
MRALVVIRLSRVTDATTSPERQLESCQQLCAQRGWDVVGVAEDLDVSGAVDPFDRKRRPNLARWLAFEEQPFDAIVAYRVDRLTRTIRHLQQLVHWAEDHKKLVVSATEAHFDTTTPFAAVVIALMGTVAQMELEAIKERNRSAAHFNIRAGKYRGSLPPWGYLPTRVDGEWRLVPDPVQRERILEVYHRVVDNHEPLHLVAHDLNRRGVLSPKDYFAQLQGREPRGRKWSATALKRSMTSEAMLGYATLNCKTVRVDDGAPLVRAEPILTREQLEALRAELVRTSRAKPAVSTPSLLLRVLFCAVCGEPAYKFAGGGRKHPRYRCRSMGFPKHCGNGTVVMAEWDAFCEEQVLDLLGGAERLERVWVAGSDSAVELAEVNAELVDLTGLVGSPAYRAGSPQREALDARIAALAARQEELEGSGARPSGWEWRETGQRFGDWWREQDTAAKNTWLRSMNVRLTFDVRGGLTRTIDFGDLREYEQHLRLGSVVERLHTGMS

SEQ ID NO: 9379 - protein, 500 aa, synthetic construct
MRALVVIRLSRVTDATTSPERQLESCQQLCAQRGWDVVGVAEDLDVSGAVDPFDRKRRPNLARWLAFEEQPFDAIVAYRVDRLTRSVRHLQQLVHWAEDHKKLVVSATEAHFDTTTPFAAVVIALMGTVAQMELEAIKERNRSAAHFNIRAGKYRGSLPPWGYLPTRVDGEWRLVPDPVQRERILEVYHRVVDNHEPLHLVAHDLNRRGVLSPKDYFAQLQGREPQGRKWSATALKRSMISEAMLGYATLNGKTVRDDDGAPLVRAEPILTREQLEALRAELDKTSRAKPAVSTPSLLLRVLFCAVCGEPAYKFAGGGRKHPRYRCRSMGFPKHCGNGTVAMAEWDAFCEEQVLDLLGDAERLEKVWVAGSDSAVELAEVNAELVDLTSLIGSPAYRAGSPQREALDARIAALAARQEELEGLGARPSGWEWRETGQRFGDWWREQDTAAKNTWLRSMNVRLTFDVRGGLTRTIDFGDLQEYEQHLRSGSVAERLHTGMS

SEQ ID NO: 9380 - protein, 500 aa, synthetic construct
MRALVVIRLSRVTDATTSPERQLESCQQLCAQRGWDIVGVAEDLDVSGAVDPFDRKRRPNLARWLASEEQPFDVIVAYRVDRLTRSTRHLQQLVHWAEDHKKLVVSATEAHFDTTTPFAAVVIALMGTVAQMELEAIKERIRSAAHFNIRAGKYRGSLPPWGYLPTRVDGEWRLVPDPVQRERILEVYHRVVDNHEPLHLVAHDLNRRGVLSPKDYFAQLRGREPQGRKWSATALKRSMTSKAMLGYATLNGKTVRDDDGAPLVRAEPILTREQQEALRAELAKTSRAKPAVSTPSLLLRVLFCAVCGEPAYKFAGGGRKHPRYRCRSMGFPKHCGNGTVVMAEWDAFCEKQVLDLLGDAERLEKVWVAGSDSAVELAEVNAELVDLTSLIGSPAYRAGSPQREALDARIAALAARQEKLEGLEARPSGWEWRGTGQRLGDWWREQDTAAKNTWLRSMNIRLTFDVRGGLTRTIDFGELQEYEQHLRLGSAAERLHTGMS

SEQ ID NO: 9381 - protein, 500 aa, synthetic construct
MRALVVIRLSRVTDATTSPERQLESCQQLCAQRGWDVVGVAEDLDVSGAIDPFDRKRRPNLARWLAFEELPFDVIVAYRVDRLTRSTRHLQQLVHWAEDHKKLVVSATEAHFDTTTPFAAVVIALMGTVAQMELEAIKERNRSAAHFNIRAGKYRGSLPPWGYLPTRVDGEWRLVPDPVQRERILEVYHRVVDDHEPLHLVAHDLNRRGVLSPKDYFAQLRGREPQGRKWSATALKRSMTSEAMLGYATLNGKTVRDDDGAPLVRAEPILTRGQLEALRAELVKTSRAKPAVSTPSLLLRVLFCAVCGEPAYKFAGGGRKHPRYRCRSMGFPKHCGNGTVVMAEWDAFCEELVLDLLGDAERPEKVWVAGSDSAVELAEVNAELVDLTSLIGSPAYRAGSPQREALDARIAALAARQEELEGLEARPSGWEWRGTGQRFGDWWHEQDTAAKNTWLRSMNVRLTFDVRGGLTRTIDFGDLQEYEQHLRLGSVVERLHTGVS

SEQ ID NO: 9382 - protein, 500 aa, synthetic construct
MRALVVIRLSRVTDATTSPERQLESCQQLCAQRGWDVVGVAEDLDVSGAVDPFDRKRRPNLARWLAFEEQPFDVIVAYRVDRLTRSVRHLQQLVHWSEDHKKLVVSATEAHFDMTTPFAAVVIALMGTVAQMELEAIKERNRSAAHFNIRAGKYRGSLPPWGYLPTRVDGEWRLVPDPVQRERILEVYHRVVDNHEPLHLVAHDLNRRGVLSPKDYFAQLQGREPQGRKWSATALKRSMISEAMLGYATLNGKTVRDDDGAPLVRAEPILTREQLEALRAELVKTSRAKPAVSTPSLLLRVLFCAVCGEPAYKFAGGGRKHPRYRCRSMGFPKHCGNGTVAMAEWDAFCEEQVLGLLGDAKRLEKVWVAGSDSAVELAEVSAELVDLTSLIGSPAYRAGSPQREALDARIAALAARQEELEGLEARPSGWAWRETGQRFGDWWREQDTAAKNTWLRSMNVRLTFDVRGGLTRTIDFGDLQEYEQHLRLGSVVERLHTGMS

SEQ ID NO: 9383 - protein, 500 aa, synthetic construct
MRALVVIRLSRVTDATTSPERQLESCLRLCAQRGWDVVGVAEDLDVSGAVDPFDRKRRPNLARWLAFEEQPFDVIVAYRVDRLTRSTRHLQQLVHWAEDHKKLVVSATEAHFDTTTPFAAVVIALMGTVAQMELEAIKERNRSAAHFNIRAGKYRGSLPPWGYLPTRVDGEWRLAPDPVQRERILEVYHRVVDNHEPLHLVAHDLNRRGVLSPKDYFAQRQGREPQGRKWSATALKRSMISEAMLGYATLNGKTVRDDDGAPLVRAEPILTRGQLEALRAELVKTSRAKPAVSTPSLLLRVLFCAVCGEPAYKFAGGGRKHPRYRCRSMGFPKHCGNGTVAMAEWDAFCEEQVLNLLGDAERLEKVWVAGSDSAVELAEVNAELVDLTSLIGSPAYRAGSPQREALDARIAALAARQEELEGLEARPSGWEWRGTGQRFGDWWREQGTAAKNTWLRSMNVRLTFDVRGGPTHAIDFGDLQEYKQRLRLGSVVERLHTGMS

SEQ ID NO: 9384 - protein, 500 aa, synthetic construct
MRALVVIRLSRVTDATTSPERQLESCQQLCAQRGWDVVGVAEDLDVSGAVDPFDRKRRPNLARWLAFEEQPFDAIVAYRVDRLTRSVRHLQQLVHWAEDHKKLVVSATEAHFDTTTPFAAVVIALMGTVAQMELEAIKERSRSAAHFNIRAGKYRGSLPPWGYLPTRVDGEWRLVPDPVQRERILEVYHRVVDNHEPLHLVAHDLNRRGVLSPKDYFAQLRGREPQGRKWSATALKRSMISMAMLGYATLNGKTVRGDDGAPLVRAEPILTREQLEAIRAELVKTSRAKPAVSTPSLLLRVLFCAVCGEPAYKFVGGGRKHPRYRCRSMGFPKHCGNGTVVMAEWDAFCEEQVLDLLGDVERLEKVWVAGSDSAVELAEVSAELMDLTSLIGSPAYRAGSPQREALDVRIAALAARQEELEGLEARPSGWEWRDTGQRFRDWWREQDTAAKNTWLRSMNVRLTFDVRDGPTRTIDFGDLREYEQHLRLGSVAKRLHTGMS

SEQ ID NO: 9385 - protein, 500 aa, synthetic construct
MRALVVIRLSRVTDATTSPERQLESCQQLCAQRGWNVVGVAEDLDVSGAVDPFDRKRRPNLARWLAFEEQPFDVIVAYRVDRLTRSVRHLQQLVHWAEDHKKLVVSATEAHFDTTTPFAAVVIALMGTVAQMELEAIKERNRSAAHFNIRAGKYRGSLPPWGYLPTRVDGEWRLVPDPVQRERILEVYHRVVDNHEPLHLVAHDLNRRGVLSPKDYFAQLQGREPQGRKWSATALKRSMVSVAMLGYATLNGKIVRDDDGAPLVRAEPILTRGQLEALRAELVKTSRAKPAVSTPSLLLRVLFCAVCGEPAYKFAGGGRKHPRYRCRSMGFPKHCGNGTVVMAEWDAFCEEQVLNLLGDAERLEKVWVAGSDSAVELAEVNAELVDLTSLIGSPAYRAGSPQREALDARIAVLAARQGELEGLEARPSGWEWRETGQRFGDWWREQDTAAKNTWLRSMNVRLTFDVRGGLTRTIDFGDLQEYEQHLRLGSVVERLHTGMS

SEQ ID NO: 9386 - protein, 500 aa, synthetic construct
MRALVVIRLSRVTDATTSPERQLESCQQLCAQRGWDVVGVAEDLDVSGAVDPFDRKRRPNLARWLAFEEQPFDVIVAYRVDRLTRSTRHLQQLVRWAEDHKKLVVSATEAHFDTTTPFAAVVIALMGTVAQMELEAIKERIRSAVHFNIRAGKYRGSLPPWGYLPTRVDGEWRLVPDPVQRERILEVYHRVVDNHEPLHLVAYDLNRRGVLSPKDYFAQLQGREPQGRKWSATALRRSMISVAMLGYATLNGKIVRDDDGAPLVRAEPILTRGQQEALRAEFAKTSRAKPAVSTPSLLLRVLFCAVCGEPAYKFAGGGRKHPRYRCRSMGFPKHCGNGTVTMAEWDAFCEEQVLNLLGDAERLEKVWVAGSDSAVELAEVNAELVDLTSLIGSPAYRAGSPQREALDARIAALAARQEELEGLEARPSGWEWRETGQRFRDWWREQDTAAKNTWLRAMNVRLTFDVRGGLIRAIDFGDLQGYEQHLRLGSVVERLHTGMS

SEQ ID NO: 9387 - protein, 500 aa, synthetic construct
MRALVVIRLSRVTDATTSPERQLESCQQLCAQRGWDVVGVAEDLDVSGAVDPFDRKRRPNLARWLAFEEQPFDAIVAYRVDRLTRSVRHLQQLVHWAEDHKKLVVSATEAHFDTTTPFAAVVIALMGTVAQMELEAIKERNRSAAHFNIRAGKYRGSLPPWGYLPTRVDGEWRLVPDPVQCERILEVYHRVVDNHEPLHLVAHDLNRRGVLSPKDYFAQLRGREPQGRKWSATALKRSMISEAMLGYATLNGRTVRDDDGAPLVRAEPILTRGQLEALRAELVKTSRAKPAVSTPSLLLRVLFCAVCGEPAYKFAGGGRKHPRYRCRSMGFPKHCGNGTVAMAEWDAFCEEQVLNLLGDAERLEKVWVAGSDSAVELAEVNAELVDLTSLISSPAYRAGSPQREALDARIAALAARQEELEGLEARPSGWEWCETGQRFGDWWREQDTAAKNTWLRSMNVRLTFDVRGGLTRTIDFGDLQEYEQPLRLGSVVERLHTGMS

SEQ ID NO: 9388 - protein, 500 aa, synthetic construct
MRALVVIRLSRVTDTTTSPERQLESCQQLCAQRGWDVVGVAEDLDVSGAVDPFDRKRRPNLARWLAFEEQPFDAIVAYRVDRLARSIRHIQQLVHWAEDHKKLVVSATEAHFDTTTPFAAVVVALMGTVAQMELEAIKERNRSAAHFNIRAGKYRGSLPPWGYLPTRVDGEWRLVPDPVQRERILEVYRRVVDNHEPLHLVAHDLNRRGVLSPKDYFAQLRGREPQGREWSATALKRSMTSEAMLGYATLNGKTVRDDDGAPLVRAEPILTREQLEALHAELVRTSRAKPAVSTPSLLLRVLFCAVCGEPAYKFAGGGRKHPRYRCRSMGFPKHCGNGTVVMAEWDAFCEEQVLNLLGDAERLEKVWVAGSDSAVELAEVNAELVDLTSLIGSPAYRAGSPQREALDARIAALAARQEELEGLGARPSGWEWRETGQRFGDWWREQDTATKNTWLRSMNVRLTFDVRGGLTRTIDFGDLQEYEQHLRLGSVAERLHTGMP

SEQ ID NO: 9389 - protein, 500 aa, synthetic construct
MRALVVIRLSRVTDATTSPERQLESCQQLCAQRGWDVVGVAEDLDVSGAVDPFDRKRRPNLARWLAFEEQPFDVIVAYRVDRLTRSTRHLQQLVLWAEDHKKLVVSATEAHFDTTTPFAAVVIALMGTVAQMELEAIKERIRSAAHYNIRAGKYRGSLPPWGYLPTRVDGEWRLVPDPVQRERILEVYRRVVDNHESLHLVAHDLNRRGVLSPKDYFAQLQGREPQGRKWSATALKRSMTSVAMLGYATLNGKIVRDDDGAPLVRAEPILSREQQEALRAELAKTSRAKPAVSTPSLLLRVLFCAVCGEPAYKFVGGGRKRPRYRCRSMGFPEHCGNGTVVMAEWDAFCEEQVLNLLGDAERLEKVWVAGSDSAVELTEVNAELVDLTSLIGSPTYRTGSPQREALDARIVALAARQEELEGLETRPSGWEWRETGQRFGDWWREQDTAAKNTWLRSMNVRLTFDVRGGLTRTIDFGGLQEYEQHSRLGSVVERLHTGMS

SEQ ID NO: 9390 - protein, 500 aa, synthetic construct
MRALVVIRLSRVTDATTSPERQLESCQQLCAQRGWDVVGVAEDLNVSGAVDPFDRKRRPNLARWLAFEEQPFDVIVAYRVDRLTRSVRHLQQLVHWAEDHKKSVVSATEAHFDTTTPFAAVVIALMGTVAQMELEAIKERNRSAAHFNIRAGKYRGSLPPWGYLPTRVNGEWRLVPDPVQRERILEVYHRVVDNHEPLHLVAHDLNRRGVLSPKDYFAQLQGREPQGRKWSATALKRSMISETMLGYATLNGKTVRDDDGAPLVRAEPILTRGQLEALRAELVKTSRAKPAVSTPSLLLRVLFCAVCGEPAYKFAGGGRKHPRYRCRSMGFPKHCGNGTVAMAEWDAFCEEQVLDLLGDAERLEKVWVAGSDSAVELAEVSAELVDLTSLIGSPAYRAGSPQREALDTRIAALAARQEELEGLEARPSGWEWRETGQRFRDWWREQDTAAKNTWLRSMNIRLTFDVRGGLTRAIDFGDLQEYEQRLRLGSVVERLHTGMS

SEQ ID NO: 9391 - protein, 500 aa, synthetic construct
MRALVVTRLSRVTDATTSPERQLESCHQLCAQRGWDVVGVAEDLDVSGAVDPFDRKRRPNLARWLAFEEQPFDVIVAYRVDRLTRSTRHLQQLVHWAEDHKKLVVSATEAHFDTTTPFAAVVIALMGTVAQMELEAIKERIRSATHFNIRAGKYRGSLPPWGYLPTRVDGEWRLVPDPVQRERILEVYHRVVDNHEPLHLVAYDLNRRGVLSPKDYFAQLRGREPQGRKWSATALKRSMISGAMLGYATLSGKTVRGDDGAPLVRAEPILTREQQEALRAELAKTSRAKPAVSTPSLLLRVLFCAVCGEPAYKFVGGGRRHPRYRCRSMGFPEHCGNGTVVMAEWDAFCEEQVLDLLGDAERLEKVWVAGSDSAVELAEVNAELVDLASLIGSPAYRAGSPQREALDARIAALAARQEELEGLEARPSGWEWRETGQRFRDWWREQDTAAKNTWLRSMNVRLTFDVRGGLTRTIDFGDLQGYERHLRLGSVAERLRTEMS

SEQ ID NO: 9392 - protein, 500 aa, synthetic construct
MRALVVIRLSRVTDATTSPERQLESCQQLCAQRGWDVVGVAEDLDVSGAVDPFDRKRRPNLARWLAFEEQPFDVIVAYRVDRLTRSTRHLQQLVHWAEDHKKLVVSATEAHFDTTTPFAAVVIALMGTVAQMELEAIKERNRSAAHFNIRAGKYRGSLPPWGYLPTRVDGEWRLVPDPVQRERILEVYHRVVDNHEPLHLVAHDLNRRGVLSPKDYFAQLRGREPQGREWSATALKRSMTSEAMLGYATLNGKTVRVDDGAPLVRAEPILTREQLEALRAELVKTSRAKPAVPTPSLLLRVLFCAVCGEPAYKLAGGGRKHPRYRCRSMGFPKHCGNGTVAMAELDAFCEEQVLDLLGDAERLEKVWVAGSDSAVELAEVNAELVDLTSLIGSPAYRAGSPQREALDARIAALAARQEELEGLGARPSGWEWRETGQRFGDWWREQDTATKNTWLRSMNVRLTFDVRGGLTRTIDFGDLQEYEQYLRLGSVVERLHTGMS

SEQ ID NO: 9393 - protein, 500 aa, synthetic construct
MRALVVIRLSRVTDATTSPERQLASCQQLCAQRGWDVVGVAEDLDVSGAVDPFDRKRRPNLARWLAFEEQPFDVIVAYRVDRLTRSTRHLQQLVHWAEDHKKLVVSATEAHFDTTTPFAAVVIALMGTVAQMELEAIKERIRSAAHFNIRAGRYRGSLPPWGYLPARVDGEWRLVPDPVQRERILEVYHRVVDNHEPLHLVARDLNRRGVLSPKDYFAQLRGREPRGRKWSATALKRSMTSEAMLGYATLNGKTVRDDDGAPLVRAEPILTREQLEALRAEFAKTSRAKPAVSTPSLLLRVLFCAVCGEPAYKFVGGGRRHPRYRCRSMGFPKHCGNGTVVMAEWDAFCEEQVLNLFGDAERLEKVWVAGSNSAVELAEVNAELVDLTSLIGSPAYRVGSPQREALDARIAALAARQEELEGLEARPSGWEWRETGQRFGDWWREQDTAAKNTWLRSMNVRLTFDVRGGLTRTIDFGDLQEYEQHLRLGSVAERLHTGMS

SEQ ID NO: 9394 - protein, 500 aa, synthetic construct
MRALVVIRLSRVTDATTSPGRQLGSCQQLCAQRGWDVVGVAEDLDVSGAVDPFDRKRRPNLARWLAFEEQPFDVIVAYRVDRLTRSVRHLQQLVHWAEDHKKLVVSATETHFDTTTPFAAVVIALMGTVAQMELEAIKERNRSAAHFNIRAGKYRGSLPPWGYLPARVDGEWRLVPDPVQRERILEVYHRVVDNHEPLHLVAHDLNRRGVLSPKDYFAQLQGREPQGRKWSATALKRSMISETMLGYATLNGKTVRDDDGAPLVRAEPILTREQLEAIRAELVKTSRAKPAVSTPSLLLRVLFCAVCGEPAYKFAGGGRKHPRYRCRSMGFPKHCGNGTVVMAEWDAFCEEQVLNLLGDAERLEKVWVAGSDSAVELAEVNAELVDLTSLIGSPAYRAGSPQREALDARIAALAARQEELEGLGARPSGWEWRETGRRFGDWWREQDTATKNTWLRSMNVRLTFDVRGGLTRTIDLGDLQEYEQHLRLGSVVERLHTGMS

SEQ ID NO: 9395 - protein, 500 aa, synthetic construct
MRALVVIRLSRVTDATTSPERQLESCQQLCAQRGWDVAGVAEDLDVSGAVDPFDRKRRPNLARWLAFEEQPFDVIVAYRVDRLTRSTRHLQQLVHWAEDHKKLVVSATEAHFDTTTPFAAVVIALMGTVAQMELEAIKERIRSAVRFNIRAGKYRGSLPPWGYLPTRVDGEWRLVPDPVQRERILEVYHRVVDNHEPLHLVAHDLNRRGVLSPKDYFAQLRGREPQGRKWSATALKRSMISVAMLGYVTLNGKIVRDDDGAPLVRAEPILTRGQQEALRAELAKTSRAKPAVSTPSLLLRVLFCAVCGEPAYRFVGGGRKHPRYRCRSMGFPEHCGNGTVVMAEWDAFCEEQVLDLLGDAERLEKVWLAGPDSAVELAEVNAELVDLTSLIGSPAYRAGSPQREALDARIAALAARQEELEGLEARPSGWEWRGTGQRFGDWWREQDTAAKNTWLRAMNIRLTFDVRGGLTRTIDFGDLQEYEQHLRSGSVVERLHTGTS

SEQ ID NO: 9396 - protein, 500 aa, synthetic construct
MRALVVIRLSRVTDATTSPERQLESCQQLCAQRGWDVVGVAEDLDVSGAVDPFDRKRRPNLARWLAFDEQPFDVIVAYRVDRLTRSTRHLQQLVHWAEDHKKLVVSATEAHFDTTTPFAAVVIALMGTVAQMELEAIKERNRSAAHFNIRAGKYRGSLPPWGYLPTRVDGEWRLAPDPVQRERILEVYHRVVDNHEPLHLVAHDLNRRGVLSPKDYFAQLQGREPQGRKWSATALKRSMISEAMLGYATLSGKTVRDDDGAPLVRAEPILTREQLEALRAELVKTSRAKPAVSTPSLLLRVLFCAVCGEPAYKFAGGGRKHPRYRCRSMGFPKHCGNGTVVMAEWDAFCEEQVLNLLGDAERLEKVWVAGSDSAVELSEVNAELVDLTSLIGSPAYRAGSPQREALDARIAALAARQKELEGLEARPSGWEWRETGQRFGDWWREQDTAAKNTWLRSVNVRLTFDVRGGLTRTIDFGNLQEYEQHLRLGSVVERLHTGMS

SEQ ID NO: 9397 - protein, 500 aa, synthetic construct
MRALVVIRLSRVTDATTSPERQLESCQQLCAQRGWDVVGVAEDLNVSGAVDPFDRKRRPNLARWLAFEEHPFDVVVAHRVDRLTRSIRHLQQLVHWAEDHKKLVVSATEAHFDTTTPFAAIVIALMGTVAQMELEAIKERNRSAAHFNIRAGKYRGSLPPWGYLPTRVDGEWRLVPDPVQRERILEVYHRVVDNHEPLHLVAHDLNRRGVLSPKDYFAQLQGREPRGRRWSATALKRSMISEAMLGYATLNGKTVRDDDGAPLVRAEPILTREQLEALRAELVKTSRAKPAVSTPSLLLRVLFCAVCGEPAYKFAGGGRKHPRYRCRSMGFPKHCGNGTVAMAEWDAFCEEQVLDLLGDAERLEKVWVAGSDSAVELAEVNAELVDLTSLIGSPAYRAGSPQREALDARIAALAARQEELEGLGARPSGWEWRETGQSFGDWWRGQDTAAKNTWLRSMNVRLTFDVRGGLTRTIDFGDLQEYEQHLRLGSVVERLHTGMS

SEQ ID NO: 9398 - protein, 500 aa, synthetic construct
MRALVVIRLSRVTDATTSPERQLESCQQLCAQRGWDVVGVAEDLDVSGAVDPFDRKRRPNLTRWLAFEEQPFDAIVAYRVDRLTRSVRHLQQLVHWAEDHKKLVVSATEAHFDTTTPFAAVVIALMGTVAQMELEAIKERNRSAAHFNIRAGKYRGSLPPWGYLPTRVDGEWRLVPDPVQRERILEVYHRVVDNHESLHLVAHDLNRRGVLSPKDYFAQLRGREPQGRKWSATALKRSMISEAMLGYATLNGKTVRDDDGAPLVRAEPILTREQLEALRAELVKTSRAKPAVSTPSLLLRVLFCAVCGEPAYKFAGGGRKHPRYRCRSMGFPKHCGNGTVAMAEWDAFCEEQVLELFGDAERLEKVWVAGSDSAVELAEVNAELVDLTSLIGSPAYRAGSPQREALDARIAALAARQEELEGLGARPPGWEWRGTGQRFGDWWREQDTAAKNTWLRSMNVRLAFDVRGGLTRTIDFGDLREYEQHLRLGSVVERLHIGMS

SEQ ID NO: 9399 - protein, 500 aa, synthetic construct
MRALVVIRLSRVTDATTSPERQLESCQQLCAQRGWDVVGVAEDLDVSGAVDPFDRKRRPNLARWLAFEEQPFDVIVAYRVDRLTRSTRHLQQLVHWAEDHKKLVVSATEAHFDTTTPFAAVVIALMGTVAQMELEAIKERIRSAVHFNIRAGKYRGSLPPWGYLPARVDGEWRLVPDPVQRERILEVYHRVVGNHEPLHLVAHDLNRRGVLSPKDYFAQLRGREPQGREWSATALKRSMTSVAMLGYATLNGKIVRDDGGAPLVRAEPILTREQQEALRAELVRTSRAKPAVSTPSLLLRVLFCAVCGEPAYKFAGGGRKHPRYRCRSMGFPKHCGNGTVVMAEWDAFCEKQVLDLLGDAERLEKVWVAGSDSAVELAEVNAELVDLTSLIGSPAYRAGSPQREALDARIAALAARQEELEGLEAHPSGWEWRETGQRFGDWWREQDTAAKNTWLRSMNVRLTFDARGGLTRTIDFGELQEYEQHLRLGSVAERLHTGMS

SEQ ID NO: 9400 - protein, 500 aa, synthetic construct
MRALVVIRLSRVTDATTSPERQLESCQQLCAQRGWDVVGVAEDLDVSGAVDPFDRKRRPNLARWLAFEEQPFDVIVAYRVDRLTRSTRHLQQLVHWAEDHKKLVVSATEAHFDTTTPFAAVVIALMGTVAQMELEAIKERNRSAAHFNIRAGKYRGSLPPWGYLPTRVDGEWRLVPDPVQRERILEVYHRAVVNHEPLHLVAHDLNRRGVLSPKDYFAQLQGREPQGRKWSATALKRSMTSEAMLGYATLNGKTVRDDDGAPLVRAEPILTREQLEALRAELVKTSRAKPAVSTPSLLLRVLFCAVCGEPAYKFAGGGRKHPRYRCRSMGFPKHCGNGTVVMAEWDAFCEEQVLDLLGDAERLEKVWVAGSDSAVELAEVNAELVDLTSLIGSPAYRAGSPQREALDARIAALAARQEELEGLEARPSGWEWRETGQRFGDWWREQDTAAKNTWLRSMNVRLTFDVRGGLTRTIDFGDLQEYEQHLRLGSVVERLHTGMS

SEQ ID NO: 9401 - protein, 500 aa, synthetic construct
MRALVVIRLSRVTDATTSPERQLESCQQLCAQRGWDVVGVAEDLDVSGAVDPFDRKRRPNLARWLAFEEQPFDAIVAYRVDRLTRSTRHLQQLVHWAEDHKKLVVSATEAHFDTTTPFAAVVIALMGTVAQMELEAIKERNRSAAHFNIRAGRYRGSLPPWGYLPTRVDGEWRLVPDPVQRERILEVYHRVVDNHEPLHLVAHDLNRRGVLSPKDYFAQLQGREPQGRKWSATALKRSMTSEAMLGYATLNGKTVRDDDGAPLVRAEPILTRGQLEALRAELAKTSRAKPAVSTPSLLLRVLFCAVCGEPAYKFAGGGRKHPRYRCRSMGFPKHCGNGTVAMAEWDTFCEEQVLDLLGGAERLEKVWVAGSDSAAELAEVNAELVDLTSLIGSPAYRVGSPQREALDARIAALAARQEELEGLEARPSGWEWRETGQRFGDWWREQDTAAKNTWLRSMNVRLTFDVRGGLTRTIDFGGLQEYEQHLRLGSVVERLHTGMS

SEQ ID NO: 9402 - protein, 500 aa, synthetic construct
MRALVVIRLSRVTDATTSPERQLESCRQLCAQRGWDVVGVAEDLDVSGAVDPFDRKRRPNLARWLAFEEQPFDVIVAYRVDRLTRSVRYLQQLVHWAEDHKKLVVSATEAHFDTTTPFAAVVIALMGTVAQMELEAIKERNRSAAHFNIRAGKYRGSLPPWGYLPTRVDGEWRLVPDPVQRERILEVYHRVVDNHEPLHLVAHDLNRRGVLSPKDYFAQLQGREPQGRKWSSTALKRSMISVAMLGYVTLNGKTVRDDDGAPLVRAEPILTREQREALRAELVETSRAKPAVSTPSLLLRVLFCAVCGEPAYKFAGGGRKHPRYRCRSMGFPKHCGNGTVAMAEWDSFCEEQVLGLLGDAERLEKVWVAGSDSAVELAEVNAELVDLTSLIGSPAYRAGSPQREALDARIAALVARQEELEGLEARPSGWEWRGTGQRFGDWWREQDTAAKNAWLRSMNVRLTFDVRGGLTRAIDFGGLQEYEQHSRLGSVVERLHTGMS

SEQ ID NO: 9403 - protein, 500 aa, synthetic construct
MRALVVIRLSRVTDATTSPERQLESCQQLCAQRGWDVVGVAEDLDVSGAVNPFDRKRRPNLARWLAFEEQPFDVIVAYRVDRLARSTRHLQQLVHWAEDHKKLVVSATEAHFDTTTPFAAVVIALMGTVAQMELEAIKERNRSAAHFNIRAGKYRGSLPPWGYLPTRVDGEWRLVPDPVQRERILEVYHRVVDNHEPLHLVAHDLNRRGVLSPKDYFAQLQGREPQGRKWSATALKRSMISEAMLGYATLNGKTVRDDDGAPLVRAEPILTREQLEALRAVLVRTSRAKPAVSTPSLLLRVLFCAVCGEPAYKFAGGGRKHPRYRCRSMGFPKHCGNGTVVMAEWDAFCEEQVLDLLGDAERLEEVWITGSDSAVELAEVSAELVDLTSLIGSPAYRAGSPQREALDARIAALAARQEELEGLEARPPGWEWRGTGQRFRDWWREQDTAAKNTWLRSMNVRLTFDVRGGLTRTIDFGDLQEYEQHLRLGSVVVRLHTGMS

SEQ ID NO: 9404 - protein, 500 aa, synthetic construct
MRALVVIRLSRVTDATTSPGRQLESCQQLCAQRGWDVVGVAEDLDVSGAVDPFDRKRRPNLARWLASEEQPFDVIVAYRVDRLTRSTRHLQQLVHWAEDHKKLVVSATEAHFDTTTPFAAVVVALMGTVAQMELEAIKERNRSAAHFNIRAGKYRGSLPPWGYLPTRVDGEWRLVPDPVQRERILEVYHRVVDNHEPLHLVAHDLNRRGVLSPKDYFAQLRGREPQGRKWSATALKRSMTSETMLGYATLNGKTVRDDDGAPLVRAEPILTREQLEALRAELVKTSRAKPAVSTPSLLLRVLFCAVCGEPAYKFAGGGRKHPRYRCRSMGFPKHCGNGTVAMAEWDAFCEEQVLDLLGDTERLEKVWVAGSDSAVELAEVNAELVDLTSLIGSPAYRAGSPQREALDSRIAALAARQEELEGLEARPSGWGWRETGQRFGDWWREQDTAAKNTWLRSMNVRLTFDVRGGLTRTIDFGDLRECEQHLRLGSVVERLHTGTS

SEQ ID NO: 9405 - protein, 500 aa, synthetic construct
MRTLVVIRLSRVTDATTSPERQLESCQQLCAQRGWDVVGVAEDLDVSGAVDPFDRKRRPNLARWLAFEEQPFDAIVAYRVDRLTRSIRHLQQLVHWAEDHKKLVVSATEAHFDTTTPFAAVVIALMGTVAQMELEAIKERIRSAAHFNIRAGKYRGSLPPWGYLPARVDGEWRLVPDPVQRERILEVYHRVVDNHEPLHLVAHDLNRRGVLSPKDYFAQLRGREPQGRKWSATALKRSMTSGAMLGYATLNGRTVRDDDGVPLVRAEPILTREQLEALRAELVKTSRAKPAVSTPSLLLRVLFCAVCGEPTYKFVGGGRKHPRYRCRSMGFPKHCGNGTVVMAEWDAFCEEQVLNLLGDAERLEKVWVAGSDSAVELAEVNAELVDLTSLIGSPAYRAGSPQRDALDARIAALAARQEELEGLEARPSGWEWRETGQRFRDWWREQDTAAKNTWLRSMNVRLTFDVRGGLTRTIDFGDLQEYEQHLRSGSVVERLHTGMS

SEQ ID NO: 9406 - protein, 500 aa, synthetic construct
MRALVVIRLSRVTDATTSPERQLESCQQLCAQRGWDVVGVAEDLDVSGAVDPFDRKRRPNLARWLTFEEQPFDVIVAYRVDRLTRSTRHLQQLIRWAEDHKKLVVSATEAHFDTTTPFAAVVIALMGTVAQMELEAIKERIRSAVHFNIRAGKYRGSLPPWGYLPTRVDGEWRLVPDPVQRERILEVYHRVVDNHEPLHLVAHDLNRRGVLSPKDYFAQLRGREPQGREWSATALRRSMTSVAMLGYATLSGKTVRGDDGAPLVRAEPILTREQQEALRAELAKTSRAKPAVSTPSLLLRVLFCAVCGGPAYKFVGGGRKHPRYRCRSMGFPEHCGNGTVVMAEWDAFCEEQVLNLLGDAERLEKVWVAGSDSAVELAEVNAELVDLTSLIGSPAYRTGSPQREALDARIAALAARQEELEGLEARPSGWEWRGTGQRFGDWWREQDTAAKNAWLRSMNVRLTFDVRGGLTRTIDFGDLQGYEQHSRSGSVVERLHTGMS

SEQ ID NO: 9407 - protein, 500 aa, synthetic construct
MRALVVIRLSRVTDATTSPERQLESCQQLCAQRGWNIVGVAEDLDVSGAVDPFDRKRRPNLARWLAFEEQPFDAIVAYRVDRLTRSIRHLQQLVHWAEDHKKLVVSATEAHFDTTTPFAAVVIALMGTVAQMELEAIKERIRSAAHFNIRAGKYRGSLPPWGYLPARVDGEWRLVPDPVQRERILEVYHRVVDNHEPLHLVAHDLNRRGVLSPKDYFAQLRGREPQGRKWSATALKRSMTSVAMLGYAILNGKTVRDDDGAPLVRAEPILTREQQEALRAELAKTSRAKPAVSTPSLLLRVLFCAVCGEPAYKFVGGGRKHPRYRCRSMGSPEHCGNGTVVMAEWDAFCEEQVLNLLGDAERLEKVWLAGSDSAVELAEVNAELVDLTSLIGSPAYRAGSPQREALDARIAALAARQEELEGLEARPSGWEWRGTGQRLRDWWRGQDTAAKNTWLRSMNIRLTFDVRGGLTRAIDFGDLQEYEQHLRLGSVAERLHTGMS

SEQ ID NO: 9408 - protein, 500 aa, synthetic construct
MRALVVIRLSRVTDATTSPERQLESCQQLCAQRGWDVVGVAEDLDVSGAVDPFDRKRRPNLARWLAFEEQPFDVIVAYRVDRLTRSTRHLQQLVRWAEDHKKLVVSATEAHFDTTTPFAAVVIALMGTVAQMELEAIKERIRSAVHFNIRAGKYRGSMPPWGYLPARVDGEWRLVPDPVQRERILEVYHRVVDNHEPLHLVAHDLNRRGVLSPKDYFAQLQGREPQGRKWSATALKRSMISVAMLGYATLNGKTVRDDDGAPLVRAEPILTREQQEALRAELAKTSRAKPAVSTPSLLLRVLFCAVCGEPAYKFVGGGRKHPRYRCRSMGFPEHCGNGTVVMAEWDAFCEEQVLDLLGDAERLEKVWVAGSDSAVELAEVNAELVDLTSLIGSPAYRAGSPQREALDARIAALAARQEELEGLEARPSGWEWRGTGQRFRDWWREQDTAAKNAWLRSMNVCLTFDVRGGLTRTIDFGDLQEYEQHLRSGSVVERLHTGMS

SEQ ID NO: 9409 - protein, 500 aa, synthetic construct
MRALVVIRLSRVTDATTSPERQLESCQQLCALRGWDVVGVAEDLDVSGAVDPFDRKRRPNLARWLAFEEQPFDVIVAYRVDRLTRSTRHLQQLVHWAEDHKKLVVSATEAHFDTTTPFAAVVIALMGTVAQMELEAIKERIRSAAHFNIRAGKYRGSLPPWGYLPTRVDGEWRLVPDPVQRERILEVYHRVVDNHEPLHLVAHDLNRRGVLSPKDYFAQLRGREPQGREWSATALRRSMTSVAMLGYATLNGKTVRDDNGAPLVRAEPILTREQLEALRAELAKTSRAKPAVSTPSLLLRVLFCAVCGEPAYKFVGGGRKHPRYRCRSMGFPKHCGNGTVVMAEWDAFCEEQVLDLLGDAERLEKVWVAGSDSAVELAEVNAELVDLTSLIGSPAYRAGSPQREALDARIAALAARQKELEGLEARPSGWEWRETGQRFGDWWREQDTAAKNTWLRSMNVRLTFDVRGGLTRTIDFGDLQEYERHSRSGSVVERLHTGMP

SEQ ID NO: 9410 - protein, 500 aa, synthetic construct
MRALVVIRLSRVTDATTSPERQLESCQQLCAQRGWDVVGVAEDLDVSGAVDPFDRKRRPNLARWLAFEEQPFDVIVAFRVDRLTRSTRHLQQLVHWAEDHKKLVVSATEAHFDTTTPFAAVVIALMGTVAQMELEAIKERNRSAAHYNIRAGKYRGSLPPWGYLPARVDGEWRLVPDPVQRERILEVYHRVVDNHEPLHLVAHDLNRRGVLSPKDYFAQLQGREPQGRKWSATALKRSMISEAMLGYATLNGKTVRDDDGAPLVRAEPILTREQLEALRAELVKTSRAKPAASTPSLLLRVLFCAVCGEPAYKFAGGGRKHPRYRCRSMGFPKHCGNGTVVMAEWDAFCEGQVLNLLGDAERLEKVWVAGSDSAAELAEVNAELVDLTSLIGSPAYRAGSPQREALDARIAALAARQEELESLGARPSGWEWRETGQRFGDWWREQDTAAKNTWLRSVNVRLTFDVRGGLTRTIDFGDLQEYEQHLRLGSVVGRLHTGMS

SEQ ID NO: 9411 - protein, 500 aa, synthetic construct
MRALVVIRLSRVTDATTSPERQLESCQRLCAQRGWDVVGVAEDLDVSGAVDPFDRKRRPNLARWLAFEEQPFDVIVAYRVDRLTRSTRHLQQLVRWAEDHKKLVVSATEAHFDTTTPFAAVVIALMGTVAQMELEAIKERIRSAVHFNIRAGKYRGSLPPWGYLPTRVDGEWRLVPDPVQRERILEVYHRVVDNHESLHLVAHDLNRRGVLSPKDYFAQLRGREPQGRKWSATALKRSMTSKAMLGYATLDGKTVRDDDGAPLVRAEPILTREQQEALRAELAKTSRAKPAVSTPSLLLRVLFCAVCGEPAYKFVGGGRKHPRYRCRSMGLPEHCGNGTVVMAEWDAFCEEQVLDLLGDAERLERVWVAGSDSAVELAEVNAELVDLTSLIGSPAYRAGSPQREALDARIAALAARQGELEGLEARPSGWEWRETGQRFGDWWREQDTAAKNTWLRSMNVRLTFDVRGGLTRTIDFGELQEYEQHLRLGSMVERLHTGMS

SEQ ID NO: 9412 - protein, 500 aa, synthetic construct
MRALVVIRLSRVTDATTSPERQLESCQQLCAQRGWDVVGVAEDLDVSGAVDPFDRKRRPNLARWLAFEEQPFDVIVAYRVDRLTRSTRHLQQLVHWAEDHKKLVVSATEAHFDTTTPFAAVVIALMGTVAQMELEAIKERIRSAAHFNIRAGKYRGSLPPWGYLPTRVDGEWRLVPDPVQRERILEVYHRVVDNHEPLHLVAHDLNRRGVLSPKDYFAQLRGREPQGRKWSATALKRSMTSEAMLGYAILNGKTVRDDDGAPLVRAEPILTREQQEALRAEFAKTSRAKPAVSTPSLLLRVLFCAVCGEPAYKFAGGGRKHPRYRCRSMGFPEHCGNGTVVTAEWDAFCEKQVLGLLGDAERLEKVWVAGSDSAVELAEVNAELVDLTSLIGSPAYRTGSLQREALDARIAALAARQEELESLEARPSGWEWRETGQRFRDWWREQDTAAKNTWLRSMNVRLTFDVRGGLTRTIDFGDLQEYEQHLRSGSVVERLHTGMS

SEQ ID NO: 9413 - protein, 500 aa, synthetic construct
MRALVVVRLSRVTDATTSPERQLESCQQLCAQRGWDVVGVAEDLDVSGAVDPFDRKRRPNLARWLAFEEQPFDVIVAYRVDRLTRSTRHLQQLVHWAEDHKKLVVSATEAHFDTTTPFAAVVIALMGTVAQMELEAIKERNRSAAHFNIRAGKYRGSLPPWGYLPTRVDGEWRLVPDPVQRERILEVYHRVVDNHEPLHWVAHDLNRRGVLSPKDYFAQLRGREPQGRKWSATALKRSMISEAMLGYATLNGKTVRDDDGAPLVRAEPILTRVQLEALRAELVKTSRAKPAVSTPSLLLRVLFCAVCGEPAYKFAGGGRKHPRYRCRSMGFPKHCGNGTVVMAEWDAFCEEQVLDLLGDAERLEKVWVAGSDSAVELAEANAELVDLTSLIGSPAYRAGSPQREALDARIAALAARQEELEGLEARPSGWEWRETGQRFGDWWREQDTAAKNTWLRSMNVRLTFDVRGGLTRTIDFGDLREYEQHLRLGGVVERLHTGMS

SEQ ID NO: 9414 - protein, 500 aa, synthetic construct
MRALVVIRLSRVTDTTTSPERQLESCQQLCAQRGWDVVGVAEDLDVSGAVDPFDRKRRPNLARWLAFEEQPFDAIVAYRVDRLTRSTRHLQQLVRWAEDHKKLVVSATEAHFDMTTPFAAVVIALMGTVAQMELEAIKERIRSAAHFNIRAGKYRGSLPPWGYLPTRVDGEWRLVPDPVQRERILEVYHRVVDNHEPLHLVAHDLNRRGVLSPKDYFAQLRGREPRGREWSATALRRSMTSVAMLGYATLNGKIVRDDDGAPLVRAEPILTREQQEALRAELAKTSRAKPAVSTPSLLLRVLFCAVCGEPAYKFVGGGRKHPRYRCRSTGFPKHCGNGTVAMAEWDVFCEEQVLNLLGDAERLEKVWAAGSDSAVELAEVNAELVDLTSLIGSPAYRVGSPQREALDARIAALAARQEELEGLEARPPGWEWRETGQRFGDWWREQDTAAKNTWLRSMNVRLTFDVRGGLTRTIDFGDLREYEQHLRIGSVVERLHSGTP

SEQ ID NO: 9415 - protein, 500 aa, synthetic construct
MRALVVIRLSRVTDATTSPERQLESCQQLCAQRGWDVVGVAEDLNVSGAVDPFDRKRRPSLARWLAFEEQPFDVIVAYRVDRLTRSIRHLQQLVHWAEDHKKLVVSATEAHFDTTTPFAAVVIALMGTVAQMELEAIKERNRSAAHFNIRAGRYRGSLPPWGYLPTRVDGEWRLVPDPVQRERILEVYHRVVDNHEPLHLVAHDLNRRGVLSPKDYFAQLQGREPQGRKWSATALKRSMISEAMLGYATLNGKIVRDDDGAPLVRAEPILTREQLEALRAELVKTSRAKPAVSTPSLLLRVLFCAVCGEPAYKFAGGGRKHPRYRCRSMGFPKHCGNGTVVMAEWDAFCEEQVLNLLGDAERLEKVWVVGSDSAVELAEVNAELVDLTSLIGSPAYRAGSPQREALDARIAALAARQEELEGLEARPPGWEWRETGQRFGDWWREQDTAAKNTWLRSMNVRLTFDVRGGPTRTIDFGDLQEYEQHLRLGSVVERLHTGMP

SEQ ID NO: 9416 - protein, 500 aa, synthetic construct
MRALVVIRLSRVTDATTSPERQLESCQQLCAQRGWDVVGVAEDLDVSGAVDPFDRKRRPNLARWLAFEEQPFDVIVAYRVDRLTRSVRHLQQLVHWAEDHKKLVVSATEAHFDTTTPFAAVVIALMGTVAQMELEAIKERNRSAAHFNIRAGKYRGSLPPWGYLPTRVDGEWRLVPDPVQRERILEVYHRVVDNHEPLHLVAHDLNRRGVLSPKDYFAQLQGREPQGRKWSATALKRSMISKAMLGYATLNGKTVRDEDGAPLVRAEPILTREQLEALRAELVKTSRAKPAVSTPSLLLRVLFCAVCGEPAYKFAGGGRKHPRYRCRSMGFPKHCGNGTVAMAEWDAFCEEQVLDLFGDAERLEKVWVAGSDSAVELAEVNAELVDLTSLIGSPAYRAGSPQREALDARIAALAARQEELEGLGARPSGWGWRETGQRFGDWWREQDIAAKNTWLRSMNVRLTFDARGGLTRTIDFGDLQEYEQHLRLGSVVERLHAGMS

SEQ ID NO: 9417 - protein, 500 aa, synthetic construct
MRALVVIRLSRVTDATTSPERQLESCQQLCAQRGWDVVGVAEDLDVSGAVDPFDRKRRPNLARWLAFEQQPFDVIVAYRVDRLTRSVRHLQQLVHWAEDHKKLIVSATEAHFDTTTPFAAVVIALMGTVAQMELEAIKERIRSAVHFNIRAGKYRGSLPPWGYLPTRVDGEWRLAPDPVQRERILEVYHRVVDSHESLHLVAHDLNRRGILSPKDYFAQLQGREPRGRKWSATALRRSMTSVAMLGYATLNGKTVRDDDGAPLVRAEPILTREQQEALRAELAKTSRAKPAVSTPSLLLRVLFCAVCGEPAYKFVGGGRKHPRYRCRSMGFPEHCGNGTVVTAEWDAFCEEQVLNLLGDAERLEKVWVAGSDSAVELAEVNAELMDLTSLIGSPAYRAGSPQREALDARITALAARQEELEGLEARPPGWEWRETGQRFRDWWREQDTAAKNTWLRSMNVRLTFDVRGGLTRTIDFGDLQEYVQHLRIGSVVERLHAGTS

SEQ ID NO: 9418 - protein, 500 aa, synthetic construct
MRALVVIRLSRVTDATTSPERQLESCQQLCAQRGWDVVGVAEDLDVSGAVDPFDRKRRPSLARWLAFEEQPFDVIVAYRVDRLTRSTRHLQQLVHWAEDHKKLVVSATEAHFDTTTPFAAVVIALMGTVAQMELEAIKERNRSAAHFNIRAGKYRGSLPPWGYLPTRVDGEWRLVPDPVQRERILEVYHRVVDNHEPLHLVAHDLNRRGVLSPKDYFAQLRGREPQGRKWSATALKRSMISEAMLGYVTLNGKTVRDDDGAPLVRAEPILTRVQLEALRAELVKTSRAKPAVSTPSLLLRVLFCAVCGEPAYKFAGGGRKHPRYRCRSMGFPKHCGNGTVAMAEWNAFCEEQVLDLLGNAERLEKVWVAGSDSAVELAEVNAELVDLTSLIGSPAYRAGSPQREALDARIAALAARQEELEGLEARPSGWEWRGTGQRFGDWWREQDTAAKNTWLRSMNVRLTFDVRGGLTRTIDFGDLQEYEQHLRLGSVVERLHTGMS

SEQ ID NO: 9419 - protein, 500 aa, synthetic construct
MRALVVIRLSRVTDATTSPERQLESCQRLCAQRGWDVVGVAEDLDVSGAVDPFDRKRRPNLARWLAFEEQPFDAIVAYRVDRLTRSVRHLQQLVHWAEDHKKLVVSATEAHFDTTTPFAAVVIALMGTVAQMELEAIKERNRSAAHFNIRAGKYRGSLPPWGYLPTRVDGEWRLVPDPVQRERILEVYHRVVVNHEPLHLVAHDLNRRGVLSPKDYFAQLQGREPQGRKWSATALKRSMISEAMLGYATLNGKTVRDDDGAPLVRAEPILTREQLEALRAELVKTSRAKPAVSTPSLLLRVLFCAVCGEPAYKFAGGGRKHPRYRCRSVGFPKHCGNGTVAMAEWDAFCEEQVLNLLGDAERLEKVWVAGSDSAVELAEVNAELVDLTSLIGSPAYRAGSPQREALDARIAALAARQEELEGLEARPSGWEWRETGQRFGDWWREQDTAAKNTWLRSMNVRLTFDVRGGLTRTIDFGDLQEYEQHLRLGSVVERLHTGMS

SEQ ID NO: 9420 - protein, 500 aa, synthetic construct
MRALVVIRLSRVTDATTSPERQLESCQQLCAQRGWDVVGVAEDLDVSGAVDPFDRKRRPYLARWLAFEEQPFDVIVAYRVDRLTRSTRHLQRLVLWAEDHKKLVVSATEAHFDTTTPFAAVVIALMGTVAQMELEAIKERIRSAVRFNIRAGKYRGSLPPWGYLPTRVDGEWRLVPDPVQRERILEVYHRVVGNHEPLHLVAHDLNRRGVLSPKDYFAQLRGREPQGRKWSATALKRSMTSAAMLGYATLSGKIVRDDDGAPLVRAEPILTREQQEALRAVLVKTSRAKPAVSTPSLLLRVLFCAVCGEPAYKFVGGGRKHPRYRCRSMGLPKHCGNGTVAMAEWDAFCEEQVLNLLGDAERLEKVWVAGSDSSVELAEVNAELVDLTSLIGSPAYRAGSPQREALDARITALAARQEELEGLEACPSGWEWRGTGQRFGDWWREQDTAAKNTWLRSMNVRLTFDVRGGLTRTIDFGDLQEYGQHLRLGSVVERLRTGVS

SEQ ID NO: 9421 - protein, 500 aa, synthetic construct
MRALVVIRLSRVTDATTSPERQLESCQQLCAQRGWDVVGVAEDLDVSGAVDPFDRKRRPNLARWLAFEEQPFDVIVAYRVDRLTRSTRHLQQLVHWAEDHKKLVVSATEAHFDTTTPFAAVVIALMGTVAQMELEAIKERNRSAAHFNIRAGKYRGSLPPWGYLPTRVDGEWRLVPDPVQRERILEVYHRVVDNHEPLHWVAHDLNRRGVLSPKDYFAQLQGREPQGRKWSATALKRSMISEAMLGYATLNGKTVRDDDGAPLVRAEPILSREQLEALRAELVRASRAKPAVSTPSLLLRVLFCAVCGEPAYKFAGGGRKHPRYRCRSMGFPKHCGNGTVAMAEWDAFCEEQVLDLLGDAKRLEKVWVAGSDSAVELAEVNAELVDLTSLIGSPAYRAGSPQREALDARIAALAARQEELEGLEARPSGWEWRETGQRFGDWWREQDTAAKNTWLRSMNVCLTFDVRGGLTRTIDFGDLQEYEQHLRLGSVVERLHTGMS

SEQ ID NO: 9422 - protein, 500 aa, synthetic construct
MRALVVIRLSRVTDATTSPERQLESCQQLCAQRGWDVVGVAEDLDVSGAVDPFDRKRRPSLARWLAFEEQPFDVVVAYRVDRLTRSTRHLQQLVHWAEDHKKLVVSATEAHFDTTTPFAAVVIALMGTVAQMELEAIKERIRSAVHFNIRAGKYRGSLPPWGYLPTRVEGEWRLVPDPVQRERILEVYHRVVDNHEPLHLVAYDLNRRGVLSPKDYFAQLRGREPQGRKWSATALKRSMISVAMLGYATLNGKTVRDDDGAPLVRAEPILTREQQEALRAELAKTSRAKPAVSTPSLLLRVLFCAVCGEPAYKFAGGGRKHPRYRCRSMGFLKHCGNGTVAMAEWDAFCEEQVLDRLGDTERLEKVWVAGSDSAVELAEVNAELVDLTSLIGSPAYRAGSPQREALDARIAALAARQEELEGLEARPSGWEWRETGQRFGDWWREQDTAAKNTWLRSMNVRLTFDVRGGLTRTIDFGELQEYEQHLRLGGAVERLHTGMS

SEQ ID NO: 9423 - protein, 500 aa, synthetic construct
MRALVVIRLSRVTDATTSPERQLESCQQLCAQRGWDAVGVAEDLNVSGAVDPFDRKRRPNLARWLAFEEQPFDVIVAYRVDRLTRSVRHLQQLVHWAEDHKKLVVSATEAHFDTTTPFAAVVIALMGTVAQMELEAIKERNRSAAHFNIRAGKYRGSLPPWGYLPARVDGEWRLVPDPVQRERILEVYHRVVDNHEPLHLVAHDLNRRGVLSPKDYFAQLQGREPQGRKWSATALKRSMISVAMLGYATLNGKTVRDDDGAPLVRAKPILTREQLEALRAELVKTSRAKPAVSTPSLLLRVLFCAVCGEPAYKFAGGGRKHPRYRCRSMGFPKHCGNGTVAMAEWDAFCEEQVLGLLGDAERLEKVWVAGSDSAVELAEVNAELMDLTSLIGSPAYRAGSPQREALDARIAALAVRQEELEGLEARPSGWEWRETGQRFGDWWREQDTAAKNTWLRSMNVRLTFDVRGGPTRTIDFGDLQEYEQHSRLGSVVERLHTGMS

SEQ ID NO: 9424 - protein, 500 aa, synthetic construct
MRALVVVRLSRVTDATTSPERQLESCQQLCAQRGWDVVGVAEDLDVSGAVDPFDRKRRPNLARWLAFEEQPFDVIVTYRVDRLTRSTRHLQQLVHWAEDHKKLVVSATEAHFDTTTPFAAVVIALMGTVAQMELEAIRERSRSAAHFNIRAGKYRGSLPPWGYLPTRVDGEWRLVPDPVQRERILEVYHRVVDNHEPLHLVAHDLNRRGVLSPKDYFAQLRGREPQGRKWSATALKRSMTSVAMLGYATLNGKTVRDDDGAPLVRAEPILTRGQLEALRAELAKTSRAKPAVSTPSLLLRVLFCAVCGEPAYKFVGGGRKHPRYRCRSMGFPEHCGNGTVVMAEWDAFCEEQVLDLLGDAERLEKVWVAGSDSAVELAEVNAELVDLTSLIGSPAYRAGSPQREALDARIAALAARQEELEGLEARPSGWGWRETGQRFGDWWREQDTAAKNTWLRSMNVRLTFDARGGLTRTIDFGDLQEYEQHLCLGSVVDRLHTGMS

SEQ ID NO: 9425 - protein, 500 aa, synthetic construct
MRALVVIRLSRVTDATTSPERQLESCQQLCAQRGWDVVGVAEDLDVSGAVDPFDRKRRPNLARWLAFEEQPFDVIVAYRVDRLTRSTRYLQQLVHWAEDHKKLVVSATEAHFDTTTPFAAVVIALMGTVAQMELEAIKERNRSAAHFNIRAGKYRGSLPPWGYLPARVDGEWRLVPDPVQRERILEVYHRVVDNHEPLHLVAHDLNRRGVLSPKDYFAQLQGREPQGRKWSATALKRSMISEAMLGYATLNGKTVRDDGGAPLVRAEPILTREQLEALRAELVKTSRAKPAVSTPSLLLRVLFCAVCGEPAYKFAGGGRKHPRYRCRSMGFPKHCGNGTVVMAEWDAFCEEQVLDLLGDAERLEKVWVAGSDSAVELAEVNAELVDLTGLIGSPAYRAGSPQREALDARIAALAARQEELEGLGARPSGWEWRETGQRFGDWWREQDTAAKNTWLRSMNVRLMFDARGGLTRTIDFGDLQEYEQHLRLGSVVERLHTGRS

SEQ ID NO: 9426 - protein, 500 aa, synthetic construct
MRALVVIRLSRVTDATTSPERQLESCQQLCAQRGWDVVGVAEDLDVSGAVDPFDRKRRPNLARWLAFEEQPFDVIVAYRVDRLTRSTRYLQQLVHWAEDHKKLVVSATEAHFDTTTPFAAVVIALMGTVAQMELEAIKERNRSAAHFNIRAGKYRGSLPPWGYLPARVDGEWRLVPDPVQRERILEVYHRVVDNHEPLHLVAHDLNRRGVLSPKDYFAQLQGREPQGRKWSATALKRSMISVAMLGYATLNGKTVRDDDGAPLVRAEPILTREQLEALRAELVKTSRAKPAVSTPSLLLRVLFCAVCGEPAYKFAGGGRKHPRYRCRSMGFPKHCGNGTVAMAEWDAFCEEQVLDLLGDAERLEKVWVAGSDSAVELAEVNAELVDLTSLIGSPAYRAGSQQREALDARIAALAARQEELEGLEARPSGWEWRETGQRFGDWWREQDTAAKNTWLRSMNVRLTFDVRGGLTRTIDFGDLQEYEQHLRLGSVVERLHTGMS

SEQ ID NO: 9427 - protein, 500 aa, synthetic construct
MRALVVIRLSRVTDATTSPERQLESCQQLCAQRGWDVVGVAEDLNVSGAVDPFDRKRRPNLARWLAFEEQPFDVIVAYRVDRLTRSIRHLQQLVHWAEDHKKLVVSATEAHFDTATPFAAVVIALMGTVAQMELEAIKERNRSAAHFNIRAGKYRGSLPPWGYLPTRVDGEWRLVPDPVQRERILEVYHRVVDNHEPLHLVAHDLNRRGVLSPKDYFAQLQGREPQGRKWSATALKRSMTSEAMLGYATLNGKTVRDDDGAPLVRAEPILTREQLEALRAELVKTSRAKPAVSTPSLLLRVLFCAVCGEPAYKFAGGGRKHPRYRCRSMGFPKHCGNGTVVMAEWDTFCEEQVLELLGDAERLEKVWVAGSDYAVELAEVNAELVDLTSLIGSPAYRAGSPQREALDARIAALAARQEELEGLEARPSGWEWRGTGQRFGEWWREQDTAAKNTWLRSMNVRLTFDVRGELSRTIDFGDLQEYEQHLRLGSVVERLHAGMS

SEQ ID NO: 9428 - protein, 500 aa, synthetic construct
MRALAVIRLSRVSDATTSPERQLESCQQLCAQRGWDVVGVAEDLDVSGAVDPFDRKRRPNLARWLAFEEQPFDVIVAYRVDRLTRSTRHLQQLVHWAEDHKKLVVSATEAHFDTTTPFAAVVIALMGTVAQMELEAIKERNRSAAHFNIRAGKYRGSLPPWGYLPTRVDGEWRLVPDPVQRERVLEVYHRVVDNHEPLHLVAHDLNRRGVLSPKDYFAQLQGREPQGRKWSATALKRSMISEAMLGYATLNGKIVRDDDGAPLVRAEPILTRGQLEALRAELVKTSRAKPAVSTPSLLLRVLFCAVCGEPAYRLAGGGRKHPRYRCRSMGFPKHCGNGTVAMAEWDAFCEEQVLNLFGDAERLEKVWVAGADSAVELAEVNAELVDLTSLIGSPAYRAGSPQREALDARIAALAARQEELEGLEARPSGWEWRGTGQRFGDWWREQDTAAKNTWLRSMNVRLTFDVRGGLTRTIDFGVLQEYEQHLRLGRVVERLHTGMS

SEQ ID NO: 9429 - protein, 500 aa, synthetic construct
MRALVVIRLSRVTDATTSPERQLESCQQLCAQRGWDVVGVAEDLDVSGAVNPFDRKRRPSLARWLAFEEQPFDVIVAYRVDRLTRSTRHLQQLVHWAEDHKKLVVSATEAHFDTTTPFAAVVIALMGTVAQMELEAIKERNRSAAHFNIRAGKYRGSLPPWGYLPARVDGEWRLVPDPVQRERILEVYHRVVDNHEPLHLVAHDLNRRGVLSPKDYFARLQGREPQGRKWSATALKRSMVSEAMLGYATLSGKTVRDDDGAPLVRAEPILTRVQLEALRAELVKTSRAKPAVSTPSLLLRVLFCAVCGEPAYKFAGGGRKHPRYRCRSMGFPKHCGNGTVAMAEWDAFCEEQVLDLLGDAERLEKVWVAGSDSAVELAEVNAELVDLTSLIGSPAYRAGSPQREALDARIAALAARQEELEGLGTHPSGWEWRETGQRFGDWWHEQDTAAKNTWLRSMNVRLTFDVRGGLTRTIDFGDLQEYEQHLRLGSVVERLHTGMS

SEQ ID NO: 9430 - protein, 500 aa, synthetic construct
MRALVVIRLSRVTDATTSPERQLESCQQLCAQRGWDVVGVAEDLDVSGAVDPFDRKRRPNLARWLAFEEQPFDVIVAYRVDRLTRSVRHLQQLVHWAEDHKKLVVSATEAHFDMTTPFAAVVIALMGTVAQMELEAIKERNRSAAHFNIRAGKYRGSLPPWGYLPTRVDGEWRLAPDPVQRERILEVYHRVVDNHEPLHLVAHDLNRRGVLSPKDYFAQLQGREPQGRKWSATALKRSIISVAMLGYATLNGKTVRDDDGAPLVRAEPILTREQLEALRAELVKTSRAEPAVSTPSLLLRVLFCAVCGEPAYKFAGGGRKHPRYRCRSMGFPKHCGNGTVAMAEWDAFCEEQVLDLLGDAERLEKVWVAGSDSAVELAEVNAELVDLTSLIGSPAYRAGSPQREALDARIAALAARQEELEGLEARPSGWEWRETGQRFGDWWREQDTAAKNTWLRSMNVRLTFDVRGGLTRTIDFGDLQEYEQHLRLGCVVERLHTGRS

SEQ ID NO: 9431 - protein, 500 aa, synthetic construct
MRALVVIRLSRVTDATTSPERQLESCQQLCAQRGWDVVGVAEDLDVSGAVDPFDRKRRPSLARWLAFEERPFDVIVAYRVDRLTRSIRHLQQLVHWAGDHKKLVVSATEAHFDTTTPFAAVVIALMGTVAQMELEAIKERIRSAVRFNIRAGKYRGSLPPWGYLPARVNGEWRLVPDPVQRERILEVYHRVVDNHEPLHLVAHDLNRRGVLSPKDYFAQLRGREPQGREWSATALKRSMTSEAMLGYATLNGKTVRGDDGAPLVRAEPILTREQLEALRAELVKTSRAKPAVSTPSLLLRVLFCAVCGEPAYKFVGGGRKHPRYRCRSMGSPKHCGNGTVVMAEWDAFCEEQVLALLGDAERLEKVWVAGSDSAVELAEVNAELVDLTSLIGSPAYRAGSPQREALDARIAALAARQEELEGLEARPSGWEWRETGRRFGDWWREQDTAAKNTWLRSMNVRLTFDVRGGLTRTIDLGDLQEYEQHLRLGSVVERLHTGMS

SEQ ID NO: 9432 - protein, 500 aa, synthetic construct
MRALVVIRLSRVTDATTSPERQLESCQQLCAQRGWDVVGVAEDLDVSGAVDPFDRKRRPNLARWLAFEEQPFDVIVAYRVDRLTRSTRHLQQLVHWAEDHKKLVVSATEAHFDTTTPFAAVVIALMGTVAQMELEAIKERNRSAAHFNIRAGKYRGSLPPWGYLPTRVDGEWRLVPDPVQRERILEVYHRVVDNHEPLHLVAHDLNRRGVLSPKDYFAQLQGREPQGRKWSATALKRSMISVAMLGYATLNGKTVRDDDGAPLVRAEPILTREQLEALRAELVKTTRAKPAVSTPSLLLRVLFCAVCGEPAYKFAGGGRKHPRYRCRSMGFPKHCGNGTVAMAEWDAFCEEQVLNLLGDAERLEKVWVAGSDSAVELAEVNAELVDLTSLIGSPAYRAGSPQREALDARIAALAARREELEGLGARPSGWEWRETGQRFGDWWREQDTAAKNTWLRSMNVRLTFDVRGGLTRTIDFGDLQEYEQRLRLGSVVERLHTGMS

SEQ ID NO: 9433 - protein, 500 aa, synthetic construct
MRALVVIRLSRVTEATTSPERQLESCRQLCAQRGWDVVGVAEDLDVSGAVDPFDRKRRPNLARWLAFEEQPFDAIVAYRADRLTRSTRHLQQLVHWAEDHKKLVVSATEAHFDTTTPFAAVVIALMGTVAQMELEAIKERIRSAVHFNIRAGKYRGSLPPWGYLPTRVDGEWRLVPDPVQRERILEVYHRVVDNHEPLHLVAHDLNRRGVLSPKDYFAQLRGREPQGRKWSATALKRSMTSGAMLGYATLNGKIVRDDDGAPLVRAEPILTREQQEALRAELAKTSRAKPAVSTPSLLLRVLFCAVCGEPAYKFVGGGRKHPRYRCRSMGFPRHCGNGTVTMAEWDAFCEEQVLDLLGDAERLEKVWVAGSDSAVELAEVSAELVDLTSLIGSPAHRAGSPQREALDARIAALAARQEELEGLEARPSGWEWRGTGQRFGDWWREQDTAAKNTWLRSMNIRLTFDVRGGLTRTIDFGDLQEYEQHLRSGSVVERLHTGMP

SEQ ID NO: 9434 - protein, 500 aa, synthetic construct
MRALVVIRLSRVTDATTSPERQLGSCQRLCAQRGWDVVGVAEDLDVSGAVDPFDRKRRPNLARWLAFEEQPFDVIVAYRVDRLTRSTRHLQQLVHWAGDHKKLVVSATEAHFDTTTPFAAVVIALMGTMAQMELEAIKERIRSAVHFNIRAGKYRGSLPPWGYLPTRVDGEWRLVPDPVQRERILEVYHRVVDNHEPLHLVAHDLNRRGVLSPKDYFAQLRGREPQGRKWSATALKRSMTSEAMLGYATLNGKIVRDDDGAPLVRAEPILTRVQLEALRAELVKTSRAKPAVSTPSLLLRVLFCAVCGEPAYKFVGGGRKHPRYRCRSMGFPKHCGNGTVAMAEWDAFCEEQVLDLLGDAERLEKVWVADSDSAVELAEVNAELVDLTSLIGSPAYRAGSPQREALDVRIAALAARQEKLEGLEARPSGWEWRGTGQRLGDWWREQDTAAKNTWLRSMNIRLTFDVRGGLTRAIDFGDLQEYEQHLRLGSAVERLHTGMS

SEQ ID NO: 9435 - protein, 500 aa, synthetic construct
MRALVVIRLSRVTDATTSPERQLESCQQLCAQRGWDVVGVAEDLDVSGAVDPFDRKRRPNLARWLAFEVQPFDVIVAYRVDRLTRSTRHLQQLVHWAEDHKKLVVSATEAHFDTTTPFAAVVIALMGTVAQMELEAIKERNRSAAHFNIRAGKYRGSLPPWGYLPTRVDGEWRLAPDPVQRERILEVYHRVVDNHEPLHLVAHDLNRRGVLSPKDYFAQLRGREPQGRKWSATALKRSMISEAMLGYATLNGKTVRDDDGAPLVRAEPILTREQLEALRAELVKTSRAKPAVSTPSLLLRVLFCAVCGEPAYKFAGGGRKHPRYRCRSMGFPKHCGNGTVAMAEWDAFCEEQVLDLLGDAERLEKVWVAGTDSAVELAEVNAELVDLTSLIGSPAYRAGSPQREALDARIAALAARQEELEGLGARPSGWEWRETGRRFGDWWREQDTAAKNTWLRSMNVRLTFDVRGGLTRTIDFGDLQEYEQHLRLGSVVERLHTGMS

SEQ ID NO: 9436 - protein, 500 aa, synthetic construct
MRALVVIRLSRVTDATTSPERQLESCQQLCAQRGWDVVGVAEDLDVSGAVDPFDRKRRPNLARWLAFEERPFDVIVAYRVDRLTRSVRHLQQLVHWAEDHKKLVVSATEAHFDTTTPFAAVVIALMGTVAQMELEAIKERIRSAAHFNIRAGKYRGSLPPWGYLPARVDGEWRLVPDPVQRERILEVYHRVVDNHEPLHLVAHDLNRRGVLSPKDYFAQLRGREPRGRKWSATALRRSMTSEAMLGYATLNGRTVRDDDGAPLVRAEPILTREQQEALRAELVKTSRAKPAVSTPSLLLRVLFCAVCGEPAYKFVGGGRKHPRYRCRSMGLPKHCGNGTVAMAEWDAFCEEQVLNLLGDAERLEKVWVAGSDSAVEFAEVNAELVDLTSLIGSPAYRAGSPQREALDARIAALAARQEELGGLEARPSGWEWRETGQRFGDWWREQDTAAKNTWLRSMNVRLTFDARGELTRTIDFGDLQEYVQHLRLGSVVERLHTGMS

SEQ ID NO: 9437 - protein, 500 aa, synthetic construct
MRALVVIRLSRVTDATTSPERQLESCQQLCAQRGWDVVGVAEDLDVSGAVDPFDRKRRPNLARWLAFEEQPFDAIVAYRVDRLARSIRHLQQLVHWAEDHKKLVVSATEAHFDTTTPFAAVVIALMGTVAQMELEAIKERNRSAAHFNIRAGKYRGSLPPWGYLPTRVDGEWRLVPDPVQRERILEVYHRVVDNHEPLHLVAHDLNRRGVLSPKDYFAQLQGREPQGRKWSATALKRSMISEAMLGYATLNGKTVRDDDGAPLVRAEPILTREQLEALRAVLVKTSRAKPAVSTPSLLLRVLFCAVCGEPAYKFAGGGRKHPRYRCRSMGFPKHCGNGTVVMAEWDAFCEEQVLDLLGDAERLEKVWVVGSDSAVELAEVNAELVDLTSLIGSPAYRAGSPQREALDARIAALAARQEELEGLEARPSGWEWRETGQRFGDWWREQDTAAKNTWLRSVNVRLTFDVRGGLTRTIDFGDLQEYEQHLRLGSVVERLHTGMS

SEQ ID NO: 9438 - protein, 500 aa, synthetic construct
MRALVVIRLSRVTDATTSPERQLESCQQLCAQRGWDVVGVAEDLDVSGAVDPFDRKRRPNLARWLAFEEQPFDVIVAYRVDRLTRSTRHLQQLVRWAEDHKKLVVSATEAHFDTTTPFAAVVIALMGTVAQMELEAIKERIRSAVHFNIRAGKYRGSLPPWGYLPTRVDGEWRLVPDPVQRERILEVYHRVVNDHEPLHLVAYDLNRRGVLSPKDYFAQLQGREPQGRKWSATALKRSMISAAMLGYATLNGKIVRDDDGAPLVRAEPILTREQLEALRAELAKTSRAKPAVSTPSLLLRVLFCAVCGEPAYKFTGGGRKHPRYRCRSMGFPKHCGNGTVVMAEWDAFCEEQVLDLLGDAERLEKVWVAGSDSAAELAEVNAELVDLTSLIGSPAYRVGSPQREALDARIAALAARQGELEGLEARPSGWEWRGTGQRFGDWWHEQDTAAKNTWLRSMNVRLTFDVRGGLTRSIDFGDLQEYEQRLRLGSVVERLHTGMS

SEQ ID NO: 9439 - protein, 500 aa, synthetic construct
MRALVVIRLSRVTDATTSPERQLESCQQLCAQRGWDVVGVAEDLDVSGAVDPFDRKRRPNLARWLAFEEQPFDVIVAYRVDRLTRSTRHLQQLVHWAEDHKKLVVSATEAHFDTTTPFAAVVIALMGTVAQMELEAIKERSRSAAHFNIRAGKYRGSLPPWGYQPTRVDGEWRLVPDPVQRERILEVYHRVVDNHEPLHLVAHDLNRRGVLSPKDYFAQLRGREPQGRKWSATALRRSMTSGAMLGYATLNGKTVRDDDGAPLVRSEPILTREQQEALRAELAKTSRAKPAVSTPSLLLRVLFCAVCGEPAYKFVGGGRKHPRYRCRSMGFPEHCGNGTVVMAEWDAFCEEQVLDLLGDAERLEKVWVAGSDSAVELAEVNAELVDLTSLIGSPAYRVSSPQREALDARIAALAARQEELESLEAHPSGWEWRGTGQRFGDWWREQDTAAKNTWLRSMNVRLTFDVRGGLTRTIDFGDLQEYEQHLRSGSAVERLHSGMS

SEQ ID NO: 9440 - protein, 500 aa, synthetic construct
MRALVVVRLSRVTDATTSPERQLESCQQLCAQRGWDVVGVAEDLDVSGAVDPFDRKRRPNLARWLAFEEQPFDVIVAYRVDRLTRSTRHLQQLVHWAEDHKKLVVSATEAHFDTATPFAAVVIALMGTVAQMELEAIKERNRSAAHFNIRAGKYRGSLPPWGYLPSRVDGEWRLVPDPVQRERILEVYHRVVDNHEPLHLVAHDLNRRGVLSPKDYFAQLQGREPQGRKWSATALKRSMISEAMLGYATLNGKIVRNDDGAPLVRAEPILTREQLEALRAELVKTSRAKSAVSTPSLLLRVLFCGVCGEPAYKFAGGGRKHPRYRCRSMGFPKHCGNGTVAMAEWDAFCEEQVLDLLGDTERLEKVWVAGSDSAVELAEVNAELVDLTSLIGSPAYRAGSPQREALDARIAALAARQEELEGLEARPSGWEWRETGQRFGDWWREQDTAAKNTWLRSMNVRLTFDVRGGLTRTIDFGDLQEYERHLRLGSVVERLHTGIS

SEQ ID NO: 9441 - protein, 500 aa, synthetic construct
MRALVVIRLSRVTDATTSPERQLESCQQLCAQRGWDVVGVAEDLDVSGAVDPFDRKRRPNLARWLAFEEQPFDVIVAYRVDRLTRSTRHLQQLVHWAEDHEKLVVSATEAHFDTTTPFAAVVVALMGTVAQMELEAIKERNRSAAHFNIRAGKYRGSLPPWGYLPTRVDGEWRLVPDPVQRERILEVYHRVVDNHEPLHLVAHDLNRRGVLSPKDYFAQLQGREPQGRKWSATALKRSMTSEAMLGYATLNGKTVRDDDGAPLVRAEPILTREQLGALRAELVKTSRAKPAVSTPSLLLRVLFCAVCGEPAYKFAGGGRKHPRYRCRSMGYPKHCGNGTVAMAEWDAFCEEQVLDLLGDAERLEKVWVAGSDSAVELAEVNAELVDLTSLIGSPAYRAGSPQREALDARIAALAARQEELESLGARPSGWEWRETGQRFGDWWREQDTAAKNTWLRSMNVRLTFDVRGGLTRTIDFGDLQEYEQHLRLGSVVERLHTGMS

SEQ ID NO: 9442 - protein, 500 aa, synthetic construct
MRALVVIRLSRVTDATTSPERQLESCRQLCAQRGWDVVGVAEDLDVSGAVDPFDRKRRPNLARWLAFEEQPFDVIVAYRVDRLTRSVRHLQQLVRWAEDHKKLVVSATEAHFDTTTPFAAVVIALMGTVAQMELEAIKERIRSATHFNIRAGKYRGSLPPWGYLPTRVDGEWRLIPDPVQRERILEVYHRVVDNHEPLHLVAHDLNRRGVLSPKDYFAQLRGREPRGRKWSATALKRSMTSVAMLGYATLNGKTVRDDDGAPLVRAEPILTREQQEALRAELAKTSRAKPAVSTPSLLLRVLFCAVCGEPAYKFVGGGRKHPRYRCRSMGFPKHCGNGTVVMTEWDAFCEEQVLNLLGDAERLEKVWVAGSDSAVELAEVNAELVDLTSLIGSPAYRAGSPQREALDARIAALAARQEELEGLEARPSGWEWRGTGQRFGDWWREQDTAAKNTWLRSMNVRLTFDVRGGLTRTIDFGDLQEYVQHLRSGSAVERLHTGMS

SEQ ID NO: 9443 - protein, 500 aa, synthetic construct
MRALVVIRLSRVTDATTSPERQLESCQQLCAQRGWDVVGVAEDLDVSGAVDPFDRKRRPNLARWLAFEEQPFDVIVAYRVDRLTRSTRHLQQLVHWAEDHKKLVVSATEAHFDTTTPFAAVVIALMGTVAQMELEAIKERIRSAVHFNIRAGKYRGSLPPWGYLPTRVDGEWRLVPDPVQRERILEVYHRVVDNHEPLHLVAYDLNRRGVLSPKDYFAQLRGREPQGRKWSATALKRSMTSVAMLGYATLNGKIVRDDDGAPLVRAEPILTREQLEALRAELAKTSRAKPAVSTPSLLLRVLFCAVCGEPAYKFVGGGRKHPRYRCRSMGFPEHCGNGTVVMAEWDAFCEEQVLDLLGDAERLEKVWVAGSDSAVELAEVNAELMDLTSLISSPAYRAGSPQREALDARIAALAARQEELEGLEARPSGWEWRGTGQRFGDWWREQDTAAKNTWLRSMNVRLTFDVRGGLTRAIDFGDLQGYEQHLRLGSVVERLHTGMS

SEQ ID NO: 9444 - protein, 500 aa, synthetic construct
MRALVVIRLSRVTDATTSPERQLESCQQLCAQRGWDVVGVAEDLDVSGAVDPFDRKRRPNLARWLAFEEQPFDVIVAYRVDRLTRSTRHLQQLVHWAEDHKKLVVSATEAHFDTTTPFAAVVIALMGTMAQMELEAIKERNRSAAHFNIRAGKYRGSLPPWGYLPTRVDGEWRLVPDPVQRERILEVYHRVVDNHEPLHLVAHDLNRRGVLSPKDYFAQPQGREPQGRKWSATALKRSMISKAMLGYATPNGKTVRDDDGAPLVRAEPILTREQLEALRAVLVKTSRAKPAVSTPSLLLRVLFCAVCGEPAYKFAGGGRKHPRYRCRSMGSPNHCGNGTVAMAEWDAFCEEQVLDLLGDTERLEKVWVAGSDSAVELAEVNAELVDLTSLIGSPAYRAGSPQREALDARIAALAARQEELEGLEARPSGWEWRETGQRFGDWWRELDTAAKNTWLRSMNVRLTFDVRGGLTRTIDFGDLQEYEQHLRLGSVVERLHTGMS

SEQ ID NO: 9445 - protein, 500 aa, synthetic construct
MRALVVIRLSRVTDATTSPERQLESCQQLCAQRGWDVVGVAEDLDVSGAVNPFDRKRRPNLARWLAFEEQPFDVIVAYRVDRLTRSTRHLQQLVHWAEDHEKLVVSATEAHFDTTTPFAAVVIALMGTVAQMELEAIKERNRSAAHFNIRAGKYRGSLPPWGYLPTRVDGEWRLAPDPVQRERILEVYHRVVDNHEPLHLVAHDLNRRGVLSPKDYFAQLQGREPQGRKWSATALKRSMISEAMLGYATLNGKTVRDDDGAPLVRAEPILTRGQLEALRAELVKTSRAKPAVSTPSLLLRVLFCAVCGEPAYKFAGGGRKHPRYRCRSMGFPKHCGNGTVAMAEWDTFCEEQVLDLLGDAERLEKVWVVGSDSAVELAEVNAELVDLTSLIGSPAYRAGSPQREALDARIAALAARQGELEGLEARPSGWEWRETGQRFGDWWREQDTAAKNTWLRSMNVRLTFDVRGGLTRAIDFGDLQEYEQHLRLGSVVKRLHTGMS

SEQ ID NO: 9446 - protein, 500 aa, synthetic construct
MRALVVIRLSRVTDATTSPERQLESCRQLCAQRGWDVVGVAEDLDVSGAVDPFDRKRRPNLARWLAFEEQPFDVIVAYRVDRLTRSVRYLQQLVHWAEDHKKLVVSATEAHFDTTTPFAAVVIALMGTVAQMELEAIKERNRSAAHFNIRAGKYRGSLPPWGYLPTRVDGEWRLVPDPVQRERILEVYHRVVDNHEPLHLVAHDLNRRGVLSPKDYFAQLQGREPQGRKWSATALKRSMISVAMLGYATLNGKTVRDDDGAPLVRAEPILTRGQLEALRAELVKTSRARPAVSTPSLLLRVLFCAVCGEPAYKFAGVGRKHPRYRCRSMGFPKHCGNGTVAMAEWDAFCEEQVLGLLGDAERLEKVWVAGSDSAIELAEVNAELVDLASLIGSPAYRAGSPQREALDARIAALAARQEELEGLEARPPGWEWRETGQRFGDWWREQDTAAKNAWLRSMNVRLTFDVRGGLTRTIDFGDLQVYEQHLRLGSVVERLHTGVP

SEQ ID NO: 9447 - protein, 500 aa, synthetic construct
MRALVVIRLSRVTDATTSPERQLESCQQLCAQRGWDVVGVAEDLDVSGAVDPFDRKRRPNLARWLAFEEQPFDVIVAYRVDRLTRSVRHLQQLVHWAEDHKKLVVSATEAHFDTTTPFAAVVIALMGTVAQMELEAIKERIRSAVHFNIRAGKYRGSLPPWGYLPTRVDGEWRLVPDPVQRERILEVYHRVVDNHEPLHLVAYDLNRRGVLSPKDYFAQLRGREPQGRKWSATALKRSMISVAMLGYATLNGKTVRDDDGAPLVRAEPILTRGQQEALRTELVRTSRAKPAVSTPSLLLRVLFCAVCGEPAYKFAGGGRKRPRYRCRSMGFPKHCGNGTVVMAEWDAFCEEQVLDLLGDAERLEKVWVVGSGSSVELAEVNAELVDLTSLIGSPAYRAGSPQREALDARIAALAARQEELEGLGARPSGWEWRGTGQRFGDWWREQDTAAKNTWLRSMNVRLTFDVRGGLTRTIDFGELQEYEQHLRLGSVAERLHTGMS

SEQ ID NO: 9448 - protein, 500 aa, synthetic construct
MRALVVIRLSRVTDATTSPERQLESCQQLCAQRGWDVVGVAEDLDVSGAVDPFDRKRRPNLARWLAFEEQPFDVIVAYRVDRLTRSARHLQQLVHWAEDHKKLVVSATEAHFDTTTPFAAVVIALMGTVAQMELEAIKERNRSAAHFNIRAGKYRGSLPPWGYLPMRVDGEWRLVPDPVQRERILEVYHRVVDNHEPLHLVAHDLNRRGVLSPKDYFAQLQGREPQGRKWSATALKRSMISEAMLGYATLNGKIVRDDDGAPLVRAEPVLTREQLEALRAELVKTSRAKPAVSTPSLLLRVLFCAVCGEPAYKFAGGGRKHPRYRCRSMGFPKHCGNGTVVMAEWDAFCEEQVLDLLGDAERLEKVWVAGSDFAVELAEVNAELVDLTSLIGSPAYRAGSPQREALDARIAALAARQEELEGLEARPSGWEWRETGQRFGDWWREQDTAAKNTWLRSMNVRLTFDVRGGLTRTIDFGDLQEYEQHLRLGSVVERSNTGKS

SEQ ID NO: 9449 - protein, 500 aa, synthetic construct
MRALVVIRLSRVTDATTSPERQLESCQQLCAQRGWDVVGVAEDLDVSGAVDPFDRKRRPNLARWLALEEQPFDVIVAYRVDRLTRSTRHLQQLVHWAEDHKKLVVSATEAHFDTTTPFAAVVIALMGTVAQMELEAIKERNRSAAHFNIRAGKYRGSLPPWGYLPTRVDGEWRLVPDPVQRERILEVYHRVVDYHEPLHLVAHDLNRRGVLSPKDYFAQLQGREPQGRKWSATALKRSMISEAMLGYATLNGKTVRGDDGAPLVRAEPILTRGQLEALRAELVRTSRAKPAVSTPSLLLRVLFCAVCGEPAYKFAGGGRKHPRYRCRSMGFPKHCGNGTVAMAEWDAFCETQVLDLLGDAERLEKVWVAGSDSAVELAEVNAELVDLTSLIGSPAYRAGSPQREALDARIAALAARQEELEGLEARPSGWEWRETGQRFGDWWREQDTAAKNTWLRSMNVRLTFDVRGGLTRTIDFGELREYEQHLRLGSVVERLRTGMS

SEQ ID NO: 9450 - protein, 500 aa, synthetic construct
MRALVVIRLSRVTDATTSPERQLESCQQLCAQRGWDVVGVAEDLDVSGAVDPFDRKRRPNLARWLAFEEQPFDAIVAYRVDRLTRSTRHLQQLVRWAEDHKKLVVSATEAHFDTTTPFAAVVIALMGTVAQMELEAIKERIRSAAHFNIRAGKYRGSLPPWGYLPTRVDGEWRLVPDPVQRERILEVYHRVVDNHEPLHLVAHDLNRRGVLSPKDYFAQLQGREPQGRKWSATALKRSMTSVAMLGYATLNGKTVRDDDGAPLVRAEPILTREQQEALRAELVKTSRAKPAVSTPSLLLRVLFCAVCGEPAYKFAGGGRKHPRYRCRSMGFPEHCGNGTVVMAEWDAFCEEQVLDLLGDAERLEKVWVAGSDSAVELAEVNAELADLTSLIGSPAYRAGSPQREALDARIAALAARQEELEGLEARPSGWEWRETGQRFRDWWREQDTAAKNTWLRSMNVRLTFDVRGGLTRTIDFGDLQEYEQHLRLGSVAKRLHTGMS

SEQ ID NO: 9451 - protein, 500 aa, synthetic construct
MRALVVIRLSRVTDATTSPERQLESCQQLCAQRGWDVVGVAEDLDVSGAVDPFDRKRRPNLARWLAFEEQPFDVIVAYRVDRLTRSVRHLQQLVHWAEDHKKLVVSATEAHFDMTTPFAAVVIALMGTVAQMELEAIKERNRSAAHFNIRAGKYRGSLPPWGYLPTRVDGEWRLVPDPVQRERILEVYHRVVDNHEPLHLVAHDLNRRGVLSPKDYFAQLRGREPQGRKWSTTALKRSMTSEAMLGYATLNGRTVRDDDGAPLVRAEPILTREQLEALRAELVKTSRVKPAVTTPSLLLRVLFCAVCGEPAYKFAGGGRKHPRYRCRSMGFPKHCGNGTVAMAEWDAFCEEQVLNLLGDAERLEKVWVAGSDSAVELAEVNAKLVDLTSLIGSPAYRAGSPQREALDARIAALAARQEELEGSEARPSGWEWRETGQRFGDWWREQDTAAKNTWLRSMNVRLTFDVRGGLTRTIDFGDLQEYEQHLRLGSVVERSHTGMS

SEQ ID NO: 9452 - protein, 500 aa, synthetic construct
MRALVVIRLSRVTDATTSPERQLESCQQLCALRGWDVVGVAEDLDVSGAVDPFDRKRRPNLARWLAFEEQPFDVIVAYRVDRLTRSTRHLQQLVRWAEDHKKLVVSATEAHFDTTTPFAAVVIALMGTVAQMELEAIKERIRSAVRFNIRAGKYRGSLPPWGYLPTRVDGEWRLVPDPVQRERILEVYHRVVHNHEPLHLVAHDLNRRGVLSPKDYFAQLQGREPQGRKWSATALKRSMTSVAMLGYATLNGKTVRDDDGAPLVRAEPILTREQQEALRAELAKTSRAKPAVSTPSLLLRVLFCAVCGEPAYKFVGGGRKHPRYRCRSMGSPKHCGNGTVVMAEWDAFCEEQVLGLLGDAERLEKVWVAGSDSAVELAEVSAELVDLTSLIGSPAYRAGSPQREALDARIAALAARQEELEGLEARPSGWGWRETGQRLGDWWREQDTATKNTWLRSMNIRLTFDVRGGLTRTIDFGELQEYEQHLRSGGVVERLHTGMS

SEQ ID NO: 9453 - protein, 500 aa, synthetic construct
MRALVVIRLSRVTDATTSPERQLESCQQLCAQRGWDVVGVAEDLDVSGAVDPFDRKRRPNLARWLAFEVQPFDVIVAYRVDRLTRSTRHLQQLVRWAEDHKKLVVSATEAHFDTTTPFAAVVIALMGTVAQMELEAIKERIRSAVRFNIRAGKYRGSLPPWGYLPTRVDGEWRLVPDPVQRERILDVYHRVVDNHEPLHLVAHDLNRRGVLSPKDYFAQLRGREPRGRKWSATALKRSMISVAMLGYATLNGKTVRDDNGAPLVRAEPILTREQQEALRAELVRTSRAKPAVSTPSLLLRVLFCAVCGEPAYKFVGGGRKHPRYRCRSMGSPKHCGNGTVVMAEWDAFCEEQVLNLLGDAERLERVWVAGSDSAVELAEVNAELVDLTSLIGSPAYRAGSLQREALDARIAALAARQEELEGLEARPSGWEWRETGQCFGDWWREQDTAARNTWLRSMNVRLTFDVRGGLTRTIDFGDLQEYEQHLRLGSAVERLHTGMS

SEQ ID NO: 9454 - protein, 500 aa, synthetic construct
MRALVVIRLSRVTDATTSPERQLESCQQLCAQRGWDVVGVAEDLDVSGAVDPFDRKRRPNLARWLAFEEQPFDVIVAYRVDRLTRSVRHLQQLVHWAEDHKKLVASATEAHFDTTTPFAAVVIALMGTVAQMELEAIKERNRSAAHFNIRAGKYRGSLPPWGYLPTRVDGEWRLVPDPVQRERILEVYHRVVDNHESLHWVAHDLNRRGVLSPKDYFAQLQGREPQGRKWSATALKRSIISEAMLGYATLNGKTVRNDDGAPLVRAEPILTRGQLEALRAELVKTSRAKPAVSTPSLLLRVLFCAVCGEPAYKFAGGGRKHPRYRCRSMGFPKHCGNGTVVMAEWDAFCEEQVLDLLGDAECLEKVWAAGSDSAVELAEVNAELVDLTSLIGSPAYRAGSPQREALDARIAALAARQEELEGLETRPSGWEWRETGQRFGDWWREQDTAAKNTWLRSMNVRLTFDVRGGLTRTIDFGDLQEYEQHLRLGSVVERLHTGMS

SEQ ID NO: 9455 - protein, 500 aa, synthetic construct
MRALVVVRLSRVTDTTTSPERQLASCQQLCAQRGWDVVGVAEDLDVSGAVDPFDRKRRPNLARWLAFEEQPFDVIVAYRVDRLTRSTRHLQQLVHWAEDHKKLVVSATEAHFDTTTPFAAVVIALMGTVAQMELEAIKERIRSAVRFNIRAGKYRGSLPPWGYLPTRVDGEWRLVPDPVQRERILEVYHRVVDNHEPLHLVAHDLNRCGVLSPKDYFAQLRGREPQGRKWSATALKRSMTSVAMLGYATLNGKIVRDDDGAPLVRAEPILTREQQEALRAELAKTSRAKPAVSTPSLLLRVLFCAVCGEPAYKFVGGGRKHPRYRCRSMGFPKHCGNGTVVMAEWDAFCEKQVLDLLGDAERLEKVWVAGSDSAVELAEVNAELVDLTSLIGSPAYRAGSPQREALDARIAALAARQEELEGLEARPSGWESRETGQRFGDWWREQDTAAKNTWLRSMNVRLTFDVRGELTRTIDFGDLQEYEQHLRVGSVVDRLHTGMS

SEQ ID NO: 9456 - protein, 500 aa, synthetic construct
MRALVVIRLSRVTDATTSPERQLESCQQLCAQRGWDVVGVAEDLDVSGAVDPFDHKRRPNLARWLAFEEQPFDVIVAYRVDRLTRSVRHLQQLVHWAEDHKKLVVSATEAHFDTTTPFAAVVIALMGTVAQMELEAIKERNRSAAHFNIRAGKYRGSLPPWGYLPTRVDGEWRLVPDPVQRERILEVYHRVVDNHEPLHLVAHDLNRRGILSPKDYFAQLQGREPQGRKWSATALKRSMISEAMLGYATLNGKIVRDDDGAPLVRAEPILTRGQLEALRAELVKTSRAKPAVSSPSLLLRVLFCAVCGEPAYKFAGGGRKHPRYRCRSMGFPKHCGNGTVAMAEWDAFCEEQVLDLLGDAERLEKVWVAGSDSAVELAEVNAELVDLTSLIGSPAYRAGSPQREALDARIAALAARQEELEGLGARPSGWEWRGTGQRFGDWWREQDTAARNTWLRSMNVRLTFDVRGGLTRTIDFGDLQEYEQHLRLGGVVERLDTGMS

SEQ ID NO: 9457 - protein, 500 aa, synthetic construct
MRALVVIRLSRVTDATTSPERQLESCQQLCAQRGWDVVGVAEDLDVSGAVDPFDRKRRPNLARWLAFEERPFDVIVAHRVDRLTRSVRHLQQLVHWAEDHKKLVVSATEAHFDTTTPFAAVVIALMGTVAQMELEAIKERNRSAAHFNIRAGKYRGSLPPWGYLPTRVDGEWRLVPDPVQRERILEVYHRVVDNHEPLHLVAHDLNRRGVLSPKDYFAQLQGREPQGRKWSATALKRSMISEAMLGYATLNGKIVRGDDGAPLVRAEPILTREQLEALRAVLVKTSRAKPAVSTPSLLLRVLFCAVCGEPAYKFAGGGRKHPRYRCRSMGFPKHCGNGTVVMAEWDAFCEEQVLDLLGDAERLEKVWVAGSDSAVELAEVNAELVDLASLIGSPAYRAGSPQREALDARIAALAARQEELEGLGARPSGWGWRETGQRLGDWWREQDTAAKNAWLRSMNVRLTFDVRGGLTRAIDFGGLQEYEQHLRLGSVVERLHTGMS

SEQ ID NO: 9458 - protein, 500 aa, synthetic construct
MRALVVVRLSRVTDATTSPERQLESCQQLCAQRGWDVVGVAEDLDASGAVDPFDRKRRPNLARWLAFEEQPFDAIVAYRVDRLARSIRHLQQLVHWAEDHKKLVVSATEAHFDTTTPFAAVVIALMGTVAQMELEAIKERNRSAAHFNIRAGKYRGSLPPWGYLPTRVDGEWRLVPDPVQRERILEVYHRVVDNHEPLHLVAHDLNRRGILSPKDYFAQLQGREPQGRKWSATALKRSMISEAMLGYATLNGKTVRDDDGAPLVRAEPILTREQLEALRAELVKASRAKPAVSTPSLLLRVLFCAVCGEPAYKFAGGGRKHPRYRCRSMGFPKHCGNGTVVMAEWDAFCEEQVLNLLGDAERLEEVWVAGSDSAVELAEVNAELVDLTSLIGSPAYRAGSPQREALDARIAALAARQEELKGLGARPSGWEWRETGQRFGDWWREQDTAAKNTWLRSMNVRLTFDVRGGLTRTIDFGDLQEYEQRLRLGSVVERLHTGMS

SEQ ID NO: 9459 - protein, 500 aa, synthetic construct
MRALVVIRLSRVTDATTSPERQLESCRQLCAQRGWDVVGVAEDLDVSGAVDPFDRKRRPNLARWLAFEEQPFDAIVAYRVDRLTRSVRHLQQLVHWAEDHKKLVTSATEAHFDTTTPFAAVVIALMGTVAQMELEAIKERNRSAAHFNIRAGKYRGSLPPWGYLPTRVDGEWRLVPDPVQRERILEVYHRVVDNHEPLHLVAHDLNRRGILSPKDYFAQLRGREPQGRKWSATALKRSMISEAMLGYATLHGKTVRDDDGVPLVRAEPILTREQLEALRAELVKTSRAKPAVSTPSLLLRVLFCAVCGEPAYKFAGGGRKHPRYRCRSMGFPKHCGNGTVVMAEWDAFCEEQVLDLLGDAERLEKVWVAGSDSAVELAEVNAELVDLTSLIGSPTYRTGSPQREALDARIAALAARQEELEGLEARPSGWEWRETGQRFGDWWREQDTAAKNTWLRSMNVRLTFDVRGGLTRTIDFGDLQEYEQHLRLGSVVERLHTGTS

SEQ ID NO: 9460 - protein, 500 aa, synthetic construct
MRALIVIRLSRVTDATTSPERQLESCQQLCAQRGWDVVGVAEDLDVSGAVDPFDRKRRPNLARWLAFEEQPFDVIVAYRVDRLTRSTRHLQQLVHWAEDHKKLVVSATETHFDTTTPFAAVVIALMGTVAQMELEAIKERIRSAVHFNIRAGKYRGSLPPWGYLPTRVDGEWRLVPDPVQRERILEVYHRVVDDHEPLHLVAYDLNRRGVLSPKDYFAQLQGREPRGRKWSATALKRSMISGAMLGYATLNGKIVRGEDGAPLVRAEPILTREQLEALRAELAKTSRAKPAVSTPSLLLRVLFCAVCGEPAYRFVGGGRKHPRYRCRSMGSPEHCGNGTVVIAEWDVFCEEQVLNLLGDAERLEKVWVAGSDSAVELAEVNAELVDLTSLIGSPAYRAGSPQREALDARIAALAARQEELEGLEARPSGWEWRETGQRFGDWWREQDTAAKNTWLRSMNIRLTFDVRGGLTRTIDFGDLRGYERHLRLGSMAERSHTGVS

SEQ ID NO: 9461 - protein, 500 aa, synthetic construct
MRALVVIRLSRVTDATTSPERQLESCQQLCAQRGWDVVGVAEDLDVSGAVDPFDRKRRPNLARWLTFEEQPFDVIVAYRVDRLTRSTRHLQQLVHWAEDHKKLVVSATEAHFDTTTPFAAVVIALMGTVAQMELEAIKERNRSAAHFNIRAGKYRGSLPPWGYLPTRVDGEWRLVPDPVQRERILEVYHRVVDNHESLHLVAHDLNRRGVLSPKDYFAQLRGREPQGRKWSATALKRSMISEAMLGYATLNGKTVRDDDGAPLVRAEPILTREQLEALRAELVKTPRAKPAVSTPSLLLRVLFCAVCGEPAYKFAGGGRKHPRYRCRSMGFPKHCGNGTVAMAEWDAFCEEQVLDLLGDAERLEKVWVAGSDSAVELAEVNAELVDLTSLIGSPAYRAGSPQREALDARIAALAARQEELEGLEARPSGWEWRETGQRFGDWWREQDTAAKNTWLRSMNVRLTFDVRGGLTRTIDFGGLQEYEQHLRLGSVVERLHTGMS

SEQ ID NO: 9462 - protein, 500 aa, synthetic construct
MRALIVIRLSRVTDATTSPERQLESCQQLCAQRGWDVVGVAEDLDVSGAVDPFDRKRRPNLARWLAFEEQPFDAIVAYRVDRLTRSVRHLQQLVHWAEDHKKLVVSATEAHFDTTTPFAAVVIALMGTVAQMELEAIKERNRSTAHFNIRAGKYRGSLPPWGYLPTRVDGEWRLVPDPVQRERILEVYHRVVDNHEPLHLVAHDLNRRGVLSPKDYFAQLQGREPQGRKWSATALKRSMISGAMLGHATLNGKTVRDDDGAPLVRAEPILTREQLEALRAELVKTPRAKPAVSTPSLLLRVLFCAVCGEPAYKFAGGGRKHPRYRCRSMGFSKHCGNGTVVMAEWDAFCEEQVLDLLGNAERLEKVWVAGSDSAVELAEVNAELVDLTSLISSPAYRAGSPQREALDARIAALAARQEELEGLEARPPGWEWRETGQRFGDWWREQDTAAKNTWLRSMNVRLTFDVRGGLARTIDFGDLQEYEQHLRSGSVVERLHTGMS

SEQ ID NO: 9463 - protein, 500 aa, synthetic construct
MRALVVIRLSRVTDATTSPGRQLESCQQLCAQRGWDVVGVAEDLNVSGAVDPFDRKRRPNLARWLAFEEQPFDAIVAYRVDRLTRSIRHLQQLVHWAEDHKKLVVSATEAHFDTTTPFAAVVIALMGTVAQMELEAIKERNRTAAHFNIRAGKYRGSLPPWGYLPTRVDGEWRLVPDPVQRERILEVYHRVVDNHESLHLVAHDLNRRGVLSPKDYFAQLRGREPQGRKWSATALKRSMISEAMLGYATLNGKTVRDDDGAPLVRAEPILTREQLEALRAELVKTSRAKPAVSTPSLLLRVLFCAVCGEPAYKFAGGGRKHPRYRCRSMGFPRHCGNGTVAMAEWDAFCEEQVLDLLGDAERLEKVWVAGSDSAVELAEVNAELVDLTSLIGSPAYRAGSPQREALDARIAALAARQEELEGLGARPSGWEWRETGQRFGDWWREQDTAAKNTWLRSMNVCLTFDVRGGLTRTIDFGDLQEYEQRLRLGSVVERLRTGMP

SEQ ID NO: 9464 - protein, 500 aa, synthetic construct
MRALVVIRLSRVTDATTSPERQLESCQQLCAQRGWDVVGVAEDLDVSGAVDPFDRKRRPNLARWLAFEERPFDVIVAYRVDRLTRSVRHLQRLVLWAEDYKKLVVSATEAHFDTTTPFAAVVIALMGTVAQMELEAIKERIRSAVHFNIRAGKYRGSMPPWGYLPTRVDGEWRLVPDPVQRERILEVYHRVVDNHESLHSVAHDLNQRGVLSPKDYFAQLQGREPQGRKWSATALKRSMTSVAMLGYATLNGKTVRDDDGAPLVRAEPILTREQQEALRAELVKTSRAKPAVSTPSLLLRVLFCAVCGEPAYKFTGGGRKHPRYRCRSMGFPKHCGNGTVVMAEWDVFCEEQVLNLLGDAERLEKVWVAGSDSAVELAEVNAELVDLTSLIGSPAYRVGSPQREALDARIAALAARQEELEGLEARPSGWEWRETGQRFGDWWREQGTAAKNTWLRSMNVRLTFDVRGGLTRTIDFGDLREYEQHLRLGSVVGRLHTGMS

SEQ ID NO: 9465 - protein, 500 aa, synthetic construct
MRALVVIRLSRVTDATTSPERQLESCQQLCAQRGWDVVGVAEDLDVSGAVDPFDRKRRPNLARWLAFEEQPFDVIVAHRVDRLTRSTRHLQQLVHWAEDYKKLVVSATEAHFDTTTPFAAVVIALMGTVAQMELEAIKERNRSAAHFNIRAGKYRGSLPPWGYLPTRVDGEWRLVPDPVQRERILEVYHRVVDNHEPLHLVAHDLNRRGVLSPKDYFAQLQGREPQGRKWSATALKRSMTSEAMLGYATLNGKTVRDDDGAPLVRAEPILTREQLEALRAELVKTPRAKPAVSTPSLLLRVLFCAVCGEPAYKFAGGGRKHPRYRCRSMGFPKHCGNGTVVMAEWDAFCEEQVLNLLGDAERLEKVWVAGSDSAVELAEVSAELVDLTSLIGSPAYRAGSPQREALDARIAALAARQEELEGLEARPPGWEWRETGQRFGDWWREQDTAAKNTWLRSMNVRLTFDVRGGLTRTIDFGDLQEYEQHLRLGSVVERLHTGMS

SEQ ID NO: 9466 - protein, 500 aa, synthetic construct
MRALVVIRLSRVTDATTSPERQLESCQQLCAQRGWDVVGVAEDLDVSGAVDPFDRKRRPNLARWLAFEEQPFDVIVAYRVDRLTRSTRHLQQLVHWAEDHKKLVVSATEAHFDTTTPFAAVVIALMGTVAQMELEAIKERNRSAAHFNIRAGKYRGSLPPWGYLPSRVDGEWRLVPDPVQRERILEVYHRVVDNHEPLHLVAHDLNRRGVLSPKDYFAQLQGREPQGRKWSATALKRSMISEAMLGYATLNGKTVRDDDGAPLVRAEPILTREQLEALRAELVKTSRAKPAVSTPSLLLRVLFCAVCGEPAYKFAGGGRKHPRYRCRSMGFPKHCGNGTVVMAEWDAFCEEQVLDLLGDAERLEKVWVAGSASAAELAEVNAELVDLTSLIGSPAYRAGSPQREALDARIAALAARQEELEGLEARPSGWEWRETGQRFGDWWREQDTAAKNTWLRSMNVRLTFDVRGGLTRTIDFGDLQEYEQHLRLGSAVERLHTGMS

SEQ ID NO: 9467 - protein, 500 aa, synthetic construct
MRVLVVIRLSRVTDATTSPERQLESCQQLCAQRGWDVVGVAEDLDVSGAVDPFDRKRRPNLARWLAFEEQPFDVIVAYRVDRLTRSVRHLQQLVHWAEDHEKLVVSATEAHFDTTTPFAAVVIALMGTVAQMELEAIKERNRSAAHFNIRAGKYRGSLPPWGYLPTRVDGEWRLAPDPVQRERILEVYHRVVDNHEPLHLVAHDLNRRGVLSPKDYFAQLQGREPQGRKWSATALKRSMISEAMLGYATLNGKIVRDDDGAPLVRAEPILTREQLEALRAELVKTSRAKPAVSTPSLLLRVLFCAVCGEPAYKFAGGGRKHPRYRCRSMGFPKHCGNGTVVMAEWDAFCEEQVLELLGDAERLEKVWVAGSDSAVELAEVNAELVDLTSLIGSPAYRAGSPQREALDARIAALAARQEELEGLGARPSGWEWRETGQRFGDWWREQDTAAKNTWLRSMNVRLTFDVRGGLTRTIDLGELQEYEQHLRLGSVVERLHTGMS

SEQ ID NO: 9468 - protein, 500 aa, synthetic construct
MRALVVIRLSRVTDATTSPGRQLESCQKLCAQRGWDVVGVAEDLNVSGAVDPFDRKRRPNLARWLAFEEQPFDVIVAYRVDRLTRSIRHLQRLVHWAEDHKKLVVSATEAHFDTTTPFAAVVIALMGTVAQMELEAIKERNRSAAHYNIRAGKYRGSLPPWGYLPTRVDGEWRLVPDPVQRERILEVYHRVVNNHESLHLVAHDLNRRGVLSPKDYFAQLQGREPQGRKWSATALKRSITSEAMLGYATLNGKTVRNDDGAPLVRAEPILTRGQLEALRAELVKTSRAKPAVSTPSLLLRVLFCAVCGEPAYKFAGGGRKHPRYRCRSMGFPKHCGNGTVVMAEWDAFCEEQVLDLLGDAECLEKVWVAGSDSAVELAEVNAELVDLSSLIGSPAYRAGSPQREALDARIAALAARQEELEGLETRPSGWEWRETGQRFGDWWREQDTAAKNTWLRSMNVRLTFDVRGGLIRTIDFGDLQEYEQHLRLGSVVECLHTGMS

SEQ ID NO: 9469 - protein, 500 aa, synthetic construct
MRALVVIRLSRVTDATTSPERQLESCQQLCAQRGWDVVGVAEDLDVSGAVDPFDRKRRPNLARWLAFEEQPFDVIVAYRVDRLTRSTRHLQQLVHWAEDHKKLVVSATEAHFDTTTPFAAVVIALMGTVAQMELEAIKERIRSAVRFNIRAGKYRGSLPPWGYLPTRVDGEWRLVPDPVQRERILEVYHRVVDNHEPLHLVAYDLNRRGVLSPKDYFAQLQGREPQGREWSATALRRSLTSGAMLGYATLNGKIVRDDDGAPLVRAEPILTREQQEALRAELAKTSRAKPAVSTPSLLLRVLFCAVCGEPAYKFAGGGRKHPRYRCRSMGFPKHCGNGTVVMTEWDAFCEEQVLDLLGGAERLEKVWVAGSDSAVELAEVNAELVNLTSLIGSPAYRAGSPQREALDARIAALAARQGELEGLEARPSGWEWRGTGQRFGDWWREQDTAAKNTWLRSMNVRLTFDVRGGLTRTIDFGELQEYVQHLRLGSMVERLHTGMS

SEQ ID NO: 9470 - protein, 500 aa, synthetic construct
MRALVVIRLSRVTDATTSPERQLESCQQLCAQRGWDVVGVAEDLDVSGAVDPFDRKRRPNLARWLAFEEQPFDAIVAYRVDRLTRSVRHLQQLVHWAEDHKKLVVSATEAHFDTTTPFAAVVIALMGTVAQMELEAIKERNRSAAHFNIRAGKYRGSLPPWGYLPARVDREWRLVPDPVQRERILEVYHRVVDNHEPLHLVAHDLNRRGVLSPKDYFAQLQGREPQGRKWSATALKRSMISEAMLGYATLNGKTVRDDDGAPLVRAEPILTREQREALRAELVKTSRAKPAVSTPSLLLRVLFCAVCGEPAYKFAGGGRRHPRYRCRSMGFPKHCGNGTVAMAEWDAFCEEQVLNLLGDAERLEKVWVAGSDSAAELAEVNAELVDLTSLVGSPAYRAGSPQREALDARIAALAARQEELEGLEARPPGWGWRGTGQRFGDWWREQDTAAKNTWLRSMNVRLTFDVRGGLTRTIDLGDLQEYEQHLRLGSVVERLHTGMS

SEQ ID NO: 9471 - protein, 500 aa, synthetic construct
MRALVVIRLSRVTDATTSPERQLESCQQLCAQRGWDVVGVAEDLDVSGAVDPFDRKRRPNLARWLAFEEQPFDVIVAYRVDRLTRSTRHLQQLVHWAEDHKKLVVSATEAHFDTTTPFAAVVIALMGTVAQMELEAIKERNRSAAHFNIRAGKYRGSLPPWGYLPTRVDGEWRLVPDPVQRERILEVYHRVVDNHEPLHLVAHDLNRRGVLSPKDYFAQLRGREPQGRKWSATALKRSMTSEAMLGYATLNGKTVRDDDGAPLVRAEPILTREQLEALRAELIRTSRAKPAVSTPSLLLRVLFCAVCGEPAYKFAGGGRKHPRYRCRSMGFPKHCGNGTVAMVEWDAFCEEQVLDLLGDAERLEKVWVAGSDSAVELAEVNAELVDLTSLIGSPAYRAGSPQREALDARIAALAGRQEELEGLEARPSGWVWRETGQRFGDWWREQDTAAKNTWLRSMNVRLTFDVRGGLTRTIDFGDLQEYKQHSRLGSVVERLHTGMS

SEQ ID NO: 9472 - protein, 500 aa, synthetic construct
MRALVVIRLSRVTNATTSPERQLESCQQLCAQRGWDVVGVAEDLDVSGAVDPFDRKRRPNLARWLAFEEQPFDVIVAYRVDRLTRSTRHLQQLVHWAEDHKKLVVSATEAHFDTTTPFAAVVIALMGTVAQMELEAIKERNRSAAHFNIRAGKYRGSLPPWGYLPTRVDGEWRLVPDPVQRERISEVYHRVVDNHEPLHLVAHDLNRRGILSPKDYFAQLQGREPQGRKWSATALKRSMISGAMLGYATLNGKTVRNDDGTPLVRAEPILTREQLEALRAELVKTSRAKPTVSTPSLLLRVLFCAVCGEPAYKFAGGGRKHPRYRCRSMGFPKHCGNGTVVMAEWDAFCEEQVLDLLGDAERLEKVWVAGSDSAIELAEVNAELVDLTSLIGSPAYRAGSPQREALDARIAALAARQEELEGLEARPSGWEWRETGQRFGDWWREQDTAAKNTWLRSMNVRLTFDVRGGLTRTIDFGDLQEYERHLRLGSVAERLHTGMS

SEQ ID NO: 9473 - protein, 500 aa, synthetic construct
MRALVVVRLSRVTDATTSPERQLESCQQLCAQRGWDVVGVAEDLDVSGAVDPFDRKRRPNLARWLAFEEQPFDVIVAYRVDRLTRSTRHLQQLVHWAEDHKKLVVSATEAHFDTTTPFAAVVIALMGTVAQMELEAIKERIRSAVRFNIRAGKYRGSLPPWGYLPTRVDGEWRLVPDPVQRERVLEVYHRVVDNHEPLHLVAHDLNRRGVLSPKDYFAQLQGREPQGRKWSATALKRSMISMAMLGYATLNGKTVRDDDGAPLVRAEPILTREQQEALRAELAKTSRAKPAVSTPSLLLRVLFCAVCGEPAYKFAGGGRKHPRYRCRSMVFPKHCGNGTVVMAEWDAFCEEQVLNLLGDAERLEKVWVAGSDSAVELAEVNAELVDLTSLIGSPAYRAGSPQREALDARIAALAARQEELKGLEARPSGWEWRGTGQRFGDWWREQDTAAKNTWLRSMNVRLTFDARGGLTRTIDFGDLQEYEQHLRLGSVVERSHTGVS

SEQ ID NO: 9474 - protein, 500 aa, synthetic construct
MRALVVIRLSRVTDATTSPERQLESCQQLCAQRGWDVVGVAEDLDVSGAVDPFDRKRRPNLARWLAFEEQPFDVIVAYRVDRLTRSTRHLQQLVRWAEDHKKLVVSATEAHFDTTTPFAAVVIALMGTVAQMELEAIKERIRSAVRFNIRAGKYRGSLPPWGYLPTRVDGEWRLVPDPVQRERILEVYRRVVDNHEPLHLVAYDLNRRGILSPKDYFAQLQGREPQGRKWSATALKRSMTSEAMLGYATLNGKTVRDDDGAPLVRAEPILTREQQEALRAELAKTSRAKPAVSTPSLLLRVLFCAVCGEPAYKFVGGGRKHPRYRCRSMGFPKHCGNGTVVMAEWDAFCEEQVLNLLGDAERLEKVWVAGSDSAVELAEVNAELVDLTSLISSPAYRAGSPQREALDARIAALAARQEELEGLEARPSGWEWRETGQRFGDWWREQDTAAKNTWLRSMNVRLTFDVRGGLTRTIDFGDLQEHVQHLRLDSVVERLRAGMS

SEQ ID NO: 9475 - protein, 500 aa, synthetic construct
MRALVVIRLSRVTDATTSPERQLESCQQLCAQRGWDVVGVAEDLDVSGAVDPFDRKRRPNLARWLAFEEQPFDVVVAYRVDRLTRSVRHLQQLVHWAEDHKKLVVSATEAHFDTTTPFAAVVIALMGTVAQMELEAIKERNRSAAHFNIRAGKYRGSLPPWGYLPTRVDGEWRLVPDPVQRERILEVYHRVVDDHEPLHLVAHDLNRRGVLSPKDYFAQLQGREPQGRKWSATALKRSMISEAMLGYATLNGMTVRDDDGAPLVRAEPILTREQREALRAELVKTSRAKPAVSTPSLLLRVLFCAVCGEPAYKFAGGGRKHPRYRCRSMGFPKHCGNGTVAMAEWDAFCEGQVLDLLGDAERLEKVWVAGSDSAVELAEVNAELVDLTSLIGSPAYRAGSSQREALDARIAALAARQEELEGLGARPSGWEWRETGQRFGDWWREQDTAAKNTWLRSMNVRLTFDVRGGLTRTIDFGDLQEYEQHLRLGSVVERLHTGRS

SEQ ID NO: 9476 - protein, 500 aa, synthetic construct
MRALVVIRLSRVTDATTSPERQLESCQQLCAQRGWDVVGVAEDLDVSGAVDPFDRKRRPNLARWLAFEEQPFDVIVAYRVDRLTRSTRHLQQLVRWAEDHKKLVVSATEAHFDTTTPFAAVVIALMGTVAQMELEAIKERIRSAVHFNIRAGKYRGSLPPWGYLPTRVDGEWRLVPDPVQRERILEVYHRVVDNHEPLHLVAHDLNRRGVLSPKDYFAQLQGREPQGREWSATALKRSMTSVAMLGYATLNGKIVRDDDGAPLVRAEPILTREQQEALRAELAKTSRAKPAVSTPSLLLRVLFCAVCGEPAYKFVGGGRRHPRYRCRSMGFPKHCGNGTVVMTEWDAFCEEQVLDLLGDAERLEKVWVAGSDSAVELAEVNAELVDLASLIGSPAYRAGSPQREALDARIAALAARQEELEGLEAHPSGWEWRGTGQRFGDWWHEQDTAAKNTWLRSMNVRLTFDVRGGLTRTIDFGDLQEYERHLRLGSVVERLHTGMS

SEQ ID NO: 9477 - protein, 500 aa, synthetic construct
MRALVVIRLSRVTDATTSPERQLESCQQLCAQRGWDVVGVAEDLDVSGAVDPFDRKRRPNLARWLAFEEQPIDVIVAYRVDRLTRSVRHLQQLVHWAEDHKKLIVSATEAHFDTTTPFAAVVIALMGTVAQMELEAIKERNRSAAHFNIRAGKYRGSLPPWGYLPTRVDGEWRLVPDPVQRERILEVYHRVVDNHEPLHLVAHDLNRRGVLSPKDYFAQLQGREPQGRKWSATALKRSMISEAMLGHATLNGKTVRDDYGAPLVRAEPILTREQLEVLRAELAKTSRAKPAVSTPSLLLRVLFCAVCGEPAYKFAGGGRKHPRYRCRSMGFPKHCGNGTVVMAEWDAFCEEQVLDLLGDAERLEKVWVAGSDSAVELAEVNAELVDLTSLIGSPAYRAGSPQREALDARIAALAARQEELEGLGARPSGWEWRETGQRFGDWWREQDTAAKNTWLRSMNVRLTFDVRGGLTRTIDFGDLQEYEHHLRLGSVVERLHTGMS

SEQ ID NO: 9478 - protein, 500 aa, synthetic construct
MRALVVIRLSRVTDATTSPERQLESCQQLCAQRGWDVVGVAEDLDVSGAVDPFDRKRRPNLARWLAFEEQPFDVIVAYRVDRLTRSVRHLQQLVRWAEDHKKLVVSATEAHFDTTTPFAAVVIALMGTVAQMELEAIKERIRSAAHFNIRAGKYRGSLPPWGYLPARVDGEWRLVPDPVQRERILEVYHRVVDNHEPLHLVAHDLNRRGVLSPKDYFAQLRGREPQGRRWSATALKRSMTSVAMLGYATLNGRTVRDDDGAPLVRAEPILTREQQEALRAELAKTSRAKPAVSTPSLLLRVLFCAVCGEPAYKFVGGGRKHPRYRCRSMGFPKHCGNGTVVMAEWDVFCEEQVLNLLGDAERLEKVWVAGSDSAVELAEVNAELVDLTSLVGSPAYRAGSPQREALDARIAALAARQEELEGLEARPSGWEWRETGQRFGDWWREQDTAAKNTWLRSMNVRLTFDVRDGLTRTIDFGDLQEYGQRLRLGSVVERLHTGMS

SEQ ID NO: 9479 - protein, 500 aa, synthetic construct
MRALVVIRLSRVTDATTSPERQLESCQQLCAQRGWDVVGVAEDLDVSGAVDPFDRKRRPNLARWLAFEEQPFDVIVAYRVDRLTRSTRHLQQLVHWAEDHKKLVVSATEAHFDTTTPFAAVVIALMGTVAQMELEAIKERIRSAVRFNIRAGKYRGSLPPWGYLPTRVDGEWRLAPDPVQRERILEVYHRVVDNHEPLHLVAHDLNRRGVLSPKDYFAQLRGREPQGRKWSATALKRSMISGAMLGYATLDGKTVRGDDGAPLVRAEPILTREQQEALRAVLAKTSRAKPAVSTPSLLLRVLFCAVCGEPAYKFVGGGRKHPRYRCRSMGFPEHCGNGTVVMAEWDAFCEEQVLNLLGDAERLEKVRLAGSDSAVELAEVNAELVDLTSLIGSPAYRAGSPQREALDARIAALAARQEELEGLEARPSGWEWRETGQRFGDWWREQDTAAKNTWLRSMNVRLTFDVRGGLTRTIDFGDLQEYEQHLRLGSVAERLHTGMS

SEQ ID NO: 9480 - protein, 500 aa, synthetic construct
MRALVVIRLSRVTDATTSPERQLESCQQLCAQRGWDVVGVAEDLDVSGAVDPFDRKRRPNLARWLAFEEQPFDVIVAYRVDRLTRSTRHLQQLVHWAEDHKKLVVSATEAHFDTTTPFAAVVIALMGTVAQMELEAIKERNRSAAHFNIRAGKYRGSLPPWGYLPTRVDGEWRLVPDPVQRERILEVYHRVVDNHEPLYLVAHDLNRRGVLSPKDYFAQLRGREPQGRKWSATALKRSMISEAMLGYATLNGKTVRDDDGAPLVRAEPILTREQLEALRAELVKTSRAKPAVSTPSLLLRVLFCAVCGEPAYKFAGGGRRHPRYRCRSMGFPKHCGNGAVAMAEWDAFCEEQVLDLLGDAERLEKVWVAGSDSAVELAEVNAELMDLTSLIGSPAYRAGSPQREALDARIAALAARQEELEGLEARPSGWEWRGTGQRFGDWWREQDTAAKNTWLRSMNVRLTFDVRGGLTRTIDFGDLQEYGQHLRLGSVVERLHTGVS

SEQ ID NO: 9481 - protein, 500 aa, synthetic construct
MRALVVIRLSRVTDATTSPERQLESCQQLCAQRGWDVVGVAEDLDVSGAVDPFDRKRRPNLARWLAFEEQPFDAIVAYRVDRLTRSVRHLQQLVHWAEDRKKLVVSATEAHFDTTTPFAAVVIALMGTVAQMELEAIKERNRSAAHFNIRAGKYRGSLPPWGYLPTRVDGEWRLVPDPVQRERILEVYHRVVDNHEPLHLVAHDLNRRGVLSPKDYFAQLRGREPQGRKWSATALKRSMISEAMLGYATLNGKTVRDDDGAPLVRAEPILTREQLEALRAELVKTSRVKPAVSTPSLLLRVLFCAVCGEPAYKFAGGGRKHPRYRCRSMGFPKHCGNGTVAMAEWDAFCEEQVLNLLGDAERLEKVWVAGSDSAVELAEVNAELVDLTSLIGSPAYRAGSPQREALDARIAALAARQEELEGLEARPSCWGWRETGQRFGDWWREQDTAAKNTWLRSMNVRLTFDVRGGLARTIDFGDLQEYEQHLRLGSVVERLYTGMS

SEQ ID NO: 9482 - protein, 500 aa, synthetic construct
MRALVVIRLSRVTDATTSPERQLESCQQLCAQRGWDVVGVAEDLDVSGAVDPFDRKRRPNLARWLVFEEQPFDAIVAYRVDRLTRSVRHLQQLVHWAEDHKKLVVSATEAHFDTTTPFAAVVIALMGTAAQMELEAIKERNRSAAHFNIRAGKYRGSLPPWGYLPTRVDGEWRLAPDPVQRERILEVYHRVVDNHEPLHLVAHDLNRRGVLSPKDYFAQLQGREPQGRKWSATALKRSMISEAMLGYATLNGKTVRDDDGTPLVRAEPILTREQQEALRAELARTSRAKPAVSTPSLLLRVLFCAVCGEPAYKFAGGGRKHPRYRCRSMGFPKHCGNGTVAMAEWDAFCEEQVLDLLGDAERLEKVWVAGSDSAVELAEVNAELVDLTSLIGSPAYRAGSPQREALDARIAALAARQEELEGLEARPSGWEWRETGQRFGDWWREQDTAAKNTWLRSMNVRLTFDVRGGLTRTIDFGDLQEYEQLLRLGSVVERLHTGMS

SEQ ID NO: 9483 - protein, 500 aa, synthetic construct
MRALVVIRLSRVTDATTSPERQLESCQQLCAQRGWDVVGVAEDLDVSGAVDPFDRKRRPNLARWLAFEEQPFDAIVAYRVDRLARSVRHLQQLVHWAEDHKKLVVSATEAHFDTTTPFAAVVIALMGTVAQMELEAIKERNRSAAHFNIRAGKYRGSLPPWGYLPTRVDGEWRLVPDPVQRERILEVYHRVVDNHEPLHWVAHDLNRRGVLSPKDYFAQLQGREPQGRKWSATALKRSMISEAMLGYATLNGKTVRDDDGAPLVRAEPILTREQLEALRAELVKTSRAKPAVSTPSLLLRVLFCAVCGEPAYKFAGGGRKHPRYRCRSMGFPKHCGNGTVAMAEWDAFCEEQVLDLLGDAERLEKVWVAGSDSAVELADVNAELVDLTSLIGSPTYRAGSPQREALDARIAVLAARQEELEGLEARPSGWEWRETGQRFGDWWREQDTAAKNTWLRSMNVRLTFDVRGGLTRTIDFGDLRAYERHLRLGSVVKRLHTGMS

SEQ ID NO: 9484 - protein, 500 aa, synthetic construct
MRALVVIRLSRVTDATTSPERQLESCQQLCAQRGWDVVGVAEDLDVSGAVDPFDRKRRPNLARWLAFEEQPFDVIVAYRVDRLTRSTRHLQQLVHWAEDHKKLVVSATEAHFDTTTPFAAVVIALMGTVAQMELEAIKERNRSAAHFNIRAGKYRGSLPPWGYLPTRVDGEWRLVPDPVQRERILEVYHRVVDNHEPLHLVAHDLNRRGVLSPKDYFAQLQGREPQGRKWSATALKRSMISEAMLGYATLNGKTVRDDDGAPLVRAEPILTRGQREALRAELVKTSRAKPAVSTPSLLLRVLFCAVCGEPAYKFAGGGRKHPRYRCRSMGFPKHCGNGTVVMAEWDAFCEEQVLNLLGDAERLEKVWVAGSDSAVELAEVNAELVDLTSLIGSPAYRAGSPQREALDARIAALAARQEELEGLEARPPGWEWRETGQRFGDWWREQDTAAKNTWLRSMNVRLTFDVRGGLTRTIDFGDLQEYEQHLRLGSVVERLHTGTS

SEQ ID NO: 9485 - protein, 500 aa, synthetic construct
MRALVVIRLSRVTDATTSPERQLESCQQLCAQRGWDVVGVAEDLDVSGAVDPFDRKRRPNLARWLAFEEQPFDVIVAYRVDRLTRSTRHLQQLVHWAEDHKKLVVSATEAHFDTTTPFAAVVIALMGTVAQMELEAIKERNRSAAHFNIRAGKYRGSLPPWGYLPTRVDGEWRLVPDPVQRERILEVYRRVVDNHEPLHLVAHDLNRRGVLSPKDYFAQLQGREPQGRKWSATALKRSMISKAMLGYATLNGKIVRDDDGAPLVRAEPILTREQLEALRAELVKTSRAKPAVSTPSLLLRVLFCAVCGEPAYKFAGGGRKHPRYRCRSMGFPKHCGNGTVVMAEWDAFCEEQVLDLLGDAERLEKVWVAGSDSAVELAEVNAELVDLTSLIGSPAYRAGSPQREALDARIAALAARQEELEGLGARPSGWEWRETGQRFGDWWREQDTAAKNTWLRSMNIRLTFDVRGGLTRAIDFGDLQEYEQHLRSGSVVERLHTGMS

SEQ ID NO: 9486 - protein, 500 aa, synthetic construct
MRALVVIRLSRVTDATTSPERQLESCQQLCAQRGWDVVGAAEDLDVSGAVDPFDRKRRPNLARWLAFEEQPFDVIVAYRVDRLTRSTRHLQQLVHWAEDHKKLVVSATEAHFDTTTPFAAVVIALMGTVAQMELEAIKERIRSAAHFNIRAGKYRGSLPPWGYLPTRVDGEWRLVPDPVQRERILEVYHRVVDNHEPLHLVAHDLNRRGVLSPKDYFAQLRGREPQGRKWSATALKRSMTSVAMLGYATLNGKTVRDDDGAPLVRAEPILTREQLEALRAELAKTSRAKPAVSTPSLLLRVLFCAVCGEPAYKFVGGGRKHPRYRCRSMGFPKHCGNGTVTMAEWDAFCEEQVLGLLGDAERLERVWVAGSDSAVELAEVNAELVDLTSLIGSPAYRAGSPQREALDARIAALAARQEELEGLEARPSGWEWRGTGQRFGDWWREQDTAAKNTWLRSMNVRLTFDVRGGLARTIDFGDLREYEQHLRLGSVVKRLHTGVS

SEQ ID NO: 9487 - protein, 500 aa, synthetic construct
MRVLIVIRLSRVTDATTSPVRQLESCQQLCAQRGWDVVGVAEDLDVSGAVDPFDRKRRPNLARWLAFEEQPFDAIVAHRVDRLTRSVRHLQQLVHWAEDHKKLVVSATEAHFDTTTPFAAVVIALMGTVAQMELEAIKERNRSAAHFNIRAGKYRGSLPPWGYLPTRVDGEWRLVPDPVQRERILEVYHRVVDNHEPLHWVAHDLNRRGVLSPKDYFAQLQGREPQGRKWSATALKRSMISEAMLGYATLNGKTVRNDDGAPLVRAEPILTRGQLEALRAELVKTSRAKPAVSTPSLLLRVLFCAVCGEPAYKFAGGGRKHPRYRCRSMGFPKHCGNGTVVMAEWDAFCEEQVLNLLGDSERLEKVWVAGSDSAVELSEVDAELVDLTSLIGSPAYRAGSPQREALDARIAALAARQEELEGLEARPSGWEWRETGQRFGDWWREQDTAAKNTWLRSMNVRLTFDVRGELTRTIDFGDLQEYEQHLRLGSVAERLHTGMS

SEQ ID NO: 9488 - protein, 500 aa, synthetic construct
MRALVVIRLSRVTDATTSPERQLESCQQLCAQRGWDVVGVAEDLNVSGAVDPFDRKRRPSLARWLAFEEQPFDVIVAYRVDRLARSIRHLQQLVHWAEDRKKLVVSATEAHFDTTTPFAAVVIALMGTVAQMELEAIKERNRSAAHFNIRAGRYRGSLPPWGYLPTRVDGEWRLVPDPVQRERILEVYHRVVDNHEPLHLVAHDLNRRGVLSPKDYFAQLQGREPQGRKWSATALKRSMISEAMLGYATLNGKIVRDDDGAPLVRAEPILTREQLEALRAELVKTSRAKPAVSTPSLLLRVLFCAVCGEPAYKFAGGGRKHPRYRCRSMGFPKHCGNGTVVMAEWDAFCEEQVLNLLGDAERLEKVWVVGSDSAVELAEVNAELVDLTSLIGSPAYRAGSPQREALDARIAALAARQEELEGLEARPPGWEWRETGQRFGDWWREQDTAAKNTWLRSMNVRLTFDVRGGLTRTIDLGDLQEYEQHLRLGSVVERLHTGMS

SEQ ID NO: 9489 - protein, 500 aa, synthetic construct
MRALVVIRLSRVTDATTSPERQLESCQQLCAQRGWDVVGVAEDLDVSGAVDPFDRKRRPNLARWLAFGEQPFDVIVAYRVDRLTRSTRHLQQLVHWAEDHKKLVVSATEAHFDTTTPFAAVVIALMGTVAQMELEAIKERNRSAAHFNIRAGKYRGSLPPWGYLPTRVDGEWRLVPDPVQRECILEVYHRVVDGHEPLHLVAHDLNRRGVLSPKDYFAQLQGREPQGRKWSATALKRSMTSEAMLGYATLNGKTVRDDDGAPLVRAEPILTREQLEALRAVLVKTSRAKPAVSTPSLLLRVLFCAVCGEPAYKFAGGGRKHPRYRCRSMGFPKHCGNGTVVMAEWDAFCEEQVLGLLGDAERLEKVWVAGSDSAVELAEVNAELVDLTSLIGSPAYRAGSQQREALDARIAALAARQEELEGLGARPSGWEWRETGQRFGDWWREQDTAAKNTWLRSMNVRLSFDVRGGLTRTIDFGDLQEYEQHLRLGSVVERLHTGMS

SEQ ID NO: 9490 - protein, 500 aa, synthetic construct
MRALVVIRLSRVTDATTSPERQLESCQQLCAQRGWDVVGVAEDLDVSGAVDPFDRKRRPNLARWLAFEEQPFDVIVAYRVDRLTRSTRHLQQLVRWAEDHKKLVVSATEAHFDTTTPFAAVVIALMGTVAQMELEAIKERIRSAAHFNIRAGKYRGSLPPWGYLPTRVDGEWRLAPDPVQRERILEVYHRVVDNHEPLHLVAHDLNRRGVLSPKDYFAQLQGREPQGRKWSATALKRSMISGAMLGYATLNGKTVRGDDGAPLVRAEPILTREQQEALRAELAKTSRAKPAVSTPSLLLRVLFCAVCGEPAYKFVGGGRKHPRYRCRSMGFPKHCGNGTVAMAEWDAFCEEQVLDLLGDAERLEKVWVAGSDSAGELAEVNAELVDLTSLIGSPTYRAGSPQREALDARIAALAARQEELEGLGARPSGWEWRGTGQRFGDWWREQDTAAKNTWLRSMNVRLTFDVRGGLTRTIDFGDLQEYEQRLRLGSMVERIHTGTS

SEQ ID NO: 9491 - protein, 500 aa, synthetic construct
MRALVVIRLSRVTDATTSPERQLKSCQQLCAQRGWDVVGVAEDLDVSGAVDPFDRKRRPNLARWLAFEEQPFDVIVAYRVDRLTRSTRHLQQLVLWAEDHKKLVVSATEAHFDTTTPFAAVVIALMGTVAQMELEAIKERIRSAAHFNIRAGKYRGSLPPWGYLPTRVDGEWRLAPDPVQRERIFEVYHRVVDNHEPLHLVAHDLNRRGILSPKDYFAQLQGREPQGRKWSATALKRSMISGAMLGYATLNGKIVRDDDGAPLVRAEPILTREQQEALRAELVKTSRAKPAVPTPSLLLRVLFCAVCGEPAYKFVGGGRKHPRYRCRSMGFPKHCGNGTVVMAEWDAFCEEQVLNLLGDAERLEKVWVAGSDSAVELAEVNAELVDLTSLIGSPAYRAGSPQREALDARIAALAARQEELEGLEARPSGWEWRETGQRFGDWWRGQDTAAKNTWLRSMNVRLTFDVRGGLTRTIDFGELQEYEQRLRLGSVAERLHTGMS

SEQ ID NO: 9492 - protein, 500 aa, synthetic construct
MRALVVIRLSRVTDATTSPERQLESCRQLCAQRGWDVVGVAEDLDVSGAVDPFDRKRRPNLARWLAFEEQPFDAIVAYRVDRLTRSTRHLQQLVLWAEDHKKLVVSATEAHFDTTTPFAAVVIALMGTVAQMELEAIKERIRSAAHFNIRAGKYRGSLPPWGYLPARVDGEWRLVPDPVQRERILEVYHRVVDNHEPLHLVAHDLNRRGVLSPKDYFAQLRGREPRGRKWSATALRRSMTSVAMLGYATLNGKTVRGDDGAPLVRAEPILTREQQGALRAELAKTSRAKPAVSTPSLLLRVLFCAVCGEPAYKFVGGGRKHPRYRCRSMGSPEHCGNGTVVMAEWDAFCEEQVLDLLGDAERLEKVWVAGSDSSVELAEVNAELVDLTSLIGSPAYRAGSPQREALDARIAALAARQEVLEGLEARPSGWEWRETGQRFGDWWRELDTAAKNTWLRSMNVRLTFDVRGGLTRTVDFGDLQEYERHLRLGSAAGRLHTGMP

SEQ ID NO: 9493 - protein, 500 aa, synthetic construct
MRALVVIRLSRVTDATTSPERQLESCQQLCAQRGWDVVGVAEDLDVSGAVDPFDRKRRPNLARWLAFEEQPFDVIVAYRVDRLTRSTRHLQQLVHWAEDHKKLVVSATEAHFDTTTPFAAVVIALMGTVAQMELEAIKERNRSAAHFNIRAGKYRGSLPPWGYLPTRVDGEWRLVPDPVQRERILEVYHRVVDNHEPLHLVAHDLNRRGVLSPKDYFAQLRGREPQGRKWSATALKRSMISEAMLGYATLNGKTVRDDDGAPLVRAEPILTREQLEALRAELVKTSRAKPAVSTPSLLLRVLFCAVCGEPAYKFAGGGRKHPRYRCRSMGSPKHCGNGTVTMAEWDAFCEEQVLDLLGDAERLEKVWVAGSDSAVELAEVNAELMDLTSLIGSPAYRAGSPQREALDARIAALAARQEELEGLGARPSGWEWRETGQRFGDWWREQDTAAKNTWLRLMNVRLTFDVRGGLTRTIDFGDLQEYEQHLRLGSVVERLHTGMS

SEQ ID NO: 9494 - protein, 500 aa, synthetic construct
MRALVVIRLSRVTDATTSPERQLESCQQLCTQRGWDVVGVAEDLDVSGAVDPFDRKRRPNLARWLAFEEQPFDVIVAYRVDRLTRSTRHLQQLVHWAEDHKKLVVSATEAHFDTTTPFAAVVIALMGTVAQMELEAIKERNRSAAHFNIRAGKYRGSLPPWGYLPTRVDGEWRLAPDPVQREHILEVYHRVVDNHEPLHSVAHDLNRRGVLSPKDYFAQLQGREPRGRKWSATALKRSMISEAMLGYATLNGKTVRDDDGAPLVRAEPILTREQLEALRAELVKTSRAKPAVSTPSLLLRVLFCAVCGEPAYKFAGGGRKYPRYRCRSMGFPKHCGNGTVAMAEWDAFCEEQVLDLLGDAERLEKVWVAGSDSAIELAEVNAELVDLTSLIGSPAYRAGSPQRGALDARIAALAARQEELEGLEARPPGWEWRETGQRFGDWWREQDTAAKNTWLRSMNVRLTFDVRGGLTRTIDFGDLQEHEQHLRLGGVVERLHTGMS

SEQ ID NO: 9495 - protein, 500 aa, synthetic construct
MRALVVVRLSRVTDATTSPERQLESCQLLCAQRGWDVVGVAEDLDVSGAVDPFDRKRRPNLARWLAFEEQPFDAIVAYRVDRLTRSVRHLQQLVHWAEDHKKLVVSATEAHFDTTTPFAAVVIALMGTVAQMELEAIKERNRSAAHFNIRAGKYRGSLPPWGYLPARVDGEWRLVPDPVQRERILEVYHRVVDNHEPLHLVAHDLNRRGVLSPKDYFAQLQGREPQGRKWSATALKRSMISEAMLGYATLNGKTVRDDDGAPLVRAEPILTREQLEALRAELVKTSRAKPAVSTPSLLLRVLFCAVCGEPAYKFAGGGRKHPRYRCRSMGFPKHCGNGTVAMAEWDAFCEEQVLDLLGDAERLEKVWVAGSDSAVELAEVNAELVDLTSLIGSPDYRAGSPQREALDARIAALAARQEELEGLEARPSGWEWRETGQRFGDWWREQDTAAKNTWLRSMNVRLTFDARGGLTRTIDFGVLQKYEQHLRLGSVVERLHTGMS

SEQ ID NO: 9496 - protein, 500 aa, synthetic construct
MRALVVIRLSRVTDATTSPERQLESCQRLCAQRGWDVVGVAEDLDVSGAVDPFDRKRRPNLARWLAFGERPFDVIVAYRVDRLTRSVRHLQKLVHWAEDHKKLVVSATEAHFDTTTPFAAVVIALMGTVAQMELEAIKERNRSAAHFNIRAGKYRGSLPPWGYLPARVDGEWRLVPDPVQRERILEVYHRVVDNHEPLHLVARDLNRRGVLSPKDYFAQLRGREPQGREWSATALKRSMTSEAMLGYAILNGKTVRDDGGAPLVRAEPILTRGQLEALRAELVKTSRAKPAVSTPSLLLRVLFCAVCGEPAYKFAGGGRKHPRYRCRSMGFPKHCGNGTVAMAEWDAFCEEQVLNLLGDAERLEKVWVAGSDSAVELAEVNAELVDLTSLIGSPAYRAGSPQREALDARIAALAARQEELEGLGARPSGWEWRETGQLFGDWWREQDTAAKNTWLRSMSVRLTFDVRGGLTRTIDFGDLQEYEQHLRLGSVVERLHTGMP

SEQ ID NO: 9497 - protein, 500 aa, synthetic construct
MRALVVIRLSRVTDATTSPERQLESCQQLCAQRGWDVVGVAEDLDVSGAVDPFDRKRRPNLARWLAFEEQPFDVIVAYRVDRLTRSTRHLQQLVHWAEDHKKLVVSATEAHFDTTTPFAAVVIALMGTVAQMELEAIKERNRSAAHFNIRAGKYRGSLPPWGYLPTRVDGEWRLVPDPVQRERILEVYHRVVDNHEPLHLVAHDLNRRGVLSPKDYFAQLRGREPQGRKWSATALKRSMISEAMLGYATLNGKTVRDDDGAPLVRAEPILTREQLEALRAELVKTSRAKPAVPTPSLLLRVLFCAVCGEPAYKFAGGGRKHPRYRCRSMGFPKHCGNGTVAMAEWDAFCEEQVLDLLGDAERLEKVWVAGSDSAAELAEVNAELVDLTSLIGSPAYRAGSPQREALDARIAVLAARQEELEGLEARPSGWEWRETGQRFGDWWREQDTAAKNTWLRSMNVRLTFDVRGGLTRTIDFGDLREYEQHLRLGSVVERLHTGMS

SEQ ID NO: 9498 - protein, 500 aa, synthetic construct
MRALAVIRLSRVTDATTSPERQLESCQQLCARRGWDVVGVAEDLDVSGAVDPFDRKRRPNLARWLAFEEQPFDVIVAYRVDRLTRSTRHLQQLVHWAEDHKKLVVSATEAHFDTTTPFAAVVIALMGTVAQMELEAIKERNRSAAHFNIRAGKYRGSLPPWGYLPTRVDGEWRLVPDPVQRERILEVYHRVVGNHEPLHLVAHDLNRRGVLSPKDYFAQLRGREPQGRKWSATALKRSMTSEAMLGYATLNGKTVRDDDGAPLVRAEPILTRGQLEALRAELVKTSRARPAESTPSLLLRVLFCAVCGEPAYKFAGGGRKHPRYRCRSMGFPKHCGNGTVAMAEWDAFCEEQVLDLLGDAERLEKVWVAGSDSAVELAEVNAELVDLTSLIGSPAYRAGSPQREALDARIAALAARQEELEGLGARPSGWEWQETGQRFGDWWREQDTAAKNAWLRSMNVRLTFDVRGGLTRTIDFGDLQEYEQHLRLGSVVERLHTGMS

SEQ ID NO: 9499 - protein, 500 aa, synthetic construct
MRALVVIRLSRVTDATTSPERQLESCQQLCAQRGWDVVGVAEDLDVSGAVDPFDRKRRPNLARWLASEEQPFDVIVAYRVDRLTRSTRHLQQLVLWAEDHKKLVVSATEAHFDTTTPFAAVVIALMGTVAQMELEAIKERIRSAVHFNIRAGKYRGSLPPWGYLPARVDGEWRLVPDPVQRERILEVYHRVVDSHEPLHLVAYDLNRRGVLSPKDHFAQLQGREPQGRKWSATALKRSMISKAMLGYATLSGKIVRDDNGAPLVRAEPILTREQQEALRAELAKTSRAKPAVSTPSLLLRVLFCAVCGEPAYKFVGGGRKHPRYRCRSMGSPKHCGNGTVVMAEWDAFCEKQVLGLLGDAERLEKVWVAGSDSAVELAEVNAELVDLTSLIGSPVYRAGSPQREALDARIAALAARQEELEGLEARPSGWEWRETGQRFGDWWREQDTAAKNTWLRSMNVRLTFDVRGGLTRTIDFGDLQEYEQHLRSGGVVERLHTGVS

SEQ ID NO: 9500 - protein, 500 aa, synthetic construct
MRALVVIRLSRVTDATTSPERQLESCQQLCAQRGWDVVGVAEDLDVSGAVDPFDRKRRPNLARWLAFEEQPFDVIVAYRVDRLTRSTRHLQQLVHWAEDHKKLVVSATEAHFDTTTPFAAVVIALMGTVAQMELEAIKERSRSAAHFNIRAGKYRGSLPPWGYLPTRVDGEWRLVPDPVQRERILEVYHRVVDNHEPLHSVAYDLNRRGVLSPKDYFAQLRGREPRGRKWSATALKRSMTSVAMLGYATLNGKTVRGDDGAPLVRAEPILTREQLEALRAELVKTSRAKPAVSTPSLLLRVLFCAVCGEPAYKFAGGGRKHPRYRCRSMGFPKHCGNGTVVMTEWDAFCEEQVLGLLGDAERLEKVWVAGSDSAVELAEVDAELVDLTSLIGSPAYRAGSPQRGALDARIAALAARQEELESLEARPSGWEWRGTGQRFGDWWREQDTAAKNTWLRSMNVRLTFDVRGGPTRTIDFGELQEYEQHLRLGSVAERLRTGMS

SEQ ID NO: 9501 - protein, 500 aa, synthetic construct
MRALVVIRLSRVTDATTSPERQLESCQQLCAQRGWDVVGVAEDLDVSGAVDPFDRKRRPNLARWLAFEEQPFDAIVAYRVDRLARSIRHLQQLVHWAEDHKKLVVSATEAHFDTTTPFAAVVIALMGTVAQMELETIKERNRSAAHFNIRAGKYRGSLPPWGYLPTRVDGEWRLAPDPVQRERILEVYHRVVDNHEPLHLVAHDLNRRGVLSPKDYFAQLQGREPQGRKWSATALKRSMISGAMLGYATLNGKTVRDDDGAPLVRAEPILTRGQLEALRAVLVKTSRAKPAVSTPSLLLRVLFCAVCGEPAYKFAGGGRKHPRYRCRSMGFPKHCGNGTVAMAEWDAFCEEQVLDLLGDAERLEKVWAAGSDSAVELAEVSAELVDLTSLIGSPAYRAGSPQREALDARIAALAARQEELEGLGARPSGWEWRETGQRFGDWWREQDTVAKNTWLRSMNVRLTFDVRGGLTRTIDFGDLQEYVQHLRSDSVVERLHTGMS

SEQ ID NO: 9502 - protein, 500 aa, synthetic construct
MRALVVIRLSRVTDATTSPERQLASCQQLCAQRGWDVVGVAEDLDVSGAVDPFDRKRRPNLARWLAFEEQPFDVIVAYRVDRLTRSTRHLQQLVHWAEDHKKLVVSATEAHFDTTTPFAAVVIALMGTVAQMELEAIKERIRSAAHFNIRAGKYRGSLPPWGYLPTRVEGEWRLVPDPVQRERILEVYHRVVVNHEPLHLVAHDLNRRGVLSPKDYFAQLRGREPQGRKWSATALKRSMISEAMLGYATLNGKTVRDDDGAPLVRAEPILTREQQEALRAELTKTSRAKPAVSSPSLLLRVLFCAVCGEPAYKFVGGGRKHPRYRCRSMGFPKHCGNGTVVMTEWDAFCEEQVLDLLGNAERLEKVWVAGSDSAVELAEVNAELVDLTSLIGSPAYRAGSPQREALDARIAALAARQEELEGLEARPSGWEWRETGQRFGDWWREQDTAAKNSWLRAMNVRLTFDVRGGLTRTIDFGELQEYEQHLRLGSAVERIHTGMS

SEQ ID NO: 9503 - protein, 500 aa, synthetic construct
MRTLVVIRLSRVTDATTSPERQLESCQQLCAQRGWDVVGVAEDLDVSGAVDPFDRKRRPNLARWLAFEEQPFDAIVAYRVDRLTRSVRYLQQLVHWAEDHKKLVVSATEAHFDTTTPFAAVVIALMGTVAQMELEAIKERNRSAAHFNIRAGKYRGSLPPWGYLPTRVDGEWRLVPDPVQRERILEVYHRVVDNHEPLHLVAHDLNRRGVLSPKDYFAQLQGREPQGRKWSATALKRSMTSEAMLGHATLNGKTVRDDDGAPSVRAEPILTRVQLEALRAVLVKTSRAKPAVSAPSLLLRVLFCAVCGEPAYKFAGGGRKHPRYRCRSMGYPKHCGNGTVVMAEWDAFCEEQVLDLLGDAERLEKVWVAGSDSAVELAEVNAELVDLTSLIGSPAYRVGSPQREALDARIAALAARQEELESLEARPSGWEWRETGQRFGDWWREQDTAAKNIWLRSMNVRLTFDVRGGLTRTIDFGDLQEYEQHLRLGSVVERLHTGMS

SEQ ID NO: 9504 - protein, 500 aa, synthetic construct
MRALVVIRLSRVTDATTSPERQLESCQQLCAQRGWDVVGVAEDLDVSGAVDPFDRKRRPNLARWLAYEEQPFDAIVAYRVDRLARSIRHLQQLVHWAEDHKKLVVSATEAHFDTTTPFAAVVIALMGTVAQMELEAIKERNRSAAHFNIRAGKYRGSLPPWGYLPTRVDGEWRLVPDPVQRERILEVYHRVVDNHEPLHWVAHDLNRRGVLSPKDYFAQLRGREPQGRKWSATALKRSMISEAMLGYATLNGRTVRDDDGAPLVRAEPILTREQLEALRAELAKTSRARPAVSTPSLLLRVLFCAVCGEPAYKFAGGGRKHPRYRCRSMGFPKHCGNGTVVMAEWDAFCEEQVLDLLGDAERLEKVWVAGSDSAVELTEVNAELVDLTSLIGSPAYRAGSPQREALDARIAALAARQEELEGLEARPSGWEWRESGQRFGDWWREQDTAAKNTWLRSMNVRLTFDVRGGLTRTIDFGDLQEYEQYLRLGSAVERLHTGKS

SEQ ID NO: 9505 - protein, 500 aa, synthetic construct
MRALVVIRLSRVTDATTSPERQLESCRQLCAQRGWDVVGVAEDLDVSGAVDPFDRRRRPNLARWLAFEEQPFDVIVAYRVDRLTRSTRHLQQLVHWAEDHKKLVVSATEAHFDTTTPFAAVVIALMGTVAQMELEAIKERIRSAVHFNIRAGKYRGSLPPWGYLPTRVDGEWRLVPDPVQRERILEVYHRVVDNHEPLHLVAHDLNRRGVLSPKDYFAQLRGREPQGREWSATALKRSMTSVAMLGYATLNGKTVRDDDGAPLVRAEPILTRGQLEALRAELAKTSRAKPAVSTPSLLLRVLFCAVCGEPAYKFVGGGRKHPRYRCRSMGFPKHCGNGTVVMTEWDAFCEEQVLDLLGDAERLERVWVAGSDSAVELAEVNAELVDLTSLIGSPAYRAGSPQRVALDARIAALAARQEELEGLEVRPSGWEWRGTGQRFEDWWREQDTAAKNTWLRSMNVRLTFDARGGLTRTIDFGELQEYEQHLRLGSVVERLHTGMS

SEQ ID NO: 9506 - protein, 500 aa, synthetic construct
MRALVVIRLSRVTDATTSPGRQLESCQQLCAQRGWDVVGVAEDLDVSGAVDPFDRKRRPNLARWLAFEEQPFDVIVAYRVDRLTRSIRHLQQLVHWAEDHKKLVVSATEAHFDMTTPFAAVVIALMGTVAQMELEAIKERIRSAVHFNIRAGKYRGSLPPWGYLPTRVDGEWRLVPDPVQRERILEVYHRVVDNHEPLHLVAYDLNRRGVLSPKDYFAQLQGREPQGRKWSATALKRSMISGAMLGYATLNGKTVRGDDGVPLVRAEPILTREQQEALRVELARTSRAKPAVSTPSLLLRVLFCAVCGEPAYKFVGGGRKHPRYRCRSMGFPKHCGNGTVVMTEWDAFCEKQVLGLLGDAERLEKVWVAGSDSAVELAEVNAELVDLTSLIGSPAYRAGSPQREALDARIAALAARQEELEGSEARPSGWEWRGTGQRFGDWWREQDTVAKNTWLRSMNVRLTFDVRGGLTRTIDFGDLQEYEQHLRLGSVVERLHTGMS

SEQ ID NO: 9507 - protein, 500 aa, synthetic construct
MRALVAIRLSRVTDATTSPERQLESCQQLCAQRGWNVVGVAEDLDVSGAVDPFDRKRRPNLARWLAFEEQPFDVIVAYRVDRLTRSTRHLQQLVHWAEDHKKLVVSATEAHFDTTSPFAAVIIALMGTVAQMELEAIKERNRSAAHFNIRAGKYRGSLPPWGYLPTRVDGEWRLVPDPVQRERILEVYHRVVDNHEPLHLVAHDLNRRGVLSPKDYFAQLQGREPQGRKWSATALKRSMISEAMLGYATLNGKTVRDDDGAPLVRAEPILTREQLEALRAELVKTSRAKPAVSTPSLLLRVLFCAVCGEPAYKFAGGGRKHPRYRCRSMGFPKHCGNGTVAMAEWDAFCEEQVLDLLRDAERLEKVWVAGSDSGVELAEVNAELVDLTSLIGSPAYRAGSPQREALDARIAALAARQEELEGLGARPSGWEWRETGQRFGDWWREQDTAAKNTWLRSMNVRLTFDVRGGLTRTIDFGDLQEYEQHLRLGSVVERLHTGMS

SEQ ID NO: 9508 - protein, 500 aa, synthetic construct
MRALVVIRLSRVTDATTSPERQLESCQQLCAQRGWDVVGVAEDLDVSGAVNPFDRKRRPNLARWLAFEEQPFDVIVAYRVDRLTRSTRHLQQLVHWAEDHKKLVVSATEAHFDTTTPFAAVVIALMGTVAQMELEAIKERNRSAAHFNIRAGKYRGSLPPWGYLPTRVDGEWRLVPDPVQRERILEVYHRVVDNHEPLHLVAHDLNRRGVLSPKDYFAQLRGREPQGRKWSATALKRSMISEAMLGYATLNGKTVRDDDGAPLVRAEPILTREQLEALRAEFAKTSRAKPAVSTPSLLLRVLFCAVCGEPAYKFAGGGRKHPRYRCRSMGFPKHCGNGTVAMAEWDVFCEEQVLDLLGDAERLEKVWVAGSDSAVELAEVNAELVDLASLIGSPAYRAGSPQREALDARIVALAARQEELEGLEARPSGWEWRGTGQRFGDWWREQDTAAKNTWLRSMNVRLTFDVRGGLTRTIDFGDLHEYEQHLRLGSVVERLHTGMS

SEQ ID NO: 9509 - protein, 500 aa, synthetic construct
MRALVVIRLSRVTDATTSPERQLESCQQLCAQRGWDVAGVAEDLDVSGAVDPFDRKRRPNLARWLAFEEQPFDVIVAYRVDRLTRSTRHLQQLVHWAEDHKKLVVSATEAHFDTTTPFAAVVIALMGTVAQMELEAIKERIRSAVHFNIRAGKYRGSLPPWGYLPTRVDGEWRLVPDPVQRERILEVYHRVVNNHEPLHLVAHDLNRRGVLSPKDYFAQLRGREPRGRKWSATALKRSMISKAMLGYATLNGKTVRDDDGAPLVRAEPILTRKQQEALRAELAKTSRAKPAVSTPSMLLRVLFCAVCGEPAYKFVGGGRKHPRYRCRSIGFPKHCGNGTVVMAEWDAFCEEQVLDLLGDAERLERVWVAGSDSAVELAEVNAELVDLTSLIGSPAYRAGSPQREALDARIAALAARQEELEGLEACPSGWEWRGTGQRFGDWWHEQDTAAKNTWLRSMNVRLTFDVRGGLARTIDFGELQEYEQHLRSGSVAERLHTGMS

SEQ ID NO: 9510 - protein, 500 aa, synthetic construct
MRALVVIRLSRVTDATTSPERQLESCQQLCAQRGWDVVGVAEDLDVSGAVDPFDRKRRPSLARWLAFEEQPFDVIVAYRVDRLTRSTRHLQQLVHWAEDHKKLVVSATEAHFDTTTPFAAVVIALMGTVAQMELEAIKERNRSAAHFNIRAGKYRGSLPPWGYLPTRVDGEWRLAPDPVQRERILEVYHRVVDNHEPLHLVAHDLNRRGVLSPKDYFAQLQGREPQGRKWSATALKRSMISEAMLGYATLNGKTVRDDDGAPLVRAEPILTRGQQEALRAELVKTSRAKPAVSTPSLLLRVLFCAVCGEPAYKFAGGGRKHPRYRCRSMGFPKHCGNGTVVMAEWDTFCEEQVLDLLGDAERLEKVWVAGSDSAVELAEVNAELVDLTSLIGSPAYRAGSPQREALVARIAALAARQEELEGLEARPSGWGWRETGQRFEDWWREQDTAAKNTWLRSMNVRLTFDARGGLTRTIDFGDLQEYEQHLRSGSVVERLHTGMS

SEQ ID NO: 9511 - protein, 500 aa, synthetic construct
MRALVVIRLSRVTDATTSPERQLESCQQLCAQRGWNVVGVAEDLDVSGAVDPFDRKRRPNLARWLAFEEQPFDAIVAYRVDRLTRSTRHLQQLVHWAEDHKKLVVSATEAHFDTTTPFAAVVIALMGTVAQMELEAIKERSRSAARYNIRAGKYRGSLPPWGYLPARVDGEWRLVPDPVQRERILEVYHRVVDNHEPLHLVAHDLNRRGVLSPKDYFAQLQGREPRGRKWSATALKRSMTSEAMLGYATLNGKTVRDDDGAPLVRAEPILTREQLEALRAELVKTSRAKPAVSTPSLLLRVLFCAVCGEPAYKFVGGGRKHPRYRCRSMGFPKHCGNGTVVMTEWDAFCEEQVLNLLGGAERLEKVWVAGPDSAVELAEVNAELVDLTSLIGSPAYRTGSPQREALEARIAALAARQEELGGLEARPSGWEWRKTGQRFGDWWREQDTAARNTWLRSMNVRLTFDVRGGLTRTIDFGDLQEYEQHLRLGSVAKRLHTGMS

SEQ ID NO: 9512 - protein, 500 aa, synthetic construct
MRALVVVRLSRVTDATTSPERQLESCQQLCAQRGWDVVGVAEDLDVSGAVDPFDRKRRPNLARWLAFEEQPFDVIVAYRVDRLTRSTRHLQQLVHWAEDHKKLVVSATEAHFDTTTPFAAVVIALMGTVAQMELEAIKERNRSAAHFNIRAGKYRGSLPPWGYLPTRVDGEWRLVPDPVQRERILEVYHRVVDNHEPLHWVAHDLNRRGVLSPKDYFAQLQGREPQGRKWSATALKRSMISEAMLGYATLNGKTVRDDDGAPLVRAEPILTREQLEALRAELAKTSRAKPAVSTPSLLLRVLFCAVCGEPAYKFAGGGRKHPRYRCRSMGFPKHCGNGTVVMAEWDAFCEEQVLNLLGDAERLEKVWVAGSDSAVELAEVNAELVDLTSLIGSPAYRAGSPQREALDARIAALAARQEELEGLEARPSGWEWRETGQRFGDWWREQDTAAKNTWLRSMNVRLTFDVRGGLTRTIDFGELQEYEHHLRLGSVVERLHTGMS

SEQ ID NO: 9513 - protein, 500 aa, synthetic construct
MRALVVIRLSRVTDATTSPERQLESCQQLCAQRGWDVVGVAEDLDVSGAVDPFDRKRRPNLARWLAFEEQPFDVIVAYRVDRLTRSVRHLQQLVHWAEDHEKLVVSATEAHFDMTTPFAAVVIALMGTVAQMELEAIRVRNRSAAHFNIRAGKYRGSLPPWGYLPTRVDGEWRLVPDPVQRERILEVYHRVVDNHEPLHLVAHDLNRRGILSPKDYFAQLQGREPQGRKWSATALKRSMTSEAMLGYATLNGETVRDDDGAPLVRAEPILTREQLEALRAELVKTPRAKPAVSTPSLLLRVLFCAVCGEPAYKFAGGGRKHPRYRCRSMGFPKHCGNGTVAMAEWDAFCEEQVLDLLGDAERLEKVWVAGSDSAVELAEVNAELVDLTSLIGSPACRAGSPQREALDARIAALAARQEELEGLEARPPGWEWRETGQRFGDWWREQDTAAKNTWLRSMNVRLTFDVRGGLTRTIDFGDLLEYEQHLRLGSVVERLHTGMS

SEQ ID NO: 9514 - protein, 500 aa, synthetic construct
MRALVVIRLSRVTDATTSPERQLESCQLLCAQRGWDVVGVAEDLDVSGAVDPFDRKRRPNLARWLAFEEQPFDVIVAYRVDRLARSVRHLQQLVHWAEDHEKLVVSATEAHFDTTTPFAAVVIALMGTVAQMELEAIRERNRSAAHFNIRAGRYRGSLPPWGYLPTRVDGEWRLVPDPVQRERILEVYHRVVDNHESLHLVAHDLNRRGVLSPKDYFAQLQGREPQGRKWSATALKRSMISEAMLGYATLNGKIVRDDDGAPLVRAEPILTREQLEALRAELVKTSRAKPAVSTPSLLLRVLFCAVCGEPAYKFAGGGRKHPRYRCRSMGFPKHCGNGTVVMAEWDAFCEEQVLNLLGDAERLEKVWVVGSDSAVELAEVNAELVDLTSLIGSPAYRAGSPQREALDARIAALAARQEELEGLEARPPGWEWRETGQRFGDWWREQDTAAKNTWLRSMNVRLTFDVRGGLTRTIDFGDLQEYEQHLRLGSVVERLHTGMS

SEQ ID NO: 9515 - protein, 500 aa, synthetic construct
MRALVVIRLSRATDATTSPERQLESCQQLCAQRGWDVVGVAEDLDVSGAVDPFDRKRRPNLARWLALEEQPFDVIVAYRVDRLTRSTRHLQQLVHWAEDHKKLVVSATEAHFDTTTPFAAVVIALMGTVAQMELEAIKERNRSAAHFNIRAGKYRGSLPPWGYLPTRVDGEWRLVPDPVQRERILEVYHRVVDNHEPLHLVAHDLNRRGVLSPKDYFAQLRGREPQGRKWSATALKRSMISEAMLGYATLNGKTVRDDDGAPLVRAEPILTREQLEALRAELAKTSRAKPAVSTPSLLLRVLFCAVCGEPAYKFAGGGRKHPRYRCRSMGFPKHCGNGTVVMAEWDAFCEEQVLDLLGDAERLEKVWVAGSDSAVELAEVNAELVDLTSLIGSPAYRAGSPQREALDARIAALAARQEELEGLEARPPGWEWRETGRRFGDWWREQDTAAKNTWLRSMNVRLTFDVRGGLTRTIDFGDLQEYEQHLRLGSVVERFHTGMS

SEQ ID NO: 9516 - protein, 500 aa, synthetic construct
MRALVVIRLSRVTDATTSPERQLESCQQLCAQRGWDVVGVAEDLDVSGAVDPFDRKRRPNLARWLAFEEQPFDVIVAYRVDRLTRSTRHLQQLVHWAEDHKKLVVSATEAHFDTTTPFAAVVIALMGTVAQMELEAIRERNRSAAHFNIRAGKYRGSLPPWGYLPARVDGEWRLVPDPVQRERILEVYHRVVDNHESLHLVAHDLNRRGVLSPKDYFAQLQGREPQGRKWSATALKRSMISEAMLGYTTLNGKTARDDDGAPLVRAEPILTREQLEVLRAELAKTSRAKPAVSTPSLLLRVLFCAVCGEPAYKFAGGGRKHPRYRCRSMGFPKHCGNGTVVMAEWDAFCEEQVLDLLGDAERLEKVWVAGSDSAVELAEVNAELVDLTSLTGSPAYRAGSPQREALDARIAALAARQEELEGLGARPSGWEWRETGQRFGDWWREQDTAAKNTWLRSMNVRLTFDVRGGLTRTIDFGGLQEYEQHLRLGSVVERLHTGMS

SEQ ID NO: 9517 - protein, 500 aa, synthetic construct
MRALVVIRLSRVTDATTSPERQLESCQQLCAQRGWDVVGVAEDLDVSGAVDPFDRKRRPSLARWLAFEEQPFDVIVAYRVDRLTRSTRHLQQLVHWAEDHKKLVVSATEAHFDTTTPFAAVVIALMGTVAQMELEAIKERNRSAAHFNIRAGKYRGSLPPWGYLPTRVDGEWRLVPDPVQRERILEVYHRVVDNHEPLHLVAHDLNRRGVLSPKDYFAQLRGREPQGRKWSATALKRSMISEAMLGYATLNGKTVRDDDGAPLVRAEPILTREQLEALRAELVKTSRAKPAVSTPSLLLRVLFCAVCGEPAYKFAGGGRKHPRYRCRSMGFPKHCGNGTAAMAEWDAFCEEQVLDLLGDAERLEKVWVAGSDSAVELAEVNAELVDLTSLIGSPAYRAGSPQREALDARIAALAARQEELEGLEARPSGWEWRGTGQRFGDWWREQDTAAKNTWLRSMNVRLTFDVRGGLTRTIDFGDLQEYEQHLRLGSVVERLHTGMS

SEQ ID NO: 9518 - protein, 500 aa, synthetic construct
MRALVVIRLSRVTDATTSPERQLESCQQLCAQRGWDVVGVAEDLDVSGAVDPFDRKRRPNLARWLAFEEQPFDVIVAYRVDRLTRSTRHLQQLVRWAEDHKKLVVSATEAHFDTTTPFAAVVIALMGTVAQMELEAIKERIRSAVRFNIRAGKYRGSLPPWGYLPTRVDGEWRLAPDPVQRERIFEVYHRVVDNHEPLHIVAHDLNRRGVLSPKDYFAQLQGREPQGRKWSATALRRSMTSEAMLGYATLNGKIVRDDDGAPLVRAEPILTREQLEALRAELAKTSRAKPAVSTPSLLLRVLFCAVCGEPAYKFVGGGRKHPRYRCRSMGFPEHCGNGTVVMAEWDAFCEEQVLDLLGDAERLEKVWVAGSDSAVELAEVSAELVDLTSLIGSPAYRAGSPQREALDARIAALAARQEELEGLEARPSGWEWRGTGQRLGDWWREQNIAAKNTWLRSMNVRLTFDVRGGLTRTIDFGDLQEYEQHLRLGSVAERLHTGMS

SEQ ID NO: 9519 - protein, 500 aa, synthetic construct
MRALVVIRLSRVTDATTSPERQLESCQQLCAQRGWDVVGVAEDLDVSGAVDPFDRKRRPNLARWLAFEEQPFDAIVAYRVDRLARSIRHLQQLVHWAEDHKKLVVSATEAHFDTTTPFAAVVIALMGTVAQMELEAIKERNRSAAHFNIRAGKYRGSLPPWGYLPTRVDGEWRLVPDPVQRERILEVYHRVVDNHEPLHLVAHDLNRRGVLSPKDYFAQLQGREPQGRKWSATALKRSMTSEAMLGYATLNGKTVRDDDGAPLVRAEPILTREQLEALRAELVKTSRAKPAVSIPSLLLRVLFCAVCGEPAYKSAGGGRKHPRYRCRSMGFPKHCGNGTVGMAEWDAFCEEQVLDLLGDAERLEKVWVAGSDSAVELAEVNAELVDLTSLIGSPAYRAGSPQREALDARIAALAARQEELEGLGARPPGWEWRETGQRFGDWWREQDTAAKNTWLRSMNVRLTFDVRGGLTRTIDFGDLQEYEQHLRLGSVVERLHTGMS

SEQ ID NO: 9520 - protein, 500 aa, synthetic construct
MRALVVIRLSRVTDATTSPERQLESCQQLCAQRGWDVVGVAEDLDVSGAVDPFDRKRRPNLARWLAFEEQPFDVIVAYRVDRLTRSVRHLQQLVHWAEDHKKLVVSATEAHFDTTTPFAAVVIALMGTVAQMELEAIKERIRSAVHFNIRAGKYRGSLPPWGYLPTRVDGEWRLVPDPVQRERILEVYHRVVDNHEPLHLVAYDLNRRGVLSPKDYFAQLQGREPRGRKWSATALKRSMTSEAMLGYATLNGKTVRDDDGAPLVRAEPILTREQQEALRAELAKTSRAKPAVSTPSLLLRVLFCAVCGEPAYKFVGGGRKHPRYRCRSMGFPKHCGNGTVVMAEWDAFCEKQVLDLLGDAERLEKVWVAGSDSAVELAEVNAELVDLTSLIGPPAYRAGSPQREALDARIAALAARQEELEGLEARPPGWEWRGTGQRFGDWWREQDTASKNTWLRSMNVRLTFDVRGGLTRTIDFGDLQEYERHLRLGSVAERLRTGMS

SEQ ID NO: 9521 - protein, 500 aa, synthetic construct
MRALVVIRLSRVTDATTSPERQLESCQQLCAQRGWDVVGVAEDLDVSGAVDPFDRKRRPNLARWLAFEEQPFDVIVAHRVDRLTRSTRHLQQLVHWAEDHKKLVVSATEAHFDTTTPFAAVVIALMGTVAQMELEAIKERNRSAAHFNIRAGKYRGSLPPWGYLPTRVDGEWRLVPDPVQRERILKVYHRVVDNHEPLHLVAHDLNRRGVLSPKDYFAQLQGREPQGRKWSATALKRSMISEAMLGYATLNGKTVRDDDGAPLVRAEPILTREQLEALRAELVKTSRAKPAVSTPSLLLRVLFCAVCGEPAYKFAGGGRKHPRYRCRSMGFPKHCGNGTVAMAEWDAFCEEQVLNLLGDAERLEKVWVAGSDSAVELAEVNAELVDLTSLIGSPAYRAGSPQREALDARIAALAARQEELEGLEARPSGWEWRGTGQRFGDWWREQDTAAKNTWLRSMNVRLTFDVRGGLTRTIDFGGLQEYGQHLRLGSVVERLHTGMS

SEQ ID NO: 9522 - protein, 500 aa, synthetic construct
MRALVVIRLSRVTDATTSPERQLESCQQLCAQRGWDVVGVAEDLDVSGAVDPFDRKRRPNLARWLAFEEQPFDVIVAYRVDRLTRSTRHLQQLVHWAEDHRKLVVSATEAHFDTTTPFAAVVIALMGTVAQMELEAIKERNRSAAHFNIRAGKYRGSLPPWGYLPTRVDGEWRLVPDPVQRERILEVYHRVVDNHEPLHLVAHDLNRRGVLSPKDYFAQLQGREPQGRKWSATALKRSMTSEAMLGYATLNGKTVRDDDGAPLVRAEPILTRGQLEALRAELVKTSRAKPAVSTPSLLLRVLFCAVCGEPAYKFAGGGRKHPRYRCRSMGFPKHCGNGTVVMAEWDGFCEEQVLDLLGDAECLEKVWVAGSDSAVELAEVSAELVDLTSLIGSPAYRAGSPQREALDARIAALAARQEELEGLGARPSGWEWRETGQRFGDWWREQDTAAKNTWLRSMNVRLTFDVRGGLTRTIDFGDLQEYEQHLRLGSVVERLHTGMS

SEQ ID NO: 9523 - protein, 500 aa, synthetic construct
MRALVAIRLSRVTDATTSPERQLESCQQLCAQRGWDVVGVAEDLDVSGAVDPFDRKRRPNLARWLAFEEQPFDVIVAYRVDRLTRSTRHLQQLVHWAEDHKKLVVSATEAHFDTTTPFAAVVIALMGTVAQMELEAIRERNRSAAHFNIRAGKYRGSLPPWGYLPTRVDGEWRLVPDPVQRERILEVYHRVVDNHEPLHWVAHDLNRRGVLSPKDYFAQLQGREPQGRAWSATALKRSMISEAMLGYATLNGKTVRDDDGAPLVRAEPILTREQLEALRAVLVKTPRAKPAVSTPTLLLRVLFCAVCGEPAYKFAGGGRKHPRYRCRSMGFPKHCGNGTVAMAEWDAFCEEQVLDLLGDAERLEKVWVAGSDSAVELAEVNAELVDLTSLIGSPAYRAGSPQREALDARIAALAARQEELEGLGARPSGWEWRETGQRFGDWWREQDTAAKNTWLRSMNVRLTFDVRGGLTRTIDFGDLQEYEQHLRSGGVVERLHTGMS

SEQ ID NO: 9524 - protein, 500 aa, synthetic construct
MRALVVIRLSRVTDATTSPERQLESCQQLCAQRGWDVVGVAEDLDVSGAVDPFDRTRRPNLARWLAFEEQPFDVIVAYRVDRLTRSTRHLQQLVHWAEDHKKLVVSATEAHFDTTTPFAAVVIALMGTVAQMELEAIKERNRSAAHFNIRAGKYRGSLPPWGYLPTRVDGEWRLVPDPVQRERILEVYHRVVDNHEPLHLVAHDLNRRGVLSPKDYFAQLQGREPQGRKWSATALKRSMTSEAMLGYATLNGKTVRGDDGAPLVRAEPILTRGQLEALRAELVKTSRAKPAVSTPSLLLRVLFCAVCGEPAYKFAGGGRKHPRYRCRSMGFPKHCGNGTVVMAEWDAFCEEQVLNLLGDTEHLEKVWVAGSDSAVELAEVNAELVDLTNLIGSPAYRAGSPQREALDARIAALTARQEELEGLEARPSGWEWHGTGQRFGDWWREQDTAAKNTWLRSMNIRLTFDVRGGLTRTIDLGNLQEYEQYLRLGSVVERLHTGMS

SEQ ID NO: 9525 - protein, 500 aa, synthetic construct
MRALVVIRLSRVTDATTSPERQLESCQQLCAQRGWDVVGVAEDLDVSGAVDPFDRKRRPNLARWLAFEEQPFDVIVAYRVDRLTRSTRHLQQLVHWAEDHKKLVVSATEAHFDTTTPFAAVVIALMGTVAQMELEAIKERNRSAAHFNIRAGKYRGSLPPWGYLPTRVDGEWRLVPDPVQRERILEVYHRVVDNHEPLHLVAHDLNRRGVLSPKDYFAQLQGREPQGRKWSATALKRSMTSEVMLGYATLNGKTVRDDDGAPLVRAEPILTREQLEALRAELAKTSRAKPAVSTPSLLLRVLFCAVCGEPAYKFAGGGRKHPRYRCRSMGFPKHCGNGTVAMAEWDAFCEEQVLDLLGDAERLEKVWVAGSDSAVELAEVNAELVDLTSLIGSPAYRADSPQREALDARIAALAARQEELEGLGARPSGWEWRETGQRFGDWWREQDTAAKNTWLRSMNVRLTFDVRGGLTRTIDFGDLQEYEQHLRLGSVVECLHTGMS

SEQ ID NO: 9526 - protein, 500 aa, synthetic construct
MRALVVIRLSRVTDATTSPERQLESCQQLCAQRGWDVVGVAEDLDVSGAVDPFDRKRRPGLARWLAFEEQPFDVIVAYRVDRLTRSTRHLQQLVHWAEDHKKLVVSATEAHFDTTTPFAAVVIALMGTVAQMELEAIKERNRSAAHFNIRAGKYRGSLPPWGYLPTRVDGEWRLVPDPVQRERILEVYHRVVDNHEPLHWVAHDLNRRGVLSPKDYFAQLQGREPQGRKWSATALKRSMISEAMLGYATLNGKTVRDDDGAPLVRAEPILTREQLEAVRAELVKASRAKPAVSTPSLLLRVLFCAVCGEPAYKFAGGGRKHPRYRCRSMGFPKHCGNGTVVMAEWDAFCEEQVLDLLGDAERLEKVWVTGSDSAVELAEVNAELVDLTSLIGSPAYRAGSPQREALDARIAALAARQEELEGLEARPSGWEWRETGQRFGDWWREQDTAAKNTWLRSMKVRLTFDVRGGLTRTIDFGGLQEYEQHLRLGSVVERLHAGMS

SEQ ID NO: 9527 - protein, 500 aa, synthetic construct
MRALVVIRLSRVTDATTSPERQLGSCQQHCAQRGWDVVGVAEDLDVSGAVDPFDRKRRPNLARWLAFEEQPFDVIVAYRVDRLTRSIRHLQQLVHWAEDHKKLVVSATEAHFDTTTPFAAVVIALMGTVAQMELEAIKERNRSAAHFNIRAGKYRGSLPPWGYLPARVDGEWRLAPDPVQRERILEVYHRVVDNHEPLHLVAHDLNRRGVLSPKDYFAQLQGREPQGRKWSATALKRSMISVAMLGYATLNGKTVRDDDGAPLVRAEPILTREQQEALRAELVKTSRAKPAVSTPSLLLRVLFCAVCGEPAYKFAGGGRRHPRYRCRSMGFPKHCGNGTVVMAEWDAFCEEQVLDLLGDAERLEKVWVAGSDSAVELAEVSAELVDLTSLIGSPAYRAGSPQREALDARIAALAARQEELEGLEARPSGWEWRGTGQRFGDWWREQDTAAKNTWLRSMNVRLTFDVRGGLTRTIDFGDLQEYEQHLRLGSVVERLHTGVS

SEQ ID NO: 9528 - protein, 500 aa, synthetic construct
MRALVVIRLSRVTDTTTSPERQLESCRQLCAQRGWDVVGVAEDLDVSGAVDPFDRKRRPNLARWLAFEVQPFDVIVAYRVDRLTRSTRHLQQLVHWAEDHKKLVVSATEAHFDTTTPFAAVVIALMGTVAQMELEAIKERIRSAAHFNIRAGKYRGSLPPWGYLPTRVDGEWRLVPDPVQRERILEVYHRVVNNHEPLHLVAHDLNRRGVLSPKDYFAQLRGREPRGREWSATALKRSMISVAMLGYATLNGKIVRDDDGAPLVRAEPILTREQQEALRAELAKTSRAKPAVSTPSLLLRVLFCAVCGEPAYKFVGGGRKHPRYRCRSMGFPEHCGNGTVVMAEWDAFCEEQVLNLLGDAERLEKVWVAGSDSTVELAEVNAELVDLTSLIGSPAYRAGSPQREALDARIAALAARQGELEGLEARPSGWEWRGTGQRLGDWWREQDTAAKNTWLRSMNVRLTFDVRGGLTRTIDFGDLQEYEQHLRLGSVVERLHTGTP

SEQ ID NO: 9529 - protein, 500 aa, synthetic construct
MRALVVIRLSRVTDATTSPERQLESCQQLCAQRGWDVVGVAEDLDVSGAVDPFDRKRRPNLARWLAFEEQPFDVIVAYRVDRLTRSTRHLQQLVHWAEDHKKLVVSATEAHFDTTTPFAAVVIALMGTVAQMELEAIKERNRSAAHFNIRAGKYRGSLPPWGYLPTRVDGEWRLVPDPVQRERILEVYHRVVDNHEPLHLVAHDLNRRGVLSPKDYFAQLQGREPQGRKWSATALKRSMISEAMLGYATLNGKTVRDDDGAPLVRAEPILTREQLGALRAELVKTSRAKPAVSTPSLLLRVLFCAVCGEPAYKFAGGGRKHPRYRCRSMGFPKHCGNGTVVMAEWDAFCEEQVLNLLGDTERLEKVWVAGSDSAVELAEVNAELVDLTSLIGSPAYRAGSPQREALDARIAALAARQEELEGSEARPSGWERRGTGQRFRDWWHEQDTAAKNTWLRSMNVRLTFDVRGGLTRTIDFGDLQEYEQHLRLGSVVERLHTGMS

SEQ ID NO: 9530 - protein, 500 aa, synthetic construct
MRALVVIRLSRVTDATTSPERQLESCQQLCDRRGWDVVGVAEDLDVSGAVDPFDRKRRPNLARWLAFEEQPFDAIVAYRVDRLARSIRHLQQLVHWAEDHKKLVVSATEAHFDTTTPFAAVVIALMGTVAQMELEAIKERNRSAAHFNIRAGKYRGSLPPWGYLPTRVDGEWRLVPDPVQRERILEVYHRVVDNHEPLHWVAHDLNRRGVLSPKDYFAQLQGREPQGRKWSATALKRSMISEAMLGYATLNGKTVRDDDGAPLVRAEPILTREQLEALRAELVKTSRAKPAVSTPSLLLRVLFCAVCGEPAYKFAGGGRKHPRYRCRSMGFPKHCGNGTVAMAEWDALCEEQVLDLLGDAERLEKVWVAGSDSAVELAEVNAELVDLTSLIGSPAYRAGSPQREALDARIAALAARQEELEGLEARPSGWGWRGTGQRFGDWWCEQDTAAKNTWLRSMNVRLTFDARGGLTRTIDLGDLQEYEQHLRLGSVVERLHTGMS

SEQ ID NO: 9531 - protein, 500 aa, synthetic construct
MRALVVIRLSRVTDATTSPERQLESCQQLCAQRGWDVVGVAEDLDVSGAVDPFDRKRRPNLARWLAFEGQPFDVIVAYRVDRLTRSVRHLQQLVHWAEDHKKLVVSATEAHFDTTTPFAAVVIALMGTVAQMELEAIKERIRSAAHFNIRAGKYRGSLPPWGYLPTRVEGEWRLVPDPVQRERILEVYRRVVDNHEPLHLVAHDLNRRGVLSPKDYFAQLRGREPRGRKWSATALKRSMISGAMLGYATLNGKIVRDDDGAPLVRAEPILTREQLEALRAELAKTSRAKPAVSTPSLLLRVLFCAVCGEPAYKFVGGGRKHPRYRCRSMGFPEHCGNGTVVMAEWDAFCEEQVLNLLGDTERLEKVWVAGSDSAVELAEVNAELVDLTSLIGSPAYRAGSPQRETLDARIAALAARQEELEGLEARQSGWGWRETGLRFRDWWREQDTAAKNTWLRSMNVRLTFDVRGGLTRTIDFGDLQEYVQHLRLGGVVERLHTGMS

SEQ ID NO: 9532 - protein, 500 aa, synthetic construct
MRALIVIRLSRVTDATTSPERQLESCQQLCAQRGWDVVGVAEDLDVSGAVDPFDRKRRPNLARWLAFEEQPFDVIVAYRVDRLARSTRHLQQLVHWAEDHKKLVVSATEAHFDTTTPFAAVVIALMGTVAQMELEAIKERNRSAAHFNIRAGKYRGSLPPWGYLPTRVDGEWRLVPDPVQRERILEVYHRVVDNHEPLHLVAHDLNRRGVLSPKDYFAQLQGREPQGRKWSATALKRSMISEAMLGYATLNGKTVRDDDGAPLVRAEPILTRGQLEALRAELAKTSRAKPAVSTPSLLLRVLFCAVCGEPAYKFAGGGRKHPRYRCRSMGFPKHCGNGTVVMAEWDAFCEEQVLDLLGDAERPEKVWVAGSDSAVELAEVNAELVDLTSLIGSPAYRAGSPQREALDARIAVLAARQEELEGLEARPSGWEWRETGQRFGDWWREQDTAAKNTWLRSMNVRLTFDVRGGLTRTIDFGDLQEYEQHLRLGSVVERIHTGMS

SEQ ID NO: 9533 - protein, 500 aa, synthetic construct
MRALVVIRLSRVTDATTSPERQLESCQQLCAQRGWDVIGVAEDLDVSGAVDPFDRKRRPNLARWLAFEERPFDAIVAYRVDRLTRSIRHLQQLAHWAEDHKKLVVSATEAHFDTTTPFAAVVIALMGTVAQMELEAIKERNRSAAHFNIRAGKYRGSLPPWGYLPTRVDGEWRLVPDPVQRERILEVYHRVVDNHEPLHWVAHDLNRRGVLSPKDYFAQLQGREPQGRKWSATALKRSMTSEAMLGYATLNGKTVRDDDGAPLVRAEPILTREQLEALRAELVKTSRAKPAVSTPSLLLRVLFCAVCGEPAYKFAGGGRKHPRYRCRSMGFPKHCGNGTVAMAEWDAFCEEQVLDLLGDAERLEKVWVAGSDSAVELAEVNAELVDLTSLIGSPAYRAGSPQREALDARIAALAARQEELEGLGARPSGWEWRETGQRFGDWWREQDTAAKNTWLRSMNVRLTFDVRGGLTRTIDFGDLQECEQHLRSGSVVERLHTGMS

SEQ ID NO: 9534 - protein, 500 aa, synthetic construct
MRALVVIRLSRVTDATTSPERQLESCQQLCAQRGWDVVGVAEDLDVSGAVDPFDRKRRPNLARWLAFEEQPFDVIVAYRVDRLTRSTRHLQQLVHWAEDHKKLVVSATEAHFDTTTPFAAVVIALMGTVAQMELEAIKERIRSAVRFNIRAGKYRGSLPPWGYLPTRVDGEWRLVPDPVQRERILEVYHRVVDNHEPLHLVAHDLNQRGVLSPKDYFAQLQGREPQGRKWSATALKRSMTSEAMLGYATLNGKTVRDDDGAPLVRAEPILTREQQEALRAELAKTSRAKPAVSTPSLLLRVLFCAVCGEPAYKFVGGGRKHPRYRCRSMGFPKHCGNGTVVMAEWDAFCEEQVLNLLGDAERLEKVWVAGSDSAVELAEVNAELVDLTSLIGSPAYRAGSPQREALDARIAALAARQEELGSLEARPSGWEWRGTGQRFGDWWREQDTAAKNTWLRSMNVRLTFDVRGGLTRTIDFGDLQGYEQHLRSGSVAERLHTGMS

SEQ ID NO: 9535 - protein, 500 aa, synthetic construct
MRALVVIRLSRVTDATTSPERQLESCQQLCAQRGWDVVGVAEDLDVSGAVDPFDRKRRPNLARWLAFEEQPFDVIVAYRVDRLTRSTRHLQQLVHWAEDHKKLVVSATEAHFDTTTPFAAVVIALMGTVAQMELEAIKERIRSAVHFNIRAGKYRGSLPPWGYLPTRVDGEWRLVPDPVQRERILEVYHRVVDNHEPLHLVAYDLNRRGVLSPKDYFAQLRGREPQGRRWSATALKRSMTSGAMLGYATLNGKTVRDDDGAPLVRAEPILTRVQLEALRAELVKTSRAKPAVSTPSLLLRVLFCAVCGEPAYKFVGGGRKHPRYRCRSMGFPEHCGNGTVVMAEWDAFCEEQVLDLLGDAERLEKVWVAGSDSSVELAEVNAELVDLTSLIGSPAYRAGSPQREALDARIAALAARQEELEGLEARPSGWEWRETGQRFGDWWREQDTASKNTWLRSMNVRLTFDVRGGLTRTIDFGDLLEYEQHLRSGSVVERLHTGMT

SEQ ID NO: 9536 - protein, 500 aa, synthetic construct
MRALVVIRLSRVTEATTSPERQLESCRQLCAQRGWDVIGVAEDLDVSGAVDPFDRKRRPNLARWLAFEEQPFDVIVAYRVDRLTRSTRHLQQLVRWAEDHKKLVVSATEAHFDTTTPFAAVVIALMGTVAQMELEAIKERIRSAVHFNVRAGKYRGSLPPWGYLPTRVDGEWRLVPDPVQRERILEVYHRVVDNHEPLHLVAHDLNRRGVLSPKDYFAQLQGREPQGRKWSATALKRSMISAAMLGYATLSGKTVRDDDGAPLVRAEPILTREQQEALRAELAKTSRAKPAVSTPSLLLRVLFCAVCGEPAYKFVGGGRKHPRYRCRSMGFPKHCGNGTVVMTEWDAFCEEQVLDLLGDAERLEKVWVAGSDSAVELAEVNAELMDLTSLIGSPAYRAGSPQREALDARIAALAARQEELEGLEARPSGWEWRGTGQRFGDWWREQDTAAKNTWLRSMNIRLTFDVRGGLTRTIDFGELREYEQHLRLGSAAERSHTGMS

SEQ ID NO: 9537 - protein, 500 aa, synthetic construct
MRALVVIRLSRVTDATTSPERQLESCQQLCAQRGWDVVGVAEDLDVSGAVDPFDRKRRPNFARWLAFEEQPFDVIVAYRVDRLTRSVRHLQQLVHWAEDHKKLVVSATEAHFDTTTPFAAVVIALMGTVAQMELEAIKERNRSAAHFNIRAGKYRGSLPPWGYLPARVDGEWRLVPDPVQRERILEVYHRVVDNHEPLHLVAHDLNRRGVLSPKDYFAQLQGREPQGRKWSATALKRSMISVAMLGYATLNGKTVRDDDGAPLVRAEPILTREQLEALRAELVKTSRAKPAVSTPSLLLRVLFCAVCGEPAYKLAGGGRKHPRYRCRSMGFPKHCGNGTVAMAEWDTFCEEQVLDLLGDAKRLEKVWVAGSDSAVELAEVNAELVDLTGLIGSPAYRAGSPQREALDARIAALAARQEELEGSEARPSGWEWRETGQRFGDWWREQDTAAKNTWLRSMNVRLTFDARGGLTRTIDFGDLQEYEQHLRLGSVVERLHTGMS

SEQ ID NO: 9538 - protein, 500 aa, synthetic construct
MRALVVIRLSRVTDATTSPERQLESCQQLCAQRGWDVVGVAEDLDVSGAVNPFDRKRRPNLARWLAFEEQPFDVIVAYRVDRLTRSTRHLQQLVHWAEDHKKLVVSATEAHFDTTTPFAAVVIALMGTVAQMELEAIKERNRSAAHFNIRAGKYRGSLPPWGYLPARVDGEWRLVPDPVQRERILEVYHRVVDNHEPLHLVAHDLNRRGVLSPKDYFAQLQGREPQGRKWSATALKRSMISEAMLGYATLNGKTVRDDDGAPLVRAEPILTRGQLEALRAELVKTSRAKPAVSTPSLLLRVLFCAVCGEPAYKFAGGGRKHPRYRCRSMGFPKHCGNGTVAMAEWDAFCEEQVLDLLGDAERLEKVWVAGSDSAVELAEVNAELVDLTSLIGCPAYRAGSPQREALDARIAALAARQEELEGLEARPSGWVWRGTGQRFGDWWREQDTAAKNTWLRSMNVRLTFDVRGGLTRTIDFGDLQEYEQHLRLGSVVERLHTGMS

SEQ ID NO: 9539 - protein, 500 aa, synthetic construct
MRALVVIRLSRVTDATTSPERQLESCQQLCAQRGWDVVGVAEDLDVSGAVDPFDRKRRPNLARWLAFEEQPFDAIVAYRVDRLARSIRHLQQLVHWAEDHKKLVVSATEAHFDTTTPFAAVVIALMGTVAQMELEAIKERNRSAAHFNIRAGKYRGSLPPWGYLPTRVDGEWRLVPDPVQRERILEVYHRVVDNHESLYLVAHDLNRRGVLSPKDYFAQLQGREPQGRKWSATALKRSMTSVAMLGYATLNGKTVRDDDGAPLVRAEPILTRGQMEALRAELVKTSRAKPAVSTPSLLLRVLFCAVCGEPAYKFAGGGRKHPRYRCRSMGFPKHCGNGTVAMAEWDAFCEEQVLGLLGDAERLEKVWVAGSDSAVELAEVNAELVDLTSLIGSPAYRAGSPQREALDARIAALAARQEELEGLEARPSAWEWRETGQRFGDWWREQDTAARNTWLRSMNVRLTFDVRGGLTRTIDFGDLQEYEQHLRLGSVVERLHTGTS

SEQ ID NO: 9540 - protein, 500 aa, synthetic construct
MRALVVIRLSRVTDATTSPERQLESCQRLCAQRGWDVVGVAEDLDVSGAVDPFDRKRRPNLARWLAFEEQPFDVIVAYRVDRLTRSTRHLQQLVRWAEDHKKLVVSATEAHFDTTTPFAAVVIALMGTVAQMELEAIKERIRSAAHFNIRAGKYRGSLPPWGYLPTRVDGEWRLVPDPVQRERILEVYRRVVDNHEPLHLVAHDLNRRGILSPKDYFAQLRGREPQGRKWSATALRRSMTSVAMLGYATLNGKTVRGDDGAPLVRAEPILTREQQEALRAELAKTSRAKPAVSTPSLLLRVLFCAVCGEPAYKFVGGGRKHPRYRCRSMGFPEHCGNGTVVMAEWDAFCEEQMLDLLGDAERLEKVWVAGSDSAVELAEVNAELVDLTSLIGSPVYRAGSPQREALDARIAALAARQEELEGLEARPSGWEWRETGQRFGDWWREQDTAAKNTWLRSMNVRLTFDVRGGLTRTIDFGDLREYGQHLRLGSMVERLRTGMS

SEQ ID NO: 9541 - protein, 500 aa, synthetic construct
MRALVVIRLSRVTDATTSPERQLESCQQLCAQRGWDVVGVVEDLDVSGAVDPFDRKRRPNLARWLAFEEQPFDAIVAYRVDRLTRSVRHLQQLVHWAEDHKKLVVSATEAHFDTTTPFAAVVIALMGTVAQMELEAIKERNRSAAHFNIRAGKYRGSLPPWGYLPARVDGEWRLVPDPVQRERILEVYHRVVDNHEPLHLVAHDLNRRGVLSPKDYFAQLRGREPQGRKWSATALKRSMISEAMLGYATLNGKTVRDDDGAPLVRAEPILTREQLEALRAVLVKTSRAKPAVSTPSLLLRVLFCAVCGEPAYKFAGGGRKHPRYRCRSMGFPKHCGNGTVAMAEWDAFCEEQVLDLLGDAERLEKVWVAGSDSAVELAEVNAELVDLTSLIGSPAYRAGSPQREALDARIAALAARQEELEGLEARPSGWEWRETGQRFGDWWREQDTAAKNTWLRLMNVRLTFDVRGGLTRTIDFGGLQEYERHLRLGSVVGHLHTGMS

SEQ ID NO: 9542 - protein, 500 aa, synthetic construct
MRALVVIRLSRVTDATTSPERQLESCQQLCAQRGWDVVGVAEDLNVSGAVNPFDRKRRPNLARWLAFEEQPFDVIVAYRVDRLTRSTRHLQQLVRWAEDHKKLVVSVTEAHFDTTTPFAAVVIALMGTVAQMELEAIKERIRSAVHFNIRAGKYRGSLPPWGYLPARVDGEWRLVPDPVQRERILEVYHRVVDNHEPLHLVARDLNRRGVLSPKDYFAQLRGREPQGRKWSATALRRSLVSEAMLGYATLNGKTVRDDDGAPLVRAEPILTRGQQEALRAELAKTSRAKPAVSTPSLLLRVLFCAVCGEPAYKFVGGGRKHPRYRCRSIGLLKHCGNGTVVMTEWDAFCEEQVLNLLGDAERLEKVWLAGSDSAVELAEVNAELVDLTSLIGSPTYRAGSPQREALDARIAALAARQEELGGLEARPSGWEWRGTGQRFGDWWREQDTAAKNTWLRSMNVRLTFDVRGGLTRTIDFGDLQEYEQHVRLGSVVERLHTGMS

SEQ ID NO: 9543 - protein, 500 aa, synthetic construct
MRALVVIRLSRVTDATTSPERQLKSCQQLCAQRGWDVVGVAEDLDVSGAVDPFDRKRRPNLARWLAFEEQPFDVIVAYRVDRLTRSVRHLQQLVHWAEDHKKLVVSATEAHFDTTSPFAAVVIALMGTVAQMELEAIKERIRSAAHFNIRAGKYRGSLPPWGYLPTRVDGEWRLVPDPVQRERILEVYHRVVDNHEPLHLVARDLNRRGVLSPKDYFAQLRGREPQGRKWSATALRRSMTSVAMLGYATLNGKIVRDDDGAPLVRAEPILTREQQEALRAELAKTSRAKPAVSTPSLLLRVLFCAVCGEPAYKFVGGGRKHPRYRCRSMGFPEHCGNGTVVMAEWDAFCEKQVLDLLGDAERLEKVWVAGSDSAVELAEVNAELMDLTSLIGSPAYRAGSSQREALDARIAALAARQEELEGLEARPSGWEWRETGQRFGDWWREQDTAAKNTWLRSMNVRLTFDVRGGLTRTIDFGDLQEYEQHLRLGSVVERLHTGMS

SEQ ID NO: 9544 - protein, 500 aa, synthetic construct
MRALVVIRLSRVTDATTSPERQLESCQQLCAQRGWDVVGVAEDLDVSGAVDPFDRKRRPNLARWLAFEEQPFDVIVAYRVDRLTRSTRHLQQLVRWAEDHKKLVVSATEAHFDTTTPFAAVVIALMGTVAQMELEAIKERSRSAAHFNIRAGKYRGSMPPWGYLPTRVDGEWRLVPDPVQRERILEVYHRVVDNHEPLHLVAHDLNRRGILSPKDYFAQLRGREPRGRKWSATALKRSMLSVAMLGYATLNGKIVRDDDGAPLVRAEPILTREQLEALRAELVKTSRAKPAVSTPSLLLRVLFCAVCGEPAYKFVGGGRKHPRYRCRSMGFPEHCGNGTVVMAEWDAFCEEQVLDLLGDAECLEKVWVAGSDSAVELTEVNAELVDLTSLIGSPAYRAGSPQREALDVRIAALAARQKELEGLEARPSGWEWRETGQRFGDWWREQNTAAKNTWLRSMNVRLTFDVRGGLTRTIDFGDLQEYVQHLRSGSAVERLHTGTS

SEQ ID NO: 9545 - protein, 500 aa, synthetic construct
MRALVVIRLSRVTDATTSPERQLESCQQLCAQRGWDVVGVAEDLDVSGAVDPFDRKRRPNLARWLAFEEQPFDVIVAYRVDRLTRSTRHLQQLVHWAEDHKKLVVSATEAHFDTTTPFAAVVIALMGTVAQMELEAIKERNRSAAHFNIRAGKYRGSLPPWGYLPARVDGEWRLAPDPVQRERILEVYHRVVDNHEPLHLVAHDLNRRGVLSPKDYFAQLQGREPQGRKWSATALKRSMISEAMLGYATLNGKTVRDDDGAPLVRAEPILTRGQLEALRAELVKTSRAKPAVSTPSLLLRVLFCAVCGEPAYKFAGGGRKHPRYRCRSMGFPKHCGNGTVVMAEWDAFCEEQVLGLLGDAERLEKVWVVGSDSVVELAEVNAELVDLMSLIGSPAYRAGSPQREALDARIAALAARQEELEGLEARPSGWEWRGTGQRFGDWWRGQDTAAKNTWLRSMNVRLTFDVRGGLTRTIDFGDLQEYEQHSRLGSVVERLHTGMP

SEQ ID NO: 9546 - protein, 500 aa, synthetic construct
MRALVVIRLSRVTDATTSPERQLESCQQLCAQRGWDVVGVAEDLDVSGAVDPFDRKRRPNLARWLAFEEQPFDVIVAYRVDRLTRSTRHLQQLVHWAEDHKKLVVSATEAHFDTTTPFAAVVIALMGTVAQMELEAIKERIRSAVRFNIRAGKYRGSLPPWGYLPTRVDGEWRLVPDPVQRERILEVYHRVVDNHEPLHLVAHDLNRRGVLSPKDYFAQLRGREPQGREWSATALKRSMTSEAMLGYATLNGMTVRDDDGAPLVRAEPILTREQQEALRAELAKTSRAKPAVSTPSLLLRVLFCAVCGEPAYKFVGGGRKHPRYRCRSMGFPEHCGNGTVVMAEWDAFCEEQVLDLLGDAERLEKVWVAGSDSAVELAEVNAELVDLTSLIGSPAYRACTPQREALDARIAALAARQEELEGLEARPSGWEWRETGQRFGDWWREQDTAAKNTWLRSMNVRLTFDVRGGLTRTIDFGDLQEYEQHLRSGSVVERSHTGMS

SEQ ID NO: 9547 - protein, 500 aa, synthetic construct
MRALVVIRLSRVTDATTSPERQLESCQQLCAQRGWDVVGVAEDLDVSGAVDPFDRKRRPNLARWLAFEEQPFDVIVAYRVDRLARSTRHLQQLVHWAEDHQKLVVSATEAHFDTTTPFAAVVIALMGTVAQMELEAIKERNRSAAHFNIRAGKYRGSLPPWGYLPTRVDGEWRLVPDPVQRERILEVYHRVVDNHEPLHLVAHDLNRRGVLSPKDYFAQLQGREPQGRKWSATALKRSMISEAMLGYATLNGRTVRDDDGAPLVRAEPILTREQLEALRAELVKTTRAKPAVSTPSLLLRVLFCAVCGEPAYKFAGGGRKHPRYRCRSMGFPKHCGNGTVVMAEWDAFCEEQVLDLLGDAERLEKVWVAGSDSAVELAEVNAELVDLTSLIGSPAYRAGSPQREALDARIAALAARQGELEGLEARPSGWEWRGTGQRFRDWWREQDTAAKNTWLRSMNVRLTFDVRGGLTRTIDFGDLQEYEQHLRLGSVVERLHTGMS

SEQ ID NO: 9548 - protein, 500 aa, synthetic construct
MRALVVIRLSRVTDATTSPERQLESCQQLCAQRGWDVVGVAEDLDVSGAVDPFDRKRRPNLARWLAFEEQPFDVIVAYRVDRLTRSTRHLQQLVRWAEDHKKLVVSATEAHFDTTTPFAAVVIALMGTVAQMELEAIRERIRSAVHFNIRAGRYRGSLPPWGYLPTRVEGEWRLVPDPVQRERILEVYHRVVDNHEPLHLVAHDLNRRGILSPKDYFAQLRGREPQGRKWSATALKRSMTSVAMLGYATLNGKTVRDDDGAPLVRAEPILTREQQEALRAELVKTSRAKPAVPTPSLLLRVLFCAVCGEPAYKFAGGGRKHPRYRCRSMGFPKHCGNGTVAMAEWDAFCEEQVLDLLGDAERLEKVWVAGSDSAVELAEVNAELVDLTSLIGSPAYRAGSPQRGALDVRIAALAARQGELEGLEARPSGWEWRETGQRFGDWWREQDTAAKNTWLRSMNVRLTFDVRGGLTRTIDFGDLQEYEQHLRLGSVVERLHTGMS

SEQ ID NO: 9549 - protein, 500 aa, synthetic construct
MRALVVIRLSRVTDATTSPERQLESCRQLCAQRGWDVVGVAEDLDVSGAVDPFDRKRRPNLARWLAFEEQPFDAIVAYRVDRLARSIRHLQQLVHWAEDHKKLVVSATEAHFDTTTPFAAVVIALMGTVAQMELEAIKERNRSAAHFNIRAGKYRGSLPPWGYLPTRVDGEWRLVPDPVQRERILEVYHRVVDNHEPLHLVAHDLNRRGVLSPKDYFAQLQGREPQGRKWSATALKRSMTSEAMLGYATLNGKTVRDDDGAPLVRAEPILTRGQLEALRAELVKTSRAKPAVSTPSLLLRVLFCAVCGEPAYKFAGGGRKHPRYRCRSMGFPKHCGNGTVAMAEWDTFCEEQVLDLLGDAERLEKVWVAGSDSAAELAEVNAELVDLTSLIGSPAYRAGSPQREALDARIAALAARQEELEGLEARPSGWEWRETGQRFGDWWHEQDTAAKNTWLRSMNVRLTFDARGGLTRTIDFGDLQEYEQHLRLGGVVERLHTGMS

SEQ ID NO: 9550 - protein, 500 aa, synthetic construct
MRALVVIRLSRVTDATTSPERQLESCQQLCAQRGWDVVGVAEDLDVSGAVDPFDRKRRPNLARWLAFEERPFDVIVAYRVDRLTRSTRHLQQLVRWAEDHKKLVVSATEAHFDTTTPFAAVVIALMGTVAQMELEAIKERIRSAVHFNIRAGKYRGSLPPWGYLPTRVDGEWRLVPDPVQRERILEVYHRVVDNHEPLHLVAHDLNRRGVLSPKDYFAQLRGREPQGRKWSATALKRSMISVAMLGYATLNGKTVRDDDGAPLVRAEPILTREQQEAIRAELVKTSRAKPAVSTPSLLLRVLFCAVCGEPAYKFVGGGRKHPRYRCRSMGFPEHCGNGTVVMAEWDAFCEEQVLGLLGDAERLEKVWVAGSDSAVELAEVNAELVDLTSLIGSPAYRAGSPQREALDARIAALAARQEELEGLEARPPGWEWRGTGQRFGDWWRKQDTAAKNTWLRSMNVRLTFDVRGGLTRTIDFGDLQEYEQHLRSGSVVERLHTGMS

SEQ ID NO: 9551 - protein, 500 aa, synthetic construct
MRALVVIRLSRVTDATTSPERQLESCQQLCAQRGWDVVGIAEDLDVSGAVNPFDRKRRPNLARWLAFEEQPFDVIVAYRVDRLTRSTRHLQQLVHWAEDHKKLVVSATEAHFDTTTPFAAVVIALMGTVAQMELEAIKERNRSAAHFNIRAGKYRGSLPPWGYLPTRVDGEWRLVPDPVQRERILEVYHRVVDNHEPLHLVAHDLNRRGVLSPKDYFAQLQGREPQGRKWSATALKRSMISETMLGYATLNGKTVRDDDGAPLVRAEPILTREQLEALRAELVKTSRAKPAVSTPSLLLRVLFCAVCGEPAYKFAGGGRKHPRYRCRSMGFPKHCGNGTVAMAEWDAFCEEQVLDLLGDAERLEKVWVAGSDSAVELAEVNAELVDLTSLIGSPAYRAGSPQREALDARITALAARQEELAGLEARPSGWEWRETGQRFGDWWREQDTAAKNTWLRLMNVRLTFDVRGGLTRTIDFGDLQEYEQHLRLGSVVERLHTGMS

SEQ ID NO: 9552 - protein, 500 aa, synthetic construct
MRALVVIRLSRVTDATTSPERQLESCQQLCAQRGWDVVGVAEDLDVSGAVDPFDRKRRPNLARWLAFEGQPFDVIVAYRVDRLTRSTRHLQQLVHWAEDHKKLVVSATEAHFDTTTPFAAVVIALMGTVAQMELEAIKERNRSAAHFNIRAGKYRGSLPPWGYLPTRVDGEWRLVPDPVQRERILEVYHRVVDKHESLHLVAHDLNRRGVLSPKDYFAQLRGREPQGRKWSATALKRSMISEAMLGYATLNGKTVRDDDGAPLVRAEPILTREQLEALRAELVKTSRAKPAVSTPSLLLRVLFCAVCGEPAYKFAGGGRKHPRYRCRSMGFPKHCGNGTVAMAEWDAFCEEQVLDLLGDAERLEKVWVAGSDSAVELAEVNAELVDLTSLIGSPAYRAGSPQREALDARIAALAARQEELEGLEARPSSWEWRGTGQHFGDWWREQDTAAKNTWLRSMNVRLTFDVRGGLTRTIDFGNLQEYEQHLRLGSVVERLHTGMS

SEQ ID NO: 9553 - protein, 500 aa, synthetic construct
MRALVVIRLSRVTDATTSPERQLESCQQLCVQRGWDVVGVAEDLDVSGAVDPFDRKRRPNLARWLAFEEQPFDVIVAYRVDRLTRSVRHLQQLVHWAEDHRKLVISATEAHFDTTTPFAAVVIALMGTVAQMELEAIRERNRSAAHFNIRAGKYRGSLPPWGYLPTRVDGEWRLAPDPVQRERILEVYHRVVDDHEPLHLVAHDLNRRGVLSPKDYFAQLQDREPQGRKWSATALKRSMISEAMLGYATLNGETVRDDDGAPLVRAEPILTRKQLEALRAELVKTSRAKPAVSTPSLLLRVLFCAVCGEPAYKFAGGGRKHPRYRCRSMGFPKHCGNGTVVMAEWDAFCEEQVLDLLGDAERLEKVWVAGSDSAVELAEVNAELVDLTSLIGSPAYRAGSPQREALDARIAALAARQEELEGLGARPSGWEWRETGQRFGDWWREQDTAAKNTWLRSMNVRLTFDVRGGLTRTIDFGDLQEYEQHLRLGGVVERLRTGMS

SEQ ID NO: 9554 - protein, 500 aa, synthetic construct
MRALVVIRLSRVTDATTSPERQLESCQQLCAQRGWDVVGVTEDLNVSGAVDPFDRKRRPNLARWLAFEEQPFDVIVAYRVDRLTRSIRHLQQLVHWAEDHKKLVVSATEAHFDTTTPFAAVVIALMGTVAQMELEAIKERNRSAAHFNIRAGKYRGSLPPWGYLPTRVDGEWRLVPDPVQRERILEVYHRVVDNHEPLHLVAHDLNRRGVLSPKDYFAQLQGREPQGRKWSATALKRSMISVAMLGYATLNGKTVRDADGAPLVRAEPILTREQLEALRAELAKTSRAKPAVSTPSLLLRVLFCAVCGEPAYKFAGGGRKHPRYRCRSMGFPKHCGNGTVVMAEWDAFCEEQVLNLLGDAERLEKVWVAGSDSAVELAEVNAELVDLTSLIGSPAYRAGSPQREALDARIAALAARQEELEGLEARPSGWEWRGTGQRFGDWWREQDTAAKNTWLRSMNVRLTFDVRGRLTRTIDFGGLQEYEQHLRLGSVVERLHTGMS

SEQ ID NO: 9555 - protein, 500 aa, synthetic construct
MRALVVIRLSRVTDATTSPERQLESCQQLCAQRGWDVVGIAEDLDVSGAVDPFDRKRRPNLARWLAFEEQPFDAIVAYRVDRLTRSTRHLQQLVHWAEDHKKLVVSATEAHFDTTTPFAAVVIALMGTVAQMELEAIKERNRSAAHFNIRAGKYRGSLPPWGYLPTRVDGEWRLVPDPVQRERILEVYHRVVDNHEPLHLVAHDLNRRGVLSPKDYFAQLRGREPQGRKWSATALKRSMISEAMLGYATLNGKTVRDDDGAPLVRAEPILTREQLEALRAELVKTSPAKPAVSTPSLLLRVLFCAVCGEPAYKSAGGGRKHPRYRCRSMGFPKHCGNGTVAMAEWDAFCEEQVLDLLGDAERLEKVWVAGSDSAVELAEVSAELVDLTSLIGSPAYRAGSPQREALDARIAALAARQEELEGLEARPSGWEWRETGQRFGDWWREQDTAAKNTWLRSMNVRLTFDVRGGLTRTIDFGGLLEYEQHLRLGSVVERLHTGMS

SEQ ID NO: 9556 - protein, 500 aa, synthetic construct
MRALVVIRLSRVTDATTSPERQLESCQQLCAQRGWDVVGVAEDLDVSGAVDPFDRKRRPNLARWLAFEEQPFDAIVAYRVDRLTRSVRHLQQLVHWAEDHKKLVVSATEAHFDTTTPFAAVVIALMGTVAQMELEAIKERNRSAAHFNIRAGKYRGSLPPWGYLPTRVDGEWRLVPDPVQRERILEVYHRVVDNHEPLHLVAHDLNRRGVLSPKDYFAQLQGREPRGRKWSATALKRSMVSEAMLGYATLNGKTVRNDDGAPLVRAEPILTRGQLEALRAELVKTSRAKPAVSTPSLLLRVLFCAVCGEPAYKFTGGGRKHPRYRCRSMGFPKHCGNGTVVMAEWDAFCEEQVLDLLGDAKCLEKVWAAGSDSAVELAEVNAELVDLTSLIGSPAYRAGSPQREALDARIAALAARQEELEGLEARPSGWEWRETGQRFGDWWREQDTAAKNTWLRSMNVRLTFDVRGGLTRTIDFGGLQEYEQHLRLGGVVERLHTGMS

SEQ ID NO: 9557 - protein, 500 aa, synthetic construct
MRALVVIRLSRVTDATTSPERQLASCQQLCAQRGWDVVGVAEDLDVSGAVDPFDRKRRPNLARWLAFEEQPFDAIVAYRVDRLTRSTRHLQQLVHWAEDHKKLVVSATEAHFDTTTPFAAVVIALMGTVAQMELEAIKERIRSAAHFNIRAGKYRGSLPPWGYLPARVDGEWRLVPDPVQRERILEVYHRVVDNHEPLHLVAHDLNRRGVLSPKDYFAQLQGREPQGRKWSATALKRSMTSVAMLGYATLNGKIVRDDDGAPLVRAEPILTREQQEALRAELAKTSRAKPAVSTPSLLLRVLYCAVCGEPAYKFVGGGRKHPRYRCRSMGLPEHCGNGTVVMAEWDAFCEEQVLDLLGDAERLEKVWVAGSDSAVELAEVNAELVDLTSLIGSPAYRAGSPQREALDARIAALAARQEELEGLEAHPSGWEWRGTGQRLGDWWREQDTAAKNTWLRSMNVRLTFDVRGGLTRAIDFGDLQEYEQHLRSGSVAKRLHTGMS

SEQ ID NO: 9558 - protein, 500 aa, synthetic construct
MRALVVIRLSRVTDATTSPERQLESCQQLCAQRGWDVVGVAEDLDVSGAVDPFDRKRRPNLARWLAFEEQPFDVIVAYRVDRLTRSTRHLQQLVHWAEDHKKLVVSATEAHFDTTTPFAAVVIALMGTVAQMELEAIKERNRSAAHFNIRAGKYRGSLPPWGYLPTRVDGEWRLVPDPVQRERILEVYHRVVDNHEPLHLVAHDLNRRGVLSPKDYFAQLQGREPQGRKWSATALKRSMTSEAMLGYATLNGKTVRDDDGAPLVRAEPILTREQLEALRAELVKTSRAKPAVSTPSLLLRVLFCAVCGEPAYKFAGGGRRHPRYRCRSMGSPKHCGNGTVAMAEWDAFCEEQVLDLLGDAERLEKVWVAGSDSAVELAEVNAELVDLTSLIGSPVYRAGSPQRGALDARIAALAARQEELEGLGARPPGWEWRETGQRFGDWWREQDTAAKNTWLRSMNVRLTFDVRGGLARTIDFGGLLEYEQHLRLGSVVERLHTGMS

SEQ ID NO: 9559 - protein, 500 aa, synthetic construct
MRALVVIRLSRVTDATTSPERQLESCQQLCAQRGWDVVGVAEDLDVSGAVDPFDRKRRPNLARWLAFEEQPFDVIVAYRVDRLTRSTRHLQQLVHWAEDHEKLIVSATEAHFDTTTPFAAVVIALMGTVAQMELEAIKERNRSAAHFNIRAGKYRGSLPPWGYLPTRVDGEWRLVPDPVQRERILEVYHRVVDNHEPLHLVAHDLNRRGVLSPKDYFAQLQGREPQGRKWSATALKRSMVSEAMLGYATLNGKTVRNDDGAPLVRAEPILTRGQLEALRAELVKTSRAKPAVSTPSLLLRVLFCAVCGEPAYKFAGGGRKHPRYRCRSMGFPKHCGNGTVAMAEWDAFCEEQVLDLLGDAERLEKVWVAGSDSAVELAEVNAELVDLTSLIGSPAYRAGSPQREALDARIAALAARQEELEGLGARPSGWEWRGTGQRFGDWWREQDTAAKNIWLRSMNVRLTFDVRGGLTRTIDFGDLQEYERHLRLGSVVERLHTGMP

SEQ ID NO: 9560 - protein, 500 aa, synthetic construct
MRALVVIRLSRVTDATTSPERQLESCQQLCAQRGWDVVGVAEDLDVSGAVDPFDRKRRPNLARWLAFGEQPFDVIVAYRVDRLTRSVRHLQQLVHWAEDHKKLVVSATEAHFDTTTPFAAVVIALMGTVAQMELEAIKERNRSAAHFNIRAGKYRGSLPPWGYLPARVDGEWRLAPDPVQRERILEVYHRVVDKHEPLHLVAHDLNRRGVLSPKDYFAQLQGREPQGRKWSATALKRSMTSEAMLGYATLSGKTVRDDDGAPLVRAEPILTREQLEALRAVLVKTSRAKPAVSTPSLLLRVLFCAVCGEPAYKFAGGGRKHPRYRCRSMGFPKHCGNGTVAMAEWDAFCEEQVLDLLGDSERLEKVWVAGSDSAVELAEVNAELVDLTSLIGSPAYRAGSPQREALDARIAALAARQEGLEGLEARPSGWEWRETGQRFGDWWREQDTAAKNTWLRSMNVRLTFDVRGGLTRTIDFGNLQEYEQHLRLGSVVERLHTGMS

SEQ ID NO: 9561 - protein, 500 aa, synthetic construct
MRALVVIRLSRVTDATTSPERQLESCQQLCTQRGWDVVGVAEDLDVSGAVDPFDRKRRPNLARWLAFEEQPFDVIVAYRVDRLTRSTRHLQQLVHWAEDHKKLVVSATEAHFDTTTPFAAVVIALMGTVAQMELEAIKERNRSAAHFNIRAGKYRGSLPPWGYLPTRVDGEWRLVPDPVQRERILEVYHRVVDNHEPLHLVAHDLNRRGVLSPKDYFAQLQGREPQGRKWSATALKRSMISKAMLGYATLNGKTVRDDDGAPLVRAEPILTREQLEALRAELVKTSRAKPAVSTPSLLLRVLFCAVCGEPAYKFAGGGRKHPRYRCRSMGFPKHCGNGTVVMAEWDAFCEEQVLDLLGDAERLEKVWVAGSDSAVELAEVNAELVDLTSLIGSPAYRAGSPQREALDARIAALAARQEELEGLEARPSGWEWRETGQRFGDWWREQDTAAKNTWLRSMNVRLTFDVRGGLTRTIDFGDLQEYEQHLRLGGVVKRLHTGTS

SEQ ID NO: 9562 - protein, 500 aa, synthetic construct
MRALVVIRLSRVTDTTTSPGRQLESCQQLCAQRGWDVVGVAEDLDVSGAVDPFDRKRRPNLARWLAFEEQPFDAIVAYRVDRLTRSVRHLQRLVRWAEDHKKLVVSATEAHFDTTTPFAAVVIALMGTVAQMELEAIKERIRSAVHFNIRAGKYRGSLPPWGYLPTRVDGEWRLVPDPVQRERILEVYHRVVDNHEPLHLVAHDLNRRGVLSPKDYFAQLQGREPQGRKWSATALKRSMISVAMLGYATLSGKIVRDDDGAPLVRAEPILTREQQEALRAELAKTSRAKPAVSTPSLLLRVLFCAVCGEPAYKFVGGGRKHPRYRCRSMGFPEHCGNGTVVMAEWDAFCEKQVLDLLGDAERLEKVWVAGSDFAVELAEVNAELVDLTSLIGSPAYRAGSPQREALDTRIAALAARQGELEGLEARPSGWEWRETGQRFGDWWREQDTAAKNTWLRSMNVRLTFDVRGGLTRTIDFGDLQEYEQHLRLGSVVERLHTGMS

SEQ ID NO: 9563 - protein, 500 aa, synthetic construct
MRALVVIRLSRVTDATTSPERQLESCQQLCAQRGWDVVGVAEDLDVSGAVDPFDRKRRPNLARWLAFEEQPFDVIVAYRVDRLTRSTRHLQQLVRWAEDHKKLVVSATEAHFDTTTPFAAVVIALMGTVAQMELEAIKERIRSAAHFNIRAGKYRGSLPPWGYLPTRVDGEWRLVPDPVQRERILEVYHRVVDNHEPLHLVAHDLNRRGVLSPKDYFAQLQGREPQGRKWSATALKRSMTSEAMLGYATLNGKTVRDDDGAPLVRAEPILTREQQEALRAEFAKTSRAKPAVSTPSLLLRVLFCAVCGEPAYKFAGGGRKHPRYRCRSMGFPEHCGNGTVVMAEWDAFCEEQVLNLFGDAERLEKVWVAGSDSAVELAEVNAELMDLTSLIGSPAYRAGSPQREALDARIAALAARQEELEGLEARPSGWEWRGTGQRFGDWWRKQGTAAKNTWLRSMNVRLTFDVRGGLTRTIDFGDLQEYERHLRLGSVVERLRTGMS

SEQ ID NO: 9564 - protein, 500 aa, synthetic construct
MRALVVIRLSRVTDATTSPERQLESCQQLCAQRGWDVVGVAEDLDVSGAVDPFDRKRRPNLARWLAFEEQPFDVIVAYRVDRLARSIRHLQQLVHWAEDHKKLVISATEAHFDTTTPFAAVVIALMGTVAQMELEAIKERNRSAAHFNIRAGKYRGSLPPWGYLPTRVDGEWRLVPDPVQRERILEVYHRVVDNHEPLHLVAHDLNRRGVLSPKDYFAQLQGREPQGRKWSATALKRSMISEAMLGYATLNGKTVRDDDGAPLVRAEPILTREQLEALRAELVKTSRAKPAVSTPSLLLRVLFCAVCGEPAYKFAGGGRKHPRYRCRSMGFPKHCGNGTVVMAEWDAFCEEQVLDLLGDAERLEEVWVAGSDSAVELAEVNAELVDLTSLIGSPAYRAGSPQREALDARIAALAARQEELEGLEARPSGWVWRETGQRFGDWWREQDTAAKNTWLRSMNVRLTFDVRGGLTRTIDFGGLQEHEQHLRLGSVVERLHTGMS

SEQ ID NO: 9565 - protein, 500 aa, synthetic construct
MRALVVIRLSRVTDATTSPERQLESCQQLCAQRGWDVVGVAEDLDVSGAVDPFDRKRRPNLARWLAFEEQPFDVIVAYRVDRLTRSTRHLQQLVHWAEDHKKLVVSATEAHFDTTTPFAAVVIALMGTVAQMELEAIKERNRSAAHFNIRAGKYRGSLPPWGYLPARVDGEWRLVPDPVQRERILEVYHRVVDNHEPLHLVAHDLNRRGVLSPKDYFAQLRGREPQGRKWSATALKRSMISGAMLGYATLNGKTVRDDYGAPLVRAEPILTCEQLETLRAELVKTPRAKPAVSTPSLLLRVLFCAVCGEPAYKFAGGGRKHPRYRCRSMGFPKHCGNGTVVMAEWDAFCEEQVLDLLGDAERLEKVWVAGSDSAVELAEVNAELVDLTSLIGSPAYRAGSPQREALDARIAALAARQEELEGLGARPSGWEWRETGQRFGDWWREQDTATKNTWLRSMNVRLTFDVRGGLTRTVDFGDLQEYEQHLRLGSVVERLHTGMS

SEQ ID NO: 9566 - protein, 500 aa, synthetic construct
MRALVVIRLSRVTDATTSPERQLESCQQLCAQRGWNVVGVAEDLDVSGAVDPFDRKRRPNLARWLAFEEQPFDVIVAYRVDRLTRSVRHLQQLVRWAEDHRKLVVSATEAHFDTTTPFAAVVIALMGTVAQMELEAIKERIRSAAHFNIRAGKYRGSLPPWGYLPTRVDGEWRLVPDPVQRERILEVYHRVVDNHEPLHLVAQDLNRRGVLSPKDYFAQLRGREPQGRKWSATALKRSMTSVAMLGYATLNGKIVRDDDGAPLVRAEPILTREQQEALRAELAKTSRAKPAVSTPSLLLRVLFCAVCGEPAYKFVGGGRKHPRYRCRSMGFPEHCGNGTVVMAEWDAFCEEQVLDLLGDAERLEKVWVAGSDSAVELAEVNAELVDLTSLIGSPAYRAGSPQREALDARIAALAARQGELEGLEARPSGWEWRETGQRFGDWWREQDTAAKNTWLRSMNVRLTFDVRGGLTRTIDLGDLQEYEQHLRLGGVVGRLHTGMS

SEQ ID NO: 9567 - protein, 500 aa, synthetic construct
MRALVVIRLSRVTDATTSPERQLESCQQLCAQRDWDVVGVAEDLDVSGAVDPFDRKRRPNLARWLAFEEQPFDVIVAYRVDRLTRSARHLQQLVHWAEDHKKLVVSATEAHFDTTTPFAAVVIALMGTVAQMELEAIKERSRSAVHFNIRAGKYRGSLPPWGYLPTRVDGEWRLVPDPVQRERILEVYHRVVDNHEPLHLVAHDLNRRGVLSPKDYFAQLRGREPQGRKWSATALKRSMISVAMLGYATLSGKIVRDDDGAPLVRAEPILTREQQEALRAELAKTSRAKPAVSTPSLLLRVLFCAVCGEPAYKFVGGGRKHPRYRCRSMGLPKHCGNGTVAMAEWDAFCEEQVLDLLGDAVRLEKVWVAGSDSAVELAEVNAELVDLTSLIGSPAYRAGSPQREALDARIAVLAARQEELEGLEARPSGWEWRGTGQRFGDWWREQDTAAKNTWLRSMNVRLTFDVRGGLTRTIDFGDLQEYEQHLRLGSVAERLHTGML

SEQ ID NO: 9568 - protein, 500 aa, synthetic construct
MRALVVIRLSRVTDATTSPERQLESCQQLCAQRGWDVVGVAEDLDVSGAVDPFDRKRRPNLARWLAFEEQPFDVIVAYRVDRLTRSTRHLQQLVHWAEDHKKLVVSATEAHFDTTTPLAAVVIALMGTVAQMELEAIKERNRSAAHFNIRAGKYRGSLPPWGYLPTRVDGEWRLAPDPVQRERILEVYRRVVNNHEPLHLVAHDLNRRGVLSPKDYFAQLQGREPQGRKWSATALKRSMISEAMLGYATLNGKTVRDDDGAPLVRAEPILTRVQLEALRAELVKTSRAKPAVSTPSLLLRVLFCAVCGEPAYKFAGGGRKHPRYRCRSIGFPKHCGNGTVAMAEWDAFCEEQVLNLLGDAERLEKVWVAGSDSAVELAEVNAELVDLTSLIGSPAYRAGSPQREALDARIAALAARQEELVGLEARPSGWEWRETGQRFGDWWREQDTAAKNTWLRSMNVRLTFDVRGGLTRTIDFGDLQEYGQHLRLGSVVERLHTGVS

SEQ ID NO: 9569 - protein, 500 aa, synthetic construct
MHALVVIRLSRVTDATTSPERQLESCQQLCAQRGWDVVGVAEDLNVSGAVDPFDRKRRPNLARWLAFEEQPFDVIVAYRVDRLSRSIRHLQQLVHWAEDHKKLIVSATEAHFDTTTPFAAVVIALMGTVAQMELEAIKERNRSAAHFNIRAGKYRGSLPPWGYLPTRVDGEWRLAPDPVQRERILEVYHRVVDYHEPLHLVAHDLNRRGVLSPKDYFAQLQGREPQGHKWSATALKRSMISEAMLGYATLNGKTVRDDDGAPLVRAEPILTREQLEALRAELVKTSRAKPAVSTPSLLLRVLFCAVCGEPAYKFAGGGRKHPRYRCRSMGFPKHCGNGTVAMTEWDAFCEEQVLDLLGDAERLEKVWVAGSDSAVELAEVNAELVDLTSLIGSPTYRAGSPQREALDARIAALAARQEELEGLGARPPGWEWRETGQRFGDWWREQDTAAKNTWLRSMNVRLTFDVRGGLTRTIDFGDLREYEQHLRLGSVVERLHTGMS

SEQ ID NO: 9570 - protein, 500 aa, synthetic construct
MRALVVIRLSHVTDATTSPERQLESCQQLCAQRGWDVVGVAEDLDVSGAVDPFDRKRRPNLARWLAFEEQPFDVIVAYRVDRLTRSTRHLQQLVRWAEDHKKLVVSATEAHFDTTTPFAAVVIALMGTVAQMELEAIKERIRSAAHFNIRAGKYRGSLPPWGYLPARVDGVWRLVPDPVQRERILEVYHRVVDNHEPLHLVAHDLNRRGVLSPKDYFAQLRGREPRGRKWSATALKRSMTSVAMLGYATLNGKTVRDDGGAPLVRAEPILTREQLEALRAELVKTSRAKPAVSTPSLLLRVLFCAVCGEPAYKFTGGGRKHPRYRCRSMGFPEHCGNGTVVMAEWDAFCEEQVLDLLGDAEHLEKVWVAGSDSAVELAEVNAELVDLTSLVGSPAYRAGSPQREALDARIAALAARQKELEGLEARPSGWEWRETGQRFGDWWREQDTAAKNTWLRSMNVRLTFDVRGGLTRAIDFGDLQEYEQHLRLGSVAERLHTGMS

SEQ ID NO: 9571 - protein, 500 aa, synthetic construct
MRALVVIRLSRVTDATTSPERQLESCRQLCAQRGWDVVGVAEDLDVSGAVDPFDRKRRPNLARWLAFEEQPFDVIVAYRVDRLTRSVRHLQQLVRWAEDHKKLVVSATEAHFDTTTPFAAVVIALMGTVAQMELEAIKERIRSAVHFNIRAGKYRGSLPPWGYLPTRVDGEWRLVPDPVQRERILEVYHRVVDNHEPLHLVAHDLNQRGVLSPKDYFAQLRGREPQGREWSATALKRSMTSKAMLGYATLNGKTVRDDDGAPLVRAEPILTREQQEALRAELVKTSRAKPAVSTPSLLLRVLFCAVCGEPAYKFVGGGRKHPRYRCRSMGSPKHCGNGTVAMAEWDAFCEEQVLNLLGDVERLERVWVAGSDSAIELAEVNAELVDLTSLIGSPAYRAGSPQREALDVRIAALAARQEELEGLEARPSGWGWRETGQRFGDWWREQDTAAKNTWLRAMNVRLTFDVRGGLTRTIDFGDLQEYERHLRLGSVVERLHTGMS

SEQ ID NO: 9572 - protein, 500 aa, synthetic construct
MRALVVIRLSRVTDATTSPERQLESCQQLCAQRGWDVVGVAEDLDVSGAVDPFDRKRRPNLARWLAFEEQPFDVIVAYRVDRLTRSTRHLQQLVRWAEDHKKLVVSATEAHFDTTTPFAAVVIALMGTVAQMELEAIRERIRSAVHFNIRAGKYRGSLPPWGYLPARVDGEWRLAPDPVQRERILEVYHRVVDNHEPLHLVAHDLNRRGVLSPKDYFAQLRGREPQGRKWSATALKRSMISKAMLGYATLNGETVRDDDGAPLVRAEPILTREQLEALRAELVKTSRAKPAVSTPSLLLRVLFCAVCGEPAYKFVGGGRKHPRYRCRSMGSPKHCGNGTVVMAEWDAFCEKQVLDLLGDAERLEKVWVAGSDSAVELAEVNAELVDLTSLIGSPAYRAGSPQREALDARIAALAARQGELEGLEARPSGWEWRGTGQRLRDWWRERDTAAKNTWLRSMNVRLTFDVRGGLTRTIDFGDLQEYEQHLRLGSVVERLHTGMS

SEQ ID NO: 9573 - protein, 500 aa, synthetic construct
MRALVVIRLSRVTDATTSPERQLESCQQLCAQRGWDVVGVAEDLDVSGAVDPFNRKRRPNLARWLAFEEQPFDVIVAYRVDRLTRSTRHLQQLVRWAEDHKKLVVSATEAHFDTTTPFAAVVIALMGTVAQMELEAIKERIRSAAHFNIRAGKYRGSLPPWGYLPTRVDGEWRLVPDPVQRERILEVYHRVVHNHEPLHLVAHDLNRRGVLSPKDYFAQLRGREPQGRKWSATALKRSMTSVAMLGYATLNGKTVRDDDGTPLVRAEPILTREQQEVLRAELAKTSRAKPAVSTPSLLLRVLFCAVCGEPAYKFVGGGRKHPRYRCRSMGFPKHCGNGTVVMTEWDAFCEEQVLDLLGDAERLERVWVAGSDSAVELAEVNAELVDLTSLIGSPAYRTGSPQREALDARIAALVARQEELEGLEARPSGWEWRETGQRFGDWWREQDTAAKNTWLRSMNVRLTFDVRGGLTRTIDFGDLQEYEQHLRLGSVVERLHTGMS

SEQ ID NO: 9574 - protein, 500 aa, synthetic construct
MRALVVIRLSRVTDATTSPERQLESCQQLCAQRGWDVVGVAEDLDVSGAVDPFDRKRRPNLARWLAFEEQPFDVIVAYRVDRLTRSTRHLQQLVRWAEDHKKLVVSATEAHFDTTTPFAAVVIALMGTVAQMELEAIKERIRSATHFNIRAGKYRGSLPPWGYLPARVDGEWRLVPDPVQRERILEVYHRVVDNHEPLHLVAYDLNRRGVLSPKDYFAQLRGREPQGRKWSATALKRSMISVAMLGYATLNGKVVRDDDGAPLVRAEPILTREQQEALRAELAKTSRAKPAVSTPSLLLRVLFCAVCGEPAYKFVGGGRRHPRYRCRSMGYPKHCGNGTVVMTEWDAFCEEQVLGLLGDAERLEKVWVAGSDSAVELAEVNAELVDLTSLIGSPAYRAGSPQREALDARIAALAARQEELEGLEARPSGWEWRGTGQRFGDWWREQDTVAKNTWLRSMNVRLTFDVRGGLTRTIDFGDLQEYEQHLRLGSVVERFHTGMS

SEQ ID NO: 9575 - protein, 500 aa, synthetic construct
MRALVVIRLSRVTDATTSPERQLESCQQLCAQRGWDVVGVAEDLDVSGAVDPFDRKRRPNLARWLAFEEQPFDVIVAYRVDRLARSVRYLQQLVHWAEDHKKLVVSATEAHFDTTTPFAAVVIALMGTVAQMELEAIKERNRSAAHFNIRAGKYRGSLPPWGYLPTRVDGEWRLVPDPVQRERILEVYHRVVDNHESLHLVAHDLNRRGVLSPKDYFAQLQGREPQGRKWSATALKRSMISETMLGYATLNGKTVRDDDGAPLVRAEPILTRGQLEALRAELVKTSRAKPAVSTPSLLLRVLFCAVCGEPAYKFAGGGRKHPRYRCRSMGFPKHCGNGTVAMAEWDTFCEEQVLNLLGDAERLEKVWVAGSDSAVELAEVNAELVDLTSLIGSPAYRTGSPQREALDARIAALAARQEELEGLEARPSGWEWRGTGQRFGDWWREQDTAAKNTWLRSMNVRLTFDARGGLTRTIDFGDLQEYEQQLRLGSVVERLHTGMS

SEQ ID NO: 9576 - protein, 500 aa, synthetic construct
MRALAVIRLSRVTDATTSPERQLESCQQLCARRGWDVVGVAEDLDVSGAVDPFDRRRRPNLARWLAFEEQPFDVIVAYRVDRLTRSTRHLQQLVHWAEDHKKLVVSATEAHFDTTTPFAAVVIALMGTVAQMELEAIKERNRSAAHFNIRAGKYRGSLPPWGYLPTRVDGEWRLAPDPVQRERILEVYRRVVDNHEPLHLVAHDLNRRGVLSPKDYFAQLQGREPQGRKWSATALKRSMISEAMLGYATLNGKTVRDDDGAPLVRAEPILTRGQLEALRAELVKTSRAKPAVSTPSLLLRVLFCAVCGEPAYKFAGGGRKHPRYRCRSMGFPKHCGNGTVAMAEWDAFCEEQVLDLLGDAERLEKVWVAGSDSAVELAEVNAELVDLTSLIGSPAYRAGSPQREALDARIAALAARQGELEGLGARPSGWEWRETGQRFGDWWREQDTAAKNTWLRSMNVRLTFDVRGGLTRTIDFGDLREYEQHLRLGGVVERLHTGMS

SEQ ID NO: 9577 - protein, 500 aa, synthetic construct
MRALVVIRLSRVTDATTSPERQRESCQQLCAQRGWDVVGVAEDLDVSGAVDPFDRKRRPNLARWLAFEEQPFDVIVAYRVDRLTRSTRHLQQLVHWAEDHKKLVVSATEAHFDTTSPFAAVVIALMGTVAQMELEAIKERNRSAAHFNIRAGKYRGSLPPWGYLPTRVDGVWRLVPDPVQRERILEVYHRVVDNHEPLHLVAHDLNRRGVLSPKDYFAQLQGREPQGRKWSATALKRSMISEAMLGYATLNGKIVRDDDGAPLVRAEPILTREQLEALRAELVKTSRAKPAVSTPSLLLRVLFCAVCGEPAYKFAGGGRKHPRYRCRSMGFPKHCGNGTVVMAEWDAFCEERVLDLLGDAERLEKVWVAGSDSAVELAEVNAELVDLTSLIGSPAYRAGSPQREALDARIAALAARQEELEGLRARPSGWEWRETGQRFGDWWREQDTAAKNTWLRSMNVRLTFDVRGGLTRTIDFGDLQEYEKHLRLGSVVERLHTGMS

SEQ ID NO: 9578 - protein, 500 aa, synthetic construct
MRALVVIRLSRVTDATTSPERQLESCQQLCAQRGWNVVGVAEDLDVSGAVDPFDRKRRPNLARWLAFEEQPFDVIVAYRVDRLTRSTRHLQQLVHWAEDHKKLVVSATEAHFDTTTPFAAVVIALMGTVAQMELEAIKERIRSAAHFNIRAGKYRGSLPPWGYLPTRVDGEWRLVPDPVQRERILEVYHRVVDDHEPLHLVAHDLNRRGVLSPKDYFAQLRGREPQGRKWSATALKRSMISKAMLGYATLNGKTVRDGDGAPLVRAEPILTREQQEALRAELAKTSRAKPAVSTPSLLLRVLFCAVCGEPAYKFVGGGRKHPRYRCRSMGFPKHCGNGTVAMAEWDAFCEEQVLDLLGDAERLEKVWVAGSDSAVELAEVNAELVDLTSLIGSPAYRAGSPQREALDARIAALAARQEELEGLEARPSGWEWRETGQRFGDWWREQDTAAKNTWLRSMNVRLTFDVRGGLTRTIDFGELQEYEQHLRLGSAAERLRTGVS

SEQ ID NO: 9579 - protein, 500 aa, synthetic construct
MRVLVVIRLSRVTDATTSPERQLESCQQLCAQRGWDIVGVAEDLNVSGAVDPFDRKRRPNLARWLAFEEQPFDVIVAYRVDRLTRSIRHLQQLVHWAEDHKKLVVSATEAHFDTTTPFAAVVIALMGTVAQMELEAIKERNRSAAHFNIRAGKYRGSLPPWGYLPTRVDGEWRLAPDPVQRERILEVYHRVVDNHEPLHLVARDLNRRGVLSPKDYFAQLQGREPQGRKWSATALKRSMTSEAMLGYATLNGKTVRDDDGAPLVRAEPILTRGQLGALRAELVKTSRAKPAVSTPSLLLRVLFCAVCGEPAYKFAGGGRKHPRYRCRSMGFPKHCGNGTVAMAEWDAFCEEQVLNLLGDAERLEKVWVAGSDSAVELAEVNAELVDLTSLIGSPAYRAGSPQREALDARIAALAARQEELEGLEARPSGWGWRETGQRFGDWWREQDTAAKNTWLRSMNVRLTFDVRGGLARTIDFGDLQEYEQHLRLGSVVERLYTGMS

SEQ ID NO: 9580 - protein, 500 aa, synthetic construct
MRALVVIRLSRVTDATTSPERQLESCQQLCAQRGWYVVGVAEDLDVSGAVDPFDRKRRPNLARWLAFEEQPFDVIVAYRVDRLTRSTRHLQQLVHWAEDHKKLVVSATEAHFDTTTPFAAVVIALMGTVAQMELEAIKERNRSAAHFNIRAGKYRGSLPPWGYLPTRVDGEWRLAPDPVQRERILEVYHRVVDNHEPLHLVAHDLNRRGVLSPKDYFAQLQGREPQGRKWSATALKRSMTSEAMLGYATLDGKTVRDDDGAPLVRAAPILTREQLEALRAELVKTSRAKPAVSTPSLLLRVLFCAVCGEPAYKLAGGGRKHPRYRCRSMGFPKHCGNGTVTTAEWDAFCEEQVLDLLGDAERLEKVWVAGSDSAVELAEVNAELVDLTSLIGSPAYRAGSPQREALDARIAALAARQEELEGLGARPSGWEWRGTGQRFGDWWREQDTAAKNTWLRSMNVRLTFDVRGELTRTIDFGDLQEYEQHLRLGCVVERLHTGMS

SEQ ID NO: 9581 - protein, 500 aa, synthetic construct
MRALVVIRLSRVTDATTSPERQLESCQQLCAQRGWDVVGVAEDLDVSGAVDPFDRKRRPNLARWLAFEEQPFDVIVAYRVDRLTRSTRHLQQLVHWAEDHKKLVVSATEAHFDTTTPFAAVVIALMGTVAQMELEAIKERNRSAAHFNIRAGKYRGSLPPWGYLPTRVDGEWRLVPDPVQRERILEVYHRVVDNHEPLHLVAHDLNRRGVLSPKDYFAQLRGREPQGRKWSATALKRSMISEAMLGYATLNGKTVRDEGGAPLVRAEPILTREQLEALRAELVKTSRAKPAVSTPSLLLRVLFCAVCGEPAYKFAGGGRKHPRYRCRSMGFPKHCGNGTVVMAEWDAFCEEQVLDRLGDAERLEKVWVTGSDSAVELAEVNAELVDLTSLIGSPVYRAGSPQREALDARIAALAARQKELEGLEARPSGWEWRGTGQRFGDWWREQDTAAKNTWLRSMNVRLTFDVRGGLTRTIDFGDLQEYEQHLRLGSVVERLHTGMP

SEQ ID NO: 9582 - protein, 500 aa, synthetic construct
MRALVVIRLSRVTDATTSPERQLESCQQLCAQRGWDVVGVAEDLNVSGAVDPFDRKRRPNLARWLAFEEQPFDVIVAYRVDRLTRSIRHLQQLVHWAEDHKKLVVSATEAHFDTTTPFAAVVIALMGTVAQMELEAIKERNRSAAHFNIRAGRYRGSLPPWGYLPTRVDGEWRLVPDPVQRERILEVYHRVVDNHEPLHLVAHDLNRRGVLSPKDYFAQLQGREPQGRKWSATALKRSMTSEAMLGYATLNGKTVRDDDGAPLVRAEPILTREQLEALRAELVKTSRAKPAVSAPSLLLRVLFCAVCGEPAYKFAGGGRKHPRYRCRSMGFPKHCGNGTVAMAEWDAFCEEQVLDLLGDAKRLEKVWVAGSDSAVELAEANAELVDLTSLIGSPAYRAGSPQREALDARIAALAARQEELEGLEARPSGWEWRETGQRFGDWWREQDTAAKNIWLRSMNVRLTFDVRGGLTRTIDFGDLQEYKQHQRLGSVVERLHTGMS

SEQ ID NO: 9583 - protein, 500 aa, synthetic construct
MRALVVIRLSRVTDATTSPERQLESCQQLCAQRGWDVVGVAEDLDVSGAVDPFDRKRRPNLARWLAFEEQPFDAIVAHRVDRLTRSTRHLQQLVHWAEDHKKLVVSATEAHFDMTTPFAAVVIALMGTVAQMELEAIRERIRSAAHFNIRAGKYRGSLPPWGYLPARVDGEWRLVPDPVQRERILEVYHRVVDNHEPLHLVAYDLNRRGVLSPKDYFAQLRGREPRGRKWSATALKRSMISVAMLGYATLNGRIVRDGDGAPLVRAEPILTREQQEALRAELAKTSRAEPAVSTPSLLLRVLFCAVCGEPAYKFAGEGCKHPRYRCRSMGFPKHCGNGTVVMAEWDTFCEEQVLDLLGDAERLEKVWVAGSDSAVELAEVNAELVDLTSLIGSPAYRAGSPQREALDARIAALAARQEELEGLEARPSGWEWRGTGQRFGDWWREQDTAAKNTWLRSMNVRLTFDVRGGLTRTIDFGDLREYERHLRLGSVVERLHTGMS

SEQ ID NO: 9584 - protein, 500 aa, synthetic construct
MRALVVIRLSRVTDATTSPERQLESCQQLCAQRGWDVVGVAEDLDVSGAVDPFDRKRRPNLARWLAFEEQPFDVIVAYRVDRLTRSTRHLQQLVHWAEDHKKLVVSATEAHFDTTTPFAAVVIALMGTVAQMELEAIKERNRSAAHFNIRAGKYRGSLPPWGYLPTRVDGEWRLVPDPVQRERILEVYHRVVDNHEPLHWVAHDLNRRGVLSPKDYFAQLRGREPQGRKWSATALKRSMISEAMLGYATLNGKTVRDDDGAPLVRAEPILTREQLEALRAELVKTSRAKPAVSTPSLLLRVLFCAVCGEPAYKFAGGGRKHPRYRCRSMGFPKHCGNGTVAMAEWDAFCEEQVLDLLGDAERLEKVWVAGSDSAVELAEVNAELVDLTSLIGSPAYRAGSPQREALDARIAALAARQEELEGLEARPSGWVWRGTGQRFGDWWREQDTAAKNTWLRSMNVRLTFDVRGGLTRTIDFGDLQEYEQHLRLGSVVERLHTGMS

SEQ ID NO: 9585 - protein, 500 aa, synthetic construct
MRALVVIRLSRVTDATTSPERQLESCQQLCAQRGWDVVGVAEDLDVSGAVNPFDRKRRPNLARWLAFEEQPFDVIVAHRVDRLTRSVRHLQQLVHWAEDHKKLVVSATEAHFDTTTPFAAVVIALMGTVAQMELEAIKERNRSAAHFNIRAGKYRGSLPPWGYLPTRVDGEWRLAPDPVQRERILEVYHRVVVNHEPLHLVAHDLNRRGVLSPKDYFAQLQGREPQGRKWSATALKRSMISEAMLGYATLNGKTVRDDDGAPLVRAEPILTREQLEALRAELVKTSRAKPAVSTPSLLLRVLFCAVCGEPAYKFAGGGRKHPRYRCRSMGFPKHCGNGTVAMAEWDAFCEEQVLDLLGDAERLEKVWVAGSDSAVELAEVNAELVDLTSLIGSPAYRAGSPQREALDARIAALAARQEELEGLEARPSGWEWRETGQRFGDWWREQDTAAKNAWLRSMNVRLTFDVRGGLTRTIDFGDLQEHEQHLRLGSVVERLHTGMS

SEQ ID NO: 9586 - protein, 500 aa, synthetic construct
MRALVVIRLSRVTDATTSPERQLESCQQLCAQRGWDVVGVAEDLDVSGAVDPFDRKRRPNLARWLAFEEQPFDVIVAYRVDRLTRSTRHLQQLVHWAEDHKKLVVSATEAHFDTTTPFAAVVIALMGTVAQMELEAIKERIRSATHFNIRAGKYRGSLPPWGYLPARVDGEWRLVPDPVQRERILEVYHRVVDNHEPLHLVAHDLNRRGVLSPKDYFAQLQGREPQGRKWSATALKRSMTSEAMLGYATLNGKTVRGDDGAPLVRAEPILTRGQLEALRAELVKTSRAKPAVSTPSLLLRVLFCAVCGEPAYKFTGGGRKHPRYRCRSMVFPKHCGNGTVVMAEWDAFCEEQVLNLLGDAERLEKVWVAGSDSAVELTEVNAELVDLTSLIGSPAYRAGSPQREALDARIAALAARQEELEGLEARPSGWGWRGTGQRFGDWWREQDTAAKNAWLRSMNVRLTFDVRGGLTRTIDFGDLQEYEQHLRLGSVVERLHTGMS

SEQ ID NO: 9587 - protein, 500 aa, synthetic construct
MRALVVIRLSRVTDATTSPERQLESCQQLCAQRGWDVVGVAEDLDVSGAVDPFDRKRRPNLARWLAFEEQPFDVIVAYRIDRLTRSVRHLQQLVHWAEDHKKLVVSATEAHFDTTTPFAAVVIALMGTVAQMELEAIKERNRSAAHFNIRAGKYRGSLPPWGYLPTRVDGEWRLVPDPVQRERILEVYHRVVDNHEPLHLVAHDLNRRGVLSPKDYFAQLQGREPQGRKWSATALKRSMTSEAMLGYTTLNGETVRDDDGAPLVRAEPILTREQLEALRAELVKTSRAKPAVSTPSLLLRVLFCAVCGEPAYKLAGGGRKHPRYRCRSMGFPKHCGNGTVAMAEWDAFCEEQVLDLLGDAERLEKVWIAGSDSAVELAEVNAELVDLTSLIGSPAYRAGSPQREALDARIAALAARQEELEGLGARPSGWEWRETGQRFGDWWREQDTAAKNTWLRSMNVRLTFDVRGGLTRTIDFGDLQEYEQHLRLGSVVDRLHTGMS

SEQ ID NO: 9588 - protein, 500 aa, synthetic construct
MRALVVIRLSRVTDATTSPERQLESCQQLCAQRGWDVVGVAEDLDVSGAVDPFDHKRRPNLARWLAFEEQPFDAIVAYRVDRLTRSVRHLQQLVHWAEDHKKLVVSATEAHFDTTTPFAAVVIALMGTVAQMELEAIKERNRSAAHFNIRAGKYRGSLPPWGYLPARVDGEWRLVPDPVQRERILEVYHRVVDNHEPLHLVAHDLNRRGVLSPKDYFAQLRGREPQGRKWSATALKRSMISEAMLGYATLHGKTVRDDDGAPLVRAEPILTREQLEALRAELVKTSRAKPAVSTPSLLLRVLFCAVCGEPAYKFAGGGRKHPRYRCRSMGFPKHCGNGTVAMAEWDAFCEEQVLDLLGDAERLEKVWVAGSDSAVELAEVNAELVDLTSLIGSPAYRAGSPQREALDARIAALAARQEELEGLGTRPSGWEWRETGQRFGDWWREQDTAAKNTWLRSMNVRLTFDARGGLTRTIDFGDLQEYEQHLRLGGVVERLHTGMS

SEQ ID NO: 9589 - protein, 500 aa, synthetic construct
MRALVVVRLSRVTDATTSPERQLESCQQLCAQRGWDVVGVAEDLDVSGAVDPFDRKRRPDLARWLAFEEQQFDVIVAYRVDRLTRSTRHLQRLVLWAEDHKKLVVSATEAHFDTTTPFAAVVIALMGTVAQMELEAIKERIRSAAHFNIRAGKYRGSLPPWGYLPTRVDGEWRLVPDPVQRERILEVYHRVVDNHEPLHLVAHDLNRRGVLSPKDYFAQLQGREPRGRKWSATALKRSMTSGAMLGYATLNGKIVRDDDGAPLVRAEPILTREQQEALRAELAKTSRAKPAVSTPSLLLRVLFCAVCGEPAYKFVGGGRKHPRYRCRSVGFPKHCGNGTVVMAEWDVFCEEQVLNLLGDAERLEKVWVAGSDSAVELAEVNAELVDLTSLIGSPAYRAGSPQREALDVRIAALAARQEELEGLEARPPGWEWCETGQRFGDWWREQDTAAKNSWLRSMNVRLTFDVRGGLTRTIDFGDLQEYEQRLRLGSVVERLRTGMS

SEQ ID NO: 9590 - protein, 500 aa, synthetic construct
MRALVVIRLSRVTDATTSPERQLESCQQLCAQRGWDVVGVAEDLDVSGAVDPFDRKRRPNLARWLAFEERPFDVIVAYRVDRLARSTRHLQQLVHWAEDHKKLVVSATEAHFDTTTPFAAVVIALMGTVAQMELEAIKERNRSAAHFNIRAGKYRGSLPPWGYLPTRVDGEWRLVPDPVQRERIFEVYHRVVGNHEPLHLVAHDLNRRGVLSPKDYFAQVQGREPQGRKWSATALKRSMISEAMLGYATLHGKTVRDDDGVPLVRAEPILTREQLEALRAELVKTSRAKPAVSAPSLLLRVLFCAVCGEPAYKFAGGGRKHPRYRCRSMGFPKHCGNGTVAMAEWDAFCEEQVLDLLGDTERLEKVWVAGSDSAVELAEVNAELVDLTSLIGSPAYRAGSPQREALDARIAALAARQEELEGLEARPSGWEWRETGQRFGDWWREQDTATKNTWLRSMNVRLTFDVRGGLTRTIDFGDLQEYEQHLRLGSVVERLHTGMS

SEQ ID NO: 9591 - protein, 500 aa, synthetic construct
MRALVVVRLSRVTDATTSPERQLESCQQLCAQRGWDVVGVAEDLDVSGAVDPFDRKRRPSLARWLAFEEQPFDVIVAYRVDRLTRSTRHLQQLVHWAEDHKKLVVSATEAHFDTTTPFAAVVIALMGTVAQMELEAIKERIRSAVHFNIRAGKYRGSLPPWGYLPTRVDGEWRLVPDPVQRERILEVYHRVVDNHEPLHLVAHDLNRRGVLSPKDYFAQLQGREPQGRKWSATALRRSMTSEAMLGYATLNGKIVRDDNGAPLVRAEPILTREQQEALRAELAKTSRAKPAVSTPSLLLRVLFCAVCGGPAYKFAGGGRKHPRYRCRSMGFPKHCGNGTVVMTEWDAFCEEQVLDLLGDAERLEKVWVAGSDSAVELAEVNAELVDLTSLIGSPAYRAGSPQREALDARIAALAARQEELESLEARPSGWEWRGTGQRLGDWWREQDTAAKNTWLRSMNVRLTFDVRGGLTRTIDFGDLREYEQHSRSGSVVERLHTRMS

SEQ ID NO: 9592 - protein, 500 aa, synthetic construct
MRALVVIRLSRVTEATTSPERQLESCQLLCAQRGWDVVGVAEDLDVSGAVDPFDRKRRPNLARWLAFEEQPFDVIVAYRVDRLTRSTRHLQQLVHWAEDHKKLVVSATEAHFDTTTPFAAVVIALMGTVAQMELEAIKERIRSAAHFNIRAGKYRGSLPPWGYLPTRVEGEWRLVPDPVQRERILEVYHRVVDNHEPLHLVAHDLNRRGVLSPKDYFAQLRGREPQGRKWSATALKRSMTSVAMLGYATLNGKTVRDDDGAPLVRAEPILTREQLEALRAELAKTSRAKPAVSTPSLLLRVLFCAVCGEPAYKFTGGGRKHPRYRCRSMGFPKHCGNGTVVMAEWDAFCEEQVLNLLGDAERLEKVWVAGSDSAVELAEVNAELVDLTCLIGSPAYRAGSPQREALDARIAALAARQEELEGSETRPSGWEWRGTGQRLGDWWREQDTAAKNAWLRSMNVRLTFDVRGGLTRTIDFGDLQEYEQHLRLGIEVERLHTGMS

SEQ ID NO: 9593 - protein, 500 aa, synthetic construct
MRALVVIRLSRVTDATTSPERQLESCQQLCAQRGWDVVGVAEDLDVSGAVDPFDRKRRPNLARWLAFEQQPFDVIVAYRVDRLTRSTRHLQQLVRWAEDHKKLVVSATEAHFDTTSPFAAVVIALMGTVAQMELEAIKERIRSAAHFNIRAGKYRGSLPPWGYLPARVDGEWRLVPDPVQRERILEVYHRVVDNHEPLHLVAHDLNRRGVLSPKDYFAQLQGREPRGRKWSATALRRSMTSGAMLGYATLNGKTVRDDDGAPLVRAEPILTREQQEALRAEFAKTSRAKPAVSTPSLLLRVLFCAVCGEPAYKFVGGGRKHPRYRCRSMGFPEHCGNGTVVMAEWDAFCEEQVLGLLGDAERLERVWVAGSDSAVELAEVNAELVDLTSLIGSPAYRAGSPQREALDARIAALAARQEELEGLEVRPSGWGWRGTGQRLGDWWREQDTAAKNTWLRSMNVRLTFDVRGGLARTIDFGELQEYEQHLRLGSVVERLHTGMS

SEQ ID NO: 9594 - protein, 500 aa, synthetic construct
MRALVVIRLSRVTDTTTSPERQLESCQQLCAQRGWDVVGVAEDLDVSGAVDPFDRKRRPNLARWLAFEEQPFDVIVAYRVDRLTRSTRHLQQLVHWAEDHKKLVVSATEAHFDTTTPFAAVVIALMGTVAQMELEAIKERNRSAAHFNIRAGKYRGSLPPWGYLPTRVDGEWRLVPDPVQRERILEVYHRVVDNHEPLHLVAHDLNRRGILSPKDYFAQLQGREPQGRKWSATALKRSMISEAMLGYATLNGKTVRNDDGAPLVRAEPILTRGQLEALRAELVKTSRAKPAVSTPSLLLRVLFCAVCGEPAYKFAGGGRKHPRYRCRSMGFPKHCGNGTVAMAEWDAFCEEQVLGLLGDAECLEKVWVAGSDSAVELAEVNAELVDLTSLIGSPAYRAGSPQREALDARIAALAARQEELEGLEARPSGWEWRGTGQCFGDWWREQDSAAKNTWLRSMNVRLTFDVRGGLTRTIDFGDLQEYERHLRLGSVVERLHTGMS

SEQ ID NO: 9595 - protein, 500 aa, synthetic construct
MRALVVIRLSRVTDATTSPERQLASCQQLCAQRGWDVVGVAEDLDVSGAVDPFDRKRRPNLARWLAFEEQPFDVIVAYRVDRLTRSTRHLQQLVRWAEDHKKLVVSATEAHFDTTTPFAAVVIALMGTVAQMELEAIKERIRSAMHFNIRAGKYRGSLPPWGYLPTRVDGEWRLVPDPVQRERILEVYHRVVDNHEPLHLVAHDLNRRGVLSPKDYFAQLQGREPQGRKWSATALKRSMISVAMLGYATLNGKTVRNDDGAPLVRAEPILTREQQEALRAELAKTSRAKPAVSTPSLLLRVLFCAVCGEPAYKFVGGGRKHSRYRCRSMGFPKHCGNGTVVMAEWDAFCEKQVLDLLGDAERLEKVWVAGSDSAVELAEVNAELVDLTSLIGSPAYRTGSPQREALDARIAALAARQEELEGLEARPSGWEWRETGQRFGDWWREQDTAAKNTWLRSMSVRLTFDVRGGLTRTIDFGDLQEYEQHLRLGGVAERLHTGMS

SEQ ID NO: 9596 - protein, 500 aa, synthetic construct
MRALIVIRLSRVTDATTSPERQLESCQQLCAQRGWDVVGVAEDLDVSGAVDPFDRKRRPNLARWLAFEEQPFDVIVAHRVDRLTRSVRHLQQLVHWAEDHKKLVVSATEAHFDTTTPFAAVVIALMGTVAQMELEAIKERIRSAVHFNIRAGKYRGSLPPWGYLPTRVDGEWRLVPDPVQRERILEVYHRVVDNHEPLHLVAYDLNRRGVLSPKDYFAQLQGREPQGRRWSATALKRSMTSKAMLGYATLNGKIVRDDDGAPLVRAEPILTREQQEALRAELVKTSRAKPAVSTPSLLLRVLFCAVCGEPAYKFVGGGRKHPRYRCRSMGFPKHCGNGTVVMAEWDAFCEKQVLGLLGDAERLERVWVAGSDSAVELAEVNAELVDLTSLIGSPAYRAGSPQREALDARIAALAARQEELEGLEARPSGWEWRETGQRFGDWWREQDTAAKNAWLRSMNVRLTFDVRGGLTRTIDFGELQEYEQHLRLGSVVERSRTGVS

SEQ ID NO: 9597 - protein, 500 aa, synthetic construct
MRALVVIRLSRVTDATTSPERQLESCQQLCAQRGWDVVGVAEDLDVSGAVDPFDRKRRPNFARWLAFEEQPFDVIVAYRVDRLTRSTRHLQQLVHWAEDHKKLVVSATEAHFDTTTPFAAVVIALMGTVAQMELEAIKERNRSAAHFNIRAGKYRGSLPPWGYLPTRVDGEWRLVPDPVQRERILEVYHRVVDNHESLHLVAHDLNRRGVLSPKDYFAQLRGREPQGRKWSATALKRSMISEAMLGYATLNGKTVRDDDGAPLVRAEPILTRGQLEALRAELVKTSRAKPTVSTPSLLLRVLFCAVCGEPAYKFAGGGRKHPRYRCRSTGLPKLCGNGTVVMAEWDAFCEEQVLNLLGDAERLEKVWVAGSDSAVELAEVNAELVDLTSLIGPPAYCAGSPQREALDARIAALAARQEELEGLEARPSGWEWRGTGQRFGDWWREQDTAAKNTWLRSMNVRLTFDVRGGLTRTIDFGDLQEYEQHLRLGNVVERLHTGMS

SEQ ID NO: 9598 - protein, 500 aa, synthetic construct
MRALIVIRLSRVTDATTSPERQLESCQQLCDQRGWVVVGVAEDLDVSGAVDPFDRKRRPSLARWLAFEEQPFDVIVAYRVDRLTRSTRHLQQLVHWAEDHKKLVVSATEAHFDTTTPFAAVVIALMGTVAQMELEAIKERSRSAAHFNIRAGKYRGSLPPWGYLPTRVDGEWRLVPDPVQRERILEVYHRVVDNHEPLHLVAYDLNRRGVLSPKDYFAQLQGREPRGRKWSATALKRSMTSEAMLGYAILNGKTVRDGDGAPLVRAEPILTREQQEALRAELAKTSRARPAVSTPSLLLRVLFCAVCGEPAYKFVGGGRKHPRYRCRSMGFPKHCGNGTVVMAEWDAFCEEQVLNLLGDAERLEKVWSAGSDSAVELAEVNAELVDLTSLIGSPAYRAGSPQRGALDARIAALAARQEKLEGLEARPSGWEWRGTGQRLGDWWREQDTAAKNTWLRSMNVRLTFDVRGGLTRTIDFGDLQEYERHLRLGSVAERLRTGMS

SEQ ID NO: 9599 - protein, 500 aa, synthetic construct
MRALVVIRLSRVTDATTSPERQLESCQQLCARRGWDVVGVAEDLDVSGAVDPFDRKRRPNLARWLAFEEQPFDVIVAYRVDRLTRSTRHLQQLVHWAEDHKKLVVSATEAHFDTTTPFAAVVIALMGTVAQMELEAIKERNRSAAHFNIRAGKYRGSLPPWGYLPTRVDGEWRLVPDPVQRERILEVYHRVVDNHEPLHLVAHDLNRRGVLSPKDYFAQLQGREPQGRKWSATALKRSMISEAMLGYATLNGKTVRDDDGAPLVRAEPILTREQLEALRAELVKTSRAKPAVSTPSLLLRVLFCAVCGEPAYKFAGGGRKHPRYRCRSMGFPKHCGNGTVVMAEWDAFCEEQVLDRLGDTERLEKVWVAGSDSAVELAEVNAELVDLTSLIGSPAYRAGSPQRETLDARIAALAARQEELEGLEARPSGWEWRETGRRFGDWWREQDTAAKNTWLRSMNVRLTFDVRGGLTRTIDFGDLQEYEQHLRLGSVVERLHTGMS

SEQ ID NO: 9600 - protein, 500 aa, synthetic construct
MRALVVIRLSRVTDATTSPERQLESCQQLCAQRGWDVVGVAEDLDVSGAVDPFDRKRRPNLARWLAFEEQPFDVIVAYRVDRLTRSTRHLQQLVHWAEDHKMLVVSATEAHFDTTTPFAAVVIALMGTVAQMELEAIRERNRSAAHFNIRAGRYRGSLPPWGYLPTRVDGEWRLVPDPVQRERILEVYHRVVDNHEPLHWVAHDLNRRGVLSPKDYFAQLQGREPQGRKWSATALKRSMTSVAMLGYATLNGKTVRDDDGAPLVRAEPILTRGQLEALRAELVRTSRAKPAVSTPSLLLRVLFCAVCGEPAYKFAGGGRKHPRYRCRSMGFPKHCGNGTVAMAEWDAYCEEQVLNLLGDAERLEKVWVASSDSAVELAEVNAELVDLTSLIGSPAYRAGSPQRGALDARIAALAARQEELEGLEARPSGWEWRETGQRFGDWWREQDTAAKNTWLRSMNVRLTFDVRGGPTRTIDFGDLQEYEQHLRLGSVVERLHTGTS

SEQ ID NO: 9601 - protein, 500 aa, synthetic construct
MRALVVIRLSRVTDATTSPERQLESCQQLCAQRGWDVVGVAEDLDVSGAVDPFDRKRRPNLARWLAFEEQPFDVIVAYRVDRLTRSVRHLQQLVHWAEDHRKLVVSATEAHFDTTTPFAAVVIALMGTVAQMELEAIKERNRSAAHFNIRAGKYRGSLPPWGYLPTRVDGEWRLVPDPVQRERILEVYHRVVDNHEPLHLVAHDLNRRGVLSPKDYFAQLQGREPQGRKWSATALKRSMTSEAMLGYVTLNGKIVRDDDGAPLVRAEPILTREQLEALRAELVKTSRAKPAVSTPSLLLRVLFCAVCGEPAYKLAGGGRKHPRYRCRSMGFPKHCGNGTVAMAEWDAFCEEQVLGLLGDAERLEKVWVAGSDSAVELAEVNAELVDLTSLIGSPAYRAGSPQREALDARIAALAARQEELEGLGARPSGWEWRGAGQRFGDWWREQDTAAKNTWLRSMNVRLTFDVRGGLTRTIDFGDLLEYEQHLRLGSVVERLHTGMS

SEQ ID NO: 9602 - protein, 500 aa, synthetic construct
MRALVVIRLSRATDATTSPERQLESCQQLCAQRGWDVVGVAEDLDVSGAVDPFDRKRRPNLARWLAFEEQPFDVIVAYRVDRLTRSVRHLQQLVHWAEDHKKLVASATEAHFDTTTPFAAVVIALMGTVAQMELEAIKERNRSAAHFNIRAGKYRGSLPPWGYLPKRVDGEWRLVPDPVQRERILEVYHRVVDNHESLHLVAHDLNRRGVLSPKDYFAQLQGREPQGRKWSATALKRSMISVAMLGYATLNGKTVRDDGGAPLVRAEPILTREQLEALRAELARTSRAKPAVPTPSLLLRVLFCAVCGEPAYKFAGGGRKHPRYRCRSMGFPKHCGNGTVVMAEWDAFCEEQVLDLLGDAERLEKVWVAGSDSAVELAEVNAELVDLTSLIGSPAYRTGSPQREALDARIAALAARQEELEGLGARPSGWEWRETGQRFGDWWREQDTAAKNTWLRSMNIRLTFDVRGGLTRMIDFGDLQEYEQHLRLGSVVERLRTGRS

SEQ ID NO: 9603 - protein, 500 aa, synthetic construct
MRALVVIRLSRVTDATTSPERQLESCQQLCAQRGWDVVGVAEDLDVSGAVDPFDRKRRPNLARWLAFEEQPFDVIVAYRVDRLARSTRHLQQLVHWAEDHQKLVVSATEAHFDTTTPFAAVVIALMGTVAQMELEAIKERNRSAAHFNIRAGKYRGSLPPWGYLPTRVDGEWRLVPDPVQRERILEVYHRVVDNHEPLHLVAHDLNRRGVLSPKDYFAQLQGREPQGRKWSATALKRSMISEAMLGYATLNGRTVRDDDGTPLVRAEPILTREQLEALRAELVKTTRAKPAVSTPSLLLRVLFCAVCGEPAYKFAGGGRKHPRYRCRSMGFPKHCGNGTVVMAEWDAFCEEQVLDLLGDAERLEKVWVAGSDSAVELEEVNAELVDLTSLIGSPAYRAGSPQREALDARIAALAARQEELEGLGASPSGWEWRETGQRFGDWWREQDTAAKNAWLRSMNVRLTFDVRGGQTRTIDFGDLQEYEQHLRSGSVVERLHTGMS

SEQ ID NO: 9604 - protein, 500 aa, synthetic construct
MRALIVIRLSRVTDVTTSPERQLESCQQLCAQRGWDVVGVAEDLDVSGAVDPFDRKRRPNLARWLAFEEQPFDAIVAYRVDRLTRSVRHLQQLVHWAEDHKKLVVSATEAHFDTTMPFAAVVIALMGTVAQMELEAIKERNRSAAHFNIRAGKYRGSLPPWGYLPTRVDGEWRLVPDPVQRERILEVYHRVVDNHEPLHLVAHDLNRRGVLSPKDYFAQLQGREPQGRKWSATALKRSMISEAMLGYATLNGKTVRDDDGAPLVRAEPILTREQLEALRAELVKTSRAKPAVSTPSLLLRVLFCAVCGEPAYKFAGGGRKHPRYRCRSMGFPKHCGNGTVVMAEWDAFCEEQVLDLLGDAERLEKVWVAGSDSAVELVEVNAELVDLTSLIGSPAYRAGSPQREALDARIAALAARQEELEGLEARPSGWGWRETGQRFGDWWREQDTAAKNTWLRSMNVRLTFDARGGLTRTIDFGDLQEYEQHLRLGSVVERLHTGMS

SEQ ID NO: 9605 - protein, 500 aa, synthetic construct
MRALVVIRLSRVTDATTSPERQLESCQQLCAQRGWDVVGVAEDLDVSGAVDPFDRKRRPNLARWLAFEEQPFDVIVAYRVDRLTRSTRHLQQLVRWAEDHKKLVVSATEAHFDTTTPFAAVVIALMGTVAQMELEAIKERSRSAAHFNIRAGKYRGSLPPWGYLPTRVDGEWRLVPDPVQRERILEVYHRVVDNHEPLHLVAHDLNRRGVLSPKDYFAQLRGREPRGRKWSATALKRSMISGAMLGYATLNGKTVRGDDGAPLVRAEPILTREQQGALRAELVKTSRAKPAVSTPSLLLRVLFCAVCGEPAYKFVGGGRKHPRYRCRSMGFPEHCGNGTVVMAEWDAFCEEQVLDLLGDAERLEKVWVVGSDSSVELAEVNAELVDLTSLIGSPAYRAGSPQREALDARIAALTARQEELEGLEARPSGWEWRGTGQRFGDWWREQDTAAKNTWLRSMNVRLTFDVRSGLTRTIDFGDLLEYEQHSRSGSVVERLHTGMS

SEQ ID NO: 9606 - protein, 500 aa, synthetic construct
MRALVVIRLSRVTDATTSPERQLKSCQQLCAQRGWDVVGVAEDLDVSGAVDPFDRKRRPNLARWLAFEEQPFDVIVAYRVDRLTRSVRHLQRLVRWAEDHKKLVVSATEAHFDMTTPFAAVVIALMGTVAQMELEAIRERIRSAAHFNIRAGKYRGSLPPWGYLPARVDGEWRLVPDPVQRERILEVYHRVVDNHEPLHLVAYDLNRRGVLSPKDYFAQLQGREPQGRKWSATALRRSMTSVAMLGYATLNGKTVRDDDGAPLVRAEPILTREQLEALRAELVKTSRAKPAVSTPSLLLRVLFCAVCGEPAYKFAGGGRKHPRYRCRSMGFPKHCGNGTVAMAEWDAFCEEQVLNLLGDAERLEKVWVAGSDSAVELAEVNAELMDLTSLIGSPAYRAGSPQREALDARIAALAARQEELEGLEARPSGWEWRGTGQRFGDWWREQDTAAKNTWLRSMNIRLTFDVRGGLTRTIDFGELQEYGQHLHLGSVVERLHTGMS

SEQ ID NO: 9607 - protein, 500 aa, synthetic construct
MRALVVIRLSRVTDATTSPERQLESCQQLCAQRGWDVVGVAEDLDVSGAVDPFDRKRRPNLARWLAFEEQPFDVIVAYRVDRLTRSTRHLQQLVHWAEDHKKLVVSATEAHFDTTTPFAAVVIALMGTVAQMELEAIKERNRSAAHFNIRAGKYRGSLPPWGYLPTRVDGEWRLAPDPVQRERILEVYHRVVDNHEPLHLVAHDLNRRGVLSPKDYFAQLQGREPQGRKWSATALRRSMISEAMLGYATLSGKIVRDDDGAPLVRAEPILTREQLEALRAELVKTSRAKPAVSTPSLLLRVLFCAVCGEPAYKFAGGGRKHPRYRCRSMGFPKHCGNGTVAMAEWDAFCEEQVLDLLGDAERLEKVWVVGSDSAVELAEVNAELVDLTSLIGSPAYRAGSPQREALDARIAALAARQEELEGLEARPSGWEWRETGQRFGDWWREQDTAAKNTWLRSKNVRLTFDVRGGLTRTIDFGDLQEYEQHLRLGSVAERLHTGMS

SEQ ID NO: 9608 - protein, 500 aa, synthetic construct
MRALVVIRLSRVTDATTSPERQLESCQQLCAQRGWDVAGVAEDLDVSGAVDPFDRKRRPNLARWLAFEGQPFDVIVAYRVDRLTRSVRHLQRLVHWAEDHKKLVVSATEAHFDTTSPFAAVVVALMGTVAQMELEAIKERIRSAAHFNIRAGKYRGSLPPWGYLPTRVDGEWRLVPDPVQRERILEVYHRVVDNHEPLHLVAYDLNRRGILSPKDYFAQLQGREPQGRKWSATALKRSMISKAMLGYATLNGKIVRDNDGAPLVRAEPILTRGQQEALRAELAKTSRAKPAVSTPSLLLRVLFCAVCGEPAYKFVGGGRKHPRYRCRSMGSPKHCGNGTVVMAEWDAFCEEQVLDLLGDAERLEKVWVAGSDSAVELAEVNAELVDLTCLIGSPTYRAGSPQREALDARIAALAARQEELESLEARPSGWGWRETGQRFGDWWCEQDTAAKNTWLRSMNVRLTFDARGGLTRTIDFGELREYEQHLRSGSVAERLHTGMS

SEQ ID NO: 9609 - protein, 500 aa, synthetic construct
MRALVVIRLSRVTEATTSPERQLESCRQLCAQRGWDVVGVAEDLDVSGAVNPFDRKRRPNLARWLAFEEQPFDVIVAYRVDRLTRSTRHLQQLVRWAEDHKKLVVSATEAHFDTTTPFAAVVIALMGTVAQMELEAIKERIRSAAHFNIRAGKYRGSLPPWGYLPTRVDGEWRLVPDPVQRERILEVYHRVVDNHEPLHLVAHDLNRRGVLSPKDYFAQLRGREPQGREWSATALKRSMTSVAMLGYATLNGKTVRDDDGAPLVRAEPILTRGQQEALRAELAKTSRVKPAVSTPSLLLRVLFCAVCGEPAYKFVGGGRKHPRYRCRSMGFPKHCGNGTVVMAEWDAFCEEQVLGLLGDAERLEKVWVAGSDSAVELAEVNAELVDLTSLIGSPAYRAGSPQREALDARIAALAARQEELEGLEARPSGWEWRETGQRFGDWWREQDTAAKNTWLRSMNVRLTFDTRGGLTRTIDFGELQEYEHHLRLGSVAERLHTGMS

SEQ ID NO: 9610 - protein, 500 aa, synthetic construct
MRALVVIRLSRVTDATTSPERQLESCQRLCAQRGWDVVGVAEDLDVSGAVDPFDRKRRPNLARWLAFEEQPFDVIVAYRVDRLTRSVRHLQQLVHWAEDHKKLVVSATEAHFDTATPFAAVVVALMGTVAQMELEAIKERNRSAAHFNIRAGKYRGSLPPWGYLPTRVDGEWRLVPDPVQRERILEVYHRVVDNHEPLHLVAHDLNRRGVLSPKDYFAQLRGREPQGRKWSATALKRSMTSEAMLGYATLNGKTVRDDDGAPLVRAEPILAREQLEALRAELVKTSRAKLAVSTPSLLLRVLFCAVCGEPAYKFAGGGRKYPRYRCRSVGFPKHCGNGTVVMAEWDAFCEEQVLGLLGDAERLEKVWVAGSDSAVELAEVNAELVDLTSLIGSPAYRAGSPQREALDARIAALAARQEELEGLEARPSGWEWRETGQRFGDWWREQDTAAKNTWLRSMNVRLTFDARGGLTRTIDFGDLREYEQHLRLGSVVERLHTGMS

SEQ ID NO: 9611 - protein, 500 aa, synthetic construct
MRALVVIRLSRVTDATTSPERQLESCQQLCAQRGWDVVGVAEDLDVSGAVDPFDRKRRPNLARWLAFEEQPFDVIVAYRVDRLTRSTRHLQQLVHWAEDHKKLVVSATEAHFDTTTPFAAVVIALMGTVAQMELEAIKERIRSAAHFNIRAGKYRGSLPPWGYLPTRVDGEWRLAPDPVQRERILEVYHRVVDNHEPLHLVAHDLNRRGVLSPKDYFAQLRGREPRGRKWSATALKRSMTSEAMLGYATLNGKIVRDDDGAPLVRAEPILTREQQEALRAELAKTSRAKPAVSTPSLLLRVLFCAVCGEPAYKFVGGGRKHPRYRCRSMGFSKHCGNGSVVMAEWDAFCEEQVLDLLGDAERLEKVWVAGSDSAVELAEVNAELVDLTSLIGSPAYRAGSPQRGALDARIAALAARQEELEGLEARPSGWGWRETGQRFGDWWREQDTAAKNTWLRSMNVRLTFDVRGGQTRTIDFGDLREYEQHLRLGSVVERPRTGMS

SEQ ID NO: 9612 - protein, 500 aa, synthetic construct
MRALVVIRLSRVTDATTSPERQLESCQQLCAQRDWDVVGVAEDLDVSGAVDPFDRKRRPNLARWLAFEEQPFDVIVAYRVDRLTRSVRHLRQLVHWAEDHKKLVVSATEAHFDTTTPFAAVVIALMGTVAQMELEAIKERNRSAAHFNIRAGKYRGSLPPWGYLPARVDGEWRLVPDPVQRERILEVYLRVVDNHESLHLVAHDLNRRGVLSPKDYFAQLRGREPQGRKWSATALKRSMISEAMLGYATLNGKTVRDDDGAPLVRAEPILTRGQLEALRAELAKTSRAKPAVSTPSLLLRVLFCAVCGEPAYKFAGGGRKHPRYRCRSMGFPKHCGNGTVVMAEWDAFCEEQVLDLLGDAERLEKVWVAGSDSAVELAEVNAELVGLTSLIGSPAYRAGSPQREALDARIAALAARQEELEGLEARPSGWEWRGTGQRFGDWWREQDTAAKNTWLRSMNVRLTFDVRGELSRTINFGDLQEYEQHLRLGSVVERLHTGMS

SEQ ID NO: 9613 - protein, 500 aa, synthetic construct
MRALVVIRLSRVTDATTSPERQLESCQQLCAQRGWDVVGVAEDLDVSGAVDPFDRKRRPNLARWLAFEEQPFDAIVAYRVDRLTRSVRHLQQLVHWAEDHKKLVVSATEAHFDTTTPFAAVVIALMGTVAQMELEAIKERNRSAAHFNIRAGKYRGSLPPWGYLPTRVDGEWRLAPDPVQRERILEVYHRVVDDHEPLHLVAHDLNRRGVLSPKDYFAQLQGREPQGRKWSATALKRSMISDAMLGYATLNGKTVRDDDGVPLVRAEPILTREQLEALRAELVKTSRAKPAVSTPSLLLRVLFCAVCGEPAYKFAGGGRKHPRYRCRSMGFPKHCGNGSVAMAEWDAFCEEQVLDLLGDAERLEKVWVAGSDSAVELAEVNAELVDLTSLIGSPAYRAGSPQREALDARIAALAARQEELEGLEARPSGWEWRETGQRFGDWWREQDTAAKNTWLRSMNVRLTFDVRGGLTRAIDFGDLQEYEQHLRLGSVVERIHAGMS

SEQ ID NO: 9614 - protein, 500 aa, synthetic construct
MRALVVIRLSRVTDATTSPERQLESCRHLCAQRGWDVVGVAEDLDVSGAVDPFDRKRRPNLARWLAFEEQPFDVIVAYRVDRLTRSVRHLQQLVHWAEDHKKLVVSATEAHFDTTTPFAAVVIALMGTVAQMELEAIKERNRSAAHFNIRAGKYRGSLPPWGYLPTRVDGEWRLAPDPVQRERILEVYHRVVDNHEPLHLVAHDLNRRGVLSPKDYFAQLQGREPQGRKWSATALKRSMTSEAMLGYATLNGKTVRDDDGAPLVRAEPILTRGQLEALRAELVKASRAKPAVSTPSLLLRVLFCAVCGEPAYKFAGGGRKHPRYRCRSMGFPKHCGNGTVVMAEWDAFCEEQVLDLLGDAERLEKVWVAGSDSAVELAEVNAELVDLTSLIGSPAYRAGSPQREALDARIAALAARQEELEGLEARPSGWEWRGTGQRFGDWWHEQDTAAKNTWLRSMNVRLTFDVRGGLTRTIDFGDLQEYEQHLRLGSVVERLHTGVS

SEQ ID NO: 9615 - protein, 500 aa, synthetic construct
MRALVVIRLSRVTDATTSPERQLESCQQLCAQRGWDVVGVAEDLDVSGAVDPFDRKRRPNLARWLAFEEQPFDVIVAYRVDRLARSTRHLQQLVHWAEDHKKLVVSATEAHFDTTTPFAAVVIALMGTVAQMELEAIKERNRSAAHFNIRAGKYRGSLPPWGYLPTRVDGEWRLVPDPVQRERILEVYHRVVDNHEPLHLVAHDLNRRGVLSPKDYFAQLQGREPQGRKWSATALKRSMISEAMLGYATLNGKTVRDDNGAPLVRAEPILTREQLEALRAELVKTSRAKPAVSTPSLLLRVLFCAVCGEPAYKFAGGGRKHPRYRCRSMGFPKHCGNGTVVMAEWDAFCEEQVLDLLGDAERLEKVWVAGSDSAVELAEVNAELVDLTSLIGSPAYRAGSPQREALDARIAALAARQEELEGLEARPSGWEWRETGQRFGDWWREQGTAAKNTWLRSMNVRLTFDVRGGLTRTIDFGVLQEYEQHLRLGGVVERLHRGMS

SEQ ID NO: 9616 - protein, 500 aa, synthetic construct
MRALVVIRLSRVTDATTSPERQLESCQQLCAQRGWDVVGVAEDLDVSGAVDPFDRKRRPNLARWLAFEEQPFDVIVAHRVDRLTRSTRHLQQLVHWAEDHKKLVVSATEAHFDTTTPFAAVVIALMGTVAQMELEAIKERNRSAAHFNIRAGKYRGSLPPWGYLPARVDGEWRLVPDPVQRERILEVYHRVVDNHEPLHLVAHDLNRRGVLSPKDYFAQLRGREPQGRKWSATALKRSMISEAMLGYATLNGETVRDDDGAPLVRAEPILTREQLEALRAELVKTSRAKPAVSTPSLLLRVLFCAVCGEPAYKNAGGGRKHPRYRCRSMGSPKHCGNGTVAMGEYDAFCEEQVLDLLGDAERLEKVWVAGSDSAVELAEVNAELVDLTSLIGSPAYRAGSPQREALDARIAALAARQEELEGLEARPSGWEWRGTGQRFGDWWREQDTAAKNTWLRSMNIRLTFDVRGGLTRTIDFGDLQEYEQHLRLGSVVECLHTGMS

SEQ ID NO: 9617 - protein, 500 aa, synthetic construct
MRALVVIRLSRVTDATTSPERQLESCQQLCAQRGWDVVGVAEDLDVSGAVDPFDRKRRPNLARWLAYEEQPFDVIVAYRVDRLTRSIRHLQRLVHWAEDHKKLVVSATEAHFDTTTPFAAVVIALMGTVAQMELEAIKERIRSAVHFNIRAGKYRGSLPPWGYLPTRVDGEWRLVPDPVQRERILEVYHRVVDNHEPLHSVAHDLNRRGVLSPKDYFAQLRGREPQGRKWSATALKRSMISVAMLGYATLNGKTVRGDDGAPLVRAEPILTREQLEALRAELAKTSRAKPAVSTPSLLLRVLFCAVCGEPAYKFVGGGRKHPRYRCRSMGSPKHCGNGTVVMAEWDAFCEERVLDLLGDAERLEKVWVAGSDSAAELAEVNAELVDLTSLIGSPAYRAGSPQREALDARIAALAARQEELEGLEARPSGWEWRETGQRFVDWWRGQDTAAKNTWLRSMNVRLTFDVRGELTRTIDFGDLQEYAQHLRLGSVVERLHTGMS

SEQ ID NO: 9618 - protein, 500 aa, synthetic construct
MRALVVIRLSRVTDATTSPERQLGSCQQLCAQRGWDVVGVAEDLDVSGAVDPFDRKRRPSLARWLAFEEQPFDVVVAYRVDRLTRSVRHLQRLVHWAEDHKKLVVSATEAHFDTTTPFAAVVIALMGTVAQMELEAIKERIRSAAHFNIRAGKYRGSLPPWGYLPTRVDGEWRLVPDPVQRERILEVYHRVVDNHEPLHLVAHDLNRRGVLSPKDYFAQLRGREPRGRKWSATALRRSMTSVAMLGYATLNGKTVRDDDGAPLVRAEPILTREQQEALRAEFVRTSRAKPAVSSPSLLLRVLFCAVCGEPAYKFVGGGRKHPRYRCRSMGFPKHCGNGTVVMAEWDAFCEEQVLGLLGDAERLEKVWVAGSDSAVELAEVNAELVDLTSLIGSPAYRAGSPQRGALDARIAALAARQEELEGLEARPSGWEWRETGQRFGDWWREQDTAAKNTWLRSMNVRLTFDVRGGLTRTIDFGELQEYEQHLRLGSEAERLHTGMS

SEQ ID NO: 9619 - protein, 500 aa, synthetic construct
MRALVVIRLSRVTDATTSPERQLESCRQLCAQRGWDVVGVAEDLDVSGAVDPFDRKRRPNLARWLAFEEQPFDVIVAYRVDRLTRSARHLQQLVHWAEDHKKLVVSATEAHFDTTTPFAAVVIALMGTVAQMELEAIKERIRSAVHFNIRAGKYRGSLPPWGYLPTRVDGEWRLVPDPVQRERILEVYRRVVDNHEPLHLVAHDLNRRGVLSPKDYFAQLRGREPQGREWSATALRRSMTSVAMLGYATLNGKTVRGDDGAPLVRAEPILTRVQQEALRAEFAKTSRAKPAVSTPSLLLRVLFCAVCGEPAYKFVGGGRKHPRYRCRSMGFPEHCGNGTVVMAEWDAFCEEQVLNLLGDAERLEKVWVAGSDSAVELAEVNAELMDLTSLIGSPAYRAGSPQREALDARIAALAARQEELEGLEARPSGWGWRETGQRFGDWWREQDTAAKNTWLRSMNVRLTFDVRGGLTRTIDFGDLQEYEQHLRPGGVVERLHTGMS

SEQ ID NO: 9620 - protein, 500 aa, synthetic construct
MRALVVIRLSRVTDATTSPERQLESCQQLCAQRGWDVVGVAEDLDVSGAVDPFDRKRRPNLARWLAFEEQPFDVIVAYRVDRLTRSTRHLQQLVHWAEDHKKLVVSATEAHFDTTTPFAAVVIALMGTVAQMELEAIKERNRSAAHFNIRAGKYRGSLPPWGYLPTRVDGEWRLVPDPVQRERILEVYHRVVDNHEPLHLVAHDLNRRGVLSPKDYFAQLQGREPQGRKWSATALKRSMTSEAMLGYATLNGKTVRDDDGAPLVRAEPILTREQLEALRAELVKTSRAKPAVSTPSLLLRVLFCAVCGEPAYKFAGGGRKHPRYRCRSMGFPKHCGNGTVAMAEWDAFCEEQVLDLLGDAERLEKVWVAGSDSAVELAEVNAELVDLTSLIGSPAYRVGSPQREALDARIAALAARQEELEGLEARPSGWEWRGTGQRFGDWWREQDTAAKNTWLRSMNVRLTFDVRGGLTRTIDFGGLQEYEQHLRSGSVVERLHTGMS

SEQ ID NO: 9621 - protein, 500 aa, synthetic construct
MRALVVIRLSRVTDATTSPERQLESCRQLCAQRGWDVVGVAEDLDVSGAVDPFDRKRRPNLARWLAFEEQPFDVIVAYRVDRLTRSVRHLQQLVHWAEDHKKLVVSATEAHFDTTTPFAAVVIALMGTVAQMELEAIKERIRSATHFNIRAGKYRGSLPPWGYLPTRVDGEWRLVPDPVQRERILEVYHRVVDNHEPLHLVAHDLNRRGVLSPKDYFAQLRGREPQGREWSATALKRSMTSVAMLGYATLNGKIVRDDDGAPLVRAEPILTREQLEALRAELAKTSRAKPAVSTPSLLLRVLFCAVCGEPAYKFVGGGRKHPRYRCRSMGFPEHCGNGTVVMTEWDAFCEEQVLNLLGDAERLEKVWVAGSDSTVELAEVSAELVDLTSLIGSPAYRAGSPQREALDARIAALAARQEELEGLEARPSGWEWRETGQRFGDWWREQDTAAKNTWLRSMNVRLTFDVRGGLTRTIDFGDLREYEQHLRLGSVAERLHTGMS

SEQ ID NO: 9622 - protein, 500 aa, synthetic construct
MRALVVIRLSRVTDATTSPERQLESCQQLCAQRGWDVVGVAEDLDVSGAVDPFDRKRRPNLARWLAFGEQPFDVIVAYRVDRLTRSVRHLQQLVHWAEDHEKLVVSATEAHFDTTTPFAAVVIALMGTVAQMELEAIKERNRSAAHFNIRAGKYRGSLPPWGYLPTRVDGEWRLVPDPVQRERILEVYHRVVDNHEPLHLVAHDLNRRGVLSPKDYFAQLRGREPQGRKWSATALKRSMISEAMLGYATLNGRTVRNDDGAPLVRAEPILTRGQLEALRAELVKTSRAKPAVSTPSLLLRVLFCAVCGEPAYKFAGGGRKHPRYRCRSMGFPKHCGNGTVVMAEWDAFCEEQVLDLLGDAECLEKVWVAGSDSAVELAEVNAELVDLTSLIGSPAYRAGSPQREALDARIAALAARQEELEGLEARPSGWEWRETGQRFGDWWREQDTATKNTWLRSMNVRLTFDVRGGLTRTIDFGDLQEYEQRLRLGSVVERLHTGTS

SEQ ID NO: 9623 - protein, 500 aa, synthetic construct
MRALVVIRLSRVTDATTSPERQLESCQQLCAQRGWDVVGVAEDLDVSGAVDPFDRKRRPNLARWLAFEEQPFDVIVAYRVDRLTRSTRHLQQLVHWAEDHEKLVVSATEAHFDTTTPFAAVVIALMGTVAQMELEAIKERNRSAAHYNIRAGKYRGSLPPWGYLPTRVDGEWRLAPDPVQRERILEVYHRVVDNHEPLHLVAHDLNRRGVLSPKDYFAQLQGREPQGRKWSATALKRSMISEAMLGYATLNGKTVRDNDGAPLVRAEPILTREQLEALRAVLVKTSRAKPAVSTPSLLLRVLFCAVCGEPAYKFAGGGRKHPRYRCRSMGFPKHCGNGTVAMAEWDAFCEEQVLDLLGDVERLEKVWVAGSDSAVELAEVNAELVDLTSLIGSPAYRAGSPQREALDARIAALAARQEELEGLKARPSGWERRGTGQRFGDWWNEQDTAAKNTWLRSMNVRLTFDVRGGLTRTIDFGDLQEYEQHLRLGSVVERLHTGMS

SEQ ID NO: 9624 - protein, 500 aa, synthetic construct
MRALVVIRLSRVTDATTSPERQLESCQQLCAQRGWDVVGVAEDLDVSGAVDPFDRKRRPNLARWLAFEEQPFDVIVAYRVDRLTRSTRHLQQLVHWAEDHKKLVVSATEAHFDTTTPFAAVVIALMGTVAQMELEAIKERNRSAAHFNIRAGKYRGSLPPWGYLPTRVDGEWRLVPDPVQRERILEVYHRVVDNHEPLHWVAHDLNRRGVLSPKDYFAQLQGREPQGRKWSATALKRSMISETMLGYATLNGKIVRDDDGAPLVRAEPILTREQLEALRAELVKTSRAKPAVSTPSLLLRVLFCAVCGEPAYKYAGGGRKHPRYRCRSMGFPKHCGNGTVAMAEWDAFCEEQVLNLLGDAERLEKVWEAGSDSAVELAEVNAELVDLTSLIGSPAYRAGSPQREALDARIAALAARQEELEGLEARPSGWEWRGTGQRFGDWWREQDTAAKNIWLRSMNVRLTFDVRGGLTRTIDFGDLQEYEQHLRLGGVVERLHTGMS

SEQ ID NO: 9625 - protein, 500 aa, synthetic construct
MRALVVIRLSRVTDATTSPERQLESCQQLCAQRGWDVVGVAEDLDVSGAVDPFDRKRRPNLARWLVFEEQPFDAIVAYRVDRLTRSVRHLQQLVHWAEDHKKLVVSATEAHFDTTTPFAAVVVALMGTVAQMELEAIKERNRSAAHFNIRAGKYRGSLPPWGYLPTRVDGGWRLVPDPVQRERILEVYHRVVDNHEPLHLVAHDLNQRGVLSPKDYFAQLQGREPQGRKWSATALKRSMISEAMLGYATLNGKIVRDDDGVPLVRAEPILTREQLEALRAELVKTSRAKPAVSTPSLLLRVLFCAVCGEPAYKFAGGGRKHPRYRCRSMGFPKHCGNGTVAMAEWDAFCEKQVLDLLGDAERLEKVWVAGSDSAVELAEVNAELVDLTSLISSPAYRAGSPQREALDARIAALAARQEELEGLGARPSGWEWRETGQRFGDWWREQDTAAKNTWLRSMNVRLTFDVRGGLTRTIDFGDLQEYEQHLRLGGVVERLHTGMS

SEQ ID NO: 9626 - protein, 500 aa, synthetic construct
MRALIVIRLSRVTDTTTSPGRQLESCRQLCAQRGWDVVGVAEDLDVSGAVDPFDRRRRPNLARWLAFEEQPFDAIVAYRVDRLTRSVRHLQQLVHWAEDHKKLVVSATEAHFDTTTPFAAVVIALMGTVAQMELEAIKERIRSAVHFNIRAGKYRGSLPPWGYLPTRVDGEWRLVPDPVQRERILEVYHRVVGNHEPLHLVAHDLNRRGVLSPKDYFAQLRGREPQGRRWSATALKRSMTSVAMLGYATLNGKTVRDDDGAPLVRAEPILTREQQEALRAELAKTSRTKPAVSTPSLLLRVLFCAVCGEPAYKFVGGGRKHPRYRCRSMGFPEHCGNGTVVMAEWDAFCEEQVLDLLGDAERLEKVWLAGSDSAVELAEVNAELVDLTSLIGSPAYRAGSPQREALDTRIAALAARQEGLEGLEARPSGWEWRGTGQRFGDWWRERDTATKNTWLRSMNVRLTFDVRGGLTRTIDFGDLQEYERHLRLGSVVERLHTGMS

SEQ ID NO: 9627 - protein, 500 aa, synthetic construct
MRALVVIRLSRVTDATTSPERQLESCQQLCAQRGWDVVGVAEDLDVSGAVDPFDRKRRPNLARWLAFEERPFDVIVAYRVDRLTRSTRHLQQLVHWAEDHKKLVVSATEAHFDTTTPFAAVVIALMGTVAQMELEAIKERIRSAVHFNIRAGKYRGSLPPWGYLPTRVDGEWRLVPDPVQRERILEVYHRVVDNHEPLHLVAHDLNRRGVLSPKDYFAQLQGREPQGRKWSATALKRSMTSVAMLGYATLNGKTVRDDDGAPLVRAEPILTREQLEALRAELAKTSRAKPAVSTPSLLLRVLFCAVCGEPAYKFAGGGRKHPRYRCRSMGFPEHCGNGTVVMAEWDAFCEEQVLDLLGDAERLEKVWVAGSDSAVELAEVNAELVDLTSLIGSPAYRAGSPQREALDARIVALAARQEELEGLEARPSGWEWRETGQRFGDWWREQDTAAKNTWLRAMNVRLTFDVRGGLTRTIDFGDLQEYEQHLRLGSVVERLHTGMS

SEQ ID NO: 9628 - protein, 500 aa, synthetic construct
MRALVVIRLSRVTDATTSPERQLESCQQLCAQRGWDVVGVAEDLDVSGAVDPFDRKRRPNLARWLAFEEQPFDVIVAYRVDRLTRSTRHLQQLVHWAEDHKKLVVSATEAHFDTTTPFAAVVIALMGTVAQMELEAIKERNRSAAHFNIRAGKYRGSLPPWGYLPTRVDGEWRLVPDPVQRERILEVYHRVVDNHEPLHWVAHDLNRRGVLSPKDYFAQLQGREPQGRKWSATALKRSMISGAMLGYATLNGKTVRDDDGAPLVRAEPILTREQLEALRAELVKTSRAKPAVSTPSLLLRVLFCAVCGEPAYKFAGGGRKHPRYRCRSMGFPKHCGNGTVAMAEWDAFCEEQVLNLLGDAERLEKVWVAGSDSAAELAEVNAELVDLTSLIGSPAYRAGSPQREALDARIAALTARQEELEGLEARPSGWEWRETGQRFGDWWREQDTAAKNSWLRSMNVRLTFDARGGLTRTIDFGDLQEYEQHLRLGSVAERLHTGVS

SEQ ID NO: 9629 - protein, 500 aa, synthetic construct
MRALVVIRLSRVTDATTSPERQLESCQQLCAQRGWDVVGVAEDLDVSGAVDPFDRKRRPNLARWLAFEEQPFDVIVAYRVDRLTRSTRHLQQLVHWAEDHKKLVVSATEAHFDTTTPFAAVVIALMGTVAQMELEAIKERNRSAAHFNIRAGKYRGSLPPWGYLPARVDGEWRLVPDPVQRERILEVYHRVVDNHEPLHLVAHDLNRRGVLSPKDYFAQLQGREPQGRKWSATALKRSMISEAMLGYATLNGKTVRDDDGAPLVRAEPILTREQLGALRAELVKTSRAKPAVSTPSLLLRVLFCAVCGEPAYKFAGGGRKHPRYRCRSMGFPKHCGNGTVAMAEWDAFCEEQVLDLLGDAERLEKVWVAGSDSAVELAEVNAELVDLTSLIGSPAYRAGSPQREALDARIAVLAARQEELEGLEARPSGWGWRETGQRFGDWWREQDTAAKNTWLRSMNVRLTFDVRGGLTRTIDFGGLQEYEQHLRLGSVVERLHTGMS

SEQ ID NO: 9630 - protein, 500 aa, synthetic construct
MRALVVIRLSRVTDATTSPERQLESCLQLCAQRGWDIVGVAEDLNVSGAVDPFDRKRRPNLARWLAFEEQPFDVIVAHRVDRLTRSIRHLQQLVHWAEDHKKLVVSATEAHFDTTTPFAAVVIALMGTVAQMELEAIKERSRSAAHFNIRAGKYRGSLPPWGYLPARVDGEWRLVPDPVQRERILEVYHRVVDNHEPLHLVAHDLNRRGVLSPKDYFAQLRGREPQGREWSATALKRSMTSEAMLGYATLNGKTVRDDDGVPLVRAEPILTREQLEALRAELVKTSRAKPAVSTPSLLLRVLFCAVCGEPAYKFAGGGRKHPRYRCRSMGFPKHCGNGTVAMAEWDAFCEEQVLDLLGDAERLEKVWVAGSDSSVELAEVNAELVDLTSLIGSPAYRAGSPQREALDARIAALAARQEELEGLGARPSGWEWRGTGQRFGDWWREQDTAAKNTWLRSMNVRLTFDVRGGLTRTIDFGDLQEYKQHLRLGNVVERLHTGMS

SEQ ID NO: 9631 - protein, 500 aa, synthetic construct
MRALVVIRLSRVTDATTSPERQLESCRQLCAQRGWDVVGVAEDLDVSGAVDPFDRKRRPNLARWLAFEEQPFDAIVAYRVDRLTRSVRHLQQLVHWAEDHKKLVVSATEAHFDTTTPFAAVVIALMGTVAQMELEAIKERNRSAAHFNIRAGKYRGSLPPWGYLPTRVDGEWRLVPDPVQRERILEVYHRVVDNHEPLHLVAHDLNRRGVLSPKDYFAQLQGREPQGRKWSATALKRSMISVAMLGYATLNGKTVRDDNGAPLVRAEPILTREQLEALRAELAKTSRAKPAVSTPSLLLRVLFCAVCGEPAYKFAGGGRKHPRYRCRSMGFPKHCGNGTVVMAEWDAFCEEQVLNRLGDAERLEKVWVAGSDSAVELAEVNAELVDLTSLIGSPAYRAGSPQREALDARIAALAARQEELEGLEARPSGWEWRETGQRFGDWWREQDTAAKNTWLRSMNVRLTFDVRGGLTRTIDFGDLQEYEQHLRLGSVVERLHTGMS

SEQ ID NO: 9632 - protein, 500 aa, synthetic construct
MRALVVIRLSRVTDATTSPERQLESCQQLCAQRGWDVVGVAEDLDVSGAVDPFDRKRRPNLARWLAFEEQPFDVIVAYRVDRLTRSTRHLQQLVHWAEDHKKLVVSATEAHFDTTTPFAAVVIALMGTVAQMELEAIKERNRSAAHFNIRAGKYRGSLPPWGYLPTRVDGEWRLVPDPVQRERILEVYHRVVDNHESLHLVAHDLNRRGVLSPKDYFAQLRGREPQGRKWSATALKRSMISEAMLGYATLNGKTVRDDDGAPLVRAEPILTREQLEALRAELVKTSRAKPAVSTPSLLLRVLFCAVCGEPAYKLAGGGRKHPRYRCRSMGFPKHCGNGTVAMAEWDAFCEEQVLNLLGDAERLEKVWVAGSDSAVELAEVNAELVDLTSLIGSPAYRAGSPQREALDARIAALAARQEELEGLEARPSGWEWRETGQRFGDWWREQDTAAKNTWLRSMNVRLTFDARGGLTRTIDFGDLQEYEQHLRLGSVVERLHTGMS

SEQ ID NO: 9633 - protein, 500 aa, synthetic construct
MRALVVIRLSRVTDATTSPERQLESCQQLCVQRGWDVVGVAEDLDVSGAVDPFDRKRRPNLARWLAFEEQPFDVIVAYRVDRLTRSTRHLQQLVHWAEDHKKLVVSATEAHFDTTTPFAAVVIALMGTVAQMELEAIKERIRSATHFNIRAGKYRGSLPPWGYLPARVDGEWRLVPDPVQRERILEVYHRVVDNREPLHLVAYDLNRRGVLSPKDYFAQLRGREPQGRKWSATALKRSMISGAMLGHATLNGKTVRDDDGAPLVRAEPILTREQQEALRAELAKTSRAKPAVSTPSLLLRVLFCAVCGEPAYKFVGGGRKHPRYRCRSMGSPKHCGNGTVVMAEWDAFCEKQVLGLLGDAERLEKVWVAGSDSAVELAEVNAELVDLTSLIGSPAYRAGSPQREALDARIAALAARQGELEGLEARPSGWEWRETGQRFRDWWREQDTAAKNTWLRSMNVRLTFDVRGGLTRTIDFGDLREYEQHLRSGSVVERLRTGMS

SEQ ID NO: 9634 - protein, 500 aa, synthetic construct
MRALVVIRLSRVTDATTSPERQLESCQQLCAQRGWDVVGVAEDLDVSGAVDPFDRKRRPNLARWLAFEEQPFEVIVAYRVDRLARSTRHLQQLVHWAEDHKKLVVSATEAHFDTTTPFAAVVIALMGTVAQMELEAIKERNRSAAHYNIRAGKYRGSLPPWGYLPTRVDGEWRLVPDPVQRERILEVYHRVVDNHEPLHLVAHDLNRRGVLSPKDYFAQLQGREPQGRKWSATALKRSMTSEAMLGYATLNGKTVRDDDGAPLVRAEPILTREQLEALRAELVKTSRAKPAVSTPSLLLRVLFCAVCGEPAYKFAGGGRKHPRYRCRSMGFPKHCGNGTVAMAEWDAFCEEQVLGLLGDAERLEKVWVAGSDSAVELAEVNAELVDLTSLIGSPAYRAGSPQREALDARIAALAARQEELEGLGARPSGWEWRETGQRFGDWWREQDTAAKNTWLRSMNVRLTFDVRGGQTRTIDFGDLQEYEQHLRLGSVVERLHTVMS

SEQ ID NO: 9635 - protein, 500 aa, synthetic construct
MRALVVIRLSRVTDATTSPERQLESCQQLCAQRGWDVVGVAEDLDVSGAVDPFDRKRRPNLARWLAFEEQPFDVIVAYRVDRLTRSTRHLQQLVHWAEDHKKLVVSATEAHFDTTTPFAAVVIALMGTVAQMELEAIKERNRSAAHFNIRAGKYRGSLPPWGYLPARVDGEWRLVPDPVQRERILEVYHRVVDNHEPLHLVAHDLNRRGVLSPKDYFAQLQGREPQGRKWSATALKRSMISEAMLGYATLNGKTVRDDDGAPLVRAEPILTRAQLEALRAELVKTSRAKPAVSTPSLLLRVLFCAVCGEPAYKFAGGGRKHPRYRCRSMGFPKHCGNGTVVMAEWDAFCEEQVLDLLGDAERLEKVWVAGSDSAVELAEVNAELVDLTSLIGSPAYRAGSPQREALDARIAALAARQEELEGLGARPSGWEWRETGQRFGDWWREQDTAAKNTWLRSMNVRLTFDARGGLTRTIDFGDLHEYEQHLRLGSVVERLHTGMS

SEQ ID NO: 9636 - protein, 500 aa, synthetic construct
MRALVVIRLSRVTEATTSPERQLESCQQLCALRGWDVVGVAEDLDVSGAVDPFDRKRRPNLARWLAFEEQPFDAIVAYRVDRLTRSVRYLQQLVHWAEDHKKLVVSATEAHFDTTTPFAAVVIALMGTVAQMELEAIKERNRSAAHFNIRAGKYRGSLPPWGYLPTRVDGEWRLVPDPAQRERILEVYHRVVDNHEPLHLVAHDLNRRGVLSPKDYFAQLQGREPQGRKWSATALKRSMTSEAMLGYATLNGKTVRDDGGAPLVRAEPILTREQLEALRAVLAKTSRARPAVSTPSLLLRVLFCAVCGEPAYKFAGGGRKHPRYRCRSMGFPRHCGNGTVVMAEWDAFCEEQVLDLLGGVERLEKVWVAGSDSAVELAEVNAELVDLTSLIGSPAYRAGSPQREALDARIAALAARQEELEGLEARPSGWEWRETGQRFGDWWREQDTATKNTWLRSMNVRLTFDVRGGLTRTIDFGDLQEYEQHLRLGSVVERSHTGIS

SEQ ID NO: 9637 - protein, 500 aa, synthetic construct
MRALVVIRLSRVTDATTSPERQLESCQQLCAQRGWDVVGVAEDLDVSGAVDPFDRKRRPNLARWLAFEERPFDVIVAYRVDRLTRSTRHLQQLVHWAEDHKKLVVSATEAHFDTTTPFAAVVIALMGTVAQMELEAIKERNRSAAHFNIRAGKYRGSLPPWGYLPTRVDGEWRLVPDPVQRERILEVYHRVVDNHEPLHLVAHDLNRRGVLSPKDYFAQLQGREPQGRKWSATALKRSMISEAMLGYATLNGKTVRDDDGAPLVRAEPILTRGQREALRAELVKTSRAKPAVSTPSLLLRVLFCAVCGEPAYKFAGGGRKHPRYRCRSMGFPKHCGNGTVVMAEWDAFCEEQVLNLLGDAERLEKVWVAGSDSAVELAEVNAELVDLTSLIGSPAYRAGSPQREALDARIAALAARQEELEGLEARPPGWEWRETGQRFGDWWREQDTAAKNTWLRSMNVRLTFDVRGGLTRTIDFGDLQEYEQHLRLGSVVERLHTGTS

SEQ ID NO: 9638 - protein, 500 aa, synthetic construct
MRALVVIRLSRVTDATTSPERQLESCRQLCAQRGWDVVGVAEDLDVSGAVDPFDRKRRPNLARWLAFEEQPFDVIVAHRVDRLTRSTRHLQQLVRWAEDHKKLVVSATEAHFDTTTPFAAVVIALMGTVAQMELEAIKERIRSATHFNIRAGKYRGSLPPWGYLPTRVDGEWRLAPDPVQRERILEVYHRVVDNHEPLHLVAHDLNRRGVLSPKDYFAQLQGREPQGRKWSATALKRSMTSVAMLGYATLNGKTVRDDDGAPLVRAEPILTREQLEALRAELAKTSRAKPAVSTPSLLLRVLFCAVCGEPAYKFVGGGRKHPRYRCRSMGFPEHCGNGTVVMAEWDAFCEEQVLNLLGDAERLERVWVAGSDSAVELAEVNAELVDLTSLIGSPAYRAGSPQREALDARIAALAARQEELEGLEARPSGWEWRGTGQRLGDWWREQDTAAKNTWLRLMNVRLTFDVRGGLTRTIDFGDLQEYEQHLRLGSVVERSHTGMS

SEQ ID NO: 9639 - protein, 500 aa, synthetic construct
MRALVVIRLSRVTDATTSPERQLESCQQLCARRGWDVVGVAEDLDVSGAVDPFDRKRRPNLARWLTLEEQPFDVIVAYRVDRLTRSTRHLQHLVHWAEDHKKLVVSATEAHFDTTTPFAAVVIALMGTVAQMELEAIKERIRSAVRFNIRAGKYRGSLPPWGYLPTRVEGEWRLVPDPVQRERILEVYHRVVDSHEPLHLVAHDLNRRGVLSPKDYFAQLRGREPRGRKWSATALKRSMISGAMLGYATLNGKIVRDDDGAPLVRAEPILTREQQEALRAELAKTSRAKPAVSTPSLLLRVLFCAVCGEPAYKFVGGGRKHPRYRCRSMGFPEHCGNGTVVMAEWDAFCEEQVLDLLGDAERLEKVWLAGSDSAVELAEVNAELVDLTSLIGSPAYRAGSPQREALDARIAALAARQEELEGLEARPSGWEWRETGQRFGDWWREQDTAAKNTWLRSMNVRLTFDVRGGLTRTIDFGDLQEYEQHLRLGSVVERSHTGMS

SEQ ID NO: 9640 - protein, 500 aa, synthetic construct
MRALVVIRLSRVTDATTSPERQLESCQQLCAQRGWDVVGVAEDLDVSGAVDPFDRKRRPSLARWLAFEEQPFDVIVAYRVDRLTRSTRHLQQLVHWAEDHKKLVVSATEAHFDTTTPFAAVVIALMGTVAQMELEAIKERNRSAAHFNIRAGKYRGSLPPWGYLPTRVDGEWRLAPDPVQRERILEVYHRVVDNHEPLHLVAHDLNRRGVLSPKDYFAQLRGREPQGRKWSATALKRSMISEAMLGYATLNGKTVRNDDGAPLVRAEPILTRGQLEALRAELVKTSRAKPAVSTPSLLLRVLFCAVCGEPAYKFAGGGRKHPRYRCRSMGFPKHCGNGTVAMAEWDAFCEEQVLDLLGDAERLEKVWVAGSDSAVELAEVNAELVDLTSLVGSPAYRAGSPQREALDARIAALAARQEELEGLEARPSGWEWRETGQRFGDWWREQDTAAKNTWLRSMNVRLTFDVRGGLTRTIDFGNLQEYEQHLRLGSVVERLHTGMS

SEQ ID NO: 9641 - protein, 500 aa, synthetic construct
MRALVVIRLSRVTDATTSPERQLESCQQLCAQRGWDVVGVAEDLDVSGAVDPFDRKRRPNLARWLAFGEQPFDAIVAYRVDRLTRSVRHLQQLVHWAEDHKKLVVSATEAHFDTTTPFAAVVIALMGTVAQMELEAIKERIRSAVRFNIRAGKYRGSLPPWGYLPTRVDGEWRLVPDPVQRERILEVYHRVVDNHEPLHLVAHDLNRRGVLSPKDYFAQLRGREPRGRKWSATALRRSMTSEAMLGYATLNGKIVRDDDGAPLVRAEPILTREQQEALRAELAKTSRAKPAVSTPSLLLRVLFCAVCGEPAYKFVGGGRKHPRYRCRSMGFPEHCGNGTVVVAEWDAFCEEQVLDLLGDAERLEKVWVAGSDSAVELAEVNAELVDLTSLIGSPAYRAGSPQREALDTRIAALAARQEELEGLEARPSGWEWRGTGQRFGDWWREQDTAAKNTWLRSMNVRLTFDVRGGLTRTIDFGDLQEYEQHLRLGSVVERLHAGMS

SEQ ID NO: 9642 - protein, 500 aa, synthetic construct
MRALVVIRLSRVTDATTSPERQLESCQQLCAQRGWDVVGVAEDLDVSGAVDPFDRKRRPNLARWLAFEEQPFDVIVAYRVDRLTRSVRHLQQLVHWAEDHKKLVISATEAHFDTTTPFAAVVIALMGTVAQMELEAIKERNRSAAHFNIRAGKYRGSLPPWGYLPTRVDGEWRLVPDPVQRERILEVYHRVVDNHEPLHLVAHDLNRRGVLSPKDYFAQLQGREPQGRKWSATALKRSMISEAMLGYATLNGKTVRDDDGAPLVRAEPILTREQLEALRAELVKASRAKPAVSTPSLLLRVLFCAVCGEPAYKFAGGGRKHPRYRCRSMGFPKHCGNGTVAMAEWDAFCEEQVLDLLGDAERLEKVWVAGSDSAVELAEVNAELVDLTSLIGSPAYRAGSPQREALDARIAALAARQEELEGLGARPSGWEWRETGQRFGDWWREQDTAAKNTWLRSMNVRLTFDVRGGLTRTIDFGDLQEYEQHLRLGSVVERLHTGMP

SEQ ID NO: 9643 - protein, 500 aa, synthetic construct
MRALVVIRLSRVTDATTSPERQLESCQQLCAQRGWDVVGVAEDLDVSGAVDPFDRKRRPNLARWLAFEEQPFDVIVAYRVDRLTRSVRHLQQLVHWAEDHKKLVVSATEAHFDTTTPFAAVVIALMGTVAQMELEAIKERNRSAAHFNIRAGKYRGSLPPWGYLPARVDGEWRLVPDPVQCERILEVYHRVVDNHESLHLVAHDLNRRGVLSPKDYFAQLRGREPQGRKWSATALKRSMISEAMLGYATLNGKTVRDDDGAPLVRAEPILTREQLEALRAELAKTSRAKPAVSTPSLLLRVLFCAVCGEPAYKSAGGGRKHPRYRCRSMGFPKHCGNGTVAMAEWDAFCEEQVLGLLGDAERLEKVWVAGSDSAVELAEVNAELVDLTSLIGSPAYRAGSLQREALDARIAALAARQEELEGLEARPSGWEWRETGQRFGDWWREQDTAAKNTWLRSMNVRLTFDVRGGLTRAIDFGDLLEYEQHLRLGSVVERLHTGMS

SEQ ID NO: 9644 - protein, 500 aa, synthetic construct
MRALVVIRLSRVTDATTSPERQLESCQQLCAQRGWDVVGVAEDLDVSGAVDPFDRKRRPNLARWLAFEEQPFDVIVAYRVDRLTRSVRHLQQLVHWAEDHKKLVVSATEAHFDTTTPFAAVVIALMGTVAQMELEAIKERIRSAVHFNIRAGKYRGSLPPWGYLPTRVDGEWRLVPDPAQRERILEVYHRVVDNHEPLHLVAYDLNRRGVLSPKDYFAQLRGREPRGRKWSATALKRSMISEAMLGYATLNGKIVRDDDGAPLVRAEPILTRGQQEALRAELAKTSRAKPAVSTPSLLLRVLFCAVCGEPAYKFVGGGRKHPRYRCRSMGFPKHCGNGTVVMAEWDMFCEEQVLNLLGDAERLEKVWIAGSDSAVELAEVNAELVDLTSLIGSPAYRAGSPQREALDARIAALAARQEELEGLEARPSGWEWRETGQRFGDWWREQDTAAKNTWLRSMNVRLTFDVRGGLTRTIDFGDLQEYGQHSRLGGVVERLHTGMS

SEQ ID NO: 9645 - protein, 500 aa, synthetic construct
MRALVVIRLSRVTDATTSPERQLESCQQLCAQRGWDVAGVAEDLDVSGAVDPFDRKRRPSLARWLAFEEQPFDVIVAYRVDRLTRSTRHLQQLVLWAEDHRKLVVSATEAHFDTTTPFAAVVIALMGTVAQMELEAIKERIRSAVHFNIRAGKYRGSLPPWGYLPTRVDGEWRLVPDPVQRERILEVYHRVVDNHEPLHLVAHDLNRRGVLSPKDYFAQLQGREPQGRKWSATALKRSMISVAMLGYATLNGKIVRDDDGVPLVRAEPILTREQQEALRAELSRTSRAKPAVSTPSLLLRVLFCAVCGEPAYKFVGGGRKHPRYRCRSMGFPKHCGNGTVVMTEWDAFCEEQVLDLLGDAERLEKVWVAGSDSAVELAEVNAELVDLTSLIGSPAYRAGSPQREALDARIAALAARQEELEGLEARPSGWGWRETGQRFGDWWREQDTAAKNAWLRSMNVRLTFDVRGGLTRTIDFGELQEYEQHLRLGSVVERLHTGMS

SEQ ID NO: 9646 - protein, 500 aa, synthetic construct
MRALVVIRLSRVTDATTSPERQLESCQQLCTQRGWDVVGVAEDLDVSGAVDPFDRKRRPSLARWLAFEEQPFDVIVAYRVDRLTRSTRHLQQLVHWAEDHKKLVVSATEAHFDTTTPFAAVVIALMGTVAQMELEAIKERNRSAAHFNIRAGKYRGSLPPWGYLPTRVDGEWRLVPDPVQRERVLEVYHRVVDNHEPLHLVAHDLNRRGVLSPKDYFAQLRGREPQGRKWSATALKRSMISEAMLGYATLNGKTVRGDDGAPLVRAEPILTREQLEALRAELVRTSRAKPAVSTPSLLLRVLFCAVCGEPAYKFAGGGRKHPRYRCRSMGFPKHCGNGTVVMAEWDAFCEEQVLDLLGDAERLEKVWVAGSDSAVELAEVNAELVDLTSLIGSPAYRASSPQREALDTRIAALTARQEELEGLGARPSGWEWRETGQRFGDWWREQDTAAKNTWLRSMNVRLTFDVRGGLTRTIDFGDLQEYEQHLRLGSAVERLHTGMS

SEQ ID NO: 9647 - protein, 500 aa, synthetic construct
MRALVVIRLSRVTDATTSPERQLESCQQLCAQRDWDVVGVAEDLDVSGAVDPFDRKRRPNLARWLAFEEQPFDVIVAYRVDRLTRSTRHLQQLVRWAEDHKKLVVSATEAHFDTTTPFAAVVIALMGTVAQMELEAIKERIRSAAHFNIRAGKYRGSLPPWGYLPTCVDGEWRLVPDPVQRERILEVYHRVVDNHEPLHLVAHDLNRRGVLSPKDYFAQLRGREPQGRKWSATALKRSMISVAMLGYATLNGKIVRDDDGAPLVRAEPILTREQLEALRAELAKTSRAKPAVSTPSLLLRVLFCAVCGEPAYKFVGGGRKHPRYRCRSMGFPKHCGNGTVVMTEWDAFCEEQVLDLLGDAERLEKVWVAGSDSAVELAEVSAELVDLTSLIGSPAYRAGSPQREALDARIAALAARQEELEGLEARPPGWEWRETGQRFGDWWREQDTAAKNTWLRSMNVRLTFDTRGGLARTIDFGDLQEYERHLRLGSVAERLRTGMS

SEQ ID NO: 9648 - protein, 500 aa, synthetic construct
MRALVVIRLSRVTDATTSPERQLESCRLLCAQRGWDVVGVAEDLDVSGVVDPFDRKRRPNLARWLAFEEQPFDVIVAYRVDRLTRSTRHLQQLVRWAEDHKKLVVSATEAHFDTTTPFAAVVIALMGTVAQMELEAIKERIRSAAHFNIRAGKYRGSLPPWGYLPTRVDGEWRLVPDPVQRERILEVYHRVVDNHEPLHLVAHDLNRRGVLSPKDYFAQLRGREPRGRKWSATALKRSMISVAMLGYATLNGKTVRDDDGAPLVRAEPILTREQQEALRAELAKTSRAKPAVSTPSLLLRVLFCAVCGEPAYKFVGGGRKHPRYRCRSMGFPKHCGNGTVVMTEWDAFCEEQVLDLLGDAERLEKVWVAGSDSAVELAEVNAELVDLTSLIGSPTYRTGSPQREALDARIAALAARQEELEGLEARPSGWEWRGTGQRFGDWWREQDTAAKNTWLRSMNVRLTFDVRGGLTRTIDLGELQEYVQHLRLGSVVKRLHTGVS

SEQ ID NO: 9649 - protein, 500 aa, synthetic construct
MRALVVIRLSRVTDATTSPERQLESCQQLCAQRGWDVVGVAEDLDVSGAVDPFDRKRRPNLARWLALEEQPFDVIVAHRVDRLARSIRHLQQLVHWAEDHKKLVVSATEAHLDTTTPFAAVVIALMGTVAQMELEAIKERNRSAAHFNIRAGKYRGSLPPWGYLPARVDGEWRLVPDPVQRECILEVYHRVVNNHEPLHLVAHDLNRRGVLSPKDYFAQLRGREPQGRKWSATALKRSMISEAMLGYATLNGKTVRDDDGAPLVRAEPILTREQLEALRAELVKTSRAKPAVSTPSLLLRVLFCAVCGEPAYKFAGGGRKHPRYRCRSMGFPKHCGNGTVAMAEWDAFCEEQVLNLLGDAERLEKVWVAGSDSAVELAEVNAELVDLSSLIGSPAYRAGSPQREALDARIAALAARQEELEGLEARPSGWEWRETGQRFGDWWREQDTAAKNTWLRSMNVRLMFDVRGGLTRTIDFGDLQEYEQHLRLGSVVERLHTGMS

SEQ ID NO: 9650 - protein, 500 aa, synthetic construct
MRALVVIRLSRVTDATTSPERQLESCHQLCAQRGWDVVGVAEDLDVSGAVDPFDRKRRPNLARWLAFEEQPFDAIVAYRVDRLTRSIRHLQQLVHWAEDHKKLVVSATEAHFDTTTPFAAVVIALMGTVAQMELEAIKERIRSAAHFNIRAGKYRGSLPPWGYLPTRVDGEWRLVPDPVQRERILEVYHRVVDNHEPLHIVAHDLNRRGVLSPKDYFAQLRGREPRGRKWSATALKRSMISGAMLGYATLNGMIVRDDDGAPLVRAEPILTREQQEALRAELAKTSRAKPAVSTPSLLLRVLFCAVCGEPAYKFVGGGRKHPRYRCRSMGFPKHCGNGTVAMAEWDAFCEEQVLNLLGDAERLEKVWVAGSDSAVELAEVNAELVDLTSSIGSPAYRAGSPQREALDARIAALAARQEELEGLEARPSGWEWRGTGQRFGDWWREQDTAAKNAWLRSMSVRLTFDVRGGLTRTIDFGDLQEYEQHLRSGSVVERLHTGMS

SEQ ID NO: 9651 - protein, 500 aa, synthetic construct
MRALVVIRLSRVTDATTSPERQLESCQQLCAQRGWDVVGVAEDLDVSGAVDPFDRKRRPNLARWLAFEEQPYDVIVAYRVDRLTRSTRHLQQLVHWAEDHKKLVVSATEAHFDTTTPFAAVVIALMGTVAQMELEAIKERNRSAAHFNIRAGKYRGSLPPWGYLPARVDGVWRLVPDPVQRERILEVYHRVVDNHESLHLVAHDLNRRGVLSPKDYFAQLQGREPQGRKWSATALKRSMISEAMLGYATLNGKTVRNDDGAPLVRAEPILTRGQLEALRAELVKTSRAKPAVSTPSLLLRVLFCAVCGEPAYKFAGGGRKHPRYRCRSMGFPKHCGNGTVMMAEWDAFCEEQVLGLLGDAECLEKVWVAGSDSAVELAEVNAELVDLTSLIGSPAYRAGSPQREALDARIAALAARQGELEGLEACPSGWEWRETGQRFGDWWREQDTAAKNTWLRSMNVRLTFDVRGGLTRTIDFGDLQEYEQHLRLGSVVERLHTGMS

SEQ ID NO: 9652 - protein, 500 aa, synthetic construct
MRALVVIRLSRVTDATTSPERQLESCQQLCAQRGWDVVGVAEDLDVSGAVDPFDRKRRPNLARWLAFEEQPFDVIVAYRVDRLARSTRHLQQLVHWAEDHKKLVVSATEAHFDTTTPFAAVVIALMGTVAQMELEAIKERNRSAAHFNIRAGKYRGSLPPWGYLPTRVDGEWRLVPDPVQRERILEVYHRVVDNHEPLHLVAHDLNRRGVLSPKDYFAQLQGREPQGRKWSATALKRSMISEAMLGYATLNGKIVRDDDGAPLVRAEPILTREQLEVLRAELVKTSRAKPAASTPSLLLRVLFCAVCGEPAYKFAGGGRKHPRYRCRSMGFPKHCGNGTVAMAEWDAFCEEQVLNLLGDVERLEKVWVAGSDSAVELAEVNAELVDLTSLIGSPAYRAGSPQREALDARIAALAARQEELEGLEARPSGWEWRETGQRFGDWWREQDTAAKNTWLRSMNVRLTFDVRGGLTRTIDFGVLQEYEQHLRLGSVVERLHTGMP

SEQ ID NO: 9653 - protein, 500 aa, synthetic construct
MRALVVIRLSRVTDATTSPERQLESCLQLCAQRGWDVVGVAEDLDVSGAVDPFDRKRRPNLARWLAFEELPFDAIVAYRVDRLTRSTRHLQQLVHWAEDHKKLVVSATEAHFDTTTPFAAVVIALMGTVAQMELEAIKERNRSAAHFNIRAGKYRGSLPPWGYLPARVDGEWRLAPDPVQCERILEVYHRVVDNHEPLHLVAHDLNRRGVLSPKDYFAQLQGREPRGRKWSATALKRSMISEAMLGYATLNGKTVRDDDGAPLVRAEPILTREQQEALRAELVKTSRVRPAVSTPSLLLRVLFCAVCGEPAYRSAGGGRKHPRYRCRSMGFPKHCGNGTVAMAEWDAFCEEQVMDLLGDAERLEKVWVAGSDSAVELAEVNAELVDLTSLIGSPAYRAGSPQREALDARIAALAARQEELEGLGARPSGWEWRETGQRFGDWWREQDTAAKNTWLRSMNVRLTFDVRGGLTRTIDFGDLQEYEQHLRLGSVVERLHTGMS

SEQ ID NO: 9654 - protein, 500 aa, synthetic construct
MRALVAIRLSRVTDATTSPERQLESCQQLCAQRGWDVVGVAEDLDVSGAVDPFDRKRRPNLARWLAFEERPFDVIVAHRVDRLTRSVRHLQQLVHWAEDHKKLVVSATEAHFDTTTPFAAVVIALMGTVAQMELEAIKERNRSAAHFNIRAGKYRGSLPPWGYLPTRVDGEWRLVPDPVQRERILEVYHRVVDNHEPLHLVAHDLNRRGVLSPKDYFAQLQGREPQGRKWSATALKRSMISKAMLGYATLNGKIVRGDDGAPLVRAEPILTREQLEALRAVLVKTSRAKPAVSTPSLLLRVLFCAVCGEPAYKFAGGGRKHPRYRCRSMGFPKHCGNGTVAMAEWDAFCEEQVLDLLGDAERLEKVWVAGSDSAIELAEVNAELMDLTSLIGSPAYRAGSPQRDALDARIAALAARQEELEGLEARPSGWEWRGTGQRFGDWWREQDTAAKNTWLRSMNVRLMFDVRGGLTRTIDFGDLQEYEQHLRLGSVVERLHTGMS

SEQ ID NO: 9655 - protein, 500 aa, synthetic construct
MRALVVIRLSRVTDATTSPERQLESCQQLCAQRGWDVVGVAEDLDVSGAVDPFDRKRRPNLARWLASEEQPFDVIVAYRVDRLTRSTRHLQQLVLWAEDHKKLVVSATEAHFDTTTPFAAVVIALMGTVAQMELEAIKERIRSAAHFNIRAGKYRGSLPPWGYLPARVDGEWRLVPDPVQRERILEVYRRVVDNHEPLHLVAHDLNRRGVLSPKDYFAQLRGREPQGRKWSATALKRSMTSVAMLGYATLNGKTVRGDDGAPLVRAEPILTREQLEALRAELAKTSRAKPAVSTPSLLLRVLFCAVCGEPAYKFVGGGRKHPRYRCRSMGSPEHCGNGTVVMAEWDAFCEKQVLDLLGDAERLEKVWVAGSDSAVELAEVNAELVDLTSLIGSPAYRAGSPQREALDARIAALAARQEELEGLEARPSGWEWRGTGQRLGDWWREQDTAAKNTWLRSMNVRLTFNVRGGLTRTIDFGDLQEYEQHLRLGSVVEHLHTGMP

SEQ ID NO: 9656 - protein, 500 aa, synthetic construct
MRALVVIRLSRVTDATTSPERQLESCQRLCAQRGWDVVGVAEDLDVSGAVDPFDRKRRPSLARWLAFEEQPFDVIVAYRVDRLTRSARHLQRLVHWAEDHKKLVVSATEAHFDTTTPFAAVVIALMGTVAQMELEAIKERNRSAAHFNIRAGKYRGSLPPWGYLPARVDGEWRLVPDPVQRERILEVYHRVVDNHEPLHLVAHDLNRRGVLSPKDYFAQLRGREPQGRKWSATALKRSMISEAMLGYATLNGKTVRDDDGAPLVRAEPILTREQLEALRAVLVKTSRAKPAVSTPSLLLRVLFCAVCGEPAYKFSGGGRKHPRYRCRSMGFPKHCGNGTVVMAEWDALCEEQVLGLLGDAERLEKVWVAGSDSAVELAEVNAELVDLTSLIGSPAYRAGSPQREALDARIAALAARQEELEGLEARPSSWEWRETGQRFGDWWREQDTAAKNTWLRSMNVRLTFDVRGGLTRTIDLGDLQEHEQHLRLGSVVGRSHTGTS

SEQ ID NO: 9657 - protein, 500 aa, synthetic construct
MRALVVIRLSRVTDATTSPERQLESCQQLCAQRGWDVVGVAEDLDVSGAVDPFDRKRRPNLARWLAFEEQPFDVIVAYRVDRLTRSVRHLQQLVHWAEDHKKLVVSATEAHFDTTTPFAAVVIALTGTVAQMELEAIKERSRSAAHFNIRAGKYRGSLPPWGYLPTRVDGEWRLVPDPVQRERILEVYHRVVDNHEPLHLVAHDLNRRGVLSPKDYFAQLQGREPQGRKWSATALKRSMISGAMLGYATLNGKTVRGDDGAPLVRAEPILTRGQQEALRAELAKTSRAKPAVSTPSLLLRVLFCAVCGEPAYKFVGGGRKHPRYRCRSMGFPEHCGNGTVVMAEWDAFCEEQVLDLLGDAERLEKVWVAGSDSSVELAEVNAELVDLTSLIGSPAYRAGSPQREALDARIAALAARQEELEGLEARPSGWEWRETGQRFGDWWREQDTAAKNTWLRSMNVRLTFDVRGGLTRTIDFGELQEYEQHLRLGSVAERLHTGMS

SEQ ID NO: 9658 - protein, 500 aa, synthetic construct
MRALVVIRLSRVTDATTSPERQLESCQQLCAQRGWDVVGVAEDLDVSGAVDPFDRKRRPNLARWLAFEEQPFDAIVAYRVDRLTRSVRHLQQLVHWAEDHKKLVVSATEAHFDTTTPFAAVVIALMGTVAQMELEAIKERNRSAAHFNIRAGKYRGSLPPWGYLPTRVDGEWRLVPDPVQRERILEVYRRVVDNHEPLHLVAHDLNRRGVLSPKDYFAQLRGREPQGRKWSATALKRSMISETMLGYATLNGKTVRDDGGAPLVRAEPILTREQLEALRAELVKTSRAKPAVSTPSLLLRVLFCAVCGEPAYKFAGGGRKHPRYRCRSMGFPKHCGNGTVVMAEWDAFCEEQVLNLLGDAERLEKVWVAGSDSAVELAEVNAELVDLTSLIGSPAYRAGSPQREALDARIAALAARQEELEGLEARPSGWEWRETGQRFGDWWREQDTAAKNTWLRSMNVRLTFDVRGGLTRTIDFGDLQEYEQHLRLGSEVERLHTGMS

SEQ ID NO: 9659 - protein, 500 aa, synthetic construct
MRALVVIRLSRVTDATTSPERQLESCQQLCAQRGWDVVGVAEDLDVSGAVDPFDRKRRPNLARWLAFEEQPFDVIVAYRVDRLTRSTRHLQQLVRWAEDHKKLVASATEAHFDTTTPFAAVVIALMGTVAQMELEAIKERIRSAAHFNIRAGKYRGSLPPWGYLPTRVDGEWRLVPDPVQRERILEVYHRVVDNHEPLHLVAHDLNRRGVLSPKDYFAQLRGREPQGRKWSATALKRSMTSAAMLGYATLNGKTVRDDNGAPLVRAEPILTRGQQEALRAELAKTSRAKPAVSTPSLLLRVLFCAVCGEPAYKFTGGGRKHPRYRCRSMGFPKHCGNGTVVMAEWDAFCEEQVLNLLGDAERLEKVWVAGSDSAAELAEVNAELVDLTSLIGSPAYRTGSPQREALDTRIAALAARQEELEGLEARPPGWEWRETGQRFGDWWREQDTAAKNAWLRSMNVRLTFDVRGGLTRTIDFGELQEYVQHLRLGSVAERLHTGMS

SEQ ID NO: 9660 - protein, 500 aa, synthetic construct
MRALVVIRLSRVTDATTSPERQLESCQQLCAQRGWDVVGVAEDLDVSGAVDPFDRKRRPNLARWLAFEEQPFDVIVAYRIDRLTRSTRHLQQLVHWAEDHKKLVVSATEAHFDTTTPFAAVVIALMGTVAQMELEAIKERNRSAAHFNIRAGKYRGSLPPWGYLPTRVDGEWRLAPDPEQRERILEVYHRVVDNHEPLHLVAHDLNRRGVLSPKDYFAQLQGREPQGRKWSATALKRSMISEAMLGYATLNGKTVRDDDGAPLVRAEPILTREQLEALRAELVKTSRVKPAVSTPSLLLRVLFCAVCGEPAYKFAGGGRKHPRYRCRSMGFPKHCGNGTVVMAEWDAFCEEQVLNLLGDAERLEKVWVAGSDSAVELAEVNAELVDLTSLIGSPAYRAGSTQREALDARIAALAARQEELEGLGARPSGWEWRETGQRFGDWWCEQDTAAKNTWLRSMDVRLTFDVRGGLTRTIDFGDLQEYEQHLRLGSVVKRLHTGTS

SEQ ID NO: 9661 - protein, 500 aa, synthetic construct
MRALIVIRLSRVTDATTSPERQLESCQQLCAQRGWDVVGVAEDLDVSGAVDPFDRKRRPNLARWLAFEEQPFDVIVAYRVDRLTRSTRHLQQLVHWAEDHKKLVVSATEAHFDTTSPFAAVVIALMGTVAQMELEAIKERNRSAAHFNIRAGKYRGSLPPWGYLPARVDGEWRLVPDPVQRERILEVYHRVVDNHESLHLVAHDLNRRGVLSPKDYFAQLRGREPQGRKWSATALKRSMISEAMLGYATLNGKTVRDDDGAPLVRAEPILTREQLEALRAELVKTSRAKPAVSTPSLLLRVLFCAVCGKPAYKFAGGGRKHPRYRCRSMGFPKHCGNGTVVMAEWDAFCEEQVLDLLGGAERLEKVWGAGSDSAVELAEVNAELMDLTSLIGSPAYRAGSPQREALDARIAALAARQEELEGLEARPAGWVWRETGQRFGDWWREQDTAAKNTWLRSMNVRLTFDVRGGLTRTIDFGDLQEYEQHLRLGSVVERLHTGMS

SEQ ID NO: 9662 - protein, 500 aa, synthetic construct
MRALVVIRLSRVTDTTTSPERQLESCQQLCAQRGWDVVGVAEDLDVSGAVDPFDRKRRPNLARWLAFEERPFDVIVAYRVDRLARSTRHLQQLVHWAEDHKKLVVSATEAHFDTTTPFAAVVIALMGTVAQMELEAIKERNRSAAHFNIRAGKYRGSLPPWGYLPARVDGEWRLVPDPVQRERILEVYHRVVDNHEPLHLVAYDLNRRGVLSPKDYFAQLQGREPQGRKWSATALKRSMISEAMLGYATLNGKTVRDDDGAPLVRAEPILTREQLEALRAELVKTSRAKPAVSTPSLLLRVLFCAVCGEPAYKFAGGGRKHPRYRCRSMGFPKHCGNGTVAMAEWDAFCEEQVLDLLGDAERLEKVWVAGSDSAVELAEVSAELVDLTSLIGSPAYRAGSPQREALDARIAALAARQEELEGLEARPSGWEWRGTGQRFGDWWREQDTAAKNTWLRSMNVRLTFDVRDGLTRTIDFGDLQEYEQHLRLGSVVERLHTGMS

SEQ ID NO: 9663 - protein, 500 aa, synthetic construct
MRALVVIRLSRATDATTSPERQLESCQQLCAQRGWDVVGVAEDLDVSGAVDPFDPKRRPNLARWLAFEQQPFDVIVAYRVDRLTRSVRHLQRLVHWAEDHKKLVVSATEAHFDTTTPFAAVVIALMGTVAQMELEAIKERIRSAVRFNIRAGKYRGSLPPWGYLPTRVDGEWRLVPDPVQRERILEVYHRVVDNHEPLHLVAYDLNRRGVLSPKDYFAQLQGREPQGRKWSATALKRSMTSVAMLGYATLNGKTVRDDDGAPLVRAEPILTRGQQEALRAELAKTSRAKPAVSTPSLLLRVLFCAVCGEPAYKFVGGGRKHLRYRCRSMGFPKHCGNGTVVMAEWDAFCEEQVLNLLGDAERLEKVWVAGSDSSVELAEVNAELVDLTSLIGSPAYRAGSPQRETLDARIAALAARQEELEGLEARPSGWEWRGTGQRFGDWWREQDTAAKNTWLRSMNIRLTFDVRGGLTRTIDFGDLQEYGQHLRLGSVVERLLTGMS

SEQ ID NO: 9664 - protein, 500 aa, synthetic construct
MRALVVIRLSRVTDATTSPERQLESCQQLCAQRGWDVVGVAEDLDVSGAVDPFDHKRRPNLARWLAFEEQPFDVIVAYRVDRLTRSTRHLQQLVHWAEDHKKLVVSATEAHFDTTTPFAAVVIALMGTVAQMELEAIKERNRSAAHFNIRAGKYRGSLPPWGYLPTRVDGEWRLVPDPVQRERILEVYHRVVDNHEPLHLVAHDLNRRGVLSPKDYFAQLQGREPQGRKWSATALKRSMISKAMLGYATLNGKTVRDDSGAPLVRAEPILTREQLEALRAELVKTSRAKPAVSTPSLLLRVLFCAVCGEPAYKFAGGGRKHPRYRCRSMGFPKHCGNGTVVMAEWDAFCEEQVLNLLGDAERLEKVWVAGSDSAVELAEVNAELVDLSSLIGSPAYRAGSPQREALDARIAALAARQEELEGLGARPSGWEWRETGQRFGDWWREQDTAAKNTWLRSMNVRLTFDVRGGLTRTIDFGDLQEYEQRLRLGSVVERLHTGMS

SEQ ID NO: 9665 - protein, 500 aa, synthetic construct
MRALVVIRLSRVTDATTSPERQLESCQQLCAQRGWDVAGVAEDLDVSGAVDPFDRKRRPNLARWLAFGEQPFDVIVAYRVDRLTRSVRHLQQLVHWAEDHKKLVVSATEAHFDTTTPFAAVVIALMGTVAQMELEAIRERNRSAAHFNIRAGKYRGSLPPWGYLPARVDGEWRLVPDPVQRGRILEVYHRVVDNHEPLHLVAHDLNRRGVLSPKDYFAQLQGREPQGRKWSATALKRSMTSEAMLGYATLNGKTVRDDDGAPLVRAEPILTRVQLEALRAELVKTSRAKPAVSTPSLLLRVLFCAVCGEPAYKFAGGGRKHPRYRCRSMGFPKHCGNGTVAMAEWDAFCEEQVLDLLGDAERLEKVWVAGSDSAVELAEVNAELVDLTSLIGSPAYRADSPQREALDARIAALAARQEELEGLGARPSGWGWRETGQRFGDWWREQDTAAKNTWLRSMNVRLTFDVRGGLTRTIDFGDLQEYEQHLRLGGVVERLHTGMS

SEQ ID NO: 9666 - protein, 500 aa, synthetic construct
MRALVVIRLSRVTDATTSPERQLESCQQLCAQRGWDVVGVAEDLDVSGAVDPFDRKRRPNLARWLAFEEQPFDVVVAYRVDRLTRSTRHLQQLVHWAEDHKKLVVSATEAHFDTTTPFAAVVIALMGTVAQMELEAIKERNRSAAHFNIRAGKYRGSLPPWGYLPTRVDGEWRLAPDPVQRERILEVYHRVVDNHEPLHLVAHDLNRRGVLSPKDYFAQLQGREPRGRKWSATALKRSMISEAMLGYATLNGKTVRDDDGAPLVRAEPILTREQLEALRAELVKASRAKPAVSTPSLLLRVLFCAVCGEPAYKFAGGGRKHPRYRCRSMGFPKHCGNGTVVMAEWDAFCEEQVLNLLGDVERLEKVWVAGSDSAVELAEVNAELVDLTSLIGSPAYRAGSPQREALDARIAALAARQEELKGLGARPSGWEWRETGQRFGDWWREQDTAAKNTWLRSMNVRLTFDVRGGLARTIDFGDLQEYEQHLRLGSVVERLHTGMS

SEQ ID NO: 9667 - protein, 500 aa, synthetic construct
MRALVAIRLSRVTDATTSPERQLESCQRLCAQRGWDVVGVAEDLDVSGAVDPFDRKRRPNLARWLAFEEQPFDAIVAYRVDRLSRSVRHLQQLVRWAEDHKKLVVSATEAHFDTTTPFAAVVIALMGTVAQMELEAIRERSRSAAHFNIRAGKYRGSLPPWGYLPTRVDGEWRLVPDPVQRERILEVYRRVVDNHEPLHLVAYDLNRRGVLSPKDYFAQLQGREPQGRKWSATALKRSMTSVAMLGYATLNGKTVRDDDGAPLVRAEPILTREQLEALRAELAKTSRAKPAVSTPSLLLRVLFCAVCGEPAYKFVGGGRKHPRYRCRSMGLPKHCGNGTVAMAEWDAFCEEQVLDLLGDAERLEKVWVAGSDSAVELAEVNAELVDLTSLIGSPAYRVGSPQREALDARIAALAARQEELEGLEARPSGWEWRGTGQRFGDWWREQDTAAKNTWLRSMNVRLTFDVRGGLTRAIDFGDLQEYERHLRLGSVVERLHTGMS

SEQ ID NO: 9668 - protein, 500 aa, synthetic construct
MRALVVIRLSRVTDATTSPERQLESCQQLCAQRGWDVVGVAEDLDVSGAVDPFDRKRRPNLARWLAFEEQPFDVIVAYRVDRLTRSTRHLQQLVHWAEDHKKLVVSATEAHFDTTTPFAAVVIALMGTVAQMELEAIKERNRSAAHFNIRAGKYRGSLPPWGYLPTRVDGEWRLAPDPVQRERILEVYHRVVDNHEPLHLVAHDLNRRGVLSPKDYFAQLQGREPQGRKWSATALKRSMTSEAMLGYATLNGKTVRGDDGTPLVRAEPILTREQLEALRAELVKTSRAKPAVSTPSLLLRVLFCAVCGEPAYKFAGGGRKYPRYRCRSMGFPKHCGNGTVAMAEWDAFCEEQVLDLLGDTERLEKVWVAGSDSAVELAEVNAELVDLTSSIGSPAYRAGSPQREALDARIAALAARQEELEGLEARPSGWEWRGTGQRFGDWWREQDTAAKNTWLRSMNVRLTFDVRGGLTRTIDFGDLQEYEQHLRLGSVVERLHPGMP

SEQ ID NO: 9669 - protein, 500 aa, synthetic construct
MRALVVIRLSRVTDATTSPERQLESCQQLCAQRGWDVVGVAEDLDVSGAVDPFDRKRRPSLARWLAFGEQPFDVIVAYRVDRLTRSTRHLQQLVRWAEDHKKLVVSATEAHFDTTTPFAAVVVALMGTVAQMELEAIKERIRSAAHFNIRAGKYRGSLPPWGYLPTRVDGEWRLAPDPVQRERILEVYHRVVDNHEPLHLVAYDLNRRGVLSPKDYFAQLRGREPQGRKWSATALKRSMVSVAMLGYATLNGKIVRDDDGAPLVRAEPILTREQQEALRAELAKTSRAKPAVSTPSLLLRVLFCAVCGEPAYKFVGGGRKHSRYRCRSMGFPKHCGNGTVVMTDWDTFCEEQVLDLLGDAERLEKVWVAGSDSAVELAEVNAELVDLTSLIGSPAYRAGSPQREALDARIAALAARQGELEGLEARPSGWEWRGTGQRFGDWWREQDTAAKNTWLRSMNVRLTFDVRGGLTRTIDFGDLQEYEQHLRSGSLVERLHAGMS

SEQ ID NO: 9670 - protein, 500 aa, synthetic construct
MRALVVIRLSRVTDATTSPERQLESCQQLCAQRGWDVVGVAEDLDVSGAVDPFDRKRRPNLARWLAFEEQPFDVIVAYRVDRLARSTRHLQQLVHWAEDHQKLVVSATEAHFDTTTPFAAVVIALMGTVAQMELEAIKERNRSAAHFNIRAGKYRGSLPPWGYLPTRVDGEWRLVPDPVQRERILEVYHRVVDNHEPLYLVAHDLNRRGVLSPKDYFAQLQGREPQGRKWSATALRRSMISEAMLGYATLNGKTVRDDDGAPLVRAEPILTREQLEALRAVLVKTSRAKPAVSTPSLLLRVLFCAVCGGPAYKFAGGGRKHPRYRCRSMGFPKHCGNGTVAMAEWDAFCEEQVLDLLGDAERLEKVWVAGSDSAVKLAEVNAELVDLTSLTGSPAYRAGSPQREALDARIAALAARQEELEGLGIRPSGWEWRETGQRFGDWWREQDTAAKNAWLRSMNVRLMFDVRGGLTRTIDFGDLQEYEQHLRLGSVVERLHTGMS

SEQ ID NO: 9671 - protein, 500 aa, synthetic construct
MRALVVIRLSRVTDATTSPERQLESCQQLCAQRGWDVVGVAEDLDVSGAVDPFDRKRRPNLARWLAFEEQPFDVIVAYRVDRLTRSVRHLQQLVHWAEDHKKLIVSATEAHFDTTTPFAAVVIALMGTVAQMELEAIKERIRSAVHFNIRAGKYRGSLPPWGYLPARVDGEWRLVPDPVQRERILEVYHRVVDNHEPLHLVAHDLNRRGVLSPKDYFAQLQGREPQGRKWSATALKRSMTSVAMLGYATLNGKTVRDDNGAPLVRAEPILTREQLEALRAELAKTSRAKPAVSTPSLLLRVLFCAVCGEPAYKFVGGGRKHPRYRCRSMGFPKHCGNGTVVMAEWDAFCEEQVLDLLGDAERLEKVWVAGSDSAVELAEVNAELVDLTSLIGSPAYRAGSPQREALDARIAALAARQEELEGLEARPSGWEWRETGQRFRDWWREQDTAAKNTWLRSMNVRLTFDVRGGLTRMIDFGDLQEYERYLRLGSVVERLHTGMS

SEQ ID NO: 9672 - protein, 500 aa, synthetic construct
MRALVVIRLSRVTDATTSPERQLESCQQLCAQRGWDVVGVAEDLDVSGAVDPFDRKRRPNLARWLAFEERPFDVIVAYRVDRLTRSTRHLQQLVHWAEDHKKLVVSATEAHFDTTTPFAAVVIALMGTVAQMELEAIKERNRSAAHFNIRAGKYRGSLPPWGYLPTRVDGEWRLVPDPVQRERILEVYHRVVDNHEPLHSVAHDLNRRGVLSPKDYFAQLQGREPQGRKWSATALKRSMISEAMLGYATLNGKTVRDDDGAPLVRAEPILTREQLGALRAELVKTSRAKPAVSTPSLLLRVLFCAVCGEPAYKLAGGGRKHPRYRCRSMGFPKHCGNGTVAMAEWDAFCEEQVLNLLGDAERLEKVWVAGSDSAVELAEVNAELVDLTSLIGSTAYRAGSPQREALDARIAALAARQEELEGLEARPSGWEWRETGQRFGDWWREQDTAAKNTWLRSMNVRLTFDVRGGLTRTIDFGGLQEYEQRLRLDSVVERLHTGMS

SEQ ID NO: 9673 - protein, 500 aa, synthetic construct
MRALVVIRLSRVTDATTSPERQLESCQQLCAQRGWDVVGVAEDLDVSGAVDPFDRKRRPNLARWLAFEEQPFDVIVAYRVDRLTRSTRHLQQLVHWAEDHKKLVVSATEAHFDTTTPFAAVVIALMGTVAQMELEAIKERIRSAVHFNIRAGKYRGSLPPWGYLPTRVDGEWRLVPDPVQRERILEVYHRVVDNHEPLHLVAHDLNRRGVLSPKDYFAQLQGREPQGRKWSATALKRSMISGAMLGYATLNGKIVRDDDGAPLVRAEPILTREQLEALRAELAKTSRAKPAVSTPSLLLRVLFCAVCGEPAYKFTGGGRKHPRYRCRSMGFPEHCGNGTVVMAEWDAFCEEQVLGLLGDAERLERVWVAGSDSVVELAEVNAELMDLTSLIGSPAYRVGSPQREALDARIAALAARQEELESLEARPAGWEWRETGQRFGDWWREQDTAAKNTWLRSMNVRLTFDVRGGLTRTIDFGDLQEYEQRLRSGSVVERLHTGMS

SEQ ID NO: 9674 - protein, 500 aa, synthetic construct
MRALVVIRLSRVTDATTSPERQLESCQQLCAQRGWDVVGVAEDLDVSGAVDPFDRRRRPNLARWLAFEEQPFDVIVAYRVDRLTRSTRHLQQLVHWAEDHKKLVVSATEAHFDTTTPFAAVVIALMGTVAQMELEAIRERNRSAAHFNIRAGKYRGSLPPWGYLPTRVDGEWRLVPDPVQRERILEVYRRVVDNHEPLHLVAHDLNRRGVLSPKDYFAQLRGREPQGRKWSATALKRSMISEAMLGYATLNGKTVRDDDGAPLVRAEPILTREQLEALRAVLVKASRAKPAVSTPSLLLRVLFCAVCGEPAYKFAGGGRKHPRYRCRSMGFPKHCGNGTVVMAEWDAFCEEQVLNLLGDAERLEKVWVAGSDSAVELAEVNAELVDLTSLIGSPAYRAGSPQREALDARIAALAARQEELKGLGARPSGWEWRETGQRFGDWWREQDTAAKNTWLRSMNVRLTFDVRGGLTRTVDFGDLQEYEQYLRLGSVVERLHTGMS

SEQ ID NO: 9675 - protein, 500 aa, synthetic construct
MRALVVIRLSRVTDATTSPVRQLESCQQLCAQRGWDIVGVAEDLDVSGAVDPFDRKRRPNLARWLAFEEQPFDAIVAYRVDRLTRSTRHLQQLVHWAEDHKKLVVSATEAHFDTTTPFAAVVIALMGTVAQMELEAIKERSRSAAHFNIRAGKYRGSLPPWGYLPTRVDGEWRLAPDPVQRERILEVYHRVVDNHEPLHLVAHDLNRRGVLSPKDYFAQLQGREPQGRKWSATALRRSMTSEAMLGYATLNGKTVRDDDGAPLVRAEPILTREQLGALRAELVKTSRAKPAVSTPSLLLRVLFCAVCGEPAYKFVGGGRKHPRYRCRSMGFPEHCGNGTVVMAEWDAFCEEQVLSLLGDVERLEKVWVAGSDSVVELAEVSAELVDLTSLIGSPAYRAGSPQREALDARIAALAARQVELEGLEARPSGWEWRETGQRFGDWWREQDTAAKNTWLRSMNVRLTFDVRGGLTRTIDFGDLQEYEQHLRLGSVVERLHTGMS

SEQ ID NO: 9676 - protein, 500 aa, synthetic construct
MRALIVIRLSRVTDATTSPERQLESCQQLCAQRGWDVIGVAEDLDVSGAVDPFDRKRRPNLARWLAFEEQPFDAIVAYRVDRLTRSVRHLQQLVHWAEDHKKLVVSATEAHFDTTTPFAAVVIALMGTVAQMELEAIKERNRSAAHFNIRAGKYRGSLPPWGYLPTRVDGEWRLAPDPVQRERILEVYHRVVDNHEPLHLVAHDLNRRGVLSPKDYFAQLQGREPQGRKWSATALKRSMTSEAMLGYATLNGKTVRDDDGAPLVRAEPILAREQLEALRAVLVKTSRAKPAVSTPSLLLRVLFCAVCGEPAYKFAGGGRKHPRYRCRSMGFPKHCGNGTVAMAEWDAFCEEQVLDLLGDAERLEKVWVAGSDSAVELAEVNAELVDLTSLIGSPAYRAGSPQREALDARIAALAARQEELEGLEARPSGWEWRGTGQRFGDWWREQDIAAKNTWLRSMNVRLTFDARGGLTRTIDFGDLQEYEQHLRLGSVVERLHTGMS

SEQ ID NO: 9677 - protein, 500 aa, synthetic construct
MRALVVIRLSRVTDATTSPKRQLESCQQLCAQRGWDVVGVAEDLDVSGAVDPFDRKRRPNLARWLAFEEQPFDVIVAYRVDRLTRSARHLQQLVRWAEDHKKLVVSATEAHFDTTTPFAAVVIALMGTVAQMELEAIKERIRSAVHFNIRAGKYRGSLPPWGYLPTRMDGEWRLVPDPVQRERILEVYHRVVDNHESLHLVAHDLNRRGVLSPKDYFAQLQGREPRGRKWSATALKRSMTSVAMLGYATLNGKIVRDDDGAPLVRAEPILTREQQEALRAELAKTSRAKPAVSTPSLLLRVLFCAVCGEPAYKFVGGGRKHPRYRCRSMGFPKHCGNGTVVMAEWDAFCEEQVLGLLGDAERLEKVWVAGSDSAVELAEVNAELVDLTSLIGSPAYRAGSPQREALGARIAALAARQEELEGLEARPPGWEWRETGQRLGDWWREQDTAAKNTWLRSMNVRLTFDVRGGLTRTIDFGDLQVYERHLRLGSVAERLHTGTS

SEQ ID NO: 9678 - protein, 500 aa, synthetic construct
MRALVVIRLSRVTEATTSPERQLESCQQLCAQRGWDVVGVAEDLDVSGAVDPFDRKRRPNLARWLAFEEQPFDVIVAYRVDRLTRSTRHLQQLVRWAEDHKKLVVSATEAHFDTTTPFAAVVIALMGTVAQMELEAIKERIRSAAHFNIRAGKYRGSLPPWGYLPTRVDGEWRLVPDPVQRERILEVYHRVVDNHEPLHLVAHDLNRRGVLSPKDYFAQLRGREPRGRRWSATALKRSMTSVAMLGYATLNGKTVRDDDGAPLVRAEPILTREQLEALRTELVRTSRAKPAVSTPSLLLRVLFCAVCGEPAYKFAGGGRKHPRYRCRSMGFPKHCGNGTVVMTEWDAFCEEQVLNLLGDAERLERVWVAGSDSAVELAEVNAELVDLTSLIGSPAYRAGSPQREALDARIAALAARQEELEGLEARPSGWEWRGTGQRLGDWWREQDTAAKNTWLRSMNVRLTFDVRGGLTRTIDFGDLQEYEQHSRSGSVVERLHTRMS

SEQ ID NO: 9679 - protein, 500 aa, synthetic construct
MRALVVIRLSRVTDATTSPERQLESCQQLCAQRGWDVVGVAEDLDVSGAVDPFDRKRRPNLARWLAFEEQPFDVIVAYRVDRLTRSTRHLQQLVHWAEDHKKLVVSATEAHFDTTTPFAAVVIALMGTVAQMELEAIKERNRSAAHFNIRAGKYRGSLPPWGYLPTRVDGEWRLVPDPVQRERILEVYHRVVDNHEPLHLVAHDLNRRGVLSPKDYFAQLRGREPQGRKWSATALKRSMTSGAMLGYATLNGKTVRDDDGAPLVRAEPILTREQLEALRAELVKTSRAKPAVSTPSLLLRVLFCAVCGEPAYKSAGGGRKHPRYRCRSMGFPKHCGNGTVVMAEWDAFCEEQVLNLLGDAERLEKVWVAGSDSAVELAEVNAELVDLTSLIGSPAYRAGSPQRGALDARIAALAARQEELEGLEARPSGWEWRETGQRFGDWWREQDTAAKNTWLRSMNVRLTFDVRGGLTRTIDFGDLQEYEQHLRLGSVVERLHAGTS

SEQ ID NO: 9680 - protein, 500 aa, synthetic construct
MRALVVIRLSRATDATTSPERQLESCQQLCAQRGWDVVGVAEDLDVSGAVDPFDRKRRPNLARWLAFEEQPFDAIVAYRVDRLARSARHLQQLVHWAEDHKKLVVSATEAHFDTTTPFAAVVIALMGTVAQMELEAIKERNRSAAHFNIRAGKYRGSLPPWGYLPTRVDGEWRLVPDPVQRERILEVYHRVVDDHEPLHLVAHDLNRRGVLSPKDYFAQLQGREPQGRKWSATALKRSMISEAMLGYVTLNGKTVRGDDGAPLVRAEPILTREQLEALRAELVKTSRAKPAVSTPSLLLRVLFCAVCGEPAYKFAGGGRKHPRYRCRSMGFPKHCGNGTVAMAEWDAFCEEQVLDLLGDAERLEKVWVAGSDSAVELAEVNAELVDLTSLIGSPAYRAGSPQREALDARIAALAVRQEELEGLEARPSGWEWRETGQRFGDWWREQDTAAKNTWLRSMNVRLTFDVRGGLTRTIDFGDLQEYEQYLRLGGVVERLHTGMS

SEQ ID NO: 9681 - protein, 500 aa, synthetic construct
MRALVVIRLSRVTDATTSPERQLESCRQLCAQRGWDVVGVAEDLDVSGAVDPFDRKRRPNLARWLAFEEQPFDVIVAYRVDRLARSTRHLQQLVHWAEDHKKLVVSATEAHFDTTTQFAAVVIALMGTVAQMELEAIKERNRSAAHFNIRAGKYRGSLPPWGYLPTRVDGEWRLVPDPVQRERILEVYRRVVDNHEPLHLVAHDLNRRGVLSPKDYFAQLQGREPQGRKWSATALKRSMTSEAMLGYATLNGKTVRDDDGAPLVRAEPILTREQLEALRAELVKTSRAKPAVSTPSLLLRVLFCAVCGEPAYKFAGGGRKHPRYRCRSMGFPKHCGNGTVVMAEWDAFCEEQVLDLLGDAERLEKVWVTGSDSAVELAEVNAELVDLTSLIGSPAYRAGSPQREALDARIAALAARQEELEGLEARPSGWEWRETGQRFGDWWREQDTAAKNTWLRSMNVRLTFDVRGGLTRTIDFGDLQEYEQHLRLGGVAERLHTGMS

SEQ ID NO: 9682 - protein, 500 aa, synthetic construct
MRALVVIRLSRVTDATTSPERQLESCQQLCAQRGWDVVGVAEDLDVSGAVDPFDRKRRPNLARWLAFEEQPFDVIVAYRVDRLTRSTRHLQQLVRWAEDHKKLVVSATEAHFDTTTPFAAVVIALMGTVAQMELEAIKERIRSAVRFNIRAGKYRGSLPPWGYLPTRVDGEWRLVPDPVQRERILEVYHRVVDNHEPLHLVAHDLNRRGVLSPKDYFAQLQGREPQGREWSATALKRSMTSEAMLGYATLNGKTVRDDDGTPLVRAEPILTREQQEALRAELAKTSRAKPAVSTPSLLLRVLFCAVCGEPAYKFVGGGRKHPRYRCRSIGFPEHCGNGTVVMAEWDAFCEEQVLDLLGDAERPEKVWVAGSDSAVELAEVNAELVDLTSLIGSPAYRAGSPQREALDARIAALAARQEELEGLEARPSGWEWRETGQRFRDWWREQDTAAKNTWLRSMNVRLTFDVRGGLTRTIDFGELQVYGQHTRLGSVAERLHSGMS

SEQ ID NO: 9683 - protein, 500 aa, synthetic construct
MRALVVIRLSRVTDATTSPERQLESCQQLCAQRGWDVVGVAEDLDVSGAVDPFDRKRRPNLARWLAFEEQPFDVIVAYRVDRLTRSTRHLQQLVHWAEDHKKLVVSATEAHFDTTTPFAAVVIALMGTVAQMELQAIKERNRSAAHFNIRAGKYRGSLPPWGYLPTRVDGEWRLAPDPVQRERILEVYHRVVDNHEPLHLVAHDLNRRGVLSPKDYFAQLQGREPQGRKWSATALKRSMISEAMLGYATLNGKTVRDDDGAPLVRAEPILTREQLEALRAELVKTSRAKPAVTTPSLLLRVLFCAVCGEPAYKFAGGGRKHPRYRCRSMGFPNHCGNGTVVMAEWDAFCEEQVLDLLGDAEHLEKVWVAGSDSAVELAEVNAELVDLTSLIGSPAYRAGSPQREALDARIAALAARQEELEGLEARPSGWEWRGTGRRFGDWWREQDTAAKNTWLRSMNVRLTFDVRGGLTRTIDFGVLQGYEQHLRLGSVVERLHAGMS

SEQ ID NO: 9684 - protein, 500 aa, synthetic construct
MRALVVIRLSRVTDATTSPERQLESCQQLCAQRGWDVVGVAEDLDVSGAVDPFDRKRRPNLARWLAFEEQPFDAIVAYRVDRLTRSVRHLQQLVHWAEDHKKLVVSATEAHFDTTTPFAAVVIALMGTVAQMELEAIKERIRSAAHFNIRAGKYRGSLPPWGYLPTRVDGEWRLVPDPVQRERILEVYHRVVDNHEPLYLVAHDLNRRGVLSPKDYFAQLRGREPQGREWSATALKRSMTSVAMLGYATLNGKIVRDDDGAPLVRAEPILTREQLEALRAELVKTSRAKPAVSTPSLLLRVLFCAVCGEPAYKFVGGGRKHPRYRCRSMGSPKHCGNGTVVTAEWDAFCEEQVLNLLGDAERLEKVWVAGSDSAVELAEVNAELADLTSLIGSPAYRVGSPQREALDARIAALAARQEELEGLEPRPSGWEWRGTGQRFGDWWREQDTAAKNTWLRSMNVRLTFDVRGGLTRTIDFGDLQEYERHLRLGSVAERLRTGMS

SEQ ID NO: 9685 - protein, 500 aa, synthetic construct
MRALVVIRLSRVTDATTSPERQLESCQQLCAQRGWDVVGVAEDLDVSGAVDPFDRKRRPNLARWLAFEEQPFDVIVAYRVDRLTRSVRHLQQLVHWAEDHKKLVVSATEAHFDTTTPFAAVVIALMGTVAQMELEAIKERNRSAAHFNIRAGKYRGSLPPWGYLPTRVDGEWRLVPDPVQRERILEVYRRVVDNHEPLHLVAHDLNRRGVLSPKDYFAQLQGREPQGRKWSATALKRSMISEAMLGYATLNGKTVRDDDGAPLVRAEPILTRVQLEALRAELAKTSRAKPAVSTPSLLLRVLFCAVCGEPAYKFAGGGRKHPRYRCRSMGFPKHCGNGTVVMAEWDAFCEEQVLNLLGDAERLEKVWVAGSDSAVELAEVNAELVDLTSLIGSPAYRAGSPQREALDARIAALAARQEELEGLEARPSGWEWRGTGQRFEDWWREQDTAAKNTWLRSMNVRLTFDVRGGLTRTIDFGGLQEYEQHLRLGSVVERLHTGMS

SEQ ID NO: 9686 - protein, 500 aa, synthetic construct
MRALVVIRLSRATDATTSPERQLESCQQLCAQRGWDVVGVAEDLDVSGAVDPFDRKRRPNLARWLAFEEQPFDVIVAYRVDRLTRSTRHLQQLVHWAEDHKKLVVSATEAHFDTTTPFAAVVIALMGTVAQMELEAIKERNRSAAHFNIRAGKYRGSLPPWGYLPTRVDGEWRLVPDPVQRERILEVYHRVVDSHEPLHLVAHDLNRRGVLSPKDYFAQLQGREPQGRKWSATALKRSMISEAMLGHATLNGKTVRDDDGAPLVRAEPILTREQLEALRAVLVKTSRAKPAVSTPSLLLRVLFCAVCGEPAYKFAGGGRKHPRYRCRSMGFPKHCGNGTVAMAEWDVFCEEQVLDLLGDAERLEKVWVTGSDSAVELAEVNAELVDLTSLIGSPAYRAGSPQREALDARIAALAARQEELEGLGARPSGWEWRETGQRFGDWWREQDTAAKNTWLRSMNVRLTFDVRGGLTRTIDFGDLQEYEQHLRLGGVVERLHTGMS

SEQ ID NO: 9687 - protein, 500 aa, synthetic construct
MRALVVIRLSRVTDATTSPERQLESCQQLCAQRGWDVVGVAEDLDVSGAVDPFDRKRRPNLARWLAFEEQPFDVIVAYRVDRLTRSTRHLQQLVHWAEDHKKLVVSATEAHFDTTTPFAAVVIALMGTVAQMELEAIKERIRSAVHFNIRAGKYRGSLPPWGYLPTRVDGEWRLVPDPVQRERILEVYHRVVDNHEPLHLVAHDLNRRGVLSPKDYFAQLQGREPQGRKWSATALKRSMISVAMLGYATLNGKIVRDDDGAPLVRAEPILTREQQEALRAELAKTSRAKPAVSTPSLLLRVLFCAVCGEPAYKFVGGGRKRPRYRCRSMGFPEHCGNGTVVMAEWDAFCEEQVLGLLGDAERLEKVWVAGSDSSAELAEVNAELVDLTSLIGSPAYRAGSPQREALDARIAALAARQGELEGLEARPSGWEWRETGQRFGDWWREQDTAAKNTWLRSMNVRLTFDVRGGLTRTIDFGDLQEYERHLRLGSVAERLRTGMS

SEQ ID NO: 9688 - protein, 500 aa, synthetic construct
MRALVVIRLSRVTDATTSPERQLESCQQLCAQRGWDVVGVAEDLDVSGAVDPFDRKRRPNLARWLAFEEQPFDVIVAYRVDRLTRSTRHLQQLVRWAEDHKKLVVSATEAHFDTTTPFAAVVIALMGTVAQMELEAIKERIRSAVHFNIRAGKYRGSLPPWGYLPTRVDGEWRLVPDPVQRERILEVYHRVVDNHEPLHLVAHDLNRRGVLSPKDYFAQLQGREPQGRKWSATALKRSMISVAMLGHATLNGKIVRDDDGAPLVRAEPILTREQQEALRAELAKTSRAKPAVSTPSLLLRVLFCAVCGEPAYKFVGGGRKHPRYRCRSMGFPEHCGNGTVVMAEWDAFCEEQVLGLLGDAERLEKVWVAGSDSAVELAEVNAELVDLMSLIGSPAYRAGSPQREALDARIAALAARQEELEGLEARPSGWEWRGTGQRFGDWWRKQDTAAKNTWLRSMNVRLTFDVRGGLTRTIDFGDLQEYVQHLRSGGVVERLHTGVS

SEQ ID NO: 9689 - protein, 500 aa, synthetic construct
MRALVVIRLSRVTDATTSPERQLESCQQLCAQRGWDVVGVAEDLDVSGAVDPFDRKRRPNLARWLAFEEQPFDAIVAYRVDRLTRSVRHLQQLVHWAEDHKKLVVSATEAHFDTTTPFAAVVIALMGTVAQLELEAIKERIRSAAHFNIRAGKYRGSLPPWGYLPTRVDGEWRLVPDPVQRERILEVYHRVVDNHEPLHLVAYDLNRRGVLSPKDYFAQLRGREPRGRKWSATALKRSMTSVAMLGYATLNGKTVRDDDGAPLVRAEPILTREQQEVLRAELAKTSRAKPAVSTPSLLLRVLFCAVCGEPAYKFVGGGRKHPRYRCRSMVFPKHCGNGTVVMAEWDAFCEEQVLNLLGDVERLEKVWVAGSDSAVELAEVNAELVDLTSLIGSPAYRAGSPQREALDARIAALAARQEELESLEARPSGWEWRATGQRFGDWWREQDTAAKNTWLRSMNVRLTFDVRGGLTRTIDFGDLQEYERHLRLGSVAERLRTGMS

SEQ ID NO: 9690 - protein, 500 aa, synthetic construct
MRALVVIRLSRVTDATTSPERQLESCQQLCAQRGWDVVGVAEDLDVSGAVDPFDRKRRPNLARWLAFEEQPFDVIVVYRVDRLTRSTRHLQQLVHWAEDHKKLVVSATEAHFDMTTPFAAVVIALMGTVAQMELEAIKERNRSAAHFNIRAGKYRGSLPPWGYLPTRVDGEWRLVPDPVQRERILEVYHRVVDNHEPLHLVAHDLNRRGVLSPKDYFAQLQGREPQGRKWSATALKRSMISEAMLGYATLNGKTVRDDDGAPLVRAEPILTREQLEALRAELVKTSRVKPAVSTPSLLLRVLFCAVCGEPAYKFAGGGRKHPRYRCRSMGFPKHCGNGTVAMAEWDAFCEEQVLDLLGDAEHLEKVWVAGSDSAVELAEVNAELVDLTSLIGSPAYRAGSPQREALDARIAALAARQEELEGLEARPSGWEWRESGQRFGDWWREQDTAAKNTWLRSMNVRLTFDARGGLTRTIDFGDLHEYEQHLRLGSVVEHLHTGMS

SEQ ID NO: 9691 - protein, 500 aa, synthetic construct
MRALVVIRLSRVTDTTTSPERQLESCQQLCAQRGWDVVGVAEDLDVSGAVDPFDRKRRPNLARWLAFEEQPFDVIVAYRVDRLTRTIRHLQQLVHWAEDHKKLVVSATEAHFDTTTPFAAVVIALMGTVAQMELEAIKERNRSAAHFNIRAGKYRGSLPPWGYLPTRVDGEWRLVPDPVQRERILEVYHRVVDNHEPLHLVAHDLNRRGFLSPKDYFAQLQGREPQGRKWSATALKRSMISEAMLGYATLNGKTVRDDDGAPLVRAEPILTREQLGALRAELVKTSRAKPAVSTPSLLLRVLFCAVCGEPAYKFAGGGRKHPRYRCRSMGFPKHCGNGTVVMAEWDAFCEEQVLDLLGDAERLEKVWVAGSDSAVELAEVNAELVDLTSLIGSPAYRADSPQREALDARIAALAARQEELEGLGARPSGWEWRETGQRFGDWWREQDTAAKNTWLRSMNVRLTFDIRGGLTRTIDFGDLQEYEQHLRLGSEVERLHTGMS

SEQ ID NO: 9692 - protein, 500 aa, synthetic construct
MRALVVIRLSRVTDATTSPGRQLESCQQLCAQRGWDVVGVAEDLDVSGAVDPFDRKRRPNLARWLAFEEQPFDVIVAYRVDRLTRSTRHLQQLVHWAEDHKKLVVSATEAHFDTTTPFAAVVIALMGTVAQMELEAIKERNRSAAHFNIRAGKYRGSLPPWGYLPTRVDGEWRLVPDPVQRERILEVYHRVVDNHEPLHLVAHDLNRRGVLSPKDYFAQLRGREPQGREWSATALKRSMTSEAMLGYATLNGKTVRDDDGAPLVRAEPILTRGQLEALRAELVKTSRAKPAVSTPSLLLRVLFCAVCGEPAYKSAGGGRKYPRYRCRSMGFPKHCGNGTVVMAEWDAFCEEQVLNLLGDAERLEKVRVAGSDSAVELAEVNAELVDLTSLIGSPAYRAGSPQREALDARIAALAARQEELEGLGARPSGWVWRETGQRFGDWWREQDTAAKNTWLRSMNVRLTFDVRGGLTRTIDFGDLQEYEQHLRLGSVVERLRTGMS

SEQ ID NO: 9693 - protein, 500 aa, synthetic construct
MRALVVIRLSRVTEATTSPERQLESCQQLCAQRGWNVVGVAEDLDVSGAVDPFDRKRRPNLARWLAFEEQPFDVIVAYRVDRLTRSTRHLQQLVHWAEDHKKLVVSATEAHFDTTTPFAAVIIALMGTVAQMELEAIKERIRSAVHFNIRAGKYRGSLPPWGYLPTRVDGEWRLEPDPVQRERILEVYHRVVDNHEPLHLVAHDLNRRGVLSPKDYFAQLQGREPQGRKWSATALKRSMTSVAMLGYATLNGKIVRDDDGAPLVRAEPILTREQQEALRAELAKTSRAKPAVSTPSLLLRVLFCAVCGEPAYKLVGGGRKHPRYRCRSMGFPEHCGNGTVVMAEWDAFCEEQVLDLLGDAERLEKVWVAGSDSAVELAEVNAELVDLTSLIGSPAYRAGSPQREALDARIAALVARQEELEGLEARPSGWEWRETGQRFGDWWREQDTAAKNTWLRSMNVRLTFDVRDGLTRTIDFGDLQEYEQHLRLGSVVERLHTGMS

SEQ ID NO: 9694 - protein, 500 aa, synthetic construct
MRALVVIRLSRVTDATTSPERQLESCQQLCAQRGWNVVGVAEDLDVSGAVDPFDRKRRPNLARWLAFEEQPFDVIVAYRVDRLTRSTRHLQQLVHWAEDHKKLVVSATEAHFDTTTPFAAVVIALMGTVAQMELEAIKERSRSAAHFNIRAGKYRGSLPPWGYLPTRVDGEWRLVPDPVQRERILEVYHRVVDNHEPLHLVAHDLNRRGILSPKDYFAQLQGREPQGRKWSATALKRSMISVAMLGYATLNGKIVRDDDGAPLVRAEPILTREQQEALRAELAKTSRAKPAVSTPSLLLRVLFCAVCGEPAYKFVGGGRKHPRYRCRSMGFPEHCGNGTVVMAEWDAFCEEQVLDLLGDAERLEKVWVAGSDSAVELAEVNAELVDLTSLIGSPAYRAGSPQREALDARIAALAARQEELEGLEARPSGWGWRETRQRFGDWWREQDTAAKNTWLRSMSVRLTFDVRGGLTRTIDFGDLQEYGQHLRLSSVVERLHTGMS

SEQ ID NO: 9695 - protein, 500 aa, synthetic construct
MRALVVIRLSRVTDATTSPERQLESCQQLCTQRGWDVVGVAEDLDVSGAVDPFDRKRRPNLARWLAFEEQPFDVIVAYRVDRLTRSTRHLQQLVHWAGDHKKLVVSATEAHFDTTTPFAAVVIALMGTVAQMELEAIKERIRSAVHFNIRAGKYRGSLPPWGYLPTRVDGEWRLVPDPVQRERILEVYHRVVDNHEPLHLVAYDLNRRGVLSPKDYFAQLRGREPQGRKWSATALKRSMISKAMLGYATLNGKIVRDDDGAPLVRAEPILTREQQEALRAELVRTSRAKPAVSTPSLLLRVLFCAVCGEPAYKFVGGGRKHPRYRCRSMGFPKHCGNGTVVMAEWDAFCEEQVLDLLGDAERLEKVWVAGSDSAVELAEVNAELVDLTSLVGSPAYRAGSPQRDALDARIAALAARQEELEGLEARPPGWEWRRTGQRLGDWWREQDTAAKNTWLRSMNVRLTFDVRGGLTRTIDFGDLQEYVQHLRLGSVVERLHAGMS

SEQ ID NO: 9696 - protein, 500 aa, synthetic construct
MRALVVIRLSRVTDATTSPERQLESCQQLCAQRGWDVVGVAEDLDVSGAVDPFDRKRRPNLARWLAFEEQPFDAIVAYRVDRLARSIRHLQQLVHWAEDHKKLVVSATEAHFDTTTPFAAVVIALMGTVAQMELEAIKERNRSAAHFNIRAGKYRGSLPPWGYLPTRVDGEWRLAPDPVQRERILEVYHRVVDNHEPLHLVAHDLNRRGVLSPKDYFAQLRGREPQGREWSATALKRSMTSEAMLGYATLNGKTVRDDDGAPLVRAEPILTREQLEALRAELVKTSRAKPAVSTPSLLLRVLFCAVCGEPAYKFAGGGRKHPRYRCRSMGFPKHCGNGTVVMAEWDAFCEEQVLDLLGDAERLEKVWVAGSDSAVELAEVNAELADLTSLIGSPAYRAGSPQREVLDARIAALAARQEELEGLEARPSGWEWRETGQRFGDWWREQDTAAKNTWLRSMNVRLTFDARDGLTRTINFGDLQEYEQHLRLGSVVERLHTGMS

SEQ ID NO: 9697 - protein, 500 aa, synthetic construct
MRALVVIRLSRVTDATTSPGRQLESCQQLCAQRGWDVVGVAEDLDVSGAVDPFDRKRRPNLARWLAFEEQPFDVIVAYRVDRLTRSTRYLQQLVHWAEDHKKLVVSATEAHFDTTTPFAAVVIALMGTVAQMELEAIKERNRSAAHFNIRAGKYRGSLPPWGYLPTRVDGEWRLVPDPVQRERILEVYRRVVDNHEPLHLVAHDLNRRGVLSPKDYFAQLQGREPQGRKWSATALKRSMISEAMLGYATLNGKTVRDDDGAPLVRAEPILTRVQLEALRAELAKTSRAKPAVSTPSLLLRVLFCAVCGEPAYKFAGGGRKHPRYRCRSMGFPKHCGNGTVAMAEWDAFCEKQVLDLLGDAERLEKVWVAGSDSAVELAEVSAELVDLTSLIGSPAYRAGSPQRGALDVRIAALAARQEELEGLGARPSGWEWRGTGQRFGDWWRAQDTAAKNTWLRSMNVRLTFDARGGLTRTIDFGDLQEYEQHLRLGSVVERLHTGMS

SEQ ID NO: 9698 - protein, 500 aa, synthetic construct
MRALVVIRLSRVTEATTSPERQLESCQQLCAQRGWDVVGVAEDLDVSGAVDPFDRKRRPNLARWLAFEEQPFDVIVAYRVDRLTRSTRHLQQLVHWAEDHKKLVVSATEAHFDTTTPFAAVVIALMGTVAQMELEAIKERIRSAVHFNIRAGKYRGSLPPWGYLPTRVDGEWRLVPDPVQRERILEVYHRVVDNHEPLHLVAHDLNRRGVLSPKDYFAQLQGREPRGRKWSATALKRSMTSVAMLGYATLNGKTVRDDDGAPLVRAEPILTHEQLEALRAELVKTSRAKPAVSTPSLLLRVLFCAVCGEPAYKFVGGGRKHPRYRCRSMGFPKHCGNGTVVMAEWDAFCEEQVLNLLGDAERLEKVWVAGSDSSVELAEVNAELVDLMSLIGSPAYRAGSPQREALDARIAALAARQEELEGLEARPSGWEWRETGQRFGDWWREQDTAAKNTWLRSMNVRLTFDVRGGLTRTIDFGDLQEYEQHLRSGSVVERLHTGMS

SEQ ID NO: 9699 - protein, 500 aa, synthetic construct
MRALVVIRLSRVTDATTSPERQLESCQQLCAQRGWDVVGVAEDLDVSGAVDPFDRKRRPNLARWLAFEEQPFDVIVAYRVDRLTRSVRHLQELVHWAEDHKKLVVSATEAHFDTTTPFAAVVIALMGTVAQMELEAIKERNRSAAHFNIRAGKYRGSLPPWGYLPTRVDGEWRLVPDPVQRERILEVYRRVVDNHEPLHLVAHDLNRRGVLSPKDYFAQLQGREPQGRKWSATALKRSMTSVAMLGYATLNGKTVRDDDGAPLVRAEPILTREQLGALRAELVKTSRAKPAVSTPSLLLRVLFCAVCGEPAYKFAGGGRKHPRYRCRSMGFPKHCGNGTVAMAEWDAFCEEQVLDLLGDAERLEKVWVAGSDSAVELAEVNAELVDLTSLIGSPAYRAGSQQRGALDARIAALAARQEELEGLEARPSGWEWRETGQRFGDWWREQDTAAKNTWLRSMNVRLTFDVRGGLTRTIDFGDLQEYEQHLRSGSVVERLRAGMS

SEQ ID NO: 9700 - protein, 500 aa, synthetic construct
MRALVVIRLSRVTDATTSPERQLESCQQLCAQRGWNVVGVAEDLDVSGAVDPFDRKRRPNLARWLAFEEQPFDVIVAYRVDRLTRSTRHLQQLVRWAEDHKKLVVSATEAHFDTTTPFAAVVVALMGTVAQMELEAIKERIRSAVHFNIRAGKYRGSLPPWGYLPTRVDGEWRLVPDPVQRERILEVYHRVVDNHEPLHLVAHDLNRRGVLSPKDYFAQLRGREPRGRKWSATALKRSMISVTMLGYATLNGKTVRDGDGAPLVRAEPILTREQQEALRAELAKTSRAKPAVSTPSLLLRVLFCAVCGEPAYKFVGGGRKHPRYRCRSMGFPKHCGNGTVVMAEWDAFCEEQVLDLLGDAERLEKVWLAGSDSAAELAEVNAELVDLTSLIGSPAYRAGSPQREALDARIAALAARQEELEGLEARPSGWEWRGTGQRFGDWWREQDTAAKNTWLRSMNVRLTFDVRGGLTRTIDFGDLQEYEQHLRLGSAVERLHTGMP

SEQ ID NO: 9701 - protein, 500 aa, synthetic construct
MRALVVIRLSRVTDATTSPERQLESCQQLCAQRGWDVVGVAEDLDVSGAVDPFDRKRRPNLARWLAFEEQPFDAIVAYRVDRLTRSVRHLQQLVHWAEDHKKLVVSATEAHFDTTTPFAAVVIALMGTVAQMELEAIKERNRSAAHFNIRAGKYRGSLPPWGYLPTRVDGEWRLVPDPVQRERILEVYHRVVVNHEPLHLVAHDLNRRGVLSPKDYFAQLQGREPQGRKWSATALKRSMISEAMLGYAILNGKTVRDDDGAPLVRAEPILTREQLEALRAELVKTSRAKPAVSTPSLLLRVLFCAVCGEPAYKFAGGGRKHPRYRCRSMGFPKHCGNGTVVMAEWDAFCEEQVLNLLGDAERLEKVWVAGSDSAVELAEVNAELVDLTSSIGSPAYRAGSPQREALDARIAALAARQEELEGLEARPSGWEWRGTGQRFGDWWREQDTAAKNTWLRSMNVRLTFDVRGGLTRTIDFGDLQEYEQHLRLGSVVERLHTGMS

SEQ ID NO: 9702 - protein, 500 aa, synthetic construct
MRALIVIRLSRVTDATTSPERQLESCQQLCAQRGWDVVGVAEDLDVSGAVDPFDRKRRPNLARWLAFEEQPFDVIVAYRVDRLTRSTRHLQQLVRWAEDHKKLVVSSTEAHFDTTTPFAAVVIALMGTVAQMELEAIKERIRSAAHFNIRAGKYRGSLPPWGYLPTRVDGEWRLVPDPVQRERILEVYHRVVDNHEPLHLVAHDLNRRGVLSPKDYFAQLRGREPQGRKWSATALKRSMISGAMLGYATLNGKTVRDDDGTPLVRAEPILTREQLEALRAELVRTSRAKPAVSTPSLLLRVLFCAVCGEPAYKFVGGGRKHPRYRCRSMGFPEHCGNGTVVMAEWDAFCEEQVLNLLGDAERLEKVWVAGSDSAVELAEVNAELVDLTSLIGSPAYRVGSPQREALDARIAALAARQEELEGLEARPSGWEWRETGQRFGDWWREQDTAAKNTWLRSMNVRLTFDVRGGLTRTIDFGDLQEYEQHLRLGSVVERLHTGMS

SEQ ID NO: 9703 - protein, 500 aa, synthetic construct
MRVLVVIRLSRVTDATTSPERQLESCQQLCAQRGWDVVGVAEDLDVSGAVDPFDRKRRPNLARWLAFEEQPFDVIVAYRVDRLTRSTRYLQQLVHWAEDHKKLVVSATEAHFDTTTPFAAVVIALMGTVAQMELEAIKERNRSAAHFNIRAGKYRGSLPPWGYLPTRVDGEWRLVPDPVQRERILEVYHRVVDNHEPLHLVAHDLNRHGVLSPKDYFAQLQGREPQGRKWSATALKRSMISEAMLGYATLNGKIVRDDDGAPLVRAEPILTRWQLEALRAELVKTSRAKPAVSTPSLLLRVLFCAVCGEPAYKLAGGGRKHPRYRCRSMGFPKHCGNGTVAMAEWDAFCEEQVLNLLGDAKRLEKVWVAGSDSAVELAEVNAELVDLTSLIGSPAYRAGSPQREALDARIAALAARQEELEDLEARPSGWEWRETGQRFGDWWREQDTAAKNTWLRSMNVRLTFDVRGGLTRTIDFGVLQEYEQHLRLGSVVERLHTGMS

SEQ ID NO: 9704 - protein, 500 aa, synthetic construct
MRALVVIRLSRVTDATTSPERQLESCHQLCAQRGWDVVGVAEDLGVSGAVDPFDRKRRPNLARWLAFEEQPFDVIVAYRVDRLTRSIRHLQQLVHWAEDHKKLVVSATEAHFDTTTPFAAVVIALMGTVAQMELEAIKERNRSAVHFNIRAGKYRGSLPPWGYLPTRVDGEWRLVPDPVQRERILEVYHRVVNNHEPLHLVAHDLNRRGVLSPKDYFAQLRGREPQGRKWSATALKRSMISEAMLGYATLNGKTVRDDNGAPLVRAEPILTREQLEALRAELVKTSRAKPAVSTPSLLLRVLFCAVCGEPAYKFAGGGRKHPRYRCRSMGFPKHCGNGTVAMAEWDAFCEEQVLNLLGDAERLEKVWVAGSDSAVELAEVNAELVDLTSLIGSPAYRAGSPQREALDARIAALAARQEELEGLEARPSGWEWRGTGQRFGDWWREQDTAAKNTWLRSMNVRLTFDVRGGLTRTIDFGDLQEYEQHLRLGSVVERLHTGMS

SEQ ID NO: 9705 - protein, 500 aa, synthetic construct
MRALVVVRLSRVTDTTTSPERQLESCQQLCAQRGWDVVGVAEDLDVSGAVDPFDRKRRPNLARWLAFEEQPFDAIVAYRVDRLTRSVRYLQQLVHWAEDHKKLVVSATEAHFDTTTPFAAVVIALMGTVAQMELEAIKERNRSAAHFNIRAGKYRGSLPPWGYLPTRVDGEWRLVPDPVQRERILEVYHRVVDNHEPLHWVAHDLNRRGVLSPKDYFAQLQGREPQGRKWSATALKRSMISEAMLGYTTLNGKTVRDDDGAPLVRAEPILTREQLEALRAELVKTSRAKPAVSTPSLLLRVLFCAVCGEPAYKFAGGGRKHPRYRCRSMGFPKHCGNGTVVMAEWDAFCEEQVLDLLGDAERLEKVWVAGSDSAVELAEVSAELVDLTSLIGSPAYRAGSPQREALDVRIAALAARQEELEGLGARPSGWEWRETGQRFGDWWREQDTAAKNTWLRSMNVRLTFDVRGGPTRTIDFGDLQEYEQHSRLGSVVERLHTGMS

SEQ ID NO: 9706 - protein, 500 aa, synthetic construct
MRALIVIRLSRVTDATTSPERQLESCQQLCAQRGWDVVGVAEDLDVSGAVDPFDRKRRPNLARWLAFEEQPFDVIVVYRVDRLTRSTRHLQQLVRWAEDHKKLVVSATEAHFDTTTPFAAVVIALMGTVAQMELEAIKERIRSAAHFNIRAGKYRGSLPPWGYLPTRVDGEWRLVPDPVQRERILEVYRRVVDNHEPLHLVAHDLNRRGVLSPKDYFAQLRGREPQGRKWSATALKRSMISGAMLGYATLNGKTVRDDDGAPLVRAEPILTREQLEALRAELAKTSRAKPAVSTPSLLLRVLFCAVCGEPAYKFVGGGRKHPRYRCRSMGFPEHCGNGTVVMAEWDAFCEEQVLDLLGDAERLEKVWVAGSDSAVELAEVNAELMDLTSLIGSPAYRAGSPQREVLDARIAALAARQEELEGLEARPSGWEWRGTGQRFGDWWREQDTAAKNTWLRSMNVRLTFDVRGGLTRTIDFGELQEYEQHLRLGSVVERLHTGMS

SEQ ID NO: 9707 - protein, 500 aa, synthetic construct
MRALVVIRLSRVTDATTSPERQLESCQQLCAQRGWDVVGVAEDLDVSGAVDPFDRKRRPNLARWLAFEEQPFDAIVAYRVDRLTRSVRHLQQLVHWAEDHKKLVVSATEAHFDTTTPFAAVVIALMGTVAQMELEAIKERNRSAARFNIRAGKYRGSLPPWGYLPTRVDGEWRLVPDPVQRERILEVYRRVVDNHEPLHLVAHDLNRRGVLSPKDYFAQLQGREPQGRKWSATALKRSMISEAMLGYATLNGKTVRDDDGAPLVRAEPILTREQLEALRAELVKTSRAKPAVSTPSLLLRVLFCAVCGEPAYKFAGGGRKHPRYRCRSMGSPKHCGNGTVTMAEWDAFCEEQVLDLLGDAERLEKVWVAGSDSAVELAEVNAELVDLTSLIGSPAYRAGSQQREALDARIAALAARQEELEGLGARPSGWEWRETGQRFGDWWREQDTAAKNTWLRSMNVRLTFDVRGGLTRTIDFGDLQEYEQHLRLGSVVERLHTGMS

SEQ ID NO: 9708 - protein, 500 aa, synthetic construct
MRALVVIRLSRVTDATTSPERQLGSCQQLCAQRGWDVVGVAEDLDVSGAVDPFDRKRRPNLARWLAFEEQPFDVIVAYRVDRLTRSVRHLQQLVHWAEDHKKLVVSATEAHFDTTTPFAAVVIALMGTVAQMELEAIKERNRSAAHFNIRAGKYRGSLPPWGYLPTRVDGEWRLVPDPVQRERIFEVYHRVVDNHEPLHLVAHDLNRRGVLSPKDYFAQLRGREPQGRKWSATALKRSMTSEAMLGYATLNGKTVRDDDGAPLVRAEPILTRGQLEALRAELVKTSRAKPAVSTPSLLLRVLFCAVCGEPAYKFAGGGRKHPRYRCRSMGFPKHCGNGTVVMAEWDAFCEEQVLDLLGDAERLEKVWVAGSDSAVELAEVNAELVDLTSLIGSPAYCAGSPQREALDARIAALAARQEELEGLEARPSGWEWRGTGQRFGDWWHEQDTAAKNTWLRSMNVRLTFDVRGGLTCTIDFGDLQEYEQHLRLGSVVERLHTGVS

SEQ ID NO: 9709 - protein, 500 aa, synthetic construct
MRALVVIRLSRVTDATTSPERQLESCQQLCAQRGWDVVGVAEDLDVSGAVDPFDRKRRPNLARWLAFEEQPFDVIVAYRVDRLTRSTRHLQQLVHWAEDHKKLVVSATEAHFDTTTPFAAVVIALMGTVAQMELEAIKERNRSAAHFNIRAGKYRGSLPPWGYLPTRVDGEWRLVPDPVQRERILEVYHRVVDNHEPLHLVAHDLNRRGVLSPKDYFAQLQGREPRGRKWSATALKRSMISGAMLGYATLNGKTVRDDDGAPLVRAEPILTREQLEALRAELVKTSRAKPAVSTPSLLLRVLFCAVCGEPAYKFAGGGRKHPRYRCRSMGFPKHCGNGTVVMAEWDAFCEEQVLGLLGDAERQEKVWVAGSDSAVELAEVNAELVDLMSLIGSPAYRAGSPQRGALDARIAALAARQEELEGLGARPSGWEWRETGQRFGDWWREQDTAAKNTWLRSMNVRLTFDVRGGLTRTIDFGDLQEYEQHLRLGSVVGRLHTGMS

SEQ ID NO: 9710 - protein, 500 aa, synthetic construct
MRALVVIRLSRVTDATTSPERQLESCQQLCAQRGWDVVGVAEDLDVSGAVDPFDRKRRPNLARWLAFEEQPFDVIVAYRVDRLTRSTRHLQQLVHWAEDHKKLVVSATEAHFDTTTPFAAVVIALMGTVAQMELEAIKERSRSAAHFNIRAGKYRGSLPPWGYLPTRVDGEWRLVPDPVQRERVLEVYHRVVDNHEPLHLVAHDLNRRGVLSPKDYFAQLRGREPRGRKWSATALKRSMTSVAMLGYATLNGKTVRDDDGAPLVRAEPILTREQQEALRAELAKTSRAKPAVSTPSLLLRVLFCAVCGEPAYKFVGGGRKHPRYRCRSMGFPEHCGNGTVVMAEWDAFCEEQVLDMLGDAERLEKVWVAGSDSAVELAEVNAELVDLTSLISSPAYRAGSPQREALDARIAALAARQEELESLEARPSGWEWRGTGQRFGDWWREQDTAAKNTWLRSMNVRLTFDARGGLTRTIDFGDLQEYEQHLRLGSVVERLHTGMS

SEQ ID NO: 9711 - protein, 500 aa, synthetic construct
MRALVVIRLSRVTDATTSPERQLESCQQLCAQRGWDVVGVAEDLDVSGAVDPFDRKRRPNLARWLAFEEQPFDVIVAYRVDRLTRSTRHLQQLVHWAEDHKKLVVSATEAHFDTTTPFAAVVIALMGTVAQMELEAIKERNRSAAHFNIRAGKYRGSLPPWGYLPTRVDGEWRLVPDPVQRERILEVYHRVVDNHEPLHLVAHDLNRRGVLSPKDYFAQLQGREPQGRKWSATALKRSMISGAMLGYATLNGKTVRDDDGAPLVRAEPILTREQQEALRAELVKTSRAKPAVSTPSLLLRVLFCAVCGEPAYKFAGGGRKHPRYRCRSMGFPKHCGNGTVVMAEWDAFCEEQVLDLLGGAERLEKVWVAGSDSAVELAEVNAELVDLTSLIGSPAYRAGSPQREALDARIAALAARQEELEGLEARPSGWEWRETGQRFGDWWREQDTAAKNTWLRSMNVRLTFDVRGGLTRTIDFGDLQEYEQHLRLGSVVERLHTGMS

SEQ ID NO: 9712 - protein, 500 aa, synthetic construct
MRALVVIRLSRVTDATTSPERQLESCQQLCAQRGWDVVGVAEDLDVSGAVDPFDRKRRPNLARWLAFEEQPFDAIVAYRVDRLTRSIRHLQQLVHWAEDHKKLVVSATEAHFDTTTPFAAVVIALMGTVAQMELEAIKERIRSAAHFNIRAGKYRGSLPPWGYLPTRVDGEWRLVPDPVQRERILEVYHRVVHNHEPLHLVAHDLNRRGVLSPKDYFAQLRGREPQGRKWSATALRRSMTSVAMLGYATLNGKTVRNDDGAPLVRAEPILSREQQEALCAELAKTSRAKPAVSTPSLLLRVLFCAVCGEPAYKFVGGGRKHPRYRCRSMGFPEHCGNGTVVMAEWDAFCEEQVLNLLGDAERLEKVWVAGSDSAVELAEVNAELVDLTSLIGSPAYRAGSPQREALDARIAALAARQEELGGLEARPSGWEWRGTGQRFRDWWREQDTAAKNTWLRSMNVRLTFDVRGGLTRTIDFGDLQEYEQHLRLGSVAERLHTGMS

SEQ ID NO: 9713 - protein, 500 aa, synthetic construct
MRALVVIRLSRVTDATTSPERQLESCQQLCAQRGWDVVGVAEDLDVSGAVDPFDRKRRPNLARWLAFEEQPFDVIVAYRVDRLTRSTRHLQQLVRWAEDHKKLVVSATEAHFDTTTPFAAVVIALMGTVAQMELEAIKERIRSAVRFNIRAGKYRGSLPPWGYLPTRVDGEWRLVPDPVQRERILEVYHRVVDNHEPLHLVAHDLNRRGVLSPKDYFAQLRGREPQGREWSATALKRSMISAAMLGYATLNGKIVRNDDGAPLVRAEPILTREQQEALRAELAKTSRAKPAVSTPSLLLRVLFCAVCGEPAYKFVGGGRKHPRYRCRSMGFPEHCGNGTVAMAEWDAFCEEQVLNLLGDAERLEKVWVAGSDSAVELAEVNAELMDLTSLIGSPAYRAGSPQREALDARIAALAARQEELEGLEARPSGWEWRKTGQRFEDWWREQDTAAKNTWLRSMNVRLTFDVRGGPTRTIDFGDLQEYEQHLRSGSVVERLHTGMS

SEQ ID NO: 9714 - protein, 500 aa, synthetic construct
MRALVVIRLSRVTDATTSPERQLESCQQLCAQRDWDVVGVAEDLDVSGAVDPFDRKRRPNLARWLAFEEQPFDVIVAYRVDRLTRSTRHLQQLVRWAEDHKKLVVSATEAHFDTTTPFAAVVIALMGTVAQMELEAIKERIRSAVHFNIRAGKYRGSLPPWGYLPTRVDGEWRLVPDPVQRERILEVYHRVVDNHEPLHLVAHDLNRRGVLSPKDYFAQLQGREPQGRKWSATALKRSMISGAMLGYATLNGKTVRDDDGAPLVRAEPILTREQQEALCAELAKTSRAKPAVSTPSLLLRVLFCAVCGEPAYKFVGGGRRHPRYRCRSMMFPKHCGNGTVVMAEWDAFCEEQVLDLLGDAERLEKVWVAGPDSSVELAEVNAELVDLTSLIGSPAYRAGSPQREALDARIAALAARQEELEGLEARPSGWEWRGTGQRFGDWWREQDTAAKNTWLRSMNVRLTFDVRGGLTRTIDFGDLREYERHLRLGSVAERLRTGMS

SEQ ID NO: 9715 - protein, 500 aa, synthetic construct
MRALVVIRLSRVTDATTSPERQLESCQQLCAQRGWDVVGVAEDLDVSGAVDPFDRKRRPNLARWLAFEEQPFDVIVAYRIDRLTRSVRHLQQLVHWAEDHKKLVVSATEAHFDTTTPFAAVVIALMGTVAQMELEAIKERNRSAAHFNIRAGKYRGSLPPWGYLPARVDGEWRLVPDPVQRERILEVYHRVVDDHESLHLVAHDLNRRGVLSPKDYFAQLQGREPQGRKWSATAIKRSMISEAMLGYATLNGKTVRDDDGAPLVRAEPILTREQLEALRAELVKTSRAKPAVSTPSLLLRVLFCAVCGEPAYKFAGGGRKHPRYRCRSMGFPKHCGNGTVVMAEWDAFCEEQVLGLLGDAERLERVWVAGSDSAVELAEVNAELVALTSLIGSLAYRAGSPQREALDARIAALAARQEELEGLGARPSGWEWRETGQRFGDWWREQDTAAKNTWLRSMNVRLTFDVRGGLTRTIDFGGLQEYGQHLRLGSVVERLHTGMS

SEQ ID NO: 9716 - protein, 500 aa, synthetic construct
MRALVVIRLSRVTDATTSPERQLESCQQLCAQRGWDVVGVAEDLDVSGAVDPFDRKRRPNLARWLAFEEQPFDAIVAYRVDRLTRSTRHLQQLVHWAEDHKKLVVSATEAHFDTTTPFAAVVIALMGTVAQMELEAIKERNRSAAHFNIRAGKYRGSLPPWGYLPTRVDGEWRLVPDPVQRERILEVYHRVVDNHEPLHWVAHDLNRRGVLSPKDYFAQLQGREPQGRKWSATALKRSMISEAMLGYATLNGKTVRDDGGAPLVRAEPILTREQLEVLRAELVKTSRAKPAVSTPSLLLRVLFCAVCGEPAYKFAGGGRKHPRYRCRSMGFPKHCGNGTVVMAEWDAFCEEQVLNLLGDAERLEKVWVAGSDSAVELAEVNAELVDLTSLIGSPAYRAGSPQREALDARIAALAARQEELEGLEARPSGWEWRETGQRFGDWWREQDTAAKNTWLRSMNVRLTFDVRGGLTRTIDFGDLQEYEQHLRLGSVVERLRTGMS

SEQ ID NO: 9717 - protein, 500 aa, synthetic construct
MRALVVIRLSRVTDATTSPERQLESCQQLCAQRGWDVVGVAEDLDVSGAVDPFDRKRRPNLARWLAFEGQPFDVIVAYRVDRLTRSTRHLQQLVHWAEDHKKLVVSATEAHFDTTTPFAAVVIALMGTVAQMELEAIKERNRSAAHFNIRAGKYRGSLPPWGYLPARVDGEWRLVPDPVQRERILEVYHRVVDNHEPLHLVAHDLNQRGVLSPKDYFAQLQGREPQGRKWSATALKRSMISEAMLGYVTLNGKIVRDDDGAPLVRAEPILTRGQLEALRAELVKTSRAKPAVSTPSLLLRVLFCAVCGEPAYKFAGGGRKHPRYRCRSMGFPKHCGNGTVVMAEWDAFCEEQVLDLLGDTERLEKVWVAGSDSAVELAEVNAELVDLTSLIGSPAYRAGSPQREALDARIAALAARQEELEGLEARPSGWEWRGTGQRFGDWWREQDTAAKNTWLRSMNVRLTFDVRGGRTRTIDFGDLQEHGQCLRLGSVVGRSHTGMS

SEQ ID NO: 9718 - protein, 500 aa, synthetic construct
MRALVVIRLSRVTDATTSPERQLESCQQLCAQRGWDVVGVAEDLDVSGAVDPFDRKRRPNLARWLAFEEQPFDVIVAYRVDRLTRSTRHLQQLVHWAEDHKKLVVSATEAHFDTTTPFAAVVIALMGTVAQMELEAIKERIRSAAHFNIRAGRYRGSLPPWGYLPTRVDGEWRLVPDPVQRERILEVYHRVVDNHEPLHLVAYDLNRRGVLSPKDYFAQLQGREPQGRKWSATALKRSMISGAMLGYATLNGMIVRDDDGAPLVRAEPILTREQQEALRAELAKTSRAKPAVSTPSLLLRVLFCAVCGEPAYKFVGGGRKHPRYRCRSMGFPEHCGNGTVVMAEWDAFCEEQVLDLLGDAERLEKVWVAGSDSAVELAEVNAELVDLTRLIGSPAYRAGSPQREALDARIAALAARQEELEGLEARPSGWEWRETGQRFGDWWREQDSAAKNTWLRSMNVRLTFDVRGGLTRTIDFGDLQEYEQHLRLGSVVERLHTGVS

SEQ ID NO: 9719 - protein, 500 aa, synthetic construct
MRALVVIRLSRVTDATTSPERQLESCQQLCAQRGWGVVGVAEDLDVSGAVDPFDRKRRPNLARWLAFEEQPFDVIVAYRVDRLTRSVRHLQQLVHWAEDYKKLVVSATEAHFDTTTPFAAVVIALMGTVAQMELEAIKERNRSAAHFNIRAGKYRGSLPPWGYLPTRVDGEWRLVPDPVQRKRILEVYHRVVDNHEPLHLVAHDLNRRGVLSPKDYFAQLQGREPQGRKWSATALKRSMISEAMLGYATLNGKTVRDDDGAPLVRAEPILTREQLEALRAELVKASRVKPAVSTPSLLLRVLFCAVCGEPAYKFAGGGRKHPRYRCRSMGFPKHCGNGTVVMAEWDAFCEEQVLNLLGDAERLEKVWVAGSDSAVELAEVNAELADLTSLIGSPAYRAGSPQREALDARIAALAARQEELESLEARPSGWEWRETGQRFGDWWREQDTAAKNIWLRSMNVRLTFDVRGGLTRTIDFGDLQESEQHLRLGSVVERLHTGMS

SEQ ID NO: 9720 - protein, 500 aa, synthetic construct
MRALVVIRLSRVTEATTSPERQLESCQQLCAQRGWNVVGVAEDLDVSGAVDPFDRKRRPNLARWLAFEEQPFDVIVAYRVDRLTRSVRHLQQLVHWAEDHKKLVVSATEAHFDTTTPFAAVVIALMGTVAQMELEAIKERIRSAVHFNIRAGKYRGSLPPWGYLPARVDGEWRLVPDPVQRERILEVYHRVVDNHEPLHLVAYDLNRRGVLSPKDYFAQLQGREPQGRKWSATALRRSMTSVAMLGYATLNGKTVRDDDGAPLVRAEPILTREQLEALRAELAKTSRAKPAVSTPSLLLRVLFCAVCGEPAYKFAGGGRKHPRYRCRSMGLPKHCGNGTVAMAEWDAFCEEQVLNLLGDAERLEKVWVAGSDSAVELAEVNAELVDLMSLIGSPAYRADSPQREALDARIAALAARQGELEGIEARPSGWVWRGTGQRLGDWWREQDTAAKNTWLRSMNIRLTFDVRGGLTRTIDFGELQEYEQHLRLGSVAERLHTGMS

SEQ ID NO: 9721 - protein, 500 aa, synthetic construct
MRALVVIRLSRVTDATTSPERQLESCQQLCAQRGWDVVGVVEDLDVSGAVDPFDRKRRPSLARWLAFEEQPFDVIVAYRVDRLTRSTRHLQQLVHWAEDHKKLVVSATEAHFDTTTPFAAVVIALMGTVAQMELEAIKERNRSAAHFNIRAGKYRGSLPPWGYLPTRVDGEWRLVPDPVQRERILEVYHRVVDNHESLHLVAHDLNRRGVLSPKDYFAQLRGREPQGRKWSATALKRSMISEAMLGYATLNGKTVRDDDGAPLVRAEPILTREQLEALRAELVKASRAKPAVSTPSLLLRVLFCAVCGEPAYKFAGGGRKHPRYRCRSMGFPKHCGNGTVVMAEWDAFCEEQVLNLLGDAERLEKVWVAGSDSAVELAEVNAELVDLTSLIGSPAYRAGSPQREALDARIAALAARQEELKSLGARPSGWEWCETGQRFGDWWREQDTAAKNTWLRSMNVRLTFDVRGGLTRTIDFGDLQEHEQHLRLGSAVERSRTGVS

SEQ ID NO: 9722 - protein, 500 aa, synthetic construct
MRALVVIRLSRVTDATTSPERQLESCQQLCAQRGWDVVGVAEDLDVSGAVDPFDRKRRPNLARWLAFEEQPFDVIVAYRVDRLTRSTRHLQQLVHWAEDHKKLVVSATEAHFDTTTPFAAVVIALMGTVAQMELEAIRERNRSAAHFNIRAGKYRGSLPPWGYLPTRVDGEWRLVPDPVQRERILEVYHRVVDNHEPLHSVAHDLNRRGVLSPKDYFAQLRGREPQGRKWSATALKRSMISEAMLGYATLNGKTVRDDDGAPLVRAEPILTREQLEALRAELVRASRAKPAVSTPSLLLRVLFCAVCGEPAYKFAGGGRKHPRYRCRSMGFSKHCGNGTVAMAEWDAFCEEQVLNLLGDAERLEKVRVAGSDSAVELAEVSAELVDLTSLIGSPAYRAGSPQREALDARIAALAARQEELEGLEARPSGWEWRETGQRFRDWWREQDTAAKNTWLRTMNVRLTFDVRGGLTRTIDFGELQEYGQHLCLGSVVERLHTGMS

SEQ ID NO: 9723 - protein, 500 aa, synthetic construct
MRALIVIRLSRVTDATTSPERQLESCQQLCAQRSWDVVGVAEDLDVSGAVDPFDRKRRPNLARWLAFEEQPFDAIVAYRVDRLARSIRHLQQLVHWAEDHKKLVVSATEAHFDTTTPFAAVVIALMGTVAQMELEAIKERNRSAAHFNIRAGKYRGSLPPWGYLPTRVDGEWRLVPDPVQRERILEVYHRVVDNHESLHLVAHDLNRRGVLSPKDYFAQLRGREPQGRKWSATALKRSMISEAMLGYATLNGKTVRDDDGAPLVRAEPILTREQLEALRAELVKTSRAKPAVSTPSLLLRVLFCAVCGEPAYKFAGGGRKHPRYRCRSMGFPKHCGNGTVVMAEWDAFCEEQVLNLLGDAERLEKVWVAGSDSAVELAEVNAELVDLTSLIGSPAYCAGSPQREALDARIAALAARQEELEGLEARPSGWEWRETGQRFGDWWREQDTAAKNTWLRSMNVRLMFDVRGGLTRTIDFGDLQEYEQHLRLGSVVERLHTGVS

SEQ ID NO: 9724 - protein, 500 aa, synthetic construct
MRALVVIRLSRVTDATTSPERQLESCQQLCAQRGWDVVGVAEDLNVSGAVDPFDRKRRPSLARWLAFGEQPFDVIVAYRVDRLTRSIRHLQQLVHWAEDHKKLVVSATEAHFDTTTPFAAVVIALMGTVAQMELEAIKERNRSAAHFNIRAGRYRGSLPPWGYLPTRVDGEWRLVPDPVQRERILEVYHRVVDNHEPLHLVAHDLNRRGVLSPKDYFAQLQGREPQGRKWSATALKRSMISEAMLGYATLNGKIVRDDDGAPLVRAEPILTREQLEALRAELVKTSRAKPAVSTPSLLLRVLFCAVCGEPAYKFAGGGRKHPRYRCRSMGFPKHCGNGTVVMAEWDAFCEEQVLNLLGDAERLEKVWVVGSDSAVELAEVNAELVDLTSLIGSPAYRAGSPQREALDARIAALAARQEELEGLEARPPGWEWRETGQRFGDWWREQDTAAKNTWLRSMNVRLTFDVRGGLTRTIDFGDLQEYEQHLRLGSVVERLHTGMS

SEQ ID NO: 9725 - protein, 500 aa, synthetic construct
MRALVVIRLSRVTDATTSPERQLESCQQLCAQRGWDVVGVAEDLDVSGAVDPFDRKRRPNLARWLAFEEQPFDVIVAYRVDRLTRSTRHLQQLVHWAEDHKKLVVSATEAHFDTTTPFAAVVIALMGTVAQMELEAIKERNRSAAHFNIRAGKYRGSLPPWGYLPTRVDGEWRLVPDPVQRERILEVYHRVVDNHEPLHLVAHDLNRRGVLSPKDYFAQLRGREPQGRKWSATALKRSMISEAMLGYATLNGKTVRNDDGAPLVRAEPILTRGQLEALRAELVKTSRAKPAVSTPSLLLRVLFCAVCGEPAYKFAGGGRKHPRYRCRSMGFPKHCGNGTVVMAEWDAFCEEQVLDLLGDAECLEKVWVAGSDSAVELAEVNAELVDLTSLIGSPAYRAGSPQREALDARIAALAARQEELEGLETRPSGWEWRETGQRFGDWWREQDTAAKNTWLRSMNVRLTFDARGGLTRTIDFGDLQEYEQHLRLGSVVERLRTGMS

SEQ ID NO: 9726 - protein, 500 aa, synthetic construct
MRALVVIRLSRVTDATTSPERQLESCQQLCAQRGWDVVGVAEDLDVSGAVDPFDRKRRPNLARWLAFEEQPFDVIVAYRVDRLTRSTRHLQQLVHWAEDHKKLVVSATEAHFDTTTPFAAVVIALMGTVAQMELEAIRERIRSAVHFNIRAGKYRGSLPPWGYLPTRVDGEWRLVPDPVQRERILEVYHRVVDDHEPLHLVAYDLNRRGVLSPKDYFAQLQGREPQGRKWSATALKRSMISGAMLGYATLNGMIVRDDDGAPLVRAEPILTREQQEALRAELVRTSRAKPAVSTPSLLLRVLFCAVCGEPAYKFTGGGRKHPRYRCRSMGFPEHCGNGTVVMAEWDAFCEEQVLGLLGDAERLEKAWVAGPDSAVELAEVNAELVDLTSLIGSPAYRAGSPQREALDVRIAALAARQEELEGLEARPSGWEWRGTGQRFGDWWRQQDTAAKNTWLRSMNVRLTFDVRGGLTRTIDFGDLQEYEQHLRLGSVVERLHTGMS

SEQ ID NO: 9727 - protein, 500 aa, synthetic construct
MRALVVIRLSRVTDATTSPERQLESCQQLCAQRGWDVVGVAEDLDVSGAVDPFDRKRRPNLARWLAFEEQPFDVIVAYRVDRLTRSTRHLQQLVRWAEDHKKLVVSATEAHFDTTTPFAAVVIALMGTVAQMELEAIKERIRSAVHFNIRAGKYRGSLPPWGYLPTRVDGEWRLVPDPVQRERILEVYHRVVNNHEPLHLVAHDLNRRGVLSPKDYFAQLRGREPQGRKWSATALKRSMISVAMLGYATLNGKTVRDGDGAPLVRAEPILTREQQEALRAELAKTSRAKPAVSAPSLLLRVLFCAVCGEPAYKFVGGGRKHPRYRCRSMGSPKHCGNGTVAMAEWDAFCEEQVLDLLGDAERLEKVWVAGSDSAVELAEVNAELVDLTSLIGSPAYRAGSPQREALDARIAALAARQKELEGLEARPSGWEWRETGQHFGDWWREQDTAAKNTWLRSMNVRLTFGVRGGLTRTIDFGDLQEYEQHLRLGNVVERLHTGMS

SEQ ID NO: 9728 - protein, 500 aa, synthetic construct
MRALVVIRLSRATDATTSPERQLESCQQLCAQRGWDVVGVAEDLDVSGAVDPFDRKRRPNLARWLAFEELPFDAIVAYRVDRLTRSTRHLQQLVHWAGDHKKLVVSATEAHFDTTTPFAAVVIALMGTVAQMELEAIKERIRSAVRFNIRAGKYRGSLPPWGYLPTRVDGEWRLVPDPVQRERILEVYHRVVDNHEPLHLVAYDLNRRGVLSPKDYFAQLQGREPQGRKWSATALKRSMISKAMLGYATLSGKIVRDDDGAPLVRAEPILTREQQEAFRAELAKTSRAKPAVSTPSLLLRVLFCAVCGEPAYRFVGGGRKHPRYRCRTMVFPKHCGNGTVAMAEWDAFCEEQVLGLLGDAERLEKVWVAGSDSAVELAEVNAELVDLTSLIGSPAYRAGSPQREALDARIAALAARQEELEGLEARPSGWEWRETGQRFGDWWREQDTAAKNTWLRSMNVRLTFDVRGGLTRTIDFGDLQEYERHLRLGSVAERLRTGMS

SEQ ID NO: 9729 - protein, 500 aa, synthetic construct
MRALVVIRLSRVTDATTSPERQLESCRQLCAQRGWDVVGVAEDLDVSGAVDPFDRKRRPNLARWLAFEEQPFDVIVAYRVDRLTRSTRHLQQLVHWAEDHKKLVVSATEAHFDTTTPFAAVVIALMGTVAQMELEAIKERIRSAVHFNIRAGKYRGSLPPWGYLPTRVDGEWRLVPDPVQRERILEVYHRVVDNHEPLHLVAHDLNRRGVLSPKDYFAQLQGREPQGRKWSATALRRSMTSVAMLGYATLNGKIVRDDDGAPLVRAEPILTREQQEALRAELAKTSRAKPAVSTPSLLLRVLFCAVCGEPAYKFAGGGRKHPRYRCRSMGLPEHCGNGTVVMAEWDAFCEEQVLDLLGDAERLERVWVAGSDSAVELAEVNAELVDLTSLIGSPAYRAGSPQRVALDARIAALAARQEELEGLEARPSGWEWRETGQRFGDWWREQDTAAKNTWLRLMNVRLTFDVRGGLTRTIDFGDLQEYEQHSRSGSVVERLHTGVS

SEQ ID NO: 9730 - protein, 500 aa, synthetic construct
MRALVVIRLSRVTDATTSPERQLESCQQLCAQRGWDVVGVAEDLDVSGAVDPFDRKRRPSLARWLAFEEQPFDVIVAYRVDRLTRSTRHLQQLVHWAEDHKKLVVSATEAHFDTTTPFAAVVIALMGTVAQMELEAIKERNRSAAHFNIRAGKYRGSLPPWGYLPTRVDGEWRLVPDPVQRERILEVYHRVVDNHESLHLVAHDLNRRGVLSPKDYFAQLRGREPQGRKWSATALKRSMISEAMLGYATLNGKTVRDDDGAPLVRAEPVLTREQLEALRAELVKASRAKPAVSTPSLLLRVLFCAVCGEPAYKFAGGGRKHPRYRCRSMGFPKHCGNGTVVMAEWDAFCEEQVLNLLGDAERLEKVWVAGSDSAVELAEVNAELVDLTSLIGSPAYRAGSPQREALDARIAALAARQEELKSLGARPSGWEWCETGQRFGDWWREQDTAAKNTWLRSMNVRLTFDVRGGLTRTIDFGDLQEYEQHLRLGSVVERSRTGVS

SEQ ID NO: 9731 - protein, 500 aa, synthetic construct
MRALIVIRLSRVTEATTSPERQLESCQQLCAQRGWDVVGVAEDLDVSGAVDPFDRKRRPNLARWLAFEEQPFDVIVAYRVDRLTRSTRHLQQLVRWAEDHKKLVVSATEAHFDTTTPFAAVVVALMGTVAQMELEAIKERIRSAVHFNIRAGKYRGSLPPWGYLPTRVDGEWRLVPDPVQRERILEVYHRVVDNHEPLHLVAYDLNRRGVLSPKDYFAQLQGREPQGREWSATALKRSMTSVAMLGYATLNGKIVRDDDGAPLVRAEPILTRGQQEALRAELAKTSRAKPAVSTPSLLLRVLFCAVCGEPAYKFTGGGRKHPRYRCRSMGFPKHCGNGTVVMAEWDAFCEEQVLNLLGDAERLEKVWVAGSDSAVELAEVNAELVDLTGLIGSPAYRAGSPQREALDARIAALAARQEELEGLEARPSGWEWRGTGQRLGDWWREQNTAAKNTWLRSMNVRLTFDVRGGLTRTFDFGDLQEYEQHSRLGSVVERLHTGMS

SEQ ID NO: 9732 - protein, 500 aa, synthetic construct
MRALVVIRLSRVTDTTTSPVRQLESCQQLCAQRGWDVVGVAEDLDVSGAIDPFDRKRRPNLARWLAFEEQPFDVIVAYRVDRLTRSTRHLQQLVRWAEDHKKLVVSATEAHFDTTTPFAAVVIALMGTVAQMELEAIKERIRSAVRFNIRAGKYRGSLPPWGYLPARVDGEWRLVPDPVQRERILEVYHRVVDNHEPLHLVAHDLNRRGVLSPKDYFAQLRGREPQGRKWSATALKRSMISVAMLGYATLNGMIVRDDDGAPLVRAEPILTREQLEALRAELAKTSRAKPAVSTPSLLLRVLFCAVCGEPAHKFAGGGRKHPRYRCRSMGFPKHCGNGTVVMAEWDAFCEEQVLNLLGDAERLEKVWVAGSDSSVELAEVNAELVDLTSLIGSPAYRAGSPQREALDTRIAALAARQEELEGLEARPSGWEWRGTGQRFGDWWREQDTAAKNTWLRSMNVRLTFDVRGGLTRTIDFGDLQEYERHSRLGSVAERLRTGMS

SEQ ID NO: 9733 - protein, 500 aa, synthetic construct
MRALVVIRLSRVTDATTSPERQLESCQQLCAQRGWDVVGVAEDLDVSGAVDPFDRKRRPNLARWLAFEEQPFDVIVAYRVDRLTRSTRHLQQLVHWAEDHKKLVVSATEAHFDTTTPFAAVVIALMGTVAQMELEAIKERIRSAAHFNIRAGKYRGSLPPWGYLPTRMDGEWRLVPDPVQRERILEVYHRVVDNHEPLHSVAHDLNRRGVLSPKDYFAQLRGREPQGRKWSATALKRSMISKAMLGYATLNGKTVRDDDGAPLVRAEPILTREQQEALRAELVKTSRAKPAVSTPSLLLRVLFCAVCGEPAYRFIGGGRKHPRYRCRSMGLPKHCGNGTVVMAEWDAFCEEQVLGLLGDVERLEKVWLAGSDSAAELAEVNAELVDLTSLIGSPAYRAGSPQREALDARIAALAARQGELEGLEARPSGWEWRETGQRFGDWWREQDTAAKNTWLRSMNVRLTFDVRGGLTRTIDFGDLQEYERHSRIGSVVERLRTGMP

SEQ ID NO: 9734 - protein, 500 aa, synthetic construct
MRALVVIRLSRVTDATTSPERQLESCQQLCAQRGWDVVGVAEDLDVSGAVDPFDRKRRPNLARWLAFEEQPFDVIVAYRVDRLTRSTRHLQQLVHWAEDHKKLVVSATEAHFDTTTPFAAVVIALMGTVAQMELEAIKERIRSAVRFNIRAGKYRGSLPPWGYLPTRVDGEWRLVPDPVQRERILEVYHRVVDNHEPLHLVAHDLNQRGVLSPKDYFAQLRGREPQGRKWSATALKRSMISEAMLGYATLNGKTVRDDDGAPLVRAEPILTRGQLEALRAELVKTSRAKPAVSTPSLLLRVLFCAVCGEPAYKFVGGGRKHPRYRCRSMGYPKHCGNGTVVMAEWDAFCEEQVLNLLGDAERLEKVWVAGSDSAVELAEVNAELMDLTSLISSPAYRAGSPQREALDARIAALAARQEELEGLEARPSGWEWRETGQRFGDWWREQGTAAKNTWLRSMNVRLTFDVRGGLTRTIDFGDLREYAQHLRLGSVAERLRTGMS

SEQ ID NO: 9735 - protein, 500 aa, synthetic construct
MRALVVIRLSRVTDATTSPERQLESCQQLCAQRGWDVVGVAEDLDVSGAVEPFDRKRRPNLARWLAFEEQPFDAIVAYRVDRLTRSVRHLQQLVHWAEDHKKLVVSATEAHFDTTTPFAAVVIALMGTVAQMELEAIKERNRSAAHFNIRAGKYRGSLPPWGYLPTRVDGEWRLVPDPVQRERILEVYHRVVDNHESLHLVAHDLNRRGVLSPKDYFAQLRGREPQGCEWSATALKRSMISEAMLGYATLNGKTVRDDDGAPLVRAEPILTREQLEALRAELVKTSRAKPAVSTPSLLLRVLFCAVCGEPAYKFAGGGRKHPRYRCRSMGFPKHCGNGTVVMAEWDAFCEEQVLNLLGDAERLEKVWVAGSDSAVELAEVIAELVDLTSLIGSPAYRTGSPQREALDARIAALAARQEELEGLEARPSGWEWRGTGQRFGDWWREQDTAAKNTWLRSMNVRLTFDVRGGLTRTIDFGDLQEYEQRLRLGSVAERLHTGMS

SEQ ID NO: 9736 - protein, 500 aa, synthetic construct
MRAIVVIRLSRVTDATTSPERQLASCQQLCAQRGWDVVGVAEDLDVSGAVDPFDRKRRPSLARWLAFEEQPFDVIVAYRVDRLTRSVRHLQRLVRWAEDHKKLVVSATEAHFDMTTPFAAVVIALMGTVAQMELEAIKERIRSAAHFNIRAGKYRGSLPPWGYLPTRVDGEWRLVPDPVQRERILEVYHRVVDNHEPLHLVAHDLNRRGVLSPKDYFAQLRGREPRGRKWSATALKRSMISGAMLGYATLNGKIVRDDDGAPLVRAEPILTREQQEALRAELAKTSRAKPAVSTPSLLLRVLFCAVCGEPAYKFVGGGRKHPRYRCRSMGFPRHCGNGTVVMAEWDAFCEEQVLDLLGDAERLKKVWVAGSDSAVELAEVNAELVDLTSLIGSPAYRAGSPQREALDARIAALAARQGELEGLEARPSGWEWRETGQRFGDWWREQDTAAKNTWLRSMNIRLTFDVRGGLTRTIDFGELQKYEQHLRLGSVVERLHTGMS

SEQ ID NO: 9737 - protein, 500 aa, synthetic construct
MRALVVIRLSRVTDATTSPERQLESCQQLCAQRGWDVVGVAKDLDVSGAVDPFDRKRRPNLARWLAFEEQPFDVIVAYRVDRLTRSTRHLQQLVHWAEDHKKLVVSATEAHFDTTTPFAAVVIALMGTVAQMELEAIKERIRSAVHFNIRAGRYRGSLPPWGYLPTRVDGEWRLVPDPVQRGRILEVYHRVVDNHEPLHLVAHDLNRRGVLSPKDYFAQLRGREPRGRKWSATALRRSMTSVAMLGYATLNGKTVRGDDGAPLVRAEPILTREQQEALRAELAKTSRAEPAVSTPSLLLRVLFCAVCGEPAYKFVGGGRKHPRYRCRTMGLPEHCGNGTVVMAEWDAFCEEQVLGLLGDAERLEKVWVAGSDSAVELAEVNAELVDLTSLICSPAYRAGSPQREALDARIAALAARQEELEGLETRPSGWEWRETGQRFGDWWREQDTAAKNTWLRLMNVRLTFDVRGGLTRTIDFGDLQEYEQHLRLGSVAERLHTGMS

SEQ ID NO: 9738 - protein, 500 aa, synthetic construct
MRALVVIRLSRVTDATTSPERQLESCQQLCAQRGWDIVGVAEDLDVSGAVNPFDRKRRPNLARWLAFEEQPFDAIVAYRVDRLARSIRHLQQLVHWAEDHKKLVVSATEAHFDTTTPFAAVVIALMGTVAQMELEAIKERNRSAAHFNIRAGKYRGSLPPWGYLPTRVDGEWRLVPDPVQRERILEVYHRVVDDHEPLHLVAHDLNRRGVLSPKDYFAQLRGREPQGCEWSATALKRSMTSEAMLGYATLNGKTVRDDDGAPLVRAEPILTREQLEALRAELVKTSRAKPAVSTPSLLLRVLFCAVCGEPAYKFAGGGRKHPRYRCRSMGFPKHCGNGTVAMAEWDAFCEEQVLDLLGDAERLEKVWVAGSDSAVELAEVNAELVDLTSLIGSPAYRAGSPQREALDARIAALAARQEELEGLGARPSGWEWRETGQRFGDWWREQDTAAKNAWLRSMNVRLTFDVRGGLTRTIDFGDLQEYEQHLRSGSVVERLHTGMS

SEQ ID NO: 9739 - protein, 500 aa, synthetic construct
MRTLVVIRLSRVTDATTSPERQLESCQRLCAQRGWDVVGVAEDLDVSGAVDPFDRKRRPNLARWLAFEEQLFDVIVAYRVDRLTRSVRHLQQLVHWAEDHKKLVVSATEPHFDTTTPFAAVVIALMGTVAQMELEAIKERNRSAAHFNIRAGKYRGSLPPWGYLPTRVDGEWRLVPDPVQRERILEVYHRVVDNHEPLHLVAHDLNRRGVLSPKDYFAQLRGREPQGRKWSATALKRSMISEAMLGYATLNGKTVRDDGGAPLVRAEPILTREQLEALRAELVKTSRAKPVVSTPSLLLRVLFCAVCGEPAYKFAGGGRKHPRYRCRSMGFPKHCGNGTVAMAEWDAFCEEQVLNLFGDAERLEKVWVAGSDSAVELAEVNAELVDLTSLIGSPAYRAGSPQRRALDARIAALAARQEELAGLEARPSGWEWRETGQRFGDWWREQDTATKNTWLRSMSVRLTFDVRGGLTRTIDFGDLQEYEQHLRLGSVVERLHTGMS

SEQ ID NO: 9740 - protein, 500 aa, synthetic construct
MRALVVIRLSRVTEATTSPERQLESCQQLCAQRGWDVVGVAEDLDVSGAVDPFDRKRRPNLARWLALEEQPFDVIVAYRVDRLTRSTRHLQQLVHWAEDHKKLVVSATEAHFDTTTPFAAVVIALMGTVAQMELEAIKERVRSAAQFNIRAGKYRGSLPPWGYLPTRVDGEWRLVPDPVQRERILEVYRRVVDNHEPLHLVAHDLNRRGVLSPKDYFAQLRGREPQGRKWSATALKRSMISVAMLGHATLNGKIVRDDDGAPLVRAEPILTREQQEALRAELAKTSRAKPAVSTPSLLLRVLFCAVCGEPAYKFVGGGRKHPRYRCRSMGFPKHCGNGTVVMAEWDAFCEEQVLDLLGDAERLEKVWVAGSDSAVELAEVNAELVDLTSLIGSPAYRAGSPQRKALDARIAALAARQEELEGLEARPSGWEWRETGQRFGDWWREQTTAAKNTWLRSMNVRLTFDVRGGLTRTIDFGDLQEYERHLRLGSVAERLRTGMS

SEQ ID NO: 9741 - protein, 500 aa, synthetic construct
MRALVVIRLSRVTDATTSPERQLESCHQLCAQRGWDVVGVAEDLDVSGAVDPFDRKRRPNLARWLAFEEQPFDAIVAYRVDRLTRSVRHLQQLVHWAEDHKKLVVSATEAHFDTTTPFAAVVIALMGTVAQMELEAIKERIRSAVHFNIRAGKYRGSLPPWGYLPTRVDGEWRLAPDPVQRERILEVYHRVVDNHEPLHLVAYDLNRRGVLSPKDYFAQLRGREPQGRKWSATALKRSMISGAMLGYATLNGTIVRDDDGAPLVRAEPILTREQQEALRAELAKTSRAKPAVSTPSLLLRVLFCAVCGEPAYKFTGGGRKHPRYRCRSMGFPKHCGNGTVVMTEWDAFCEEQVLDLLGDVERLEKVWVAGSDSAVELAEVNAELVDLTSLIGSPAYRAGSPQRGALDARIAALAARQEELEGLEARPSGWGWRGTGQCFGDWWREQGTAAKNTWLRSMNVRLTFDVRGGLTRTIDFGDLQEYGQHLRLGSVAERLHTGMS

SEQ ID NO: 9742 - protein, 500 aa, synthetic construct
MRAVVVIRLSRVTDATTSPERQLESCQQLCAQRGWDVVGVAEDLDVSGAVDPFDRKRRPNLARWLAFEEQPFDAIVAYRVDRLTRSIRHLQQLVHWAEDHKKLVVSATEAHFDTTTPFAAVVIALMGTVAQMELEAIKERIRSATHFNIRAGKYRGSLPPWGYLPARVDGEWRLVPDPVQRERILEVYHRVVDNHEPLHLVAHDLNRRGVLSPKDYFAQLRGREPQGREWSATALKRSMTSVAMLGYATLNGKTVRDDDGAPLVRAEPILTREQLEALRAELAKTSRAKPAVSTPSLLLRVLFCAVCGEPAYKFVGGGRKHPRYRCRSMGFPKHCGNGTVVMAEWDAFCEKQVLGLLGDAERLEKVWVAGSDSAVELAEVNAELVDLTSLIGSPAYRAGSPQRKALDARIAALAARQEELEGLEARPSGWEWRGTGQRLGDWWREQDTAAKNTWLRSMNVRLTFDVRGGLTRTIDFGDLQEYEQHLRLGSVAERLHTGMS

SEQ ID NO: 9743 - protein, 500 aa, synthetic construct
MRALVVIRLSRVTDATTSPERQLESCQQLCAQRGWDVVGVAEDLDVSGAVNPFDRRRRPNLARWLAFEEQPFDVIVAYRVDRLTRSTRHLQQLVHWAEDHKKLVVSATEAHFDTTTPFAAVVIALMGTVAQMELEAIKERIRSAVHFNIRAGKYRGSLPPWGYLPTRVDGEWRLVPDPVQRERILEVYHRVVDNHEPLHLVAHDLNRRGVLSPKDYFAQLQGREPRGRKWSATALKRSMISVAMLGHATLNGKIVRDDDGAPLVRAEPILTREQQEALRAELAKTSRAKPAVSTPSLLLRVLFCAVCGEPAYKFVGGGRKHPRYRCRSMGFPKHCGNGTVVMAEWDAFCEERVLDLLGDAERLERVWVAGSDSAVELAEVNAELVDLTSLIGSPAYRAGSPQREALDARIAALAARQEELEGLEARPSSWEWRETGQRFGDWWREQDTAAKNTWLRSMNVRLTFDVRGRLTRTIDFGDLQEYERHLRLGSVVERSHTGMS

SEQ ID NO: 9744 - protein, 500 aa, synthetic construct
MRALVVIRLSRVTDTTTSPERQLESCQQLCAQRGWDVVGVAEDLDVSGAVDPFDRKRRPNLARWLAFEEQPFDVIVAYRVDRLTRSVRHLQQLVHWAEDHKMLVVSATEAHFDTTTPFAAVVIALMGTVAQMELEAIKERNRSAAHFNIRAGKYRGSLPPWGYLPTRVGGEWRLVPDPVQRERILEVYHRVVDNHEPLHLVAHDLNRRGVLSPKDYFAQLRGREPQGRKWSATALKRSMISEAMLGYATLNGKTVRDDDGAPLVRAEPILTREQLEALRAELVKTSRAKPAVSTPSLLLRVLFCAACGEPAYKLAGGGRKHPRYRCRSMGFPKHCGNGTVAMAEWDAFCEEQVLDLLGDTERLEKVWVAGSDSAIELAEVNAELVDLTSLIGSPAYRAGSPQRETLDARIAALTARQEELEGLEARSSGWEWRETGQRFGDWWREQDTAAKNTWLRSMNVRLTFDVRGGLTRTIDFGDLQEYEQHLRLGSVVERLHTGMS

SEQ ID NO: 9745 - protein, 500 aa, synthetic construct
MRALVVIRLSRVTDATTSPERQLESCQQLCAQRGWDVVGVAEDLDVSGAVDPFDRKRRPNLARWLAFEEQPFDVLVAYRVDRLTRSTRHLQQLVHWAEDHKKLVVSATEAHFDTTTPFAAVVIALMGTVAQMELEAIKERNRSAAHFNIRAGKYRGSLPPWGYLPTRVDGEWRLVPDPVQRERILEVYRRVVDSHEPLHLVAHDLNRRGVLSPKDYFAQLRGREPQGRKWSATALKRSMISEAMLGYATLNGKTVRDDDGAPLVRAEPILTREQLEALRAELVKTSRAKPAVSTPSLLLRVLFCAVCGEPAYKFAGGGRKHPRYRCRSMGFPKHCGNGTVAMAEWDAFCEEQVLDLLGDAERLEKVWVAGSGSAVELAEVNAELVDLTSLIGSPAYRAGSPQREALDARIAALAARQEELEGLEARPSGWEWRGTGQRFGDWWREQDTAAKNTWLRSMNVRLTFDVRGGLTRTIDFGDLQEYEQHLRLGSVAERLHTGMS

SEQ ID NO: 9746 - protein, 500 aa, synthetic construct
MRALVVIRLSRVTDATTSPERQLESCQQLCAQRGWDVVGVAEDLDVSGAVDPFDRKRRPNLARWLAFEEQPFDVIVAYRVDRLARSTRHLQQLVHWAEDHKKLVVSATEAHFDTTTPFAAVVIALMGTVAQMELEAIKERIRSAAHFNIRAGKYRGSLPPWGYLPTRVDGEWRLAPDPVQRERILEVYHRVVDNHEPLHLVAHDLNRRGVLSPKDYFAQLQGREPQGRKWSATALKRSMISGAMLGYATLNGKIVRGDDGAPLVRAEPILTREQLEALRAEFAKTSRAKPAVSTPSLLLRVLFCAVCGEPAYKFVGGGRKYPRYRCRSMGFPKHCGNGTVVMTEWDTFCEEQVLGLLGDAERLEKVWVAGSDSSVELAEVNAELADLTSLIGSPAYRAGSLQRGALDARIAALAARQEELEGLEARPSGWEWRGTGQRFRDWWREQDTTAKNTWLRSMNVRLTFDVRGGLTRTIDFGDLQEYERHSRIGSVVERLRTGMP

SEQ ID NO: 9747 - protein, 500 aa, synthetic construct
MRALVVIRLSRVTDATTSPERQLESCQQLCAQRGWDVVGVAEDLDVSGAVDPFDRKRRPNLARWLAFEEQPFDVIVAYRVDRLTRSTRYLQQLVHWAEDHKKLVVSATEAHFDTTTPFAAVVIALMGTVAQMELEAIKERNRSAAHFNIRAGKYRGSLPPWGYLPTRVDGEWRLVPDPAQRERILEVYRRVVDNHEPLHLVAHDLNRRGVLSPKDYFAQLRGREPQGRKWSATALKRSMISEAMLGYAILNGKTVRDDDGAPLVRAEPILTREQLEALRAELVKTSRAKPAVSTPSLLLRVLFCAVCGEPAYKFAGGGRKHPRYRCRSMGFPKHCGNGTVAMAEWDAFCEEQVLNLLGDAERLEKVWVAGSDSAVELAEVNAELVDLTSLIGSPAYRAGSPQREALDARIAALAARQEELEGLEARPSGWEWRETGQRFGDWWREQDTAAKNTWLRSMNVRLTFDVRGGLTRTIDFGDLQEYEQHLRLGSMVERLHTGMS

SEQ ID NO: 9748 - protein, 500 aa, synthetic construct
MRALVVIRLSRVTDATTSPERQLESCQQLCAQRGWDVVGVAEDLDVSGAVDPFDRKRRPNLARWLAFEERPFDVIVAYRVDRLTRSTRHLQQLVRWAEDHKKLVVSATEAHFDTTTPFAAVVIALMGTVAQMELEAIKERSRSAVRFNIRAGKYRGSLPPWGYLPTRVDGEWRLVPDPVQRERILEVYHRVVDNHEPLHLVAHDLNQRGVLSPKDYFAQLQGREPQGRKWSATALKRSMISMAMLGYATLNGKIVRDDDGAPLVRAEPILTRGQQEALRAELAKTSRAKPAVSTPSLLLRVLFCAVCGEPAYKFVGGGRKHPRYRCRSMGFPKHCGNGTVVMAEWDAFCEEQVLDLLGDAERLEKVWVAGSDSAVELAEVNAELVDLTSLIGSPAYRAGSPQREALDARIAALAARQEELEGLEVRPSGWEWRETGQRFGDWWREQDTAAKNTWLRSMNVRLTFDVRGGPTRTIDFGDLQEYEQHLRLGGVVERSRTGMS

SEQ ID NO: 9749 - protein, 500 aa, synthetic construct
MRALVVIRLSRVTDATTSPERQLESCQQLCAQRGWDVAGVAEDLDVSGAVDPFDRKRRPNLARWLAFEEQPFDAIVAYRVDRLTRSVRHLQQLVHWAEDHKKLVVSATEAHFDTTTPFAAVVIALMGTVAQMELEAIRERIRSAVHFNIRAGKYRGSLPPWGYLPTRVDGEWRLAPDPVQRERILEVYHRVVDNHEPLHLVAHDLNRRGVLSPKDYFAQLRGRGPQGRKWSATALKRSMISAAMLGYATLNGKIVRDDAGAPLVRAEPILTREQQEALRAELAKTSRAKPAVSTPSLLLRVLFCAVCGEPAYKFVGGGRKHPRYRCRSMGFPEHCGNGTVVMAEWDAFCEEQVLNLLGDAEHLERVWVAGSDSAVELAEVNAELVDLTSLIGSPAYRASSPQREALDARIAALAARQEELEGLEARPSGWEWRETGQRFGDWWREQDTAARNTWLRSMNVRLTFDVRGGLTRTIDFGDLHEYEQHLRQGSVVGRLHTGMS

SEQ ID NO: 9750 - protein, 500 aa, synthetic construct
MRALVVIRLSRVTDVTTSPERQLESCQQLCAQRGWDVVGVAEDLDVSGAVDPFDRKRRPNLARWLAFEERPFDVIVAYRVDRLTRSTRHLQQLVHWAEDHKKLVVSATEAHFDTTTPFAAVVIALMGTVAQMELEAIKERNRSAAHFNIRAGKYRGSLPPWGYLPTRVDGEWRLVPDPVQRERILEVYRRVVDNHEPLHLVAHDLNRRGVLSPKDYFAQLRGREPQGRKWSATALKRSMISEAMLGYATLNGKTVRDDDGAPLVRAEPILTRGQLEALRAELVKTSRAKPAVSTPSLLLRVLFCAVCGEPAYKFAGGGRKHPRYRCRSMGFPKHCGNGTVVMAEWDAFCEEQVLDLLGDAERLEKVWVAGSDSAVELAEVNAELVDLTSLIGSPAYRAGSPQREALDARIAALAARQEELEGLEARPSGWEWRETGQRFGDWWREQDTAAKNTWLRSMNVRLTFDVRGGLTRTIDFGGLLECEQHLRLGSVVERLHTGMS

SEQ ID NO: 9751 - protein, 500 aa, synthetic construct
MRALVVIRLSRVTDATTSPERQLESCQQLCAQRGWDVVGVAEDLDVSGAVDPFDRKRRPNLARWLAFEEQPFDVIVAYRVDRLTRSTRHLQQLVRWAEDHKKLVVSATEAHFDTTTPFAAVVIALMGTVAQMELEAIKERCRSAAHFNIRAGKYRGSLPPWGYLPTRVEGEWRLVPDPVQRERILEVYHRVVDNHEPLHLVAHDLNRRGVLSPKDYFAQLQGREPQGRKWSATALKRSLISKAMLGYATLNGKIVRDDDGAPLVRAEPILTREQQEALRAELAKTSRAKPAVSTPSLLLRVLFCAVCGEPAYKFVGGGRKHPRYRCRSMGFPEHCGNGTVVMAEWDAFCEKQVLGLLGDAERLEKVWVAGSDSAVELAEVNAELVDLTSLIGSPAYRAGSPQREALDARIAALAARQEELEGLEARPSGWEWRGTGQRFGDWWREQDTAAKNTWLRSMNVRLTFDVRGGLTRTIDFGDLQEYEQRLRLGSVVERLRTGMS

SEQ ID NO: 9752 - protein, 500 aa, synthetic construct
MRALVVIRLSRVTDATTSPERQLESCQQLCAQRGWDVIGVAEDLDVSGAVDPFDRKRRPNLARWLAFEEQPFDVIVAYRVDRLTRSTRHLQQLVHWAEDHKKLVVSATEAHFDTTTPFAAVVIALMGTVAQMELEAIKERIRSAVHFNIRAGKYRGSLPPWGYLPTRVDGEWRLVPDPVQRERIIEVYHRVVDNHEPLHLVAYDLNRRGVLSPKDYFAQLRGREPQGRKWSATALKRSMISKAMLGYATLSGKIVRDDDGAPLVRAEPILTREQLEALRAELVKTSRAKPTVSTPSLLLRVLFCAVCGEPAYKFAGGGRKHPRYRCRSMGFPEHCGNGTVVMAEWDAFCEEQVLNLLGDAERLEKVWVAGSDSAVELAEVNAELVDLTSLIGSPAYRAGSPQREALDTRIAALAARQEELEGLEARPSGWEWRGTGLRFGDWWREQDTAAKNTWLRSMNVRLTFDARGGLTRTIDFGDLQEYEQHLRLGSAVGRLHTGTP

SEQ ID NO: 9753 - protein, 500 aa, synthetic construct
MRALVVIRLSRVTDATTSPERQLESCQQLCAQRGWDVVGVAEDLDVSGAVDPFDRKRRPNLARWLAFEEQPFDVIVAYRVDRLTRSTRHLQQLVHWAEDHKKLVVSATEAHFDTTTPFAAVVIALMGTVAQMELEAIKERIRSATHFNIRAGKYRGSLPPWGYLPTRVDGEWRLVPDPVQRERILEVYHRVVDNHEPLHLVAHDLNRRGVLSPRDYFAQLRGREPQGRKWSATALKRSMISAAMLGYATLNGKTVRDDDGAPLVRAEPILTRGQQEALRAELAKTSRAKPAVSTPSLLLRVLFCAVCGEPAYKFAGGGRKHPRYRCRSMGFPKHCGNGTVVMAEWDAFCEEQVLGLLGDAERLEKVWVAGSDSAVELAEVNAELVDLTSLICSPTYRAGSPQRGALDARIAALAARQEELESLEARPSGWEWRGTGQRLGDWWREQDTAAKNTWLRSMNIRLTFDVRGELTRTIDFGELQEYEQHLRSGSVVERLHTGMS

SEQ ID NO: 9754 - protein, 500 aa, synthetic construct
MRALVVIRLSRVTEATTSPERQLESCRQLCARRGWDVVGVAEDLDVSGAVDPFDRKRRPNLARWLASEEQPFDAIVAYRVDRLTRSVRHLQQLVHWAEDHKKLVVSATEAHFDTTTPFAAVVIALMGTVAQMELEAIKERIRSAAHFNIRAGKYRGSLPPWGYLPTRVDGEWRLVPDPVQRERILEVYHRVVDNHEPLHLVAHDLNRRGVLSPKDYFAQLQGREPQGRKWSATALKRSMTSVAMLGYATLNGKTVRDDDGAPLVRAEPILTREQQEALRAELAKTSRAKPAVSTPSLLLRVLFCAVCGEPAYKFVGGGRKHPRYRCRSMGFPKHCGNGTVVMAEWDAFCEEQVLGLLGDAERLEKVWVAGSDSAVELAEVNAELVDLTSLIGSPAYRTGSPQREALDARIAALTARQEELEGLEARPSGWEWRETGQRFGDWWREQDTAAKNTWLRSMNVRLTFDVRGGLTRTIDFGDLQEYEQHLRLGSVVERLHTGMP

SEQ ID NO: 9755 - protein, 500 aa, synthetic construct
MRALVVIRLSRVTDATTSPERQLESCQQLCAQRGWDVVGVAEDLDVSGAVDPFDRKRRLNLARWLAFEEQPFDVIVAYRVDRLTRSTRHLQQLVHWAEDHKKLVVSATEAHFDTTTPFAAVVIALMGTVAQMELEAIKERNRSAAHFNIRAGKYRGSLPPWGYLPTRVDGEWRLAPDPVQRERILEVYHRVVDNHEPLHLVAHDLNRRGVLSPKDYFAQLQGREPQGRKWSATALKRSMISEAMLGYATLNGKTVRDDDGAPLVRAEPILTREQLEALRAELVKTSRAKPAVSTPSLLLRVLFCAVCGEPAYKFAGGGRKHPRYRCRSMGFPKHCGNGTVVMAEWDTFCEEQVLGLLGDAERLEKVWVAGSDSAVELAEVNAELVDLTSLIGSPAYRAGSPQREALDARIAALAARQEELEGLGARPSGWEWREAGQRFGDWWREQDTAAKNTWLRSMNVRLTFDVRGGLTRTIDFGDLQEYKQHLRLGSVVERLHTGMS

SEQ ID NO: 9756 - protein, 500 aa, synthetic construct
MRALVVIRLSRVTDATTSPERQLESCQQLCAQRGWDVVGVAEDLDVSGAVNPFDRKRRPNLARWLAFEEQPFDVIVAYRVDRLTRSIRHLQQLVHWAEDHKKLVVSATEAHFDTTTPFAAVVIALMGTVAQMELEAIKERIRSAVRFNIRAGKYRGSLPPWGYLPTRVDGEWRLVPDPVQRERILEVYHRVVNNHESLHLVAHDLNRRGVLSPKDYFAQLRGREPQGRKWSATALRRSMTSVAMLGYATLNGKTVRDDDGAPLVRAEPILTREQQEALRAELVKTSRAKPAVSTPSLLLRVLFCAVCGEPAYKFVGGGRKHPRYRCRSMGFPEHCGNGTVVMAEWDAFCEEQVLGLLGDAERLEKVWVAGSDSAVELAEVNAELVDLTSLIGSPAYRAGSPQREALDVRIAALAARQEELEGSEARPSGWEWRETGQRFGDWWREQDTAAKNTWLRTMNVRLTFDVRGGLTRTIDFGELQEYERHLRLGSVAERLRTGMS

SEQ ID NO: 9757 - protein, 500 aa, synthetic construct
MRALVVIRLSRVTDATTSPERQLESCQQLCAQRGWDVVGVAEDLDVSGAVDPFDRKRRPNLARWLAFEEQPFDVIVAYRVDRLTRSTRHLQQLVHWAEDHKKLVVSATEAHFDTTTPFAAVVIALMGTVAQMELEAIKERNRSAAHFNIRAGKYRGSLPPWGYLPTRVDGEWRLVPDPVQRERILEVYHRVVDNHEPLHLVAHDLNRRGVLSPKDYFAQLRGREPQGRKWSATALKRSMISEAMLGYATLNGKTVRDDDGAPLVRAEPILTREQLEALRAELVKTSRAKPAVSTPSLLLRVLFCAVCGEPAYKSAGGGRKHPRYRCRSVGFPKHCGNGTVAMAEWDAFCEEQVLDLLGDAERLEKVWVAGSDSAVELAEVNAELVDLTSLIGSPAYRAGSPQREALDARIAALAARQEELEGLEARPSGWEWRETGQRFGDWWRGQDTAAKNTWLRSMNVRLTFDVRGGLTRTIDFGDLQEYEQRLRLGSVVERLHTGMS

SEQ ID NO: 9758 - protein, 500 aa, synthetic construct
MRALVVIRLSRVTDATTSPERQLESCQQLCAQRGWDVVGVAEDLDVSGAVDPFDRKRRPNLARWLAFEEQPFDVIVAYRVDRLTRSVRHLQQLVRWAEDHKKLVVSATEAHFDTTTPFAAVVIALMGTVAQMELEAIKERIRSAVHFNIRAGKYRGSLPPWGYLPTRVDGEWRLVPDPVQRERILEVYRRVVDNHEPLHLVAHDLNRRGVLSPKDYFAQLRGREPQGRKWSATALKRSMISVAMLGYATLNGKTVRDDDGAPLVRAEPILTREQLEALRAELVKTSRAKPAVSTPSLLLRVLFCAVCGEPAYKFAGGGRRHPRYRCRSMGSPKHCGNGTVVMTEWDAFCEEQVLNLLGDAERLEKVWVVGSDSAVELAEVNAELVDLTSLIGSPAYRAGSPQREALDARIAALAARQGELEGLEARSSGWEWRGTGQRFGDWWCEQDTAAKNTWLRSMNVRLTFDVRGGLTRTIDFGDLQEYERHLRSGSVVERLHTGMP

SEQ ID NO: 9759 - protein, 500 aa, synthetic construct
MRALVVIRLSRVTDATTSPERQLESCQQLCAQRGWDVVGVAEDLDVSGAVDPFDRKRRPNLARWLAFEEQPFDVIVAYRVDRLTRSTRHLQQLVHWAEDHKKLVVSATEAHFDTTTPFAAVVIALMGTVAQMELEAIKERNRSAAHFNIRAGKYRGSLPPWGYLPTRVDGEWRLVPDPVQRERILEVYHRVVDNHESLHLVAHDLNRRGVLSPKDYFAQLQGREPQGRKWSATALKRSMISEAMLGYATLNGKTVRDDDGAPLVRAEPILTRGQLEALRAELVKTSRAKPAVSTPSLLLRVLFCAVCGEPAYKFAGGGRKHPRYRCRSMGFPKHCGNGTVVMAEWDAFCEEQVLDLLGDAERLEKVWVAGSDSAVELAEVNAELVDLTSLIGSPAYRAGSPQREALDARIAALAARQEELEGLEARPSGWEWRETGQRFGDWWREQDTAAKNTWLRSVNVRLTFDVRGGLTRTIDFGDLQEYVQHLRSGSVVERLHTGMS

SEQ ID NO: 9760 - protein, 500 aa, synthetic construct
MRALVVIRLSRVTDATTSPERQLESCQQLCAQRGWDVVGVAEDLDVSGAVDPFDRKRRPNLARWLAFEEQPFDVIVAYRVDRLTRSVRHLQQLVHWAEDHKKLVVSATEAHFDTTTPFAAVVIALMGTVAQMELEAIKERNRSAAHFNIRAGKYRGSLPPWGYLPARVDGEWRLMPDPAQRERILEVYHRVVDNHEPLHLVAHDLNRRGVLSPKDYFAQLQGREPQGRKWSATALKRSMISETMLGYATLNGKTVRDDDGAPLVRAEPILTREQLEALRAKLVKTSRAKPAVSTPSLLLRVLFCAVCGEPAYKFAGGGRKHPRYRCRSMGFPKHCGNGTVVMAEWDAFCEEQVLNLLGDAERLEKVWVAGSDSAVELAEVSAELVDLTSLIGSPAYRAGSPQREALDARIAALAARQEELGGLGARPSGWEWRGTGQRFGDWWREQDTAAKNTWLRSMNVRLTFDVRGGLTRTIDFGDLQEYEQLLRSGSVVERLRTGMS

SEQ ID NO: 9761 - protein, 500 aa, synthetic construct
MRALVVIRLSRVTEATTSPERQLESCQQLCAQRGWDVVGVAEDLDVSGAVDPFDRKRRPNLARWLASEEQPFDVIVAYRVDRLTRSTRHLQQLVRWAEDHKKLVVSATEAHFDTTTPFAAVVIALMGTVAQMELEAIKERIRSAVHFNIRAGKYRGSLPPWGYLPTRVDGEWRLVPDPVQRERILEVYRRVVDNHEPLHLVAHDLNRRGVLSPKDYFAQLRGREPQGRKWSATALKRSMISAAMLGYATLNGKTVRDDDGAPLVRAEPILTREQQEALRAELAKTSRAKPAVSTPSLLLRVLFCAVCGEPAYKFVGGGRKHPRYRCRSMGSPKHCGNGTVVVTEWDTFCEEQVLGLLWDAERLEKVWVAGPDSSVELAEVNAELVDLTSLIGSPAYRAGSPQREALDARIAALAARQGELEGLEARPSGWEWRRTGQRFGDWWREQDTAAKNTWLRSMNVRLTFDVRGGLTRTIDFGDLQEYGQHLRLGSVVERLHTGVS

SEQ ID NO: 9762 - protein, 500 aa, synthetic construct
MRALIVIRLSRVTDATTSPERQLESCQQLCAQRGWDVIGVAEDLDVSGAVDPFDRKRRPNLARWLAFEEQPFDVIAAYRVDRLTRSVRHLQQLVHWAEDHKKLVVSATEVHFDTTTPFAAVVVALMGTVAQMELEAIKERNRSAAHFNIRAGKYRGSLPPWGYLPTRVDGEWRLAPDPVQRERILEVYHRVVDNHEPLHLVAHDLNRRGVLSPKDYFAQLQGREPQGRKWSATALKRSMTSVAMLGYATLNGKTVRDDDGAPLVRAEPILTREQLEALRAVLAKTSRAKPAASTPSLLLRVLFCAVCGEPAYKFAGGGRKHPRYRCRSMGFPKHCGNGTVAMAEWDAFCEEQVLDLLGDAERLEKVWVAGSDSAVELAEVNAELVDLTSLIGSPAYRAGSPQREALDARIAALAARQEELEGLEARPSGWEWRATGQRFGDWWREQDTAAKNTWLRSMNVRLTFDVRGGLTRTIDFGDLQEYEQHLRLGSVVERLHTGMS

SEQ ID NO: 9763 - protein, 500 aa, synthetic construct
MRALVVIRLSRVTDATTSPERQLESCQQLCAQRGWDVVGVAEDLDVSGAVDPFDRKRRPNLARWLAFEEQPFDAIVAYRVDRLTRSIRHLQQLVHWAEDHKKLVVSATEAHFDTTTPFAAVVIALMGTVAQMELEAIKERIRSAAHYNIRAGKYRGSLPPWGYLPTRVDGEWRLVPDPVQRERILEVYHRVVDNHEPLHLVAHDLNRRGVLSPKDYFAQLQGREPQGRKWSATALKRSMISKAMLGYATLNGKIVRDDDGAPLVRAEPILTREQQEALRAELAKTSRAKPAVSTPSLLLRVLFCAVCGEPAYKFVGGGRKHPRYRCRSMGFPEHCGNGTVVMAEWDAFCEEQVLDLLGDAERLEKVWVAGSDSAVELVEVNAELVDLTSLIGSPAYRTGSPQRKALDARIAALATRQEELESLEARPSGWEWRGTGQRFGDWWRQQDTAAKNTWLRSMNVRLTFDVRGGLTRTIDFGDLQEYEQHLRLGSVVERLHTGMS

SEQ ID NO: 9764 - protein, 500 aa, synthetic construct
MRALVVIRLSRVTDATTSPERQLESCQQLCAQRGWDVVGVAEDLDVSGAVDPFDRKRRPNLARWLAFEEQPFDVIVAYRVDRLTRSVRHLQQLVHWAEDHKKLVVSATEAHFDTTTPFAAVVIALMGTVAQMELEAIKERNRSAAHFNIRAGKYRGSLPPWGYLPTRVDGEWRLVPDPVQRERILEVYRRVVDNHEPLHLVAHDLNRRGVLSPKDYFAQLQGREPQGSKWSATALKRSMTSEAMLGYATLNGKTVRDDDGAPLVRAEPILTREQLEALRAELAKTSRAKPAVSTPSLLLRVLFCAVCGEPAYKFAGGGRKHPRYRCRSMGFPKHCGNGTVVMAEWDAFCEEQVLDLLGDAERLEKVWVAGSDSAVELAEVNAELVDLTSLIGSPAYRAGSPQREALDARITALAARQEELEGLEARPSGWEWRETGQRFGDWWREQDTAAKNTWLRSMNVRLTFDVRGGLTRAIDFGDLQEYEQHLRLGNVVERLHTGMS

SEQ ID NO: 9765 - protein, 500 aa, synthetic construct
MRALVVIRLSRVTDATTSPERQLESCRQLCAQRGWDVVGVAEDLNVSGAVDPFDRKRRPSLARWLAFEEQPFDVIVAYRVDRLTRSIRHLQQLVHWAEDHKKLVVSATEAHFDTTTPFAAVVIALMGTVAQMELEAIKERNRSAAHFNIRAGKYRGSLPPWGYLPTRVDGEWRLVPDPVQRERILEVYHRVVDNHEPLHLVAHDLNRRGVLSPKDYFAQLQGREPQGRKWSATALKRSMTSEAMLGYATLNGRTVRDDDGAPLVRAEPILTREQLEAIRAELVKTSRAKPAVSTPSLLLRVLFCAVCGEPAYKFAGGGRKRPRYRCRSMGFPKHCGNGTVVMAEWDAYCEEQVLDLLGDAERLEEVWVAGSDSAVELAEVNAELVDLTSLISSPAYRAGSPQREALDARIAALAARQEELEGLEARPSGWGWRGTGQRFGDWWREQDTAAKNTWLRSMNVRLTFDVRGGLTRTIDFGDLREYEQRLRLGSVVERLHTGMS

SEQ ID NO: 9766 - protein, 500 aa, synthetic construct
MRALVVIRLSRVTDATTSPERQLESCQQLCAQRGWDVVGVAEDLDVSGAVDPFDRKRRPNLARWLAFEEQPFDVIVAYRVDRLTRSTRHLQQLVHWAEDHKKLVVSATEAHFDTTTPFAAVVIALMGTVAQMELEAIKERNRSAAHFNIRAGKYRGSLPPWGYLPTRVDGEWRLVPDPVQRERILEVYHRVVDNHEPLHLVAHDLNRRGVLSPKDYFAQLQGREPQGRKWSATALKRSMISEAMLGYATLNGKTVRDDDGAPLVRAEPILTRGQLEALRAELVKTSRAKPAVSTPSLLLRVLFCAVCGEPAYKLAGGGRKHPRYRCRSIGSPKHCGNGTVAMAEWDAFCEEQVLDLLGDAERLEKVWVAGSDSAVELAEVNAELVDLTSLIGSPAYRAGSPQREALDVRIAALAARQEELEGLGARPSGWEWRETGQRFGDWWREQDTAAKNTWLRSMNVRLTFDVRGGLTRTVDFGDLLEYEQHLRLGSVVERLHTGMS

SEQ ID NO: 9767 - protein, 500 aa, synthetic construct
MRALVVIRLSRVTDATTSPERQLESCQQLCAQRGWDVVGVAEDLDVSGAVDPFDRKRRPNLARWLAFEERPFDVIVAYRVDRLTRSTRHLQQLVHWAEDHKKLVVSATEAHFDTTTPFAAVVIALMGTVAQMELEAIKERIRSAVHFNIRAGKYRGSLPPWGYLPTRVDGEWRLVPDPVQRERILEVYHRVVDNHEPLHLVAHDLNRRGVLSPKDYFAQLRGREPQGCKWSATALKRSMISKAMLGYATLNGKTVRDDDGAPLVRAEPILTRGQLEALRAELAKTSRAKPAVSTPSLLLRVLFCAVCGEPAYKFVGGGRKHPRYRCRSMGFPKHCGNGTVAMAEWDAFCEEQVLNLLGDAERLEKVWVAGSDSAVELAEVNAELVDLTSLIGSPAYRAGSPQREALDARIAALTVRQEELESLEARPSGWEWRETGQRFRDWWREQDTAAKNTWLRSMNVRLTFDVRGGLTRTIDFGELQEYVQHLRLGSVVERLHTGMS

SEQ ID NO: 9768 - protein, 500 aa, synthetic construct
MRALVVIRLSRVTDATTSPERQLESCQQLCAQRGWDVVGVAEDLDVSGAVDPFDRKRRPNLARWLAFEEQPFDVIVAYRVDRLTRSTRHLQQLVHWAEDHKKLVVSATEAHFDTTTPFAAVVIALMGTVAQMELEAIKERIRSAAHFNIRAGKYRGSLPPWGYLPTRVDGEWRLVPDPVQRERILEVYRRVVDNHEPLHLVAHDLNRRGVLSPKDYFAQLQGREPRGRKWSATALKRSMISVAMLGYATLNGKIVRDDDGAPLVRAEPILTREQQEALRAELAKTSRAKPAVSTPSLLLRVLFCAVCGEPAYKFVGGGRKHPRYRCRSMGFPKHCGNGTVVMAEWDAFCEEQVLNLLGDAEHLEKVWVAGSDSAVELAEVNAELVDLTSLIGSPAYRAGSPQREALDARIAALAARQEELEGLEARPSGWEWRETGQRFGDWWREQDTAAKNTWLRSMDVRLTFDVRGGLTRTVDFGDLQEYKQHLRSGSVVERLHTGMP

SEQ ID NO: 9769 - protein, 500 aa, synthetic construct
MRALVVIRLSRVTDATTSPERQLESCQQLCAQRGWDIVGVAEDLDVSGAVDPFDRKRRPNLARWLAFEEQPFDVIVAYRVDRLARSTRHLQRLVHWAEDHKKLIVSATEAHFDTTTPFAAVVIALMGTVAQMELEAIKERNRSAAHFNIRAGKYRGSLPPWGYLPTRVDGEWRLVPDPVQRERILEVYHRVVDNHEPLHLVAHDLNRRGVLSPKDYFAQLQGREPQGRKWSATALKRSMISEAMLGYATLNGKTVRDDDGAPLVRAEPILTRGQLEALRAELVRTSRAKPAVSTPSLLLRVLFCAVCGEPAYKFAGGGRKHPRYRCRSMGFPKHCGNGTVVMAEWDAFCEEQVLELLGDAERLEKVWVAGSDSAVELAEVNAELVDLTSLIGSPAYRASSPQREALDARIAALAARQEELEGLGARPSGWEWRETGQRFGDWWREQDTAVKNTWLRSMNVRLTFDVRGGLTRTIDFGDLQEYEQHLRLGSMVERLHTGTS

SEQ ID NO: 9770 - protein, 500 aa, synthetic construct
MRALVVIRLSRVTNATTSPERQLESCQQLCAQRGWDVVGVAEDLDVSGAVDPFDRKRRPNLARWLAFEEQPFDVIVAYRVDRLTRSTRHLQQLVHWAEDHKKLVVSATEAHFDTTTPFAAVVIALMGTVAQMELEAIKERIRSAVHFNIRAGKYRGSLPPWGYLPTRVDGEWRLVPDPVQRERILEVYHRVVDNHEPLHLVAHDLNRRGVLSPKDYFAQLRGREPRGRKWSATALRRSMTSVAMLGYATLNGKTVRGDDGAPLVRAEPILTREQLEALRAELVKTSRAKPAVSTPSLLLRVLFCAVCGEPAYKFVGGGRKHPRYRCRSMGFPKHCGNGTVVMAEWDAFCEEQVLDLLGDAERLEKVWVAGSDSAVELAEVNAELVDLTSLIGSPAYRAGSPQREALDVRIAALAARQEELEGLEARPSGWEWRETGQRFGDWWREQDTAAKNTWLRSMNVRLTFDVRGGLTRTIDFGDLQEYEQHLHLGCVVERLHTGMS

SEQ ID NO: 9771 - protein, 500 aa, synthetic construct
MRALIVIRLSRVTDATTSPVRQLESCQQLCAQRGWDVVGVAEDLDVSGAVDPFDRKRRPNLARWLAFEEQPFDVIVAYRVDRLTRSTRHLQQLVHWAEDHKKLVVSATEAHFDTTTPFAAVVIALMGTVAQMELEAIKERNRSAAHFNIRAGKYRGSLPPWGYLPARVDGEWRLVPDPVQRERILEVYHRVVDNHEPLHLVAHDLNRRGVLSPKDYFAQLRGREPQGRKWSATALRRSMISGAMLGYATLNGRTVRDDDGAPLVRAEPILTREQLEALRAELVKTSRAKPAVSAPSLLLRVLFCAVCGEPAYKLAGGGRKHPRYRCRSIGSPKHCGNGTVAMAEWDAFCEEQVLDLLGDAERLEKVWVAGSDSAVELAEVNAELVDLTSLIGSPAYRAGSPQREALDARIAALAARQEELEGLGARPSGWGWRETGQRFGDWWREQDTAAKNTWLRSMNVRLTFDVRGGLTRTVDFGDLQEYEQHLRLGSVVERLHTGMS

SEQ ID NO: 9772 - protein, 500 aa, synthetic construct
MRALVVVRLSRVTVATTSPERQLESCQQLCAQRGWDVVGVAEDLDVSGAVDPFDRKRRPNLARWLAFEEQPFDVIVAYRVDRLTRSTRHLQQLVRWAEDHKKLVVSATEAHFDTTTPFAAVVIALMGTVAQMELEAIKERIRSAVRFNIRAGKYRGSLPPWGYLPTRVDGEWRLVPDPVQRERILEVYHRVVDNHEPLHLVAHDLNRRGVLSPKDYFAQLQGREPQGRKWSATALRRSMTSVAMLGYATLNGKTVRDDDGAPLVRAEPILTREQQEALHAELAKTSRAKPAVSTPSLLLRVLFCAVCGEPAYKFVGGGRKHPRYRCRSMGFPEHCGNGTVVMAEWDAFCEEQVLNLLGDAERLEKVWVAGSDSAVELAEVNAELVDLTSLIGSPAYRAGSPQREALDARIAALAARQEELEGLEAHPSGWEWRETGQRFGDWWREQDTAAKNTWLRSMNVRLTFDVRGGLTRTIDFGDLQEYELHLRLGGVVERLHTGMS

SEQ ID NO: 9773 - protein, 500 aa, synthetic construct
MRALVVIRLSRVTDATTSPERQLESCQQLCAQRGWDVVGVAEDLDVSGAVNPFDRKRRPNLARWLAFEEQPFDVIVAYRVDRLTRSTRHLQQLVRWAEDHKKLVVSATEAHFDTTTPFAAVVIALMGTVAQMELEAIKERIRSAAHFNIRAGKYRGSLPPWGYLPTRVDGEWRLVPDPVQRERILEVYHRVVDNHEPLHLVAHDLNRRGVLSPKDYFAQLRGREPQGREWSATALKRSMISVAMLGYATLNGKIVRDDDGAPLVRAEPILTRGQQEALRAELAKTSRAKPAVSTPSLLLRVLFCAVCGEPAYKFAGGGRKHPRYRCRSMGSPEHCGNGTVVMAEWDAFCEEQVLDLLGDAERLEKVWVAGSDSAVELAEVNAELVDLTSLIGSPAYRAGSPQREALDARIAALAARQEELEGLEARPSGWEWRKTGQRFGDWWREQDTAAKNTWLRSMNVRLTFDVRGGLTRTIDFGDLQVYEQHLRLGSVAERLHTGMT

SEQ ID NO: 9774 - protein, 500 aa, synthetic construct
MRALVVIRLSRVTDATTSPERQLESCQQLCAQRGWGIVGVAEDLDVSGAVDPFDRKRRPNLARWLAFEEQPFDVIVAYRVDRLTRSTRHLQQLVHWAEDHKKLVVSATEAHFDTTTPFAAVVIALMGTVAQMELEAIKERNRSAAHFNIRAGKYRGSLPPWGYLPTRVDGEWRLAPDPVQRERILEVYHRVVDNHEPLHLVAHDLNRRGVLSPKDYFAQLQGREPQGRKWSATALKRSMISEAMLGYATLNGKTVRDDDGAPLVRAEPILTREQLEALRAELVKTSRAKPAVSTPSLLLRVLFCAVCGEPAYKFAGGGRKHPRYRCRSMGFPKHCGNGTVAMAEWDAFCEEQVLDLLGDAERLERVWVAGSDSAVELAEVNAELVDLASLIGSPAYRAGSPQREALDVRIAALAARQEELEGLKARPSGWEWRGTGQRFGDWWREQDTAAKNTWLRSMNVRLTFDVRGGLTRTIDFGDLQEYEQHLRLGSVVERLHTGMP

SEQ ID NO: 9775 - protein, 500 aa, synthetic construct
MRALVVIRLSRVTDATTSPERQLESCQQLCAQRGWDVVGVAEDLNVSGAVDPFDRKRRPNLARWLAFEEQPFDVIVAYRVDRLTRSIRHLQQLVRWAEDHKKLVVSATEAHFDTTTPFAAVVIALMGTVAQMELEAIKERSRSAAHFNIRAGKYRGSLPPWGYLPTRVDGEWRLVPDPVQRERILEVYHRVVDNHEPLHLVAHDLNRRGVLSPKDYFAQLQGREPQGRKWSATALKRSMTSVAMLGYATLNGKTVRDDDGAPLVRAEPILTREQQEALRAELVKTSRAKPAVSTPSLLLRVLFCAVCGEPAYKFVGGGRKHPRYRCRSMGFPEHCGNGTVVMAEWDAFCEKQVLGLLGDAERLEKVWVAGSDSAVELTEVNAELVDLTSLIGSPAYRAGSPQRKALDARIAALAARQEELEGLGARPSGWEWRETGQRFRDWWREQDTAAKNTWLRSMNVRLTFDVRGGLTRTIDFGDLQEYEQHLRLGSVVERLHTGMP

SEQ ID NO: 9776 - protein, 500 aa, synthetic construct
MRALVVIRLSRVTDATTSPERQLESCQQLCAQRGWDVVGVAEDLDVSGAVDPFDRKRRPNLARWLAFEEQPFDVIVAYRVDRLTRSTRHLQQLVHWAEDHKKLVVSATEAHFDTTTPFAAVVIALMGTVAQMELEAIKERNRSAAHFNIRAGKYRGSLPPWGYLPARVDREWRLVPDPVQRERILEVYHRVVDNHEPLHLVAHDLNRRGVLSPKDYFAQLQGREPQGRKWSATALKRSMTSVAMLGYVTLNGKTVRDDDGAPLVRAEPILTREQLEALRAELVKTSRAKPAVSTPSLLLRVLFCAVCGEPAYKFAGGGRKHPRYRCRSMGFPKHCGNGTVAMAEWDAFCEEQVLNLLGDVERLEKVWVAGSDSAVELAEVNAELVDLTSLIGSPAYRAGSPQREALDARIAALAARQEELEGLEARPSGWEWRGTGQRFGDWWREQDTAVKNAWLRSMNVRLTFDVRGGLTRAINFGDLQEYEQHLRLGSVAERLHTGMS

SEQ ID NO: 9777 - protein, 500 aa, synthetic construct
MRALVVIRLSRVTDATTSPERQLESCQQLCAQRGWDVVGVAEDLDVSGAVDPFDRKRRPNLARWLAFEEQPFDVIVAHRVDRLTRSTRHLQQLVHWAEDHKKLVVSATEAHFDTTTPFAAVVIALMGTVAQMELEAIKERNRSAAHFNIRAGKYRGSLPPWGYLPARVDGEWRLVPDPVQRERILEVYHRVVDNHEPLHLVAHDLNRRGVLSPKDYFAQLRGREPQGRKWSATALKRSMISEAMLGYATLNGKTVRDDDGAPLVRAEPILTRVQLEALRAELVKTSRAKPAVSTPSLLLRVIFCAVCGEPAYKFAGGGRKHPRYRCRSMGFPKHCGNGTVAMAEWDAFCEEQVLDLLGDAERLEKVWVAGSDAAVELAEVNAELADLTSLIGSPAYRAGSPQREALDARIAALAARQEELEGLEARPSGWEWRETGQRFGDWWREQDTAAKNTWLRSMNVRLTFDVRGGLTRTIDFGDLQEYEQHLRLGGVVERLHTGMS

SEQ ID NO: 9778 - protein, 500 aa, synthetic construct
MRALVVIRLSRVTEATTSPERQLESCQQLCAQRGWDVVGVAEDLDVSGAVDPFDRKRRPNLARWLAFEEQPFDVIVAYRVDRLTRSTRHLQQLVRWAEDHKKLVVSATEAHFDTTTPFAAVVIALTGTVAQMELEAIKERIRSAVRFNIRAGKYRGSLPPWGYLPARVDGEWRLVPDPVQRERILEVYHRVVDNHEPLHLVAHDLNRRGVLSPKDYFAQLQGREPQGREWSATALKRSMISVAMLGYATLNGKIVRDDDGAPLVRAEPILTREQQEALRAELAKTSRAKPAVSTPSLLLRVLFCAVCGEPAYKFVGGGRKHPRYRCRSMGFPRHCGNGTVVMAEWDAFCEEQVLNLLGDAERLEKVWVAGSDSAVELAEVNAELVDLTSLIGSPAYRAGSPQREALDTRIAALAARQEELEGLEARPSGWEWRETGQRFGDWWREQDTAAKNTWLRSMNVRLTFDVRGGLTRTIDLGDLQEYEQHLRLGSVVERLHTRMS

SEQ ID NO: 9779 - protein, 500 aa, synthetic construct
MRALVVIRLSRVTDATTSPERQLETCQQLCAQRGWDVVGVAEDLDVSGAVDPFDRKRRPNLARWLAFEEQPFDAIVAYRVDRLTRSVRHLQQLVHWAEDHKKLVVSATEAHFDTTTPFAAVVIALMGTVAQMELEAIKERNRSAAHFNIRAGKYRGSLPPWGYLPTRVDGEWRLVPDPVQRERILEVYHRVVDNHEPLHWVAHDLNRRGVLSPKDYFAQLQGREPQGRKWSATALKRSMISEAMLGYATLNGKTVRDDDGAPLVRAEPILTREQLEAVRAELVKASRAKPAVSTPSLLLRVLFCAVCGEPAYKFAGGGRKHPRYRCRSMGFPKHCGNGTVVMAEWDAFCEEQVLNLLGDAERLEKVWVAGSDSAVELSEVNAELVDLTGLIGSPAYRAGSPQREALDARIAALAARQEELEGLGARPSGWEWRETGQRFGDWWREQDTAAKNTWLRSMNVRLTFDVRGGLTRTIDFGDLQEYEQHLRLGSVVKRLHTGMS

SEQ ID NO: 9780 - protein, 500 aa, synthetic construct
MRALIVIRLSRVTDATTSPERQLESCQQLCAQRGWDVVGVAEDLDVSGAVDPFDRKRRPNLARWLAFEEQPFDVIVAYRVDRLTRSTRHLQQLVRWAEDHKKLVVSATEAHFDTTSPFAAVVIALMGTVAQMELEAIKERIRSAVHFNIRAGKYRGSLPPWGYLPTRVDGEWRLVPDPVQRERILEVYHRVVDNHESLHLVARDLNRRGILSPKDYFAQLQGREPQGRKWSATALRRSMTSEAMLGYATLNGKTVRDDDGAPLVRAEPILTREQLEALRAELAKTSRAKPAVSAPSLLLRVLFCAVCGEPAYKFVGGGRKHPRYRCRSMGFPEHCGNGTVVMAEWDAFCEEQVLNLLGDAEHLEKVWVAGSDSAVELAEVNAELMDLTSLIGSPAYRTGSPQREALDARIAALAARQEGLEGLEARPSGWEWRGTGQRFGDWWREQDTAAKNTWLRSMNVRLTFDVRGGLTRTIDFGDLQEYEQHLRVGSVVERLRTGMS

SEQ ID NO: 9781 - protein, 500 aa, synthetic construct
MRALVVIRLSRVTDATTSPERQLESCQQLCAQRGWDVVGVAEDLDVSGAVDPFDRKRRPNLARWLAFEEQPFDVIVAYRVDRLARSTRHLQQLVHWAEDHKKLVVSATEAHFDTTTPFAAVVIALMGTVAQMELEAIKERNRSAAHFNIRAGKYRGSLPPWGYLPTRVDGEWRLVPDPVQRERILEVYHRVVDNHEPLHLVAHDLNRRGVLSPKDYFAQLQGREPQGRKWSATALKRSMISEAMLGYATLNGKTVRGDDGAPLVRAEPILTREQLEALRAELVKTSRAKPAVSTPSLLLRVLFCAVCGEPAYKFAGGGRKHPRYRCRTMGSPKHCGNGTVAMAEWDAFCEEQVLDLLGDAERLEKVWVAGSDSAVELAEVNEELVDLTSLIGSPAYRAGSPQREALDARIVALAARQEELEGLGARPSGWGWRETGQRFGDWWREQDTAAKNTWLRSMNVRLTFDVRGGLTRTIDFGELQEYEQHLRLGSVVERLHTGMS

SEQ ID NO: 9782 - protein, 500 aa, synthetic construct
MRALVVIRLSRVTDATTSPERQLESCQQLCAQRGWDVVGVAEDLDVSGAVDPFDRKRRPNLARWLAFEEQPFDVIVAYRVDRLTRSTRHLQQLVHWAEDHKKLVVSATEAHFDTTTPFAAVVIALMGTVAQMELEAIKERNRSAAHFNIRAGKYRGSLPPWGYLPTRVDGEWRLAPDPVQRERILEVYHRVVDDHEPLHLVAHDLNRRGVLSPKDYFAQLQGREPQGRKWSATALKRSMISEAMLGYATLNGKTVRDDDGAPLVRAEPILTRVQQEALRAELVKTSRARPAVSTPSLLLRVLFCAVCGEPAYKFAGGGRKHPRYRCRSMGFPKHCGNGTVVMAEWDAFCEEQVLNLLGDVERLEKVWVAGSDSAVELAEVNAELVDLTGLIGSPAYRAGTPQREALDARIAALAARQEELEGLGARLSGWEWRETGQRFGDWWREQGTAAKNTWLRSMNVRLTFDVRGGLTRTIDFGDLQEYEQHLRLGSVVERLHTGMS

SEQ ID NO: 9783 - protein, 500 aa, synthetic construct
MRALVVIRLSRVTDATTSPERQLESCQQLCAQRGWDVVGVAEDLDVSGAVDPFDHKRRPNLARWLAFEEQPFDAIVAYRVDRLTRSVRHLQQLVHWAEDHKKLVVSATEAHFDTTTPFAAVVIALMGTVAQMELEAIKERNRSAAHFNIRAGKYRGSLPPWGYLPTRVDGEWRLVPDPVQRERILEVYHRVVDNHEPLHLVAHDLNRRGVLSPKDYFAQLRGREPQGRKWSATALKRSMISEAMLGYATLNGKTVRDDDGAPLVRAEPILTREQLEALRAVLVKTSRAKPAVSTPSLLLRVLFCAVCGEPAYKFAGGGRKHPRYRCRSMGFPKHCGNGTVAMAEWDAFCEEQVLDLLGDAERLEKVWVAGSDSAVELAEVNAELVDLTSLIGSPAYRAGSPQREALDARIAALAARQEELEGLEARPSGWGWRETGQRFGDWWREQDTAAKNTWLRSMNIRLTYDVRGGLTRTIDLGDLQEYEQHLRLGSVVERLHTGMS

SEQ ID NO: 9784 - protein, 500 aa, synthetic construct
MRALVVIRLSRVTDATTSPERQLESCQQLCAQRGWDVVGIAEDLDVSGAVDPFDRKRRPNLARWLAFEEQPFDVIVAYRVDRLTRSTRHLQQLVHWAEDHKKLVVSATEAHFDTTTPFAAVVIALMGTVAQMELEAIKERSRSATHFNIRAGKYRGSLPPWGYLPTRVDGEWRLVPDPVQRERILEVYHRVVDNHEPLHLVAHDLNRRGVLSPKDYFAQLRGREPQGRKWSATALRRSMTSGAMLGYATLNGKTVRDDDGAPLVRAEPILTREQLEALRAELAKTSRAKPAVSTPSLLLRVLFCAVCGEPAYKFVGGGRKHPRYRCRSMGFPKHCGNGTVVMAEWDAFCEEQVLNLLGDAERLEKVWVAGSDSAVELAEVNAELVDLTSLIGSPAYRAGSPQREALDARITALAARQEELEGLEARPSGWEWRETGQRFGDWWREQDTAAKNTWLRSMNVRLTFDVRGGLTRTIDFGDLQEYGQHLRLGSVVERLHTGVS

SEQ ID NO: 9785 - protein, 500 aa, synthetic construct
MRALVVIRLSRVTDATTSPERQLESCQQLCAQRGWDVVGVAEDLDVSGAVDPFDRKRRPNLARWLAFEERPFDVIVAYRVDRLTRSTRHLQQLVHWAEDHKKLVVSATEAHFDTTTPFAAVVIALMGTVAQMELEAIRERNRSAAHFNIRAGKYRGSLPPWGYLPTRVDGEWRLVPDPVQRERILEVYHRVVDNHEPLHLVAHDLNRRGVLSPKDYFAQLQGREPQGRKWSATALKRSMISEAMLGYATLNGKTVRDDDGAPLVRAEPILTREQLETLRAELVKTSRAKPAVSTPSLLLRVLFCAVCGEPAYKFAGGGRKHPRYRCRSMGFPKHCGNGTVVMAEWDAFCEEQVLDLLGDAERLEKVWVAGSDSAVELAEVNAELVDLSNLIGSPAYRAGSPQREALDARIAALAARQEELEGLGARPSGWEWRETGQRFGDWWREQDTAAKNTWLRSMNVRLTFDVRDGLTRTIDFGDLQEYEQRLRLGSVVERLHTGMS

SEQ ID NO: 9786 - protein, 500 aa, synthetic construct
MRALVVIRLSRVTDATTSPERQMESCQQLCAQRGWDVVGVAEDLDVSGAVDPFDRKRRPNLARWLAFEEQPFDVIVAYRVDRLTRSVRHLQQLVHWAEDHKKLVVSATEAHFDTTTPFAAVVIALMGTVAQMELEAIKERNRSAAHFNIRAGKYRGSLPPWGYLPARVDGEWRLVPDPVQRERILEVYHRVVDGHEPLHLVAHDLNRRGVLSPKDYFAQLRGREPQGRKWSATALKRSMISKAMLGYATLNGKTVRDDSGAPLVRAEPILTREQLEALRAELVKTSRAKPAVSTPSLLLRVLFCAVCGEPAYKFAGGGRKHPRYRCRSMGFPKHCGNGTVVMAEWDAFCEEQVLDLLGDAERLEKVWVAGSDSAVELAEVNSELVDLTSLIGSPAYRAGSPQREALDARIAALAARQEELEGLGARPSGWEWRETGQRFGDWWREQDTAEKNAWLRSMNVRLTFDVRGGLTRTIDFGDLQEYEQHLRLGSVVERLHTGMS

SEQ ID NO: 9787 - protein, 500 aa, synthetic construct
MRALVVIRLSRVTDATTSPERQLESCQQLCTQRGWDVVGVAEDLDVSGAVDPFDRKRRPNLARWLAFEEQPFDVIVAHRVDRLTRSTRHLQQLVHWAEDHKKLVVSATEAHFDTTTPFAAVVIALMGTVAQMELEAIKERNRSAAHFNIRAGKYRGSLPPWGYLPARVDGEWRLVPDPVQRERILEVYHRVVDNHEPLHLVAHDLNRRGILSPKDYFAQLQGRRPQGCEWSATALKRSMISVAMLGYATLNGKTVRDDDGAPLVRAEPILTREQLEALRAELVKTTRAKPAVSTPSLLLRVLFCAVCGEPAYKFAGGGRKHPRYRCRSMGFPKHCGNGTVAMAEWDAFCEEQVLNLLGDAERLEKVWVAGSDSAVELAEVNAELVDLTSLVSSPAYRAGSPQREALDARIAALAARQEELEGLEARPSGWEWRETGQRFGDWWREQDTAAKNSWLRSMNVRLTFDVRGGLTRTIDFGDLQEYEQHLRLGSVVERLHTGMS

SEQ ID NO: 9788 - protein, 500 aa, synthetic construct
MRALVVIRLSRVTDATTSPERQLESCQRLCAQRGWDVVGVAEDLDVSGAVDPFDRKRRPNLARWLAFEEQPFDVIVAYRVDRLTRSTRHLQQLVRWAEDHKKLVVSATEAHFDTTTPFAAVVIALMGTVAQMELEAIKERIRSAAHFNIRAGKYRGSLPPWGYLPARVDGEWRLVPDPVQRERILEVYHRVVDNHEPLHLVAHDLNRRGVLSPKDYFAQLRGREPQGRKWSATALKRSMISVAMLGYATLNGKIVRDDDGAPLVRAEPILTREQQEALRAELVRTSRAKPAVSTPSLLLRVLFCAVCGEPAYKFVGGGRKHPRYRCRSVGFPKHCGNGTVVMTEWDAFCEEQVLNLLGDAERLEKVWVAGSDSAVELAEVNAELVDLTSLIGSPAYRAGSPQREALDARIAALAARQEELESLEARPSGWEWRGTGQRLGDWWREQDTAAKNTWLRSMNVRLTFDVRGGPTRTIDFGDLQEYEQHLRSGSVVKRLHTGMP

SEQ ID NO: 9789 - protein, 500 aa, synthetic construct
MRALVVIRLSRVTDATTSPERQLESCQQLCAQRDWDVVGVAEDLDVSGAVDPFDRKRRPNLARWLAFEEQPFDVIVAYRVDRLTRSTRHLQQLVHWAEDHKKLVVSATEAHFDTTTPFAAVVIALMGTVAQMELEAIKERIRSAAHFNIRAGKYRGSLPPWGYLPARVDGEWRLVPDPMQRERILEVYHRVVDNHEPLHLVAHDLNRRGVLSPKDYFAQLRGREPQGRKWSATALRRSMTSVAMLGYATLNGKTVRDDDGAPLVRAEPILTREQLEALRAELAKTSRAKPAVSTPSLLLRVLFCAVCGEPAYKFVGGGRKHPRYRCRSMGFPEHCGNGTVVMAEWDAFCEEQVLNLLGDAERLEKVWVAGLDSAVELAEVNAELVDLTSLIGSPAYRAGSPQREALDARIAALAARQEELEGLEARPSGWEWRETGQRFGDWWREQDTAAKNTWLRSMNVRLTFDVRGGLTRTIDFGDLQEYEQHLRLGSAVERLRTGVS

SEQ ID NO: 9790 - protein, 500 aa, synthetic construct
MRALVVIRLSRVTDATTSPERQLESCQQFCAQRGWDVVGVAEDLDVSGAVDLFDRKRRPNLARWLAFEEQPFDVIVAYRVDRLTRSVRHLQQLVHWAEDHKKLVVSATEAHFDTTTPFAAVVIALMGTVAQMELEAIKERNRSAAHFNIRAGKYRGSLPPWGYLPSRVDGEWRLVPDPVQRERILEVYHRVVDNHEPLHLVAHDLNRRGVLSPKDYFAQLQGREPQGRKWSATALKRSMISEAMLGYATLNGKTVRDDDGAPLVRAEPILTREQLEALRAELVRASRAKPAVSTPSLLLRVLFCAVCGEPAYKFAGGGRKHPRYRCRSMGFSKHCGNGTVAMAEWDAFCEGQVLNLLGDAERLEKVWVAGSDSAVELAEVSAELVDLTSLIGSPAYRVGSPQREALDARIAALAARQEELEGLEARPSGWEWRGTGQRFGDWWREQDTAAKNTWLRSMNVRLTFDVRGGLTRTIDFGDLQEYEQHLRLGSVVERLHTGMS

SEQ ID NO: 9791 - protein, 500 aa, synthetic construct
MRALVVIRLSRVTDATTSPERQLESCQQLCAQRGWDVVGVAEDLDVSGAVDPFDRKRRPNLARWLAFEERPFDVIVAYRVDRLTRSVRHLQQLVHWAEDHKKLVVSATEAHFDTTTPFAAVVIALMGTVAQMELEAIKERNRSAAHFNIRAGKYRGSLPPWGYLPTRVDGEWRLVPDPVQRERILEVYRRVVDNHEPLHLVAHDLNRRGVLSPKDYFAQLQGREPQGRKWSATALKRSMISKAMLGYATLNGKIVRDDDGAPLVRAEPILTREQLEALRAELVKTSRAKPAVSTPSLLLRVLFCAVCGEPAYKFAGGGRKHPRYRCRSMGFPKHCGNGTVVMAEWDAFCEEQVLDLLGDAERLEKVWVAGSDSAVELAEVNAELVDLTSLIGSPAYRAGSPQREALDARIAALAARREELEGLEARPSGWEWRETGQRFGDWWREQDTAAKNTWLRSMNVRLTFDARGGLTRTIDFGDLQEYEQQLRLGSVVERLHTGMS

SEQ ID NO: 9792 - protein, 500 aa, synthetic construct
MRALVVIRLSRVTDTTTSPERQLESCQQLCAQRGWDVVGVAEDLDVSGAVDPFDRKRRPNLARWLAFEEQPFDVIVAYRVDRLTRSTRHLQQLVRWAEDHKKLVVSATEAHFDTTTPFAAVVIALMGTVAQMELEAIKERIRSAAHFNIRAGKYRGSLPPWGYLPTRVDGEWRLVPDPVQRERILEVYHRVVDNHEPLHLVAHDLNRHGVLSPKDYFAQLRGREPQGRKWSATALKRSMTSEAMLGYATLNGKTVRDDDGAPLVRAEPILTRVQLEALRAELVKTSRAKPAVSTPSLLLRVLFCAVCGEPAYKFTGGGRKHPRYRCRSMGFPEHCGNGTVVMAEWDAFCEEQVLGLLGDAERLEKVWVAGSDSTVELAEVNAELVDLTSLIGSPAYRAGSPQREALDARIAALAARQEELEGVEARPSGWEMRETGQRFGDWWREQDTAAKNTWLRSMNVRLTFDVRGGLTRTIDFGDLREYEQHLRLGSVVKRLHTGTS

SEQ ID NO: 9793 - protein, 500 aa, synthetic construct
MRALVVIRLSRVTDATTSPERQLESCQQLCAKRGWDVVGVAEDLDVSGAVDPFDRKRRPNLARWLAFEEQPFDVIVAYRVDRLTRSARHLQQLVHWAEDHKKLVVSATEAHFDTTTPFAAVVIALMGTVAQMELEAIKERNRSAAHFNIRAGKYRGSLPPWGYLPTRVDGEWRLVPDPVQRERILEVYHRVVDNHEPLHWVAHDLNRRGVLSPKDYFAQLQGREPQGRKWSATALKRSMISVAMLGYATLNGKTVRDDDGAPLVRAEPILTREQLEALRAELAKTSRAKPAVSTPSLLLRVLFCAVCGEPAYKFAGGGRKHPRYRCRSMGFPKHCGNGTVAMAEWDAFCEEQVLDLLGDAERLEKVWVAGSDSAVELAEVNAELVDLTSLIGSPAYRAGSPQREALDARIAALAARQEELEGLEARPSGWEWRGTGQRFGDWWREQDTAAKNTWLRSMNVRLTFDVRGGLTRTIDFGDLQEYEQYLRLGSVVGRLHTGML

SEQ ID NO: 9794 - protein, 500 aa, synthetic construct
MRALVVIRLSRVTDATTSPERQLESCRQLCAQRGWDVVGVAEDLDVSGAVDPFDRKRRPNLARWLAFEEQPFDVIVAYRVDRLTRSTRHLQQLVRWAEDHKKLVVSATEAHFDMTTPFAAVVVALMGTVAQMELEAIKERIRSAVRFNIRAGKYRGSLPPWGYLPARVDGEWRLVPDPVQRERILEVYHRVVDNHEPLYLVAHDLNRRGVLSPKDYFAQLRGREPRGREWSATALRRSMTSVAMLGYATLNGKTVRDDDGAPLVRAEPILTREQQEALRAELAKTSRAKPAVSTPSLLLRVLFCAVCGEPAYRFVGGGRKHPRYRCRSMGSPEHCGNGTVVMAEWDAFCEEQVLNLLGDAERLEKVWVAGSDSAVELAEVNAELVDLSSLIGSPAYRVGSPQREALGVRIAALAARQEELEGLEARPSGWEWRETGQRFGDWWREQDTAAKNTWLRSMNVRLTFDVRGGLTRAIDFGDLQEYERHLRLGSAVERLHTGMP

SEQ ID NO: 9795 - protein, 500 aa, synthetic construct
MRALVVIRLSRVTDTTTSPERQLESCQQLCAQRGWDVVGVAEDLDVSGAVDPFDRKRRPNLARWLAFEEQPFDVVVAYRVDRLTRSTRHLQQLVHWAEDHKKLVVSATEAHFDTTSPFAAVVIALMGTVAQMELEAIKERIRSAAHFNIRAGKYRGSLPPWGYLPTRVDGEWRLAPDPVQRERILEVYHRVVDNHEPLHLVAHDLNRRGVLSPKDYFAQLRGREPRGRKWSATALKRSMISVAMLGYATLNGKIVRDDDGAPLVRAEPILTREQLEALRTELVRTSRAKPAVSTPSLLLRVLFCAVCGEPAYKFVGGGRKHPRYRCRSMGFPKHCGNGTVAMAEWDAFCEEQVLELLGDAERLEKVWVAGSDSAVELAEVNAELVDLTSLIGSPAYRAGSPQREALDVRIAALAARQEELEGLEARPSGWEWRGTGQRFGDWWREQDTAAKNTWLRSMNVRLMFDVRGGLTRTIDFGDLQEYEQHLRLGSVVERSHTGTP

SEQ ID NO: 9796 - protein, 500 aa, synthetic construct
MRALVVIRLSRVTDATTSPERQLESCQQLCAQRGWDVVGVAEDLDVSGAVDPFDRKRRPNLARWLAFEEQPFDVIVAYRVDRLTRSTRHLQQLVHWAEDHKKLVVSATEAHFDTTTPFAAVVIALMGTVAQMELEAIKERNRSAAHFNIRAGKYRGSLPPWGYLPTRVDGEWRLMPDPVQRERILEVYHRVVDSHEPLHLVAHDLNRRGVLSPKDYFAQLQGREPQGRKWSATALKRSMISEAMLGYATLNGKTVRDDDGAPLVRAEPILTRGQLEALRAELVKTSRAKPAVSTPSLLLRVLFCAVCGEPAYKFAGGGRKHPRYRCRSMGFPKHCGNGTVVMAEWDAFCEEQVLDLLGDAERLEKVWVAGSDSAVELAEVNAELVDLTSLIGSPAYRAGSPQREALDARIAALAARQEELEGLEARPSGWGWRETGQRFGDWWREQDTAAKNTWLRSMNVRLTFDVRGGLTRTIDFGELREYEQHLRLGSVAERLHTGMS

SEQ ID NO: 9797 - protein, 500 aa, synthetic construct
MRALVVIRLSRVTDATTSPERQLESCHQLCAQRGWDVVGVAEDLDVSGAVDPFDRKRRPNLARWLAFEEQPFDVIVAYRVDRLTRSTRHLQQLVHWAEVHKKLVVSATEAHFDMTTPFAAVVIALMGTVAQMELEAIKERIRSAVHYNIRAGRYRGSLPPWGYLPTRVDGEWRLVPDPVQRERILEVYHRVVDNHEPLHLVAHDLNRRGVLSPKDYFAQLRGREPRGRKWSATALKRSMISVAMLGYATLNGRIVRDNDGAPLVRAEPILTREQQEALHAELAKTSRAKPAVSTPSLLLRVLFCAVCGEPAYKFVGGGRKHPRYRCRSMGLPKHCGNGTVVMAEWDAFCEEQVLGLLGDAERLEKVWVAGSDSAVELAEVNAELVDLTSLIGSPAYRAGSPQREALDARIAALAARQEELEGLEARPSGWEWRGTGQRLGDWWREQDTAAKNTWLRSMNVRLTFDVRGGLTRAIDFGDLQEYEQHLRLGSVAERLHTGMS

SEQ ID NO: 9798 - protein, 500 aa, synthetic construct
MRALVVIRLSRVTDATTSPERQLESCQQLCDQRDWNVVGVAEDLDVSGAVDPFDRKRRPNLARWLAFEEQPFDVIVAYRVDRLTRSVRHLQRLVRWAEDHKKLVVSATEAHFDMTTPFAAVVIALMGTVAQMELEAIKERSRSAAHFNIRAGKYRGSLPPWGYLPTRVDGEWRLVPDPVQRERILEVYRRVVDNHEPLHLVAHDLNRRGVLSPKDYFAQLRGREPQGRRWSATALKRSLISEAMLGYATLNGKTVRDDDGAPLVRAEPILTRGQLEALRAELGKTSRAKPAVSTPSLLLRVLFCAVCGEPAYKFVGGGRKHPRYRCRSMGFPKHCGNGTVVMAEWDAFCEEQVLDLLGDAERLEKVWVAGSDSAVELAEVNAELVDLTSLIGSPVYRAGSPQRGALDARIAALAVRQEELESLEARPSGWEWRGTGQRLGDWWREQDTATKNTWLRSMNVRLTFDVRGGLTRTIDFGELQEYEQHLRSGSVAERLRTGIP

SEQ ID NO: 9799 - protein, 500 aa, synthetic construct
MRALVVIRLSRVTEATTSPERQLESCRQLCAQRGWDVVGVAEDLDVSGAVDPFDRKRRPNLARWLAFEEQPFDVIVAYRVDRLTRSTRHLQQLVRWAEDHKKLVVSATEAHFDTTTPFAAVVIALMGTVAQMELEAIKERIRSAVHFNIRAGKYRGSLPPWGYLPTRVDGEWRLVPDPVQRERILEVYHRVVDNHEPLRLVAHDLNRRGVLSPKDYFAQLRGREPQGREWSATALRRSMTSVAMLGYATLNGKTVRDDDGAPLVRAEPILTREQLEALRAELAKTSRAKPAVSTPSLLLRVLFCAVCGEPAYKFVGGGRKHPRYRCRSMGFPEHCGNGTVVMAEWDAFCEEQVLNLLGDAERLEKVWVAGSDSAVELAEVNAELVDLTSLIGSPAYRAGSPQREALDARIAALAARQEELEGLEARPSGWEWRGTGQRFGDWWREQDTAAKNTWLRSMNVRLTFDVRGGLTRTIDFGDLQEYEQHLRLGSVVERLHTGMS

SEQ ID NO: 9800 - protein, 500 aa, synthetic construct
MRALVVIRLSRVTDATTSPERQLESCQQLCAQRGWDVVGVAEDLDVSGAVDPFDRKRRPSLARWLAFEEQPFDVIVAYRVDRLTRSTRHLQQLVHWAEDHKKLVVSATEAHFDTTTPFAAVVIALMGTVAQMELEAIKERNRSAAHFNIRAGKYRGSLPPWGYLPTRVDGEWRLVPDPVQCERILEVYHRVVDNHEPLHLVAHDLNRRGVLSPKDYFAQLQGREPQGRKWSATALKRSMISKAMLGYATLNGKTVRDDDGAPLVRAEPILTREQLEALRAELVKTSRAKPAVSTPSLLLRVLFCAVCGEPAYKFAGGGRKHPRYRCRSMGFPKHCGNGTVAMAEWDAFCEEQVLNLLGDAERLEKVWVAGSGSAVELAEVNAELVDLTSLIGSPAYRAGSPQREALDARIAALAARQEELEGLEARPSGWEWRGTGQRFGDWWREQDTAAKNTWLRSMNVRLTFDVRGGLTRTIDFGDLQEYEQHLRLDSVVKRLHTGMS

SEQ ID NO: 9801 - protein, 500 aa, synthetic construct
MRALVVIRLSRVTDATTSPERQLESCQQLCAQRGWDVVGVAEDLDVSGAVDPFDRKRRPNLARWLAFEEQPFDVIVAYRVDRLTRSTRHLQQLVHWAEDHKKLVVSATEAHFDTTTPFAAVVIALMGTVAQMELEAIKERNRSAAHFNIRAGRYRGSLPPWGYLPTRVDGEWRLVPDPVQRERILEVYHRVVDNHESLHLVAHDLNRRGVLSPKDYFAQLQGREPQGRKWSATALKRSMISEAMLGYATLSGETVRDDDGAPLVRAEPILTREQLEVLRAELVKTSRAKPAVSTPSLLLRVLFCAVCGEPAYKFAGRGRKHPRYRCRSMGFPKHCGNGTVVMAEWDAFCEEQVLDLLGDAERLEKVWVTGSDSAVELAEVNAELMDLTSLIGSPTYRTGSPQREALDARIAALAARQEELESLEARPSGWEWRETGQRFGDWWREQDTAAKNTWLRSMNVRLTFDVRGGLTRTIDFGDLQEYEQHLRLGSVVERLHTGMS

SEQ ID NO: 9802 - protein, 500 aa, synthetic construct
MRALVVIRLSRVTDATTSPERQLESCQQLCAQRGWDVVGVAEDLDVSGAVDPFDCKRRPNLARWLAFEEQPFDAIVAYRVDRLTRSVRHLQQLVHWAEDHKKLVVSATEAHFDTTTPFAAVVIALMGTVAQMELEAIKERNRSAAHFNIRAGKYRGSLPPWGYLPTRVDGEWRLAPDPVQRERILEVYHRVVDNHEPLHLVAHDLNRRGVLSPKDYFAQLQGREPQGRKWSATALKRSMISEAMLGYVTLNGKTVRGDDGAPLVRAEPILTRVQLEALRAELVKTSRTKPAVSTPSLLLRVLFCAVCGEPAYKFAGGGRKHPRYRCRSTGFPKHCGNGTVVMAEWDAFCEEQVLDRLGDAERLEKVWVAGSDSAVELAEVNAELVDLTSLIGSPAYRAGSPQREALDARIAALTARQEELEGLEARPSGWGWRGTGQRFGDWWHEQDTAAKNTWLRSMNVRLTFDVRGGLTRTIDFGDLQEYEQHLRLGGVVERLHTGMS

SEQ ID NO: 9803 - protein, 500 aa, synthetic construct
MRALVVIRLSRVTDATTSPERQLESCQQLCAQRGWDVVGVAEDLDVSGAVNPFDRKRRPNLARWLAFEEQPFDVIVAYRVDRLTRSTRHLQQLVHWAEDHKKLVVSATEAHFDTTTPFAAVVIALMGTVAQMELEAIKERNRSAAHFNIRAGKYRGSLPPWGYLPARVDGEWRLVPDPVQRERILEVYHRVVDNHEPLHLVAHDLNRRGVLSPKDYFAQLQGREPQGRMWSATALKRSMISEAMLGYATLNGKTVRDDDGAPLVRAEPILTRVQLEALRAELVKASRAKPAVSTPSLLLRVLFCAVCGEPAYKFAGGGRKHPRYRCRSMGFPKHCGNGTVVMAEWDAFCEEQVLDLLGDAERLEKVWVAGSDSAVELAEVNAELEDLTGLIGSPAYRAGSPQRVALDARIAALAARQEELEGLEARPSGWEWRGTGQRFGDWWREQDTAAKNTWLRSMDVRLTFDVRGGLTRTIDFGGLQEYEQHLRLGSVVERLHTGTS

SEQ ID NO: 9804 - protein, 500 aa, synthetic construct
MRALVVIRLSRVTDATTSPERQLESCQQLCAQRGWDVVGVAEDLDVSGAVDPFDRKRRPNLARWLAFEEQPFDVIVAYRVDRLTRSTRHLQQLVRWAEDHKKLVVSATEAHFDTTTPFAAVVIALMGTVAQMELEAIKERIRSAAHYNIRAGKYRGSLPPWGYLPTRVDGEWRLVPDPVQRERILEVYHRVVDNHEPLHTVAHDLNRRGVLSPKDYFAQLRGREPQGRKWSATALRRSMISVAMLGYATLSGKIVRDDDGAPLVRAEPILTRGQQEALRAELVKTSRAKPAVSTPSLLLRVLFCAVCGEPAYKFAGGGRKHPRYRCRSMGFPEHCGNGTVVMAEWDAFCEEQVLGLLGDAERLEKVWVAGSDSAVELAEVNAELVDLTSLIGSPAYRAGSPQREALDARITALAARQEELESLEARPSGWEWRETGQRFRDWWREQDTAAKNTWLRSMNIRLTFDVRGGLTRTIDFGELQEYEQHLRSGSVVERLHTGMS

SEQ ID NO: 9805 - protein, 500 aa, synthetic construct
MRALVVIRLSRVTDATTSPERQLESCQQHCAQRGWDVVGVAEDLDVSGAVDPFDRKRRPNLARWLAFEEQPFDVIVAYRVDRLTRSTRHLQQLVHWAEDHKKLVVSATEAHFDTTTPFAAVVIALMGTVAQMELEAIKERNRSAAHFNIRAGKYRGSLPPWGYLPARVDGEWRLVPDPVQRERILEVYHRVVDNHEPLHLVAHDLNRHGVLSPKDHFAQLQGREPQGRKWSATALKRSMTSEAMLGYATLNGKTVRDDDGAPLVRAEPILTREQLEALRAELVKTSRAKPAVSTPSLLLRVLFCAVCGEPAYKFAGGGRKHPRYRCRSMGFPKHCGNGTVVMAEWDAFCEEQVLDLLGDAERLEKVWVAGSDSAVELAEVNAELVDLMSLIGSPAYRAGSPQREALDARIAALAARQEELEGLGARPSGWGWRETGQRFGDWWREQDTAAKNTWLRSMNVRLTFDVRGGLTRTIGFGDLQEYVQHLRLGSVVGRLHTGMP

SEQ ID NO: 9806 - protein, 500 aa, synthetic construct
MRALVVIRLSRVTDATTSPERQLESCQEHCAQRGWDVVGVAEDLDVSGAVDPFDRKRRPNLARWLAFEEQPFDVIVAYRVDRLARSIRHLQQLVHWAEDHKKLVVSATEAHFDTTTPFAAVVIALMGTVAQMELEAIKERNRSAAHFNIRAGKYRGSLPPWGYLPTRVDGEWRLVPDPVQRERILEVYHRVVVNHEPLHLVAHDLNRRGVLSPKDYFAQLQGREPQGRKWSATALKRSMISEAMLGHATLNGKTVRDDDGAPLVRAEPILTREQLEALRAELVKTSRAKPAVSTPSLLLRVLFCAVCGEPAYKFAGGGRKHPRYRCRSLGFPKHCGNGTVAMAEWDAFCEEQVLNLLGDAERLEKVWVAGSDSAVELAEVNAELVDLTSLIGSPAYRAGSPQREALDARIAALAARQEELEGLEARPSGWEWRGTGQRFGDWWREQDTAAKNTWLRSMNVRLTFDARGGLTRTIDFGGLQEYEQHLRLGSVVERLHTGTS

SEQ ID NO: 9807 - protein, 500 aa, synthetic construct
MRALVVIRLSRVTDATTSPERQLESCQQLCAQRGWDVVGVAEDLDVSGAVDPFDRRRRPNLARWLAFEEQPFDAIVAYRIDRLTRSIRHLQQLVRWAEDHKKLVVSATEAHFDTTTPFAAVVIALMGTVAQMELEAIKERIRSAAHFNIRAGKYRGSLPPWGYLPTRVDGEWRLAPDPVQRERILEVYHRVVDNHEPLHLVAHDLNRRGVLSPKDYFAQVRGREPRGRKWSATALKRSMISVAMLGYATLNGKIVRDDDGAPLVRAEPILTREQQEALRAELAKTSRAKPAVSTPSLLLRVLFCAVCGEPAYKFVGGGRKHPRYRCRSMGFPKHCGNGTVAMAEWDAFCEEQVLNLLGDAERLEKVWVAGSDSAVELAEVNAELVDLTSLIGSPAYRAGSPQREALDTRIAALAARQEELEGLGARPSGWEWRETGQRFGDWWREQDTAAKNTWLRSMNVRLTFDVRGGLTRTIDFGELQEYEQHLRLGSVVERLHTGMS

SEQ ID NO: 9808 - protein, 500 aa, synthetic construct
MRALIVIRLSRVTDATTSPERQLESCRQLCAQRGWDVVGVAEDLDVSGAVDPFDRKRRPNLARWLAFEEQPFDVIVAYRVDRLTRSTRHLQQLVHWAEDHKKLVVSATEAHFDTTTPFAAVVIALMGTVAQMELEAIKERSRSAAHFNIRAGKYRGSLPPWGYLPTRVNGEWRLVPDPVQRERILEVYHRVVDNHEPLHLVAHDLNRRGILSPKDYFAQLRGREPQGREWSATALKRSMTSVAMLGYATLNGKIVRDDGGAPLVRAEPILTRGQQEALRAELVKTSRAKPAVSTPSLLLRVLFCAVCGEPAYKFVGGGRKHPRYRCRSMGFPKHCGNGTVVMTEWDAFCEEQVLGLLGDTERLERVWVAGSDSAVELAEVNAELVDLTSLIGSPAYRAGSPQREALDARIAALAARQEELEGLEARPSGWEWRETGQRFRDWWREQDTAAKNTWLRSMNVRLTFDVRSGLTRMIDFGDLREYERHLRLGSVAERLRTGTS

SEQ ID NO: 9809 - protein, 500 aa, synthetic construct
MRALVVIRLSRVTDTTTSPERQLESCQQLCAQRGWDVVGVAEDLDVSGAVDPFDRKRRPNLARWLAFEERPFDVIVAYRVDRLTRSTRHLQQLVHWAEDHKKLVVSATEAHFDTTTPFAAVVIALMGTVAQMELEAIKERNRSAAHFNIRAGKYRGSLPPWGYLPTRVDGEWRLVPDPVQRERILEVYHRVVDNHEPLHLVAHDLNRRGVLSPKDYFAQLQGREPRGRKWSATALKRSMISEAMLGYATLNGKTVRDDDGAPLVRAEPILTREQLEALRAELVKTPRAKPAVSTPSLLLRVLFCAVCGEPAYKFAGGGRKHPRYRCRSMGFPKHCGNGSVAMAEWDAFCEEQVLDLLGDAERLEKVWVAGSDSAVELAEVNAELVDLTSLIGSPAYRAGSPQREALDARIAALAARQEELEGLEARPSGWEWRETGQRFGDWWREQDTAAKNTWLRSMNVRLTFDARGGLTRTIDYGDLQEYEQHLRLGSVVERLHTGMS

SEQ ID NO: 9810 - protein, 500 aa, synthetic construct
MRALVVIRLSRVTDATTSPERQLESCQQLCAQRGWDVVGVAEDLDVSGAVDPFDRKRRPNLARWLAFEEQPFDVIVAHRVDRLTRSTRHLQQLVHWAEDHKKLVVSATEAHFDTTTPFAAVVIALMGTVAQMELEAIKERNRSAAHFNIRAGKYRGSLPPWGYLPTRVDGEWRLVPDPVQRERILEVYHRVVDNHEPLHLVAHDLNRRGVLSPKDYFAQLRGREPQGRKWSATALKRSMTSEAMLGYATLNGKTVRDDDGTPLVRAEPILTRGQLEALRAELAKTSRAKPAVSTPSLLLRVLFCAVCGEPAYKFAGGGRKHPRYRCRSMGFPKHCGNGTVVMAEWDAFCEEQVLGLLGDAERLEKVWVVGSDSVVELAEVNAELVDLMSLIGSPAYRAGSPQREALDARIAALAARQEELEGLEARPSGWEWRETGQRFGDWWREQDTAAKNTWLRSMNVRLTFDVRGGLTRTIDFGDLQEYEQHSRLGSVVERLHTGVS

SEQ ID NO: 9811 - protein, 500 aa, synthetic construct
MRALVVIRLSRVTDATTSPERQLESCQQLCAQRGWDVVGVAEDLDVSGAVDPFDRKRRPNLARWLAFEEQPFDAIVAYRVDRLARSVRHLQQLVHWAEDHKKLVVSATEAHFDTTTPFAAVVIALMGTVAQMELEAIKERNRSAAHFNIRAGKYRGSLPPWGYLPTRVDGEWRLMPDPVQRERILEVYHRVVDNHEPLHLVAHDLNRRGVLSPKDYFAQLQGREPQGRRWSATALKRSMISEAMLGYATLNGKTVRDDDGAPLVRAEPILTREQLEALRAELVKTSRAKPAVSTPSLLLRVLFCAVCGEPAYKFAGGGRKHPRYRCRSMGFPKHCGNGTVVMAEWDAFCEEQVLDLLGDAERLEKVWVAGSDSAVELAEVNAELVDLTSLIGSPAYRAGSPQREALDARIAALAARQEELEGLEARPSGWEWRETGQRFGDWWREQDTAAKNTWLRSMNVRLTFDVRGGLTRTIDFGGLQEYEQHLRLGSVVERLHTGMS

SEQ ID NO: 9812 - protein, 500 aa, synthetic construct
MRALVVIRLSRVTDATTSPERQLESCQQLCAQRGWDVVGVAEDLDVSGAVDPFDRKRRPNLARWLAFEEQPFDVIVAYRVDRLTRSTRHLQQLVRWAEDHKKLVVSATEAHFDTTTPFAAVVVALMGTVAQMELEAIKERSRSAAHFNIRAGKYRGSLPPWGYLPTRVDGEWRLVPDPVQRERILEVYHRVVDNHEPLHLVAYDLNRRGVLSPKDYFAQLRGREPRGRKWSATALKRSMTSVAMLGYATLNGKTVRDDDGAPLVRAEPILTREQQEALRAELAKTSRAKPAVSTPSLLLRVLFCAVCGEPAYKFAGGGRKHPRYRCRSMGFPKHCGNGTVVMAEWDAFCEEQVLNLLGDAERLERVWVVGSDSAVELAEVNAELVDLTSLIGSPAYRAGSPQREALDARIAALAARQEELEGLGAHPSGWEWRGTGQRFGDWWREQDTAAKNTWLRSMNIRLTFDVRGGLTRTIDLGDLQECEQHLRSGSVAERLHTGMS

SEQ ID NO: 9813 - protein, 500 aa, synthetic construct
MRALVVIRLSRVTDATTSPERQLESCQQLCAQRGWDVVGVAEDLDVSGAVDPFDRKRRPNLARWLAFEEQPFDAIVAYRVDRLTRSIRHLQQLVHWAEDHKKLVVSATEAHFDTTTPFAAVVIALMGTVAQMELEAIKERIRSAVRFNIRAGKYRGSLPPWGYLPTRVDGEWRLAPDPVQRERILEVYHRVVDNHEPLHLVAHDLNRRGVLSPKDYFAQLRGREPQGRKWSATALKRSMISVAMLGYATLNGKIVRDDDGAPLVRAEPILTREQQEALRAELVKTSRAKPAVSTPSLLLRVLFCAVCGEPAYKFVGGGRKHPRYRCRSTGFPRHCGNGTVVMAEWDAFCEEQVLDLLGDAERLEKVWVAGSDSAVELAEVNAELVDLTSLIGSPAYRAGSPQREALDARIAALAARQEELEGLEARPSGWEWRGTGQRFGDWWREQDTAAKNTWLRSMNVRLTFDVRGGPTRTIDFGDLQEYEQHLRLGSVVERLHTGTS

SEQ ID NO: 9814 - protein, 500 aa, synthetic construct
MRALVVIRLSRVTDATTSPERQLESCQQLCAQRGWDVVGVAEDLDVSGAVDPFDRKRRPNLARWLAFEEQPFDVIVAYRVDRLTRSVRHLQQLVHWAEDHKKLVVSATEAHFDTTTPFAAVVIALMGTVAQMELEAIKERIRSAVHFNIRAGKYRGSLPPWGYLPTRVGGEWRLVPDPVQRERILEVYHRVVDNHEPLHLVAHDLNRRGVLSPKDYFAQLRGREPQGRKWSATALKRSLISGAMLGYATLNGKTVRDDDGAPLVRAEPILTREQQEALRAELAKTSRVKPAVSTPSLLLRVLFCAVCGEPAYKFAGGGRKHPRYRCRSMGFPKHCGNGTVVVAEWDAFCEEQVLNLLGDAERLEKVWVAGSDSAVELAEVNAELVDLTSLIGSPAYRADSPQREALDARIAALAARQEELESLEARPSGWEWRETGQRFGDWWREQDTAAKNTWLRSMNVRLTFDVRGGLTRTIYFGELQEYEQHSRLGGVVKRLHTGMS

SEQ ID NO: 9815 - protein, 500 aa, synthetic construct
MRALVVIRLSRVTDATTSPERQLESCQQLCAQRGWDVVGVAEDLDVSGAVDPFDRKRRPNLARWLAFEEQPFDVIVAYRVDRLTRSTRHLQQLVHWAEDHKKLVVSATEAHFDTTTPFAAVVIALMGTVAQMELEAIKERNRSAAHFNIRAGKYRGSLPPWGYLPARVDGEWRLVPDPVQRERILEVYHRVVDDHEPLHLVAHDLNRRGVLSPKDYFAQLQGREPQGRKWSATALKRSMISEAMLGYATLHGKTVRGDDGVPLVRAEPILTRVQLEALRAELVKTSRAKPAVSTPSLLLRVLFCAVCGEPAYKFAGGGRKHPRYRCRSMGFPKHCGNGTVAMAEWDAFCEEQVLALLGDAERLEKVWVAGSDSAVELAEVSAELVDLTSLIGSPAYRAGSPQREALDARIAALAARQEELEGLEARPSGWEWRETGQRFGDWWREQDTAAKNTWLRSMNVRLTFDVRGGLTRTIDFGDLQEYEQHLRLGSVVERLHAGMS

SEQ ID NO: 9816 - protein, 500 aa, synthetic construct
MRALVVIRLSRVTDATTSPERQLESCQQLCAQRGWDVVGVAEDLDVSGAVDPFDRKRRPNLARWLAFEEQPFDVIVAYRVDRLTRSTRHLQQLVHWAEDHKKLVVSATEAHFDTTTPFAAVVIALMGTVAQMELEAIKERNRSAAHFNIRAGKYRGSLPPWGYLPTRVDGEWRLVPDPVQRERILEVYHRVVDNHEPLYLVAHDLNRRGVLSPKDYFAQLRGREPQGRKWSATALKRSMISEAMLGYATLNGKTVRDDDGAPLVRAEPILTREQLETLRAELVKTSRAKPAVSTPSLLLRVLFCAVCGEPAYKLAGGGRKHPRYRCRSMGFPKHCGNGTVSMAEWDAFCEEQVLDQLGDVERLEKVWVAGSDSALELAEVNVELVDLMSLIGSPAYRAGSPQREALDARIAALAARQEELEGLEARPSGWGWRETGQRFGDWWREQDTAAKNTWLRSMNVRLTFDVRGGLTRTIDFGDLQEYEQHLRSGSVVERLHTGMS

SEQ ID NO: 9817 - protein, 500 aa, synthetic construct
MRALVVIRLSRVTDATTSPERQLESCQQLCAQRGWVVVGVAEDLDVSGAVDPFDRKRRPNLARWLAFEEQPFDVIVAYRVDRLTRSTRHLQQLVHWAEDHKKLVVSATEAHFDTTTPFAAVVIALVGTVAQMELEAIKERIRSATHFNIRAGKYRGSLPPWGYLPTRVDGEWRLVPDPVQRERILEVYHRVVDNHEPLHLVAHDLNRRGVLSPKDYFAQLRGREPRGRKWSATALKRSMTSVAMLGYATLNGKTVRDDGGAPLVRAEPILTREQLEALRAELVKTSRAKPAVSTPSLLLRVLFCAVCGEPAYKFVGGGRKHPRYRCRSMGFPKHCGNGTVAMAEWDAFCEEQVLNLLGDAERLEKVWVAGSDSAVELAEVNAELVDLTSLIGSPAYRAGSPQREALDARIAALAARQEELESLEARPSGWEWRGTGQRFGDWWREQDTAAKNTWLRSMNVRLTFDSRGGLTRTIDFGDLQEYEQHLRLDSVVERSHTGMS

SEQ ID NO: 9818 - protein, 500 aa, synthetic construct
MRALVVIRLSRVTDATTSPERQLESCQQLCAQRGWDVVGVAEDLDVSGAVDPFDRKRRPNLARWLAFEEQPFDVIVACRVDRLTRSTRHLQQLVRWAEDHKKLVVSATEAHFDTTTPFAAVVIALMGTVAQMELEAIKERIRSAVRFNIRAGKYRGSLPPWGYLPTRVDGEWRLVPDPVQRERILEVYHRVVDNHEPLHLVAYDLNRRGVLSPKDYFAQLQGREPQGREWSATALKRSMTSVAMLGYATLNGKTVRDDDGAPLVRAEPILTREQLEALRAELVKTSRAKPAVSSPSLLLRVLFCAVCGEPAYKFVGGGRKHPRYRCRSMGFPKHCGNGTVVMAEWDAFCEEQVLRLLGDAERLEKVWVAGSDSAVELAEVNAELVDLASLISSPAYRAGSPQREALDARIAALAARQEELEGLEARPSGWEWRGTGQRLGDWWREQDTAAKNTWLRSMNVRLTFDVRGGLTRTIDFGDLQEYEQHLRSGSVVERLHTGMS

SEQ ID NO: 9819 - protein, 500 aa, synthetic construct
MRALVVIRLSRVTDATTSPECQLESCQQLCAQRGWDVVGVAEDLDVSGAVDPFDRKRRPNLARWLAFEEQPFDVIVAYRVDRLTRSTRHLQQLVHWAEDHKKLVVSATEAHFDTTTPFAAVVIALMGTVAQMELEAIKERNRSAAHFNIRAGKYRGSLPPWGYLPTRVDGEWRLVPDPVQRERILEVYHRVVDNHEPLHLVAHDLNRRGVLSPKDYFAQLRGREPQGRKWSATALKRSMISEAMLGYATLNGKTVRDEDGAPLVRAEPILTRGQLEALRAVLVKTSRAKPAVSTPSLLLRVLFCAVCGEPAYKFAGGGRKHPRYRCRSMGFPKHCGNGTVAMTEWDAFCEEQVLNLLGDAERLEKVWVAGSDSAVELAEVSAELVDLTSLIGSPAYRAGSPQREALDARIAALAARQEELEGLGARPSGWEWCETGQRFGDWWREQDTAAKNTWLRSMNVRLTFDVRGGLTRTIDFGDLQEYEQHLRSGSVVERLHTGMS

SEQ ID NO: 9820 - protein, 500 aa, synthetic construct
MRALVVIRLSRVTDATTSPERQLESCQQLCAQRGWDVIGVAEDLDVSGAVDPFDRKRRPNLARWLAFEEQPFDAIVAYRVDRLTRSVRHLQQLVHWAEDHKKLVVSATEAHFDTTTPFAAVVIALMGTVAQMELEAIKERNRSAAHFNIRAGKYRGSLPPWGYLPARVDGEWRLVPDPVQRERILEVYHRVVDNHEPLHLVAHDLNRRGDLSPKDYFAQLQGREPQGRKWSATALKRSMISEAMLGYATLNGKTVRDDDGAPLVRAEPILTRGQLEALRAELVKTSRAKPAVSAPSLLLRVLFCAVCGEPAYKFAGGGHKHPRYRCRSMGFPKHCGNGTVAMAEWDAFCEEQVLNLLGDAERLEKVWVAGSDSAVELAEVNAELVDLTSLIGSPAYRAGSPQREALDARIAALAARQEELEGLGARPSGWEWRETGQRFGDWWREQDTAAKNTWLRSMNVRLTFDVRGGLTRTIDFGDLQEYEQHLRLGSVVERLHTGMS

SEQ ID NO: 9821 - protein, 500 aa, synthetic construct
MRALVVIRLSRVTDATTSPERQLESCQQLCARRGWDVVGVAEDLDVSGAVDPFDRKRRPNLARWLAFEERPFDVIVAYRVDRLTRSTRHLQQLVHWAEDHKKLVVSATEAHFDTTTPFAAVVIALMGTVAQMELEAIKERNRSAAHFNIRAGKYRGSLPPWGYLPARVDGEWRLVPDPVQRERILEVYHRVVDNHEPLHLVAHDLNRRGVLSPKDYFAQLQGREPQGRKWSATALKRSMISEAMLGYATLNGKTVRDDDGAPLVRAEPILTRGQLEALRAELVKTSRAKPAVSTPSLLLRVLFCAVCGEPAYKFAGGGRKHPRYRCRSMGFPKHCGNGTVVMAEWDAFCEEQVLNLLGDAERLEKVWVAGSDSAVELSEVNAELVDLTSLIGSPAYRAGSPQREALDARIAALAAHQEELEGSEARPSGWEWRETGQRFGDWWREQDTAAKNTWLRSMNVRLTFDVRGGLTRTIDFGDLQEYEQHLRLGSVVERLRTGMS

SEQ ID NO: 9822 - protein, 500 aa, synthetic construct
MRALVVIRLSRVTDATTSPERQLESCQQLCAQRGWDVVGVAEDLDVSGAVDPFDRKRRPNLARWLAFEEQPFDVIVAYRVDRLTRSTRHLQQLVHWAEDHKKLVVSATEAHFDTTTPFAAVVIALMGTVAQMELEAIKERNRSAAHFNIRAGKYRGSLPPWGYLPARVDGEWRLVPDPVQRERIFEVYHRVVDNHEPLHLVAHDLNRRGVLSPKDYFAQLQGREPQGCEWSATALKRSMTSEAMLGYATLNGKTVRDNDGAPLVRAEPILTREQLEALRAELVKTSRAKPAVSTPSLLLRVLFCAVCGEPAYKFAGGGRKHPRYRCRSMGFPKHCGNGTVAMAEWDAFCEEQVLNLLGDAERLEEVWVAGSDSAVELAEVNAELVDLTSLIGSPAYRAGSPQREALDARIAALAARQEELEGLEARPSGWEWRGTGQRFGDWWREQDTAAKNTWLRSMNVRLTFDVRGGLSRTIDFGDLQEYEQHLRLGSVVERLHTGMS

SEQ ID NO: 9823 - protein, 500 aa, synthetic construct
MRALVVIRLSRVTDGTTSPERQLESCQQLCAQRGWDVVGVAEDLDVSGAVDPFDRKRRPNLARWLAFEEQPFDAIVAYRVDRLTRSVRHLQQLVRWAEDHKKLVVSATEAHFDTTTPFAAVVIALMGTVAQMELEAIKERIRSAAHFNIRAGKYRGSLPPWGYLPARVDGEWRLVPDPVQRERILEVYHRVVGNHEPLHLVAHDLNRRGILSPKDYFAQLRGREPRGRKWSATALKRSMTSVAMLGYATLNGKTVRGDDGAPLVRAEPILTREQQGALRAELAKTSRAKPAVSTPSLLLRVLFCAVCGEPAYKFVGGGRKHPRYRCRSMGFPEHCGNGTVVMAEWDAFCEEQVLDLLGDAERLEKVWVAGSDSAVELAEVNAELVDLTSLIGSPAYRAGSPQREALDARIAALAARQEELEGLEARPSGWEWRETGQRFGDWWREQDTAAKNTWLRSMNVRLTFDARGELTRTIDFGDLQEYERHLRSGSVVERLHTGMS

SEQ ID NO: 9824 - protein, 500 aa, synthetic construct
MRALVVIRLSRVTDATTSPERQLESCQQLCAQRGWDVVGVAEDLDVSGAVDPFDRKRRPNLARWLAFEEQPFDVIVAYRVDRLTRSVRHLQQLVHWAEDHKKLVVSATEAHFDMTTPFAAVVIALMGTVAQMELEAIKERNRSAAHFNIRAGKYRGSLPPWGYLPARVDGEWRLVPDPVQRERILEVYHRVVDNHEPLHLVAHDLNRRGVLSPKDYFAQLQGREPQGRKWSATALKRSMISEAMLGYATLNGKTVRDDDGAPLVRAEPILTREQLEALRAELVKTSRAKPAVSTPSLLLRVLFCAVCGEPAYKFAGGGRKHPRYRCRSMGFPKHCGNGTVAMAEWDAFCEEQVLDLLGDAERLEKVWVAGSDSAVEFAEVNAELVDLTSLIGTPAYRAGSPQREALDARIAALAARQEELEGLEARPCGWEWRETGQRFGDWWREQDTAAKNTWLRSMNVRLTFDVRGGLTRTIDFGDLQEYEQHLRLGSVVKRLHTGMS

SEQ ID NO: 9825 - protein, 500 aa, synthetic construct
MRALVVIRLSRVTDATTSPERQLESCQQLCAQRGWDVVGVAEDLDVSGAVDPFDRKRRPNLARWLAFEEQPFDAIVAYRVDRLTRSVRHLQQLVHWAEDHKKLVVSATEAHFDTTTPFAAVVIALMGTVAQMELEAIKERNRSAAHFNIRAGKYRGSLPPWGYLPTRVDGEWRLVPDPVQRERILEVYHRVVDNHEPLHLVAHDLNRRGVLSPKDYFAQLRGREPQGRKWSATALKRSMISEAMLGYATLNGKTVRDDDGAPLVRAEPILTRGQLEALRAELVKTSRAKPAVSTPSLLLRVLFCAVCGEPAYKFAGGGRKHPRYRCRSMGFPKHCGNGTVAMAEWDAFCEEQVLDLLGDAERLERVWVAGSDSAVELAEVNAELVDLTSLIGSPAYRAGSPQREALDARIAALAARQEELEGLEARPSGWEWRGTGQRFGDWWREQDTAAKNTWLRSMNVRLTFDVRGGLTRTIDFGDLQEYEQHLRLGSVVERLRTGMS

SEQ ID NO: 9826 - protein, 500 aa, synthetic construct
MRALVVIRLSRVTDATTSPERQLESCQQLCAQRGWDVVGVAEDLNVSGAVDPFDRKRRPNLARWLAFEERPFDVIVAYRVDRLARSIRHLQQLVHWAEDHKKLVVSATEAHFDTTTPFAAVVIALMGTVAQMELEAIKERNRSAAHFNIRAGKYRGSLPPWGYLPARVDGEWRLVPDPVQRERILEVYHRVVDNHEPLHLVAHDLNRRGVLSPKDYFARLQGREPQGRKWSATALKRSMISDAMLGYATLNGKTVRDDDGAPLVRAEPILTRKQLEAIRAELVKTSRAKPAVSTPSLLLRVLFCAVCGEPAYKFAGGGRKHPRYRCRSMGFPKHCGNGTVAMAEWDAFCEEQVLDLLGDTERLEKVWVAGSDSADELAEVNAELVDLTSLIGSPAYRAGSPQREALDARIAALAARQEELEGLEARPSGWEWRETGQHFGDWWREQDTAAKNTWLRSMNVRLTFDVRGGLTRTIDFGDLQGYERHLRLGSVVERLHTGMS

SEQ ID NO: 9827 - protein, 500 aa, synthetic construct
MRALVVIRLSRVTDATTSPERQLESCQQLCAQRGWDVVGVAEDLDVSGAVDPFDRKRRPNLARWLAFEEQPFDVIVAYRVDRLTRSTRHLQQLVHWAEDHKKLVVSATEAHFDTTTPFAAVVIALMGTVAQMELEAIKERNRSAAHFNIRAGKYRGSLPPWGYLPTRVDGEWRLVPDPVQRERILEVYHRVVDNHEPLHSVAHDLNRRGVLSPKDYFAQLQGREPQGRKWSATALKRSMISEAMLGYATLNGETVRDDDGAPLVRAEPILTREQLEALRAELVKTSRAKPAVSTPSLLLRVLFCAVCGEPAYKFAGGGRKHPRYRCRSMGFPKHCGNGTVAMAEWDAFCEEQVLDLLGDAERLEEVWVAGSDSAVELAEVNAELVDLTSLIGSPAYRAGSPQREALDARIAALATRQEELEGLEARPSGWGWRETGQRFGDWWREQDTAAKNTWLRSMNVRLTFDVRGGLTRTIDFGDLQEYKQHLRLGSVVERLHTGMS

SEQ ID NO: 9828 - protein, 500 aa, synthetic construct
MRALVVIRLSRVTDATTSPERQLESCQQLCAQRGWDVVGVAEDLDVSGAVDPFDRKRRPNLARWLAFEEQPFDAIVAHRVDRLARSIRHLQQLVHWAEDHKKLVVSATEAHFDTTTPFAAVVIALMGTVAQMELEAIKERNRSAAHFNIRAGKYRGSLPPWGYLPARVDGEWRLVPDPVQRERILEVYHRVVDDHEPLHLVAHDLNRRGVLSPKDYFAQLQGREPQSRKWSATALKRSMISEAMLGYATLHGKTVRDDDGVPLVRAEPILTRVQLEALRAELVKTSRAKPAVSTPSLLLRVLFCAVCGEPAYKFAGGGRKHPRYRCRSMGFPKHCGNGTVAMAEWDAFCEEQVLALLGDAERLEKVWVAGSDSAVELAEVNAELVDLTSLIGSPAYRAGSPQREALDARIAALAARQEELEGLEARPSGWGWRETGQRFGDWWREQDTAAKNTWLRSMNVRLSFDVRGGLTRTIDFGDLQEYEQHLRLGSVVERLHTGMS

SEQ ID NO: 9829 - protein, 500 aa, synthetic construct
MRALVVIRLSRVTDATTSPERQLESCQQLCAQRGWDVVGVAEDLDVSGAVDPFDRKRRPNLARWLAFEEQPFDVIVAYRVDRLTRSTRHLQQLVRWAEDHKKLVVSATEAHFDTTTPFAAVVIALMGTVAQMELEAIKERIRSATHFNIRAGKYRGSLPPWGYLPTRVDGEWRLVPDPVQRERILEVYHRVVDNHEPLHLVAHDLNRRGVLSPKDYFAQLRGREPQGRKWSATALKRSMISEAMLGYATLNGKTVRDDDGAPLVRAEPILTREQQEALRAELAKTSRAKPAVSTPSLLLRVLFCAVCGEPAYKFVGGGRKHPRYRCRSMGFPKHCGNGTVVMAEWDAFCEEQVLDLLGDAERLEKVWVAGSDSSVELAEVNAELVDLTSLIGSPAYRAGSPQREALDTRIAALAARQEELEGLEARPSGWGWRRTGQRFGDWWREQDTAAKNTWLRSMNVRLTFDARGGLTRTIDFGELQEYEQHLRLGSVVERLHTGMS

SEQ ID NO: 9830 - protein, 500 aa, synthetic construct
MRALVVIRLSRVTDATTSPERQLESCQQLCAQRGWDVVGVAEDLDVSGAVDPFDRKRRPNLARWLAFEEQPFDVIVAYRVDRLTRSTRHLQQLVHWAEDHKKLVVSATEAHFDTTTPFAAVVIALMGTVAQMELEAIKERSRSAAHFNIRAGKYRGSLPPWGYLPARVDGEWRLAPDPVQRERILEVYRRVVDNHEPLHLVAHDLNRRGVLSPKDYFAQLRGREPRGRKWSATALRRSMISGAMLGYATLNGKIVRGDDGAPLVRAEPILTRVQQEALRAELAKTSRTKPAVSTPSLLLRVLFCAVCGEPAYKFVGGGRKHPRYRCRSMGFPKHCGNGTVVMAEWDAFCEEQVLDLLGDAERLEKVWVAGSDSAVELAEVNAELVDLTSLIGSPAYRAGSLQREALDARIAALAARQEELEGLEARPSGWEWRETGQRFGDWWREQDTAAKNTWLRSMNVRLTFDVCGGLTRTIDFGDLQEYGQHLRLGSVVERLHTGMS

SEQ ID NO: 9831 - protein, 500 aa, synthetic construct
MRALVVIRLSRVTDATTSPERQLESCQQLCAQRGWDVVGVAEDLDVSGAVDPFDRKRRPNLARWLAFEEQPFDVIVAYRVDRLARSIRHLQQLVHWAEDHKKLVVSATEAHFDTATPFAAVVIALMGTVAQMELEAIKERNRSAAHFNIRAGKYRGSLPPWGYLPARVDGEWRLVPDPVQRERILEVYHRVVDNHEPLHLVAHDLNRRGVLSPKDYFAQLQGREPQGRKWSATALKRSMISEAMLGYATLNGKTVRDDDGAPLVRAEPILTREQLEALRAELVKTSRVKPAVSTPSLLLRVLFCAVCGEPAYKFAGGGRKHPRYRCRSMGFPKHCGNGTVVMAEWDAFCEEQVLNLLGDAERLEKVWVAGSDSAVELAEVNAELVDLTSLIGSPAYRAGSPQREALDARIAALAARQEELEGLEARPSGWEWRGTGQRFGDWWREQDTAAKNTWLRSMNARLTFDVRGGLTRTIDFGDLQEYEQHLRLGSVVERLHTGMS

SEQ ID NO: 9832 - protein, 500 aa, synthetic construct
MRALVVIRLSRVTDATTSPERQLESCQQLCAQRGWDVVGVAEDLDVSGAVDPFDRKRRPNLARWLAFEEQPFDVIVAYRIDRLTRSVRHLQQLVHWAEDHKKLVVSATEAHFDTTTPFAAVVIALMGTVAQMELEAIKERNRSAAHFNIRAGKYRGSLPPWGYLPTRVDGEWRLVPDPVQRERILEVYHRVVNNHEPLHLVAHDLNRRGVLSPKDYFAQLQGREPQGRKWSATALKRSMISVAMLGYATLNGKTVRDDDGAPLVRAEPILTREQLEALRAELVKTSRAKPAVSTPSLLLRVLFCAVCGEPAYKFAGGGRKHPRYRCRSMGFPKHCGNGTVAMAEWDAFCEEQVLGLLGDAERLEKVWVAGSDSAVELAEVNAELVDLTSLIGSPAYRAGSPQREALDSRIAALAARREELEGLAARPSGWEWRETGQRFRDWWREQDTAAKNTWLRMMNVRLTFDVRGGLTRTIDFGDLQEHEQHLRLGSVVERLHTGMS

SEQ ID NO: 9833 - protein, 500 aa, synthetic construct
MRALVVIRLSRVTDATTSPERQLESCQQLCAQRGWDVVGVAEDLDVSGAVDPFDRKRRPNLARWLAFEEQPFDVIVAYRVDRLTRSTRHLQHLVHWAEDHKKLVVSATEAHFDTTTPFAAVVIALMGTVAQMELEAIKERSRSAAHFNIRAGKYRGSLPPWGYLPTRVDGEWRLVPDPVQRERILEVYHRVVDNHEPLHSVAHDLNRRGVLSPKDYFAQLQGREPRGRKWSATALKRSMTSVAMLGYATLNGKIVRDDDGAPLVRAEPILTREQQEALRAELAKTSRAKPAVSTPSLLLRVLFCAVCGEPAYKFVGGGRKHPRYRCRSMGSPKHCGNGTVAMAEWDAFCEEQVLDLLGDAERLEKVWVAGSDSAVELAEVNAELVDLTSLIGSPAYRAGSPQREALDARIAALAARQEELEGLEARPSGWEWRETGQRFRDWWREQDTAAKNTWLRSMNVRLTFDVRGGLTRTIDFGDLQEYEQHLRLGSVVERSHTGMS

SEQ ID NO: 9834 - protein, 500 aa, synthetic construct
MRALVVIRLSRVTDATTSPERQLESCQQLCAQRGWDVVGVAEDLDVSGAVDPFDRKRRPNLARWLAFEEQPFDVIVVHRVDRLTRSTRHLQQLVHWAEDHKKLVVSATEAHFDTTTPFAAVVIALMGTVAQMELEAIKERSRSAAHFNIRAGKYRGSLPPWGYLPTRVDGEWRLVPDPVQRERILEVYHRVVDNHEPLHSVAHDLNRRGILSPKDYFAQLQGREPQGRKWSATALKRSMISVAMLGYATLNGKTVRDDDGAPLVRAEPILTREQQEALRAELAKTSRAKPAVSTPSLLLRVLFCAVCGEPAYKFTGGGRKHPRYRCRSMGFQKHCGNGTVAMAEWDAFCEKQVLGLLGDAERLEKVWVAGSDSAVELAEVNAELVDLTSLIGSPAYRAGSPQREALDARIAALAARQEELEGLEARPSGWEWRNTGQRFGDWWREQDTAAKNTWLRSMNIRLTFDVRGGLTRTIDFGELQEYEQHLRSGSVVERLHTGMS

SEQ ID NO: 9835 - protein, 500 aa, synthetic construct
MRALVVIRLSRVTDATTSPERQLESCQQLCAQRGWDVVGVAEDLDVSGAVNPFDRKRRPNLARWLAFEEQPFDVIVAYRVDRLTRSTRHLQQLVHWAEDHKKLVVSATEAHFDTTTPFAAVVIALMGTVAQMELEAIKERNRSAAHFNIRAGKYRGSLPPWGYLPTRVDGEWRLAPDPVQRERILEVYHRVVDNHEPLHLVAHDLNRRGVLSPKDYFAQLRGREPQGREWSATALKRSMTSEAMLGYATLNGKTVRDDDGAPLVRTEPILTREQLEALRAELVKTSRAKPAVSTPSLLLRVLFCAVCGEPAYKLAGGGRKHPRYRCRSMGFPKHCGNGTVAMAEWDAFCEEQVLNLLGDAKRLEKVWVAGSDSAVELAEVNAELVDLTSLIGSPAYRAGSPQREALDARIAALAARQEELEDLEARPSGWEWRETGQRFGDWWREQDTAAKNTWLRSMNVRLTFDVRGGLTRTIDFGVLQEYEQHLRLGSVVERLHTGVS

SEQ ID NO: 9836 - protein, 500 aa, synthetic construct
MRALVVIRLSRVTDATTSPERQLESCQQLCAQRGWDVAGVAEDLDVSGAVDPFDRKRRPNLARWLAFEEQPFDVIVAYRVDRLTRSTRHLQQLVHWAEDHKKLVVSATEAHFDTTTPFAAVVIALMGTVAQMELEAIKERIRSAAHFNIRAGKYRGSLPPWGYLPTRVDGEWRLVPDPVQRERILEVYRRVVDNHEPLHSVAHDLNRRGVLSPKDYFAQLQGREPQGRRWSATALKRSMISVAMLGYATLNGKIVRDDDGAPLVRAEPILTRGQQEALRAELVKTSRAKPAVSTPSLLLRVLFCAVCGEPAYKFAGGGRKHPRYRCRSMGFPEHCGNGTVVMAEWDAFCEEQVLNLLGDAERLENVWVAGSDSAVELAEVNAELVDLTSLIGSPAYRTGSPQREALDARIAALAARQEELEGLEARPSGWEWRGTGQRFGDWWREQDTAAKNTWLRAMNVRLTFDVRGGLTRTIDFGDLLEYEQHLRSGSVVERLHTGMS

SEQ ID NO: 9837 - protein, 500 aa, synthetic construct
MRALVVIRLSRVTDATTSPERQLESCQQLCAQRGWDVVGVAEDLGVSGAVDPFDRKRRPNLARWLAFEEQPFDVIVAYRVDRLTRSTRHLQQLVHWAEDHKKLVVSATEAHFDTTTPFAAVVIALMGTVAQMELEAIRERNRSAAHFNIRAGKYRGSLPPWGYLPTRVDGEWRLVPDPVQRERILEVYHRVVDNHEPLHLVAHDLNRRGVLSPKDYFAQLRGREPQGRKWSATALKRSMISEAMLGYATLNGMTVRDDDGAPLVRAEPILTRGQLEALRAELVKTPRAKPAVSTPSLLLRVLFCAVCGEPAYKFAGGGRKHPRYRCRSMGFPKHCGNGTVAMAEWDAFCEEQVLELLGDAERLEKVWVAGSDTAVELAEVSAELVDLTSLISSPAYRAGSPQREALDARIAALAARQEELEGLEARPSGWEWRETGQRFGDWWREQDTAAKNTWLRSMNVRLTFDVRGGLTRTIGFGDLQEYEQRLRLGSVVERLHAGMP

SEQ ID NO: 9838 - protein, 500 aa, synthetic construct
MRALVVIRLSRVTDATTSPERQLESCQQLCAQRGWDVVGVAEDLDVSGAVDPFDRKRRPNLARWLAFEEQPFDVIVAYRVDRLTRSTRHLQQLVHWAEDHKKLVVSATEAHFDTTTPFAAVVIALMGTVAQMELEAIRERNRSAAHFNIRAGKYRGSLPPWGYLPARVDGEWRLVPDPVQRERILEVYHRVVDNHEPLHLVAHDLNRRGVLSPKDYFAQLQGREPQGRKWSATALKRSMISEAMLGHATLNGKTVRDDDGAPLVRAEPILTRGQLGALRAELVKTSRVKPAVSTPSLLLRVLFCAVCGEPAYKFAGGGRKHPRYRCRSMGFPKHCGNGSVAMAEWDAFCEEQVLDLLGDAERLEKVWVAGSDSAVELAEVNAELVDLTSLIGSPAYRAGSPQREALDARIAALVARQEELEGLEARPSGWEWRGTGQRFGDWWREQDTAAKNTWLRSMNVRLTFDVRGGLTRTIDFGDLQEYEQHLRLGSVVERLHTGMS

SEQ ID NO: 9839 - protein, 500 aa, synthetic construct
MRALVVIRLSRVTDATTSPERQLESCQQLCAQRGWDVVGVAEDLDVSGAVDPFDRKRRPNLARWLAFEEQPFDVIVAHRVDRLTRSVRHLQRLVRWAEDHKKLVVSATEAHFDTTTPFAAVVIALMGTVAQMELEAIKERIRSAAHFNIRAGKYRGSLPPWGYLPTRVDGEWRLVPDPVQRERILEVYHRVVDNHEPLHLVAHDLNRRGVLSPKDYFAQLRGREPQGRKWSATALKRSMISGAMLGYATLNGKIVRDDDGAPLVRAEPILTREQQEALRAELAKTSRAKPAVSSPSLLLRVLFCAVCGEPAYKFVGGGRKHPRYRCRSMGFPEHCGNGTVVMAEWNAFCEEQVLDLLGDAERLEKVWVAGSDSAVELAEANAELVDLTSLIGSPAYRAGSPQREALDARIAALAARQEELEGLEARPSGWEWRETGQRFGDWWREQDTAAKNTWLRSMNVRLTFDVRGGLTRTIDFGDLQEYAQHLRLGGVAERLHTGTS

SEQ ID NO: 9840 - protein, 500 aa, synthetic construct
MRALVVVRLSRVTDATTSPERQLESCRQLCAQRGWDVVGVAEDLDVSGAVDPFDRKRRPNLARWLAFEEQPFDVIVAYRVDRLTRSTRHLQQLVRWAEDHEKLVVSATEAHFDTTTPFAAVVIALMGTVAQMELEAIKERIRSAVRFNIRAGKYRGSLPPWGYLPTRVDGEWRLVPDPVQRERILEVYHRVVDNHEPLHLVAYDLNRRGVLSPKDYFAQLQGREPRGRKWSATALKRSMTSVAMLGYATLNGKTVRDDDGAPLVRAEPILTREQQEALRAELAKTSRAKPAVSTPSLLLRVLFCAVCGEPAYKFAGGGRKHPRYRCRSMGLPKHCGNGTVVMAEWDAFCEEQVLNLLGDAERLEKVWAAGSDSSVELAEVNAELVDLTSLIGSPAYRTGSPQREALDARIAALAARQEELEGLEAHPSGWEWRETGQRFGDWWREQDTAAKNTWLRSMNVRLTFDIRGGLTRTIDFGDLQEYEQHLRLGSVIGRLHTGMS

SEQ ID NO: 9841 - protein, 500 aa, synthetic construct
MRALVVIRLSRVTEATTSPERQLESCQQLCAQRGWDVVGVAEDLDVSGAVDPFDRKRRPNLARWLAFEEQPFDVIVAYRVDRLARSTRHLQQLVHWAEDHKKLVVSATEAHFDTTTPFAAVVIALMGTVAQMELEAIKERNRSAAHFNIRAGKYRGSLPPWGYLPTRVDGEWRLVPDPVQRERILEVYHRVVDNHEPLHLVAHDLNRRGVLSPKDYFAQLQGREPQGRKWSATALKRSMISEAMLGYATLNGKTVRDDDGAPLVRAEPILTRVQLEALRAELVKTSRAKPAVSTPSLLLRVLFCAVCGKPAYKFAGGGRKHPRYRCRSMGFPKHCGNGTVVMAEWDAFCEEQVLDLLGDAECLEKVWVAGTDSAVELAEVNAELVDLTSLIGSPAYRAGSPQREALDARIAALAARQEELEGLEARPSGWEWRETGQRFGDWWREQDTAAKNTWLRSMNVRLTFDVRGGLTRTIDFGDLLEYERHLRLGSVVERLHTGTS

SEQ ID NO: 9842 - protein, 500 aa, synthetic construct
MRALVVIRLSRVTDATTSPERQLESCQQLCAQRGWDVVGVAEDLDVSGAVDPFDRKRRPNLARWLASEEQPFDVIVAYRVDRLTRSTRHLQQLVRWAEDHKKLVVSATEAHFDTTTPFAAVVIALMGTVAQMELEAIKERIRSAAHFNIRAGKYRGSLPPWGYLPTRVDGEWRLVPDPVQRERILEVYHRVVDNHEPLHLVAYDLNRRGVLSPKDYFAQLQGREPQGRRWSATALKRSMTSVAMLGYATLDGKIVRDDDGAPLVRAEPILTREQQEALRAELAKTSRAKPAVSTPSLLLRVLFCAVCGEPAYKFAGGGRKHPRYRCRSMGFPKHCGNGTVVMAEWDAYCEEQVLDLLGDAERLEKVWVAGSDSAVELAEVNAELVDLTSSIGSPAYRAGSPQREALDTRIAALAARQEELESLKARPSGWEWRGTGQRFGDWWREQDTAAKNTWLRSMNVRLTFDVRGGLTRTIDFGDLQEYEQHLRLGSVVERLHTGTS

SEQ ID NO: 9843 - protein, 500 aa, synthetic construct
MRALVVIRLSRVTDATTSPERQLESCQQLCAQRGWDVVGVAEDLDVSGAVDPFDRKRRPNLARWLAFEEQPFDVIVAYRVDRLTRSTRHLQQLVRWAEDHKKLVVSATEAHFDTTTPFAAVVIALMGTVAQMELEAIKERIRSAVRFNIRAGKYRGSLPPWGYLPTRVDGEWRLVPDPVQRERILEVYRRVVDNHEPLHLVAHDLNRRGVLSPKDYFAQLRGREPQGREWSATALKRSMTSVAMLGYATLNGKIVRDDDGAPLVRAEPILTREQQEALRAELAKTSRAKPAVSTPSLLLRVLFCAVCGEPAYKFVGGGRKHPRYRCRSMGFPKHCGNGTVVMAEWDVFCEEQVLNLLGDAERLEKVWVAGPDSVVELAEVNAELVDLTGLIGSPAYRAGSPQREALDARIAALAARQEELEGLEARPSGWEWRETGQRFGDWWREQDTAAKNTWLRSMNIRLTFDVRGGLTRTIDFGELQEYEQRLRLGSVVKRLHTGLS

SEQ ID NO: 9844 - protein, 500 aa, synthetic construct
MRALVVIRLSRVTDATTSPERQLESCQQLCARRGWDVVGVAEDLDVSGAVDPFDRKRRPNLARWLAFEEQPFDVIVAYRVDRLTRSTRHLQQLVRWAEDHKKLVVSATEAHFDTTTPFAAVVIALMGTVAQMELEAIKERIRSAVHFNIRAGKYRGSLPPWGYLPARVDGEWRLVPDPVQRERILEVYHRVVDNHEPLHLVAHDLNRRGVLSPKDYFAQLRGREPRGRKWSATALRRSMTSVAMLGYATLNGKIVRDDDGAPLVRAEPILTREQQEALRAELAKTSRAKPAVSTPSLLLRVLFCAVCGEPAYKFVGGGRKHPRYRCRSMGLPEHCGNGTVVMTEWDSFCEEQVLGLLGDAERLEKVWVAGSDSTVELAEVNAELVDLTSLIGSPAYRAGSPQREALDARIAALAARQEELEGLEARPSGWEWRKTGQRFGDWWREQDTAAKNTWLRSMNVRLTFDVRGVLTHTIDLGDLQEYEQHLRSGSVVERSHTEMS

SEQ ID NO: 9845 - protein, 500 aa, synthetic construct
MRALVVIRLSRVTDATTSPERQLESCQQLCAQRGWDVVGVAEDLDVSGAVDPFDRKRRPNLARWLAFEEQPFDVIVAYRVDRLTRSTRHLQQLVHWAEDHKKLVVSATEAHFDTTTPFAAIVIALMGTVAQMELEAIKERIRSAAHFNIRAGKYRGSLPPWGYLPTRVDGEWRLVPDPVQRERILEVYHRVVDNHEPLHLVAHDLNRRGVLSPKDYFAQLRGREPQGRKWSATALKRSMTSEAMLGYATLNGKIVRDDNGAPLVRAEPILTREQQEALRAELAKTSRAKPAVSTPSLLLRVLFCAVCGEPAYRFVGGGRKHPRYRCRSMGFPKHCGNGTVVMAEWDAFCEKKVLDLLGDAERLEKVWVAGSDSAVELAEVSAELVDLTSLIGSPAYRAGSPQREALDARIAALAARQEELEGLEARPSGWEWRETGQRFEDWWREQDTAAKNTWLRSMNVRLTFDVRGGLTRTIDFGDLQEYEQHLRLGSVVERLHTGMS

SEQ ID NO: 9846 - protein, 500 aa, synthetic construct
MRALVVIRLSRVTDATTSPERQLESCQQLCAQRGWDVVGVAEDLDVSGAVDPFDRKRRPNLARWLAFEERPFDVIVAYRVDRLTRSTRHLQQLVHWAEDHKKLVVSATEAHFDTTTPFAAVVIALMGTVAQMELEAIRERSRSAAHFNIRAGKYRGSLPPWGYLPTRVDGEWRLVPDPVQRERILEVYHRVVDNHEPLHLVAHDLNRRGVLSPKDYFAQLRGREPRGRKWSATALRRSMTSEAMLGYATLNGRTVRDDDGAPLVRAEPILTREQLEALRAELAKTSRAKPAVSTPSLLLRVLFCAVCGEPAYKFVGGGRKHPRYRCRSMGFPKHCGNGTVVTAEWDAFCEEQVLDLLGDVERLEKVWVAGSDSAVELAEVNAELVDLTSLIGSPAYRAGSPQREALDARIAALAARQEELEGLEARPSGWEWRETGQRFGDWWREQDTAAKNTWLRSMNVRLTFDVRGGLTRTIDFGDLQEYEQHLRLGSVAERLHTGMS

SEQ ID NO: 9847 - protein, 500 aa, synthetic construct
MRALVVIRLSRVTDATTSPERQLESCQQLCAQRGWDVVGVAEDLDVSGAVDPFDRKRRPNLARWLAFEEQPFDVIVAYRVDRLTRSTRHLQQLVHWAEDHKKLVVSATEAHFDTTTPFAAVVIALMGTVAQMELEAIKERNRSAAHFNIRAGKYRGSLPPWGYLPTRVDGEWRLVPDPVQRERILEVYHRVVDDHEPLHLVAHDLNRRGVLSPKDYFAQLRGREPQGRKWSATALKRSMISEAMLGYATLNGKTVRDDDGAPLVRAEPILTRGQLEALRAELVKPSRAKPAVSTPSLLLRVLFCAVCGEPAYKFAGGGRKHPRYRCRSMGFPKHCGNGTVAMAEWDAFCEEQVLNLLGDAERLEKVWVAGSDSAVELAEVNAELEDLASLIGSPAYRAGSPQREALDARIAALAARQEELEGLEARPSGWEWRETGQRFGDWWREQDTAAKNTWLRSMNVRLTFDVRGGLTRTIDFGDLQEYEQHLRLGSVVERLHTGML

SEQ ID NO: 9848 - protein, 500 aa, synthetic construct
MRALVVIRLSRVTDATTSPERQLESCQQLCAQRGWDVVGVAEDLDVSGAVDPFDRKRRPNLARWLAFEEQPFDVIVAYRVDRLTRSVRHLQQLVRWAEDHKKLVVSATEAHFDTTTPFAAVVIALMGTVAQMELEAIKERIRSAVHFNIRAGKYRGSLPPWGYLPTRVDGEWRLVPDPVQRERILEVYHRVVDNHEPLHLVAHDLNRRGVLSPKDYFAQLRGREPQGRKWSATALKRSMISVAMLGYATLNGKTVRDDDGAPLVRAEPILTREQQEALRAELAKTSRAKPAVTTPSLLLRVLFCAVCGEPAYKFVGGGRKHPRYRCRSMGFPKHCGNGTVVMAEWDAFCEEQVLELLGDAERLEKVWVTGSDSAVELAEVNAELVDLTSLIGSPAYRAGSPQRGALDARIAALAARQEELESLEARPSGWEWRETGQRLGDWWREQDTAAKNTWLRSMNIRLTFDVRGGLTRTIDFGDLQEYEQHLRLGSVAERLHTGMS

SEQ ID NO: 9849 - protein, 500 aa, synthetic construct
MRALVVIRLSRVTDATTSPERQLESCQQLCAQRGWDVVGVAEDLNVSGAVDPFDRKRRPNLARWLAYEEQPFDVIVAYRVDRLTRSIRHLQQLVHWAEDHKKLVVSATEAHFDTTTPFAAVVIALMGTVAQMELEAIKERNRSAAHFNIRAGKYRGSLPPWGYLPARVDGEWRLVPDPVQRERILEVYHRVVDNHEPLHLVAHDLNRRGVLSPKDYFAQLQGREPQGRKWSATALKRSMTSEAMLGYATLNGKTVRDDDGAPLVRAEPILTREQLEALRAELVKTSRAKPAVSTPSLLLRVLFCAVCGEPAYKFAGGGRKHPRYRCRSMGFPKHCGNGTVVMAEWDAFCEEQVLDLLGDAERLEKVWVAGSDSAVELAEVNAELVDLTSLIGSPTYRAGSPQREALDARIAALAARQEELEGLEARPSGWEWRETGQRFGDWWREQDTAAKNTWLRSVNVRLTFDVRGGLTRTIDFGDLQGYEQHLRLGSVVERLHTGMS

SEQ ID NO: 9850 - protein, 500 aa, synthetic construct
MRALVVIRLSRVTDATTSPERQLESCQQLCAQRGWDVVGVAEDLDVSGAVDPFDRKRRPNLARWLAFEEQPFDVIVAYRVDRLTRSTRHLQQLVRWAEDHKKLVVSATEAHFDTTTPFAAVVIALMGTVAQMELEAIKERIRSAAHFNIRAGKYRGSLPPWGYLPTRVDGEWRLVPDPVQRERILEVYHRVVDNHEPLHLVAHDLNRRGVLSPKDYFAQLRGREPRGRKWSATALKRSMISEAMLGYATLNGKIVRDDDGAPLVRAEPILTREQQEALRAELAKTSRAKPAVSTPSLLLRVLFCAVCGEPAYKFVGGGRKHPRYRCRSMGFPKHCGNGTVVMAEWDAFCEEQVLNLLGDAERLEKVWVAGSDSAVELAEVNAELVDLTSLIGSPAYRAGSPQREALDARIAALAARQEELEGLEARPSGWEWRGTGQRFRDWWREQDTAAKNTWLRSMNVRLTFDVRGGLTRTIDFGELQEYEQHLRLGSVVERSHTGMS

SEQ ID NO: 9851 - protein, 500 aa, synthetic construct
MRALVVIRLSRVTDATTSPERQLESCQQLCAQRGWDVVGVAKDLDVSGAVDPFDRKRRPNLARWLAFEEQPFDVIVAYRVDRLTRSTRHLQQLVRWAEDHKKLVVSATEAHFDMTTPFAAVVIALMGTVAQMELEAIKERIRSAAHFNIRAGKYRGSLPPWGYLPARVDGEWRLVPDPVQRERILEVYHRVVDNHEPLHLVAHDLNRRGVLSPKDYFAQLRGREPQGRKWSATALRRSMISEAMLGYATLNGKTVRDDDGAPLVRAEPILTREQQEALRAELAKTSRAKPAVSTPSLLLRVLFCAVCGEPAYKFVGGGRKHPRYRCRSMGFPKHCGNGTVVMTEWDAFCEEQVLDLLGDTERLERVWVAGSDSAVVLAEVNAELVDLTSLIGSPAYRAGSPQREALDARIAALAARQGELEGLEARPSGWEWRGTGQRFEDWWREQDTAAKNTWLRSMNVRLTFDVRGGLTRTIDFGDLQEYEQHLRLGSVVERLHTGAS

SEQ ID NO: 9852 - protein, 500 aa, synthetic construct
MRALVVIRLSRVTDATTSPERQLESCRQLCAQRGWDVVGVAEDLDVSGAVDPFDRKRRPNLARWLAFEEQPFDAIVAYRVDRLARSIRHLQQLVHWAEDHKKLVVSATEAHFDTTTPFAAVVIALMGTVAQMELEAIKERNRSAAHFNIRAGKYRGSLPPWGYLPTRVDGEWRLVPDPVQRERILEVYHRVVDNHEPLHLVAHDLNRRGVLSPKDYFAQLRGREPQGRKWSATALKRSMISEAMLGYATLNGKTVRDDDGAPLVRAEPILTREQLEALRAELAKTSRAKPAVSTPSLLLRVLFCAVCGEPAYKFAGGGRKHPRYRCRSMGFPKHCGNGTVVMAEWDAFCEEQVLNLLGDAERLEKVWVAGSDSAVELAEVNAELVDLTSLIGSPAYRAGSPQREALDARIAALAARQEELEGLEARPSGWEWRETGQRFGDWWREQDTAAKNTWLRSMNVRLTFDVRGGLTRTIDFGDLQEYEQHLRLGSVVERLHTGMS

SEQ ID NO: 9853 - protein, 500 aa, synthetic construct
MRALVVIRLSRVTDATTSPERQLESCQQLCAQRGWDVVGVAEDLDVSGAVDPFDRKRRPNLARWLAFEEQPFDAIVAYRVDRLTRSVRHLQRLVRWAEDHKKLVVSATEAHFDTTTPFAAVVIALMGTVAQMELEAIKERIRSAAHFNIRAGKYRGSLPPWGYLPARVDGEWRLVPDPVQRERILEVYRRVVDNHEPLHLVAHDLNRRGVLSPKDYFAQLRGREPQGRKWSATALRRSMTSGAMLGYATLNGKTVRDDNGAPLVRAEPILTREQQEALRAELAKTSRAKPAVSTPSLLLRVLFCAVCGEPAYKFAGGGRKHPRYRCRSMGFPKHCGNGTVVMAEWDTFCEEQVLDLLGDAERLEKVWVAGSDSAVELAEVNAELADLTSLIGSPAYRAGSPQREALDARIAALAARQEELEGLETRPSGWEWRGTGQRFGDWWREQDTAAKNTWLRSMNVRLTFDVRGGLTRTIDFGELQEYKQHLRSGSVVERLHTGMS

SEQ ID NO: 9854 - protein, 500 aa, synthetic construct
MRALVVIRLSRVTDATTSPERQLESCQQLCAQRGWDVVGVAEDLDVSGAVNPFDRKRRPNLARWLAFEEQPFDVIVAYRVDRLTRSARHLQQLVHWAEDHKKLVVSATEAHFDTTTPFAAVVIALMGTVAQMELEAIKERNRSAAHFNIRAGKYRGSLPPWGYLPTRVDGEWRLVPDPVQRERILEVYHRVVDNHEPLHLVAHDLNRRGVLSPKDYFAQLQGREPQGRKWSATALKRSMISETMLGYATLNGKTVRDDDGAPLVRAEPILTREQLEALRAELVKTSRAKPAVSTPSLLLRVLFCAVCGEPAYKFAGGGRKHPRYRCRSMGFPKHCGNGTVVMAEWDAFCEEQVLNLLGDAERLEKVWVAGSDSAVELAEVNAELVDLTSLIGSPAYRAGSPQREALDARIAALAARQEELEGLGARPSGWEWRETGRRFGDWWREQDTAAKNTWLRSMNVRLTFDVRGGLTRTIDFGDLQEYEQHLRLGSVVERLHTGMS

SEQ ID NO: 9855 - protein, 500 aa, synthetic construct
MRALVVIRLSRVTDATTSPERQLESCQRLCAQRGWDVVGVAKDLDVSGAVDPFDRKRRPNLARWLAFEEQPFDAIVAYRVDRLTRSVRHLQQLVRWAEDHKKLVVSATEAHFDTTTPFAAVVIALMGTVAQMELEAIKERIRSAAHYNIRAGKYRGSLPPWGYLPTRVDGEWRLVPDPVQRERILEVYHRVVDDHEPLHLVAHDLNRRGVLSPKDYFAQLQGREPQGRKWSATALKRSMTSVAMLGYATLNGKIVRDDDGAPLVRAEPILTREQQEALRAELAKTSRAKPAVSTPSLLLRVLFCAVCGEPAYKFTGGGRKHPRYRCRSMGFPKHCGNGTVVMTEWDAFCEEQVLDLLGDAERLEKVWVAGSDSAVELAEVNAELVDLTSLIGSPAYRAGSPQREALDARIAALAARQEELESLEARPSGWEWRGTGQRLGDWWREQDTAAKNTWLRSMNVRLTFDVRGGLTRTIDFGDLQEYEQHLCLGSVVERLHAGMS

SEQ ID NO: 9856 - protein, 500 aa, synthetic construct
MRALVVIRLSRVTDATTSPERQLESCQQLCAQRGWDVVGVAEDLDVSGAVDPFDRKRRPNLARWLASEEQPFDVIVAYRVDRLTRSTRHLQQLVHWAEDHKKLVVSATEAHFDTTTPFAAVVIALMGTVAQMELEAIKERIRSAAHFNIRAGKYRGSLPPWGYLPTRVDGEWRLVPDPVQRERILEVYRRVVDNHEPLHLVAYDLNRRGVLSPKDYFAQLQGREPQGRKWSATALKRSMISVAMLGYATLNGKIVRDDDGAPLVRAEPILTREQQEALRAELAKTSRAKPAVSTPSLLLHVLFCAVCGEPAYKFVGGGRKHPRYRCRSMGFPKHCGNGTVVTAEWDAFCEEQVLNLLGDAERLEKVWVAGSDSAVELAEVNAELVDLASSIGSPAYRAGSPQREALDARIAALAARQEELEGLEARPSGWEWRETGQRFRDWWREQDTAAKNTWLRSMNVRLTFDVRGGLTRTIDFGELQEYEQHLRLGSVAERLHTGMS

SEQ ID NO: 9857 - protein, 500 aa, synthetic construct
MRALVVIRLSRATDATTSPERQLESCQQLCAQRGWDVVGVAEDLDVSGAVDPFDRKRRPNLARWLAFEEQPFDVIVAYRVDRLTRSVRHLQQLVLWAEDHKKLVISATEAHFDTTTPFAAVVIALMGTVAQMELEAIKERNRSAAHFNIRAGKYRGSLPPWGYLPTRVDGEWRLVPDPVQRERILEVYHRVVVNHEPLHLVAHDLNRRGVLSPKDYFAQLRGREPRGRKWSATALKRSMTSEAMLGYATLNGKTVRDDDGAPLVRAEPILTRGQLEALRAELVKTSRARPAVSTPSLLLRVLFCAVCGEPAYKFAGGGRKHPRYRCRSMGFPKHCGNGTVVMAEWDAFCEEQVLDLLGDAERLEKVWVAGSDSAVELAEVNAELVDLTSLIGSPAYRASSPQREALDARIAALAARQEELEGLGARPSGWEWRETGQRFGDWWRKQDTAAKNTWLRSMNVRLTFDVRGGLTRTIDFGDLQEYEQHLRLGSVVERLHTGMS

SEQ ID NO: 9858 - protein, 500 aa, synthetic construct
MRALVVIRLSRVTDATTSPERQLESCQRLCAQRGWDVVGVAEDLDVSGAVDPFDRKRRPNLARWLAFEEQPFDAIVAYRVDRLTRSVRHLQRLVHWAEDHKKLVVSATEAHLDTTTPFAAVVIALMGTVAQMELEAIKERNRSAAHFNIRAGKYRGSLPPWGYLPTRVDGEWRLVPDPVQRERILEVYHRVVDNHESLHLVAHDLNRRGVLSPKDYFAQLRGREPQGRKWSATALKRSMISEAMLGYATLNGKTVRDDDGAPLVRAEPILTREQLEALRAELVKTSRAKPAVSTPSLLLRVLFCAVCGEPAYKFAGGGRKHPRYRCRSMGFPKHCGNGTVAMAEWDAFCEEQVLDLLGDAERLEEVWVTGSDSAVELAEVNAELVDLTSLIGSPAYRAGSPQREALDARIAALAARQEELEGLEARPSGWEWRGTGQRFGDWWREQDTATKNTWLRSMNVRLTFDVRGGLTRTIDFGGLQEYEQHLRLGSVVERLHTGMS

SEQ ID NO: 9859 - protein, 500 aa, synthetic construct
MRALVVIRLSRVTDATTSPERQLESCRQLCAQRGWDVVGVAKDLDVSGAVDPFDRKRRPNLARWLAFEEQPFDVIVAYRVDRLTRSTRHLQQLVRWAEDHKKLVVSATEAHFDTTTPFAAVVIALMGTVAQMELEAIKERIRSAVRFNIRAGKYRGSLPPWGYLPTRVDGEWRLVPDPVQRERILEVYHRVVDNHEPLHLVAHDLNRRGVLSPKDYFAQLRGREPRGREWSATALKRSMTSVAMLGYATLNGKTVRGDDGAPLVRAEPILTREQQEALRAELAKTSRAKPAVSTPSLLLRVLFCAVCGEPAYKFTGGGRKHPRYRCRSMVFPKHCGNGTVVMAEWDAFCEEQVLDLLGDAERLEKVWVAGSDSAVELAEVNAELVDLTSLIGSPAYRAGSPQREALDARIAALAARQEELEGLEARPSGWEWRGTGQRFGDWWREQDTAAKNTWLRSMNVRLTFDVRGGLTRAIDFGELQEYERHLRLGSVVERLHTGRS

SEQ ID NO: 9860 - protein, 500 aa, synthetic construct
MRALVVIRLSRVTDATTSPERQLESCQQLCAQRGWDVVGVAEDLDVSGAVDPFDRKRRPNLARWLAFEEQPFDVIVAYRVDRLTRSTRHLQQLVHWAEDHKKLVVSATEAHFDTTTPFAAVVIALMGTVAQMELEAIKERSRSAAHFNIRAGKYRGSLPPWGYLPARVDGEWRLVPDPVQRERILEVYHRVVDNHEPLHLVAHDLNRRGVLSPKDYFAQLRGREPQGRKWSATALKRSMTSVAMLGYATLNGKTVRDDDGAPLVRAEPILTRGQQEALRAELAKTSRAKPAVSTPSLLLRVLFCAVCGEPAYKFVGGGRKHPRYRCRSMGLPKHCGNGTVVMAEWDAFCEEQVMDLLGDAERLEKVWVAGSDSAVELAEVNAELVDLTSLIGSPAYRAGSPQRDALDARIAALAARQEELESLEARPSGWEWRGTGQRFGDWWRELDTAAKNTWLRSMNVRLTFDVRGGPTPTIDFGDLQEYERHLRLGSVAERLRTGMS

SEQ ID NO: 9861 - protein, 500 aa, synthetic construct
MRALVVIRLSRITDATTSPERQLESCRQLCAQRGWDVVGVAEDLDVSGAVDPFDRKRRPNLARWLAYEEQPFDVIVAYRVDRLTRSTRHLQQLVHWAEDHKKLVVSATEAHFDTTTPFAAVVIALMGTVAQMELEAIKERIRSAVHFNIRAGKYRGSLPPWGYLPTRVDGEWRLVPDPVQRERILEVYHRVVDNHEPLHLVAHDLNRRGVLSPKDYFAQLRGREPQGRKWSATALKRSMISVAMLGYATLNGKIVRDDDGAPLVRAEPILTREQQEALRAELAKTSRAKPAVSTPSLLLRVLFCAVCGEPAYKFAGGGRKHPRYRCRSMGFPEHCGNGTVVMAEWDAFCEEQVLDLLGDAERLEKVWVAGSDSAVELAEVNAELVDLTSLIGSPAYRAGSPQREALDARIAALAARQEELEGLEARPSGWEWRKTGQRLGDWWREQDTAAKNTWLRSMNVRLTFDVRGGLTRTIDFGGLQEYEQHLRLGSVVERLHTGMS

SEQ ID NO: 9862 - protein, 500 aa, synthetic construct
MRALVVIRLSRVTDATTSPERQLESCQQLCAQRGWVVVGVAEDLDVSGAVDPFDRKRRPSLARWLAFEEQPFDVIVAYRVDRLTRSVRHLQQLVHWAEDHKKLVVSATEAHFDTTTPFAAVVIALMGTVAQMELEAIKERNRSAAHFNIRAGKYRGSLPPWGYLPTRVDGEWRLAPDPVQRERILEVYHRVVDNHEPLHLVAHDLNRRGVLSPKDYFAQLQGREPQGRKWSATALKRSMISEAMLGYATLSGKTVRDDDGVPLVRAEPILTREQLEALRAELVKTSRAKPAVSTPSLLLRVLFCAVCGEPAYKFAGGGRKHPRYRCRSIGFPKHCGNGTVAMAEWDAFCEEQVLDLLGDAERLEKVWVAGSDSAVELAEVNAELVDLTSLIGSPAYRAGSPQREALDARIAALAARQEELEGLGARPSGWEWRGTGQRFGDWWREQDTAAKNTWLRSMNVRLTFDVRGGLTRTIDFGELQEYEQHLRLGSVVERLHTGMS

SEQ ID NO: 9863 - protein, 500 aa, synthetic construct
MRALVVIRLSRVTDATTSPERQLESCQQLCAQRGWDVVGVAEDLDVSGAVDPFDRKRRPNLARWLAFEEQPFDVIVAYRVDRLTRSTRHLQQLVHWAEDHKKLVVSATEAHFDTTTPFAAVVIALMGTVAQMELEAIKERNRSAAHFNIRAGKYRGSLPPWGYLPTRVDGEWRLVPDPVQRERILEVYHRVVDNHEPLHLVAHDLNRRGVLSPKDYFAQLQGREPQGRKWSATALKRSMTSEAMLGYATLNGKTVRDDDGAPLVRAEPILTREQLEALRAELVKTSRAKPAVPTPSLLLRVLFCAVCGEPAYKFAGGGRKHPRYRCRSMGFPKHCGNGTVAMAEWDAFCEEQVLDLLGDAERLEKVWVAGSDSAVELAEVNAELVDLTSLIGSPAYRAGSPQREALDARIAALAARQEELEGLGARPSGWEWRETGQRFGDWWREQDTAAKNTWLRSMNVRLTFDVRGGLTRTIDFGDLQEYEQHLRLGSVVGRLHTGTS

SEQ ID NO: 9864 - protein, 500 aa, synthetic construct
MRALVVIRLSRVTDASTSPERQLGSCQQLCARRGWDVVGVAEDLDVSGAVDPFDRKRRPNLARWLAFEEQPFDVIVAYRVDRLTRSTRHLQQLVHWAEDHKKLVVSATEAHFDTTTPFAAVVIALMGTVAQMELEAIKERNRSAAHFNIRAGKYRGSLPPWGYLPTRVDGEWRLAPDPVQRERILEVYHRVVDNHEPLHLVAHDLNQRGVLSPKDYFAQLRGREPQGRKWSATALKRSMISEAMLGYATLNGKTVRDDDGAPLVRAEPILTREQLEALRAELVKTSRAKPAVSTPSLLLRVLFCAVCGEPAYKFAGGGRKHPRYRCRSMGFPKHCGNGTVAMAEWDSFCEEQVLGLLGDAERLEKVWVAGSDSAVELAEVNAELVDLTSLIGSPAYRAGSPQREALDARIAALAARQEELEGLEARPSGWGWRETGQRFGDWWREQDTAAKNTWLRSMNVRLTFDVRGGLTHTIDFGDLQEYVQHLRSGSVVERLHTRMS

SEQ ID NO: 9865 - protein, 500 aa, synthetic construct
MRALVVIRLSRVTDATTSPERQLESCQQLCAQRGWDVVGVAEDLDVSGAVDPFDRKRRPNLARWLAFEEQPFDAIVAYRVDRLARSIRHLQQLVHWAEDHEKLVVSATEAHFDTTTPFAAVVIALMGTVAQMELEAIKERNRSAAHFNIRAGKYRGSLPPWGYLPTRVDGEWRLAPDPVQRERILEVYHRVVDNHEPLHLVAHDLNRRGVLSPKDYFAQLQGREPQGRKWSATALKRSMTSEAMLGYAILNGKTVRDDDGAPLVRAEPILTREQLEALRAELVKTSRAKPAVSTPSLLLRVLFCAVCGEPAYRFAGGGRKHPRYRCRSMGFPKHCGNGTVAIAEWDAFCEEQVLDLLGDAERLEKVWVAGSDSAVELAEVNAELVDLTSLIGSPAYRAGSPQREALDARIAALAARQEELEGSGARPSGWEWHETGQRFGDWWREQDTAAKNTWLRSMNVRLTFDVRGGLTRTIDFGDLQEYEQHLRLGSVAERLHTGMS

SEQ ID NO: 9866 - protein, 500 aa, synthetic construct
MRALVVVRLSRVTDATTSPERQLESCQQLCAQRGWDVVGVAEDLDVSGAVDPFDRKRRPNLARWLAFEEQPFDVIVAYRVDRLTRSTRHLQQLVRWAEDHKKLVVSATEAHFDTTTPFAAVVIALMGTVAQMELEAIKERIRSAAHFNIRAGKYRGSLPPWGYLPTRVDGEWRLVPDPVQRERILEVYRRVVDNHEPLHLVAYDLNRRGVLSPKDYFAQLRGREPQGRKWSATALKRSMTSVAMLGYATLNGTTVRDDDGAPLVRAEPILTREQQEALRAELVRTSRAKPAVSTPSLLLRVLFCAVCGEPAYKFVGGGRKHPRYRCRSMGFPEHCGNGTVVMAEWDAFCEEQVLGLLGNAERLEKVWVAGSDSAVELAEVNAELVDLTSLIGSPAYRVGSPQREALDARIAALAARQEELEGLEARPSGWEWRGTGQRFGDWWREQDTAAKNTWLRSMNVRLTFDVRGGPTRTIDFGDLQEYEQHLRLGGVAECLHTGMS

SEQ ID NO: 9867 - protein, 500 aa, synthetic construct
MRALVVIRLSRVTDATTSPERQLESCQQLCAQRGWDVVGVAEDLDVSGAVDPFDRKRRPNLARWLAFEEQPFDVIVAYRVDRLTRSVRHLQQLVRWAEDHKKLVVSATEAHFDTTTPFAAVVIALMGTVAQMELEAIKERIRSAVHFNIRAGKYRGSLPPWGYLPTRVDGEWRLVPDPVQRERILEVYHRVVDNHEPLHLVAHDLNRRGVLSPKDYFAQLRGREPRGRKWSATALKRSMISVAMLGYATLNGKIVRDDDGAPLVRAEPILTRGQLEALRAELVRTSRAKPAVSTPSLLLRVLFCAVCGEPAYKFVGGGRKHPRYRCRSMGFPKHCGNGTVVMAEWDAFCEEQVLNLLGDAERLEKVWVAGSDSAVELAEVNAELVDLTSLIGSPAYRTGSPQREALDARIAALATRQEELEGLEARPSGWEWRETGQRFGDWWREQDTAAKNTWLRSMNVRLTFDVRGGLTRTIDFGDLQEYEQHLRVGGVVRRLHTGKS

SEQ ID NO: 9868 - protein, 500 aa, synthetic construct
MRALVVIRLSRVTDATTSPERQLESCQQLCAQRGWDVVGVAEDLDVSGAVDPFDRKRRPNLARWLAFEEQPFDVIVAYRVDRLTRSVRHLQQLVHWAEDHKKLVVSATEAHFDTTTPFAAVVIALMGTVAQMELEAIKERNRSAAHFNIRAGKYRGSLPPWGYLPARVDGEWRLAPDPVQCERILEVYHRVVDNHEPLHLVAHDLNRRGVLSPKDYFAQLQGRGPQGRKWSATALKRSMTSEAMLGYATLNGKTVRDDDGAPLVRAEPILTREQLEALRAVLVKTSRAKPAVSTPSLLLRVLFCAVCGEPAYKFAGGGRKHPRYRCRSMGFPKHCGNGTVVMAEWDAFCEEQVLGLLGDAERLEKVWVAGSDSAAELAEVNAELVDLTSLIGSPAYRAGSPQREALDARIAALAARQGELEGLEARPSGWEWRETGQRFGDWWREQDTAAKNTWLRSMNVRLTFDVRGGLTRTIDFGDLLEYEQHLRLGSVVGRLHTGMS

SEQ ID NO: 9869 - protein, 500 aa, synthetic construct
MRALVVIRLSRVTDATTSPERQLESCQQLCAQRGWDVVGVAEDLDVSGAVDPFDRKRRPNLARWLAFEEQPFDVIVAYRVDRLTRSTRHLQLLVHWAEDHKKLVVSATEAHFDTTTPFAAVVIALMGTVAQMELEAIKERIRSAVHFNIRAGKYRGSLPPWGYLPTRVDGEWRLVPDPVQRERILEVYHRVVDNHEPLHLVAHDLNRRGVLSPKDYFAQLRGREPQGRKWSATALKRSMISVAMLGYATLNGKTVRDDDGAPLVRAEPILTREQQEALRAELAKTSRTKPAVSTPSLLLRVLFCAVCGEPAYKFVGGGRKHPRYRCRSMGFPKHCGNGTVVMAEWDAFCEEQVLDLLGDAERLEKVWVAGSDSAVELAEVNAELVDLTSLISSPAYRAGSPQREALDARIAALAARQEELEGLEARPSGWEWRGTGQRLGDWWREQDTAAKNTWLRSMNVRLTFDVRGGLARTIDFGDLQEYERRLRLGSVAERLRTGMP

SEQ ID NO: 9870 - protein, 500 aa, synthetic construct
MRALVVIRLSRVTVATTSPERQLESCQQLCAQRGWDVVGVAEDLDVSGAVDPFDRKRRPNLARWLAFEEQPFDVIVAYRVDRLTRSVRHLQQLVHWAEDHKKLVVSATEAHFDTTTPFAAVIIALMGTVAQMELEAIKERIRSAVHFNIRAGKYRGSLPPWGYLPTRVDGEWRLVPDPVQRERILEVYHRVVDNHEPLHLVAYDLNRRGVLSPKDYFAQLQGREPQGRKWSATALKRSMTSVAMLGYATLNGKIVRDDDGAPLVRAEPILTREQLEALRAELVKTSRAKPAVSTPSLLLRVLFCAVCGEPAYKFVGGGRKHPRYRCRSMGFPEHCGNGTVVMTEWDAFCEEQVLDLLGDAERLEKAWVAGSDSAVELAEVSAELVDLTSLIGSPAYRAGSPQREALDARIVALAARQEELEGLEARPSGWEWRETGQRFGDWWREQDTAAKNTWLRSMNVRLTFDVRGGLTRTIDFGDLQEYEQHLRLGSVVERLHTGTS

SEQ ID NO: 9871 - protein, 500 aa, synthetic construct
MRALVVIRLSRVTDATTSPERQLESCQQLCAQRGWDVVGVAEDLDVSGAVDPFDRKRRPNLARWLAFEEQPFDVIVAYRVDRLTRSTRHLQQLVHWAEDHKKLVVSATEAHFDTTTPFAAVVIALMGTVAQMELEAIRERNRSAAHFNIRAGKYRGSLPPWGYLPTRVDGEWRLVPDPVQRERILEVYHRVVDNHEPLHLVAHDLNRRGVLSPKDYFAQLQGREPQGRKWSATALKRSMTSEAMLGYATLNGKTVRDDDGAPLVRAEPILTREQLEALRAELVKTSRAKPAVSTPSLLLRVLFCAVCGEPAYKFAGGGRKHPRYRCRSMGFPKHCGNGTVVMAEWDAFCEEQVLGLLGDAERLEKVWVAGSDSVVELAEVNAELVDLMSLIGSPAYRVGSPQREALDARIAALAARQEELEDLEARPSGWEWRETGQRFGDWWREQDTAAKNTWLRSMNVRLTFDVRGGLTRTIDFGDLQEYEQHSRLGSVVERLHTGMS

SEQ ID NO: 9872 - protein, 500 aa, synthetic construct
MRALVVIRLSRVTEATTSPERQLKSCQQLCAQRGWDVVGVAEDLDVSGAVDPFDRKRRPNLARWLAFEEQPFDVIVAYRVDRLTRSTRHLQQLVHWAEDHKKLVVSATEAHFDTTTPFAAVVIALMGTVAQMELEAIKERIRSAVHFNIRAGKYRGSLPPWGYLPARVDGEWRLVPDPVQRERILEVYHRVVDNHEPLHLVAHDLNRRGVLSPKDYFAQLRGREPQGREWSATALKRSMISVAMLGYATLNGKIVRDDDGAPLVRAEPILTREQQEALRAELAKTSRAKPAVSTPSLLLRVLFCAVCGEPAYKFVGGGRKHPRYRCRSMGFPEHCGNGTVVMAEWDAFCEEQVLDLLGDAERLEKVWVAGSDSAVELAEVNAELVDLTSLIGSPAYRAGSPQREALDARITALAARQEELEGLEARPSGWEWRGTGQRFGDWWHEQDTAAKNTWLRSMNVRLTFDVRGGLTRTIDFGDLQEYERHLRFDSVAGRLRTGMS

SEQ ID NO: 9873 - protein, 500 aa, synthetic construct
MRALVVIRLSRVTDATTSPERQLESCQQLCALRGWDVVGVAEDLDVSGAVDPFDRKRRPNLARWLAFEEQPFDVIVAYRVDRLTRSTRHLQQLVHWAEDHKKLVVSATEAHFDTTTPFAAVVIALMGTVAQMELEAIKERIRTAVRFNIRAGKYRGSLPPWGYLPTRVDGEWRLAPDPVQRERILEVYHRVVDNHEPLHLVAHDLNRRGVLSPKDYFAQLQGREPQGRKWSATALKRSMISVAMLGYATLNGKTVRDDDGAPLVRAEPILTREQQEALRAELAKTSRAKPAVSTPSLLLRVLFCAVCGEPAYKFAGGGRKHPRYRCRSMGFPKHCGNGTVAMAEWDAFCEKQVLDLLGDAERLEKVWVAGSDSVVELAEVSAELVDLTSLIGSPAYRAGSPQREALDARIAALAARQEELGGLEARPSGWEWRETGQRFGDWWREQDTVAKNTWLRSMNVRLTFDVRGGLTRTIDFGDLQEYEQHLRLGSVAERLHTGMS

SEQ ID NO: 9874 - protein, 500 aa, synthetic construct
MRALVVIRLSRVTDATTSPERQLESCQQLCAQRGWDVVGVAEDLDVSGAVDPFDRKRRPNLARWLAFEEQPFDVIVAYRVDRLTRSTRHLQQLVHWAEDHKKLVVSATEAHFDTTTPFAAVVIALMGTVAQMELEAIKERNRSAAHFNIRAGKYRGSLPPWGYLPARVDGEWRLVPDPVQRERILEVYHRVVDNHEPLHLVAHDLNRRGVLSPKDYFAQLQGREPQGRKWSATALKRSMISEAMLGYATLNGKTVRDDDGAPLVRAEPILTREQLEALRAELVKTSRAKPAVSTPSLLLRVLFCAVCGEPAYKFAGGGRKHPRYRCRSMGFPKHCGNGTVVMAEWDAFCEEQVLDLLGDAKRLEKVWVAGSDSAVELAEVNAELVDLTSLIGSPAYRAGSPQREALGARIAALAARQEELEGLEARPSGWEWRETGQRFGDWWREQDTAAKNTWLRSMNVRLTFDVRGGLTRTIDFGDLQEYEQHLRLGSVVERLHTGMS

SEQ ID NO: 9875 - protein, 500 aa, synthetic construct
MRALVVIRLSRVTDATTSPERQLESCQQLCAQRGWDVVGVAEDLDVSGAVDPFDRKRRPNLARWLAFEEQPFDVIVAYRVDRLTRSTRHLQQLVHWAEDHKKLVVSATEAHFDTTTPFAAVVIALMGTVAQMELEAIKERNRSAAHFNIRAGKYRGSLPPWGYLPARVDGEWRLVPDPVQRERILEVYHRVVDNHEPLHLVAHDLNRRGVLSPKDYFAQLRGREPQGRKWSATALKRSMISEAMLGYATLNGKTVRDDDGVPLVRAEPILTREQLEALRAELVKTSRAKPAVSTPSLLLRVLFCAVCGEPAYKFAGGGRKHPRYRCRSMGFPKHCGNGTVAMAEWDAFCEEQVLDLLGDAERLEKVWVAGSDSAVELAEVDAELVDLTSLVGSPAYRAGSPQREALDARIAALAARQEELEGLEARPSGWGWRETGQRFGDWWREQDTAAKNTWLRSMNVRLTFDVRGGLTRTIDFGDLQEYEQHLRLGSVVERLHTGMS

SEQ ID NO: 9876 - protein, 500 aa, synthetic construct
MRALVVIRLSRVTDATTSPERQLESCQQLCAQRGWDVVGVAEDLGVSGAVDPFDRKRRPNLARWLAFEEQPFDVIVAHRVDRLTRSIRHLQQLVHWAEDHKKLVVSATEAHFDTTTPFAAVVIALMGTVAQMELEAIKERNRSAAHFNIRAGKYRGSLPPWGYLPTRVDGEWRLVPDPVQRERILEVYHRVVDNHEPLHLVAHDLNRRGVLSPKDYFAQLRGREPQGRKWSATALKRSMISEAMLGYATLNGKTVRDDDGAPLVRAEPILTRVQLEALRAELVKISRAKPAVSTPSLLLRVLFCAVCGEPAYKFAGGGRKHPRYRCRSMGFPKHCGNGTVAMAECDAFCEEQVLNLLGDAERLEKVWVAGSDSAVELAEVNAELVDLTSLIGSPAYRAGSPQRGALDARIAALAARQEELEGLEARPSGWEWRETGQRFGDWWREQDTAAKNTWLRSMNVRLTFDVRGGLTRTIDFGDLQEYEQHLRLGSAVERLHTGMS

SEQ ID NO: 9877 - protein, 500 aa, synthetic construct
MRALVVIRLSRVTDATTSPERQLESCQQLCAQRGWDIVGVAEDLDVSGAVAPFDRKRRPNLARWLAFEEQPFDVIVAYRVDRLTRSIRHLQQLVHWAEDHKKLVVSATEAHFDTTTPFAAVVIALMGTVAQMELEAIKERNRSAAHFNIRAGKYRGSLPPWGYLPARVDGEWRLVPDPVQRERILEVYHRVVDNHEPLHLVAHDLNRRGVLSPKDYFAQLQGREPQGRKWSATALKRSMISGAMLGYATLNGKTVRNDDGAPLVRAEPILTRGQLEALRAELVKTSRAKPAVSTPSLLLRVLFCAVCGEPAYKFAGGGRKHPRYRCRSMGFTKHCGNGTVVMAEWDAFCEEQVLNLLGDAERLEKVWVAGSDSAVELAEVNAELVDLTSLIGSPAYRAGSPQREALDARIAALAASQEELEGLEARPSGWEWRGTGQRFGDWWREQDTAAKNTWLRSMNVRLTFDVRGGLTRTIDFGDLQEYEQHLRLGSVVERLHTGMS

SEQ ID NO: 9878 - protein, 500 aa, synthetic construct
MRALVVIRLSRVTDATTSPERQLESCQQLCAQRGWDVVGVAEDLDVSGAVDPFDRKRRPNLARWLAFEEQPFDVIVAYRVDRLTRSTRHLQQLVHWAEDHKKLVVSATEAHFDTTTPFAAVVIALMGTVAQMELEAIKERIRSASHFNIRAGKYRGSLPPWGYLPTRVDGEWRLVPDPVQRERILEVYHRVVDNHEPLHLVAHDLNRRGVLSPKDYFAQLRGREPQGRKWSATALKRSLISKAMLGYAILNGKTVRDDDGAPLVRAEPILTREQQEALRAELAKTSRAKPAVSTPSLLLRVLFCAVCGEPAYKFAGGGRKHPRYRCRSMGFPKHCGNGSVVMAEWDAFCEEQVLDLLGDAERLEKVWVAGSDSAVELAEVNAELVDLTSLIGSPAYRAGSPQREALDARIAALAARQEELEGLEARPSGWEWRGTGQRFGDWWRGQDTAAKNAWLRSMNVRLTFDVRGGLTRTIDFGDLQEYEQHLRLSCVVERPHTRMS

SEQ ID NO: 9879 - protein, 500 aa, synthetic construct
MRALVVIRLSRVTDATTSPKRQLESCQQLCAQRGWDVVGVAEDLDVSGAVDPFDRKRRPNLARWLAFEEQPFDVIVAYRVDRLTRSTRHLQQLVRWAEDHKKLVVSATEAHFDTTTPFAAVVIALMGTVAQMELEAIKERIRSAAHFNIRAGKYRGSLPPWGYLPTRVDGEWRLVPDPVQRERIIEVYHRVVDNHEPLHLVAHDLNRRGVLSPKDYFAQLQGREPQGRKWSATALKRSMTSVAMLGYATLNGKTVRDDDGAPLVRAEPILTREQQEALRAELAKTSRAKPAVSTPSLLLRVLFCAVCGEPAYKFVGGGRKHPRYRCRSMGLPKHCGNGTVVMTEWDAFCEEQVLGLLGDAERLEKVWVAGSDSAVELAEVNAELVDLTSLIGSPAYRAGSPQREALDARIAALAARQGELEGLEARPSGWEWRGTGQRFGDWWREQDTAAKNTWLRSMNVRLTFDARGGLTRTIDFGELREYEQHLRLGSVVERLHTGMS

SEQ ID NO: 9880 - protein, 500 aa, synthetic construct
MRALVVIRLSRVTDATTSPERQLESCQQLCAQRGWDVVGVAEDLDVSGAVDPFDRKRRPNLARWLAFEERPFDVIVAYRVDRLTRSTRHLQQLVHWAEDHKKLVVSATEAHFDTTTPFAAVVIALMGTVAQMELEAIKERNRSAAHFNIRAGKYRGSLPPWGYLPTRMDGEWRLVPDPVQRERILEVYHRVVDNHEPLHLVAHDLNRRGVLSPKDYFAQLRGREPQGRKWSATALKRSMISEAMLGYVTLNGKTVRDDDGAPLVRAEPILTREQLEALRAELVKTSRAKPAVSTPSLLLRVLFCAVCGEPAYKFAGGGRKHPRYRCRSMGFPKHCGNGTVAMAEWDAFCEEQVLDLLGDAERLEKVWVAGSDSAVELAKVNAELVDLTSLIGSPAYRAGSPQREALDARIAALAARQEELEGLEARPSGWEWRETGQRFGDWWREQDTAAKNTWLRSMNVRLTFDVRGGLTRTIDFGDLQEHEQHLRLGSVVERLHTGMS

SEQ ID NO: 9881 - protein, 500 aa, synthetic construct
MRALVVIRLSRVTDATTSPERQLESCQQLCAQRGWDVVGVAEDLDVSGAVDPFDRKRRPNLARWLAFEEQPFDVIVAYRVDRLTRSTRHLQQLVHWAEDHKKLVVSATEAHFDTTTPFAAVVIALMGTVAQMELEAIKERNRSAAHFNIRAGKYRGSLPPWGYLPARVDGEWRLVPDPVQRERISEVYRRVVDNHEPLYLVAHDLNRRGVLSPKDYFAQLQGREPQGRKWSATALKRSMTSEAMLGYATLNGKTVRDDDGAPLVRAEPILTRGQLEALRAELVKTSRAKPAVSTPSLLLRVLFCAVCGEPAYKFAGGGRKHPRYRCRSMGFPKHCGNGTVAMAEWDAFCEEQVLGLLGDAERLEKVWVTGSDSAVELAEVNAELVDLTSLIGSPAYRADSPQREALDARIAALAARQEELEGLGARPSGWEWRETGQRFGDWWREQDTAAKNTWLRSMNVRLTFDVRGGLTRTIDFGDLQEYEQHLRLGSVVERLHTGMS

SEQ ID NO: 9882 - protein, 500 aa, synthetic construct
MRALVVIRLSRVTDATTSPERQLESCQQLCAQRGWDVVGVAEDLDVSGAVDPFDRKRRPNLARWLAFEEQPFDVIVAYRVDRLTRSTRHLQQLVHWAEDHKKLVVSATEAHFDTTTPFAAVVIALMGTVAQMELEAIKERNRSAAHFNIRAGKYRGSLPPWGYLPTRVDGEWRLAPDPAQRERILEVYHRVVDNHEPLHLVAHDLNQRGVLSPKDYFAQLQGREPQGRKWSATALKRSMISVAMLGYATLNGKTVRDDDGAPLVRAEPILTREQLEALRAELVKTSRAKPAVSTPSLLLRVLFCAVCGEPAYKFAGGGRKHPRYRCRSMGFLKHCGNGTVVMAEWDAFCEEQVLGLLGDAERLEKVWVAGSDSAVELAEVNAELVDLTSLIGSPAYRAGSPQREALDARIAALAARQEELEGLEARPSGWEWRETGQRFGDWWREQDTAAKNTWLRSMNVRLTFDVRGGLTRTIDFGDLQEYEQHLRLGSVAKRLHTGMS

SEQ ID NO: 9883 - protein, 500 aa, synthetic construct
MRALVVIRLSRVTDATTSPERQLESCQQLCAQRGWDVVGVAEDLDVSGAVDPFDRKRRPNLARWLAFEEQPFDAIVAYRVDRLARSIRHLQQLVHWAEDHKKLVVSATEAHFDTTTPFAAVVIALMGTVAQMELEAIKERNRSAAHFNIRAGKYRGSLPPWGYLPTRVDGEWRLVPDPVQCERILEVYRRVVDNHEPLHLVAHDLNRRGVLSPKDYFAQLRGREPQGRKWSATALKRSMISEAMLGYATLNGKTVRDEDGAPLVRAEPILTRKQLEALRAELVKTSRAKPAVSTPSLLLRVLFCAVCGEPAYKFAGGGRKHPRYRCRSMGSPKHCGNGTVAMAEWDAFCEEQVLDLLGDAERLEKVWVAGSDSAVELAEVNAELVDLTSLIGSQAYRAGSPQREALDARIAALAARQEELEDLEARPSGWEWRETGQRFGDWWRGQDTAAKNTWLRSMNVRLTFDVRGGLTRTIDFGDLQEYEQHLRLGSVVERLHTGMS

SEQ ID NO: 9884 - protein, 500 aa, synthetic construct
MRALVVIRLSRVTDATTSPERQLESCQQLCAQRGWDVVGVAEDLDVSGAVDPFDRKRRPNLARWLAFEEQPFDAIVAHRVDRLTRSARHLQQLVHWAEDHKKLVVSATEAHFDTTTPFAAVVIALMGTVAQMELEAIKERIRSAAHFNIRAGKYRGSLPPWGYLPTRVDGEWRLVPDPVQRERILEVYHRVVDNHEPLHSVAHDLNRRGVLSPKDYFAQLRGREPQGRKWSATALKRSMTSKAMLGYAILNGKTVRDDDGAPLVRAEPILTREQLEALRAELAKTSRAKPAVSTPSLLLRVLFCAVCGEPAYKFVGGGRKHPRYRCRSMGSPKHCGNGTVAMAEWDAFCEEQVLNLLGDAERLEKVWVAGSDSAVELAEVNAELVDLTSLIGSPAYRAGSPQREALDARIAALAARQEELEGLEARPSGWEWRETGQRFGDWWREQNTAAKNTWLRSMNVRLTFDVRGGLTRTIDFGDLQEYEQHLRLGSVVERLHTGMS

SEQ ID NO: 9885 - protein, 500 aa, synthetic construct
MRALVVIRLSRVTDATTSPERQLESCQQLCAQRGWDVVGVAEDLDVSGAVDPFDRKRRPNLARWLAFEEQPFDVIVAYRVDRLTRSTRHLQQLVRWAEDHKKLVVSATEAHFDTTTPFAAVVIALMGTVAQMELEAIKERIRSAAHFNIRAGKYRGSLPPWGYLPTRVDGEWRLVPDPVQRERILEVYRRVVDNHEPLHLVAHDLNRRGVLSPKDYFAQLQGREPQGRKWSATALKRSMTSVAMLGYATLNGKTVRDDDGAPLVRAEPILTREQQEALRAELAKTSRAKPAVSTPSLLLRVLFCAVCGEPAYKFVGGGHKHPRYRCRSMGFPKHCGNGTVVMAEWDAFCEEQVLNLLGDAERLEKVWVAGSDSAVELAEVNAELVDLTSLIGSPAYRVGSPQREALDARIAALAARQEELEGLEARPSGWEWRGTGQRFGDWWREQDTAAKNTWLRSMNVRLTFDVRGGLTRTIDFGELQEYEQHLRLGSVAERLHTGMS

SEQ ID NO: 9886 - protein, 500 aa, synthetic construct
MRALVVIRLSRVTDATTSPERQLESCQQLCAQRGWDVVGVAEDLDVSGAVDPFDRKRRPNLARWLAFEQQPFDVIVAYRVDRLTRSTRHLQQLVHWAEDHKKLVVSATEAHFDTTTPFAAVVIALMGTVAQMELEAIKERIRSATHFNIRAGKYRGSLPPWGYLPTRVDGEWRLVPDPVQRERILEVYHRVVDNHEPLHLVAHDLNRRGVLSPKDYFAQLRGREPRGRKWSATALKRSMISGAMLGYATLNGKTVRDDDGAPLVRAEPILTREQQEALRAELVRTSRAKPAVSTPSLLLRVLFCAVCGEPAYKFAGGGRKHPRYRCRSMGFPKHCGNGTVAMADWDAFCEKQVLGLLGDAERLERVWVAGSDSAVELAEVNAELVDLTSLIGSPAYRAGSPQREALDARIAALAARQEELEGLEARPSGWEWRGTGQRFGDWWREQDTAAKNTWLRSMNVRLTYDARGGLTRTIDFGDLQEYGQHLRLGSVVERLRTGMS

SEQ ID NO: 9887 - protein, 500 aa, synthetic construct
MRALVVIRLSRVTDATTSPERQLESCRQLCAQRGWDVVGVAEDLDVSGAVDPFDRKRRPNLARWLAFEEQPFDVIVAYRVDRLTRSIRHLQQLVHWAEDHKKLVVSATEAHFDMTTPFAAVVIALMGTVAQMELEAIKERNRSAAHFNIRAGKYRGSLPPWGYLPTRVDGEWRLVPDPVQRERILEVYHRVVDNHEPLHLVAHDLNRRGVLSPKDYFAQLQGREPQGRKWSATALKRSMVSVAMLGYATLNGKTVRGDDGAPLVRAEPILTREQLEAIRAVLVKTSRAKPAVSTPSLLLRVLFCAVCGEPAYKFAGGGRKHPRYRCRSMGFPKHCGNGTVAMAEWDAFCEEQVLNLLGDAERLEKVWVAGSDSAVELAEVNAELVDLTSLIGSPAYRAGSPQREALDARIAALAARQEELEGLEARPSGWEWRETGQRFGDWWREQDTAAKNTWLRSMNVRLTFDVRGGLTRTIDLGDLQEYEQHLRLGSVVERLHTGMS

SEQ ID NO: 9888 - protein, 500 aa, synthetic construct
MRALVVIRLSRVSDATTSPERQLESCQQLCAQRGWDVVGIAEDLDVSGAVDPFDRKRRPNLARWLAFEEQPFDVIVAYRVDRLTRSTRHLQQLVHWAEDHKKLVVSATEAHFDTTTPFAAVVIALMGTVAQMELEAIKERNRSAAHFNIRAGKYRGSLPPWGYLPTRVDGEWRLVPDPVQRERILEVYHRVVDNHEPLHLVAHDLNRRGVLSPKDYFAQLRGREPQGRKWSATALKRSMISGAMLGYATLNGKTVRGDDGAPLVRAEPILTREQLEALRDELAKTSRAKPAVSTPSLLLRVLFCAVCGEPAYKFAGGGRKHPRYRCRSMGFPKHCGNGTVTMAEWDAFCEEQVLNLLGDAERLEKVWVAGSDSAVELAEVNAELVDLTSLIGSPAYRAGSPQREALDARIAALAARQEELEGLEARPSGWGWRGTGQRFGDWWRELDTGAKNTWLRSMNVRLTFDVRGGLARTIDFGDLQEYEQHLRLGSVVERLHTGMS

SEQ ID NO: 9889 - protein, 500 aa, synthetic construct
MRALVVIRLSRVTDATTSPERQLESCQQLCAQRGWDVVGVAEDLDVSGAVDPFDRKRRPNLARWLAFEEQPFDVIVAYRVDRLTRSTRHLQQLVHWAEDHKKLVVSATEAHFDTTTPFAAVVIALMGTVAQMELEAIKERNRSAAHFNIRAGKYRGSLPPWGYLPTRVDGEWRLVPDPVQRERILEVYHRVVDNHEPLHLVAHDLNRRGVLSPKDYFAQLRGREPQGRKWSATALKRSMTSEAMLGYATLNGKTVRDDDGAPLVRAEPILTREQLEALRAELVKTSRAKPAVPTPSLLLRVLFCAVCGEPAYKFAGGGRKHPRYRCRSMGFPKHCGNGTVAMAEWDAFCEEQVLDLLGDAERLEKVWVAGSDSAVELAEVNAELVDLTSLIGSPTYRAGSPQREALDARIAALAARQEELEGLEARPSGWEWRETGQRFGDWWREQDTAAKNTWLRSMNVRLTFDVRGGLTRTIDFGDLQEYEQHLRSGSVVERLHTGMS

SEQ ID NO: 9890 - protein, 500 aa, synthetic construct
MRTLVVIRLSRVTDATTSPERQLESCQQLCAQRGWDVVGVAEDLDVSGAVDPFDRKRRPNLARWLAFEEQPFDVIVAYRVDRLTRSVRHLQQLVHWAEDHKKLVVSATEAHFDTTTPFAAVVIALMGTVAQMELEAIKERNRSAAHFNIRAGKYRGSLPPWGYQPTRVDGEWRLVPDPVQRERILEVYHRVVDNHESLHLVAHDLNRRGVLSPKDYFAQLRGREPQGREWSATALKRSMVSVAMLGYATLNGKIVRGDDGAPLVRAEPILTREQLEVLRAELVKTSRAKPAVSTPSLLLRVLFCAVCGEPAYKFAGGGRKHPRYRCRSMGFPKHCGNGTVVMAEWDAFCEEQVLNLLGDAERLEKVWVAGSDSAVELAEVNAELVDLTSSIGSPAYRAGSPQREALDARIAALAARQEELEGLEARPSGWEWRETGQRFGDWWREQDTAAKNTWLRSMNVRLTFDVRGGLTRTIDFGDLQEYEQHLRLGGVVERLHTGMS

SEQ ID NO: 9891 - protein, 500 aa, synthetic construct
MRALVAIRLSRVTDATTSPERQLESCQQLCAQRGWDVVGVAEDLDVSGAVDPFDRKRRPNLARWLAFEEQPFDVIVAYRVDRLTRSTRHLQQLVHWAEDHKKLVVSATEAHFDTTTPFAAVVIALMGTVAQMELEAIKERIRSAVHFNIRAGRYRGSLPPWGYLPARVDGEWRLVPDPVQRERILEVYHRVVDNHEPLHLVAYDLNRRGVLSPKDYFAQLQGREPQGRKWSATALKRSMISVAMLGYATLNGKIVRDNNGAPLVRAEPILTREQQEALRAELVKTSRAKPAVPTPSLLLRVLFCAVCGEPAYKFVGGGRKHPRYRCRSMGFPKHCGNGTVVMAEWDAFCEEQVLDLLGDAERLEKVWVAGSDSAVELAEVNAELVDLTSLIGSPAYRAGSPQREALDARIAALAARQEELEGLEARPSGWGWRETGQRFGDWWREQDTAAKNTWLRSMNVRLTFDVRGGLTRAIDFGDLQEYEQHLRLGSVAERLDTGMS

SEQ ID NO: 9892 - protein, 500 aa, synthetic construct
MRALVVIRLSRVTDATTSPERQLESCQQLCAQRGWDVVGVAEDLDVSGAVDPFDRKRRPNLARWLAFEEQPFDVIVAYRVDRLTRSTRHLQQLVHWAEDHKKLVVSATEAYFDTTTPFAAVVIALMGTVAQMELEAIKERNRSAAHFNIRAGKYRGSLPPWGYLPTRVDGEWRLVPDPVQRERILEVYHRVVDNHEPLHLVAHDLNRRGVLSPKDYFAQLQGREPQGRKWSATALKRSMISEAMLGYATLNGKTVRDDDGAPLVRAEPILTRGQLEALRAELVKTSRTKPAVSTPSLLLRVLFCAVCGEPAYKFAGGGRKHPRYRCRSMGFPKHCGNGTVAMAEWDAFCEEQVLDLLGDAKRLEKVWVAGSDSAVELAEVNAELVDLTGLIGSPAYRAGSPQREALDARIAALAARQKELEGLEARPSGWEWRETGQRFGDWWREQDTAAKNTWLRSMNVRLTFDVRGGLTRTIDFGDLQEYEQHLRLGSVVERLHTGMS

SEQ ID NO: 9893 - protein, 500 aa, synthetic construct
MRALVVIRLSRVTDATTSPERQLESCQQLCAQRGWDVVGVAEDLDVSGAVDPFDRKRRPNLARWLAFEERPFDVIVAYRVDRLTRSTRHLQQLVRWAEDHKKLVVSATEAHFDTTTPFAAVVIALMGTVAQMELEAIKERSRSAAHFNIRAGKYRGSLPPWGYLPTRVDGEWRLVPDPVQRERILEVYHRVVDNHEPLHLVAHDLNRRGVLSPKDYFAQLRGREPQGRKWSATALKRSMISKAMLGYVTLNGKIVRDDDGAPLVRAEPILTREQQEALRAELVKTSRAKPAVSTPSLLLRVLFCAVCGEPAYKFVGGGRKHPRYRCRSMGFPKHCGNGTVVMTEWDAFCEEQVLDLLGDAERLEKVWVAGSDSAVELAEVNAELVDLTSLIGSPAYRAGSPQREALDARIAALAARQEELKGLEARPSGWGWRETGQRFGDWWREQDTAAKNTWLRSMNVRLTFDVRGGLTRTIDFGDLQEYERHLRSGGVAERLRTGMS

SEQ ID NO: 9894 - protein, 500 aa, synthetic construct
MRALVVIRLSRVTDATTSPERQLESCQQLCAQRGWDVVGVAEDLDVSGAVDPFDRKRRPNLARWLAFEEQPFDVIVAYRVDRLTRSTRHLQQLVHWAEDHKKLVVSATEAHFDTTTPFAAVVIALMGTVAQMELEAIKERNRSAAHFNIRAGKYRGSLPPWGYLPTRVDGEWRLVPDPVQRERILEVYRRVVDNHEPLHLVAHDLNRRGVLSPKDYFAQLQGREPQGRKWSATALKRSMTSVAMLGYATLNGKTVRDDDGAPLVRAEPILTREQLGALRAELAKTSRAKPAVSTPSLLLRVLFCGVCGEPAYKFAGGGRKHPRYRCHSMGFPKHCGNGTVAMAEWDAFCEEQVLDLLGDAERLEKVWVAGSDSAVELAEVNAELVDLTSLIGSPAYRAGSPQREALDARIAALAARQEELEGLEARPSGWEWRETGQRFRDWWREQDTAAKNTWLRSMNVRLTFDVRGGLTRTIDFGGLQEYKQHLRLGSVVERLHTGMS

SEQ ID NO: 9895 - protein, 500 aa, synthetic construct
MRALVVIRLSRVTDATTSPERQLESCQQLCARRGWDVVGVAEDLDVSGAVDPFDRKRRPNLARWLAFEEQPFDVIVAYRVDRLARSVRHLQQLVRWAEDHKKLVVSATEAHFDTTTPFAAVVIALMGTVAQMELEAIKERIRSAVHFNIRAGKYRGSLPPWGYLPTRVDGEWRLAPDPVQRERILEVYHRVVDNHEPLHLVAHDLNRRGVLSPKDYFAQLRGREPQGREWSATALKRSMTSVAMLGYATLNGKTVRDDDGTPLVRAEPILSREQLEALRAELVRTSRAKPAVSTPSLLLRVLFCAVCGEPAYKFVGGGRKHPRYRCRSMGFPKHCGNGTVVMAEWDAFCEEQVLDLLGDAERLEKVWVAGSDSAVELAEVNAELVDLTSLIGSPAYRAGSPQREALDARIAALAARQEELEGLEARPSGWEWRGTGQRLGDWWREQDTAAKNTWLRSMNIRLTFDVRGGLTRTIDFGELQEYEQHLRLGSVAGRLHTGMS

SEQ ID NO: 9896 - protein, 500 aa, synthetic construct
MRALVVIRLSRVTEATTSPERQLESCQQLCAQRGWDVVGVAEDLDVSGAVDPFDRKRRPNLARWLAFEEQPFDAIVAYRVDRLTRSIRHLQQLVLWAEDHKKLVVSATEAHFDTTTPFAAVVIALMGTVAQMELEAIKERIRSAVHFNIRAGKYRGSLPPWGYLPTRVNGEWRLAPDPVQRERILEVYHRVVHNHEPLHLVAHDLNRRGVLSPKDYFAQLRGREPQGRKWSATALKRSMISKAMLGYATLNGKTVRDDDGAPLVRAEPILTREQLEALRAELAKTSRAKPAVSTPSLLLRVLFCAVCGEPAYKFVGGGRKHPRYRCRSMGFPEHCGNGTVVMAEWDAFCEEQVLDLLGDAERLEKVWVAGSDSAVELAEVNAELVDLTGLIGSPAYRAGSPQREALDARIAALAARQEELEGLEARPSGWEWRGTGQRFGDWWREQDTAAKNTWLRSMNVRLTFDVRGGLTRTIDFGDLLECEQHLRLGSVAERLHTGMP

SEQ ID NO: 9897 - protein, 500 aa, synthetic construct
MRALVVIRLSRVTDATTSPERQLESCQQLCAQRGWDVVGVAEDLDVSGAVDPFDRKRRPNLARWLAFEEQPFDAIVAYRVDRLTRSVRHLQQLVHWAEDHKKLVISATEAHFDTTTPFAAVVIALMGTVAQMELEAIKERNRSAAHFNIRAGKYRGSLPPWGYLPTRVDGEWRLVPDPVQRERVLEVYHRVVDNHEPLHWVAHDLNRRGVLSPKDYFAQLQGREPQGRKWSATALKRSMISEAMLGYATLGGKTVRDDDGAPLVRAEPILTREQQEALRAELVKTSRAKPAVSTPSLLLRVLFCAVCGEPAYKFAGGGRKHPRYRCRSMGFPKHCGNGTVVMAEWDAFCEEQVLNLLGDAERLEKVWVAGSDSAVELAEVNAELVDLTSLTGSPAYRAGSPQRDALDARIAALAARQEELEGLEARPSGWEWRGTGQRFGDWWREQDTAAKNTWLRSMNVRLTFDVRGGLTRTIDFGDLQEYEQHLRLGSVVERLHAGKS

SEQ ID NO: 9898 - protein, 500 aa, synthetic construct
MRALVVIRLSRVTDATTSPERQLESCQQLCAQRGWDVVGVAEDLDVSGAVDPFDRKRRPNLARWLAFEEQPFDVIVAYRVDRLTRSTRHLQQLVHWAEDHKKLVVSATEAHFDTTTPFAAVVIALMGTVAQMELEAIKERIRSAVRFNIRAGKYRGSLPPWGYLPTRVDGEWRLVPDPVQRERILEVYHRVVDSHEPLHLVAHDLNRRGVLSPKDYFAQLQGREPQGREWSATALKRSLISKAMLGYATLNGKIVRDDDGAPLVRAEPILTRVQQEALRAELAKTSRAKPAVSTPSLLLRVLFCAVCGEPAYKFVGGGRKHPRYRCRSMGFPKHCGNGTVVMTEWDAFCEEQVLGLLGDAERLEKVWVAGSDSAVELAEVNAELVDLTSLIGSPAYRAGSPQREALDARVAALAARQEELEGLEARPSGWEWRGTGQRLGDWWREQDTAAKNTWLRSMNIRLTFDVRGGLTRTIDFGELQEYEQHLRLGSVAERLRTGMS

SEQ ID NO: 9899 - protein, 500 aa, synthetic construct
MRALVVIRLSRVTDATTSPERQLESCQQLCAQRGWDVVGVAEDLDVSGAVDPFDRKRRPNLARWLAFEEQPFDVIVAYRVDRLTRSTRHLQQLVHWAEDHKKLVVSATEAHFDTTTPFAAVVIALMGTVAQMELEAIKERIRSAAHFNIRAGKYRGSLPPWGYLPARVDGEWRLVPDPVQRERILEVYHRVVDNHEPLHLVAHDLNRRGVLSPKDYFAQLRGREPQGRKWSATALKRSMTSEAMLGYAILNGRIVRDDNGAPLVRAEPILTREQQEALRAELAKTSRAKPAVSTPSLLLRVLFCAVCGEPAYKFVGGGRKHPRYRCRSMGFPKHCGNGTVVMAEWDAFCEEQVLDLLGDAERLERVWVAGSDSAVELAEVNAELVDLTSLIGSPAYRVGSPQREALDARIAALAARQEELEGLEARPSGWEWRGTGQRFGDWWREQDTAAKNTWLRSMNVRLTFDVRGGLTRTIDFGDLQEYEQHLRLGSMVERLHSGMS

SEQ ID NO: 9900 - protein, 500 aa, synthetic construct
MRALVVIRLSRVTDATTSPERQLESCRQLCAQRGWDVVGVAEDLDVSGAVDPFDRKRRPNLARWLAFEEQPFDVIVAYRVDRLTRSTRHLQQLVRWAEDHKKLVVSATEAHFDTTTPFAAVVIALMGTVAQMELEAIKERIRSATHFNIRAGKYRGSLPPWGYLPTRVDGEWRLAPDPVQRERILEVYRRVVDDHEPLHLVAHDLNRRGVLSPKDYFAQLQGREPQGRRWSATALKRSMISGAMLGYATLNGKTVRGDDGAPLVRAEPILTREQQEALRAELAKTSRAKPAVSTPSLLLRVLFCAVCGEPAYKFVGGGRKHPRYRCRSMGFPKHCGNGTVAMAEWDAFCEEQVLDLLGDAERLEKVWVAGSDSAVELAEVNAELVDLTSLIGSPAYRAGSPQREALDTRIAALAARQEELEGLEARPSGWEWRGTGQRFGDWWREQDTAAKNTWLRSMHIRLTFDVRGGLTRTIDFGELQEYEQHLRLGSVVKRLYTGLS

SEQ ID NO: 9901 - protein, 500 aa, synthetic construct
MRALVVIRLSRVTDATTSPERQLESCQQLCAQRGWDVVGVAEDLDVSGAVDPFDRKRRPNLARWLAFEEQPFDVIVAYRVDRLTRSTRHLQQLVRWAEDHKKLVVSATEAHFDTTTPFAAVVIALMGTVAQMELEAIKERIRSAVHFNIRAGKYRGSLPPWGYLPTRVDGEWRLVPDPVQRERILEVYHRVVDNHEPLHLVAHDLNRRGILSPKDYFAQLQGREPQGRKWSATALKRSMTSEAMLGYATLNGKTVRDDNGAPLVRAEPILTRGQQEALRAELAKTSRAKPAVSTPSLLLRVLFCAVCGEPAYKFAGGGRKHPRYRCRSMGFPEHCGNGTVVMAEWDAFCEEQVLNLFGDAERLEKVWVAGSDSAVELAEVNAELMDLTSLICSPAYRAGSPQREALDARIAALAARQEELEGLEARPSGWEWRGTGQRLGDWWREQDTAAKNTWLRLMNVRLTFDVRGGLTRTIDFGELQEYEQHLRLGSVVGRLYTGTS

SEQ ID NO: 9902 - protein, 500 aa, synthetic construct
MRALVVIRLSRVTEATTSPERQLESCQQLCARRGWDVVGVAEDLDVSGAVDPFDRKRRPNLARWLAFEEQPFDVIVAYRVDRLTRSTRHLQQLVRWAEDHKKLVVSATEAHFDTTTPFAAVVIALMGTVAQMELEAIKERIRSAVRFNIRAGKYRGSLPPWGYLPSRVDGEWRLVPDPVQRERILEVYHRVVDDHEPLHLVAHDLNRRGVLSPKDYFAQLRGREPQGRKWSATALKRSMISEAMLGYATLNGMTVRDDDGAPLVRAEPILTREQLEALRAELAKTSRAKPAVSTPSLLLRVLFCAVCGEPAYKFTGGGRKHPRYRCRSMGLPKHCGNGTVVMAKWDAFCEEQVLDLLGDAERLEKVWVAGSDSAVELAEVNAELVDLTSLIGSPAYRAGSPQREALDTRIAALAARQEELEGLGARPSGWEWRGTGQRFGDWWREQNTAAKNTWLRSMNVRLTFDVRGGLTRTIDFGDLQEYEQHLRLGSVVERLHTGMS

SEQ ID NO: 9903 - protein, 500 aa, synthetic construct
MRALVVIRLSRVTDATTSPERQLESCQQLCAQRGWNVVGVAEDLDVSGAVDPFDRKRRPNLARWLAFEEQPFDVIVAYRVDRLTRSVRHLQQLVHWAEDHKKLVVSATEAHFDMTTPFAAVVIALMGTVAQMELEAIKERNRSAAHFNIRAGKYRGSLPPWGYLPARVDGEWRLVPDPVQRERILEVYHRVVDNHEPLHLVAHDLNRRGVLSPKDYFAQLQGREPQGRKWSATALKRSMISEAMLGYATLNGKTVRDDDGTPLVRAEPILTREQLEALRAELVKTSRVKPAVSTPSLLLRVLFCAVCGEPAYKFAGGGRKHPRYRCRSMGFPKHCGNGTVAMAEWDAFCEEQVLDLLGDAERLEKVWIAGSDSAVELAEVNAELVDLTSLIGSPAYRAGSLQREALDARIVALAARREELEGLGARPSGWEWRETGQRFGDWWREQDTAAKNTWLRSMNVRLTFDVRGGLTRTIDFGDLLEYVQHLRLGSVVERLHTGMS

SEQ ID NO: 9904 - protein, 500 aa, synthetic construct
MRALVVIRLSRVTDATTSPERQLESCQQFCAQRGWDVVGVAEDLDVSGAVDPFDRKRRPNLARWLALEERPFDVIVVYRVDRLTRSVRHLQQLVHWAEDHKKLVVSATEAHFDTTTPFAAVVITLMGTVAQMELEAIKERNRSAAHFNIRAGKYRGSLPPWGYLPTRVDGEWRLVPDPVQRERILEVYHRVVDNHEPLHLVAHDLNRRGVLSPKDYFAQLRGREPQGRKWSATALKRSMISKAMLGYATLNGKTVRDDDGAPLVRAEPILTREQLEALRAELVKTSRAKPAVSTPSLLLRVLFCAVCGEPAYRFAGGGRKHPRYRCRSMGFPKHCGNGTVVMAEWDAFCEEQVLDLLGDAERLEKVWVAGSDSAVELAEVNAELVDLTSLIGSPAYRAGSPQREALDARIAALAARQEELEGLGARPSGWEWRETGQRFGDWWREQDTAAKNTWLRSMNVRLTFDVRGGLTRTIDFGDLQEYEQHLRLGSVVERLHTGMS

SEQ ID NO: 9905 - protein, 500 aa, synthetic construct
MRALVVIRLSRVTDATTSPERQLESCQQLCAQRDWDVVGVAEDLDVSGAVDPFDRKRRPNLARWLAFEEQPFDAIVAYRVDRLTRSIRHLQQLVHWAEDHKKLVVSATEAHFDTTTPFAAVVIALMGTVAQMELEAIKERNRSAAHFNIRAGKYRGSLPPWGYLPTRVDGEWRLVPDPVQRERILEVYRRVVDNHEPLHLVAHDLNRRGVLSPKDYFAQLRGREPQGRKWSATALKRSMISVAMLGYATLNGKTVRDDDGAPLVRAEPILTREQLEALRVELAKTSRAKPAVSTPSLLLRVLFCAVCGEPAYKFAGGGRKHPRYRCRSMGFPKHCGNGTVAMAEWDAFCEEQVLDLLGDAERPEKVWVAGSDSAVELAEVNAELVDLTSLIGSPAYRAGSPQREALDARIAALAARQEELEGLEARPSGWEWRETGQRFGDWWREQDTAAKNTWLRSMNVRLTFDVRGGLTRTIDFGDLQEYERHLRLGCVVGRSHTGMS

SEQ ID NO: 9906 - protein, 500 aa, synthetic construct
MRALVVIRLSRVTDATTSPERQLESCQQLCAQRGWDVVGVAEDLDVSGAVDPFDRKRRPNLARWLAFEEQPFDAIVAYRVDRLTRSVRHLQQLVHWAEDHKKLVVSATEAHFDTTTPFAAVVIALMGTVAQMELEATKERNRSAAHFNIRAGKYRGSLPPWGYLPTRVDGEWRLVPDPVQRERILEVYHRVVDNHEPLHLVAHDLNRRGVLSPKDYFAQLRGREPQGRKWSATALKRSMISEAMLGYATLNGKIVRDDDGAPLVRAEPILTREQLEALRAELVKTSRTKPAVSTPSLLLRVLFCAVCGEPAYKFAGGGRKHPRYRCRSMGFPKHCGNGTVAMAEWDAFCEEQVLDLLGDAERLEKVWVAGSDSAVELAEVNAELVDLTSLLGSQAYRAGSPQRGALDARIAALAARQEELEGLEARPSGWEWRETGQRFGDWWREQDTAAKNTWLRSMNVRLTFDVRGGLTRTIDFGGLQEYEQRLRLGSVVERLHAGTS

SEQ ID NO: 9907 - protein, 500 aa, synthetic construct
MRALVVIRLSRVTDATTSPERQLESCQQLCAQRGWDVVGVAEDLDVSGAVDPFDRKRRPDLARWLAFEEQPFDVIVAYRIDRLTRSVRHLQQLVHWAEDHKKLVVSATEAHFDTTTPFAAVVIALMGTVAQMELEAIRERNRSAAHFNIRAGKYRGSLPPWGYLPTRVDGEWRLVPDPVQRERILEVYHRVVDNHEPLHLVAHDLNRRGVLSPKDYFAQLRGREPQGRKWSATALKRSMISEAMLGYATLDGKTVRDDDGAPLVRAEPILTREQLEALRAELVKTSRAKPAVSTPSLLLRVLFCAVCGEPAYKFAGGGRKHPRYRCRSMGFPKHCGNGTVAIAEWDAFCEELVLDLLGDAERLEKVWVAGSDSAVELAEVNAELVDLTSLIGSPAYRAGSPQREALDARIAALAARQEELEGLGARPSGWEWRGTGQRFGDWWREQDTAAKNTWLRSTNVRLTFDVRDGLTRTIDFGDLQEYKQHLRLGSAVERLHTGMS

SEQ ID NO: 9908 - protein, 500 aa, synthetic construct
MRALVVIRLSRVTDATTSPERQLESCQRLCAQRGWDVVGVAEDLDVSGAVNPFDRKRRPNLARWLAFEEQPFDVIVAYRVDRLTRSTRHLQQLVHWAEDHKKLVVSATEAHFDTTTPFAAVVIALMGTVAQMELEAIKERNRSAAHFNIRAGKYRGSLPPWGYLPTRVDGEWRLVPDPVQRERILEVYHRVVDNHEPLHLVAHDLNRRGVLSPKDYFAQLRGREPRGRKWSATALKRSMISEAMLGYATLNGKTVRDDDGAPLVRAEPILTREQLEALRAELVKTSRAKPAVSTPSLLLRVLFCAVCGEPAYRFAGGGRKHPRYRCRSMGFPKHCGNGTVAMAEWDAFCEEQVLDLLGDAERLEKVWVAGSDSAVELAEVNAELVDLTSLIGSPAYRAGSPQREALDARIAALAARQEELEGLEARPPGWGWRETGQRFGDWWREQDTAAKNTWLRSMNVRLTFDVRGGLTRTIDFGDLQGYEQHLRLGSVVERLHTGMS

SEQ ID NO: 9909 - protein, 500 aa, synthetic construct
MRALVVIRLSRVTDATTSPERQLESCQQLCAQRGWDVVGVAEDLDVSGAVDPFDRKRRPNLARWLAFEEQPFDVIVAYRVDRLTRSTRHLQQLVHWAEDHKKLVVSATEAHFDTTTPFAAVVIALMGTVAQMELEAIKERNRSAAHFNIRAGKYRGSLPPWGYLPTRVDGEWRLAPDPVQRERILEVYHRVVDNHEPLHLVAHDLNRRGVLSPKDYFAQLRGREPQGREWSATALKRSMTSEAMLGYATLNGKTVRDDDGAPLVRAEPILTREQLEALRAELVKTSRAKPAVSTPSLLLRVLFCAVCGEPAYKFAGGGRKHPRYRCRSMGFPKHCGNGTVAMAEWDTFCEEQVLDLLGDAERLEKVWVAGSDSAVELAEVNAELVDLTSLIGSPAYRAGSPQREALDARIAALAARQEELEGLGARPPGWEWRETGQRFGDWWREQDTAAKNTWLRSMNVRLTFDVRGGLTRTIDFGDLQEYEQHLRLGSVVERLHTGMS

SEQ ID NO: 9910 - protein, 500 aa, synthetic construct
MRALVVIRLSRVTDATTSPERQLESCQQLCAQRGWDVVGVAEDLNVSGAVDPFDRKRRPNLARWLAYEEQPFDVIVAYRVDRLTRSIRHLQQLVHWAEDHKKLVVSATEAHFDTTTPFAAVVIALMGTVAQMELEAIKERNRSAAHFNIRAGKYRGSLPPWGYLPARVDGEWRLVPDPVQRERILEVYHRVVDNHESLHLVAHDLNRRGVLSPKDYFAQLQGREPQGRKWSATALKRSMTSEAMLGYATLNGKTVRGDDGAPLVRAEPILTREQLEALRAELVKASRAKPAVSTPSLLLRVLFCAVCGEPAYKFAGGGRKHPRYRCRSMGFPKHCGNGTVVMAEWDAFCEEQVLDLLGDTERLEKVWVAGSDSAVELAEVSAGLVDLTGLIGSPTYRAGSPQREALDARIAALAARQEELEGLEARPSGWVWRETGQRFGDWWREQDTAAKNTWLRSMNVRLTFDVRGGLTRTVDFGDLLEYEQQLRLGSVVERLHTGMS

SEQ ID NO: 9911 - protein, 500 aa, synthetic construct
MRALVVIRLSRVTDATTSPERQLESCQQLCAQRGWDVVGVAEDLDVSGAVDPFDRKRRPNLARWLAFEEQPFDVIVAYRVDRLARSVRHLQQLVHWAEDHEKLVVSATEAHFDTTTPFAAVVIALMGTVAQMELEAIRERNRSAAHFNIRAGKYRGSLPPWGYLPTRVDGEWRLVPDPVQRERILEVYHRVVDNHEPLHLVAHDLNRRGVLSPKDYFAQLQGREPQGRKWSATALKRSMTSEAMLGYATLNGKTVRDDDGAPLVRAEPILTRVQLEALRAELVKTSRAKPAVSTPSLLLRVLFCAVCGEPAYKFAGGGRKHPRYRCRSMGFPKHCGNGTVAMAEWDAFCEEQVLNLLGDAERLEKVWVAGSDSAVELAEVNAELVDLTGLIGSPAYRAGSPQREALDARIAALAARQEELEGLEARPSGWEWRETGQRFGDWWREQDTAAKNTWLRSMNVRLTFDARGGLTRTIDFGGLLEYEQHLRLGSVVERLHTGMS

SEQ ID NO: 9912 - protein, 500 aa, synthetic construct
MRALVVIRLSRVTDATTSPERQLESCQQLCAQRGWDVVGVAEDLDVSGAVDPFDRKRRPNLARWLAFEEQPFDVIVAYRVDRLTRSIRHLQQLVHWAEDHKKLVVSATEAHFDTTTPFAAVVIALMGTVAQMELEAIKERIRSATHFNIRAGKYRGSLPPWGYLPTRVDGEWRLVPDPVQRERILEVYHRVVDNHEPLHLVAYDLNRRGVLSPKDYFAQLRGREPQGRKWSATALKRSMISRAMLGYATLNGKTVRGGDGAPLVRAEPILTREQQEALRAELAKTSRAKPAVSTPSLLLRVLFCAVCGEPAYKFAGGGRKHPRYRCRSMGFPKHCGNGTVTMAEWDAFCEEQVLDLLGDAERLEKVWVAGSDSAVELAEVNAELVDLTSLIGSPAYRAGSPQREALDARIAALAARQEELEGLEARPSGWEWRGTGQRFGDWWREQDTAAKNTWLRSMNVRLTFDVRGGLTRTIDFGDLQEYEQHLRLGSVAKRLHTGMS

SEQ ID NO: 9913 - protein, 500 aa, synthetic construct
MRALIVIRLSRVTDATTSPERQLESCQQLCAQRGWDVVGVAEDLDVSGAVDPFDRKRRPNLARWLALEEQPFDVIVAYRVDRLTRSVRHLQQLVHWAEDHKKLVVSATEAHFDTTTPFAAVVIALMGTVAQMELEAIRERIRSAVHFNIRAGKYRGSLPPWGYLPTRVDGEWRLVPDPVQRERILEVYHRVVDNHEPLHLVAHDLNRRGVLSPKDYFAQLRGREPQGREWSATALRRSMTSVAMLGYATLNGKTVRGDDGAPLVRAEPILTREQQEALRAELAKTSRAKPAVSTPSLLLRVLFCAVCGEPAYKFVGGGRKHPRYRCRSMGFPEHCGNGTVVMAEWDAFCEEQVLALLGDAERLEKVWVAGSDSSVELAEVNAELVDLTSLIGSPAYRAGSPQREALDARIAALAARQEELESLEARPSGWEWRETGQRFGDWWREQDTAAKNSWLRSMNVRLTFDVRGGLTRTIDFGDLQEYEQHLRLSSVDERLPTGRS

SEQ ID NO: 9914 - protein, 500 aa, synthetic construct
MRALVVIRLSRVTDATTSPERQLESCQQLCAQRGWDVVGVAEDLDVSGAVDPFDRKRRPNLARWLAFEEQPFDVIVAYRVDRLTRSTRHLQQLVHWAEDHKKLVVSATEAHFDTTTPFAAIVIALMGTVAQMELEAIKERNRSAAHFNIRAGKYRGSLPPWGYLPTRVDGEWRLVPDPVQRERILEVYRRVVDNHEPLHLVAHDLNRRGVLSPKDYFAQLRGREPQGRKWSATALKRSMISEAMLGYATLNGKTVRDDDGAPLVRAEPILTRGQLEALRAELVKASRAKPAVSTPSLLLRVLFCAVCGEPAYKSAGGGRKHPRYRCRSMGFPKHCGNGTVAMAEWDAFCEEQVLNLLGDAERLEKVWVAGSDSAVELAEVNAELVDLTSLIGSPAYRAGSPQREALDARIATLAARQGELEGLEARPSGWEWRETGQRFGDWWREQDTAAKNTWLRSMNVRLTFDARGGLTRTIDFGDLQEYEQHLRLGSVVERLHTEMS

SEQ ID NO: 9915 - protein, 500 aa, synthetic construct
MRAIVVIRLSRVTDATTSPERQLESCQQLCAQRGWDVVGVAEDLNVSGAVDPFDRKRRPNLARWLAFEEQPFDVIVAYRVDRLTRSTRHLQQLVRWAEDHKKLVVSATEAHFDTTTPFAAVVIALMGTVAQMELEAIKERSRSAAHFNIRAGKYRGSLPPWGYLPTRVDGEWRLVPDPVQRERILEVYHRVVDNHEPLHLVAHDLNRRGILSPKDYFAQLQGREPQGRKWSATALKRSMTSVAMLGYATLNGKIVRDDDGAPLVRAEPILTREQQEALRAELVKTSRAKPAVSTPSLLLRVLFCAVCGEPAYKFTGGGRKHPRYRCRSMGFPKHCGNGTVVMAEWDAFCEKQVLDLLGDAERLEKVWVAGSDSAVELAEVSAELVDLTSLIGSPAYRAGSPQREALDARIAALAARQEELEGLEARPSGWEWRETGQRFGDWWRGQDTAAKNTWLRSMNVRLTFDVRGGLTRTIDFGDLQEYEQYLRLGSEVERLHTGMS

SEQ ID NO: 9916 - protein, 500 aa, synthetic construct
MRALVVIRLSRVTDATTSPERQLESCQQLCAQRGWDVVGVAEDLDVSGAVNPFDRKRRPNLARWLAFEEQPFDAIVACRVDRLARSVRHLQQLVHWAEDHKKLVVSATEAHFDTTTPFAAVVIALMGTVAQMELEAIKERNRSAAHFNIRAGKYRGSLPPWGYLPTRVDGEWRLVPDPVQRERILEVYHRVVDNHEPLYLVAHDLNRRGVLSPKDYFAQLQGREPQGRKWSATALKRSMISEAMLGYATLNGKTVRDDDGAPLVRAEPILTREQLEVLRAELVKTSRAKPAVSTPSLLLRVLFCAVCGEPAYRFAGGGRKHPRYRCRSMGFPKHCGNGTVVMAEWDAFCEEQVLGLLGDAERLEKVWVAGSDSAVELAEVSAELVDLTSLIGSPAYRAGSPQREALDARIAALAARQEELEGLEARPSSWEWRGTGQRFGDWWREQDTAAKNTWLRSMNVRLTFDVRGGLTRTIDFGDLQEYEQHLRLGSVVERLHTGMS

SEQ ID NO: 9917 - protein, 500 aa, synthetic construct
MRALVVIRLSRVTDATTSPERQLASCQQLCAQRGWDVVGVAEDLDVSGAVDPFDRKRRPNLARWLAFEEQPFDVIVAYRVDRLTRSTRHLQQLVRWAEDHKKLVVSATEAHFDTTTPFAAVVIALMGTVAQMELEAIKERIRSAAHFNIRAGKYRGSLPPWGYLPARVDGEWRLVPDPVQRERILEVYRRVVDNHEPLHLVAHDLNRRGVLSPKDYFAQLQGREPRGRKWSATALKRSMISVAMLGYATLNGKTVRDDDGAPLVRAEPILTREQQEALRAELVKTSRAKPAVSTPSLLLRVLFCAVCGEPAYKFVGGGRKHPRYRCRSMGFPKHCGNGTVVMAEWDAFCEEQVLDLLGDAERLEKVWVAGSDSAVELAEVSAELVDLTSLIGSPAYRAGSPQREALDARIAALAARQEELEGLEARPSGWEWRETGQRFRDWWREQDTAAKNTWLRSMNIRLTFDVRGGLTRTIDFGGLQEYVQHLRLSSVVERSHTGMS

SEQ ID NO: 9918 - protein, 500 aa, synthetic construct
MRALVVIRLSRVTNATTSPERQLESCQQLCAQRGWDVVGVAEDLDVSGAVDPFDRKRRPNLARWLAFEEQPFDVIVAYRVDRLARSVRHLQQLVHWAEDHKKLVVSATEAHFDTTTPFAAVVIALMGTVAQMELEAIRERNRSAAHFNIRAGKYRGSLPPWGYLPARVDGEWRLAPDPVQRERILEVYHRVVDNHEPLHLVAHDLNRRGVLSPRDYFAQLQGREPQGRKWSATALKRSMISEAMLGYATLNGKTVRDDDGAPLVRAEPILTREQLEALRAELVKTSRAKPAVSTPSLLLRVLFCAVCGEPAYKSAGGGRKHPRYRCRSMGFPKHCGNGTVVMAEWDAFCEEQVLDLLGDAERLEKVWVAGSDSAVELAEVNAELVGLTSLIGSPAYRAGSPQREALDARIAALAARQEELEGLEARPSGWEWRETGQHFGDWWREQDTAAKNTWLRSMNVRLTFDVRGGLTRTIDFGDLQEYEQHLRLGSVVERLHAGMS

SEQ ID NO: 9919 - protein, 500 aa, synthetic construct
MRALVVIRLSRVTDATTSPERQLESCQQLCAQRGWDVVGVAEDLDVSGAVDPFDRKRRPNLARWLAFEEQPFDVIVACRVDRLTRSTRHLQQLVRWAEDHKKLVVSATEAHFDTTTPFAAVVIALMGTVAQMELEAIKERIRSAAHYNIRAGKYRGSLPPWGYLPTRVDGEWRLVPDPVQRERILEVYHRVVDNHEPLHLVAYDLNRRGVLSPKDYFAQLQGREPRGRKWSATALKRSMISVAMLGYATLNGKIVRDDDGAPLVRAEPILTREQQEALRAELAKTSRAKPAVSTPSLLLRVLFCAVCGEPAYKFVGGGRKHPRYRCRSMGFPKHCGNGTVVMTEWDAFCEEQVLNLLGDAERLEKVWVAGSDSAVELAEVNAELVDLTSLIGSPAYRAGSPQREALDARIAALAARQEELESLEARPSGWEWRGTGQRFGDWWREQDTAAKNTWLRSMNVRLTFDVRGGLTRAIDFGDLQEYEQHLRLGSVVERLHTGMS

SEQ ID NO: 9920 - protein, 500 aa, synthetic construct
MRALVVIRLSRVTDATTSPGRQLESCQQLCAQRGWDVVGVAEDLDVSGAVDPFDRKRRPNLARWLAFEEQPFDAIVAYRVDRLTRSVRHLQQLVRWAEDHKKLVVSATEAHFDTTTPFAAVVIALMGTVAQMELEAIKERSRSAAHFNIRAGKYRGSLPPWGYLPARVDGEWRLVPDPVQRERILEVYHRVVDNHEPLHLVAHDLNRRGVLSPKDYFAQLQGREPQGRKWSATALKRSMTSVAMLGYATLSGMTVRGDDGAPLVRAEPILTREQQEALRAELAKTSRAKPAVSSPSLLLRVLFCAVCGEPAYKFVGGGRKHPRYRCRSMGFPKHCGNGTVVMAEWDVFCEEQVLDLLGDAERLEKVWVAGSDSAVELAEVNAELVDLTSLIGSPAYRAGSPQREALDARIAALVARQEELEGLEARPSGWEWRETGQRFGDWWREQDTAAKNAWLRSMNVRLTFDARGGLTRTIDFGDLQEYEQHLRLGSVAERLHTGMS

SEQ ID NO: 9921 - protein, 500 aa, synthetic construct
MRALIVIRLSRVTDATTSPERQLESCQQLCAQRGWDVVGVAEDLDVSGAVDPFDRKRRPNLARWLAFEEQPFDVIVAYRVDRLTRSTRHLQQLVRWAEDHKKLVVSATEAHFDTTTPFAAVVIALMGTVAQMELEAIKERSRSAAHFNIRAGKYRGSLPPWGYLPTRVNGEWRLAPDPVQRERILEVYHRVVDDHEPLHLVAYDLNQRGVLSPKDYFAQLQGREPQGREWSATALKRSMTSVAMLGYATLNGKTVRDDDGAPLVRAEPILTRKQQEALRAELAKTSRAKPAVSTPSLLLRVLFCAVCGEPAYKFAGGGRKHPRYRCRSMGLPKHCGNGTVVMAEWDAFCEEQVLNLLGDAERLEKVWVAGSDSAVELAEVNAELVDLTSLIGSPAYRAGSPQREALDARIAALAARQEELEGLEARPSGWEWRETGQRFGDWWREQDTAAKNTWLRSMNVRLTFDVRGGLTRTIDFGELQEYERHLRSGSVVERLHTGRS

SEQ ID NO: 9922 - protein, 500 aa, synthetic construct
MRALVVVRLSRVTEATTSPERQLKSCQQLCAQRGWDVVGVAEDLDVSGAVDPFDRKRRPNLARWLAFEEQPFDVIVVYRVDRLTRSTRHLQQLVHWAEDHKKLVVSATEAHFDTTTPFAAVVIALMGTVAQMELEAIKERIRSAVHFNIRAGKYRGSLPPWGYLPTRVDGEWRLVPDPVQRERILEVYHRVVDNHEPLHLVAHDLNRRGVLSPKDYFAQLRGREPQGREWSATALKRSMTSKAMLGYATLNGKTVRDDDGAPLVRAEPILTREQQEALRAELAKTSRAKPAVSTPSLLLRVLFCAVCGEPAYKFAGGGRKHPRYRCRSMGFPEHCGNGTVVMAEWDAFCEEQVLDLLGDAERLEKVWVAGSDSAVELAEVSAELVDLTSLIGSPAYRAGSPQREALDARIAALAARQEELEGSEARPSGWEWRGTGQRLGDWWREQDTAAKNTWLRSMNIRLTFDVRGGLARTIDFGDLQEYEQHLRLGSVAKRLHTGMS

SEQ ID NO: 9923 - protein, 500 aa, synthetic construct
MRALVVIRLSRITDATTSPKRQLESCQQLCAQRGWDVVGVAEDLDVSGAVDPFDRKRRPNLARWLAFEEQPFDVIVAYRVDRLTRSTRHLQQLVRWAEDHKKLVVSATEAHFDTTTPFAAVVIALMGTVAQMELEAIKERIRSATHFNIRAGKYRGSLPPWGYLPTRVEGEWRLVPDPVQRERILEVYHRVVDNHEPLHLVAHDLNRRGVLSPKDYFAKLQGREPQGRKWSATALKRSMISKAMLGYATLNGKTVRDDDGVPLVRAEPILTREQQEALRAELAKTSRAKPAVSTPSLLLRVLFCAVCGEPAYKFVGGGRKHPRYRCRSMGFPKHCGNGTVVMTEWDAFCEEQVLDLLGDAERLEKVWVAGSDSAVELAEVNAELVDLTSLIGSPAYRAGSPQREALDARIAALAARQEELEGLEARPSGWEWRGTGQRFGDWWREQDTAAKNTWLRSMNVRLTFDVRGGLTRTIDFGELQGYEQHLRLGSVAERLHTGMS

SEQ ID NO: 9924 - protein, 500 aa, synthetic construct
MRALVVIRLSRVTDATTSPERQLESCRQLCAQRGWDVVGVAEDLDVSGAVDPFDRKRRPNLARWLAFEEQPFDVIVAYRVDRLTRSTRHLQQLVRWAEDHKKLVVSATEAHFDTTTPFAAVVIALMGTVAQMELEAIKERIRSAVHFNIRAGKYRGSLPPWGYLPTRVDGEWRLVPDPVQRERILEVYHRVVDNHEPLHLVAHDLNRRGVLSPKDYFAQLQGREPRGRKWSATALKRSMISVAMLGYATLNGKIVRDGDGAPLVRAEPILTREQQGALRAELAKTSRAKPAVSTPSLLLRVLFCAVCGEPAYKFVGGGRKHPRYRCRSMGFPKHCGNGTVVMAEWDVFCEEQVLNLLGDAERLEKVWVAGSDSAVELAEVNAELVDLTSLIGSPAYRAGSPQREALDARIAALAARQGELEGLEARPSGWEWRGTGQRFGDWWREQDTAAKNTWLRSMNVRLTFDVRGGLTRTIDFGELQEYEQHLRLGSVVGRLHAGMS

SEQ ID NO: 9925 - protein, 500 aa, synthetic construct
MRALVVIRLSRVTDATTSPKRQLESCQQLCAQRGWDVVGVAEDLDVSGAVDPFDRKRRPNLARWLAFEEQPFDVIVAYRVDRLTRSTRHLQRLVHWAEDHKKLIVSATEAHFDTTTPFAAVVIALMGTVAQMELEAIKERIRSATHFNIRAGKYRGSLPPWGYLPTRVDGEWRLVPDPVQRERILEVYHRVVDNHEPLHLVAHDLNRRGVLSPKDYFAQLRGREPQGRKWSATALKRSMISVAMLGYATLNGKTVRDDDGAPLVRAEPILTREQQEALRAELARTSRAKPAVSTPSLLLRVLFCAVCGEPAYKFVGGGRRHPRYRCRSTGFPEHCGNGTVVMAEWDAFCEEQVLNLLGDAERLEKVWVAGSDSAVELAEVNAELVDLTSLIGSPAYRAGSPQREALDARIAALAARQGELEGLEARPPGWEWRGTGQRFGDWWREQDTAAKNTWLRLMNVRLTFDVRGGLTRTIDFGDLQEYEQHLRLGSVAERLHAGMP

SEQ ID NO: 9926 - protein, 500 aa, synthetic construct
MRALVVIRLSRVTDATTSPERQLESCQQLCAQRGWDVVGVAEDLDVSGAVDPFDRKRRPSLARWLAFEEQPFDVIVAYRVDRLTRSTRHLQQLAHWAEDHEKLVVSATEAHFDMTTPFAAVVIALMGTVAQMELEAIRERNRSAAHFNIRAGKYRGSLPPWGYLPTRVDGEWRLVPDPVQRERILEVYHRVVDNHEPLHLVAHDLNRRGILSPKDYFAQLQGREPQGRKWSATALKRSMTSEAMLGYATLNGKTVRDDDGAPLVRAEPILTRGQLEALRAELVKTSRAKPAVSTPSLLLRVLFCAVCGEPAYKFAGGGRKHPRYRCRSMGFPKHCGNGTVAMAEWDAFCEEQVLNLFGDAERLEKVWVAGSDSAVELAEVNAELVDLTSLIGSPAYRAGSPQREALDARIAALAARQEGLEGLEARPSGWEWRGTGQRFGDWWREQDTAAKNTWLRSMNVRLTFDVRGGLTRTIDFGDLQEYEQHLRLGSVVERLHTGMS

SEQ ID NO: 9927 - protein, 500 aa, synthetic construct
MRALVVIRLSRVTDATTSPERQLESCQQLCAQRGWDVVGVAEDLDVSGAVDPFDRKRRPSLARWLAFEEQPFDVIVAYRVDRLTRSTRHLQQLVRWAEDHKKLVVSATEAHFDTTTPFAAVVIALMGTVAQMELEAIKERIRSAAHFNIRAGKYRGSLPPWGYLPARVDGEWRLVPDPVQRERILEVYHRVVGNHEPLHLVAHDLNRRGVLSPKDYFAQLRGREPQGRKWSATALKRSMTSEAMLGYATLNGKTVRDDDGAPLVRAEPILTREQQEALRAELAKTSRAKPAVSTPSLLLRVLFCAVCGEPAYKFVGGGRKRPRYRCRSMVFPKHCGNGTVVMAEWDAFCEEQVLDLLGDTERLEKVWVAGSDSAVELAEVNAELVDLTSLIGSPAYRAGSPQREALDARIAALAARQEELEGLEARPSGWEWRETGQRFGDWWREQDTAAKNTWLRSMNVRLTFDVRGGLTRTIDFGDLQEYEQHLRLGGVAERLHTGTS

SEQ ID NO: 9928 - protein, 500 aa, synthetic construct
MRALVVIRLSRVTDATTSPERQLESCQQLCAQRGWDVVGVAEDLDVSGAVDPFDRKRRPNLARWLAFEEQPFDVIVAYRVDRLTRSTRHLQQLVHWAEDHKKLVVSATEAHFDTTTPFAAVVIALMGTVAQMELEAIKERIRSAVRFNIRAGKYRGSLPPWGYLPTRVDGEWRLVPDPVQRERILEVYHRVVDNHEPLHLVAHDLNRRGVLSPKDYFAQLRGREPQGRKWSATALKRSMTSVAMLGYATLNGKIVRGDDGAPLVRAEPILTREQQEALRAELVKTSRAKPAVSAPSLLLRVLFCAVCGEPAYKFVGGGRKHPRYRCRSMGFPKHCGNGTVVMAEWDAFCEEQVLDLLGDAERLEKVWVAGSDSSVELAEVNAELVDLTSLIGSPAYRAGSPQREALDARIAALAARQEELEGLEARPSGWEWRGTGQRFGDWWREQDTAAKNAWLRSMNVRLTFDVRGGLTRTIDFGDLQEYEQHLRLGSVAERLRTGKS

SEQ ID NO: 9929 - protein, 500 aa, synthetic construct
MRALVVIRLSRVTDATTSPERQLGSCQQLCAQRGWDVAGVAEDLDVSGAVDPFDRKRRPNLARWLAFEEQPFDVIVAYRVDRLTRSTRHLQQLVHWAEDHKKLVVSATEAHFDTTTPFAAVVIALMGTVAQMELEAIKERNRSAAHFNIRAGKYRGSLPPWGYLPTRVDGEWRLAPDPVQRERILEVYHRVVDNHEPLHLVAHDLNRRGVLSPKDYFAQLQGREPQGRKWSATALKRSMISEAMLGYATLNGKTVRDDDGAPLVRAEPILTRGQLEALRAELVKTSRAKPAVSTPSLLLRVLFCAVCGEPAYKFAGGGRKHPRYRCRSMGFPKHCGNGTVVMAEWDAFCEEQVLDLFGDAERLEKVWVAGSDSAVELAEVNTELVDLTSLIGSPAYRAGSPQREALDARIAALAARQEELEGLGARPSGWEWRETGQRFGDWWREQDTAAKNTWLRSMNVRLTFDVRGGLTRTIDFGDLQEYEQQLRLGSVVERLHTGMS

SEQ ID NO: 9930 - protein, 500 aa, synthetic construct
MRVLVVIRLSRVTDATTSPERQLESCQQLCAQRGWDVVGVAEDLDVSGAVDPFDRKRRPNLARWLAFEEQPFDVIVAYRVDRLTRSTRHLQQLVHWAEDHKKLVVSATEAHFDTTTPFAAVVIALMGTVAQMELEAIKERNRSAAHFNIRAGKYRGSLPPWGYLPARVDGEWRLVPDPVQRERILEVYHRVVDNHEPLHLVAHDLNRRGVLSPKDYFAQLRGREPQGRKWSATALKRSMISEAMLGYATLNGKTVRDDDGAPLVRAEPILTREQLEALRAELVKTSRAKPAVSTPSLLLRVLFCAVCGEPAYKLAGGGRKHPRYRCRSMGFPKHCGNGTVAMAEWDAFCEEQVLSLLGDAERLEKVWAAGSDSAVELAEVNTELVDLTSLIGSPAYRAGSPQREALDARIAALAARQEELKGLEARPSGWEWRETGQRFGDWWREQDTAAKNTWLRSMNVRLTFDVRGGLTRTIDFGDLQEYEQHLRLGSVVERLHTGMS

SEQ ID NO: 9931 - protein, 500 aa, synthetic construct
MRALVVIRLSRVTDATTSPERQLESCQQLCAQRGWDVVGVAEDLDVSGAVDPFDRKRRPNLARWLAFEEQPFDVIVAYRVDRLTRSVRHLQRLVRWAEDHKKLVVSATEAHFDTTTPFAAVVIALMGTVAQMELEAIKERIRSAAHFNIRAGKYRGSLPPWGYLPARVDGEWRLVPDPVQRERILEVYHRVVDNHEPLHLVAHDLNRRGVLSPKDYFAQLRDREPQGRKWSATALKRSMISVAMLGYATLNGRTVRDNNGAPLVRAEPILTRGQLEALRAELAKTSRAKPAVSTPSLLLRVLFCAVCGEPAYKFTGGGRKHPRYRCRSMGSPEHCGNGTVVMAEWDAFCEEQVLDLLGDAERLEKVWVAGSDSAVELAEVNAELVDLTCLIGSPAYRAGSPQREALDARIAALAARQEELEGLEARPSGWEWRGTGQRFGDWWREQDTAAKNTWLRLMNVRLTFDVRGGLTRTIDFGDLQEYGQHLRLGSVVERLHTGMS

SEQ ID NO: 9932 - protein, 500 aa, synthetic construct
MRALVVIRLSRVTDATTSPERQLESCQQLCAQRGWDVVGVAEDLDVSGAVDPFDRKRRPNLARWLAFEEQSFDVIVAYRVDRLTRSTRHLQQLVHWAEDHKKLVVSATEAHFDTTTPFAAVVIALMGTVAQMELEAIKERNRSAAHFNIRAGKYRGSLPPWGYLPTRVDGEWRLMPDPVQRERILEVYHRVVDNHEPLYLVAHDLNRRGVLSPKDYFAQLRGREPQGREWSATALKRSMTSEAMLGYATLNGKTVRDDDGAPLVRAEPILTRGQLEALRAELAKTSRAKPAVSTPSLLLRVLFCAVCGEPAYKFAGGGRKHPRYRCRSMGFPNHCGNGTVVMAEWDAFCEEQVLNLLGDAERLEKVWVAGSDSAVELAEVNAELVDLTSLIGSPAYRAGSPQREALDARIAALAARQGELEGLGARPSGWEWRETGQRFGDWWREQDTAAKNTWLRSMNVRLTFDVRGGLTRTIDFGGLQEYEQHLRLGSVVGRLHTGMS

SEQ ID NO: 9933 - protein, 500 aa, synthetic construct
MRALVVIRLSRVTDATTSPERQLESCQQLCAQRGWDVVGVAEDLDVSGAVNPFDRKRRPNLARWLAFEEQPFDVIVAYRVDRLTRSTRHLQQLVHWAEDHKKLVVSATEAHFDTTTPFAAVVIALMGTVAQMELEAIKERNRSAAHFNIRAGKYRGSLPPWGYLPTRVDGEWRLVPDPVQRERILEVYHRVVDNHEPLYLVAHDLNRRGVLSPKDYFAQLQGREPQGRKWSATALKRSMTSEAMLGYATLNGKTVRDDDGAPLVRAEPILTREQLEALRAELGKTSRAKPAVSTPSLLLRVLFCAVCGEPAYRFAGGGRKHPRYRCRSMGFPKHCGNGTVVMAEWDAFCEEQVLDLLGDAEHLEKVWVAGSDSAVELAEVNAELVDLTSLIGSPAYRAGSPQREALDARIAALAARQEELEGLGARPSGWEWRETGQRFGDWWREQDTAAKNTWLRSMNVRLTFDVRGGLSRTIDFGELQEYEQHLRLGSVVERLHTGRS

SEQ ID NO: 9934 - protein, 500 aa, synthetic construct
MRALIVIRLSRVTDATTSPERQLESCQQLCAQRGWDVVGVAEDLDVSGAVDPFDRKRRPNLARWLAFEEQPFDVIVTYRVDRLTRSTRHLQQLVHWAEDHKKLVVSATEAHFDTTTPFAAVVIALMGTVAQMELEAIKERNRSAAHFNIRAGKYRGSLPPWGYLPTRVDGEWRLVPDPVQRERILEVYHRVVDNHEPLHLVAHDLNQRGVLSPKDYFAQLQGREPQGRKWSATALKRSMTSVAMLGYATLNGKTVRDDDGAPLVRAEPILTREQLEALRAELAKTSRAKPAVSTPSLLLRVLFCGVCGEPAYKFAGGGRKHPRYRCRSMGFPKHCGNGTVAMAEWDAFCEEQVLDLLGDAERLEKVWVAGSDSAVELAEVNAELVDLTSLIGSPAYRAGSPQREALDARIAALAARQEELEGLEARPSGWEWRGTGQRFGDWWHEQDTAAKNTWLRSMNVRLTFDVRGGLTRTVDFGDLQEYEQHLRLGSVVERLHTGVS

SEQ ID NO: 9935 - protein, 500 aa, synthetic construct
MRALVVIRLSRVTDATTSPERQRESCQQLCAQRGWDVVGVAEDLDVSGAVDPFDRKRRPNLARWLAFEEQPFDVIVAYRVDRLTRSTRHLQQLVHWAEDHKKLVVSATEAHFDTTTPFAAVVIALMGTVAQMELEAIKERIRSAVRFNIRAGKYRGSLPPWGYLPTRVDGEWRLVPDPVQRERILEVYHRVVDNHEPLHLVAHDLNRRGVLSPKDYFAQLQGREPQGRKWSATALRRSMTSEAMLGYATLNGKIVRDDDGAPLVRAEPILTREQQEALRAELAKTSRAKPAVSTPSLLLRVLFCAVCGEPAYKFVGGGRKHPRYRCRSMGFPKHCGNGTVVMAEWDAFCEEQVLNLVGDAERLEKVWVAGSDSAVELAEVNAELVELTSLIGSPAYRAGSPQREALDARIAALAARQEELEGLEARPSGWEWRGTGQRFGDWWRGQDTAAKNTWLRSMNVRLTFDVRGGLTRTIDFGDLQEYEQHLRLGSVAERLHTGMS

SEQ ID NO: 9936 - protein, 500 aa, synthetic construct
MRALVVIRLSRVTDATTSPERQLESCQQLCAQRGWDVVGVAEDLDVSGAVDPFDRKRRPNLARWLAFEEQPFDAIVAYRVDRLTRSVRHLQQLVHWAEGHKKLVVSATEAHFDTTTPFAAVVIALMGTVAQMELEAIKERIRSAVHFNIRAGKYRGSLPPWGYLPTRVDGEWRLVPDPVQRERILEVYHRVVDNHEPLHLVAHDLNRRGVLSPKDYFAQLQGREPQGRKWSATALKRSMTSVAMLGYATLNGKTVRDDDGAPLVRAEPILTREQLEALRTELVRTSRAKPAVSTPSLLLRVLFCAVCGEPAYKFVGGGRKHPRYRCRSMGFPEHCGNGTVVMAEWDAFCEEQVLDLLGDAERLEKVWVVGSDSAVELAEVNAELVDLTSLIGSPAYRAGSPQREALDARIAALAARQEKLESLEARPSGWEWRETGQRFRDWWREQDTAAKNTWLRSMNVRLTFDVRGGLTRTIDFGDLQEYERHLRLGGVAERLRTGMS

SEQ ID NO: 9937 - protein, 500 aa, synthetic construct
MRALVVIRLSRVTDATTSPERQLESCQQLCAQRGWDVVGVAEDLDVSGAVDPFDRKRRPNLARWLAFEEQPFDVIVAYRVDRLTRSTRHLQQLVHWAEDHKKLVVSATEAHFDTTTPFAAVVIALMGTVAQMELEAIKERNRSAAHFNIRAGKYRGSLPPWGYLPTRVEGEWRLVPDPVQRERILEVYHRVVDNHEPLHLVAHDLNRRGVLSPKDYFAQLRGREPQGRKWSATALKRSMISEAMLGYATLNGRTVRDDDGAPLVRAEPILTREQLEALRAELVKASRAKPAVSTPSLLLRVLFCAVCGEPAYKFAGGGRKHPRYRCRSMGFPKHCGNGTVAMAEWDAFCEEQVLGLLGDAERLEKVWVAGSDSAVELAEVNAELADLTSLIGSPAYRAGSPQREALDARIAALAARQEELEGLGARPSGWVWRETGQRFGDWWREQDTAAKNTWLRSMNVRLTFDVRGGLTRTIDFGDLQEYEQHLRLGSVVERLHTGMS

SEQ ID NO: 9938 - protein, 500 aa, synthetic construct
MRALVVIRLSRVTDATTSPERQLESCQQLCAQRGWDVVGVAEDLDVSGAVDPFDHKRRPNLARWLAFEEQPFDVIVAYRVDRLTRSTRHLQQLVHWAEDHKKLVVSATEAHFDTTTPFAAVVIALMGTVAQMELEAIKERIRSATHFNIRAGKYRGSLPPWGYLPTRVDGEWRLVPDPVQRERILEVYHRVVDNHEPLHLVAHDLNRRGVLSPKDYFAQLQGREPQGREWSATALKRSMISGAMLGYATLSGKTVRGDDGAPLVRAEPILTREQQEALRAELAKTSRAKPAVSTPSLLLRVLFCAVCGEPAYKFVGGGRKHPRYRCRSMGFPEHCGNGTVVMAEWDAFCEEQVLDLLGDAERLEKVWVVGSDSTVELAEVSAELVDLTSLIGSPAYRAGSPQREALDARIAALAARQEELERLEARPSGWGWRGTGQRFGDWWREQDTAAKNTWLRSMNVRLTFDVRGGLTRTIDFGDLQEYEQHLRLGGVVGRLRTRMS

SEQ ID NO: 9939 - protein, 500 aa, synthetic construct
MRALVVIRLSRVTDATTSPERQLESCQQLCAQRGWDVVGVAEDLDVSGAVDPFDRKRRPNLARWLAFEEQPFDVIVAYRVDRLTRSTRHLQRLVHWAEDHKKLVVSATEAHFDTTTPFAAVVIALMGTVAQMELEAIKERNRSAAHFNIRAGKYRGSLPPWGYLPARVDGEWRLVPDPVQRERILEVYHRVVDNHEPLHLVAHDLNRRGVLSPKDYFAQLQGREPRGRKWSATALKRSMISVAMLGYATLNGKTVRDDDGAPLVRAEPILTREQLEALRAELVKTSRAKPAVSTPSLLLRVLFCAVCGEPAYKFAGGGRKHPRYRCRSMGFPKHCGNGTVAMAEWDAFCEEQVLNLLGDSERLEKVWVAGSDSAVELAEVNAELVDLTSLIGSPAYRAGSPQREALDARIAALAARQEELEGLEARPSGWEWRETGQRFGDWWREQDTAAKNTWLRSMNVRLTFDVRGGLTRTIDLGDLQKHEQYLRLGSVVERLRTGMS

SEQ ID NO: 9940 - protein, 500 aa, synthetic construct
MRALVVIRLSRVTDATTSPERQLESCQQLCTQRGWDVVGVAEDLDVSGAVDPFDRKRRPNLARWLAFEEQPFDVIVAYRIDRLTRSVRHLQQLVHWAEDHRKLVVSATEAHFDTTTPFAAVVIALMGTVAQMELEAIKERNRSAAHFNIRAGKYRGSLPPWGYLPTRVDGEWRLVPDPVQRERILEVYHRVVDNHEPLHLVAHDLNRRGVLSPKDYFAQLQGREPQGRKWSATALKRSMTSEAMLGYATLNGKVVRDDDGAPLVRAEPILTRGQLEALRAELVKTSRAKPAVSTPSLLLRVLFCAVCGEPAYKFAGGGRKHPRYRCRSMGFPKHCGNGTVAMAEWDAFCEEQVLDLLGDVERLEKVWVAGSDSAVELAEVNAELVDLTSLIGSPAYRAGSPQREALDARIAALAARQEELEGLEARPSGWEWRETGQRFGDWWREQDTAAKNTWLRSVNVRLTFDVRGGLTRTIDFGDLQEYEQHSRLGSVVERLHTGMS

SEQ ID NO: 9941 - protein, 500 aa, synthetic construct
MRALVVIRLSRVTGATTSPERQLESCQQLCAQRGWDVVGVAKDLDVSGAVDPFDRKRRPNLARWLAFEEQPFDAVVAYRIDRLTRSIRHLQQLVLWAEDHKKLVVSATEAHFDMTTPFAAVVIALMGTVAQMELEAIKERIRSAAHFNIRAGKYRGSLPPWGYRPARVDGVWRLVPDPVQRERILEVYHRVVNNHEPLHLVAHDLNRRGVLSPKDYFAQLRGREPQGRKWSATALKRSMTSVAMLGYATLNGKTVRDDDGAPLVRAEPILTREQLEALRAVLVKSSRAKPAVSTPSLLLRVLFCAVCGEPAYKFVGGGRKHPRYRCRSMGFPKHCGNGTVVMAEWDAFCEGQVLNLLGDAERLEKVWLAGSDSAVELAEVNAELVDLTSLIGSPAYRAGSPQREALDARIAALAARQEELEGLEARPSGWEWRKTGQRLGDWWREQDTAAKNTWLRSMNVRLTFDVRGGLTRTIDYGDLQEYEQHLRSGSVVERLHTGMS

SEQ ID NO: 9942 - protein, 500 aa, synthetic construct
MRALVVIRLSRVTDATTSPERQLESCQQLCAQRGWDVVGVAEDLDVSGAVNPFDRKRRPNLARWLAFEEQPFDVIVAYRVDRLTRSARHLQQLVHWAEDHKKLVVSATEAHFDTTTPFAAVVIALMGTVAQMELEAIKERNRSAAHFNIRAGKYRGSLPPWGYLPARVDGVWRLVPDPVQRERILEVYHRVVDNHEPLHLVAHDLNRRGVLSPKDYFAQLQGREPQGHKWSATALKRSMTSEAMLGYATLNGKTVRDDDGAPLVRAEPILTREQLEALRAELVKTSRAKPAVSTPSLLLRVLFCAVCGEPAYKFAGGGRKHPRYRCRSMGFPKHCGNGTVVMAEWDAFCEEQVLDLLGDAERLEKVWVAGSDSAVELAEVNAELVDLTSLIGSPVYRAGSPQREALDARIAALAARQEELEGLEARPSGWEWRETGQRFGDWWREQDTAAKNTWLRSMNVRLTFDVRGGLVRTIDFGDLQEYEPHLRLGSVAERLHSGMS

SEQ ID NO: 9943 - protein, 500 aa, synthetic construct
MRALVVIRLSRVTDATTSPERQLESCLQLCAQRGWDVVGVAEDLDVSGAVDPFDRKRRPNLARWLAFEEQPFDVIVAYRVDRLTRSTRHLQQLVRWAEDHKKLVVSATEAHFDTTTPFAAVVIALMGTVAQLELEAIKERIRSAAHFNIRAGKYRGSLPPWGYLPTRVDGEWRLVPDPVQRERILEVYHRVVDNHEPLHLVAHDLNRRGVLSPKDYFAQLRGREPQGRKWSATALKRSMTSVAMLGYATLNGKIVRDDDGAPLVRAEPILTREQQEALRAELAKTSRAKPAVSTPSLLLRVLFCAVCGEPAYKFVGGGRKHPRYRCRSMGSPKHCGNGTVVMTEWDAFCEEQVLNLLGDAERLERVWVAGSDSAVELAEVDAELVDLTSLIGSPAYRAGSPQREALDARITALAARQEELESLEARPSGWEWRGTGQGFGDWWREQDTAAKNTWLRSMNVRLTFDVRGGLTRTIDFGDLQEYEQHLRSGSVVERPHTGMS

SEQ ID NO: 9944 - protein, 500 aa, synthetic construct
MRALVVIRLSRVTDATTSPERQLGSCQQLCAQRGWDVVGVAEDLNVSGAVDPFDRKRRPNLARWLAFEEQPFDVIVAYRVDRLTRSIRHLQQLVHWAEDHKKLVVSATEAHFDTTTPFAAVVIALMGTVAQMELEAIKERNRSAAHFNIRAGKYRGSLPPWGYLPARVDGEWRLVPDPVQRERILEVYHRVVDNHEPLHLVAHDLNRRGVLSPKDYFAQLRGREPQGRKWSATALKRSMISEAMLGYATLNGKTVRDDDGAPLVRAEPILTREQLEALRAELVKTSRAKPAVSTPSLLLRVLFCAVCGEPAYKFAGGGRKHPRYRCRSMGFPKHCGNGTVAMAEWDAFCEEQVLDLLGDAERLEKVWVAGSDSAVELAEVNAELVDLTSLIGSPAYRTGSPQREALDTRIAALAARQEELEGLEARPSGWEWRETGQRFGDWWREQDTAAKNTWLRSMNVRLTFDVRGGLTRTIDFGDLQEYEQHLRLGSVVERLYTGMS

SEQ ID NO: 9945 - protein, 500 aa, synthetic construct
MRALVVIRLSRVTDATTSPERQLESCQQLCAQRGWDVVGVAEDLDVSGAVDPFDRKRRPNLARWLAFEEQPFDVIVAYRVDRLTRSTRHLQQLVHWAEDHKKLVVSATEAHFDTTTPFAAVVIALMGTVAQMELEAIKERNRSAAHFNIRAGKYRGSLPPWGYLPTRVDGEWRLVPDPVQRERILEVYHRVVDNHEPLHLVAHDLNRRGVLSPKDYFAQLRGREPQGRKWSATALKRSMISEAMLGYATLNGKTVRDDDGAPLVRAEPILTREQLEVLRAELVKTSRAKPAVSTPSLLLRVLFCAVCGEPAYKFAGGGRKHPRYRCRSMGFPKHCGNGTVVMAEWDAFCEEQVLDLLGDAERLEKVWVTGSDSAVELAEVNAELVDLTSLIGSPTYSTGSPQREALDARIAALAARQEELESLEARPSGWEWRETGQRFGDWWREQDTAAKNTWLRSMNVRLTFDVRGGLTRTIDFGDLQEYEQHLRLGSVVERLHTGMS

SEQ ID NO: 9946 - protein, 500 aa, synthetic construct
MRALVVIRLSRVTDATTSPERQLESCQQLCAQRGWDVVGVAEDLDVSGAVDPFDRKRRPNLARWLAFEEQPFDVIVAYRVDRLTRSVRHLQQLVHWAEDHKKLVVSATEAHFDTTTPFAAVVIALMGTVAQTELEAIKERNRSAAHFNIRAGKYRGSLPPWGYLPARVDGEWRLVPDPVQRERILEVYHRVVDNHEPLHLVAHDLNRRGVLSPKDYFAQLQGREPQGRKWSATALKRSMTSEAMLGYATLNGKIVRDDDGAPLVRAEPILTREQLEALRAELVKTSRAKPAVSTPSLLLRVLFCAVCGEPAYKFAGGGRKHPRYRCRSMGFPKHCGNGTVAMAEWDAFCEEQVLDLLGDAERLEKVWAAGSDSAVELAEVNAELVDLTSLIGSPAYRAGSPQREALDARITALAARQEELEGLEARPSGWEWRETGQRFGDWWREQDTAAKNTWLRSMNVRLTFDVRGGLTRTIDLGDLQEYEQHLRLGSVVERLHTGMS

SEQ ID NO: 9947 - protein, 500 aa, synthetic construct
MRALVVIRLSRVTDATTSPERQLESCQQLCAQRGWVVVGVAEDLDVSGAVDPFDRKRRPNLARWLAFEEQPFDVIVAYRVDRLTRSTRHLQQLVHWAEDHKKLVVSATEAHFDTTTPFAAVVIALMGTVAQMELEAIKERNRSAAHFNIRAGKYRGSLPPWGYLPTRVDGEWRLAPDPVQRERILEVYHRVVDNHEPLHLVAHDLNRRGVLSPKDYFAQLQGREPQGRKWSATALKRSMTSEAMLGYATLNGKTVRDGDGAPLVRAEPILTREQLEALRAELVRTSRAKPAVSTPSLLLRVLFCAVCGEPAYKFAGGGRKHPRYRCRSMGFPEHCGNGTVVMAEWDAFCEEQVLNLLGDAERLEKVWVAGSDSAVELAEVNAELVDLTSLIGSPAYRAGSPQREALDARIAVLAARQEELEGLEARPSGWEWRETGQRFGDWWREQDTAAKNTWLRSMNVRLTFDVRGGLTRTIDFGDLQEYEQHLRLGSVAERLHTGMS

SEQ ID NO: 9948 - protein, 500 aa, synthetic construct
MRALVVIRLSRVTDATTSPERQLESCQQLCAQRGWDVVGVAEDLDVSGAVDPFDRKRRPNLARWLAFEEQPFDVIVAYRVDRLTRSTRHLQQLVRWAEDHKKLIVSATEPHFDTTTPFAAVIIALMGTVAQMELEAIKERIRSAAHFNIRTGKYRGSLPPWGYLPTRVDGEWRLVPDPVQCERILEVYRRVVENHEPLHLVAHDLNRRGVLSPKDYFAQLRGREPRGRKWSATALKRSMTSVAMLGYATLNGKIVRDDDGAPLVRAEPILTRGQQEALRAELAKTSRAKPAVSSPSLLLRVLFCAVCGEPAYKFTGGGRKHPRYRCRSMGFPKHCGNGTVVMAEWDAFCEEQVLNLLGDAERLEKVWVAGSDSAVELAEVNAELVDLTSLIGSPAYRAGSPQREALDARIAALAARQEELEGLEARPSGWEWRETGQRFGDWWHEQDTAAKNTWLRSMNVRLTFDARGGLTRTIDFGDLQEYEQHLRLGSVAGRLHTGMS

SEQ ID NO: 9949 - protein, 500 aa, synthetic construct
MRALVVIRLSRVTDATTSPERQLASCQQLCAQRGWDVVGVAEDLDVSGAVDPFDRKRRPNLARWLAFEEQPFDVIVAYRVDRLTRSTRHLQQLVHWAEDHKKLVVSATEAHFDTTTPFAAVVIALMGTVAQMELEAIKERIRSAVHFNIRAGKYRGSLPPWGYLPTRVDGEWRLVPDPVQRERILEVYHRVVDNHEPLHLVAHDLNQRGVLSPKDYFAQLRGREPQGREWSATALRRSMTSVAMLGYATLNGKTVRDDDGAPLVRAEPILTREQQEALRAELAKTSRAKPAVSTPSLLLRVLFCAVCGEPAYKFVGGGRKHPRYRCRSMGFPKHCGNGTVVMAEWNAFCEKQVLDLLGDAERLEKVWVVGSDSSVELAEVNAELVDLTSLIGSSAYRAGSPQRETLDARIAALTTRQEELEGLEARPSGWGWRGTGQRFGDWWREQNTAAKNTWLRSMNVRLTFDVRGGLTRTIDFGDLREYEQHSRSDSVVERLHTGMS

SEQ ID NO: 9950 - protein, 500 aa, synthetic construct
MRALVVIRLSRVTDATTSPERQLESCQQLCAQRGWDVVGVAEDLDVSGAVDPFDRKRRPNLARWLAFEEQPFDVIVAYRVDRLTRSTRHLQQLVHWAEDHKKLVVSATEAHFDTTTPFAAVVIALMGTVAQMELEAIKERSRSAAHFNIRAGKYRGSLPPWGYLPTRVDGEWRLVPDPVQRERILEVYHRVVDNHEPLHLVAYDLNRRGVLSPKDYFAQLQGREPQGRKWSATALRRSMTSKAMLGYAILNGKTVRDDDGAPLVRAEPILTREQLEALRAELAKTSRAKPAVSTPSLLLRVLFCAVCGEPAYKFVGGGRKHPRYRCRSMGFPKHCGNGTVVMAEWDAFCEEQVLDLLGDAERLEKVWVAGSDSAVELAEVSAELVDLTSLIGSPAYRVCSPQREALDARIAALAARQEELESLEARPSGWEWRETGQRFGDWWREQDTATKNTWLRSMNIRLTFDVRGGLTRTIDFGELQEYERHLRLGSVAKRLRTGMS

SEQ ID NO: 9951 - protein, 500 aa, synthetic construct
MRALVVIRLSRVTEATTSPERQLESCQQLCAQRGWDVVGVAEDLDVSGAVNPFDRKRRPSLARWLAFEEQPFDVIVAYRVDRLTRSTRHLQQLVRWAEDHKKLVVSATEAHFDTTTPFAAVVIALMGTVAQMELEAIKERSRSAAHFNIRAGKYRGSLPPWGYLPTRVDGEWRLVPDPVQRERILEVYHRVVDNHEPLHLVAHDLNRRGVLSPKDYFAQLRGREPQGRKWSATALKRSMTSVAMLGYATLNGKTVRDDDGAPLVRAEPILTREQLEALRAELAKTSRAKPAVSTPSLLLRVLFCAVCGEPAYKFVGGGRKHPRYRCRSMGFPKHCGNGTVAMAEWDAFCEEQVLDLLGDAERLEKVWVAGSDSVVELAEVNAELVDLTSLIGSPAYRAGSPQREALDARIAALAARQEELEGLEARPSGWEWRGTGQRFGDWWREQDTAAKNTWLRSMNVRLTFDVRGGLTRTIDFGELQGYKQHLRLGSVVERLRTGMS

SEQ ID NO: 9952 - protein, 500 aa, synthetic construct
MRALVVIRLSRVTDATTSPERQLESCQQLCAQRGWDVVGVAEDLDVSGAVDPFDRKRRPNLARWLAFEEQPFDVIVAYRVDRLTRSTRHLQQLVHWAEDHKKLVVSATEAHFDTTTPFAAVVIALMGTVAQMELEAIKERNRSAAHFNIRAGKYRGSLPPWGYLPTRVDGEWRLVPDPVQRERILEVYHRVVDDHEPLHLVAHDLNRRGVLSPKDYFAQLQGREPQGRKWSATALKRSMISDAMLGYATLNGKTVRDDDGVPLVRAEPILTREQLEALRAELVKTSRAKPAVSTPSLLLRVLFCAVCGEPAYKFAGGGRKHPRYRCRSMGFPKHCGNGSVVMAEWDAFCEEQVLDLLGDAERLEKVWVTGSDSAVELAEVNAELVDLTSLIGSPAYRAGSPQREALDARIAALAARQEELEGLEARPSGWEWRGTGQRFGDWWREQDTAAKNTWLRSMNVRLTFDVRGGLTRTIDYGDLQEYEQHLRLGSVVERLHTGIS

SEQ ID NO: 9953 - protein, 500 aa, synthetic construct
MRALVVIRLSRVTDATTSPERQLESCQQLCAQRGWDVVGVAEDLDVSGAVDPFDRKRRPNLARWLAFEEQPFDVIVAYRVDRLTRSTRHLQQLVHWAEDHKKLVVSATEAHFDTTTPFAAVVIALMGTVAQMELEAIKERNRSAAHFNIRAGKYRGSLPPWGYLPARVDGEWRLVPDPVQRERILEVYHRVVDNHEPLHLVAHDLNRRGVLSPKDYFAQLQGREPQGRKWSATALKRSMISEAMLGYATLNGKTVRDDDGAPLVRAEPILTREQLEAIRAELVKTSRAKPAVSTPSLLLRVLFCAVCGEPAYKFAGGGRKHPRYRCRSMGFPKHCGNGTVAMAEWDAFCEEQVLDLFGDAERLEKVWVAGSDSAVELAEVNAELVDLTSLVSSPAYRAGSPQREALDARIAALAARQVELESLEARPSGWEWRETGQRFGDWWREQDTAAKNTWLRSMNVRLTFDVRGGLTRTIDFGDLQEYEQHLRLGSVVERLYTGMS

SEQ ID NO: 9954 - protein, 500 aa, synthetic construct
MRALVVIRLSRVTDATTSPERQLESCQQLCAQRGWDVVGVAEDLDVSGAVDPFDRKRRPNLARWLAFEEQPFDAIVAYRVDRLARSIRHLQQLVHWAEDHKKLVVSATEAHFDTTTPFAAVVIALMGTVAQMELEAIKERNRSAAHFNIRAGKYRGSLPPWGYLPTRVDGEWRLVPDPVQRERILEVYHRVVDNHEPLYLVAHDLNRRGVLSPKDYFAQLQGREPQGRKWSATALKRSMISEAMLGYATLNGKTVRDADGAPLVRAEPILTREQLEALRAELVKTSRAKPAVSTPSLLLRVLFCAVCGEPAYKFAGGGRKHPRYRCRSMGFPEHCGNGTVAMVEWDAYCEEQVLDLLGDTERLEKVWVAGSDSAVELTEVNAELVDLTSLIGSPAYRAGSPQREALDARIAALAARQEELEGLGARPSGWEWRETGQRFGDWWREQDTAAKNTWLRSMNVRLTFDVRGGLTRTTDFGDLQEYEQHLRLGGMVGRLHTGMS

SEQ ID NO: 9955 - protein, 500 aa, synthetic construct
MRALVVIRLSRVTDATTSPERQLESCRQLCAQRGWDVVGVAEDLDVSGAVDPFDRKRRPNLARWLAFEERPFDVIVAYRVDRLTRSVRHLQRLVRWAEDHKKLVVSATEAHFDMTTPFAAVVIALMGTVAQMELEAIKERIRSAAHFNIRAGKYRGSLPPWGYLPTRVDGEWRLVPDPVQRERILEVYHRVVDNHEPLHLVAYDLNRRGVLSPKDYFAQLQGREPQGRKWSATALKRSMTSVAMLGHATLNGKTVRDDNGAPLVRAEPILTREQQEALRTELVRTSRAKPAVSTPSLLLRVLFCAVCGEPAYKFVGGGRKHPRYRCRSMGFPKHCGNGTVAMAEWDAFCEELVLNLLGDAERLEKVWVAGSDSAVELAEVNAELVDLTSLIGSPAYRAGSPQREALDARIAALAARQKELEGLEARPSGWEWRGTGQRFGDWWREQDTAAKNTWLRSMNVRLTFDVRGGLTRTIDFGDLQEYGQHLRLGSVVERLHTGMS

SEQ ID NO: 9956 - protein, 500 aa, synthetic construct
MRALVVIRLSRVTDATTSPERQLESCQRLCAQRGWDIVGVAEDLDVSGAVDPFDRKRRPNLARWLAFEEQPFDAIVVYRVDRLARSTRHLQQLVHWAEDHKKLVVSATEAHFDTTTPFAAVVIALMGTVAQMELEAIKERNRSAAHFNIRAGKYRGSLPPWGYLPARVDGEWRLVPDPVQRERILEVYHRVVDNHEPLHLVAHDLNRRGVLSPKDYFAQLQGREPQGRKWSATALKRSMTSEAMLGYATLNGRTVRNDDGAPLVRAEPILTREQLEALRAELVKTSRAKLAVSTPSLLLRVLFCAVCGEPAYKFAGGGRKHPRYRCRSMGFPKHCGNGTVAMAEWDAFCEEQVLDLLGDAERLEKVWVAGSDSAVELAEVNAELVDLTSLIGSPAYRADSPQRVALDARIAALAARQEELEGLEARPPGWEWRETGQRFGDWWREQDTAAKNTWLRSMNVRLTFDVRGGLTRTIDFGDLQEYEQHLRLGSVVERLHTGMS

SEQ ID NO: 9957 - protein, 500 aa, synthetic construct
MRALVVIRLSRVTDATTSPKRQLESCQQLCARRGWVVVGVAEDLNVSGAVDPFDRKRRPNLARWLAFEEQPFDVIVAYRVDRLTRSIRHLQQLVHWAEDHKKLVVSATEAHFDTTTPFAAVVIALMGTVAQMELEAIKERNRSTAHFNIRAGKYRGSLPPWGYLPARVDGEWRLVPDPVQRERILEVYHRVVDNHEPLHLVAHDLNRRGVLSPKDYFAQLRGREPQGRKWSATALKRSMISEAMLGYATLNGKTVRDDDGAPLVRAEPILTREQLEALRAELVKTSRAKPAVSTPSLLLRVLFCAVCGEPAYKFAGGGRKHPRYRCRSMGFPKHCGNGTVAMAEWDAFCEEQVLGLLGDAERLERVWVAGSDSAVELAEVSAELVDLTSLIGSPAYRAGSPQREALDVRIAALAARQEELEGLEARPSGWEWRETGQRFGDWWREQDTAAKNTWLRSMNVRLTFDFRGGLTRTIDFGDLQEYEKHLRLGSVVERLHTGMS

SEQ ID NO: 9958 - protein, 500 aa, synthetic construct
MRALVVIRLSRVTDATTSPERQLESCQQLCAQRGWDVVGVAEDLDVSGAVDPFDRKRRPNLARWLAFEERPFDVIVAYRVDRLTRSVRHLQQLVRWAEDHKKLVVSATEAHFDTTTPFAAVVIALMGTVAQMELEAIKERIRSAVRFNIRAGKYRGSLPPWGYLPTRVDGEWRLVPDPVQRERILEVYHRVVDNHEPLHLVAHDLNRRGVLSPKDYFAQLRGREPQGRKWSATALKRSMTSGAMLGYATLNGKTVRDDDGAPLVRAEPILTREQQEALRAELAKTSRAKPAVSTPSLLLRVLFCAVCGEPAYKFVGGGRKHPRYRCRSMGFPKHCGNGTVVMAEWDEFCEEQVLDLLGDAERLEKVWVAGSDSAVELAEVNAELVDLTSLIGSPAYRAGSPQREALDARIAALAARQEELEGLEARPSGWEWRETGQRFGDWWREQDTAAKNTWLRSMNIRLTFDVRGGLTRTIDFGELQEYEQHFRSGSVVERLHTGMS

SEQ ID NO: 9959 - protein, 500 aa, synthetic construct
MRALVVIRLSRVTDATTSPERQLESCQQLCAQRGWDVVGVAEDLDVSGAVDPFDRKRRPNLARWLAFEEQPFDVIVAYRVDRLTRSTRHLQQLVHWAEDHKKLVVSATEAHFDTTTPFAAVVIALMGTVAQMELEAIKERNRSAAHFNIRAGKYRGSLPPWGYLPTRVDGEWRLVPDPVQRERILEVYHRVVDNHEPLHLVAHDLNRRGVLSPKDYFAQLQGREPQGRKWSATALKRSMISVAMLGYATLNGKTVRDDDGAPLVRAEPILTRGQLEALRAELVKTSRAKPAVSTPSLLLRVLFCAVCGEPAYKFAGGGRKHPRYRCRSMGFPKHCGNGTVAMAEWDAFCEEQVLDLLGDAERLEKVWVAGSDSAVELAEVNAELVDLTSLIGSPAYRAGSPQREALDARIAALAARQEELEGLEARPSGWEWRGTGQCFGDWWREQDTAAKNTWLRSMNVRLTFDVRGGLTRTIDFGDLQEYEQHLRLGSVVERLHTGMS

SEQ ID NO: 9960 - protein, 500 aa, synthetic construct
MRALVVIRLSRVTDATTSPERQLESCQQLCAQRGWDVVGVAEDLDVSGAVDPFDRKRRPNLARWLAFEEQPFDAIVAYRVDRLTRSVRHLQQLVHWAEDHKKLVVSATEAHFDTTTPFAAVVIALMGTMAQMELEAIKERNRSAAHFNIRAGKYRGSLPPWGYLPTRVDGEWRLAPDPVQRERILEVYHRVVDNHEPLHSVAHDLNRRGVLSPKDYFAQLQGREPRGRKWSATALKRSMISEAMLGYATLNGKTVRDDDGAPLVRAEPILTREQLEALRAELVKTSRAKPAVSTPSLLLRVLFCAVCGEPAYRFAGGGRKYPRYRCRSMGFPKHCGNGTVAMAEWDAFCEEQVLDLLGDAERLEKVWIAGSDSAIELAEVNAELVDLTCLIGSPAYRAGSPQRGALDARIAALAARQEELEGLDARPPGWEWRETGQRFGDWWREQDTAAKNTWLRSMNVRLTFDVRGGLTRTIDFGDLQEHEQHLRLGSVVERLHTGMS

SEQ ID NO: 9961 - protein, 500 aa, synthetic construct
MRALVVIRLSRVTDATTSPERQLESCQQLCAQRGWDVVGVAEDLDVSGAVDPFDRKRRPNLARWLAFEEQPFDVIVAYRVDRLTRSVRHLQRLVRWAEDHKKLVVSATEAHFDTTTPFAAVVIALMGTVAQMELEAIKERIRSAVHFNIRAGKYRGSLPPWGYLPTRVDGEWRLVPDPVQRERILEVYHRVVNNHEPLHLVAHDLNRRGVLSPKDYFAQLQGREPRGRKWSATALRRSMTSVAMLGYATLNGKTVRGDDGAPLVRAEPILTREQQEALRAELAKTSRAKPAVSTPSLLLRVLFCAVCGEPAYKFVGGGRKHSRYRCRSMVFPKHCGNGTVVMAEWDTFCEEQVLNLLGDAERLEKVWVAGSDSAVELAEVNAELVDLTSLIGPPAYRAGSPQREALDARIAALAARQEELESLEARPSGWEWRGTGQRLGDWWREQDTAAKNTWLRSMNVRLTFDVRGGLTRTIDFGDLREYEQHLRLGSVVERLHTGTS

SEQ ID NO: 9962 - protein, 500 aa, synthetic construct
MRALVVIRLSRVTEATTSPERQLESCQQLCAQRSWDVVGVAEDLDVSGAVDPFDRKRRPNLARWLAFEEQPFDVIVAYRVDRLTRSVRHLQQLVHWAEDHKKLVVSATEAHFDTTTPFAAVVIALMGTVAQMELEAIKERIRSAVHFNIRAGKYRGSLPPWGYLPTRVDGEWRLVPDPVQRERILEVYHRVVDNHEPLHLVAHDLNRRGVLSPKDYFAQLRGREPRGRKWSATALKRSMTSVAMLGYATLNGKTVRDDDGAPLVRAEPILTRGQLEALRAELAKTSRAKPAVSTPSLLLRVLFCAVCGEPAYKFVGGGRKHPRYRCRSMGFPEHCGNGTVVMAEWDAFCEEQVLDLLGDAERLEKVWVAGSDSAVELAEVNAELVDLTSLIGSPAYRAGSPQREALDARIAALAARQEELEGLEARPSGWEWRETGQRFRDWWREQDTAAKNTWLRSMNVRLTFDVRGGLTRTIDLGDLQEYEQHLRLGSVVERLHTEMS

SEQ ID NO: 9963 - protein, 500 aa, synthetic construct
MRALVVIRLSRVTDATTSPERQLESCQQLCAQRGWDVVGVAEDLDVSGAVDPFDRKRRPNLARWLAFEEQPFDAVVAYRVDRLTRSIRHLQQLVHWAEDHKKLVVSATEAHFDTTTPFAAVVIALMGTVAQMELEAIKERNRSAAHFNIRAGKYRGSLPPWGYLPARVDGEWRLVPDPVQRERILEVYHRVVDNHEPLHWVAHDLNRRGVLSPKDYFAQLQGREPQDRKWSATALKRSMISEAMLGYATLSGETVRDDSGAPLVRAEPILTREQLEALRAELVKTSRAKPAVSTPSLLLRVLFCAVCGEPAYKFAGGGRKHPRYRCRSMGFPRHCGNGTVAMAEWDAFCEGQVLDLLGDAERLEKVWVAGSDSAVELAEVNAELVDLTGLIGSPAYRAGSPQREALDARIAALAARQEELEGLGARPSGWEWRETGQRFGDWWREQDTAAKNAWLRSMNVRLTFDVRGGLTRTIDFGDLQEYEQHLRLGSVVERLHTGMS

SEQ ID NO: 9964 - protein, 500 aa, synthetic construct
MRALVVIRLSRVTDATTSPERQLESCQQLCAQRGWDVVGVAEDLDVSGAVDPFDRKRRPNLARWLAFEEQPFDVIVAYRVDRLTRSTRHLQQLVHWAEDHKKLVVSATEAHFDTTTPFAAVVIALMGTVAQMELEAIKERNRSAAHFNIRAGKYRGSLPPWGYLPTRVDGEWRLVPDPVQRERILEVYHRVVDNHEPLHLVAHDLNRRGVLSPKDYFAQLRGREPQGRKWSATALKRSMTSEAMLGYATLNGKTVRDDDGAPLVRAEPILTREQLEALRAELVKTSRAKPAVSTPSLLLRVLFCAVCGEPAYKFAGGGRKHPRYRCRSMGFPKHCGNGTVAMAEWDAFCEEQVLGLLGDAERLEKVWVAGSDSAVELAEVNAELVDLTSLIGSPAYRAGSPQREALDARIAALAARQEELEGLEARPSGWELRETGQCFGDWWREQDTAAKNTWLRSVNVRLTFDVRGGLTRTIDFGDLREYEQHLRLGSVVERSHTGMS

SEQ ID NO: 9965 - protein, 500 aa, synthetic construct
MRALVVIRLSRVTDATTSPERQLESCQQLCAQRGWDVVGVAEDLDVSGAVDPFDRKRRPNLARWLAFEEQPFDAIVAYRVDRLTRSVRHLQQLVHWAEDHKKLVVSATEAHFDTTTPFAAVVIALMGTVAQMELEAIKERNRSAAHFNIRAGKYRGSLPPWGYLPARVDGEWRLVPDPVQRERILEVYHRVVDNHEPLHLVAHDLNRRGVLSPKDYFAQLQGREPRGRKWSATALKRSMISEAMLGYATLNGKIVRDDDGAPLVRAEPILTREQLEAIRAELVKTSRAKPAVSTPSLLLRVLFCAVCGEPAYKFAGGGRKHPRYRCRSMGFPKHCGNGTVAMAEWDAFCEEQVLDLLGDAERLENVWVAGSDSAVELAEVNAELVDLTSLISSPAYRAGSPQREALDARIAALAARQEELEGLEARPSGWEWRETGQRFGDWWREQDTAAKNTWLRSMNVRLTFDVRGGLTRTIDFGDLQEYEQHLRLGSVVGRLHTGMS

SEQ ID NO: 9966 - protein, 500 aa, synthetic construct
MRALVVIRLSRVTDATTSPERQLESCQQLCAQRGWDVVGVAEDLDVSGAVDPFDRKRRPNLARWLAFEEQPFDVIVAYRVDRLTRSTRHLQQLVHWAEDHKKLVVSATEAHFDTTTPFAAVVIALMGTVAQMELEAIKERNRSAAHFNIRAGKYRGSLPPWGYLPTRVDGEWRLAPDPVQRERILEVYHRVVDNHEPLHLVAHDLNRRGVLSPKDYFAQLQGREPRGRKWSATALKRSMISEAMLGYATLNGKTVRDDDGAPLVRAEPILTRGQLEALRAELAKTSRAKPAVSTPSLLLRVLFCAVCGEPAYKFAGGGRKHPRYRCRSMGFPKHCGNGTVAMAEWDAFCEEQVLGLLGDAERLEKVWVASSNSAVELVEVNAELVDLTSLIGSPAYRAGSPQREALDARIAALAARQEELEGLGARPSGWEWRETGQRFGDWWREQDTAAKNTWLRSMNIRLTFDVRGGLTRTIDFGDLQEYEQHLRLGSVVERLHTGTS

SEQ ID NO: 9967 - protein, 500 aa, synthetic construct
MRALVVIRLSRVTDATTSPERQLESCQQLCAQRGWVVVGVAEDLDVSGAVDPFDRKRRPNLARWLAFEEQPFDVIVAYRVDRLTRSVRHLQQLVHWAEDHKKLVVSATEAHFDTTTPFAAVVIALMGTVAQMELEAIKERIRSAAHFNIRAGKYRGSLPPWGYLPTRVDGEWRLVPDPVQRERILEVYHRVVDNHEPLHLVAHDLNRRGVLSPKDYFAQLRGREPQGRKWSATALKRSMISRAMLGYATLNGKVVRGDDGAPLVRAEPILTRGQQEALRAELAKTSRAKPAVSTPSLLLRVLFCAVCGEPAYKFVGGGRKHPRYRCRSMGFPKHCGNGTVVMTEWDAFCEEQVLDLLGGAERLEKVWVAGSDSAVELAEVNAELVDLTSLIGSPAYRAGSPQREALDARIAALAARQEELEGLEARPSGWEWRETGQRFRDWWREQDTAAKNTWLRSMNVRLTFDVRGGLTRTIDFGELQEYEQHLRLGSVAERSHTGMS

SEQ ID NO: 9968 - protein, 500 aa, synthetic construct
MRALVVIRLSRVTEATTSPERQLESCQQLCAQRDWDVVGVAEDLDVSGAVDPFDRKRRPNLARWLAFEEQPFDVIVAYRVDRLTRSTRHLQQLVRWAEDHKKLVVSATEAHFDTTTPFAAVVIALMGTVAQMELEAIKERIRSAAHFNIRAGKYRGSLPPWGYLPTRVDGEWRLVPDPVQRERILEVYHRVVDNHEPLHLVAHDLNRRGVLSPKDYFAQLQGREPQGRKWSATALKRSMISGAMLGYATLNGKIVRDDDGAPLVRAEPILTREQQEALRAELVKTSRAKPAVSTPSLLLRVLFCAVCGEPAYKFVGGGRKHPRYRCRSMRFPKHCGNGTVMMAEWDAFCEEQVLNLLGDAERLEKVWVAGSDSAVELAEVNAELVDLTSLIGSPAYRAGSPQREALDARIAALAARQEELEGLEARPSGWEWRETGQRFGDWWREQDTTAKNTWLRSMNVRLTFDVRGGPTRTVDFGDLREYVQHLRLGSVVERLHTGMS

SEQ ID NO: 9969 - protein, 500 aa, synthetic construct
MRALVVIRLSRVTDATTSPERQLESCQQLCAQRGWDVVGVAEDLDVSGAVDPFDRKRRPNLARWLAFEEQPFDVIVAYRVDRLTRSTRHLQQLVHWAEDHEKLVVSATEAHFDTTTPFAAVVIALMGTVAQMELEAIKERNRSAAHFNIRAGKYRGSLPPWGYLPTRVDGEWRLVPDPVQRERILEVYHRVVDDHEPLHWVAHDLNRRGVLSPKDYFAQLRGREPQGRKWSATALKRSMTSVAMLGYATLNGKTVRDDDGAPLVRAEPILTREQLEALRAELVKTSRAKPAVSTPSLLLRVLFCAVCGEPAYKFAGGGRKHPRYRCRSMGFPKHCGNGTVAMAEWDAFCEEQVLGLLGDAERLEKVWVAGSDSAVELAEVNAELVDLTSLIGSPAYRAGSPQREALDARIAALAARQEELEGLEARPSGWEWRETGQRFGDWWREQDTAAKNTWLRSMNVRLTFDVRGGLTRTIDFGDLQVYEQHLRLGSVVERLHTGMS

SEQ ID NO: 9970 - protein, 500 aa, synthetic construct
MRALVVIRLSRVTDATTSPERQLESCQQLCAQRGWGVVGVAEDLDVSGAVDPFDRKRRPNLARWLAFEEQPFDAIVAYRVDRLTRSVRHLQRLVHWAEDHEKLVVSATEAHFDTTTPFAAVVIALMGTVAQMELEAIKERNRSAAHFNIRAGKYRGSLPPWGYLPTRVDGEWRLVPDPVQRERILEVYRRVVDNHEPLHLVAHDLNRRGVLSPKDYFAQLRGREPQGRKWSATALKRSMISEAMLGYATLNGKTVRDDDGAPLVRAEPILTRGQLEALRAELVKTSRAKPAVSTPSLLLRVLFCAVCGEPAYKFAGGGRKHPRYRCRSMGFPKHCGNGTVAMAEWDAFCEEQVLDLLGDAERLEKVWVAGSDSAVELAEVNAELVDLTSLIGSPAYRAGSPQRGALDARIAALAARQEELEGLEARPSGWEWRETGQRFGDWWREQDTAAKNTWLRSMNVRLTFDVRGGLTRTIDFGGLQEYEQHLRLGSVAERLHTGVL

SEQ ID NO: 9971 - protein, 500 aa, synthetic construct
MRALVVIRLSRVTDATTSPERQLESCQRLCAQRGWDIVGVAEDLDVSGAVDPFDRKRRPNLARWLAFEEQPFDAIVAYRVDRLARSIRHLQQLVHWAEDHKKLVVSATEAHFDTTTPFAAVVIALMGTVAQMELEAIKERNRSAAHFNIRAGKYRGSLPPWGYLPTRVDGEWRLVPDPMQRERILEVYHRVVDNHEPLHLVAHDLNRRGVLSPKDYFAQLQGREPQGRKWSATALKRSMISVAMLGYATLNGKTVRDDNGAPLVRAEPILTREQLEALRAELAKTSRAKPAVSTPSLLLRVLFCAVCGEPAYKFAGGGRKHPRYRCRSMGFPKHCGNGTVVMAEWDAFCEEQVLNLLGDAEHLEKVWVAGSDSAVELSEVSAELVDLTSLIGSPAYRAGSPQREALDARIAALAARQEELEGLEARPSGWEWRETGQRFGDWWREQNTAAKNTWLRSMNVRLTFDVRGELTRTIDFGDLQEYEQHLRLGSVVERLHTGMS

SEQ ID NO: 9972 - protein, 500 aa, synthetic construct
MRALVVIRLSRVTDATTSPERQLESCQQLCAQRGWDVVGVAEDLDVSGAVDPFDRKRRPNLARWLAFEEQPFDAIVAYRVDRLTRSTRHLQQLVRWAEDHKKLVVSATEAHFDTTTPFAAVVIALMGTVAQMELEAIKERIRSATRFNIRAGKYRGSLPPWGYLPTRVDGEWRLVPDPVQRERILEVYHRVVDNHEPLHLVAHDLNRRGVLSPKDYFAQLRGREPRGRKWSATALKRSMISVAMLGYATLNGKIVRDDDGAPLVRAEPILTREQQEALRAELAKTSRAKPAVSTPSLLLRVLFCAVCGEPAYKFVGGGRKHPRYRCRSMGFPEHCGNGTVVMVELDAFCEEQVLSLLGDAERLEKVWVAGSDSSVELAEVNVELVDLTGLIGSPAYRAGSPQREALDARIAALAARQEELEGLEARPSGWEWRETGQRFGDWWREQDTASKNTWLRSMNVRLTFDVRGGLTRTIDFGDLQEYGQHLRSGSVVERLHTGMS

SEQ ID NO: 9973 - protein, 500 aa, synthetic construct
MRALVVIRLSRVTDATTSPERQLESCQQLCAQRGWDVVGVAEDLDVSGAVDPFDRKRRPNLARWLAFEEQPFDAIVAYRVDRLTRSVRHLQRLVRWAEDHKKLVVSATEAHFDMTTPFAAVVIALMGTVAQMELEAIKERIRSAAHFNIRAGKYRGSLPPWGYLPTRVNGEWRLVPDPVQRERILEVYHRVVDNHEPLHLVAYDLNRRGVLSPKDYFAQLRGREPQGRKWSATALKRSMTSVAMLGYATLNGRTVRDDDGAPLVRAEPILTRGQQEALRAELAKTSRAKPAVSTPSLLLRVLFCAVCGEPAYKFVGGGRKHPRYRCRSMGFSEHCGNGTVVMAEWDTFCEEQVLNLLGDAERLEKVWVAGSDSAVELAEVNAELVDLTGLVGSPAYRAGSPQREALDARIAALAARQGELEGLEARPSGWEWRGTGQRLGDWWREQDTAAKNTWLRSMNVRLTFDVRGGLTRTIDFGDLQEYEQHLRLGSVVERLHTGTS

SEQ ID NO: 9974 - protein, 500 aa, synthetic construct
MRALIVIRLSRVTDATTSPERQLESCQQLCAQRGWDVVGVAEDLDVSGAVDPFDRKRRPNLARWLVFEEQPFDAIVAYRVDRLTRSVRHLQQLVRWAEDHKKLVVSATEAHFDTTTPFAAVVIALMGTVAQMELEAIKERIRSAVHFNIRAGKYRGSLPPWGYLPTRVDGEWRLVPDPVQRERILEVYHRVVDNHEPLHLVAHDLNRRGVLSPKDYFAQLQGREPQGRKWSATALKRSMTSVAMLGYATLNGKIVRDDDGAPLVRAEPILTREQLEALHAELVKTSRAKPAVSTPSLLLRVLFCAVCGEPAYKFVGGGRKHPRYRCRSMGFPKHCGNGTVAMAEWDAFCEEQVLGLLGDAERLEKVWVAGSDSAVELAEVNAELTDLTSLIGSPAYRAGSPQREALDARIAALAARQEELEGLEARPSGWEWRETGQHFGDWWREQDTAAKNTWLRSMNVRLTFDVRGGLTRTIDFGELQEYEQHLRSGSVVERLRTGVS

SEQ ID NO: 9975 - protein, 500 aa, synthetic construct
MRALVVIRLSRVTDATTSPERQLESCQQLCTQRGWDVVGVAEDLDVSGAVDPFDRKRRPNLARWLAFEEQPFDAIVAYRVDRLTRSTRHLQQLVHWAEDHKKLVVSATEAHFDTTTPFAAVVIALMGTVAQMELEAIKERNRSAAHFNIRAGKYRGSLPPWGYLPARVDGEWRLVPDPVQRERILEVYHRVVDNHEPLHLVAHDLNRRGVLSPKDYFAQLQGREPQGRKWSATALKRSMISEAMLGYATLNGKTVRDEDGAPLVRAEPILTREQLEALRAELVKTSRAKPAVSTPSLLLRVLFCAVCGEPAYKFAGGGRKHPRYRCRSMGFPKHCGNGTVAMAEWDAFCEEQVLDLLGDAERLEKVWVAGSDSAVELAEVNAELVDLASLIGSPAYRAGSPQREALDARIAALAARQEELEGLGARPSGWEWRKTGQRFGDWWREQDTAAKNTWLRSMNVRLTFDVRGGLTRTIDFGDLQEYKQHLRLGCVVERLRTEMS

SEQ ID NO: 9976 - protein, 500 aa, synthetic construct
MRALVVIRLSRVTDATTSPERQLESCQQLCAQRGWDVVGVAEDLDVSGVVDPFDRKRRPNLARWLAFEEQPFDVIVAYRVDRLTRSTRHLQQLVRWAEDHKKLVVSATEAHFDMTTPFAAVVIALMGTVAQMELEAIKERIRSAAHFNIRAGKYRGSLPPWGYLPTRVDGEWRLVPDPVQRERILEVYHRVVDNHEPLHLVAHDLNRRGVLSPKDYFAQLRGREPRGRKWSATALRRSMTSVAMLGYATLNGKTVRDDDGAPLVRAEPILTREQQEALRAELAKTSRAKPAVSTPSLLLRVLFCAVCGEPAYKFVGGGRKHPRYRCRSMGFPEHCGNGTVVMAEWDSFCEEQVLDLLGDAERLEKVWVASSDSAVELAEVNAELVDLTCLIGSPAYRTGSPQREALDARIAALVARQEELEGLGARPSGWEWRETGQCFGDWWREHDTAAKNAWLRSMNVRLTFDVRGGLTRTIDFGDLQEYGQHLRLGSVVERLRTGMS

SEQ ID NO: 9977 - protein, 500 aa, synthetic construct
MRALVVIRLSRVTDATTSPERQLESCQQLCAQRGWDVVGVAEDLDVSGAVDPFDRKRRPNLARWLAFEEQPFDVIVAYRVDRLTRSTRHLQQLVHWAEDHKKLVVSATEAHFDTTTPFAAVVIALMGTVAQMELEAIKERSRSAAHFNIRAGKYRGSLPPWGYLPTRVDGEWRLVPDPVQRERILEVYHRVVDNHEPLHLVAHDLNRRGVLSPKDYFAQLRGREPQGRKWSATALKRSMTSVAMLGYATLNGETVRDDDGAPLVRAEPILTRGQLEALRAELAKTSRAKPAVSTPSLLLRVLFCAVCGEPAYKFVGGGRKHPRYRCRSMGSPGHCGNGTVVMAEWDAFCEEQVLDLLGDAERLEKVWVAGSDSSVELAEVNAELVDLTSLIGSPAYRVGSPQREALDARIAALAARQEELEGLEARPSGWEWRGTGQRLGDWWGEQDTAAKNAWLRSMNVRLTFDVRGGLTRTIDFGDLQEYGQYSRLGSVVERLRTGTS

SEQ ID NO: 9978 - protein, 500 aa, synthetic construct
MRALVVIRLSRVTDATTSPERQLESCQQLCAQRGWDVVGVAEDLDVSGAVDPFDRKRRPNLARWLAFEEQPFDAIVAYRVDRLTRSVRHLQQLVHWAEDHKKLIVSATEAHFDTTTPFAAVVIALMGTVAQMELEAIKERNRSAAHFNIRAGKYRGSLPPWGYLPTRVDGEWRLVPDPVQRERILEVYHRVVDNHEPLHWVAHDLNRRGVLSPKDYFAQLQGREPQGRKWSATALKRSMISKAMLGYATLNGKTVRDADGAPLVRAEPILTREQLEALRAELVKTSRAKPAVSTPSLLLRVLFCAVCGEPAYKFAGGGRKHPRYRCRSMGFPKHCGNGTVAMAEWDAFCEEQVLDLLGDAERLEKVWVAGSDSAVELAEVNAELVDLTSLIGSPAYRAGSPQREALDARIAALAARQEELEGLGARPSGWEWRETGQRFGDWWREQDTAAKNTWLRSMNVRLMFDVRGGLTRTIDFGDLQEYEQHLRSGGVVERLHTGMS

SEQ ID NO: 9979 - protein, 500 aa, synthetic construct
MRALVVIRLSRVTDATTSPERQLESCRQLCAQRGWDVVGVAEDLDVSGAVDPFDRKRRPNLARWLAFEEQPFDVIVAYRVDRLTRSTRHLQQLVHWAEDHKKLVVSATEAHFDTTTPFAAVVIALMGTVAQMELEAIKERIRSAAHFNIRAGKYRGSLPPWGYLPTRVDGEWRLVPDPVQRERILEVYHRVVDNHEPLHLVAYDLNRRGVLSPKDYFAQLRGREPQGRKWSATALKRSMTSEAMLGYATLNGKTVRDDDGAPLVRAEPILTREQQEALRAELAKTSRAKPAVSTPSLLLRVLFCAVCGEPAYKFAGGGRKHPRYRCRSMGFPKHCGNGTVAMAEWDAFCEEQVLNLLGDVERLEKVWVAGSDSAVELAEVSAELVDLTSLIGSPAYRAGSPQREALDARIAALAARQGELEGLEARPSGWEWRGTGQRFGDWWREQDTAAKNTWLRSMNVRLTFDVRGGPSRTIDFGDLQEYEQHLRVGSVVERLHTGMS

SEQ ID NO: 9980 - protein, 500 aa, synthetic construct
MRALVVIRLSRVTDATTSPERQLESCQQLCAQRGWDVVGVAEDLDVSGAVDPFDRKRRPNLARWLAFEEQPFDVIVAYRVDRLTRSVRHLQQLVHWAEDHKKLVVSATEAHFDTTTPFAAVVIALMGTVAQMELEAIKERNRSAAHFNIRAGKYRGSLPPWGYLPTRVDGEWRLVPDPVQRERILEVYHRVVDNHEPLHLVAHDLNRRGVLSPKDYFAQLRGREPQGRKWSATALKRSMISEAMLGYATLNGKTVRDDDGAPLVRAEPILTREQLEALRAELVKTSRAKPAVSTPSLLLRVLFCAVCGEPAYKFAGGGRKHPRYRCRSMGFPKHCGNGTVAMAEWDAFCEEQVLGLLGDAERLEKVWVAGSDSAVELAEVNAELVDLTSLIGSPAYRAGSPQREALDARIAALAARQEELEGLEARPSGWGWRGTGQRFGDWWREQDTAAKNTWLRSMNVRLTFDVRGGPTRTIDFGDLQEYEQHLRLGSVVERLHTGMS

SEQ ID NO: 9981 - protein, 500 aa, synthetic construct
MRALVVIRLSRVTDATTSPERQLESCQQLCAQRGWDVVGVAEDLDVSGAVDPFDRKRRPNLARWLAFEEQPFDVIVAYRVDRLTRSTRHLQQLVHWAEDHKKLVVSATEAHFDTTTPFAAVVIALMGTVAQMELEAIKERNRSAAHFNIRAGKYRGSLPPWGYLPTRVDGEWRLVPDPVQRERILEVYHRVVDNHEPLHWVAHDLNRRGVLSPKDYFAQLQGREPQGRKWSATALKRSMISEAMLGYATLNGKTVRDDDGAPLVRAEPILTRGQLEALRAELVKTSRAKPAVSTPSLLLRVLFCAVCGEPAYKFAGGGRKHPRYRCRSMGFPKHCGNGTVAMAEWDAFCEEQVLDLLGDAERLEKVWVAGSDSAVELAEVNAELVDLTSLIGSPAYRAGSPQREALDARIAALAARQEELEGLGARPPGWEWRETGQRFGDWWREQDTAAKNTWLRSMNVRLTFDVRGGLAHTIDFGDLQEYEQHLRLGSVVERLHTGMS

SEQ ID NO: 9982 - protein, 500 aa, synthetic construct
MRALVAIRLSRVTDATTSPERQLESCQQLCAQRGWDVVGVAEDLDVSGAVDPFDRKRRPNLARWLAFEEQPFDVIVAYRVDRLTRSTRHLQQLVYWAEDHKKLVVSATEAHFDTTTPFAAVVIALMGTVAQMELEAIKERNRSAAHFNIRAGKYRGSLPPWGYLPARVDGEWRLVPDPVQRERILEVYHRVVDDHEPLHLVAHDLNRRGVLSPKDYFAQLQGREPQGRKWSATALKRSMISEAMLGYATLNGKTVRDDDGAPLVRAEPILTREQQEALRAELVKTSRVKPAVSTPSLLLRVLFCAVCGEPAYKFAGGGRKHPRYRCRSMGFPKHCGNGTVAMAEWDAFCEEQVLDLLGDAERLEKVWVVGPDSAVELAEVNAELVDLTSLIGPPAYRAGSPQREALDARIAALAARQEELEGLEARPSGWEWRGTGQRFGDWWREQDTATKNTWLRSMNVRLTFDVRGGLTRTIDFGDLQEYEQHLRSGSVVERLHTGMS

SEQ ID NO: 9983 - protein, 500 aa, synthetic construct
MRALVVIRLSRVTEATTSPERQLESCQQLCAQRGWDVVGVAEDLDVSGAVDPFDRERRPNLARWLAFEEQPFDVIVAYRVDRLTRSVRHLQQLVHWAEDHKKLVVSATEAHFDTTTPFAAVVIALMGTVAQMELEAIKERSRSAAHFNIRAGKYRGSLPPWGYLPARVDGEWRLVPDPVQRERILEVYHRVVDNHEPLHLVAHDLNRRGVLSPKDYFAQLRGREPRGRKWSATALKRSMISVAMLGYATLNGKIVRDDDGAPLVRAEPILTREQQEALRAELAKTSRAKPAVSTPSLLLRVLFCAVCGEPAYKFVGGGRKHPRYRCRSMGSPKHCGNGTVVMAEWDAFCEEQVLNLLGDAERLEKVWVAGSDSAVELAEVNAELVDLTSLIGSPAYRAGSPQREALDARIAALAARQEELEGLEARPSGWKWRETGQRFGDWWREQDTAAKNTWLRSMNVRLTFDVRGGLTRTIDFGDLQEYGQHLRLGSVVERLHAGRS

SEQ ID NO: 9984 - protein, 500 aa, synthetic construct
MRALVVIRLSRVTDATTSPERQLESCQQLCAQRGWDVVGVAEDLDVSGAVDPFDRKRRPNLARWLAFEEQPFDVIVAYRVDRLTRSVRHLQQLVHWAEDYKKLVVSATEAHFDTTTPFAAVVIALMGTVAQMELEAIKERNRSAAHFNIRAGKYRGSLPPWGYLPTRVDGEWRLVPDPVQRERILEVYHRVVGNHEPLHLVAHDLNRRGVLSPKDYFAQLQGREPQGRKWSATALKRSMTSVAMLGYATLNGKTVRDDDGAPLVRAEPILTREQLEALRAELVKTSRAKPAVSTPSLLLRVLFCAVCGEPAYKFAGGGRKHPRYRCRSMGFPKHCGNGTVAMAEWDAFCEEQVLDLLGDAERLEKVWVAGSDSAVELAEVNAELVDLTGLISSPAYRAGSPQREALDARIAALAARQEELEGLEARPSGWGWRETGQRFGDWWREQDTATKNTWLRSMNVRLTFDVRGGLTRTIDFGDLQEYEQHLRLGSVVERLHTGMS

SEQ ID NO: 9985 - protein, 500 aa, synthetic construct
MRALVVIRLSRVTDATTSPERQLESCQQLCAQRGWDVVGVAEDLDVSGAVDPFDRKRRPNLARWLAFEEQPFDVIVAYRVDRLTRSTRQLQQLVHWAEDHKKLVVSATEAHFDTTTPFAAVVIALMGTVAQMELEAIKERNRSAAHFNIRAGKYRGSLPPWGYLPTRVDGEWRLVPDPVQRERILEVYHRVVDNHEPLHLVAHDLNRRGILSPKDYFAQLQGREPQGRRWSATALRRSMISEAMLGYATLNGKTVRDDDGAPLVRAEPILTRVQLEALRAELVKTSRAKPAVSTPSLLLRVLFCAVCGEPAYKSAGGGRKHPRYRCRSMGFPKHCGNGTVAMAEWDAFCEEQVLDLLGDAERLEKVWVTGSDSAVELAEVNAELVDLTSLIGSPAYRAGSPQREALDARIAALAARQEELEGLGARPSGWEWRETGQRFGDWWREQDTAAKNTWLRSMNVRLTFDVRGGLTRTIDFGDLQEYEQHLRLGSVVERLHTGMS

SEQ ID NO: 9986 - protein, 500 aa, synthetic construct
MRALVVIRLSRVTDATTSPERQLESCQQLCAQRGWDVVGVAEDLDVSGAVDPFDRKRRSNLARWLAFEEQPFDAIVAYRVDRLTRSVRHLQQLVHWAEDHKKLVVSATEAHFDTTTPFAAVVIALMGTVAQMELEAIKERNRSAAHFNIRAGKYRGSLPPWGYLPTRVDGEWRLAPDPVQRERILEVYHRVVDDHESLHLVAHDLNRRGVLSPKDYFAQLQGREPQGRKWSATAIKRSMISEAMLGYATLNGKTVRDDDGAPLVRAEPILTREQLEALRAELVKTSRAKPAVSTPSLLLRVLFCAVCGEPAYKFAGGGRKHPRYRCRSMGFPKHCGNGTVVMAEWDAFCEEQVLGLLGDAERLERVWVAGSDSAVELAEVNAELVDLTSLIGSLAYRAGSPQREALDARIAALAARQEELEGLGARPSGWEWRETGQRFGDWWREQDTAAKNTWLRSMNVRLTFDVRGGLTRTIDFGGLQEYGQHLRLGSVVERLHTGMS

SEQ ID NO: 9987 - protein, 500 aa, synthetic construct
MRALVVIRLSRVTDATTSPERQLESCQQLCAQRGWDVVGVAEDLDVSGAVDPFDRKRRPNLARWLAFEEQPFDVIVAYRVDRLTRSTRHLQQLVHWAEDHKKLVVSATEAHFDTTTPFAAVVIALMGTVAQMELEAIRERNRSAAHFNIRAGKYRGSLPPWGYLPARVDGEWRLVPDPVQRERILEVYHRVVDNHESLHLVAHDLNRRGVLSPKDYFAQLRGREPRGRKWSATALKRSMISEAMLGYATLNGKTVRDDDGAPLVRAEPILTREQLEALRAELVKTSRAKPAVSTPSLLLRVLFCAVCGEPAYKFAGGGRKHPRYRCRSMGFPKHCGNGTVVMAEWDAFCEEQVLDLLGDAERLEKVWVAGSGSAVELAEVDAELVDLTSLIGSPAYRAGSPQREALDARIAALAARQEELEGLEARPSGWEWRGTGQRFGDWWREQDTAARNTWLRSMNVRLTFDVRGGPTRTIDFGDLQEYEQHLRLGSVVERLHTGMS

SEQ ID NO: 9988 - protein, 500 aa, synthetic construct
MRALIVIRLSRVTDATTSPERQLESCQQLCAQRGWDVVGVAEDLDVSGAVDPFDRKRRPNLARWLAFDEQPFDVIVAYRVDRLTRSTRHLQQLVHWAEDHKKLVVSATEAHFDTTTPFAAVIIALMGTVAQMELEAIKERIRSAVRFNIRAGKYRGSLPPWGYLPTRVDGEWRLVPDPVQRERILEVYHRVVDNHEPLHLVAHDLNRRGVLSPKDYFAQLRGREPRGRKWSATALKRSMTSVAMLGYATLNGKTVRGDDGAPLVRAEPILTREQQGALRAELAKTSRAKPAVSTPSLLLRVLFCAVCGEPAYKFVGGGRKHPRYRCRSIGLPKHCGNGTVAMAEWDAFCEEQVLGLLGDAERLEKVWVAGSDSSVELAEVNAELVDLTSLIGSPAYRAGSPQREALDARIAALAARQEELEGLEARPSGWEWRETGQRFRDWWREQGTAAKNTWLRSMNVRLTFDVRGGLTRTIDFGELQEYEQYLRLGSVVERLHTGMS

SEQ ID NO: 9989 - protein, 500 aa, synthetic construct
MRALVVIRLSRVTDATTSPERQLESCQQLCAQRGWDVVGVAEDLDVSGAVDPFDRKRRPNLARWLAFEEQPFDVIVAYRVDRLTRSTRHLQQLVRWAEDHKKLVVSATEAHFDTTTPFAAVVIALMGTVAQMELEAIKERIRSAAHFNIRAGRYRGSLPPWGYLPTRVDGEWRLVPDPVQRERILEVYRRVVDNHEPLHLVAHDLNRRGVLSPKDYFAQLQGREPQGRKWSATALKRSMTSGAMLGYATLNGKTVRDGDGAPLVRAEPILTREQLEALRTELAKTSRAKPAVPTPSLLLRVLFCAVCGEPAYKFVGGGRKHPRYRCRSMGFPEHCGNGTVVLAEWDAFCEEQVLNLLGNAERLEKVWVAGSDSAVELAEVNAELVDLTSLIGSPAYRAGSPQREALDARIAALAARQEELEGLEARPSGWMWRETGQRFGDWWREQDTAAKNTWLRSMNVRLAFDVRGGLTRTIDFGDLREYEQHLRLGSVVERLHTGMS

SEQ ID NO: 9990 - protein, 500 aa, synthetic construct
MRALIAIRLSRVTDATTSPERQLESCQQLCAQRGWDVVGVAEDLDVSGAVDPFDRKRRPNLARWLAFEEQPFDVIVAYRVDRLTRSTRHLQQLVHWAEDHKKLVVSATEAHFDTTTPFAAVVIALMGTVAQMELEAIKERNRSAAHFNIRAGKYRGSLPPWGYLPTRVDGEWRLVPDPVQRERILEVYHRVVDNHEPLHLVAHDLNRRGVLSPKDYFAQLRGREPQGRKWSATALKRSMTSEAMLGYATLNGKTVRDDDGAPLVRAEPILTREQLEALRAELVKTSRAKPAVSTPSLLLRVLFCAVCGEPAYKFAGGGRKHPRYRCRSMGFPKHCGNGTVAMAEWDAFCEEQVLDLLGDAERLEKVWVTGSDSAVELAEVNAELVDLTSLIGSPAYRAGSPQREALDARIAALAARQEELEGLGARPSGWEWRETGQRFGDWWREQDTAAKNTWLRSMNVRLTFDVRGGLTRTIDFGDLQEYEQHLRLGSVVERLHTGML

SEQ ID NO: 9991 - protein, 500 aa, synthetic construct
MRALVVIRLSRVTDATTSSERQLESCQQLCTQRGWDVVGVAEDLDVSGAVDPFDRKRRPNLARWLAFEEQPFDVIVAYRIDRLTRSVRHLQQLVHWAEDHKKLVVSATEAHFDTTTPFAAVVIALMGTVAQMELEAIKERNRSAAHFNIRAGKYRGSLPPWGYLPTRVDGEWRLAPDPVQRERILEVYHRVVNNHEPLHLVAHDLNRRGVLSPKDYFAQLRGREPQGREWSATALKRSMISEAMLGYATLNGKTVRDDDGAPLVRAEPILTREQLEALRAELVKTSRAKPAVSTPSLLLRVLFCAVCGEPAYKFAGGGRKHPRYRCRSMGFPKHCGNGTVVMAEWDAFCEEQVLDLLGDAERLEKVWVAGSDSAVELAEVNAELVDLTSLIGSPAYRAGSPQREALDARIAALAARQEELEGLGARPSGWEWRETGQRFGDWWREQDTAAKNTWLRSMNVRLTFDVRGRLTRTIDFGDLQEYEQHLRLGSVVERLHTGMS

SEQ ID NO: 9992 - protein, 500 aa, synthetic construct
MRALVVIRLSRVTDATTSPERQLESCQQLCAQRGWDVVGVAEDLDVSGAVDPFDRKRRPNLARWLAFEEQPFDVIVAYRVDRLTRSTRHLQQLVHWAEDHKKLVVSATEAHFDTTTPFAAVVIALMGTVAQMELEAIRERNRSAAHFNIRAGKYRGSLPPWGYLPTRVDGEWRLVPDPVQRERILEVYHRVVDNHEPLHLVAHDLNRRGVLSPKDYFAQLQGREPQGRKWSATALKRSMLSEAMLGYATLNGKTVRDDDGAPLVRAEPILTRGQLEALRAVLVKTSRAKPAVSTPSLLLRVLFCAVCGEPAYKFAGGGRKHPRYRCRSMGFPKHCGNGTVAMAEWDAFCEERVLDLLGDAERLEKVWVAGSDSAVELAEVSAELVDLTSLIGSPAYRAGSPQREALDARIAALAARQGELEGLGARPSGWEWRETGQRFGDWWREQDTAAKNTWLRSMNVRLTFDVRGGLTRTIDFGGLQEYVQHLRLGSVVERLHTGMP

SEQ ID NO: 9993 - protein, 500 aa, synthetic construct
MRALVVIRLSRVTDATTSPERQLESCQQLCAQRGWDVVGVAEDLDVSGAVDPFDRKRRPNLARWLAFEEQPFDVIVAYRVDRLTRSTRHLQQLVHWAEDHKKLVVSATEAHFDTTTPFAAVVIALMGTVAQMELEAIKERNRSAAHFNIRAGKYRGSLPPWGYLPARVDGEWRLVPDPVQRERILEVYHRVVDNHEPLHLVAHDLNRRGVLSPKDYFAQLRGREPQGRKWSATALKRSMISEAMLGHATLNGKTVRDDDGAPLVRAEPILTREQLEALRAELVKTSRAKPAVSTPSLLLRVLFCAVCGEPAYKLAGGGRKHPRYRCRSMGFPKHCGNGTVAMAEWDVFCEEQVLDLLGDAERLEKVWVAGSDSAVELAEVNAELVDLTSLIGSPAYRAGSPQREALDARIAALAARQEELEGLEARPSGWVWRETGQRFGDWWREQDTAAKNTWLRSMNVRLTFDVRGGLTRTIDFGDLHEYVRHLRLGSVVGRLHTGMS

SEQ ID NO: 9994 - protein, 500 aa, synthetic construct
MRALVVIRLSRVTDATTSPERQLESCRQLCAQRDWDVVGVAEDLDVSGAVDPFDRKRRPNLARWLAFEEQPFDVIVAYRVDRLTRSVRHLQQLVHWAEDHKKLVVSATETHFDTTTPFAAVVIALMGTVAQMELEAIRERNRSAAHFNIRAGKYRGSLPPWGYLPTRVDGEWRLAPDPVQRERILEVYHRVVDYHEPLHLVAHDLNRRGVLSPKDYFAQLRGREPQGRKWSATALKRSMISEAMLGYATLNGETVRDDDGAPLVRAEPILTREQLEALRAELVKTSRAKPAVSTPSLLLRVLFCAVCGEPAYKLAGGGRKHPRYRCRSMGFPKHCGNGTVAMAEWDAFCEEQVLGLLGDAERLEKVWVAGSDSAVELAEVNAELVDLTSLIGSPAYRAGSPQREALDARIAALAARQEELEGLEARPSGWEWRGTGQRFGDWWREQDTAAKNTWLRSMNVRLTFDVRGRLTRTIDFGGLQEYEQHLRLGSVVDRLHTGMS

SEQ ID NO: 9995 - protein, 500 aa, synthetic construct
MRALIVIRLSRVTDATTSPERQLESCQQLCAQRGWDVVGVAEDLDVSGAVDPFDRKRRPNLARWLAFEEQPFDAIVAYRVDRLTRSTRHLQQLVRWAEDHKKLVVSATEAHFDTTTPFAAVVIALMGTVAQMELEAIKERIRSAVRFNIRAGKYRGSLPPWGYLPTRVDGEWRLVPDPVQRERILEVYHRVVDNHEPLHLVAHDLNRRGVLSPKDYFAQLQGREPQGRKWSATALKRSMTSEAMLGYATLNGKTVRDDDGAPLVRAEPILTREQLEALRAELVKTSRAKPAVSTPSLLLRVLFCAVCGEPAYKFVGGGRKHPRYRCRSMGFPEHCGNGTVVMAEWDAFCEEQVLDLLGDAERLEKVWVAGSDSAVELVEVNAELVDLASLIGSPAYRAGSPQREALDARIAALAARQEELESLEARPSGWEWRETGQRFGDWWREQDTAAKNTWLRSMNVRLTFDVRGGLTRTIDFGDLQKYEQHLRLGSVVERLHTGMS

SEQ ID NO: 9996 - protein, 500 aa, synthetic construct
MRALVVIRLSRVTDATTSPERQLESCQQLCAQRGWDVVGVAEDLDVSGAVNPFDRKRRPSLARWLAFEEQPFDAIVAYRVDRLSRSVRHLQQLVRWAEDHKKLVVSATEAHFDTTTPFAAVVIALMGTVAQMELEAIKERIRSAAHFNIRAGKYRGSLPPWGYLPTRVDGEWRLAPDPVQRERILEVYHRVVDNHEPLHLVAHDLNRRGVLSPKDYFAQQRGREPQGRKWSATALKRSMISVAMLGYATLNGKIVRDDDGAPLVRAEPILTREQLEALRAELAKTSRAKPAVSTPSLLLRVLFCAVCGEPAYKFVGGGRKHPRYRCRSMGFPKHCGNGTVVMAEWDAFCEEQVLNLLGDVERLEKVWLAGSDSAVELAEVNAELVDLTSLIGSPAYRAGSPQREALDARIAALAARQEELEGLEARPSGWEWRGTGQRLGDWWREQDTAAKNTWLRSMNVRLTFDVRGGLTRTIDFGDLQEYERHLRLGSVVERLHTGMS

SEQ ID NO: 9997 - protein, 500 aa, synthetic construct
MRALVVIRLSRVTDATTSPERQLESCQQLCAQRGWDVVGVAEDLDVSGAVDPFDRKRRPNLARWLASKEQPFDVIVAYRVDRLTRSVRHLQQLVHWAEDHKKLVVSATEAHFDTTTPFAAVVIALMGTVAQMELEAIKERNRSAAHFNIRAGKYRGSLPPWGYLPTRVDGEWRLVPDPVQRERILEVYHRVVDNHEPLHWVAHDLNRRGVLSPKDYFAQLQGREPRGRKWSATALKRSMTSGAMLGYATLNGKTVRDDDGAPLVRAEPILTREQLEALRAELVKTSRAKPAVSTPSLLLRVLFCAVCGEPAYKFAGGGRKHPRYRCRSMGFPKHCGNGTVTMAEWDAFCEELVLDLLGDAERLEKVWVAGSDSAVELAEVNAELVDLTSLIGSPAYRAGSPQREALDARIAALAARQEELEGLEARPSGWEWRGTGQRFGDWWREQDTAAKNTWLRSMNVRLTFDVRGGLTRTIDFGGLQEYEQHLRIGSGVERLHTGMS

SEQ ID NO: 9998 - protein, 500 aa, synthetic construct
MRALVVIRLSRVTDATTSPERQLESCQQLCAQRGWDVVGVAEDLDVSGAVDPFDRKRRPGLARWLAFEEQPFDVIVAYRVDRLTRSTRHLQRLVHWAEDHKKLVVSATEAHFDTTTPFAAVVIALMGTVAQMELEAIRERNRSAAHFNIRAGKYRGSLPPWGYLPTRVDGEWRLVPDPVQRERILEVYHRVVDNHEPLHLVAHDLNRRGVLSPKDYFAQLRGREPQGRKWSATALKRSMISEAMLGYATLNGKTVRDDDGAPLVRAEPILTREQLEALRAELVKASRAKPAVSTPSLLLRVLFCAVCGEPAYKFAGGGRKHPRYRCRSMGFPKHCGNGTVAIAEWDAFCEELVLDLLGDAERLEKVWVAGSDSAVELAEVNAELVDLTSLIGSPAYRAGSPQREALDARIAALAARQEELEGLGARPSGWEWRGTGQRFGDWWREQDTAAKNTWLRSMNVRLTFDVRGGLTRTIDFGDLQEYEQHLRSGSVVERLHTGMS

SEQ ID NO: 9999 - protein, 500 aa, synthetic construct
MRALVVIRLSRVTDATTSPERQLESCQQLCAQRGWDVVGVAEDLDVSGAVDPFDRKRRPNLARWLAFEEQPFDAIVAYRVDRLTRSTRHLQQLVHWAEDHKKLVVSATEAHFDTTTPFAAVVIALMGTVAQMELEAIKERNRSAAHFNIRAGKYRGSLPPWGYLPTRVDGEWRLVPDPVQRERILEVYHRVVDNHEPLYLVAHDLNRRGVLSPKDYFAQLQGREPQGRKWSATALKRSMISEAMLGYATLNGKTVRDDDGAPLVRAEPILTREQLEALRAELVKTSRAKPAVSTPSLLLRVLFCAVCGEPAYKFAGGGRKHPRYRCRSMGFPKHCGNGTVAMAEWDAFCEEQVLDLLGDAERLEKVWVAGSDSAVKLAEVNAELVDLTSLIGSPAYRAGSPQREALDARIAALAARQEELEGLGARPSGWEWRETGQRFGDWWREQDTAAKNAWLRSMNVRLMFDVRGGLTRTVDFGDLQEYEQHLRLGSVVERLHAGMS

SEQ ID NO: 10000 - protein, 500 aa, synthetic construct
MRALVVIRLSRVTDATTSPERQLESCQQLCAQRGWDVVGVAEDLDVSGAVNPFDRKRRPNLARWLAFEEQPFDAIVAYRVDRLTRSVRHLQQLVHWAEDHKKLVVSATEAHFDTTTPFAAVVIALMGTVAQMELEAIKERNRSAAHFNIRAGKYRGSLPPWGYLPTRVDGEWRLVPDPVQRERILEVYRRVVDNHEPLHSVAHDLNRRGVLSPKDYFAQLQGREPQGRKWSATALKRSMISEAMLGYATLNGKTVRDDDGAPLVRAEPILTRGQLEALRAELVKTSRAKPAVSTPSLLLRVLFCAVCGEPAYKFAGGGRKHPRYRCRSMGFPKHCGNGTVAMAEWDAFCEEQVLGLLGDAERLEKVWVAGSDSAAELAEVNAELVDLASLIGSPAYRAGSPQREALDARIAALVARQEELEGLEARPSGWEWRGTGQRFGDWWREQDTAAKNTWLRSMNVRLTFDVRGGLTHTIDFGGLQEYEQHLRLGSVVERLHTGMS

SEQ ID NO: 10001 - protein, 500 aa, synthetic construct
MRALVVIRLSRVTDATTSPERQLESCQQLCAQRGWDVVGVAEDLDVSGAVDPFDRKRRPNLARWLAFEEQPFDAIVAYRVDRLTRSTRHLQQLVRWAEDHKKLVVSATEAHFDTTTPFAAVVIALMGTVAQMELEAIKERIRSAAHFNIRAGKYRGSLPPWGYLPTRVEGEWRLVPDPVQRERILEVYHRVVDNHEPLHLVAHDLNRRGVLSPKDYFARLRGREPQGRKWSATALKRSMISRAMLGYATLNGKIVRDDDGAPLVRAEPILTREQQEALRAELAKTSRAKPAVSTPSLLLRVLFCAVCGEPAYKFVGGGRKHPRYRCRSMGFPEHCGNGTVVMAEWDAFCEEQVLDLLGDAERLEKVWVAGSDSAVELAEVNAELMDLTSLIGSPAYRAGSPQREALDARIAALAARQEELEGLEARPSGWEWRETGQRFRDWWREQDTAAKNTWLRSMNVRLTFDVRGGLTRTIDFGDLQEYEQHLRLGSVVERLHTGMS

SEQ ID NO: 10002 - protein, 500 aa, synthetic construct
MRALVVIRLSRVTDATTSPERQLESCQQLCAQRGWDVVGVAEDLDVSGAVDPFDRKRRPNLARWLAFEEQPFDVIVAYRVDRLTRSTRHLQQLVHWAEDHKKLVVSATEAHFDTTTPFAAVVIALMGTVAQMELEAIKERNRSAAHFNIRAGKYRGSLPPWGYLPTRVDGEWRLVPDPVQRERILEVYHRVVDNHEPLHSVAHDLNRRGVLSPKDYFAQLRGREPQGREWSATALKRSMTSVAMLGYATLDGKTVRDDDGAPLVRAEPILTREQLEALRAELVKTSRAKPAVSTPSLLLRVLFCAVCGEPAYKSAGGGRKHPRYRCRSMGFPKHCGNGTVAMAEWDAFCEEQVLDLLGDAERLEKVWVAGSDSAVELAEVNAELVDLTSSIGSPAYRAGSPQREALDARIAALAARQEELEGLEARPSGWEWRGTGQRFGDWWREQDTAAKNTWLRSMNVRLTFDVRGGLTRTIDFGDLQEYEQHLRLGSVVERLHTGVS

SEQ ID NO: 10003 - protein, 500 aa, synthetic construct
MRALVVIRLSRVTDATTSPERQLESCQQLCAQRGWDVVGVAEDLDVSGAVDPFDRKRRPNLARWLAFEEQPFDVIVAYRVDRLTRSTRHLQQLVHWAEDHKKLVVSATEAHFDTTTPFAAVVIALMGTVAQMELEAIKERIRSAVHFNIRAGKYRGSLPPWGYLPTRVDGGWRLVPDPVQRERILEVYHRVVDNHEPLHLVAHDLNRRGVLSPKDYFAQLQGREPQGRKWSATALKRSMTSVAMLGYATLSGKTVRGDDGAPLVRAEPILTREQLEVLRAELAKTSRAKPAVPTPSLLLRVLFCAVCGEPAYKFAGGGRKHPRYRCRSMGFPEHCGNGTVVMAEWDAFCEEQVLDLLGDAERLEKVWVAGSDSAVELAEVNAELVDLTSLIGSPAYRAGSPQREALDARIAALAARQGELEGLEARPSGWEWRGTGQRFGDWWREQDTAAKNSWLRSMNVRLTFDVRGGLTRTIDFGDLQGYEQHLRLGSVAGRLHTGMS

SEQ ID NO: 10004 - protein, 500 aa, synthetic construct
MRALVVVRLSRVTDATTSPERQLESCQQLCAQRGWDVVGVAEDLDVSGAVDPFDRKRRPNLARWLAFEEQPFDVIVAYRVDRLTRSIRHLQQLVHWAEDHKKLVVSATEAHFDTTTPFAAVVIALMGTVAQMELEAIKERIRSAAHFNIRAGKYRGSLPPWGYLPARVDGEWRLVPDPVQRERILEVYRRVVDNHEPLHLVAHDLNRRGVLSPKDYFAQLQGREPQGRKWSATALKRSMTSVAMLGYATLSGKTVRDDDGAPLVRAEPILTREQQEALRAELVKTSRAKPAVSTPSLLLRVLFCAVCGEPAYKFVGGGRKHPRYRCRSMGFPKHCGNGTVVMAELDVFCEEQVLDLLGDAERLEKVWVAGSDSAVELAEVNAELVDLTSLIGSPAYRAGSPQREALDARIAALAARQEELEGLEARPSGWEWRETGQRFGDWWREQDTAAKNTWLRSMNVRLTFDVRGGLTRAIDFGDLQEYEQHLRLGSMAERSHTGMS

SEQ ID NO: 10005 - protein, 500 aa, synthetic construct
MRALVVIRLSRVTDATTSPERQLESCQQLCAQRGWDVVGVAEDLDVSGAVDPFDRKRRPNLARWLAFEEQPFDVIVAYRVDRLTRSTRHLQQLVHWAEDHKKLVVSATEAHFDTTTPFAAVVIALMGTVAQMELEAIKERNRSAAHFNIRAGKYRGSLPPWGYLPTRVDGEWRLVPDPVQRERILEVYHRVVDNHEPLHWVAHDLNRRGVLSPKDYFAQLQGREPQGRKWSATALKRSMTSGAMLGYATLNGKTVRDDDGAPLVRAEPILTREQLEAIRAELVKTSRAKPAVSTPSLLLRVLFCAVCGEPAYKFAGGGRKHPRYRCRSMGFPKHCGNGTVVMAEWDAFCEEQVLNLLGDAERLEKVWVAGSDSAVELAEVNAELVDLTSLIGSPAYRAGSPQREALDARIAALAARQEELEGLGARPSGWEWRGTGQRFGDWWREQDAAAKNTWLRSMNVRLTFDVRGGLTRTIDFGDLREYEQHIRLGSVVERLHTGVS

SEQ ID NO: 10006 - protein, 500 aa, synthetic construct
MRALVVIRLSRVTDATTSPERQLESCQQLCAQRGWDVVGVAEDLDVSGAVDPFDRKRRPNLARWLAFEEQPFDAIVAYRVDRLTRSVRHLQQLVHWAEDHKKLVVSATEAHFDTTTPFAAVVIALMGTVAQMELEAIKERNRSAAHFNIRAGKYRGSLPPWGYLPTRVDGEWRLVPDPVQRERILEVYHRVVDNHEPLHLVAHDLNQRGVLSPKDYFAQLQGREPQGRKWSATALKRSMISETMLGYATLNGKIVRDDDGAPLVRAKPILTREQLEALRAELVKTSRAKPAVSTPSLLLRVLFCAVCGEPAYKFAGGGRKHPRYRCRSMGFPKHCGNGTVVMAEWDAFCEEQVLDLLGDAERLEKVWIAGSDSAVELAEVSAELVDLTSLIGAPAYRAGSPQREALDARIAALAARQEELEGLEARPSGWEWRETGQRFGDWWREQDTAAKNTWLRSMNVRLTFDARDGLTRTIDFGNLQEYEQHLRLGSVVERLHTGMS

SEQ ID NO: 10007 - protein, 500 aa, synthetic construct
MRALVVIRLSRATDATTSPERQLESCQQLCAQRGWDVVGVAEDLDVSGAVDPFDRKRRPNLARWLAFEEQPFDVIVAYRVDRLTRSTRHLQQLVHWAEDHKKLVVSATEAHFDTTTPFAAVVIALMGTVAQMELEAIKERNRSAAHFNIRAGKYRGSLPPWGYLPTRVDGEWRLVPDPVQRERILEVYHRVVDDHEPLHLVAHDLNRRGVLSPKDYFAQLRGREPQGRKWSATALKRSMISEAMLGYATLNGKTVRDDNGAPLVRAEPILTREQLEALRAVLAKTSRAKPAVSTPSLLLRVLFCAVCGEPAYKFAGGGRKHPRYRCRSMGFPKHCGNGTVAMAEWDAFCEEQVLDLLGDAERLEKVWATGSDSAVELAEVNAELVDLTSLIGSPAYRAGSPQREALDTRIAALAARQEELEGLEARPSGWEWRETGQRFGDWWREQDTAAKNTWLRSMNVRLTFDVRGGLTRTIDFGDLQEHEQHLRLGSVVGRSHTGMS

SEQ ID NO: 10008 - protein, 500 aa, synthetic construct
MRALVVIRLSRVTDATTSPERQLESCQQLCAQRGWDVVGVAEDLDVSGAVDPFDRKRRPNLARWLAFEEQPFDVVVTYRIDRLTRSVRHLQQLVHWAEDHKKLVVSATEAHFDTTTPFAAVVIALMGTVAQMELEAIKERNRSAAHFNIRAGKYRGSLPPWGYLPTRVDGEWRLVPDPVQRERILEVYHRVVDNHEPLHLVAHDLNRRGVLSPKDYFAQLQGREPQGRKWSATALKRSMISAAMLGYATLNGKTVRDDDGAPLVRAEPILTRVQLEALRAELAKTSRAKPAVSTPSLLLRVLFCAVCGEPAYKFAGGGRKHPRYRCRSMGFPKHCGNGTVVMAEWDAFCEEQVLNLLGDAEHLEKVWVAGSDSAVELAEVNAELVDLTSLIGSPAYRAGSPQREALDARIAALAARQEELEGLGARPSGWEWRETGQRFGDWWREQDTAAKNTWLRSMNVRLTFDVRGGLARTIDFGDLQEYEQHLRLGSVVERLHTGMS

SEQ ID NO: 10009 - protein, 500 aa, synthetic construct
MRALVVIRLSRVTDATTSPERQLESCQQLCAQRGWDVVGVAEDLNVSGAVDPFDRKRRPNLARWLAFEEQPFDAIVAYRVDRLTRSIRHLQQLVHWAEDHKKLVVSVTEAHFDTTTPFAAVVIALMGTVAQMELEAIKERNRSAAHFNIRAGKYRGSLPPWGYLPTRVDGEWRLVPDPVQRERILEVYHRVVNNHEPLHLVAHDLNRRGVLSPKDYFAQLQGREPQGRKWSATALKRSMISGAMLGYATLNGKTVRDDDGAPLVRAEPILTREQLEALRAELVKTSRAKPAVSTPSLLLRVLFCAVCGEPAYKFAGGGRKHPRYRCRSMGFPKHCGNGTVVMAEWDAFCEEQVLNLLGDAERLEKVWVAGSDSAVELAEVNAELVDLTSLIGSPAYRAGSPQREALDARIAALAARQEELEGLEARPSGWEWRETGQRFGDWWREQDTAAKNTWLRSMNVRLTFDVRGGLTRTIDFGDLQEYEQHLRLGGVVERLHTGMS

SEQ ID NO: 10010 - protein, 500 aa, synthetic construct
MRALVVIRLSRVTDATTSPERQLESCQQLCAQRGWDVVGVAEDLDVSGAVDPFDRKRRPNLARWLAFEEQPFDVIVAYRVDRLSRSIRHLQQLVHWAEDHEKLVVSATEAHFDMTTPFAAVVIALMGTVAQMELEAIKERNRSAAHFNIRAGKYRGSLPPWGYLPTRVDGEWRLAPDPVQRERILEVYHRVVDNHEPLHLVAHDLNRRGVLSPKDYFAQLQGREPRGRKWSATALKRSMISEAMLGYATLNGKTVRDDDGAPLVRAEPILTREQLEALRAELVKTSRAKPAVSTPSLLLRVLFCAVCGEPAYKFAGGGRKHPRYRCRSMGFPKHCGNGTVAIAEWDAFCEEQVLDLLGDAERLERVWVAGSDSAVELAEVNAELVDLTSLIGSPACRAGSPQREALDARIAALAARQEELEGLEARPSGWGWRETGQRFGDWWREQDTAAKNTWLRSMSVRLTFDVRGGLTRTIDFGDLQEYVQHLRSGSVVERLHTRMP

SEQ ID NO: 10011 - protein, 500 aa, synthetic construct
MRALVVIRLSRVTDATTSPERQLESCQQLCAQRGWDVVGVAEDLDVSGAVDPFDRKRRPNLARWLAFEEQPFDVIVAYRVDRLARSTRHLQQLVHWAEDHKKLVVSATEAHFDTTTPFAAVVIALMGTVAQMELEAIKERNRSAAHFNIRAGRYRGSLPPWGYLPTRVDGEWRLAPDPVQRERILEVYHRVVDNHEPLHLVAHDLNRRGVLSPKDYFAQLQGREPQGRKWSATALKRSMISEAMLGYATLNGKTVRNDDGAPLVRAEPILTREQLEALRAELVKTSRAKPAVSTPSLLLRVLFCAVCGEPAYKFAGGGRKHPRYRCRSMGFPKHCGNGTVAMAEWDAFCEEQVLDLLGDAERLEKVWVAGSDSAVELAEVNAELVDLTSLIGSPAYRAGSPQREALDARIAALAARQEELEGLEARPSGWEWRETGQRFGDWWREQDTAAKNTWLRSMNVRLTFDVRGGLTRTIDFGDLRGYEQHLRLGGAVERIHTGMS

SEQ ID NO: 10012 - protein, 500 aa, synthetic construct
MRALVVIRLSRVTDATTSPERQLESCQQLCAQRGWDVVGVAEDLDVSGAVDPFDRKRRPNLARWLAFEEQPFDVIVAHRVDRLTRSTRHLQQLVHWADDHKKLVVSATEAHFDTTTPFAAVVIALMGTVAQMELEAIKERIRSATHFNIRAGKYRGSLPPWGYLPTRVDGEWRLVPDPVQRERILEVYHRVVDNHEPLHLVAYDLNRRGVLSPKDYFAQLQGREPQGRKWSATALKRSMISVAMLGYATLDGKIVRDDDGAPLVRAEPILTREQQEALRAELARTSRAKPAVSTPSLLLRVLFCAVCGEPAYKFTGGGRKHPRYRCRSMGFPEHCGNGTVVMAEWDAFCEEQVLNLLGDAERLEKVWLAGSDSAVELAEVNAELVDLTSLIGSPAYRAGSPQREALDARIAALAARQEELEGLEARPSGWEWRETGQRFRDWWREQDTAAKNTWLRSMNVRLTFDVRGGLARTIDFGDLQEYEQHLRLGSVAERLRTGVS

SEQ ID NO: 10013 - protein, 500 aa, synthetic construct
MRALVVIRLSRVTDATTSPERQLESCHQLCAQRGWDVVGVAEDLGVSGAVDPFDRKRRPNLARWLAFEEQPFDVIVAYRVDRLTRSIRHLQQLVHWAEDHKKLVVSATEAHFDTTTPFAAVVIALMGTVAQMELEAIKERNRSAVHFNIRAGKYRGSLPPWGYLPTRVDGEWRLVPDPVQRERILEVYHRVVNNHEPLHLVAHDLNRRGVLSPKDYFAQLRGREPQGRKWSATALKRSMISEAMLGYATLNGKTVRDDNGAPLVRAEPILTREQLEALRAELVKTSRAKPAVSTPSLLLRVLFCAVCGEPAYKFAGGGRKHPRYRCRSMGFPKHCGNGTVAMAEWDAFCEEQVLNLLGDAERLEKVWVAGSDSAVELAEVNAELVDLTSLIGSPAYRAGSPQREALDARIAVLAARQEELEGLEARPSGWEWRETGQRFGDWWREQDTAAKNTWLRSMNVRLTFDVRGGLTRTIDFGGLLEYEQHLRLGSVVERLHTGTS

SEQ ID NO: 10014 - protein, 500 aa, synthetic construct
MRALVVIRLSRVTDATTSPERQLESCQQLCAQRGWDVVGVAEDLDVSGAVDPFDRKRRPNLARWLAFEEQPFDAIVAYRVDRLTRSVRHLQQLVHWAEDHKKLVVSATEAHFDTTTPFAAVVIALMGTVAQMELEAIKERNRSAAHFNIRAGKYRGSLPPWGYLPARVDGEWRLVPDPVQRERILEVYRRVVDNHEPLHLVAYDLNRRGVLSPKDYFAQLQGREPQGRKWSATALKRSMISEAMLGYATLSGKTVRDEDGAPLVRAEPILTREQLEALCAELVKSSRAKPAVSTPSLLLRVLFCAVCGEPAYKFAGGGRKHPRYRCRSMGFPKHCGNGTVAMAEWDAFCEEQVLDLLGDTERLEKVWVAGSDSAVELAGVNAELVDLTSLIGSPAYRTGSPQRKALDARIAALAARQEELEGLEARPSGWEWRGTGQRFGDWWREQDTAAKNTWLRSMNVRLTFDVRGGLTRTIDFGDLQEYEQHLRLGSVVERLHTGMS

SEQ ID NO: 10015 - protein, 500 aa, synthetic construct
MRALVVIRLSRVTDATTSPERQLASCQQLCAQRGWDVVGVAEDLDVSGAVDPFDRKRRPNLARWLAFEEQPFDVIVAYRVDRLTRSTRHLQQLVHWAEDHKKLVVSATEAHFDTTTPFAAVVIALMGTVAQMELEAIKERIRSAAHFNIRAGKYRGSLPPWGYLPARVDGEWRLVPDPVQRERILEVYHRVVDNHEPLHLVAHDLNRRGVLSPKDYFAQLRGREPQGRKWSATALKRSMTSVAMLGYATLNGKTVRNDDGAPLVRAEPILTREQLEALRAELVKTSRAKPAVSTPSLLLRVLFCAVCGEPAYKFVGGGRKHPRYRCRSMGFPKHCGNGTVVMTEWDAFCEEQVLNLLGDAERLEKVWVAGSDSAVELAEVNAELVDLTSLIGSPAYRAGSPQREALDARIAALAARQEELEGLEARPSGWEWRETGQRFRDWWREQDTAAKNTWLRSMNVRLTFDVRGGLTRTIDFGDLQEYEQHLRLGSVVERLHTGMS

SEQ ID NO: 10016 - protein, 500 aa, synthetic construct
MRALAVIRLSRVTDVTTSPERQLESCQQLCAQRGWDVVGVAEDLDVSGAVDPFDRKRRPNLARWLAFEEQPFDVIVAHRVDRLTRSTRHLQQLVHWAEDHKKLVVSATEAHFDTTTPFAAVVIALMGTVAQMELEAIKERNRSAAHFNIRAGKYRGSLPPWGYLPTRVDGEWRLVPDPVQRERILEVYHRVVDNHEPLHLVAHDLNRRGVLSPKDYFAQLQGREPQGRKWSATALKRSMTSVAMLGYATLNGKTVRDDDGAPLVRAEPILTREQLEALRAELVKTSRAKPAVSTPSLLLRVLFCAVCGEPAYKFAGGGRKHPRYRCRSMGFPKHCGNGTVVMAEWDAFCEEQVLNQLGDAERLEKVWVAGSDSAVELAEVNAELVDLASLIGSPAYRAGSPQREALDARVAALAARQEELEGLEARPSGWEWRGTGQRFGDWWREQDTAAKNTWLRSMNVRLTFDVRGGLTRTIDFGDLQEYAQHLRLGSVVERLHTGMS

SEQ ID NO: 10017 - protein, 500 aa, synthetic construct
MRALVVIRLSRVTDATTSPERQLESCQRLCAQRGWDVVGVAEDLDVSGAVDPFDRKRRPNLARWLAFEEQPFDVIVAYRVDRLTRSVRHLQQLVHWAEDHKKLVVSATEAHFDTTTPFAAVVIALMGTVAQMELEAIKERIRSAVRFNIRAGKYRGSLPPWGYLPTRVDGEWRLVPDPVQRERILEVYHRVVDNHEPLHLVAHDLNRRGVLSPKDYFAQLQGREPQGRKWSATALKRSMTSVAMLGYATLNGKTVRGDDGAPLVRAEPILTREQQEALRAELAKTSRAKPAVSTPSLLLRVLFCAVCGEPAYKFVGGGRKHPRYRCRSMGFPKHCGNGTVVMTEWDAFCEEQVLDLLGDAERLEKVWAAGSDSAVELAEVNAELVDLTSLIGSPAYRAGSPQREALDARIAALAARQEELEGLEARPSGWEWRGTGQRLGDWWREQDTAAKNTWLRSMNIRLTFDVRGGLTRTVDFGDLREYARHLRLGSVVERLHTGTS

SEQ ID NO: 10018 - protein, 500 aa, synthetic construct
MRALVVIRLSRVTDATTSPERQLESCQQLCAQRGWDVVGVAEDLDVSGAVDPFDRKRRPNLARWLAFEEQPFDVIVAYRVDRLTRSTRHLQQLVRWAEDHKKLVVSATEAHFDTTTPFAAVVIALMGTVAQMELEAIKERIRSAVHFNIRAGKYRGSLPPWGYLPARVDGEWRLVPDPVQRERILEVYHRVVDKHEPLHLVAHDLNRRGVLSPKDYFAQLRGREPRGRKWSATALKRSMISVAMLGYATLDGKTVSDDDGAPLVRAEPILTREQQEALRAELAKTSRAKPAVSTPSLLLRVLFCAVCGEPAYKFVGGGRKHPRYRCRSMGFPKHCGNGTVVMAEWDAFCEEQVLNLLGDAERLEKVWVAGSDSAVELAEVNAELVDLTSLIGSPAYRAGSPQREALDARIAALAARQEELEGLEARPSGWVWRETGQRFGDWWREQNTAAKNTWLRSMNIRLTFDVRGGLTRTIDFGELQEYEQRLRLGGVVERLHTGMS

SEQ ID NO: 10019 - protein, 500 aa, synthetic construct
MRALVVIRLSRVTDTTTSPERQLESCQQLCAQRGWDVVGVAEDLDVSGAVDPFDRKRRPNLARWLAFEEQPFDVIVAYRVDRLTRSTRHLQQLVHWAEDHKKLVVSATEAHFDTTTPFAAVVIALMGTVAQMELEAIKERNRSAAHFNIRAGKYRGSLPPWGYLPTRVDGEWRLAPDPVQRERILEVYHRVVDNHEPLHLVAHDLNRRGVLSPKDYFAQLQGREPRGRKWSATALKRSMISEAMLGYATLNGKTVRDDDGAPLVRAEPILTREQLEALRAELVKASRAKPAVSTPSLLLRVLFCAVCGEPAYKFAGGGRKHPRYRCRSMGFPKHCGNGTVVMAEWDAFCEEQVLNLLGDAERLEKVWVAGSDSAVELAEVNAELVDLTSLIGSPAYRAGSPQREALDARIAALAARQEELKGLGARPSGWEWRETGQRFGDWWREQDTAARNTWLRLMNVRLTFDVRGGLTRTIDFGDLREYEQHLRLGSVVERLHTGMS

SEQ ID NO: 10020 - protein, 500 aa, synthetic construct
MRALVVIRLSRVTDATTSPERQLESCQQHCAQRGWDVVGVAEDLDVSGAVDPFDRKRRPNLARWLAFEEQPFDVIVAYRVDRLTRSVRHLQQLVHWAEDHKKLVVSATEAHFDTTTPFAAVVIALMGTVAQMELEAIKERNRSAAHFNIRAGKYRGSLPPWGYLPTRVDGEWRLVPDSVQRERILEVYHRVVDNHEPLHLVAHDLNRRGVLSPKDYFAQLRGREPQGRKWSATALKRSMTSEAMLGYATLNGKTVRDDDGAPLVRAEPILTREQLEALRAELVKTSRAKPAVSIPSLLLRVLFCAVCGEPAYKFAGGGRKHPRYRCRSTGFPKHCGNGTVVMAEWDAFCEEQVLNLVGDAERLEKVWVAGSDSAAELAEVNAELVDLTCLIGSPAYRVGSPQREALDARIAALAARQEELEGLEARPSGWEWRETGQRFGDWWREQDTAAKNAWLRSMNVRLTFDVRGGLTRTIDFGELQEYEQHLRLGSVVERLHTGMS

SEQ ID NO: 10021 - protein, 500 aa, synthetic construct
MRALVVVRLSRVTDATTSPERQLESCQQLCAQRGWDVVGVAEDLDVSGAVDPFDRKRRPNLARWLAFEEQPFDVIVAYRVDRLTRSTRHLQQLVRWAEDHKKLVVSATEAHFDTTSPFAAVVIALMGTVAQMELEAIKERIRSAVHFNIRAGKYRGSLPPWGYLPTRVDGEWRLVPDPVQRERILEVYHRVVDNHEPLHLVAHDLNRRGVLSPKDYFAQLRGREPRGRKWSATALKRSMISVAMLGYATLNGKIVRDDDGAPLVRAEPILTREQLEALRAELVKTSRAKPAVSTPSLLLRVLFCAVCGEPAYKFVGGGRKHPRYRCRSMGFPKHCGNGTVVMAEWDAFCEEQVLDLLGDTERLEKVWVAGSDSAVELAEVNAELVDLTSLIGSPAYLAGSPQREALDARIAALAARQEELEGLEARPSGWEWRETGQCFGDWWREQDTAAKNTWLRSMNVRLTFDVRGGLTRTIDFGDLQEYGQHLRLGSVVERLHPGMS

SEQ ID NO: 10022 - protein, 500 aa, synthetic construct
MRALVVIRLSRVTDATTSPVRQLESCQQLCAQRGWDVVGVAEDLDVSGAVDPFDRKRRPNLARWLAFEEQPFDAIVAYRVDRLTRSVRHLQQLVRWAEDHKKLVVSATEAHFDTTTPFAAVVIALMGTVAQMELEAIKERIRSAVHFNIRAGKYRGSLPPWGYLPTRVDGEWRLVPDPVQRERILEVYHRVVDNHEPLHLVAHDLNRRGVLSPKDYFAQLRGREPQGRKWSATALRRSMTSEAMLGYATLNGKTVRDDNGAPLVRAEPILTREQQEALRAELVKTSRAKPAVSTPSLLLHVLFCAVCGEPAYKFVGGGRKHPRYRCRSMGSPKHCGNGTVVMAEWDAFCEEQVLNLLGDAERLEKVWVTGSDSAVELAEVNAELVDLTSLIGSPAYRAGSPQREALDARIAALAARQEELEGLEARPSGWEWRETGQRFGDWWRKQDTAAKNTWLRSMNVRLTFDVRGGLTRTIDFGDLQEYEQHLRLGSVVERLHTGMS

SEQ ID NO: 10023 - protein, 500 aa, synthetic construct
MRALVVIRLSRVTDATTSPERQLESCQQLCAQRGWDVVGVAEDLDVSGAVDPFDRKRRPNLARWLAFEEQPFDVIVAYRVDRLTRSVRHLQQLVRWAEDHKKLVVSATEAHFDMTTPFAAVVIALMGTVAQMELEAIKERIRSAVHFNIRAGKYRGSLPPWGYLPTRVDGEWRLVPDPVQRERILEVYHRVVDNHEPLHLVAHDLNRRGVLSPKDYFAQLRGREPQGRKWSATALKRSMTSGAMLGYATLNGKTVRDDDGAPLVRAEPILTREQQEALRAELAKTSRAKPAVSTPSLLLRVLFCAVCGEPAYKFVGGGRKHPRYRCRSMGFPEHCGNGTVVMAEWDAFCEEQVLNLLGDAERLEKVWVAGSDPAVELAEVNAELVDLTSLIGSPAYRAGSPQREALDARIAALAARQEELEGLEARPSGWEWRETGQRFGDWWREQDTAAKNTWLRSMNVRLAFDVRGGLTRTIDFGDLQEYEQHLRLGSVAERLHTGTS

SEQ ID NO: 10024 - protein, 500 aa, synthetic construct
MRALVVIRLSRVTDATTSPERQLESCQQLCAQRGWDVVGVAEDLDVSGAVDPFDRKRRPNLARWLAFEEQPFDVIVAYRVDRLTRSTRHLQQLVHWAEDHKKLVVSATEAHFDTTTPFAAVVIALMGTVAQMELEAIKERNRSAAHFNIRAGKYRGSLPPWGYLPTRVDGEWRLVPDPVQRERILEVYHRVVDNHEPLHLVAHDLNRRGVLSPKDYFAQLRGREPQGRKWSATALKRSMTSEAMLGYATLNGKTVRGDDGAPLVRAEPILTRGQLEALRAELVKTSRAKPAVSTPSLLLRVLFCAVCGEPAYKFAGGGRKHPRYRCRSMGFPKHCGNGTVVMAEWDAFCEEQVLNLLGGTEHLEKVWVAGSDSAVELAEVNAELVDLTNLIGSPAYRAGSPQREALDARIAALTARQEELEGLEARPSGWEWHGTGQRFGDWWREQDTAAKNTWLRSMNIRLTFDVRGGLTRTIDLGSLQEYEQYLRLGSVVERLHTGMS

SEQ ID NO: 10025 - protein, 500 aa, synthetic construct
MRALVVIRLSRVTDATTSPERQLESCQQLCAQRGWDVVGVAEDLDVSGAVDPFDRKRRPNLARWLAFEEQPFDVIVAYRVDRLTRSTRHLQQLVHWAEDHKKLVVSATEAHFDTTTPFAAVVIALMGTVAQMELEAIKERNRSAAHFNIRAGKYRGSLPPWGYLPTRVDGEWRLAPDPVQRERILEVYHRVVDNHEPLHLVAHDLNRRGVLSPKDYFAQLQGREPQGRKWSATALKRSMISEAMLGYATLNGKTVRDDDGAPLVRAEPILTREQLEALRAELVKTSRAKPAVSTPSLLLRVLFCAVCGEPAYKFAGGGRKHPRYRCRSMGFPKHCGNGTVAMAEWDAFCEEQVLDLLGDMERLEKVWAAGSDSAVELAEVNAELVDLTSLIGSPTYRAGSPQREALDARIAALAARQEELEGLEARPSGWEWRETGQRFGDWWREQDTAAKNTWLRSMNVRLTFDVRGGLTRTIDFGGLQEYEQHLRLGSVAKRLHTGMS

SEQ ID NO: 10026 - protein, 500 aa, synthetic construct
MRALVVIRLSRVTDATTSPERQLESCQQLCAQRGWDVVGVAEDLDVSGAVDPFDRKRRPNLARWLAFEEQPFDVIVAYRVDRLTRSTRHLQQLVHWAEDHKKLVVSATEAHFDTTTPFAAVVIALMGTVAQMELEAIKERNRSAAHFNIRAGKYRGSLPPWGYLPTRVDGEWRLVPDPVQRERILEVYHRVVVNHEPLHLVAHDLNRRGVLSPKDYFAQLQGREPRGRKWSATALKRSMTSEAMLGYATLNGKTVRDDDGAPLVRAEPILTREQLEALRAELVKTSRAKPAVSTPSLLLRVLFCAVCGEPAYKFAGGGRKHPRYRCRSMGFPKHCGNGTVAMAEWDAFCEEQVLDLLGDAERLEKVWVAGSDSAVELAEVNAELVDLTSLIGSPAYRAGSPQREALDARIAALAARQEELEGLEARPSGWEWRGTGQRFGDWWREQDTAAKNTWLRSMNVRLTFDVRGGLTRTIDFGDLQEYEQHLRLGGVVERLHTGMS

SEQ ID NO: 10027 - protein, 500 aa, synthetic construct
MRVLVVIRLSRVTDATTSPERQLESCQQLCAQRGWDVVGVAEDLDVSGAVDPFDRKRRPNLARWLAFERQPFDVIVAHRVDRLTRSTRHLQQLVHWAEDHKKLVVSATEAHFDTTTPFAAVVIALMGTVAQMELEAIKERIRSATHFNIRAGKYRGSLPPWGYLPARVDGEWRLVPDPVQRERILEVYHRVVDNHEPLHLVAHDLNRRGVLSPKDYFAQLRGREPQGRKWSATALKRSMTSVAMLGYATLNGKTVRDDDGAPLVRAEPILTREQQEALRAELVKTSRAKPAVSTPSLLLRVLFCAVCGEPAYKFAGGGRKHSRYRCRSMGFPKHCGNGTVVVAEWDAFCEEQVLNLLGDAERLEKVWVAGSDSAVELAEVNAELVDLTSLIGSPAYRAGSPQREALEARIAALAARQEELEGLEARPSGWEWRETGQRFGDWWREQDTAAKNTWLRSMNIRLTFDARGGLTRTIDFGELQEYEQHLRLGSVAERLHTGMS

SEQ ID NO: 10028 - protein, 500 aa, synthetic construct
MRALVAIRLSRVTDATTSPERQLESCQQLCAQRGWDVVGIAEDLDVSGAVDPFDRKRRPNLARWLAFEEQPFDVIVAYRVDRLTRSTRHLQQLVHWAEDHEKLVVSATEAHFDTTTPFAAVVIALMGTVAQMELEAIKERNRSAAHFNIRAGKYRGSLPPWGYLPTRVDGEWRLVPDPVQRERILEVYHRVVDNHEPLHLVAHDLNRRGVLSPKDYFAQLQGREPQGRKWSATALKRSMISEAMLGYATLNGKTVRDDDGAPLVRAEPILTRGQLEALRAELVKTSRAKPAVSTPSLLLRVLFCAVCGEPAYKFAGGGRKHPRYRCRSMGFPKHCGNGTVAMAEWDAFCEEQVLNLLGDAERLERVWVAGSDSAVELAEVNAELVDLTSLIGSPAYRAGSPQREALDARIAALAARQGELEGLEARPPGWEWRETGQRFGDWWREQDTAAKNTWLRSMNVRLTFDVRGGLTRTIDFGDLQEYEQHLRLGSVAERLHTGMS

SEQ ID NO: 10029 - protein, 500 aa, synthetic construct
MRALVVIRLSRVTDATTSPERQLESCQQLCAQRGWDVVGVAEDLDVSGAVDPFDRKRRPNLARWLAFEEQPFDVIVAYRVDRLTRSTRHLQQLVRWAEDHKKLVVSATEAHFDTTTPFAAVVIALMGTVAQMELEAIKERIRSAVHFNIRAGKYRGSLPPWGYLPARVDGEWRLVPDPVQRERILEVYRRVVNNHEPLHLVAHDLNRRGVLSPKDYFAQLQGREPQGRKWSATALKRSMTSVAMLGYATLNGTTVRDDDGAPLVRAEPILTREQQEALRAELAKTSRAKPAVSTPSLLLRVLFCAVCGEPAYKFVGGGRKHPRYRCRSMGSPEHCGNGTVVMAELDTFCEEQVLNLLGDAERLEKVWVAGSDSAVELAEVNAELVDLTSLIGSPVYRAGSPQREALDARIAALAARQEELEGLEARPSGWEWRGTGQRLGDWWREQDTAAKNTWLRSMNVRLTFDVRGGLTRTIDFGELQEYEQHLRSGSVVERLHTGMS

SEQ ID NO: 10030 - protein, 500 aa, synthetic construct
MRALVVIRLSRVTDATTSPERQLESCQQLCAQRGWDVVGVAEDLDVSGAVDPFDRKRRPNLARWLAFEEQPFDVIVTYRVDRLTRSTRHLQQLVHWAEDHKKLVVSATEAHFDTTTPFAAVVIALMGTVAQMELEAIKERNRSAAHFNIRAGKYRGSLPPWGYLPARVDGVWRLVPDPVQRERILEVYHRVVDNHEPLHLVAHDLNRRGVLSPKDYFAQLQGREPQGRKWSATALKRSMTSEAMLGYATLNGKTVRDDDGAPLVRAEPILTRGQLEALRAELVRTSRAKPAVSTPSLLLRVLFCAVCGEPAYKFAGGGRKHPRYRCRSMGFPKHCGNGTAAVAEWDAFCEEQVLDLLGDAERLEKVWVAGSDSAVELAEVNAELVDLTSLIGSPAYRAGSPQREALDARIAALAARQEELEGLGARPPGWEWRETGQRFGDWWREQDTAAKNTWLRSMNVRLTFDVRGGLTRTIDFGDLQEYKQHLRLGSVVERLHTGMS

SEQ ID NO: 10031 - protein, 500 aa, synthetic construct
MRALIVIRLSRVTDATTSPERQLESCQQLCAQRGWDVVGVAEDLDVSGAVDPFDRKRRPNLARWLAFEEQPFDVIVAYRVDRLTRSVRHLQRLVHWAEDHKKLVVSATEAHFDTTTPFAAVVIALMGTVAQMELEAIKERIRSAAHFNIRAGKYRGSLPPWGYLPTRVDGEWRLVPDPVQRERILEVYHRVVDNHEPLHLVAHDLNRRGVLSPKDYFAQLQGREPRGRKWSATALKRSMISVAMLGYATLNGKIVRDDDGAPLVRAEPILTREQLEALRAELGKTSRAKPAVSTPSLLLRVLFCAVCGEPAYKFVGGGRKHPRYRCRSMGFPKHCGNGTVVMTEWDAFCEEQVLDLLGDVERLEKVWVAGSDSAVELAEVNAELVDLTSLIGSPAYRAGSPQREALDARIAALAARQGELEGLEARPSGWEWRGTGQRFGDWWRKQDTAAKNTWLRSMNVRLTFDIRGGLTRTIDFGELQEYEQHLRLGSVVKRLHTGMS

SEQ ID NO: 10032 - protein, 500 aa, synthetic construct
MRALVVIRLSRVTDATTSPERQLESCQQLCAQRGWDVVGVAEDLDVSGAVDPFDRKRRPNLARWLAFEEQPFDVIVAYRVDRLTRSVRHLQQLVHWAEDHKKLVVSATEAHFDMTTPFAAVVIALMGTVAQMELEAIKERNRSAAHFNIRAGKYRGSLPPWGYLPTRVDGEWRLVPDPAQRERILEVYHRVVDNHESLHLVAHDLNRRGVLSPKDYFAQLRGREPQGRKWSATALKRSMISEAMLGYATLNGKTVRDDDGAPLVRAEPILTREQLEALRAELVKTSRAKPAVSTPSLLLRVLFCAVCGEPAYKFAGGGRKHPRYRCRSMGYPKHCGNGTVAMAEWDAFCEEQVLGLLGDAERLEKVWVAGSDSAVELAGVNAELVDLTSLIGSPAYRAGSPQREALDVRIAALAARQEELEGLEARPSGWGWRETGQRFGDWWREQDTAAKNTWLRSMNVRLTFDARGGLTRTIDFGDLQEYVQHLRSGSVVERLHTGMS

SEQ ID NO: 10033 - protein, 500 aa, synthetic construct
MRALVVIRLSRVTDATTSPERQLESCQQLCAQRGWDVVGVAEDLNVSGAVDPFDRKRRPNLARWLAFEEQPFDVIVTYRIDRLTRSIRHLQQLVHWAEDHKKLVVSATEAHFDTTTPFAAVVIALMGTVAQMELEAIKERNRSAAHFNIRAGKYRGSLPPWGYLPTRVDGEWRLVPDPVQRERILEVYHRVVDNHEPLHLVAHDLNRRGVLSPKDYFAQLQGRKPQGRKWSATALKRSMISEAMLGYATLNGKTVRDDDGAPLVRAEPILTREQLGALRAELVKTSRAKPAVSTPSLLLRVLFCAVCGEPAYKFAGGGRKHPRYRCRSMGFPKHCGNGTVVMAEWDAFCEEQVLNLLGDAERLEKVWVAGSDSAVELAEVNAELVDLTSLIGSPAYRAGSPQREALDARIAALAARQEELEGSEARPSGWEWRGTGQRFGDWWREQDTAAKNTWLRSMNVRLTFDVRGGLTRTIDFGGLQEYEQHLRLGSVVERLHTGMS

SEQ ID NO: 10034 - protein, 500 aa, synthetic construct
MRALVVIRLSRVTDATTSPERQLESCQQLCAQRGWDVVGVAEDLDVSGAVDPFDRKRRPNLARWLAFEEQPFDVIVAYRVDRLTRSTRHLQQLVRWAEDHKKLVVSATEAHFDTTTPFAAVVIALMGTVAQMELEAIKERSRSAAHFNIRAGKYRGSLPPWGYLPTRVDGEWRLVPDPVQRERILEVYHRVVDNHEPLHLVAHDLNRRGVLSPKDYFAQLRGREPRGRKWSATALKRSMTSVAMLGYATLNGKTVRDDDGAPLVRAEPILTREQLEAVRAELAKTSRAKPAVSTPSLLLRVLFCAVCGEPAYKFVGGGRKHPRYRCRSMGFPEHCGNGTVAMAEWDAFCEEQVLNLLGDAERLEKVWVVGSDSAVELAEVNAELVDLTSLIGSPAYRAGSPQREALDARIVALAARQEELEGLEARPSGWEWRETGQRFGDWWREQDTAAKNTWLRSMNVRLTFDVRGGLTRTIDFGDLQEYERHLRLGSVAERLRTGMS

SEQ ID NO: 10035 - protein, 500 aa, synthetic construct
MRALVVIRLSRVTDATTSPERQLESCQQLCAQRGWDVVGVAEDLDVSGAVDPFDRKRRPNLARWLAFEEQPFDVIVAYRVDRLTRSTRHLQQLVHWAEDHKKLVVSATEAHFDTTTPFAAVVIALMGTVAQMELEAIKERNRSAAHFNIRAGKYRGSLPPWGYLPTRVDGEWRLVPDPVQRERILEVYHRVVDNHEPLHLVAHDLNRRGVLSPKDYFAQLRGREPQGREWSATALKRSMTSEAMLGYATLNGKTVRDDDGAPLVRAEPILTREQLEAIRAELVKTSRAKPAMSTPPLLLRVLFCAVCGEPAYKFAGGGRKHPRYRCRSMGSPKHCGNGTVVMAEWDAFCEEQVLDLLGDTERLERVWVAGSDSAVELAEVNAELVDLTSLIGSPAYCAGSPQREALDARIAALAARQEELEGLEARPSGWGWRETGQRFGDWWREQDTAAKNTWLRSMNVRLTFDVRGGLTRTIDFGDLQEYGQHLRSGSVVERLHTGMS

SEQ ID NO: 10036 - protein, 500 aa, synthetic construct
MRALVVIRLSRVTDATTSPERQLASCQQLCAQRGWDVVGVAEDLDVSGAVDPFDRKRRPNLARWLAFEEQPFDVIVAYRVDRLTRSVRHLQQLVRWAEDHKKLVVSATEAHFDTTTPFAAVVIALMGTVAQMELEAIKERIRSAMHFNIRAGKYRGSLPPWGYLPTRVDGEWRLVPDPVQRERILEVYHRVVDNHEPLHLVAHDLNRRGVLSPKDYFAQLQGREPQGRKWSATALKRSMTSVAMLGYATLNGKTVRGDDGAPLVRAEPILTREQQEALRAELVKTSRAKPAVSTPSLLLRVLFCAACGEPAYKFVGGGRKHPRYRCRSMGFPEHCGNGTVVMAEWDAFCEKQVLDLLGGVERLEKVWVAGSDSAVELAEVNAELVDLTSLIGSPAYRAGSPQREALDVRIAALAARQEELGGLEARPSGWEWRGTGQRFGDWWREQDTAAKNTWLRSMNVRLTFDVRGGLTRTIDFGDLQKYEQHLRSGSVVKRLHTGMS

SEQ ID NO: 10037 - protein, 500 aa, synthetic construct
MRALVVIRLSRVTDATTSPERQLESCQQLCALRGWDVVGVAEDLDVSGAVDPFDRKRRPNLARWLAFEEQPFDVIVAYRVDRLTRSTRHLQQLVHWAEDHKKLVVSATEAHFDTTTPFAAVVIALMGTVAQMELEAIKERIRSAVRFNIRAGKYRGSLPPWGYLPTRVDGEWRLVPDPVQRERVLEVYHRVVDNHEPLHLVAHDLNRRGVLSPKDYFAQLQGREPQGRKWSATALKRSMISGAMLGYATLNGKIVRDDDGAPLVRAEPILTREQQEALRAELAKTSRAKPAVSTPSLLLRVLFCAVCGEPAYKFVGGGRKHPRYRCRSMGFPEHCGNGTVVMAEWDAFCEEQVLDLLGDAERLEKVWVAGSDSAVELAEVNAELVDLTSLIGSPAYRAGSPQREALDARIAALAARQEELEGLEARPSGWEWRETGQRFRDWWREQDTASKNTWLRSMNVRLTFDVRGGLTRTVDFGDLQEYEQHLRLGSVVERLHTGMS

SEQ ID NO: 10038 - protein, 500 aa, synthetic construct
MRALIVIRLSRVTDATTSPERQLESCQQLCAQRGWDVVGVAEDLDVSGAVDPFDRKRRPNLARWLAFEEQPFDVIVAYRVDRLTRSTRHLQQLVHWAEDHKKLVVSATEAHFDTTTPFAAVVIALMGTVAQMELEAIKERNRSAAHFNIRAGKYRGSLPPWGYLPTRVDGEWRLAPDPVQRERILEVYHRVVDNHEPLHLVAHDLNRRGVLSPKDYFAQLQGREPQGRKWSATALKRSMISEAMLGYATLNGKTVRDDDGAPLVRAEPILTREQLEALRAELVRAPRAKPAVSTPSLLLRVLFCAVCGEPAYKFAGGGRKHPRYRCRSMGFPKHCGNGTVVMAEWDAFCEEQVLDLLGDAERLEKVWVAGSDSAVELAEVNAELVDLTSLISSPAYRAGSPQREALDARIAALAARQEELEGLEARPSGWEWRGTGQRFGDWWREQDTAAKNTWLRSMNVRLTFDVRGGLTRTIDFGELQEYEQHLRLGSVVERLHTGMS

SEQ ID NO: 10039 - protein, 500 aa, synthetic construct
MRALVVIRLSRVTDATTSPERQLESCQQLCAQRGWDVVGVAEDLDVSGAVDPFDRKRRPNFARWLAFEEQPFDVIVAYRVDRLTRSARHLQQLVHWAGDHKKLVVSATEAHFDTTTPFAAVVIALMGTVAQMELEAIKERIRSAVHFNIRAGKYRGSLPPWGYLPTRVDGEWRLVPDPVQRERILEVYHRVVDNHEPLHLVAHDLNRRGVLSPKDYFAQLQGREPRGRKWSATALKRSMISVAMLGYATLNGKIVRDDDGVPLVRAEPILTREQQEALRAELVKTSRAKPAVSTPSLLLRVLFCAVCGEPAYKFVGGGRKHPRYRCRSMGFPEHCGNGTVVMAEWDAFCEEQVLDLLGDAEHLEKVWVAGSDSAVELAEVNAELMDLTSLIGSPAYRAGSPQREALDARIAALAARQEELEGLEARPSGWEWRETGQRFGDWWREQDTAAKNTWLRSMNVRLTFDVRGGLTRTIDFGDLREYEQHLRLGSVVKRLYTGLS

SEQ ID NO: 10040 - protein, 500 aa, synthetic construct
MRALVVIRLSRVSDATTSPERQLESCQQLCAQRGWDVVGVAEDLDVSGAVDPFDRKRRPNLARWLAFEEQPYDVIVAYRVDRLTRSTRHLQQLVHWAEDHKKLVVSATEAHFDTTTPFAAVVIALMGTVAQMELEAIKERNRSAAHFNIRAGKYRGSLPPWGYLPTRVDGEWRLVPDPVQRERILEVYHRVVDNHEPLHLVAHDLNRRGVLSPKDYFAQLQGREPQGRKWSATALKRSMISEAMLGYATLNGKTVRDDDGAPLVRAEPILTREQLEALRAELVKTSRAKPAVSTPSLLLRVLFCAVCGEPAYKFAGGGRKHPRYRCRSMGFPKHCGNGTVVMAEWDALCEEQVLDLLGDAERLEKVWVAGSDSAVELAEVNAELMDLTSLIGSPAYRAGSPQREALDARIAALAARQEELEGLEARPSGWEWRGTGQRFGDWWREQDTAAKNTWLRSMNVRLTFDVRGGLTRTIDFGDLHEYEQHLRLGSVVERLHTGMS

SEQ ID NO: 10041 - protein, 500 aa, synthetic construct
MRALVVIRLSRVTDATTSPERQLESCQQLCAQRGWDVVGVAEDLDVSGAVNPFDRKRRPNLARWLAFEEQPFDVIVAYRVDRLTRSTRHLQQLVHWAEDHKKLVVSATEAHFDTTTPFAAVVIALMGTVAQMELEAIKERNRSAAHFNIRAGKYRGSLPPWGYLPARVDGEWRLVPDPVQRERILEVYHRVVDNHEPLHLVAHDLNRRGVLSPKDYFAQLQGREPQGRKWSATALKRSMISEAMLGYATLNGKTVRDDDGAPLVRAEPVLTRGQLEALRAELAKTSRAKPAVSTPSLLLRVLFCAVCGEPAYKFAGGGRKHPRYRCRSMGFPKHCGNGTVVMAEWDAFCEEQVLNLLGDAERLEKVWVAGSDSAVELAEVNAELVDLTSLIGSPAYRAGSPQREALDARIAALAARQEELEGLEARPSGWEWRGTGQRFGDWWREQDTTAKNTWLRSMNVRLTFDVRGGLTRTVDFGGLQEYEQHLRLGGVVERLHTGMS

SEQ ID NO: 10042 - protein, 500 aa, synthetic construct
MRALVVIRLSRVTDATTSPERQLASCQQLCAQRGWDVAGVAEDLDVSGAVDPFDRKRRPNLARWLAFEEQPFDVIVAYRVDRLTRSTRHLQQLVRWAEDHRKLVVSATEAHFDTTTPFAAVVIALMGTVAQMELEAIKERSRSAAHFNIRAGKYRGSLPPWGYLPARVDGEWRLVPDPVQRERIIEVYHRVVDNHEPLHLVAYDLNRRGVLSPKDYFAQLQGREPQGRKWSATALKRSMTSVAMLGYATLNGKTVRDDDGAPLVRAEPILTREQQEALRAELAKTSRAKPAVPTPSLLLRVLFCAVCGEPAYKFTGGGRKHPRYRCRSMGSPEHCGNGTVVMAEWDAFCEEQVLNLFGDAERLEKVWVAGSDSAVELAEVNAELVDLTSLIGSPAYRAGSPQREALDARIAALAARQEELEGLEARPSGWEWRETGQRFGDWWREQDTAAKNTWLRSMNIRLTFDVRGGLTRTIDFGDLREYEQHLRLGSVVERLRTGMS

SEQ ID NO: 10043 - protein, 500 aa, synthetic construct
MRALVVIRLSRVTDATTSPGRQLESCQQLCAQRGWDVVGVAEDLDVSGAVDPFDRKRRPNLARWLAFEERPFDVIVAYRVDRLTRSTRHLQQLVHWAEDHKKLVVSATEAHFDTTTPFAAVVIALMGTVAQMELEAIKERNRSAAHFNIRAGKYRGSLPPWGYLPTRVDGEWRLVPDPVQRERILEVYHRVVDSHEPLHWVAHDLNRRGVLSPKDYFAQLQGREPQGRKWSATALKRSMISEAMLGYATLNGKTVRDDDGAPLVRAEPILTREQLEALRAELVKTSRAKPAVSTPSLLLRVLFCAVCGEPAYKFAGGGRKHPRYRCRSMGFPKHCGNGTVAMAEWDAFCEEQVLDLLGDAERLEKVWVAGSDSAVELAEVNAELVDLTSLIGSPAYRAGSPQREALDARIAALAARQEELEGLEARPSGWGWRETGQRFGDWWREQDTAAKNTWLRSMNVRLTFDVRGGLTRTIDFGKLQECEQHLRLGSVVERLHTGMS

SEQ ID NO: 10044 - protein, 500 aa, synthetic construct
MRALVVIRLSRVTDATTSPERQLESCQQLCAQRGWDVVGVAEDLDVSGAVDPFDRKRRPNLARWLAFEEQPFDVIVAYRVDRLARSTRHLQQLVHWAEDHKKLVVSATEAHFDTTTPFAAVVIALMGTVAQMELEAIKERNRSAAHFNIRAGKYRGSLPPWGYLPTRVGGEWRLVPDPVQRERILEVYHRVVDNHEPLHLVAHDLNRRGVLSPKDYFAQLQGREPQGRKWSATALKRSMTSEAMLGYATLNGKTVRDDDGAPLVRAEPILTREQLEALRAELVKTSRAKPAVSTPSLLLRVLFCAVCGEPAYKFAGGGRKHPRYRCRSMGFPKHCGNGTVAMAEWDAFCEEQVLGLLGDAERLEEVWVAGSDSAVELAEVNAELVDLTSLIGSPAYRTGSPQREALDARIAALAARQEELEGLEARPSGWEWRETGQRFGDWWREQDTAAKNAWLRSMNVRLTFDVRGGLTRTIDFGDLQEYEQHLRLGSVVERSHTGMS

SEQ ID NO: 10045 - protein, 500 aa, synthetic construct
MRALVVIRLSRVTDATTSPERQLESCRQLCAQRGWDVVGVAEDLDVSGAVDPFDRKRRPNLARWLAFEEQPFDTIVAYRVDRLTRSVRHLQQLVHWAEDHKKLVVSATEAHFDTTTPFAAVVIALMGTVAQMELEAIKERNRSAAHFNIRAGKYRGSLPPWGYLPTRVDGEWRLVPDPVQRERILEVYRRVVDNHEPLHLVAHDLNRRGVLSPKDYFAQLQGREPQGRKWSATALKRSMISEAMLGYVTLNGETVRDDDGAPLVRAEPILTRGQLEALRAELVKTSRAKPAVSTPSLLLRVLFCAVCGEPAYKFAGGGRKHPRYRCRSMGFPKHCGNGTVVMAEWDAFCEEQVLDLLGDAERLEKVWVAGSDSAVELAEVNAELVDLTSLIGSPAYRTGSPQREAIDARIAALAARQEELEGLGARPSGWEWRETGQRFGDWWREQDTAAKNTWLRSMNIRLTFDVRGGLTRTIDFGDLQEYEQHLRLGSVVERLHTGMS

SEQ ID NO: 10046 - protein, 500 aa, synthetic construct
MRALVVIRLSRVTDATTSPERQLESCQQLCAQRGWDVVGVAEDLDVSGAVDPFDRMRRPNLARWLAFEEQPFDVIVAYRVDRLTRSTRHLQQLVHWAEDHKKLVVSATEAHFDTTTPFAAVVIALMGTVAQMELEAIKERIRSAVHFNIRAGKYRGSLPPWGYLPTRVDGEWRLVPDPVQRERILEVYHRVVDNHEPLHIVAHDLNRRGVLSPKDYFAQLRGREPQGRKWSATALRRSMTSAAMLGYATLNGKTVRDDDGAPLVRAEPILTREQQEALRAELAKTSRAKPAVSTPSLLLRVLFCAVCGEPAYKFVGGGRKHPRYRCRSMGYPEHCGNGTVVMAEWDAFCEEQVLNLLGDAERLEKVWVVGSDSAVELAEVNAELVDLTSLIGSPAYRAGSPQREALDARIAALAARQEELEGLEARPSGWAWRETGQRFGDWWREQDTAAKNTWLRSMNVRLTFDVRGGLTRTIDFGDLQEYEQHLRLGGVVERLHTGMS

SEQ ID NO: 10047 - protein, 500 aa, synthetic construct
MRALVVIRLSRVTDATTSPERQLESCQQLCAQRGWDVVGVAEDLDVSGAVDPFDRKRRPNLARWLAFEEQPFDAIVAYRVDRLARSIRHLQQLVHWAEDHKKLVVSATEAHFDTTTPFAAVVIALMGTVAQMELEAIKERNRSAAHFNIRAGKYRGSLPPWGYLPTRVDGEWRLVPDPVQRERILEVYRRVVDNHEPLHLVAHDLNRRGVLSPKDYFAQLRGREPQGRKWSATALKRSMISEAMLGYATLNGKTVRDDDGAPLVRAEPILTRGQLEALRAELAKTSRAKPAVSTPSLLLRVLFCAVCGEPAYKFAGGGRKHPRYRCRSMGFPKHCGNGTVVMAEWDAFCEEQVLGLLGDAERLEKVWVAGSDSAVELAEVTAELVDLTSLIGSPAYRAGSPQREALDARIAALAARQGELESLEARPSGWEWRETGQRFGDWWREQDTAAKNTWLRSMNVRLTFDVRGGLTRTIDFGDLQEYEQHLRLGSVVERLHTGMS

SEQ ID NO: 10048 - protein, 500 aa, synthetic construct
MRALVVIRLSRVTDATTSPERQLASCQQLCAQRGWDVVGVAEDLDVSGAVDPFDRKRRPNLARWLAFEEQPFDVIVAYRVDRLTRSTRHLQQLVRWAEDHKKLVVSATEAHFDTTTPFAAVVIALMGTVAQMELEAIKERIRSAVHFNIRAGKYRGSLPPWGYLPTRVDGEWRLVPDPVQCERILEVYHRVVDNHEPLHLVAHDLNRRGVLSPKDYFAQLQGREPQGRKWSATALKRSMISVAMLGYATLNGKIVRDDDGAPLVRAEPILTREQQGALRAELAKTSRAKPAVSTPSLLLRVLFCAVCGEPAYKFVGGGRKHPRYRCRSMGSPKHCGNGTVVMTEWDAFCEEQVLDLLGDAERLEKVWVAGSDSAVELAEVNAELVDLTSLIGSPAYRAGSPQREALDARIAALAARQEELEGLKARPSGWEWRGTGQRLGDWWREQDTAAKNTWLRSMNVRLTFDVRGGPTRTIDFGDLQEYEQQLRLGSVAERLHAGMP

SEQ ID NO: 10049 - protein, 500 aa, synthetic construct
MRALVAIRLSRVTDATTSPERQLESCRQLCAQRGWDVVGVAEDLDVSGAVDPFDRKRRPNLARWLAFEEQPFDVIVAYRVDRLTRSTRHLQQLVHWAEDHKKLVVSATEAHFDTTTPFAAVVIALMGTVAQMELEAIKERSRSAAHFNIRAGKYRGSLPPWGYLPTRVDGEWRLVPDPVQRERILEVYHRVVDNHEPLHLVAHDLNRRGVLSPKDYFAQLRGREPQGREWSATALKRSMTSVAMLGYATLNGKTVRDDDGAPLVRAEPILTRGQLEALRAELAKTSRAKPAVSTPSLLLRVLFCAVCGEPAYKFVGGGRKHPRYRCRSMGFPEHCGNGTVVMAEWDAFCEEQVLNLLGDAERLEKVWVAGSDSAVELAEVNAELVDLTSLIGSPVYRAGSPQREALDARIAALAARQEELEGLEARPSGWEWHETGQRFGDWWREQDTAAKNTWLRSMNVRLTFDVRGGLTRTIDFGDLREYEQHLRLSSVVERSHTGMS

SEQ ID NO: 10050 - protein, 500 aa, synthetic construct
MRALVVIRLSRVTEATTSPERQLESCQQLCAQRGWDVVGVAEDLNVSGAVDPFDRKRRPNLARWLAFEEQPFDAIVAYRVDRLARSIRHLQQLVHWAEDHKKLVVSATEAHFDTTTPFAAVVIALMGTVAQMELEAIKERNRSAAHFNIRAGKYRGSLPPWGYLPTRVDGEWRLVPDPVQRERILEVYHRVVDNHEPLHLVAHDLNRRGVLSPKDYFAQLQGREPQGCEWSATALKRSMISEAMLGYATLNGKTVRDDDGAPLVRAEPILTREQLEALRAVLVRTSRAKPAVSTPSLLLRVLFCAVCGGPAYKFAGGGRKHPRYRCRSMGFPKHCGNGTVVMAEWDAICEEQVLNLLGDAERLEKVWVAGSDSAVELAEVNAELVDLTSLIGSPAYRAGSPQREALDARIAALAARQEELGGLGARPSGWEWRGTGQRFGDWWREQDTAAKNAWLRSMNVRLTFDVRGGLTRTIDFGDLQEYEQHLRLGSVDERLRTGMS

SEQ ID NO: 10051 - protein, 500 aa, synthetic construct
MRALVVIRLSRVTDATTSPERQLESCQQLCAQRGWDVVGVAEDLDVSGAVDPFDRKRRPNLARWLAFEEQPFDVIVAYRVDRLTRSTRHLQQLVRWAEDHKKLVVSATEAHFDTTTPFAAVVIALMGTVAQMELEAIKERIRSAVHFNIRAGKYRGSLPPWGYLPTRVDGEWRLAPDPVQRERILEVYHRVVDNHEPLHLVAHDLNRRGVLSPKDYFAQLQGREPQGRKWSATALKRSMTSVAMLGYATLNGKIVRDNDGAPLVRAEPILTREQLEALRAELAKTSRAEPAVSTPSLLLRVLFCAVCGEPAYKFAGGGRKHPRYRCRSMGFPKHCGNGTVVMAEWDAFCEKQVLDLLGDAERLEKVWVAGSDSGVELAEVNAELVDLTSLIGSPAYRAGSPQREALDARIAALAARQGELEGLEARPSGWEWRETGQRFGDWWREQDTAAKNAWLRSMNVRLTFDVRGGLTRTIDFGDLQEYERHLRLGSVVERLHTGMP

SEQ ID NO: 10052 - protein, 500 aa, synthetic construct
MRALVVIRLSRVTDATTSPERQLESCQQLCAQRGWDVVGVAEDLDVSGAVDPFDRKRRPNLARWLAFEEQPFDAIVAYRVDRLTRSVRHLQQLVHWAEDHKKLVVSATEAHFDTTTPFAAVVIALMGTVAQMELEAIKERNRSAAHFNIRAGKYRGSLPPWGYLPTRVDGEWRLVPDPVQRERILEVYRRVVDNHESLHLVAHDLNRRGVLSPKDYFAQLRGREPQGRKWSATALKRSMISEAMLGYATLSGKIVRDDDGAPLVRAEPILTREQLEALRAELVKTSRAKPAVSTPSLLLRVLFCAVCGEPAYKFAGGGRKHPRYRCRSMGFPKHCGNGTVVMAEWDTFCEEQVLDLLGDAERLEKVWVAGSDSAVELAEVNAELVDLTSLIGSPAYRAGSPQREALDARIAALAARQEELESLEARPSGWEWRETGQRFGDWWREQDTAAKNTWLRSMNVRLTFDARGGLTRTIDFGDLQEYEQHLRSGSVVERLHTGMS

SEQ ID NO: 10053 - protein, 500 aa, synthetic construct
MRALVVIRLSRVTDATTSPERQLESCQQHCAQRGWDVVGVAEDLDVSGAVDPFDRKRRPNLARWLAFEEQPFDVIVAYRVDRLTRSIRHLQQLVHWAEDHKKLVVSATEAHFDTTTPFAAIVIAVMGTVAQMELEAIKERNRSAAHFNIRAGKYRGSLPPWGYLPTRVDGEWRLAPDPVQRERILEVYHRVVDNHEPLHLVAHDLNRRGVLSPKDYFAQLRGREPQGRKWSATALKRSMISEAMLGYATLNGKTVRDDDGAPLVRAEPILTREQLEALRAELVKTSRAKPAVSTPSLLLRVLFCAVCGEPAYKFAGGGRKHPRYRCRSMGFPKHCGNGTVAMAEWDAFCEEQVLNLLGDAERLEKVWVAGSDSAVELAEVNAELVNLTSLIGSPAYRAGSQQREALDARIAALAARQEELECLEARPSGWEWRGTGQRFGDWWREQDTAAKNTWLRSMNVRLTFDVRGGLTRTIGFGDLQEYEQHLRLGSVVERLHTGMS

SEQ ID NO: 10054 - protein, 500 aa, synthetic construct
MRALVVIRLSRVTDATTSPERQLESCQQLCAQRGWDVVGVAEDLDVSGAVDPFDRKRRPNLARWLAFEEQPFDVIVAYRVDRLTRSTRHLQQLVHWAEDHKKLVVSATEAHFDTTTPFAAVVIALMGTVAQMELEAIKERIRSAVRFNIRAGKYRGSLPPWGYLPTRVDGEWRLVPDPVQRERILEVYHRVVDNHEPLHLVAHDLNRRGVLSPKDYFAQLRGREPRGRKWSATALRRSMTSEAMLGYATLNGKTVRDDDGAPLVRAEPILTREQLEVLRAELVKTSRVKPAVSTPSLLLRVLFCAVCGEPAYKFVGGGRKHPRYRCRSMGFPEHCGNGTVVMAEWDSFCEEQVLGLLGDAERLEKVWVTGSDSSVELAEVNAELVDLTSLIGSPAYRAGSPQREALDARIAALAARQEELEGLEARPSGWEWRGTGLRFGDWWREQDTAAKNTWLRSMNVRLTFDVRGGLTRTIDFGDLQEYEQHLRLGNVVERLHTGMS

SEQ ID NO: 10055 - protein, 500 aa, synthetic construct
MRALVVIRLSRVTDATTSPERQLESCQQLCAQRGWDVVGVAEDLDVSGAVDPFDRKRRPNLARWLAFEEQPFDVIVAYRVDRLTRSARHLQQLVHWAEDHKKLVVSATEAHFDTTTPFAAVVIALMGTVAQMELEAIKERNRSAAHFNIRAGKYRGSLPPWGYLPARVDGEWRLVPDPVQRERILEVYHRVVDNHEPLHLVAHDLNRRGVLSPKDYFAQLRGREPQGRKWSATALKRSMISEAMLGYATLNGKIVRDDDGAPLVRAEPILTRERLEALRAELVKTSRAEPAVSTPSLLLRVLFCAVCGEPAYKLAGGGRKHPRYRCRSMGFPKHCGNGTVAMAEWDAFCEEQVLDLLGDAERLEKVWVAGSDSAVELAEVNAELVDLTSLIGSPAYRAGSPQREALDARIAALAARQEELEGLEARPSGWEWRGTGQRFGDWWRELDTAAKNTWLRSMNVRLMFDVRGGLTRTIDFGDLQEYEQHLRLGSVVERLHTGMS

SEQ ID NO: 10056 - protein, 500 aa, synthetic construct
MRALVVIRLSRVTDATTSPERQLESCQQLCAQRGWDVVGVAEDLDVSGAVDPFDRKRRPSLARWLAFEEQPFDVIVAYRVDRLTRSTRHLQQLVHWAEDHKKLVVSATEAHFDTTTPFAAVVIALMGTVAQMELEAIKERNRSAAHFNIRAGKYRGSLPPWGYLPTRVDGEWRLAPDPVQRERILEVYHRVVDNHEPLHLVAHDLNRRGVLSPKDYFAQLQGREPQGRKWSATALKRSMISEAMLGYATLNGKTVRDDDGAPLVRAEPILTRGQLEALRAELVKTSRAKPAVSTPSLLLRVLFCAVCGEPAYKFAGGGRKHPRYRCRSMGFPKHCGNGTVAMAEWDAFCEEQVLDLLGDAERLEKVWVAGSDSAVELAEVNAELVDLTSLIGSPAYRAGSPQREALDARIAALAARQEELEGLEARPSGWEWRGTGQRFGDWWREQDTAAKNTWLRSMNVRLTFDVRGGLTRTVDFGGLQEYEQHLRLGSVVERLHTGIS

SEQ ID NO: 10057 - protein, 500 aa, synthetic construct
MRALVVIRLSRVTDATTSPERQLESCQQLCAQRGWDVVGVAEDLDVSGAVDPFDRKRRPSLARWLAFEEQPFDVIVAYRVDRLTRSVRHLQELVHWAEDHKKLVVSATEAHFDTTTPFAAVVIALMGTVAQMELEAIKERNRSAAHFNIRAGKYRGSLPPWGYLPTRVDGEWRLVPDPVQRERILEVYRRVVDNHEPLHLVAHDLNRRGVLSPKDYFAQLQGREPQGRKWSATALKRSMISEAMLGYATLNGKTVRDDDGAPLVRAEPILTREQQEALRAELVKTSRAKPAVSTPSLLLRVLFCAVCGEPAYKFAGGGRKHPRYRCRSMGFPKHCGNGTVAMAEWDAFCEEQVLELLGDAERLEKVWVAGSDSAVELAEVNAELVDLTSLIGSPAYRAGSPQREALDARIAALAARQGELEGLGARPSGWEWRETGQRFGDWWREQDTAAKNTWLRSMNVRLTFDVRGGLTRTIDFGVLQEYEQHLRLGSVVERLHTGVS

SEQ ID NO: 10058 - protein, 500 aa, synthetic construct
MRALVVIRLSRVTDATTSPERQLESCQQLCAQRGWDVVGVAEDLDVSGAVDPFDRKRRPNLARWLAFEEQPFDVIVAYRVDRLARSTRHLQQLVHWAEDHKKLVVSATEAHFDTTTPFAAVVIALMGTVAQMELEAIIERNRSAAHFNIRAGKYRGSLPPWGYLPTRVDGEWRLVPDPVQRERILEVYHRVVDNHEPLHSVAHDLNRRGVLSPKDYFAQLQGREPQGRKWSATALKRSMISGAMLGYATLNGKTVRDDDGVPLVRAEPILTREQLEALRAELVKTSRVKPAVSTPSLLLRVLFCAVCGEPAYKFAGGGRKHPRYRCRSMGFPKHCGNGTVAMAEWDAFCEEQVLNLLGDAERLEKVWVAGSDSAVELAEVNAELVDLTSLIGSPAYRAGSPQREALDARIAALAARQEELEGLETRPSGWEWRETGQRFGDWWRELDTAAKNTWLRSMNVRLTFDVRGGLTRTIDFGDLQEYEQHLRLGSVAERLHTGMS

SEQ ID NO: 10059 - protein, 500 aa, synthetic construct
MRALVVIRLSRVTDATTSPERQLESCQQLCAQRGWDVVGVAEDLDVSGAVDPFDRKRRPNLARWLAFEEQPFDVIVAHRVDRLTRSTRHLQQLVHWAEDHKKLVVSATEAHFDTTTPFAAVVIALMGTVAQMELEAIKERNRSAAHFNIRAGKYRGSLPPWGYLPARVDGEWRLVPDPVQRERILEVYHRVVDNHEPLHWVAHDLNRRGVLSPKDYFAQLQGREPQGCKWSATALKRSMISEAMLGYATLNGKTVRDDDGAPLVRAEPILTREQLEALRAELVKTSRAKPAVSTPSLLLRVLFCAVCGEPAYKFAGGGRKHPRYRCRSMGFPKHCGNGTVVMAEWDAFCEEQVLDLLGGAERLEKVWVAGSVSAVELAEVNAELVDLTSLIGSPAYRAGSPQREALDARIAALAARQEELEGLGARPSGWEWRETGQRFGDWWRKQDTAAKNTWLRSMNVRLTFDVRGGLTRTIDFGDLQEYEQHLRLGSVVERLHTGMS

SEQ ID NO: 10060 - protein, 500 aa, synthetic construct
MRALVVIRLSRVTDATTSPERQLESCQQLCAQRGWDVVGVAEDLDVSGAVDPFDRKRRPNLARWLAFEEQPFDVIVAYRVDRLTRSTRHLQQLVHWAEDHKKLVVSATEAHFDTTTPFAAVVIALMGTVAQMELEAIKERNRSAAHFNIRAGKYRGSLPPWGYLPTRVDGEWRLVPDPVQRERILEVYHRVVDNHESLHLVAHDLNRRGVLSPKDYFAQLRGREPQGCEWSATALKRSMTSEAMLGYATLNGKTVRDDDGAPLVRAEPILTREQLEALRAELVKTSRAKPAVSTPSLLLRVLFCAVCGEPAYKFAGGGRKHPRYRCRSMGFPKHCGNGTVVMAEWDAFCEEQVLNLLGDTEHLEKVWVTGSDSAVELAEVNAELVDLTSLIGSPAYRAGSPQREALDARIAALAARQEELEGLEARPSGWEWRETGQCFRDWWREQDTAAKNAWLRSMSVRLTFDVRGGLTRTIDFGGLQAYEQHLRLGSVVERLHTGMS

SEQ ID NO: 10061 - protein, 500 aa, synthetic construct
MRALVVIRLSRVTDATTSPERQLESCLQLCAQRGWDVVGVAEDLDVSGAVDPFDRKRRPNLARWLAFEEQPFDVIVAHRVDRLTRSVRHLQRLIRWAEDHKKLVVSATEAHFDMTTPFAAVVIALMGTVAQMELEAIKERIRSAVHFNIRAGKYRGSLPPWGYLPTRVDGEWRLVPDPVQRERILEVYHRVVVNHEPLHLVAHDLNRRGVLSPKDYFAQLQGREPQGRKWSATALKRSMISEAMLGYATLNGKTVRDDDGAPLVRAEPILTREQLEALRAELAKTSRAKPAVSTPSLLLRVLFCAVCGEPAYKFAGGGRKHPRYRCRSMGFPKHCGNGTVVMAEWDAFCEEQVLDLLGDAERLEKVWVAGSDSAVELAEVNAELVDLTSLIGSPTYRTGSPQREALDARIAALAARQEELEGLEARPSGWEWRGTGQRFGDWWREQDTAAKNTWLRSMNIRLTFDVRGGLTRTIDFGDLQEYERHLRLGSVAERLHTGMS

SEQ ID NO: 10062 - protein, 500 aa, synthetic construct
MRALVVIRLSRVTDATTSPERQLESCQQLCAQRGWDVVGVAEDLDVSGAVDPFDRKRRPNLARWLAFEEQPFDVIVAYRVDRLTRSTRHLQQLVHWAEDHKKLVVSATEAHFDTTTPFAAVVIALMGTVAQMELEAIKERIRSAAHFNIRAGKYRGSLPPWGYLPTRVDGEWRLVPDPVQRERILEVYRRVVDNHEPLHLVAHDLNRRGVLSPKDYFAQLRGREPRGRKWSATALRRSMISGAMLGYATLNGKIVRDDDGAPLVRAEPILTREQQEALRAEFAKTSRAKPAVSTPSLLLRVLFCAVCGEPAYKFVGGGRKHPRYRCRSMGFPKHCGNGTVVMAEWDAFCEEQVLDLLGDAERLEKVWVAGSDSAVELTEVSAELVDLTSLIGSPAYRAGSPQREALDARIAALAARQEELEGLEARPSGWEWRETGQRFGDWWREQDTASKNTWLRSMNVRLTFDVRGGLTRTIDFGELQEYEQHLRLGTVAERLHTGVS

SEQ ID NO: 10063 - protein, 500 aa, synthetic construct
MRALVVIRLSRVTDATTSPERQLESCQQFCAQRGWDVVGVAEDLDVSGAVDPFDRKRRPNLARWLAFGERPFDVIVAYRVDRLTRSIRHLQQLVHWAEDHKKLVVSATEAHFDMTTPFAAVVIALMGTVAQMELEAIKERNRSAAHFNIRAGKYRGSLPPWGYLPTRVDGEWRLVPDPVQRERILEVYHRVVDNHEPLHLVAHDLNRRGVLSPKDYFAQLQGREPQGRKWSATALKRSMISEAMLGYVTLNGKTVRDDDGAPLVRAEPILTRGQLEALRAGLVRTSRAKPAVSTPSLLLRVLFCAVCGEPAYKFAGGGRKHPRYRCRSMGFPKHCGNGTVVMAEWDAFCEEQVLNLLGDSERLEKVWAAGSDSAVELSEVNAELVDLTSLIGSPAYRAGSPQREALDARIAALAARREELEGLEARPSGWEWRETGQRFGDWWREQDTAAKNTWLRSMNVRLTFDVRGELTRTIDFGDLLEYEQHLRLGSVAERLHTGMS

SEQ ID NO: 10064 - protein, 500 aa, synthetic construct
MRALVVIRLSRVTDATTSPERQLESCQQLCAQRGWDVVGVAEDLDVSGAVDPFDHKRRPNLARWLAFEEQPFDVIVAYRVDRLTRSTRHLQQLVRWAEDHKKLVVSATEAHFDTTTPFAAVVIALMGTVAQMELEAIKERIRSAVRFNIRAGKYRGSLPPWGYLPTRVDGEWRLVPDPVQRERILEVYHRVVDNHESLHSVAHDLNRRGVLSPKDYFAQLRGREPRGRKWSATALRRSMTSEAMLGYATLNGKTVRDDDGAPLVRAEPILTREQQGALRAELAKTSRAKPAVSTPSLLLRVLFCAVCGEPAYKFVGGGRKHPRYRCRSMGFPKHCGNGTVVMTEWDAFCEEQVLDLLGDAEHLERVWVAGSDSAVELAEVNAELVDLTSLIGSPAYRAGSPQREALDARIAALVARQEELGGLEARPSGWEWCKTGQCFGDWWREQDTAAKNTWLRSMNVRLTFDVRGGLTRTIDFGDLREYEQHLRLGSGVERIHTGMS

SEQ ID NO: 10065 - protein, 500 aa, synthetic construct
MRALVVIRLSRVTDATTSPERQLESCQQLCAQRGWDVVGVAEDLDVSGAVDPFDRKRRPNLARWLAFEEQPFDAIVAYRVDRLTRSVRHLQQLVHWAEDHKKLVVSATEAHFDTTTPFAAVVIALMGTVAQMELEAIKERNRSAAHFNIRAGKYRGSLPPWGYLPTRVDGEWRLAPDPVQRERILEVYHRVVDNHEPLHLVAHDLNRRGVLSPKDYFAQLRGREPQGRKWSATALKRSMTSEAMLGYATLNGKTVRDDDGAPLVRAEPILTREQLEALRAELVKTSRAKPAVSTPSLLLRVLFCAVCGEPAYKFAGGGRKHPRYRCRSMGFPKHCGNGTVVMAEWDAFCEEQVLDLLGDAERLEKVWVAGSDSAVELAEVNAELVDLTSLIGSPAYRAGSPQREALDARIAALAARQEELEGLEARPSGWEWRETGQRFGDWWREQDTAAKNIWLRSMNVRLTFDVRGGLTRTIDFGDLQEYEQHLRLGSVVERLHTGMS

SEQ ID NO: 10066 - protein, 500 aa, synthetic construct
MRALVVIRLSRVTDATTSPERQRESCQQLCAQRGWDVVGVAEDLDVSGAVDPFDRKRRPNLARWLAFEEQPFDVIVAYRVDRLTRSTRHLQQLVRWAEDHKKLIVSATEAHFDTTTPFAAVVIALMGTVAQMELEAIKERIRSAVRFNIRAGKYRGSLPPWGYLPTRVDGEWRLVPDPVQRERILEVYHRVVDNHEPLHLVAHDLNRRGVLSPKDYFAQLRGREPQGRKWSATALKRSMTSVAMLGYATLDGKTVRDDDGAPLVRAEPILTREQLEALRAELAKTSRAKPAVSTPSLLLRVLFCAACGEPAYRFVGGGRKHPRYRCRSMGFPEHCGNGTVVMTEWDAFCEEQVLDLLGDAERLEKVWVAGSDSAVELAEVNAELVDLTSLIGSPAYRAGSPQREALDARIAALAARQEELEGLEARPSGWEWRGTGQRFGDWWREQDTAAKNTWLRSMNVRLTFDVRGGLTRTIDFGELQEYEQHLRLGSVVERLHTGTS

SEQ ID NO: 10067 - protein, 500 aa, synthetic construct
MRALVVIRLSRVTDATTSPERQLESCQQLCAQRGWDVVGVAEDLDVSGAVDPFDRKRRPNLARWLAFEEQPFDVIVAYRVDRLTRSTRHLQQLVHWAEDHKKLVVSATEAHFDTTTPFAAVVIALMGTVAQMELEAIRERNRSAAHFNIRAGKYRGSLPPWGYLPTRVDGEWRLVPDPVQRERILEVYHRVVDNHEPLHLVAHDLNRRGVLSPKDYFAQLRGREPQGREWSATALKRSMTSEAMLGYATLNGKTVRDNDGAPLVRAEPILTREQLEALRAELVKTSRAKPAVSTPSLLLRVLFCAVCGEPAYKLAGGGRKHPRYRCRSIGSPKHCGNGTVAMAEWDAFCEGQVLDLLGDAERLEKVWVAGSDSAVELAEVNAELVDLTSLIGSPAYRAGSPQREALDARIAALAVRQEELEGLGARPSGWEWRETGQRFGDWWREQDTAAKNTWLRSMNVRLTFDVRGGLTRTIDFGDLREYEQHLRLGSVVERLHTGTS

SEQ ID NO: 10068 - protein, 500 aa, synthetic construct
MRALVVIRLSRVTDATTSPERQLESCQQLCAQRGWDVVGVAEDLDVSGAVDPFDRKRRPNLARWLAFGEQPFDVIVAYRVDRLTRSTRHLQQLVHWAEDHKKLVVSATEAHFDTTTPFAAVVIALMGTVAQMELEAIKERNRSAAHFNIRAGKYRGSLPPWGYLPTRVDGEWRLAPDPVQRERILEVYHRVVDNHEPLHLVAHDLNRRGVLSPKDYFAQLQGREPQGRKWSATALKRSMISEAMLGYATLNGKTVRDDDGAPLVRAEPILTREQLEALRAELVKTSRAKPAVSTPSLLLRVLFCAVCGEPAYKFAGGGRKHPRYRCRSMGFPKHCGNGTVAMAEWDAFCEEQVLDLLGDAERLEKVWVAGSDSAVELAEVNAELVDLTSLIGSPAYRAGSPQREALDARIAALAARQEELEGLGARPSDWEWRETGRRFGDWWREQDTAAKNTWLRSMNVRLTFDARGGLTRTIDFGGLQEYEQYLRLGSVVERLHTGMS

SEQ ID NO: 10069 - protein, 500 aa, synthetic construct
MRALVVIRLSRVTDATTSPERQLESCQQLCAQRGWDVVGVAEDLDVSGAVDPFDRKRRPNLARWLAFEEQPFDVIVAYRVDRLTRSTRHLQQLVHWAEDHKKLVVSATEAHFDTTTPFAAVVIALMGTVAQMELEAIKERNRSAAHFNIRAGKYRGSLPPWGYLPTRVDGVWRLVPDPVQRERILEVYHRVVDNHEPLHLVAHDLNRRGVLSPKDYFAQLQGREPQGRKWSATALKRSMTSEAMLGYATLNGKTVRDDDGAPLVRAEPILTREQLEALRAELVKTSRAKPAVSTPSLLLRVLFCAVCGEPAYKFAGGGRKHPRYRCRSMGFPKHCGNGTVAMAEWDAFCEELVLDLLGDAERLEEVWVAGSDSAVELAEVNAELVDLTSLIGSPAYRAGSPQREALDARVAALAARQEELEGLEARPSGWEWRGTGQRFGDWWREQDTAAKNTWLRSMNVRLTFDVRGGLTRTIDFGDLQEYEQHLRLGSVVERLHTGMS

SEQ ID NO: 10070 - protein, 500 aa, synthetic construct
MRALVVIRLSRVTDATTSPERQLESCQQLCAQRGWDVVGVAEDLDVSGAVDPFDRKRRPNLARWLAFEEQPFDAIVAYRVDRLARSIRHLQQLVHWAEDHKKLVVSATEAHFDTTTPFAAVVIALMGTVAQMELEAIKERNRSAAHFNIRAGKYRGSLPPWGYLPSHVDGEWRLVPDPVQRERILEVYHRVVDNHEPLHLVAHDLNRRGVLSPKDYFAQLQGREPQGRKWSATALKRSMTSEAMLGYATLNGKTVRDDDGAPLVRAEPILTRVQLEALRAELVKTSRAKPAVSTPSLLLRVLFCAVCGEPAYKFAGGGRKHPRYRCRSMGFPKHCGNGTVAMAEWDAFCEEQVLNLLGDAERLEKVWVAGSDSAVELAEVNAELVDLTGLIGSPAYRAGSPQRGALDARIAALAARQEELEGLEARPPGWEWRETGQRFGDWWREQDTAAKNTWLRSMNVRLTFDARGGLTRTIDFGGLLEYEQHLRLGSVVERLHTGMS

SEQ ID NO: 10071 - protein, 500 aa, synthetic construct
MRALVVIRLSRVSDATTSPERQLESCQQLCAQRGWDVVGVAEDLDVSGAVNPFDRKRRPNLARWLAFEEQPFDVIVAYRVDRLTRSVRHLQQLVHWAEDHKKLVVSATEAHFDTTTPFAAVVIALMGTVAQMELEAIKERNRSAAHFNIRAGKYRGSLPPWGYLPTRVDGEWRLAPDPVQRERILEVYHRVVDNHEPLHLVAHDLNRRGVLSPKDYFAQLQGREPQGRKWSATALKRSMISEAMLGYATLNGKTVRDDDGAPLVRAEPILTREQLEALRAELVKTSRAKPAVSTPSLLLRALFCAVCGEPAYKLAGGGRKHPRYRCRSMGSPKHCGNGTVAMAEWDAFCEEQVLDLLGDAERLEKVWVAGSDSAVELAEVNEELVDLTSLIGSPAYRAGSPQREALDARIAALAARQEELEGLGARPSGWGWRETGQRFGDWWREQDTAAKNTWLRSMNVRLTFDVRGELIRTIDFGDLQEYEQHLRLGSVAERLHTGMS

SEQ ID NO: 10072 - protein, 500 aa, synthetic construct
MRALVVIRLSRVTDATTSPERQLESCQQLCAQRGWDVVGVAEDLDVSGAVDPFDRKRRPNLARWLAFEEQPFDAIVAHRVDRLTRSTRHLQQLVHWAEDHKKLVVSATEAHFDTTTPFAAVVTALMGTVAQMELEAIKERNRSAAHFNIRAGKYRGSLPPWGYLPTRVDGEWRLVPDPVQRERILEVYHRVVDNHEPLHLVAHDLNRRGVLSPKDYFAQLQGREPQGRKWSATALKRSMISKAMLGYATLNGKTVRDNDGAPLVRAEPILTREQLEALRAELVKTSRAKPAVSTPSLLLRVLFCAVCGEPAYKFAGGGRKHPRYRCRSMGFPKHCGNGTVVMAEWDAFCEEQVLDLLGDAERLEKVWVAGSDSAVELAEVNAELVDLTSLIGSPAYRAGSPQREALDACIAALAARQEELESLEARPSGWEWRETGQRFGDWWREQDTAAKNTWLRSMNVRLTFDVRGGLTRTIDFGDLQEYKQHLRLGSVVERLHTGTS

SEQ ID NO: 10073 - protein, 500 aa, synthetic construct
MRALVVIRLSRVTDATTSPERQLESCQQLCAQRGWDVVGVAEDLDVSGAVDPFDRKRRPNLARWLALEEQPFDAIVAYRVDRLARSIRHLQQLVHWAEDHKKLVVSATEAHFDTTTPFAAVVIALMGTVAQMELEAIKERNRSAAHFNIRAGKYRGSLPPWGYLPTRVDGEWRLVPDPVQRERILEVYHRVVDNHEPLHLVAHDLNRRGVLSPKDYFAQLQGREPQGRKWSATALKRSMISEAMLGYATLNGKTVRDDDGAPLVRAEPILTRGQLEAVRAELIKTSRAKPAVSTPSLLLRVLFCAVCGEPAYKFAGGGRKHPRYRCRSMGFPKHCGNGTVAMAEWDAFCEEQVLVLLGDAERLEKVWVAGSDSAVELAEVNAELVDLTSLIGSPAYRAGSPQREALDARIAALAARQEELEGLEARPSGWEWRETGQRFGDWWREQDTAAKNAWLRLKNVRLTFDVRGGPTRTIDFGDLQEYEQHLRSGSVVRRLHTGMS

SEQ ID NO: 10074 - protein, 500 aa, synthetic construct
MRALVVIRLSRVTDATTSPERQLESCRQLCAQRGWDVVGVAEDLDVSGAVDPFDRKRRPNLARWLAFEEQPFDVIVAYRVDRLTRSTRHLQQLVHWAEDHKKLVVSATEAHFDTTTPFAAVVIALMGTVAQMELEAIKERNRSAAHFNIRAGKYRGSLPPWGYLPTRVDGEWRLVPDPVQRERILEVYHRVVDNHEPLHLVAHDLNRRGVLSPKDYFAQLRGREPQGRKWSATALKRSMTSEAMLGYATLNGKTVRDDDGAPLVRAEPILTREQLEALRAELVKTSRAKPAVSTPSLLLRVLFCAVCGEPAYKFAGGGRKHPRYRCRSMGFPRHCGNGTVAMAEWDAFCEEQVLDLLGDAERLEKVWVAGSDSAVELAEVNAELVDLTSLIGSPAYRAGSPQREALGARIAALAARQEELEGLEARPSGWEWRETGQRFGDWWREQDTAAKNTWLRSVNVRLTFDARGGLTRTIDFGDLQEYEQHLRLGSVVERLHTGKS

SEQ ID NO: 10075 - protein, 500 aa, synthetic construct
MRALVVIRLSRVTDATTSPERQLESCQRLCAQRGWDVVGVAEDLDVSGAVDPFDRKRRPNLARWLAFEEQPFDVIVAYRVDRLTRSTRHLQQLVHWAEDHKKLVVSATEAHFDTTTPFAAVVIALMGTVSQMELEAIKERNRSAAHFNIRAGKYRGSLPPWGYLPTRVDGEWRLVPDPVQRERILEVYHRVVVNHEPLHLVAHDLNRRGVLSPKDYFAQLQGREPQGRKWSATALKRSMTSEAMLGYATLNGKTVRDDDGAPLVRAEPILTREQLEALRAVLVKTSRAKPAVSTPSLLLRVLFCAVCGEPAYKFAGGGRKHPRYRCRSMGFPKHCGNGTVTMAEWDAFCEEQVLDLLGDAERLEKVWVAGSDSAVELAEVNAELVDLTSLIGSPAYRVGSPQREALDARIAALAARQEELEGLGARPSGWEWRETGQRFGDWWRAQDTAAKNTWLRSMNVRLTFDVRGGLTRTIDFGDLQGYGQHLRLGSVVERLRTGMS

SEQ ID NO: 10076 - protein, 500 aa, synthetic construct
MRALVVIRLSRVTDATTSPERQLESCQRLCAQRGWDVVGVAEDLNVSGAVNPFDRKRRPNLARWLAFEEQPFDVIVAYRVDRLTRSIRHLQQLVHWAEDHKKLVVSATEAHFDTTTPFAAVVIALMGTVAQMELEAIKERNRSAAHFNIRAGKYRGSLPPWGYLPTRVDGEWRLVPDPVQRERILEVYHRVVDNHEPLHLVAHDLNRRGVLSPKDYFAQLQGREPRGRKWSATALKRSMTSEAMLGYATLNGKIVRDDDGAPLVRAEPILTREQLEALRAELVKTSRAKPAVSTPSLLLRVLFCAVCGEPAYKFAGGGRKHPRYRCRSMGFPKHCGNGTVAMAEWDAFCEEQVLDLLGDAERLEKVWVAGSDSAVELAEVNAELVDLTSLIGSPAYRAGSPQREALDARIAALAARQEELEGLEARPSGWEWRGTGQRFGDWWREQDTAAKNTWLRSMNVRLTFDVRGVLTRTIDFGGLQEYEQHLRLGSVVERLHTGTP

SEQ ID NO: 10077 - protein, 500 aa, synthetic construct
MRALVVIRLSRVTDATTSPERQLESCQQLCAQRGWDVVGVAEDLDVSGAVDPFDRKRRPNLARWLAFEEQPFDVIVAYRVDRLTRSTRHLQQLVHWAEDHKKLVVSATEAHFDTTTPFAAVVIALMGTVAQMELEAIRERNRSAAHFNIRAGKYRGSLPPWGYLPTRVDGEWRLVPDPVQRERILEVYHRVVDNHEPLHLVAHDLNRRGVLSPKDYFAQLRGREPQGRKWSATALKRSMISEAMLGYATLNGKTVRDDDGAPLVRAEPILTREQLEALRAELVKTSRAKPAVSTPSLLLRVLFCAVCGEPAYKFAGGGRKHPRYRCRSMGYPKHCGNGTVVMAEWDAFCEEQVLDLLGDAERLEKVWVAGSDSAVELAEVNAELVDLTSLIGSPAYRAGSPQREALDARIAALAARQEELEGLEARPSGWEWRGTGQRFGDWWREQDTAAKNTWLRSMNVRLTFDVRGGLTRTIDFGVLQEYEQHLRLGSVVERLHAGMS

SEQ ID NO: 10078 - protein, 500 aa, synthetic construct
MRALVVIRLSRVTDATTSPERQLESCQQHCAQRGWDVVGVAEDLDVSGAVDPFDRKRRPNLARWLAFEEQPFDVIVAYRVDRLTRSIRHLQQLVHWAEDHKKLVVSATEAHFDTTTPFAAVVIALMGTVAQMELEAIKERNRSAAHFNIRAGKYRGSLPPWGYLPTRVDGEWRLVPDPVQRERILEVYHRVVDNHEPLHLVAHDLNRRGVLSPKDYFAQLQGREPQGRKWSATALKRSMISVAMLGYATLNGKTVRDDDGAPLVRAEPILTRGQLEALRAELVKTSRAKPAVSTPSLLLRVLFCAVCGEPAYKSAGGGRKHPRYRCRSMGFPKHCGNGTVAMAEWDAFCEGQVLDLLGDAERLERVWVAGSDSAVELAEVSAELVDLTSLIGSPAYRAGSPQREALDARIAALAARQEELEGLEARPSGWEWRGTGQRFGDWWREQGTAAKNAWLRSMNVRLTFDVRGGLTRTIDFGDLQEYEQHLRLGGVVERLHTGRS

SEQ ID NO: 10079 - protein, 500 aa, synthetic construct
MRALIVIRLSRVTDATTSPERQLESCQQLCAQRGWDVIGVAEDLDVSGAVDPFDRKRRPNLARWLAFEEQPFDVIVAYRVDRLTRSTRHLQQLVHWAEDHKKLVVSATEAHFDTTTPFAAVVIALMGTVAQMELEAIKERIRSAAHFNIRAGKYRGSLPPWGYLPARVDGEWRLVPDPVQRERILEVYHRVVDNHEPLHLVAHDLNRRGVLSPKDYFAQLRGREPQGRKWSATALKRSMTSEAMLGYAILNGKTVRDDDGAPLVRAEPILTREQQEALRAELAKTSRAKPAVSTPSLLLRVLFCAVCGEPAYKFVGGGRKHPRYRCRSMGFPEHCGNGTVVMAEWDAFCEEQVLDLLGDAERLEKVWVAGSDSAVELAEVNAELMDLMSLIGSPAYRAGSPQREALDARIAALAARQEELEGLEARPSGWEWRETGQRFGDWWREQDTAAKNTWLRSMNVRLTFDVRGGPTRTIDFGDLQEYEQHLRLGSVVERLHAGMS

SEQ ID NO: 10080 - protein, 500 aa, synthetic construct
MRALVVIRLSRVTDATTSPERQLESCQQLCAQRGWDVVGVAEDLDVSGAVDPFDRKRRPNLARWLAFEEQPFDVIVAYRVDRLTRSTRHLQQLVHWAEDHKKLVVSATEAHFDTTTPFAAVVIALMGTVAQMELEAIKERNRSAAHFNIRAGKYRGSLPPWGYLPTRVDGEWRLAPDPVQRERILEVYHRVVDNHEPLHLVAHDLNQRGVLSPKDYFAQLQGREPQGRKWSATALKRSMISEAMLGYATLNGKTVRDDDGAPLVRAEPILTREQLEALRAELVKTSRAKPAVSTPSLLLRVLFCAVCGEPAYKFAGGGRKHPRYRCRSMGFPKHCGNGTVVMAEWDAFCEEQVLDLLGDAERLEKVWVAGSDSAVELAEVNAELVDLTSLIGSPAYRAGSPQREALDARIAALAARQEELEGLEARPSGWEWREAGQRFGDWWREQDTAAKNTWLRSMNVRLTFDVRGGLTRTIDFGGLREYEQHLRLGSVVERLHTGMS

SEQ ID NO: 10081 - protein, 500 aa, synthetic construct
MRALVVIRLSRVTDATTSPERQLESCQQLCAQRGWDVVGVAEDLDVSGAVDPFDRKRRPNLARWLAFEEQPFDVIVAYRVDRLTRSTRHLQQLVRWAEDHKKLVVSATEAHFDTTTPFAAVVIALMGTVAQMELEAIKERIRSAVHFNIRAGKYRGSLPPWGYLPTRVDGEWRLVPDPVQRERILEVYHRVVDSHEPLHMVAHDLNRRGVLSPKDYFAQLRGREPRGRKWSATALRRSMTSEAMLGYATLNGKIVRDDDGAPLVRAEPILTREQQEALRAELAKTSRAKPAVSTPSLLLRVLFCAVCGEPAYKFVGGGRKHPRYRCRSMGFPKHCGNGTVVMAEWDAFCEEQVLDLLGDAERPEKVWVAGSDSAVELAEVNAELVDLTSLIGSPAYRVGSPQREALDARIAALAARQGELEGLEARPSGWEWRETGQRFRDWWREQDTAAKNAWLRSMNVRLTFDVRGGLTRTIDFGDLQEYEQHLRLGNVVERLHTGMS

SEQ ID NO: 10082 - protein, 500 aa, synthetic construct
MRALVVIRLSRVTDATTSPERQLESCQQLCAQRGWDIVGVAEDLDVSGAVDPFDRKRRPNLARWLAFEEQPFDVIVAYRVDRLTRSTRHLQQLVHWAEDHKKLVVSATEAHFDTTTPFAAVVIALMGTVAQMELEAIKERNRSAAHFNIRAGKYRGSLPPWGYLPTRVDGEWRLVPDPVQRERILEVYHRVVDNHEPLHLVAHDLNRRGVLSPKDYFAQLQGREPQGRKWSATALKRSMISEAMLGYATLNGKTVRDDDGAPLVRAEPILTREQLEALHAELVKTSRAKPAVSTPSLLLRVLFCAVCGEPAYKFAGGGRKHPRYRCRSMGFPKHCGNGTVAMAEWDAFCEEQVLNLLGDAVRLEKVWVAGSDSAVELAEVNAELVDLTSLIGSPAYRAGSPQREALDARIAALAARQEELEGLGTRPSGWEWRETGQRFGDWWREQDTAAKNTWLRSMNVRLTFDARGGLTRTIDLGGLQEYEQHLRLGGVAERLHTGMS

SEQ ID NO: 10083 - protein, 500 aa, synthetic construct
MRALVVIRLSRVTDATTSPERQLESCQQLCAQRGWDVVGVAEDLDVSGAVDPFDRKRRPNLARWLAFEEQPFDVIVAYRVDRLTRSTRHLQQLVHWAEDHKKLVVSATEAHFDTTTPFAAVVIALMGTVAQMELEAIKERNRSAAHFNIRAGKYRGSLPPWGYLPTRVDGEWRLVPDPVQRERILEVFHRVVDNHEPLHLVAHDLNRRGVLSPKDYFAQLRGREPQGRKWSATALKRSMISEAMLGYATLNGKTVRDDDGAPLVRAEPILTREQLGALRAELVKTSRAKPAVSTPSLLLRVLFCAVCGEPAYKFAGGGRKHPRYRCRSMGSPKHCGNGTVVMAEWDAFCEEQVLNLLGDAERLEKVWVAGSDSAVGLAEVNAELVDLTSLIGSPAYRAGSPQREALDARIAALAARQEELEGLGARPSGWEWRETGQRFGDWWREQDTAAKNTWLRSMNVRLTFDVRGGLTRTIDFGDLQEYEQHLRLGSVVERLHTGMS

SEQ ID NO: 10084 - protein, 500 aa, synthetic construct
MRALVVIRLSRVTDATTSPERQLESCQQLCAQRGWDVVGVAEDLNVSGAVDPFDRKRRPNLARWLAFEEQPFDVIVAYRADRLARSIRHLQQLVHWAEDHKKLVVSATEAHFDTTTPFAAVVIALMGTVAQMELEAIKERNRSAAHFNIRAGRYRGSLPPWGYLPTRVDGEWRLVPDPVQRERILEVYHRVVDNHEPLHLVAHDLNRRGVLSPKDYFAQLRGREPQGRKWSVTALKRSMISEAMLGYATLNGKTVRDDDGAPLVRAEPILTREQLEALRAELVKTSRAKPAVSTPSLLLRVLFCAVCGEPAYKLAGGGRKHPRYRCRSMGFPKHCGNGTVVMAEWDAFCEEQVLNLLGDTERLEKVWVAGSDSAVELAEVSAELVDLTSLIGSPAYRAGSPQREALDARIAALAARQEELEGLEARPSGWEWRETGQRFGDWWREQDTAAKNTWLRSMNVRLTFDVRGGLTRTIDFGDLQEYVQHLRLGSVVERLHTGMS

SEQ ID NO: 10085 - protein, 500 aa, synthetic construct
MRALVVIRLSRVTDATTSPERQLESCQQLCAQRGWDVVGVAEDLDVSGAVDPFDRKRRPNLARWLAFEEQPFDVIVAYRVDRLTRSTRHLQQLVHWAEDHKKLVVSATEAHFDTTTPFAAVVIALMGTVAQMELEAIKERIRSAVHFNIRAGKYRGSLPPWGYLPTRVDGEWRLVPDPVQRERILEVYHRVVDNHEPLHLVAHDLNRRGVLSPKDYFAQLRGREPQGREWSATALKRSMTSEAMLGYATLNGKTVRDDDGAPLVRAEPILTREQQEALRAELAKTSRAKPAVSTPSLLLRVLFCAVCGEPAYKFVGGGRKHPRYRCRSMGFPEHCGNGTVVMAEWDAYCEEQVLDLLGDAERLEKVWVAGSDSAVELAEVNAELVDLTSLIGSPAYRAGSPQRVALDARIAALAARQEELGGLEARPSGWEWRGTGQRFGNWWREQDTAAKNTWLRSMNVRLTFDARGGLTRTIDFGELQEYEQHLRLGSVVERLHSGMS

SEQ ID NO: 10086 - protein, 500 aa, synthetic construct
MRALVVIRLSRVTDATTSPERQLESCQRLCAQRGWDVVGVAEDLDVSGAVDPFNRKRRPNLARWLAFEEQPFDVIVAYRVDRLTRSTRHLQQLVHWAEDHKKLVVSATEAHFDTTTPFAAVVIALMGTVAQMELEAIKERNRSAAHYNIRAGKYRGSLPPWGYLPTRVDGEWRLVPDPVQRERILEVYHRVVDNHEPLHLVAHDLNRRGVLSPKDYFAQLRGREPQGRKWSATALKRSMISEAMLGYATLNGKTVRDDDGAPLVRAEPILTREQLEALRAELVKTSRAKPAVSTPSLLLRVLFCAVCGEPAYKFAGGGRKHPRYRCRSMGFPKHCGNGTVAMAEWDAFCEEQVLNLLGDAERLEKVWVAGSDSAVELAEVNAELVDLTSLIGSPAYRAGSPQREALDARIAALAARQEELEGLEARPSGWVWRETGQRFGDWWREQDTAAKNTWLRSMNVRLTFDVRGGLTRTIDFGGLQEYEQHLRLGSVVERLHTGMS

SEQ ID NO: 10087 - protein, 500 aa, synthetic construct
MRALVVIRLSRVTDTTTSPERQLESCQQLCAQRGWDVVGVAEDLDVSGAVDPFDRKRRPNLARWLAFEEQPFDVIVAYRVDRLTRSTRHLQQLVHWAEDHKKLVVSATEAHFDTTTPFAAVVIALMGTVAQMELEAIKERNRSAAHFNIRAGKYRGSLPPWGYLPARVDGEWRLVPDPVQRERILEVYHRVVDNHEPLHLVAHDLNRRGVLSPKDYFAQLRGREPQGRKWSATALKRSMISGAMLGYATLNGKTVRDDDGAPLVRAEPILTREQLGALRAELVKTSRAKPAVSTPSLLLRVLFCAVCGEPAYKFAGGGRKHPRYRCRSMGFPKHCGNGTVAMAEWDAFCEEQVLDLLGDAERLEKVWVAGSDSAVELAEVNAELVDLTSLIGSPAYRAGSPQREALDARIAALAARQEELEGLEARPSGWEWRGTGQRFGDWWREQDTAAKNTWLRSMNVRLTFDVRGGLTRMIDYGDLQEYEQHLRLGSVVERLHTGMS

SEQ ID NO: 10088 - protein, 500 aa, synthetic construct
MRALVVIRLSRVTDATTSPERQLESCLQLCTQRGWDVVGVAEDLDVSGAVDPFDRKRRPNLARWLAFEEQPFDAIVAYRVDRLTRSVRHLQQLVHWAEDHKKLVVSATEPHFDTTTPFAAVVIALMGTVAQMELEAIKERNRSAAHFNIRAGKYRGSLPPWGYLPTRVDGEWRLVPDPVQRERILEVYHRVVDNHESLHLVAHDLNRRGVLSPKDYFAQLRGREPRGREWSATALKRSMISEAMLGYATLNGKTVRDDDGAPLVRAEPILTREQLEALRAELVKTSRAKPAVSTPSLLLRVLFCAVCGEPAYKSAGGGRKHPRYRCRSMGFPKHCGNGTVVMAEWDAFCEEQVLNLLGDAERLEKVRVAGSDSAAELAEVNAELVDLTSLIGSPAYRAGSPQREALDARIAALAARQEELEGLEARPSGWEWRETGQRFGDWWREQDTAAKNTWLRSMNVRLTFDVRGGLTRTIDFGDLREYEQHLRLGSVVERLHTGMS

SEQ ID NO: 10089 - protein, 500 aa, synthetic construct
MRALVVIRLSRVTDATTSPERQLESCRQLCAQRGWDVVGVAEDLDVSGAVDPFDRKRRPNLARWLAFEEQPFDAIVAYRVDRLTRSTRHLQQLVHWAEDHKKLVVSATEAHFDTTTPFAAVVIALMGTVAQMELEAIKERNRSAAHFNIRAGKYRGSLPPWGYLPTRVGGEWRLVPDPVQRERILEVYHRVVDNHEPLHLVAHDLNRRGVLSPKDYFAQLQGREPQGRKWSATALKRSMISEAMLGYATLNGKIVRDDDGAPLVRAEPILTREQLEALRAELVKTSRAKPAVSTPSLLLRVLFCAVCGEPAYKFAGGGRKHPRYRCRSMGFPKHCGNGMVVMAEWDAFCEERVLDLLGDAERLEKVWVAGSDSAVELAEVNAELVDLTSLIGSPAYRAGSPQREALDARIAALAARQEELEGLRARPSGWEWRETGQRFGDWWREQDTAAKNTWLRSMNVRLTFDVRGGLTRTIDFGDLQEYEKHLRLGSVVERLHTGMS

SEQ ID NO: 10090 - protein, 500 aa, synthetic construct
MRALVVIRLSRVTDATTSPERQLESCQQLCAQRGWDVVGVAEDLDVSGAVNPFDRKRRPNLARWLAFEEQPFDVIVAYRVDRLTRSTRHLQQLVHWAEDHKKLVVSATEAHFDTTTPFAAVVIALMGTVAQMELEAIKERNRSAAHFNIRAGKYRGSLPPWGYLPTRVDGEWRLMPDPVQRERILEVYHRVVDDHEPLHLVAHDLNRRGVLSPKDYFAQLQGREPQGRKWSATALKRSMISEAMLGYATLNGKTVRDDDGAPLVRAEPILTREQLEALRAELVKTSRAKPAVSAPSLLLRVLFCAVCGEPAYKFAGGGRKHPRYRCRSMGFPKHCGNGTVAMAEWDAFCEEQVLDLLGDTERLEKVWVAGSDSAVELAEVNAELVDLTSLIGSPAYRAGSPQREALDARIATLAARQEELEGLEARPSGWGWRETGQRFGDWWREQDTAAKNAWLRSMNVRLTFDVRGGLTRTIDFGDLQEYEQHLRLGSVVERLHTGMS

SEQ ID NO: 10091 - protein, 500 aa, synthetic construct
MRALVVIRLSRVTDATTSPERQLESCQQLCVQRGWDVVGVAEDLDVSGAVDPFDRKRRPNLARWLAFEEQPFDVIVAYRVDRLTRSVRHLQQLVHWAEDHKKLVVSATEAHFDTTTPFAAVVIALMGTVAQMELEAIKERNRSAAHFNIRAGKYRGSLPPWGYLPTRVDGEWRLMPDPVQRERILEVYHRVVDNHEPLHLVAHDLNRRGVLSPKDYFAQLRGREPQGRKWSATALKRSMISEAMLGYATLNGKTVRDDNGAPLVRAEPILTREQLEALRAELAKTSRAKPAVSTPSLLLRVLFCAVCGEPAYRFAGGGRKRPRYRCRSMGFPRHCGNGTVVMAEWDAFCEEQVLNLLGDVERLEKVWVAGSDTAVELAEVIAELVDLTSLIGSPAYRAGSPQREALDARIAALAARQEELEGLEARPSGWEWRETGQRFGDWWREQDTAAKNTWLRSMNVRLTFDVRGGLTRTIDFGSLQEYEQHLRSGSVVARLHTGMS

SEQ ID NO: 10092 - protein, 500 aa, synthetic construct
MRALIVIRLSRVTDATTSPERQLESCQQLCAQRGWDVVGVAEDLDVSGTVDPFDRKRRPNLARWLAFEEQPFDVIVAYRVDRLTRSTRHLQQLVHWAEDHKKLVVSATEAHFDTTTPFAAVVIALMGTVAQMELEAIKERNRSAAHFNIRAGKYRGSLPPWGYLPARVDGEWRLVPDPVQRERILEVYHRVVDNHEPLHLVAHDLNRRGVLSPKDYFAQLQGREPQGRKWSATALKRSMISEAMLGYATLNGKTVRDGDGAPLVRAEPILTREQLEALRAELVKTSRAKPAVSTPSLLLRVLFCAVCGEPAYKFAGGGRKHPRYRCRSMGFPKHCGNGTVVMAEWDAFCEEQVLDLLGDTERLEKVWVAGSDSAVELAEVNAELVDLTSLIGSPAYRAGSPQREALDARIAALAARQEELEGLEARPSGWEWRETGQRFGDWWREQDTAAKNTWLRSMNVRLTFDVRGGLTRTIDFGDLQEYEQHLRSGSVVKRLHTGMS

SEQ ID NO: 10093 - protein, 500 aa, synthetic construct
MRALVVIRLSRVTDATTSPERQLESCQQLCAQRDWDVVGVAEDLDVSGAVDPFDRKRRPNLARWLAFEEQPFDAIVAYRVDRLTRSVRHLQQLVHWAEDHKKLVVSATEAHFDTTTPFAAVVIALMGTVAQMELEAIKERNRSAAHFNIRAGKYRGSLPPWGYLPTRVDGEWRLVPDPVQRERILEVYHRVVDNHEPLYLVAHDLNRRGVLSPKDYFAQLQGREPQGRKWSATALKRSMISEAMLGYATLNGKTVRDDDGAPLVRAEPILTRGQLEALRAELAKTSRAKPAVSTPSLLLRVLFCAVCGEPAYKFAGGGRKHPRYRCRSMGFPKHCGNGTVAMAEWDAFCEEQVLNLLGDAERLEKVWVAGSDSAVELAEVNAELVDLTSLIGSPAYRAGSPQREALDARIAALAARQEELEGLGARPSGWEWRETGQRFGDWWREQDTAAKNTWLRSMNVRLTFDVRGGLTRTIDFGDLQEYEQRLRLGSVVERLHTGMS

SEQ ID NO: 10094 - protein, 500 aa, synthetic construct
MRALVVIRLSRVTDATTSPERQLESCQQLCAQRGWDVVGVAEDLDVSGAVDPFDRKRRPNLARWLAFEEQPFDVIVAYRVDRLTRSTRHLQQLVHWAEDHKKLVVSATEAHFDTTTPFAAVVIALMGTVAQMELEAIRERIRSAAHFNIRAGKYRGSLPPWGYLPTRVDGEWRLVPDPVQRERILEVYHRVVDNHEPLHLVAYDLNRRGVLSPKDYFAQLQGREPRGRKWSATALKRSMTSEAMLGYATLNGKIVRDDDGAPLVRAEPILTREQQEALRAELAKTSRAKPAVSTPSLLLRVLFCAVCGEPAYKFVGGGRKHPRYRCRSMGFPKHCGNGTVAMAEWDAFCEEQVLNLLGDVERLEKVWVAGSDSAVELAEVNAELVDLTSLIGSPAYRAGSPQRAALDARIAALAARQEELEGLGARPSGWEWRGTGQRFGDWWREQDTAAKNTWLRSMNVRLTFDVRGGLTRTIDFGDLQEYEQHLRLGSVVERLHTGMS

SEQ ID NO: 10095 - protein, 500 aa, synthetic construct
MRALVVIRLSRVTDATTSPERQLESCQQLCAQRGWDVVGVAEDLDVSGAVDPFDRKRRPNLARWLAFEEQPFDVIVAYRVDRLTRSVRHLQRLVHWAEDHKKLVVSATEAHFDTTTPFAAVVIALMGTVAQMELEAIKERIRSAAHFNIRAGKYRGSLPPWGYLPTRVDGEWRLVPDPVQRERILEVYRRVVDNHEPLHLVAYDLNRRGVLSPKDHFAQLQGREPQGRKWSATALKRSMTSVAMLGYATLNGKTVRDDDGAPLVRAEPILTRGQQEALRAELAKTSRAKPAVSTPSLLLRVLFCAVCGEPAYKFVGGGRKHPRYRCRSMGFPEHCGNGTVVMAEWDAFCEEQVLDLLGDAERLEKVWVAGSDSAVELAEVNAELVDLTSLIGSPAYRAGSPQREALDARIAALAARQEELEGLEARPSGWEWRETGQRLGDWWREQDTAAKNTWLRSMNVRLTFDVRGGLTRTIDFGDLQEYEQHLRSGSVVERLHTGMS

SEQ ID NO: 10096 - protein, 500 aa, synthetic construct
MRALVVIRLSRVTDATTSPERQLESCQQLCAQRGWDVVGVAEDLDVSGAVDPFDRKRRPNLARWLAFEEQPFDVIVAYRVDRLTRSTRHLQQLVHWAEDHKKLVVSATEAHFDTTTPFAAVVIALMGTVAQMELEAIKERNRSAAHFNIRAGKYRGSLPPWGYLPARVDGEWRLVPDPVQRERILEVYHRVVDNHEPLHLVAHDLNRRGVLSPKDYFAQLQGREPQGRKWSATALKRSMISEAMLGYATLDGKTVRDDDGAPLVRAEPILTREQLEALRAELVKTSRAKPAVSTPSLLLRVLFCAVCGEPAYKFAGGGRKHPRYRCRSMGFPKHCGNGTVAMAEWDAFCEEQVLDLLGDAARLEKVWVAGSDSAVELAEVNAELVDLTSLIGSPDYRAGSPQREALDARIAALAARQEELEGLEARPSGWEWRGTGQRFGDWWREQDTAAKNTWLRLMNVRLTFDVRGGLTRTIDFGDLQEYEQHSRLGSVVGRLHTGMS

SEQ ID NO: 10097 - protein, 500 aa, synthetic construct
MRALVVIRLSRVTDATTSPERQLESCQRLCAQRGWDVVGVAEDLDVSGAVDPFDRKRRPNLARWLAFEEQPFDAIVAYRVDRLTRSTRHLQQLVHWAEDHKKLVVSATEAHFDTTTPFAAVVIALMGTVAQMELEAIKERNRSAAHFNIRAGKYRGSLPPWGYLPARVDGVWRLVPDPVQRERILEVYHRVVDNHEPLHSVAHDLNRRGVLSPKDYFAQLQGREPQGREWSATALKRSMISGAMLGYATLNGKTVRDDDGAPLVRAEPILTREQQEALRAELVKTSRAKPAVSTPSLLLRVLFCAVCGEPAYKFAGGGRKHPRYRCRSMGSPKHCGNGTVAMAEWDAFCEEQVLDLLGDTERLEKVWVAGSDSAVELAEVNAELVDLTSLIGSPAYRAGSPQREALDARIAALAARQEELEGLGARPSGWEWRETGQRFGDWWREQDTAAKNTWLRSMNVRLTFDVRGGLTRTINFGDLQEYEQHLRLGSVVERLHTGMP

SEQ ID NO: 10098 - protein, 500 aa, synthetic construct
MRALVVIRLSRVTDATTSPERQLESCQQLCAQRGWDVVGVAEDLDVSGAVDPFDRKRRPNLARWLAFEEQPFDVIVAYRVDRLTRSVRYLQQLVHWAEDHKKLVVSATEAHFDTTTPFAAVAIALMGTVAQMELEAIKERNRSAAHFNIRAGKYRGSLPPWGYLPTRVDGEWRLVPDPVQRERILEVYHRVVDNHESLHLVAHDLNRRGVLSPKDYFAQLQGREPQGRKWSATALRRSMISEAMLGYATLNGKTVRDDNGAPLVRAEPILTREQLEAIRAELVKTSRAKPAVSTPSLLLRVLFCAVCGEPAYKFAGGGRKHPRYRCRSMGLPKHCGNGTVAMAEWDAFCEEQVLGLFGDAERLEKVWVAGSDSAVELAEVNAELVDLTSLIGSPAYRAGSPQREALDARIAALAARQEELEGLEARPSGWEWRETGQRFGDWWREQDTAAKNTWLRSMNVRLTFDARGGLTRTIDFGDPQEYEQQLRLGSVVERLHTGMS

SEQ ID NO: 10099 - protein, 500 aa, synthetic construct
MRALVVIRLSRVTDATTSPERQLESCQQLCAQRGWDVVGVAEDLDVSGAVDPFDRKRRPNLARWLAFEEQPFDVIVAHRVDRLTRSVRHLQQLVHWAEDYKKLVVSATEAHFDTTTPFAAVVIALMGTVAQMELEAIKERNRSAAHFNIRAGKYRGSLPPWGYLPTRVDGEWRLVPDPVQRERILEVYHRVVDNHEPLHLVAHDLNRRGVLSPKDYFAQLQGREPQGRKWSATALKRSMTSEAMLGYATLNGKTVRDDDGAPLVRAEPILTRVQLEALRAELVKTSRAKPAVSTPSLLLRVLFCAVCGEPAYKFAGGGRKHPRYRCRSMGFPKHCGNGTVAMAEWDAFCEEQVLDLLGDAERLEKVWVAGSDSAVELAEVNAELVDLTGLIGSPAYRAGSPQREALDARIAALAARQEELEGLGARPSGWEWRETGQRFGDWWREQDTAAKNAWLRSMNVRLTFDVRGGLTRTIDFGDLQEYEQHLRLGSVVERLHTGMS

SEQ ID NO: 10100 - protein, 500 aa, synthetic construct
MRALVVIRLSRVTDATTSPERQLESCQQLCAQRGWDVVGVAEDLDVSGAVDPFDRKRRPNLARWLAFEEQPFDVIVAYRVDRLTRSTRHLQQLVHWAEDHKKLVVSATEAHFDTTTPFAAVVIALMGTVAQMELEAIKERNRSAAHFNIRAGKYRGSLPPWGYLPTRVDGEWRLVPDPVQRERILEVYHRVVDNHEPLHLVAHDLNRRGVLSPKDYFAQLQGREPQGRKWSATALKRSMTSVAMLGYATLNGKTVRDDDGAPLVRAEPILTREQLEALRAELVKTSRAKPAVSTPSLLLRVLFCAVCGEPAYKFAGGGRKHPRYRCRSMGFPKHCGNGTVAMAEWDAFCEEQVLDLLGDAERLEKVWVAGSDSAVELAEVNAELADLTSLIGSPAYRAGSPQREALDARIAALAARQEELEGLGARPSGWEWRETGQRFGDWWREQDTAAKNTWLRSMNVRLTFDVRGGLTRTIDFGDLQGYERHLRLGSVVERLHTGMS

SEQ ID NO: 10101 - protein, 500 aa, synthetic construct
MRALVVIRLSRVTDATTSPERQLESCRQLCAQRGWDVVGVAEDLDVSGAVDPFDRKRRPNLARWLAFEEQPFDAIVAYRVDRLTRSVRHLQQLVHWAEDHKKLVVSATEAHFDTTTPFAAVVIALMGTVAQMELEAIRERNRSAAHFNIRAGKYRGSLPPWGYLPARVDGEWRLVPDPVQRERILEVYHRVVDNHESLHLVAHDLNRRGVLSPKDYFAQLQGREPQGRKWSATALERSMISEAMLGYATLNGKTVRDDDGAPLVRAEPILTREQLEALRAELVRTSRAKPAVSTPSLLLRVLFCAVCGEPAYKFAGGGRKHPRYRCRSMGFPKHCGNGTVAMAEWDAFCEEQVLDLLGDAERLEKVWVAGSDSAVELAEVNAELVDLSSLIGSPAYRAGSPQREALDARIAALAARQEKLEGLEARPSGWEWRGTGQRFGDWWREQDTTAKNTWLRSMNVRLTFDVRGGLTRTIDFGDLQECEQHLRLGSVVERLHTGMS

SEQ ID NO: 10102 - protein, 500 aa, synthetic construct
MRALVVIRLSRVTDATTSPERQLESCQQLCAQRGWVVVGVAEDLNVSGAVDPFDRKRRPNLARWLAFEEQPFDVIVAYRVDRLTRSIRHLQQLVHWAEDHKKLVVSATEAHFDTTTPFAAVVIALMGTVAQMELEAIKGRNRSTAHFNIRAGKYRGSLPPWGYLPARVDGEWRLVPDPVQRERILEVYHRVVDNREPLHLVAHDLNRRGVLSPKDYFAQLQGREPQGRKWSATALKRSMTSEAMLGYATLNGKTVRDDDGAPLVRAEPILTREQLEALRAELVKTSRAKPAVSTPSLLLRVLFCAVCGEPAYKFAGGGRKHPRYRCRSMGFPKHCGNGTVAMAEWDAFCEEQVLDLLGDAERLEKVWVAGSDSAVELAEVNAELVDLTSLIGSPAYRAGSPQREALDARIAALAARQEELEGLEARPSGWGWRETGQRFGDWWREQDTAAKNTWLRSMNVRLTFDVRGGLTRTIDFGDLQEYEQHLRLGSVVERLHTGTS

SEQ ID NO: 10103 - protein, 500 aa, synthetic construct
MRALVVIRLSRVTDATTSPERQLESCQQLCAQRGWDVVGVAEDLDVSGAVDPFDRKRRPNLARWLAFEEQPFDVIVVYRVDRLTRSTRHLQQLVHWAEDHKKLVVSATEAHFDTTTPFAAVVIALMGTVAQMELEAIKERNRSAAHFNIRAGKYRGSLPPWGYLPTRVDGEWRLVPDPVQRERILEVYHRVVDNHEPLHWVAHDLNRRGVLSPKDYFAQLQGREPQGRKWSATALKRSIISEAMLGYATLNGKTVRNDDGAPLVRAEPILTRGQLEALRAELVKTSRAKPAVSTPSLLLRVLFCAVCGEPAYKFAGGGRKHPRYRCRSMGFPKHCGNGTVVMAEWDAFCEEQVLDLLGDAERLEKIWVAGSDSAVELAEVNAELVDLSSLIGSPAYRAGSPQREALDARIAALAARQEELEGLETRPSGWEWRETGQRFGDWWREQDTAAKNTWLRSMNVRLTFDVRGGLTRTIDFGDLQEYEQHLRLGSVVERLHTGMS

SEQ ID NO: 10104 - protein, 500 aa, synthetic construct
MRALVVIRLSRVTDATTSPERQLESCQQLCAQRGWGVVGVAEDLDVSGAVNPFDRKRRPNLARWLAFEEQPFDAIVAYRVDRLARSTRHLQQLVHWAEDHKKLVVSATEAHFDTTTPFAAVVIALMGTVAQMELEAIKERNRSAAHFNIRAGKYRGSLPPWGYLPTRVDGEWRLVPDPVQRERILEVYRRVVDNHEPLHLVAHDLNRRGVLSPKDYFAQLRGREPQGRKWSATALKRSMISEAMLGYATLNGKTVRDDDGAPLVRAEPILTRGQLEALRAELAKTSRAKPAVSTPSLLLRVLFCAVCGEPAYKFAGGGRKHPRYRCRSMGFPKHCGNGTVVMAEWDAFCEEQVLGLLGDAERLEKVWVAGSDSAVELAEVTAELVDLTSLIGSPAYRAGSPQREALDARIAALAARQGELESLEARPSGWEWRETGQRFGDWWREQDTAAKNTWLRSMNVRLTFDVRGGLTRTIDFGELHEYEQHLRLGSVVERLHTGMS

SEQ ID NO: 10105 - protein, 500 aa, synthetic construct
MRALVVIRLSRVTDATTSPERQLESCQRLCAQRGWDVVGVAEDLNVSGAVDPFDRKRRPNLARWLAFEEQPFDVIVAYRVDRLTRSIRHLQQLVHWAEDHKKLVVSATEAHFDTTTPFAAVVIALMGTAAQMELEAIKERNRSAAHFNIRAGKYRGSLPPWGYLPTRVDGEWRLVPDPVQRERILEVYHRVVDNHEPLHLVAHDLNRRGVLSPKDYFAQLQGREPQGRKWSATALKRSMISEAMLGYATLNGKTVRDDDGAPLVRAEPILTREQLEALRAELVRTSRAKPAVSTPSLLLRVLFCAVCGEPAYKFAGGGRKHPRYRCRSMGFPKHCGNGTVVMAEWDAFCEEQVLDLLGDAERLEKVWVAGSDSAVELAEVNAELVDLSSLIGSPAYRAGSPQREALDARIAALAARQEELEGLGARPSGWEWRETGQRFGDWWREQDTAAKNTWLRSMNVRLTFDVRGGLTRTIDFGDLQEYEQRLRLGSVVERLHTGMS

SEQ ID NO: 10106 - protein, 500 aa, synthetic construct
MRALVVIRLSRVTDATTSPERQLESCQQLCAQRGWDVVGVAEDLDVSGAVDPFDRKRRPNLARWLAFEEQPFDVIVAYRVDRLTRSTRHLQQLVRWAEDHKKLVVSATEAHFDTTTPFAAVVIALMGTVAQMELEAIKERIRSAVRFNIRAGKYRGSLPPWGYLPTRVDGEWRLVPDPVQRERILEVYHRVVDNHEPLHLVARDLNRRGVLSPKDYFAHLRGREPQGRKWSATALKRSMTSKAMLGYATLNGKTVRDDDGAPLVRAEPILTREQQEALRAELVRTSRAKPAVSTPSLLLRVLFCAVCGEPAYKFVGGGRKHPRYRCRSMGFPKHCGNGTVVMTEWDAFCEEQVLDLLGDAERLEKVWVAGSDSAVELAEVNAELVDLTSLIGSPAYRAGSPQREALDARIAALAARQEELEGLEARPSGWEWRETGQRFGDWWREQDTAARNTWLRSMNVRLTFDVRGGLTRTIDFGDLQEYEQHLRLGSVAERLHTGMS

SEQ ID NO: 10107 - protein, 500 aa, synthetic construct
MRALVVIRLSRVTDATTSPERQLESCQQLCAQRGWDVVGVAEDLDVSGAVDPFDRKRRPNLARWLAFEEQPFDVIVAYRVDRLTRSTRHLQQLVHWAEDHKKLVVSATEAHFDTTTPFAAVVIALMGTVAQMELEAIKERNRSAAHFNIRAGKYRGSLPPWGYLPARVDGEWRLVPDPVQRERILEVYRRVVDNHEPLHLVAHDLNRRGVLSPKDYFAQLRGREPQGRKWSATALKRSMISEAMLGYATLNGKTVRDDNGAPLVRAEPILTREQLEALRAELVKTSRAKPAVSAPSLLLRVLFCAVCGEPAYKFAGGGRKHPRYRCRSMGYPKHCGNGTVAMAEWDAFCEGQVLDLLGDAERLEKVWVAGSDSAVELAEVNAELVDLTSLIGSPAYRAGSPQREALDARIAALAARQEELEGLEARPSGWEWRGTGQRFGDWWREQDTAAKNTWLRSVNVRLTFDVRGGLTRTIDFGDLQEYEQHLRLGSVVERLHTGMS

SEQ ID NO: 10108 - protein, 500 aa, synthetic construct
MRALVVIRLSRVTDATTSPERQLESCQQLCSQRGWDVVGVAEDLDVSGAVDPFDRKRRPNLARWLAFEEQPFDVIVAYRVDRLTRSTRHLQQLVHWAGDHKKLVVSATEAHFDTTTPFAAVVIALMGTVAQMELEAIKERIRSAVRFNIRAGKYRGSLPPWGYLPTRVEGEWRLVPDPVQRERILEVYHRVVDNHEPLHLVAHDLNRRGVLSPKDYFAQLRGREPRGRKWSATALKRSMTSVAMLGYATLNGKTVRGDDGAPLVRAEPILTREQLEALRAELVKTSRAKPAVSTPSLLLRVLFCAVCGEPAYKFTGGGRKHPRYRCRSMGFPKHCGNGTVVVAEWDAFCEEQVLNLLGDAERLEKVWVAGSDSAVELAEVNAELVDLTSLIGSPAYRAGSPQREALDARIAALAARQEELEGLEARPSGWEWRGTGQRFGDWWREQDTAAKNTWLRSMNVRLTFDVRGGLTRAIDFGDLREYEQHLRSGSVVERLHTGRS

SEQ ID NO: 10109 - protein, 500 aa, synthetic construct
MRALVVIRLSRVTDATTSPERQLESCQQLCAQRGWDVVGVAEDLDVSGAVDPFDRKRRPSLARWLAFEEQPFDVIVAYRVDRLTRSTRHLQQLVHWAEDHKKLVVSATEAHFDTTTPFAAVVIALMGTVAQMELEAIKERIRSAVHFNIRAGKYRGSLPPWGYLPTRVDGEWRLVPDPVQRERILEVYHRVVDNHEPLHLVAYDLNRRGVLSPKDYFAQLQGREPQGRKWSSTALKRSMISVAMLGYATLNGKIVRDDDGAPLVRAEPILTREQQEALRAELAKTSRAKPAVSTPSLLLRVLFCAVCGEPAYKFVGGGRKHPRYRCRSMGFPEHCGNGTVVMAEWDAFCEEQVLNLLGDAERLEKVWVVGSDSSVELAEVNAELVDLTSLIGSPAYRAGSPQREALDARIAALAARQEELEGLEARPSGWEWRETGQRFGDWWREQDTAAKNTWLRSVNVRLTFDVRGGLTRTIDFGELQEYEQHLRLGSVAERLHTGMP

SEQ ID NO: 10110 - protein, 500 aa, synthetic construct
MRALVVIRLSRVTDATTSPERQLESCQQLCVQRDWDVVGVAEDLDVSGAVDPFDRKRRPNLARWLAFEEQPFDVIVTYRVDRLTRSTRHLQQLVHWAEDHKKLVVSATEAHFDTTTPFAAVVIALMGTVAQMELEAIKERIRSAAHFNIRAGKYRGSLPPWGYLPARVDGEWRLVPDPVQRERILEVYHRVVDNHEPLHLVAHDLNRRGVLSPKDYFAQQQGREPQGRKWSATALKRSMISGAMLGYATLNGKIVRDDDGAPLVRAEPILTREQLEALRAELVKTSRAKPAVSTPSLLLRVLFCAVCGEPAYKFAGGGRKHPRYRCRSMGFPKHCGNGTVVMAEWDAFCEEQVLNLLGDAERLEKVWVAGSDSAVELAEVNAELVDLTSLIGSPAYRAGSPQREALDARIAALAARQEELEGLEARPSGWEWRETGQRFGDWWREQDTAAKNAWLRAMNVRLTFDVRGGLTRTIDFGDLRRYEQHLRLGSVVEQLHTGMS

SEQ ID NO: 10111 - protein, 500 aa, synthetic construct
MRALVVIRLSRVTDATTSPERQLESCQQLCAQRGWDVVGVAEDLDVSGAADPFDRKRRPSLARWLAFEEQPFDAIVAYRVDRLTRSVRHLQQLVHWAEDHKKLVVSATEAHFDTTTPFAAVVIALMGTVAQMELEAIKERNRSAAHFNIRAGKYRGSLPPWGYLPTRVDGEWRLAPDPVQRERILEVYHRVVDNHEPLHLVAHDLNRRGVLSPKDYFAQLQGREPQGRKWSATALKRSMISETMLGYATLNGKTVRDDDGAPLVRAEPILTRGQLEALRAELAKTSRAKPAVSTPSLLLRVLFCAVCGEPAYKFAGGGRKHPRYRCRSMGFPKHCGNGTVAMAEWDAFCEEQVLGLLGDAERLEKVWVASSNSAVELVEVNAELVDLTSLIGSPAYRAGSPQREALDARIAALAARQEELEGLGARPSGWEWRETGQRFGDWWREQDTAAKNTWLRSMNVRLTFDVRGGLTRTIDLGDLQEYVRHLRLGSVVERLHTGMS

SEQ ID NO: 10112 - protein, 500 aa, synthetic construct
MRALVVIRLSRVTDATTSPERQLESCQQLCAQRGWDVVGVAEDLDVSGAVDPFDRKRRPNLARWLAFEEQPFDAIVAYRVDRLTRSTRHLQQLVHWAEDHKKLVVSATEAHFDTTTPFAAVVIALMGTVAQMELEAIKERNRSAAHFNIRAGKYRGSLPPWGYLPTRVDGEWRLVPDPVQRERIFEVYHRVVDNHESLHLVAHDLNRRGVLSPKDYFAQLRGREPQGRKWSATALKRSMISEAMLGYATLNGKTVRDDDGAPLMRAEPILTREQLEALRAELVKTSRAKPAVSTPSLLLRVLFCAVCGEPAYKFAGGGRKHPRYRCRSMGFPKHCGNGTVAMAEWDAFCEEQVLGLLGDAERLEKVWAAGSDSAVELAEVNAELVDLTSLIGSPAYRAGSPQREALDTRIAALAARQEELKGLGARPSGWEWRETGQRFGDWWREQDTAAKNTWLRSMNVRLTFDVRGGLTRTIDFGDLREYEQHLRSGSVVERLHTGMS

SEQ ID NO: 10113 - protein, 500 aa, synthetic construct
MRALVVIRLSRVTDATTSPERQLESCQQLCAQRGWDVVGVAEDLDVSGAVDPFDRKRRPNLARWLAFEEQPFDVIVAYRVDRLTRSTRHLQQLVHWAEDHKKLVVSATEAHFDTTTPFAAVVIALMGTVAQMELEAIRERNRSAAHFNIRAGKYRGSLPPWGYLPARVDGEWRLVPDPVQRERILEVYHRVVDNHEPLHLVAHDLNRRGVLSPKDYFAQLQGREPQGRKWSATALKRSMISKAMLGYATLNGKTVRDDDGAPLVRAEPILTRGQLEALRAELVKTSRAKPAVSTPSLLLRVLFCAVCGEPAYKFAGGGRKHPRYRCRSMGFPKHCGNGTVAMAEWDAFCEEQVLDLLGDAERLEKVWAAGSDSAVELAEVNAELVDLTSLISSPAYRAGSPQREALDARIAALAARQEELEGLEARPSGWEWRETGQRFGDWWREQDTAAKNTWLRSMNVRLTFDVRGGLTRTIDFGDLQKYEQHLRLGSVVERSHTGMS

SEQ ID NO: 10114 - protein, 500 aa, synthetic construct
MRALVVIRLSRVTDATTSPERQLASCQQLCAQRGWDVVGVAEDLDVSGAVDPFDRKRRPNLARWLAFEEQPFDVIVAYRVDRLTRSVRHLQQLVHWAEDNKKLVVSATEAHFDTTTPFAAVVIALMGTVAQMELEAIKERIRSAVRFNIRAGKYRGSLPPWGYLPTRVDGEWRLVPDPVQRERILEVYHRVVDNHEPLHLVAHDLNRRGVLSPKDYFAQLQGREPQGRKWSATALKRSMTSVTMLGYATLNGKIVRDDDGAPLVRAEPILTREQQEALRAELVKTSRAKPAVSTPSLLLRVLFCAVCGEPAYKFVGGGRKHPRYRCRSMGFPKHCGNGTVVMAEWDAFCEEQVLNLLGDAERLEKVWVAGSDSAIELAEVNAELEDLTSLIGSSAYRAGSPQREALAARIVALAARQGELEGLEARPSGWEWRGTGQRFGDWWREQDTAAKNTWLRSMNVRLTFDVRGGLTRTIDFGDLQEYEQHFRLGSVVERLHTGMS

SEQ ID NO: 10115 - protein, 500 aa, synthetic construct
MRALVVIRLSRVTDATTSPERQLESCQQLCAQRGWDVVGVAEDLDVSGAVDPFDRKRRPNLARWLAFEEQPFDVIVAYRVDRLSRSIRHLQQLVHWAEDHKKLVVSATEAHFDMTTPFAAVVIALMGTVAQMELEAIKERNRSAAHFNIRAGKYRGSLPPWGYLPTRVDGEWRLAPDPVQRERILEVYHRVVDNHEPLHLVAHDLNRRGVLSPKDYFAQLQGREPRGRKWSATALKRSMISEAMLGYATLNGKTVRDDDGAPLVRAEPILTREQLEALRAELVKTSRAKPAVSTPSLLLRVLFCAVCGEPAYKFAGGGRKHPRYRCRSMGFPKHCGNGTVAMAEWDAFCEEQVLDLLGDAERLEKVWVAGSDSAVELAEVNAELVDLTSLIGSPAYRAGSPQREALDARIAALAERQEELEGLGARPSGWKWRETGQRFGVWWREQDTAAKNTWLRSMNVRLTFDVRGGLTRTIDFGDLQEYEQHLRLGSVVERLHTGMS

SEQ ID NO: 10116 - protein, 500 aa, synthetic construct
MRALVVIRLSRVTDATTSPERQLESCQQLCAQRGWDVVGVAEDLDVSGAVDPFDRKRRPNLARWLAFEEQPFDVIVAYRVDRLTRSTRHLQQLVHWAEDHKKLVVSATEAHFDTTSPFAAVVIALMGTVAQMELEAIKERIRSAVHFNIRAGKYRGSLPPWGYLPTRVDGEWRLVPDPVQRERILEVYHRVVDNHEPLHLVAHDLNRRGVLSPKDYFAQLRGREPQGREWSATALRRSMTSETMLGYATLNGKTVRDDDGAPLVRAEPILTREQQEALRAELVKTSRAKPAVSTPSLLLRVLFCAVCGEPAYKFVGGGRKHPRYRCRSMGFPKHCGNGTVVMAEWDAFCEEQVLDLLGDAERLEKVWVAGSDSAVELAEVNAELVDLTSLIGSPAYRAGSPQREALDARIAALAARQEELEGLEARPSSWEWRGTGQRFGDWWREQDTAAKNTWLRAMNVRLTFDVRGGLTRTIDFGDLQKYEQHLRLGSVVERLHTGRS

SEQ ID NO: 10117 - protein, 500 aa, synthetic construct
MRALVVIRLSRVTDATTSPERQLESCQQLCAQRGWDVVGVAEDLDVSGAVDPFDRKRRPNLARWLAFEEQPFDVIVTYRVDRLTRSTRHLQQLVHWAEDHKKLVVSATEAHFDTTTPFAAVVIALMGTVAQMELEAIKERIRSAAHFNIRAGKYRGSLPPWGYLPTRVGGEWRLVPDPVQRERILEVYHRVVDNHEPLHLVAHDLNRRGVLSPKDYFAQLRGREPQGRKWSATALKRSMISVAMLGYATLNGKIVRDDDGAPLVRAEPILTRGQQEALRAEFAKTSRAKPAVSTPSLLLRVLFCAVCGEPAYKFVGGGRKHPRYRCRSMGFPKHCGNGTVVMTEWDAFCEKQVLGLLGDAERLERVWVAGSDSAVELAEVNAELVDLTGLVGSPAYRAGSPQREALDARIAALAARQEELGGLEARPSGWEWRGTGQRFRDWWREQDTAAKNTWLRSMNIRLTFDVRGGLTRTIDFGDLREYEQHLRLGSVAERLRTGTS

SEQ ID NO: 10118 - protein, 500 aa, synthetic construct
MRALIVIRLSRVTDATTSPERQLESCQQLCAQRGWDVVGVAEDLDVSGAVGPFDRKRRPNLARWLAFEEQPFDAIVAYRVDRLTRSTRHLQQLVHWAEDHKKLVVSATEAHFDTTTPFAAVVIALMGTVAQMELEAIKERNRSAAHFNIRAGKYRGSLPPWGYLPTRVDGEWRLVPDPVQRERILEVYRRVVDNHEPLHLVAHDLNRRGVLSPKDYFAQLRGREPQGRKWSATALKRSMISEAMLGYATLNGKTVRDDDGVPLVRAEPILTREQLEALRAELVRTSRAKPAVSTPSLLLRVLFCAVCGEPAYKFAGGGRKHPRYRCRSMGFPKHCGNGTVAMAEWDAFCEDQVLDLLGDAERLEKVWVAGSDSAVELAEVNAELVDLTSLIGSPAYRAGSPQREALDARIAALAARQEELEGLEARPSGWEWRETGQRFGDWWREQDTAAKNTWLRSMNVRLTFDARGGLTRTIDFGDLQGYEQQLRLGSVVERLHTGMS

SEQ ID NO: 10119 - protein, 500 aa, synthetic construct
MRALVVIRLSRVTDATTSPERQLESCQQLCAQRGWDVVGVAEDLDVSGAVDPFDRKRRPNLARWLAFEEQPFDVIVACRVDRLTRSTRHLQQLVHWAEDHKKLVVSATEAHFDTTTPFAAVVIALMGTVAQMELEAIKERNRSAAHFNIRAGKYRGSLPPWGYLPTRVDGEWRLVPDPVQRERILEVYHRVVDNHEPLHLVAHDLNRRGVLSPKDYFAQLRGREPQGRKWSATALKRSMISEAMLGYATLNGRTVRDDDGAPLVRAEPILTREQLEALRAELARTSREKPAVSTPSLLLRVLFCAVCGEPAYKFAGGGRKHPRYRCRSMGFPEHCGNGTVVMAEWDAFCEEQVLNLLGDAERLEKVWVAGSDSAAELAEVNAELVDLTSLIGSPAYRAGSPQREALDVRIAALAARQEELEGLEARPSGWEWRETGQRFGDWWREQDTAAKNTWLRSMNVRLTFDVRGGLTRTIDFGDLQGYEQHSRLGSVVERSHTGMS

SEQ ID NO: 10120 - protein, 500 aa, synthetic construct
MRALVVIRLSRVTDATTSPERQLESCQQLCAQRGWDVVGVAEDLDVSGAVDPFDRKRRPNLARWLAFEEQPFDVIVVYRVDRLTRSTRHLQQLVHWAEDHKKLVVSATEAHFDTTTPFAAVVIALMGTVAQMELEAIKERNRSAAHFNIRAGKYRGSLPPWGYLPTRVDGEWRLVPDPVQRERILEVYHRVVDNHEPLHSVAHDLNRRGVLSPKDYFAQLRGREPQGRKWSATALKRSMISEAMLGYATLNGKTVRDDDEAPLVRAEPILTRGQLEALRTALVKTSRAKPAVSTPSLLLRVLFCAVCGEPAYKLSGGGRKHPRYRCRSMGFPKHCGNGTVAMAEWDAFCEEQVLNLLGDAERLEKVWVTGSDSAVELAEVNAELADLTSLIGSPAYRAGSPQREALDARIAALAARQEELEGLEARPSGWEWRGTGQRFGDWWCEQDTAAKNTWLRSMNVRLTFDARGGLTRTIDFGDLQEYEQHLRLGSVVERLYTGMS

SEQ ID NO: 10121 - protein, 500 aa, synthetic construct
MRALVVIRLSRVTDATTSPERQLESCQQLCAQRGWDVVGVAEDLDVSGAVDPFDRKRRPNLARWLAFEEQPFDVIVAYRVDRLTRSTRHLQQLVHWAEDHKKLVVSATEAHFDTTTPFAAVVIALMGTVAQMELEAIKERIRSAVHFNIRAGKYRGSLPPWGYLPTRVDGEWRLAPDPVQCERILEVYHRVVDNHEPLHLVAHDLNRRGVLSPKDYFAQLQGREPQGRKWSATALKRSMTSGAMLGYATLNGKTVRDDDGAPLVRAEPILTRGQLEALRAELAKTSRAKPAVSTPSLLLRVLFCAVCGEPAYKFVGGGRKHPRYRCRSMGFPKHCGNGTVVMAEWDAFCEEQVLDLLGDAERLEKVWVAGSDSAVELAEVNAELVDLTSLIGSPAYRAGSPQREALDARIAALAARQEELEGLEARPSGWEWRGTGQRLGDWWREQDTAAKNTWLRTMNVRLTFDARGGLTRTIDFGDLQEYVQHLRLGSVVERLHTGTS

SEQ ID NO: 10122 - protein, 500 aa, synthetic construct
MRALIVIRLSRVTDATTSPERQLESCQQLCAQRGWDVVGVAEDLDVSGAVDPFDRKRRPNLARWLAFEEQPFDAIVAYRVDRLTRSTRHLQQLVHWAEDHKKLVVSATEAHFDTTTPFAAVVIALMGTVAQMELEAIKERNRSAAHFNIRAGKYRGSLPPWGYLPTRVDGEWRLVPDPVQRERILEVYHRVVDNHEPLHLVAHDLNRRGVLSPKDYFAQLRGREPQGRKWSATALKRSMISEAMLGYATLNGKTVRDDDGAPLVRAEPILTREQLEALRAELVKTSRAKPAVSTPSLLLRVLFCAVCGEPAYKLAGGGRKHPRYRCRSMGFPKHCGNGTVAMAEWDAFCEEQVLDLLGDVEHLEKVWIAGSDSAVELAEVNAELVDLTSLIGSPAYRAGSPQREALDAHIAALAARQEELEGLEARPSGWEWRETGQRFGDWWREQDTAAKNTWLRSMNVRLTFDVRGGLTRTIDFGDLLEYEQHLRLGSVVERLHTGMS

SEQ ID NO: 10123 - protein, 500 aa, synthetic construct
MRALVVIRLSRVTDATTSPERQLESCQQHCAQRGWDVVGVAEDLDVSGAVDPFDRKRRPNLARWLAFEEQPFDVIVAYRVDRLTRSVRHLQRLVHWAEDHKKLVVSATEAHFDTTTPFAAVVIALMGTVAQMELEAIKERNRSAAHFNIRAGKYRGSLPPWGYLPTRVDGEWRLVPDPVQRERILEVYHRVVDNHEPLHLVAHDLNRRGVLSPKDYFAQLQGREPQGRKWSATALKRSMISEAMLGYATLNGKTVRNDDGAPLVRAEPILTREQLEALRAELVRTSRAKPAVSTPSLLLRVLFCAVCGEPAYKFAGGGRKHPRYRCRSMGFPKHCGNGTVVMAEWDAFCEEQVLGLLGDAERLEKVWVAGSDSAVELAEVNAELVDLTSLIGSPAYRAGSPQREALDARIAALTARQEELEGLGARPSGWEWRETGQRFGDWWREQDTAAKNTWLRSMNVRLTFDVRGGLTRTIDFGDLQEYEQHLRLGSVVERLHTGMS

SEQ ID NO: 10124 - protein, 500 aa, synthetic construct
MRALVVIRLSRVTDATTSPERQLESCQQLCAQRGWDVVGVAEDLDVSGAVDPFDRKRRPNLARWLAFEEQPFDVIVAYRVDRLTRSTRHLQQLVHWAEDHKKLVVSATEAHFDTTTPFAAVVIALMGTVAQMELEAIKERNRSAAHFNIRAGKYRGSLPPWGYLPTRVDGEWRLVPDPVQRERILEVYHRVVDNHEPLHWVAHDLNRRGVLSPKDYFAQLRGREPQGRKWSATALKRSMISEAMLGYATLNGKTVRDEDGAPLVRAEPILTREQLEALRAELVKTSRAKPAVSTPSLLLRVLFCAVCGEPAYRFAGGGRKHPRYRCRSMGFPKHCGNGTVVMAEWDAFCEQQVLNLLGDAERLEKVWVAGSDSAVELAEVNAELVDLTSLIGSPAYRAGSPQREALDARIAALAARQEELKGLGARPSGWEWRETGQRFGDWWREQDTAAKNTWLRSMNVRLTFDVRGGLTRTIDFGDLQEYEQHLRLGSVVERLHTGMS

SEQ ID NO: 10125 - protein, 500 aa, synthetic construct
MRALVVIRLSRVTDATTSPERQLESCQQLCAQRGWDVVGVAEDLDVSGAVDPFDCKRRPNLARWLAFEEQPFDAIVAYRVDRLTRSVRHLQQLVHWAEDHKKLVVSATEAHFDTTTPFAAVVIALMGTVAQMELEAIKERNRSAAHFNIRAGKYRGSLPPWGYLPARVDGEWRLAPDPVQRERILEVYHRVVDNHEPLHLVAHDLNRRGVLSPKDYFAQLQGREPQGRKWSATALKRSMISEAMLGYVTLNGKTVRGDDGAPLVRAEPILTRVQLEALRAELVKTSRAKPAVSTPSLLLRVLFCAVCGEPAYKFAGGGRKHPRYRCRSMGFPKHCGNGTVAMAEWDAFCEEQVLDLLGDAERLEKVWVAGSDSAAELAEVNAELVDLTSLIGSPAYRADSPQREALDARIAALAARQEELEGLGARPSGWEWRETGQRFGDWWREQDTAAKNAWLRSMNVRLTFDIRGGLTRTIDLGDLQEYEQHLRLGSVVERLHTGMS

SEQ ID NO: 10126 - protein, 500 aa, synthetic construct
MRALVVIRLSRVTDATTSPERQLESCQRLCAQRGWDVVGVAEDLDVSGAVDPFDRKRRPNLARWLAFEEQPFDVIVAYRVDRLTRSTRHLQQLVHWAEDHKKLVVSATEAHFDTTTPFAAVVIALMGTVAQMELEAIKERNRSAAHFNIRAGKYRGSLPPWGYLPTRVDGEWRLVPDPVQRERILEVYHRVVNNHESLHLVAHDLNRRGVLSPKDYFAQLQGREPQGRKWSATALKRSMTSEAMLGYATLNGKTVRDDGGAPLVRAEPILTRGQLEALRAELVKTSRAKPAVSTPSLLLRVLFCAVCGEPAYKFAGGGRKHPRYRCRSMGFPKHCGNGTVAMAEWDAFCEGQVLDLLGDAERLEKAWVAGSDSAVELAEVNAELVDLTSLIGSPAYRAGSPQREALDARMAALAARQEELEGLGARPSGWEWRGTGQRFGDWWREQDTAAKNTWLRSMNVRLTFDVRGGLTRTIDFGDLHEYEQHLRLGSVVERLHTGMS

SEQ ID NO: 10127 - protein, 500 aa, synthetic construct
MRALVVIRLSRVTDATTSPERQLESCQQLCAQRGWDVVGVAEDLNVSGAVDPFDRKRRPNLARWLAFEEQPFDVIVAYQVDRLTRSTRHLQQLVHWAEDHKKLVVSATEAHFDTTTPFAAVVIALMGTVAQMELEAIKERNRSAAHFNIRAGKYRGSLPPWGYLPTRVDGEWRLVPDPVQRERILEVYHRVVDNHEPLHLVAHDLNRRGVLSPKDYFAQLQGRAPQGRKWSATALKRSMTSEAMLGYATLNGKTVRDDDGAPLVRAEPILTRVQLEALRAELVKTPRAKPAVSTPSLLLRVLFCAVCGEPAYKFAGGGRKHPRYRCRSMGFPKHCGNGTVVMAEWDAFCEEQVLGLLGEVGRLEKVWVAGSDSAVELAEVNAELVDLTSLIGSPAYRAGSPQREALDTRIAVLAARQGELEGLEARPSGWELRETGQRFGDWWREQDTAAKNTWLRSMNVRLTFDVRGGLTRTIDFGDLQEYEQHLRLGSVVERLHTGTS

SEQ ID NO: 10128 - protein, 500 aa, synthetic construct
MRALVVIRLSRVTDATTSPERQLESCQQLCAQRGWDVVGVAEDLDVSGAVDPFDGKRRPNLARWLAFEEQPFDVIVAYRIDRLTRSVRHLQQLVHWTEDHKKLVVSATEAHFDTTTPFAAVVIALMGTVAQMELEAIKERNRSAAHFNIRAGKYRGSLPPWGYLPTRVDGEWRLVPDPVQCERILEVYHRVVDNHEPLHLVAHDLNQRGVLSPKDYFAQLRGREPQGRKWSATALKRSMTSEAMLGYATLSGKTVRDDDGAPLVRAEPILTREQLETLRAELVKTSRAKPAVSTPSLLLRVLFCAVCGEPAYKFAGGGRKHPRYRCRSMGFPRHCGNGTVAMAEWDAFCEEQVLDLLGDAERLEKVWVAGSDSAVELAEVNAELVDLTSLIGSPAYRAGSPQREALDARIAALAARQEELEGLGARPSGWEWRETGQRFGDWWREQDTAAKNTWLRSMNVRLTFDVRGGLTRTIDFGDLQEYEQHLRLGSVVERLHTGAS

SEQ ID NO: 10129 - protein, 500 aa, synthetic construct
MRALVVIRLSRVTDATTSPERQLESCQQLCAQRGWDVVGVAEDLDVSGAVDPFDRKRRPNLARWLAFEEQPFDAIVAYRVDRLTRSIRHLQQLVHWAEDHKKLVISATEAHFDITTPFAAVVIALMGTVAQMELEAIKERNRSAAHFNIRAGKYRGSLPPWGYLPARVDGEWRLVPDPVQRERIFEVYHRVVDNHEPLHLVAHDLNRRGVLSPKDYFAQLQGREPQGRKWSATALKRSMISEAMLGYATLNGKTVRDDDGAPLVRAEPILTREQQEALRAELVKTSRVKPAVSTPSLLLRVLFCAVCGEPAYKFAGGGRKRPRYRCRSMGFPKHCGNGTVAMAEWDAFCEEQVLDLLGDAERLEKVWVAGSDSAVELEEVNAELADLTSLIGSPAYRAGSPQRETLDARIAALAARQEELEGLEARPSGWEWRETGQRFGDWWREQDTAAKNTWLRSMNVRLTFDARGGLTRTIDFGDLQEYEQHLRLGSVVERLRTGMS

SEQ ID NO: 10130 - protein, 500 aa, synthetic construct
MRALVVIRLSRVTDATTSPERQLESCQQLCAQRGWDVVGVAEDLDVSGAVDPFDRKRRPNLARWLAFEEQPFDAIVAYRVDRLTRSVRHLQQLVHWAEDHKKLVVSATEAHFDTTTPFAAVVIALMGTVAQMELEAIKERNRSAAHFNIRAGKYRGSLPPWGYLPTRVGGEWRLVPDPVQRERILEVYHRVVDNHEPLHLVAHDLNRRGVLSPKDYFAQLRGREPQGRKWSATALKRSMTSEAMLGYATLNGKTVRGDDGAPLVRAEPILTREQLEALRAELVKTSRAKPAVSTPSLLLRVLFCAVCGEPAYKFAGGGRKHPRYRCRSMGFPKHCGNGTVAMAEWDAFCEEQVLDLLGDAERLEKVWVAGSDSAVELAEVSAELVDLTSLIGSPAYRAGSPQREALDARIAALAARQEELEGLGARPSGWEWRETGQRFGDWWREQDTAAKNTWLRSMNVRLMFDVRGGLTRTIDFGDLQEYEQHLRSGGVVERLHTGMS

SEQ ID NO: 10131 - protein, 500 aa, synthetic construct
MRALVVIRLSRVTDATTSPERQLESCQQLCAQRGWDVVGIAEDLDVSGAVDPFDRKRRPNLARWLAFEERPFDVIVAYRVDRLTRSTRHLQQLVHWAEDHEKLVVSATEPHFDTTTPFAAVVIALMGTVAQMELEAIKERNRSAARFNIRAGKYRGSLPPWGYLPTRVDGEWRLVPDPVQRERILEVYHRVVDNHEPLHWVAHDLNRRGVLSPKDYFAQLQGREPRGRKWSATALKRSMISEAMLGYATLDGKTVRDDDGAPLVRAEPILTREQLEALRAELVKASRAKPAVSTPSLLLRVLFCAVCGEPAYKFAGGGRKHPRYRCRSMGFPKHCGNGTVVMAEWDAFCEEQVLNLLGDAERLEKVWVAGSDSAVELAEVNAELVDLTSLIGSPAYRAGSPQREALDARIAALAARQEELKGLGARPSGWEWRETGQRFGDWWREQDTAAKNTWLRSMNVRLTFDVRGGLTRTIDFGDLQEYEQHLRLGSVVERLHTGMS

SEQ ID NO: 10132 - protein, 500 aa, synthetic construct
MRALVVIRLSRVTDATTSPERQLETCQQLCAQRGWDVVGVAEDLDVSGAVDPFDRKRRPNLARWLAFEEQPFDAIVAYRVDRLTRSVRHLQQLVHWAEDHKKLVVSATEAHFDTTTPFAAVVIALMGTVAQMELEAIKERNRSAAHFNIRAGKYRGSLPPWGYLPARVDGEWRLVPDPVQRERILEVYHRVVDNHESLHLVAHDLNRRGALSPKDYFAQLQGREPQGRKWSATALKRSMISVAMLGYATLNGKTVRDDDGAPLVRAEPILTREQLEALRAELVKTSRAKPAVSTPSLLLRVLFCAVCGEPAYKFAGGGRKHPRYRCRSMGFPRHCGNGTVVMTEWDAFCEEQVLNLLGDAERLEKVWVAGSDSAVELAEVSAELVDLTSLIGSPAYRAGSPQREALDARIAALAARQEELEGLEARPSGWEWRGTGQRFEDWWREQDTAAKNTWLRSMNVRLTFDVRGGLTRAIDFGDLQEYEQHLRLGSVDERLHTGMS

SEQ ID NO: 10133 - protein, 500 aa, synthetic construct
MRALVVIRLSRVTDATTSPERQLESCQQLCAQRGWNVVGVAEDLDVSGAVDPFDRKRRPNLARWLAFEEQPFDVIVAYRVDRLTRSVRHLQQLVHWAGDHKKLVVSATEAHFDTTTPFAAVVIALMGTVAQMELEAIKERSRSAAHFNIRAGKYRGSLPPWGYLPARVDGEWRLVPDPVQRERILEVYHRVVDNHEPLHLVAHDLNRRGVLSPKDYFAQLRGREPQGRKWSATALKRSMTSVTMLGYATLNGKIVRDDDGAPLVRAEPILTRGQLEALRAELVKTSRAKPAVSTPSLLLRVLFCAVCGEPAYKFVGGGRKHPRYRCRSMGFPKHCGNGTVAMAEWDAFCEEQVLNLLGDAERLEKVWVAGSDSAVELAEVNAELVDLTSLIGSPAYRAGSPQREALDARIAALAARQEELEGLEARPSGWEWRGTGQRFGDWWREQDTAAKNTWLRSMNVRLTFDARGGLTRTIDFGDLREYVQHLRLGSVVERLHTGMS

SEQ ID NO: 10134 - protein, 500 aa, synthetic construct
MRALVVIRLSRVTDTTTSPERQLESCQQLCAQRGWDVVGVAEDLDVSGAVDPFDRKRRPNLARWLALEEQPFDVIVAHRVDRLTRSVRHLQQLVHWAEDHKKLVVSATEAHFDTTTPFAAVVIALMGTVAQMELEAIKERNRSAAHFNIRAGKYRGSLPPWGYLPTRVDEEWRLVPDPVQRERILEVYRRVVDNHEPLHLVAHDLNRRGVLSPKDYFAQLQGREPQGRKWSATALKRSMISEAMLGYATLNGKTVRDDDGAPLVRAEPILTREQQEALRAELVKTSRAKPAVSTPSLLLRVLFCAVCGEPAYKFAGGGRKHPRYRCRSMGFLKHCGNGTVAMAEWDAFCEEQVLDLLGDAERLERVWVAGSDSAVELAEVNAELVDLTSLIGSPAYRAGSPQREALDARIAALAARQEELEGLEARPSGWVWRATGQRFGDWWREQDTAAKNTWLRSMNVRLTFDVRGGQTRTIDFGDLREYEQHLRLGSVVERLHTGMS

SEQ ID NO: 10135 - protein, 500 aa, synthetic construct
MRALIVIRLSRVTDATTSPERQLESCQQLCAQRGWDVVGVAEDLDVSGAVDPFDRKRRPNLARWLAFEEQPFDAIVAYRVDRLTRSVRHLQQLVHWAEDHKKLIVSATEAHFDTTTPLAAVVIALMGTVAQMELEAIKERNRSAAHFNIRAGKYRGSLPPWGYLPTRVDGEWRLVPDPVQRERILEVYHRVVDDHEPLHLVAHDLNRRGVLSPKDYFAQLQGREPQGRKWSATALKRSMISEAMLGHATLNGKTVRDDDGAPLVRAEPILTRVQLEALRAELVKTSRAKPAVSTPSLLLRVLFCAVCGEPAYKFAGGGRKHPRYRCRSMGFPKHCGNGTVAMAEWDAFCEEQVLNLLGDAERLEKVWVAGSDSAVELAEVNAELVDLTSLIGSPTYRAGSPQREALDARIAALAARQEELEGLRARPSGWEWRETGQRFGDWWREQDTAAKNAWLRSMNVRLTFDARGGLTRTIDFGDLQEYEQHLRLGSVVERLHTGMS

SEQ ID NO: 10136 - protein, 500 aa, synthetic construct
MRALVVIRLSRVTDATTSPERQLESCQQLCAQRGWDVVGVAEDLDVSGAVDPFDRKRRPNLARWLAFEEQPFDVIVAYRVDRLTRSTRHLQQLVRWAEDHKKLVVSATEAHFDTTTPFAAVVIALMGTVAQMELEAIKERIRSAVHFNIRAGKYRGSLPPWGYLPARVGGEWRLVPDPVQRERILEVYHRVVDNHEPLHLVAHDLNRRGVLSPKDYFAQLRGREPQGRKWSATALKRSMTSVAMLGYATLNGKTVRVDDGAPLVRAEPILTREQQEALRAELAKTSRAKPAVSTPSLLLRVLFCAVCGEPAYKFAGGGRKHPRYRCRSMGFPKHCGNGTVAMAEWDAFCEEQVLNLLEDAERLEKVWVAGSDSAVELAEVNAELVDLTSLIGSPAYRAGSPQRKALDARIAALAARQEELEGLEARPSGWEWRGTGQRFGDWWREQDTAAKNTWLRSMNIRLTFDVRGGLTRTIDFGDLQGYEQHLRLGSAAERLHTGMS

SEQ ID NO: 10137 - protein, 500 aa, synthetic construct
MRALVVIRLSRVTDATTSPERQLESCQQLCAQRGWDVVGVAEDLDVSGAVDPFDRRRRPNLARWLAFEEQPFDAIVAYRVDRLTRSTRHLQQLVHWAEDHKKLVVSATEAHFDTTTPFAAVVIALMGTVAQMELEAIKERNRSAAHFNIRAGKYRGSLPPWGYLPARVDGEWRLVPDPVQRERILEVYHRVVDNHEPLHLVAHDLNRRGVLSPKDYFAQLQGREPQGRKWSATALKRSMISEAMLGYATLNGKTVRDGDGAPLVRAEPILTREQLEALRAELVKASRAKPAVSTPSMLLRVLFCAVCGEPAYKFAGGGRKHPRYRCRSMGFPKHCGNGTVVMAEWDAFCEEQVLNLLGDAERLEKVWVTGSDSAVELAEVNAELVDLTSLIGSPAYRAGSPQREALDARIAALAARQEELKGLGARPSGWEWRETGQRFGDWWREQDTAAKNTWLRSMNVRLTFDVRGGLTRTIDFGDLQEYEQHLRLGSVVERLHTGMS

SEQ ID NO: 10138 - protein, 500 aa, synthetic construct
MRALVVIRLSRVTDATTSPERQLESCQQLCAQRGWDVVGVAEDLDVSGAVDPFDRKRRPNLARWLAFEEQPFDVIVAYRVDRLTRSTRHLQQLVHWAEDHKKLVVSATEAHFDMTTPFAAVVIALMGTVAQMELEAIKERNRSAAHFNIRAGKYRGSLPPWGYLPARVDGEWRLVPDPVQRERILEVYHRVVDNHEPLHLVAHDLNRRGVLSPKDYFAQLRGREPQGRMWSATALKRSMTSEAMLGYATLNGKTVRDDDGAPLVRAEPILTREQLEALRAELVKTSRAKPAVSTPSLLLRVLFCAVCGEPAYKFAGGGRKHPRYRCRSMGFPKHCGNGTVAMAEWDAFCEEQVLDLLGDAEHLEKVWVAGSDSAVELAEVNAELVDLTSLTGSPAYRAGSPQRGALDARIAALAARQEELEGLEARPSGWEWRETGQRFGDWWREQDTAAKNTWLRSMNVRLTFDVRGGLTRTVDFGDLLEYEQHSRLGSVVGRLHTGMS

SEQ ID NO: 10139 - protein, 500 aa, synthetic construct
MRALVVIRLSRVTDATTSPERQLESCQQLCAQRGWDVVGVAEDLDVSGAVDPFDRKRRPNLARWLAFEEQPFDVIVAYRVDRLARSTRHLQQLVHWAEDHKKLVVSATEAHFDTTTPFAAVVIALMGTVAQMELEAIKERNRSAAHFNIRAGKYRGSLPPWGYLPTRVDGEWRLVPDPVQRERILEVYRRVVDNHEPLHLVAHDLNRRGVLSPKDYFAQLRGREPQGRKWSATALKRSMISEAMLGYATLNGKTVRDDDGAPLVRAEPILTREQLEALRAELVKTSRAKPAVSTPSLLLRVLFCAVCGEPAYKFAGGGRKHPRYRCRSMGFPKHCGNGTVAMAEWDAFCEEQVLDLLGDAERLEKVWVAGSDSAVELAEVNAELVDLTSLISSPAYRAGSPQREALDTRIAALAARQEELEGLEARPSGWEWRETGQRFGDWWREQDTAAKNAWLRSMNVRLTFDVRGGLTRTIDFGDLQEYEQHLRLGSVVKRLHTGMS

SEQ ID NO: 10140 - protein, 500 aa, synthetic construct
MRALVVIRLSRVTDATTSPERQLESCQQLCAQRGWDVVGVAEDLDVSGAVDPFDRKRRPNLARWLAFEEQPFDVIVAYRVDRLTRSTRHLQQLVLWAEDHKKLVVSATEAHFDTTTPFAAVVVALMGTVAQMELEAIKERIRSAVRFNIRAGKYRGSLPPWGYLPTRVDGEWRLVPDPVQRERILEVYHRVVDNHEPLHLVAHDLNRRGVLSPKDYFAQLRGREPRGRKWSATALRRSMTSVAMLGYATLNGKTVRDDDGAPLVRAEPILTREQLEALRAELVKTSRAKPAVSTPSLLLRVLFCAVCGEPAYKFVGGGRKHPRYRCRSMGSPKHCGNGTVVMTEWDAFCEEQVLDLLGDAERLEKVWVVGSDSAAELAEVNAELVDLTSLIGSPAYRAGSPQREALDARIAALAARQEELEGLEARPSGWEWRGTGQRFRDWWREQDTAAKNAWLRSMNVRLTFDVRGGLTRTIDFGDLQEYEQHLRLGSVAERLHTGMS

SEQ ID NO: 10141 - protein, 500 aa, synthetic construct
MRALVVIRLSRVTDATTSPERQLESCQQLCAQRGWDVVGVAEDLDVSGAVDPFDRKRRPNLARWLAFEEQPFDVIVAYRVDRLARSTRHLQQLVHWAEDHKKLVVSATEAHFDTTTPFAAVVIALMGTVAQMELEAIKERNRSAAHFNIRAGKYRGSLPPWGYLPTRVDGEWRLAPDPVQRERILEVYHRVVDNHEPLHLVAHDLNRRGVLSPKDYFAQLQGREPQGRKWSATALKRSMISEAMLGYATLNGKTVRDEDGAPLVRAEPILTREQLEALRAELAKTSRAKPAVSTPSLLLRVLFCAVCGEPAYKFAGGGRKHPRYRCRSMGFPKHCGNGTVAMAEWDAFCEEQVLDLLGDAERLEKVWVAGSDSAVELAEVNAELVDLTSLIGSPAYRAGSPQREALDARIAALAARQEELEGLGARPSGWEWRETGQRFGDWWREQDTAAKNTWLRSMNVRLTFDVRGELTRTIDFGDLQEYEQHLRLGRVVERLHTGMS

SEQ ID NO: 10142 - protein, 500 aa, synthetic construct
MRALVVIRLSRVTDATTSPERQLESCQQLCAQRGWVVVGVAEDLDVSGAVDPFDRKRRPNLARWLAFEEQPFDVIVAYRVDRLTRSVRHLQQLVHWAEDHEKLVVSATEAHFDMTTPFAAVVIALMGTVAQMELEAIRERNRSAAHFNIRAGKYRGSLPPWGYLPTRVDGEWRLVPDPVQRECILEVYHRVVDNHEPLHLVAHDLNRRGILSPKDYFAQLQGREPQGRKWSATALKRSMTSEAMLGYATLNGKTVRDDDGAPLVRAEPILTREQLEALRAVLVKTSRAKPAVSTPSLLLRVLFCAVCGEPAYKFAGGGRKHPRYRCRSMGFPKHCGNGTVAMAEWDTFCEEQVLDLLGDAERLEKVWVAGSDSAVELAEVNAELVDLTSLIGSPAYRAGSPQREALDARIAALAARQEELEGLEARPSGWEWRGTGQRFGDWWREQDTAAKNTWLRSMNVRLTFDVRGGLTRTIDFGDLQEYEQHLRLGSVVERLHTGMS

SEQ ID NO: 10143 - protein, 500 aa, synthetic construct
MRALVVIRLSRVTEATTSPERQLESCQRLCAQRGWDVVGVAEDLDVSGAVDPFDRKRRPNLARWLAFEEQPFDVIVAYRVDRLTRSVRHLQRLVRWAEDHKKLVVSATEAHFDMTTPFAAVVIALMGTVAQMELEAIKERIRSAVHFNIRAGKYRGSLPPWGYLPARVDGEWRLVPDPVQRERILEVYHRVVDNHEPLHLVAYDLNRRGVLSPKDYFAQLRGREPQGRKWSATALKRSMTSEAMLGYATLNGKTVRDDDGAPLVRAEPILTREQLEALRAELVKTSRAKPAVSTPSLLLRVLFCAVCGEPAYKFVGGGRKHPRYRCRSMGFPKHCGNGTVVMAEWDAFCEEQVLDLLGDAERLEKAWVAGSDSAIELAEVNAELVDLTSLIGSPAYRAGSPQREALDARIAALAARQEELEGLEARPPGWEWRETGQRFGDWWREQDTAAKNTWLRSMNVRLTFDVRGGLARTIDFGDLQEYGQRLRLGSVVGRLHTGMS

SEQ ID NO: 10144 - protein, 500 aa, synthetic construct
MRALVVIRLSRVTDATTSPERQLESCQQLCAQRGWDVVGVAEDLDVSGAVDPFDRKRRPNLARWLASEEQPFDVIVAYRVDRLTRSTRHLQQLVHWAEDHKKLVVSATEAHFDTTTPFAAVVIALMGTVAQMELEAIKERIRSAVHFNIRAGKYRGSLPPWGYLPTRVDGEWRLVPDPVQRERIFEVYHRVVDNHEPLHWVAHDLNRRGVLSPKDYFAQLQGREPQGRKWSATALRRSMTSVAMLGYATLNGKIVRDDDGAPLVRAEPILTREQQEALRAELVKTSRAKPAVSTPSLLLRVLFCAVCGGPAYKLVGGGRKHPRYRCRSMGFPKHCGNGTVVMTEWDAFCEEQVLDLLGDAERLEKVWVAGSDSAVELAEVNAELVDLTSLISSPAYRAGSPQREALDARIAALAARQEELEGLEARPSGWEWRETGQRFRDWWREQDTAAKNTWLRSMNVRLTFDVRGGLTRTIDFGDLQEYEQHLRLGSVVERLHTGMS

SEQ ID NO: 10145 - protein, 500 aa, synthetic construct
MRALAVIRLSRVTDATTSPERQLESCQQLCAQRGWDVVGVAEDLDVSGAVDPFDRKRRPNLARWLAFEEQPFDVIVAYRVDRLTRSVRHLQQLIHWAEDHKKLVVSATEAHFDTATPFAAVVVALMGTVAQMELEAIKERNRSAAHFNIRAGKYRGSLPPWGYLPTRVDGEWRLVPDPVQRERILEVYHRVVDNHEPLHLVAHDLNRRGVLSPKDYFAQLRGREPQGRKWSATALKRSMTSEAMLGYATLNGKTVRDDDGAPLVRAEPILAREQLEALRAELVKTSRAKPAVSTPSLLLRVLFCAVCGEPAYKFAGGGRKYPRYRCRSMGFPKHCGNGTVVMAEWDAFCEEQVLDLLGDAERLEKVWVAGSDSAVELAEVNAELVDLTSLIGSPAYRAGSPQREALDARIAALAARQEELGGLEARPSGWEWRETGQRFGDWWREQDTAAKNTWLRSMNVRLTFDVRGGLTRTVDFGDLQEYEQRLRLGCVVERLHTGMS

SEQ ID NO: 10146 - protein, 500 aa, synthetic construct
MRALVVIRLSRVTNATTSPERQLESCQQLCAQRGWDVVGVAEDLDVSGAVDPFDRKRRPNLARWLAFEEQPFDVIVAYRVDRLTRSTRHLQQLVHWAEDHKKLVVSATEAHFDTTTPFAAVVIALMGTVAQMELEAIKERNRSAAHFNIRAGKYRGSLPPWGYLPTRVDGEWRLVPDPVQRERILEVYRRVVDNHEPLHMVAHDLNRRGVLSPKDYFAQLQGREPQGRKWSATALKRSMISEAMLGYATLNGKTVRDDDGAPLVRAEPILTREQQEALRAELVKTSRAKPAVSTPSLLLRVLFCAVCGEPAYKFAGGGRKHPRYRCRSMGFPKHCGNGTVAMAEWDAFCEEQVLNLLGDAERLEKVWVAGSDSAVELAEVNAELVDLTSLIGSPAYRAGSPQREALDARIAALAARQEELEGLGARPPGWEWRETGQRFGDWWREQDTAAKNTWLRSMNVRLTFDARGGLTRTIDFGDLQEYEQHSRLGSVVERLHTGMS

SEQ ID NO: 10147 - protein, 500 aa, synthetic construct
MRALVVIRLSRVTDATTSPERQLESCQQLCAQRGWDVVGVAEDLDVSGAVDPFDRKRRPNLARWLAFEQQPFDVIVAYRVDRLTRSTRHLQQLVRWAEDHRKLVVSATEAHFDTTTPFAAVVIALMGTVAQMELEAIKERSRSAAHFNIRAGKYRGSLPPWGYLPARVDGEWRLVPDPVQRERILEVYHRVVDNHEPLHLVAHDLNRRGVLSPKDYFAQLQGREPQGRKWSATALKRSMTSVAMLGYATLNGKIVRDDDGAPLVRAEPILTREQQEALRAELGKTSRAKPAVSTPSLLLRVLFCAVCGEPAYKFTGGGRKHPRYRCRSMGFPKHCGNGTVVMAEWDALCEEQVLNLLGDAERLEKVWVTGSDSAVELAEVNAELVDLTSLIGSPAYRAGSPQREALDARIAALAARQEELGGLGARPSGWEWRGTGQRFGDWWREQDTAAKNTWLRSMNVRLTFDVRGGLTRTIDLGDLQEYEQHLRLGSVVERLHTGTP

SEQ ID NO: 10148 - protein, 500 aa, synthetic construct
MRALVVIRLSRVTDATTSPKRQLESCQQLCAQRGWDVVGVAEDLDVSGAVDPFDRKRRPNLARWLAFEVHPFDVIVAYRVDRLTRSTRHLQQLVHWAEDHKKLVVSATETHFDTTTPFAAVVIALMGTVAQMELEAIKERIRSAVHFNIRAGKYRGSLPPWGYLPTRVDGEWRLVPDPVQRERILEVYHRVVDNHEPLHLVAHDLNRRGVLSPKDYFAQLRGREPQGREWSATALKRSMTSVAMLGYATLNGKIVRDDGGAPLVRAEPILTREQQEALRAELAKTSRAKPAVSSPSLLLRVLFCAVCGEPAYKFVGGGRKHPRYRCRSMGSPEHCGNGTVVMAEWDAFCEEQVLNLLGDAERLEKVWVAGSDSAVELAEVNAELVDLASLIGSPAYRAGSPQREALDARIAALATRQEELEGLEARPSGWEWRETGQRFGDWWREQDTAAKNTWLRSMNVRLTFDARGGPTRTIDFGDLQEYERHLRLGSVVERLHTGMS

SEQ ID NO: 10149 - protein, 500 aa, synthetic construct
MRALVVIRLSRVTDATTSPERQLESCQQLCAQRGWDVVGVAEDLDVSGAVNPFDRKRRPNLARWLAFEEQPFDVIVAYRVDRLTRSTRHLQQLVHWAEDHKKLVVSATEAHFDTTTPFAAVVIALMGTVAQMELEAIKERNRSAAHFNIRAGKYRGSLPPWGYLPTRVDGEWRLVPDPVQRERILEVYHRVVDDHEPLHLVAHDLNRRGVLSPKDYFAQLQGREPQGRKWSATALKRSMISGAMLGYATLNGKTVRDNDGAPLVRAEPILTRGQLEALRAELVKTPRAKPAVSTPSLLLRVLFCAVCGEPAYKLAGGGRKHPRYRCRSMGFPKHCGNGTVAMAEWDAFCEEQVLDLLGDAERLEKVWVAGSDSAVELAEVNAELVDLTSLIGSPAYRAGSPQRETLDARIAALAARQEELEDLEARPSGWEWRGTGQRFGDWWREQDTAAKNTWLRSMNVRLTFDVRGGLTRTIDFGDLQEYEQHLRLGSAVERLHTRMS

SEQ ID NO: 10150 - protein, 500 aa, synthetic construct
MRALIVIRLSRVTDATTSPGRQLESCQQLCAQRGWDVVGVAEDLDVSGAVDPFDRKRRPNLARWLAFEEQPFDVIVAYRVDRLTRSTRHLQQLVHWAEDHKKLVVSATEAHFDTTTPFAAVVIALMGTVAQMELEAIKERNRSAAHFNIRAGRYRGSLPPWGYLPTRVDGEWRLVPDPVQRERILEVYHRVVVNHEPLHLVAHDLNRRGVLSPKDYFAQLQGREPQGRKWSATALKRSMISEAMLGYTTLNGKTVRDDDGAPLVRAEPILTREQLEALRAELVKTSRAKPAVSTPSLLLRVLFCAVCGEPAYKFAGGGRKHPRYRCRSMGFPKHCGNGTVVMAEWDAFCEEQVLNLLGDAERLEKVWVAGSDSAVELAEVNAELVDLSSLIGSPAYRAGSPQREALDARIAALAARQEELEGLGARPSGWEWRETGQRFGDWWREQDTAAKNTWLRSMNIRLTFDVRGGLTRTIDFGDLQEYEQHLRLGSVVERLHTGTS

SEQ ID NO: 10151 - protein, 500 aa, synthetic construct
MRALVVIRLSRVTDATTSPERQLESCQQLCAQRGWDVVGVAEDLDVSGAVDPFDRKRRPNLARWLAFEEQPFDAIVAYRVDRLARSTRHLQQLVHWAEDHKKLVVSATEAHFDTTTPFAAVVIALMGTVAQMELEAIKERNRSAAHYNIRAGKYRGSLPPWGYLPTRVDGEWRLVPDPVQRERILEVYHRVVDNHEPLHLVAHDLNRRGVLSPKDYFAQLQGREPQGRKWSATALKRSMISEAMLGYATLNGKTVRDDGGAPLVRAEPILTREQLEALRAELVKTPRAKPAVSTPSLLLRVLFCAVCGEPAYKFAGGGRKHPRYRCRSMGFPKHCGNGTVAMAEWDAFCEEQVLDLLGDAERLEKVWVAGSDSAVELAEVNAELVDLTSLIGSPAYRAGSPQREALDARIAALAARQEELEGLEARPSGWEWRETGQRFGDWWREQDTAAKNTWLRSMNVRLTFDVRGGLTRTIDFGGLQEYEQHFRLGSVVERLHTGMS

SEQ ID NO: 10152 - protein, 500 aa, synthetic construct
MRALVVIRLSRVTDATTSPERQLESCQQLCAQRDWDVVGVAEDLDVSGAVDPFDRKRRPNLARWLAFEEQPFDVIVAYRVDRLTRSVRHLQRLVRWAEDHKKLVVSATEAHFDTTTPFAAVVIALMGTVAQMELEAIKERIRSAVHFNIRAGKYRGSLPPWGYLPTRVDGEWRLVPDPVQRERILEVYHRVVDNHEPLHLVAYDLNRRGVLSPKDYFAQLQGREPQGRKWSATALRRSMTSVAMLGYATLNGKTVRDDDGAPLVRAEPILTREQQEALRAEFVKTSRAKPAVSTPSLLLRVLFCAVCGEPAYKFAGGGRKHPRYRCRSMGFPEHCGNGTVVMAEWDAFCEEQVLSLLGDAERLEKVWVAGSDSAVELAEVNAELVDLTSLIGSPAYRVGSLQRKALDARIAVLAARQEELEGLEARPSGWEWRGTGQRLGDWWREQDTAAKNAWLRSMNVRLTFDVRGGLTRTIDFGDLREYVQHLRLGSVVERLHTGMS

SEQ ID NO: 10153 - protein, 500 aa, synthetic construct
MRALIVIRLSRVTDATTSPERQLESCQQLCAQRGWDVVGVAEDLDVSGAVDPFDRKRRPNLARWLAFGEQPFDAIVAYRVDRLTRSTRHLQQLVHWAEDHKKLVVSATEAHFDTTTPFAAVVIALMGTVAQMELEAIKERIRSAAHFNIRAGKYRGSLPPWGYLPTRVDGEWRLVPDPVQRERILEVYHRVVHNHEPLHLVAHDLNRRGVLSPKDYFAQQRGREPRGRKWSATALKRSMISVAMLGYATLNGKIVRDGDGAPLVRAEPILTRGQQEALRAELAKTSRAKPAVSTPSLLLRVLFCAVCGEPAYKFVGGGRKHPRYRCRSMGSPRHCGNGTVVMAEWDVFCEEQVLGLLGDAERLEKVWVAGSDSAVELAEVNTELVDLTSLICSPAYRAGSPQREALDARIAALAARQEELEGLEARPSGWEWRGTGQRFGDWWCEQDTAAKNTWLRSMNVRLTFDVRGGLTRTIDFGDLQEYAQHLRLGSVVERLHTGMS

SEQ ID NO: 10154 - protein, 500 aa, synthetic construct
MRALVVIRLSRVTDATTSPERQLESCQQLCAQRGWDVVGVAEDLDVSGAVDPFDRKRRPNLARWLAFEEQPFDVIVAYRVDRLTRSVRHLQQLVHWAEDHEKLVVSATEAHFDTTTPFAAVVIALMGTVAQMELEAIKERNRSAAHFNIRAGKYRGSLPPWGYLPMRVNGEWRLVPDPVQRERILEVYRRVVDNHEPLHLVAHDLNRRGVLSPKDYFAQLRGREPQGRKWSATALKRSMISEAMLGYATLNGKTVRDDDGAPLVRAEPILTREQLEALRAELVKTSRAKPAVSTPSLLLRVLFCAVCGEPAYKFAGGGRKHPRYRCRSMGFPKHCGNGTVAMAEWDAFCEEQVLGLLGDAERLEEVWVAGSDSAVELAEVNAELVDLTSLIGSPAYRAGSPQREALDARIAALAARQEKLEGLGARPSGWEWRGTGQRFGDWWREQDTAAKNTWLRSMNVRLTFDVRGGLTRTIDFGDLQEYEQHLRLGSVVERLHTGMS

SEQ ID NO: 10155 - protein, 500 aa, synthetic construct
MRALVVIRLSRVTGATTSPERQLESCQQLCAQRGWGVVGVAEDLDVSGAVDPFDRKRRPNLARWLAFEEQPFDVIVAYRVDRLTRSVRHLQQLVHWAEDHKKLVVSATEAHFDTTTPFAAVVIALMGTVAQMELEAIKERNRSAAHFNIRAGKYRGSLPPWGYLPTRVDGEWRLVPDPVQHERILEVYHRVVDNHEPLHLVAHDLNRRGVLSPKDYFAQLRGREPQGRKWSATALKRSMISEAMLGYATLNGKVVRDDDGAPLVRAEPILTREQLEALRAELAKTSRAKPAVSTPSLLLRVLFCAVCGEPAYKFAGGGRKHPRYRCRSMGFPKHCGNGTVAMAEWDAFCEEQVLDLLGDTKRLEKVWVAGSDSAVELAEVNAELVDLTSLIGSPAYRAGSPQREALDARIAALAARQEELEGLGARPPGWEWRETGQRFGDWWREQDTAAKNTWLRSMNVRLTFDVRGGLTRTIDFGGLQEYEQHLRLGSVVGRLHTGMS

SEQ ID NO: 10156 - protein, 500 aa, synthetic construct
MRALVVIRLSRVTDATTSPERQLESCQQLCAQRGWDVVGVAEDLDVSGAVDPFDRKRRPNLARWLAFEEQPFDVIVAYRVDRLTRSTRHLQQLVHWAEDHKKLVVSATEAHFDTTTPFAAVVIALMGTVAQMELEAIKERNRSAAHFNIRAGKYRGSLPPWGYLPTRVDGEWRLVPDPVQRERILEVYHRVVDDHEPLHLVAHDLNRRGVLSPKDYFARLRGREPQGRKWSATALKRSMISEAMLGYATLNSKTVRDDDGAPLVRAEPILTRGQLEALRAELVKTSRAKPAVSTPSLLLRVLFCAVCGEPAYKFAGGGRKHPRYRCRSMGFPKHCGNGTVVMAEWDAFCEEQVLDLLGDAERLEKVWVAGSDSAVEFAEVNAELVDLTSLIGSPAYRVGSPQREALDARIAALTARQEELEGLEARPSGWEWRETGQRFGDWWREQDTAAKNAWLRSMNVRLTFDVRGGLTRTIDFGELQEYEQHLRLGSVVERLHTGRS

SEQ ID NO: 10157 - protein, 500 aa, synthetic construct
MRALVVIRLSRVTDATTSPERQLESCQQLCAQRGWNVVGVAEDLDVSGAVDPFDRKRRPNLARWLAFEEQPFDVIVAYRVDRLTRSTRHLQQLVRWAEDHKKLVVSATEAHFDTTTPFAAVVIALMGTVAQMELEAIKERIRSAVHFNIRAGKYRGSLPPWGYLPARVDGEWRLVPDPVQRERILEVYHRVVDNHEPLHLVAHDLNRRGVLSPKDYFARLQGREPQGRKWSATALKRSMTSGAMLGYATLNGKIVRDDDGAPLVRAEPILTRVQLEALRAELVKTSRAKPAVSTPSLLLRVLFCAVCGEPAYKFVGGGRKHPRYRCRSMGFPEHCGNGTVVMAEWDAFCEEQVLNLLGDAERLEKVWVAGSDSAVELAEVNAELVDLTSLIGSPAYRAGSPQREALDARIAALAARQKELEGLEARPSGWEWRKTGQRLGDWWREQDTAAKNTWLRAMNVRLTFDVRGGLTRTIDFGELQECEQHLRSGCVAERLRTGMS

SEQ ID NO: 10158 - protein, 500 aa, synthetic construct
MRALVVVRLSRVTDATTSPERQLESCQQLCAQRGWDVVGVAEDLDVSGAVDPFDRKRRPNLARWLAFEEQPFDVIVAYRVDRLTRSTRHLQQLVHWAEDHKKLVVSATEAHFDTTTPFAAVVIALMGTVAQMELEAIKERNRSAAHFNIRAGKYRGSLPPWGYLPTRVDGEWRLAPDPVQRERILEVYHRVVANHEPLHLVAHDLNRRGVLSPKDYFAQLQGREPQGRKWSATALKRSMISEAMLGYATLNGKTVRDGDGAPLVRAEPILTREQLEALRAELVKTSRAKPAVSTPSLLLRVLFCAVCGEPAYKFAGGGRKHPRYRCRSMGFPKHCGNGTVAMAEWDAFCEEQVLDLLGDAERLEKVWVAGSDSAVELAEVNAELVDLTSLIGSPAYRAGSPQREALDARIAALAARQEELEGLGARPSGWEWRETGQRFGDWWREQDTAAKNTWLRSMNVRLTFDVRGGLTRTIDFGDLQEYRQHLRLGSVVERSHTGMS

SEQ ID NO: 10159 - protein, 500 aa, synthetic construct
MRALVVIRLSRVTDATTSPERQLESCQRLCAQRGWDVVGVAEDLDVSGAVDPFDRKRRPNLARWLAFEEQPFDVIVAYRVDRLTRSVRHLQQLVHWAEDHKKLVVSATEAHFDTTTPFAAVVIALMGTVAQMELEAIKERNRSAAHFNIRAGKYRGSLPPWGYLPTRVDGEWRLVPDPVQRERILEVYHRVVDNHEPLHLVAHDLNRRGVLSPKDYFAQLQGREPQGRKWSATALKRSMISEAMLGYATLNGKIVRDDDGAPLVRAEPILTREQLEALRAELVKTSRAKPAVSTPSLLLRVLFCAVCGEPAYKFAGGGRKHPRYRCRSMGFPKHCGNGTVVMAEWDAFCEEQVLNLLEDAERLEKVWVAGSDSAVELAEVNAELVDLTSLIGSPAYRAGSPQREALDARIAALAARQGELEGIEARPSGWGWRETGQRFGDWWREQDTAAKNTWLRSMNVRLTFDVRGGLTRTIDFGGLREYEQHLRSGSVVERLHAGMS

SEQ ID NO: 10160 - protein, 500 aa, synthetic construct
MRALVVIRLSRVTDATTSPERQLESCRQLCAQRGWDVVGVAEDLDVSGAVDPFDRKRRPNLARWLAFEERPFDVIVAYRVDRLTRSTRHLQQLVHWAEDHKKLVVSATEAHFDTTTPFAAVVIALMGTVAQMELEAIKERNRSAAHFNIRAGKYRGSLPPWGYLPARVDGEWRLVPDPVQRERILEVYHRVVDNHEPLHLVAHDLNRRGVLSPKDYFAQLRGREPQGREWSATALKRSMISEAMLGYATLNGKTVRDDDGAPLVRAEPILTREQLEALRAELVKTSRAKPAVSTPSLLLRVLFCAVCGEPAYKFAGGGRKHPRYRCRSMGFPKHCGNGTVVMAEWDAFCEEQVLDLLGDAERLEKVWVASSDSAVELAEVNAELVDLTSLIGSPAYRAGSPQREALDARIAALAARQEELEGLEARPSGWEWRGTGQRFGDWWREQDTAAKNTWLRSMNVRLTFDVRGGLTRTIDFGELQEYEQHLRLGSVDERLHTGRS

SEQ ID NO: 10161 - protein, 500 aa, synthetic construct
MRALVVIRLSRVTDATTSPERQLESCQQLCAQRGWDVVGVAEDLDVSGAVDPFDRKRRPNLARWLAFEEQPFDVIVAYRVDRLTRSTRHLQQLVHWAEDHKKLVVSATEAHFDTTTPFAAVVIALMGTVAQMELEAIRERNRSAAHFNIRAGKYRGSLPPWGYLPTRVDGEWRLVPDPVQRERILEVYHRVVDNHEPLHLVAHDLNRRGVLSPKDYFAQLQGREPQGRKWSVTALKRSMISEAMLGYATLNGKTVRDDDGAPLVRAEPILTREQLEALRAELVKTSRAKPAVSTPSLLLRVLFCAVCGEPAYKFAGGGRKHPRYRCRSMGFPKHCGNGTVVMAEWDAFCEEQVLGLLGDAERLEKVWVAGSDSAVELAEVSAELVDLTSLIGSPAYRASSPQREALDARIAALAARQEELEGLEARPSGWVWRETGQRFGDWWREQDTAAKNTWLRSVNIRLTFDVRGGLTRTIDFGDLQEYEQHLRLGSVVERLHTGMS

SEQ ID NO: 10162 - protein, 500 aa, synthetic construct
MRALVVIRLSRVTDATTSPERQLASCQQLCAQRGWDVVGVAEDLDVSGAVDPFDRKRRPNLARWLAFEEQPFDAIVAYRVDRLTRSTRHLQQLVRWAEDHKKLVVSATEAHFDTTTPFAAVVIALMGTVAQMELEAIKERIRSAVHFNIRAGKYRGSLPPWGYMPTRVDGEWRLVPDPVQRERILEVYHRVVDNHEPLYLVAHDLNRRGVLSPKDYFAQLQGREPQGRRWSATALKRSMISGAMLGYATLNGKIVRDDDGAPLVRAEPILTREQLEALRAELAKTSRAKPAVSTPSLLLRVLFCAVCGEPAYKFVGGGRKHPRYRCRSMGFPEHCGNGTVVMAEWDAFCEEQVLNLVGDAERLEKVWVAGSDSAVELAEVNAELVDLTSLIGSPAYRAGSPQREALDARIAALAARQEELEGSEARPSGWEWRGTGQRFGDWWREQNTAAKNTWLRSMNVRLTFDVRGGLTRTIDFGDLQEYERHLRSGSVVERLHTGMS

SEQ ID NO: 10163 - protein, 500 aa, synthetic construct
MRALVVIRLSRVTDATTSPERQLESCQQLCAQRGWDVVGVAEDLDVSGAVDPFDRKRRPNLARWLAFEEQPFDVIVAYRVDRLTRSTRHLQQLVHWAEDHKKLVVSATEAHFDTATPFAAVVIALMGTVAQMELEAIKERNRSAAHFNIRAGKYRGSLPPWGYLPTRVDGEWRLVPDPVQRERILEVYHRVVDNHEPLRLVAHDLNRRGVLSPKDYFAQLRGREPQGRKWSATALKRSMISEAMLGYATLNGKTVRDDDGAPLVRAEPILTREQLEALRAELVKTSRAKPAVSTPSLLLRVLFCAVCGEPAYKFAGGGRKHPRYRCRSMGFPKHCGNGTVAMAEWDAFCEEQVLNLLGDAERLEKVWVAGSDSAVELAEVNAELVDLTSLIGSPAYRAGSPQREALDARIAALTARQEELEGLEARPSGWEWRGTGQRFGDWWREQDTAAKNTWLRSMNVRLTFDVRGGLTRTIDFGGLLEYEQHLRLGSVVERLHTGMS

SEQ ID NO: 10164 - protein, 500 aa, synthetic construct
MRALVVIRLSRVTDATTSPERQLESCQQLCAQRGWDVVGVAEDLDVSGAVDPFDRKRRPNLARWLAFEERSFDVIVAYRVDRLTRSTRHLQQLVHWAEDHKKLVVSATEAHFDTTTPFAAVVIALMGTVAQMELEAIKERNRSAAHFNIRAGKYRGSLPPWGYLPARVDGEWRLVPDPVQRKRILEVYHRVVDDHEPLHLVAHDLNRRGVLSPKDYFAQLQGREPQGRKWSATALKRSMISEAMLGYATLNGKTVRDDDGAPLVRAEPILTRVQLEALRAELVKTSRAKPAVSTPSLLLRVLFCAVCGEPAYKFAGGGRKHPRYRCRSMGFPKHCGNGTVVMAEWDAFCEEQVLDLLGDAERLEKVWVAGSDSAVELAEVSAELVDLTSLIGSPAYRAGSPQREALDARIAALAARQEELEGLEARPSGWEWRETGQRFGDWWREQDTAAKNTWLRSMNVRLTFDVRGGLARTIDFGELQEYEQHLRLGSVVERLHTGMS

SEQ ID NO: 10165 - protein, 500 aa, synthetic construct
MRALVVIRLSRVTDATTSPERQLESCRQLCAQRGWDVVGVAEDLDVSGAVDPFDRKRRPNLARWLAFEEQPFDVIVAYRVDRLTRSTRHLQQLVHWAEDHKKLVVSATEAHFDTTTPFAAVVIALMGTVAQMELEAIKERNRSAAHFNIRAGKYRGSLPPWGYLPARVDGEWRLVPDPVQRERILEVYHRVVDNHEPLHLVAHDLNRRGVLSPKDYFAQLQGREPQGRKWSATALKRSMTSEAMLGYATLNGKTVRDDDGAPLVRAEPILTRGQLEALRAELVKTSRAKPAVSTPSLLLRVLFCAVCGEPAYKFAGGGRKHPRYRCRSMGFPKHCGNGTVAMAEWDAFCEEQVLDLLGDAERLEKVWVTGSDSAVELAEVNAELVDLTSLIGSPAYRAGSPQREALDARIAALAARQGELEGLEARPSGWEWRETGQRFGDWWREQDTAAKNTWLRSMNVRLTFDVRGGLTRTIDFGGLRGYEQHLRLGSVVERLHTGMS

SEQ ID NO: 10166 - protein, 500 aa, synthetic construct
MRALVVIRLSRVTDATTSPERQLESCQQLCAQRGWDVVGVAEDLDVSGAVDPFNRKRRPNLARWLAFEEQPFDAIVAYRVDRLTRSVRHLQQLVHWAEDHKKLVVSATEAHFDTTTPFAAVVIALMGTVAQMELEAIKERNRSAAHFNIRAGKYRGSLPPWGYLPMRVDGEWRLVPDPVQRERILEVYHRVVDDHEPLHLVAHDLNRRGVLSPKDYFAQLRGREPQGCEWSATALKRSMTSEAMLGYATLNGKTVRDDDGAPLVRAEPILTREQLEALRAELVKTSRAKPAVSTPSLLLRVLFCAVCGEPAYKFAGGGRKHPRYRCRSMGFPKHCGNGTVAMAEWDAFCEEQVLDLLGDAERLEKVWVAGSDSAVELAEVNAELVDLTSLIGSPAYRAGSPQREALDARIAALAARQEELEGLEARPSGWEWRGTGQRFGDWWREQDTAAKNAWLRSMNVRLTFDVRGGLTRAIDFGGLQEYEQHLRLGSVVERLHTGMS

SEQ ID NO: 10167 - protein, 500 aa, synthetic construct
MRALVVIRLSRVTDATTSPERQLESCQQLCAQRGWDVVGVAEDLDVSGAVDPFDRKRRPNLARWLAFEEQPFDVIVAYRVDRLTRSTRHLQQLVHWAEDHKKLVVSATEAHFDTTTPFAAVVIALMGTVAQMELEAIKERNRSAAHFNIRAGKYRGSLPPWGYLPARVDGEWRLVPDPVQRERILEVYHRVVDNHEPLHLVAHDLNRRGVLSPKDYFAQLQGREPQGRKWSATALKRSMTSEAMLGYATLNGKTVRDDDGAPLVRAEPILTREQLEALRAELVKTSRAKPAVSTPSLLLRVLFCAVCGEPAYKFAGGGRKHPRYRCRSMGSPKHCGNGTVAMAEWDAFCEEQVLDLLGDAERLEKVWVAGSDSAVELAEVNAELVDLTSLIGSPAYRAGSPQREALDARIAALAARQEELEGLGARPSGWEWRESGQRFGDWWREQDTAAKNTWLRSMNVRLTFDARGGLTRTIDFGDLQEYEQHLRLGSVVERSHTGMS

SEQ ID NO: 10168 - protein, 500 aa, synthetic construct
MRALVVIRLSRVTDATTSPERQLESCQQLCAQRGWDVVGVAEDLDVSGAVDPFDRKRRPNLARWLAFEEQPFDVIVAYRVDRLTRSTRHLQQLVHWAEDHKKLVVSATEAHFDTTSPFAAVVIALMGTVAQMELEAIKERNRSAAHFNIRAGKYRGSLPPWGYLPMRVDGEWRLVPDPVQRERILEVYHRVVDNHEPLHLVAHDLNRRGVLSPKDYFAQLRGREPQGRKWSATALKRSMISEAMLGYATLNGKTVRDDDGAPLVRAEPILTREQLEALRAELVKTSRAKPAVSTPSLLLRVLFCAVCGEPAYKSAGGGRKHPRYRCRSMGYPKHCGNGTVAMAEWDAFCEEQVLDLLGDAERLEKVWVAGSDSAVELAEVNAELVDLTSLIGSPTYRAGSPQREALDARIAALAARQEELEGLEARPSGWEWRETGQRFGDWWREQDTAAKNTWLRSMNVRLTFDVRGGLTRSIDFGDLQEYEQHLRLGSVVERLHTGMS

SEQ ID NO: 10169 - protein, 500 aa, synthetic construct
MRALVVIRLSRVTDATTSPERQLESCQQLCAQRGWDVVGVAEDLDVSGAVDPFDRKRRPNLARWLAFEEQPFDVIVAYRVDRLTRSTRHLQQLVHWAEDHKKLVVSATEAHFDTTTPFAAVVIALMGTVAQMELEAIKERNRSAAHFNIRAGKYRGSLPPWGYLPTRVDGEWRLVPDPVQRERILEVYHRVVDNHEPLHLVAHDLNRRGVLSPKDYFAQLQGREPQGCKWSATALKRSMISGAMLGYATLNGKTVRDDDGAPLVRAEPILTRGQLEALRAELVKTPRTKPAVSTPSLLLRVLFCAVCGEPAYKFAGGGRKHPRYRCRSMGSPKHCGNGTVAMAECDAFCEEQVLDLLGDTERLEKVWVAGSDSAVELAEVNAELVDLTSLIGSPAYRAGSPQREALDARIAALAARQEELEGLEARPSGWEWRGTGQRFGDWWREQDTAAKNTWLRSMNVRLTFDVRGGLTRTIDFGDLQEYEQHLRLGSVVERLHTGMS

SEQ ID NO: 10170 - protein, 500 aa, synthetic construct
MRALVVIRLSRVTDATTSPERQLESCQQLCAQRGWDVVGVAEDLDVSGAVDPFDRKRRPNLARWLAFEEQPFDAIVAYRVDRLARSIRHLQQLVHWAEDHKKLVVSATEAHFDTTTPFAAVVIALMGTVAQMELEAIKERSRSAAHFNIRAGKYRGSLPPWGYLPTRVDGEWRLVPDPVQRERILEVYHRVVGNHEPLHLVAHDLNQRGVLSPKDYFAQLRGREPQGRKWSATALKRSMTSEAMLGYAILNGKTVRDDDGAPLVRAEPILTRGQLEALRAELVKTSRAKPAVSAPSLLLRVLFCAVCGEPAYKFAGGGRKHPRYRCRSMGFPMHCGNGTVVMAEWDAFCEEQVLNLLGDAERLEKVWVAGSDSAVELSEVSAELVDLTSLVGSPAYRAGSPQREALDARIAALAARQEELEGLEARPSGWEWRETGQRFGDWWREQNTAAKNTWLRSMNVRLTFDVRGELTRTIDFGDLQEYEQHLRLGSVVERLHTGMS

SEQ ID NO: 10171 - protein, 500 aa, synthetic construct
MRALVVIRLSRVTDATTSPERQLESCQQLCAQRGWDVVGVAEDLDVSGAVDPFDRKRRPDLARWLAFEEQPFDVIVAYRVDRLTRSTRHLQQLVHWAEDHKKLVVSATEAHFDTTTPFAAVVIALMGTVAQMELEAIKERNRSAAHFNIRAGKYRGSLPPWGYLPTRVDGEWRLVPDPVQRERILEVYHRVVDNHEPLHLVAHDLNRRGVLSPKDYFAQLQGREPQGRKWSATALKRSMTSVAMLGYATLNGKTVRDDDGAPLVRAEPILTREQLEALRAELVKTSRAKPAVSTPSLLLRVLFCAVCGEPAYKFAGGGRKHPRYRCRSMGFPKHCGNGTVAMAEWDAFCEEQVLDLLGDAERLEKVWVAGSDSAVELAEVNAELVDLTSLIGSPAYRAGSPQREALDARIAALAARQEELEGLEARPSGWEWRGTGQRFGDWWREQDTAAKNTWLRSMNVRLTFDVRGGLTRTIDFGGLQEYEQHLRLGSVVERLHTRMS

SEQ ID NO: 10172 - protein, 500 aa, synthetic construct
MRALVVIRLSRVTDATTSPERQRESCQQLCAQRGWDVVGVAEDLDVSGAVDPFDRKRRPNLARWLAFEERPFDVIVAYRVDRLTRSTRHLQQLVRWAEDHKKLVVSATEAHFDTTTPFAAVVIALMGTVAQMELEAIKERIRSAVRFNIRAGKYRGSLPPWGYLPTRVDGEWRLAPDPVQRERILEVYHRVVDNHEPLHLVAHDLNRRGVLSPKDYFAQLQGREPQGRKWSATALKRSMISVAMLGYATLNGRIVRDDDGAPLVRAEPILTREQQEALRAELVKTSRAKPAVSTPSLLLRVLFCAVCGEPAYKFVGGGRKHPRYRCRSMGFPKHCGNGTVVMAEWDAFCEEQVLDLLGDAERLEKVWVAGSDSAVELAEVNAELVDLTSLIGSPAYRAGSPQREALDARIAALAARQEELEGLEARPSGWEWRETGQRFGDWWREQDTAAKNTWLRSMNVRLTFDARGGLTRTIDFGDLQEYEQHLRLGSVVERLHAGMS

SEQ ID NO: 10173 - protein, 500 aa, synthetic construct
MRALVVIRLSRVTDATTSPERQLGSCQQLCVQRGWDVVGVAEDLDVSGAVDPFDRKRRPNLARWLAFEEQPFDVIVAYRVDRLTRSVRHLQQLVHWAEDHKKLVVSATEAHFDTTTPFAAVVIALMGTAAQMELEAIKERNRSAAHFNIRAGRYRGSLPPWGYLPARVDGEWRLVPDPVQRERILEVYHRVVDNHEPLHLVAHDLNRRGVLSPKDYFAQLQGREPQGRKWSATALKRSMISEAMLGYATLSGKTVRDDDGAPLVRAEPILTREQLEALRAELVKTSRAKPAVSTPSLLLRVLFCAVCGEPAYKFAGGGRKHPRYRCRSMGFPKHCGNGTVVMAEWDAFCEEQVLDLLGDAERLEKAWVVGSDSAVELAEVNAELVDLTSLIGSPAYRAGSPQREALDARIAALAARQEELEGLEARPSGWEWRETGQRFGDWWREQDTAAKNAWLRSMNVRLTFDVRGELTRTIDFGDLREYEQHLRLGSVVGRLHTGMS

SEQ ID NO: 10174 - protein, 500 aa, synthetic construct
MRALVVIRLSRVTDATTSPERQLESCQQLCAQRGWDVVGVAEDLDVSGAVDPFDRKRRPNLARWLAFEEQPFDVIVAYRVDRLTRSTRHLQQLVRWAEDHKKLVVSATEAHFDTTTPFAAVVIALMGTVAQMELEAIKERIRSAAHFNIRAGKYRGSLPPWGYLPTRVDGEWRLVPDPVQRERILEVYHRVVDNHEPLHLVAHDLNRRGVLSPKDYFAQLQGREPRGRKWSATALKRSMTSVAMLGYATLNGKIVRDGDGAPLVRAEPILTREQLEALRAELVRTSRAKPAVSTPSLLLRVLFCAVCGEPAYKFAGGGRKHPRYRCRSMGFPEHCGNGTVVMAEWDAFCEEQVLDLLGDAERLEKVWVAGSDSAVELAEVNAELVDLTSLIGSPAYRAGSPQREALDARIAALAARQEELEGLEARPSGWEWRETGQRFGDWWREQDTAAKNTWLRSMNVRLTFDVRSGLTRTIDFGDLREYEQHLRSGSVVERLHTGMS

SEQ ID NO: 10175 - protein, 500 aa, synthetic construct
MRALVVIRLSRVTDATTSPERQLESCQQLCAQRGWDVIGVAEDLDVSGAVDPFDRKRRPNLARWLAFEEQPFDVIVAYRVDRLTRSTRHLQQLVHWAEDHKKLVVSATEAHFDTTTPFAAVVIALMGTVAQMELEAIKERNRSAAHFSIRAGKYRGSLPPWGYLPTRVDGEWRLVPDPVQRERILEVYHRVVDNHEPLHLVAHDLNRRGVLSPKDYFAQLRGREPQGRKWSATALKRSMISEAMLGYATLNGKTVRDDDGAPLVRAEPILTREQLEALRAVLVKTSRAKPAVSTPSLLLRVLFCAVCGEPAYKFAGGGRKHPRYRCRSMGFPKHCGNGTVAMAEWDAFCEEQVLGLLGDAKRLEKVWVAGSDSAVELAEVSAELVDLTSLIGSPAYRAGSPQREALDARIAALAARQEELEGLEARPSGWEWRETGQRFGDWWREQDTAAKNTWLRSMNVRLTFDVRGGLTRTIDFGELQEYEQHSRLGSVVERLHTGMS

SEQ ID NO: 10176 - protein, 500 aa, synthetic construct
MRALVVIRLSRVTEATTSPERQLESCQQLCAQRGWDVVGVAEDLDVSGAVDPFDRKRRPNLARWLASEEQPFDVIVAYRVDRLTRSTRHLQQLVHWAEDHKKLVVSATEAHFDTTTPFAAVVIALMGTVAQMELEAIKERIRSAVHFNIRAGKYRGSLPPWGYLPARVDGEWRLVPDPVQRERILEVYHRVVDNHEPLHLVAYDLNRRGVLSPKDYFAQLQGREPQGRKWSATALKRSMISVAMLGYATLNGKVVRDDDGAPLVRAEPILTREQQEALRAELVKTSRAKPAVSTPSLLLRVLFCAVCGEPAYKFTGGGRKHPRYRCRSVGFPKHCGNGTVVMAEWDAFCEEQVLSLLGDAERLEKVWVAGSDSAVELAEVNAELMDLTSLIGSPAYRAGSPQREALDARIAALAARQGELEGLEARPSGWGWRETGQRFGDWWREQDTAAKNTWLRSMNVRLTFDVRGGLTRTIDFGDLQEYEQHLRLGSVAERLHTGLS

SEQ ID NO: 10177 - protein, 500 aa, synthetic construct
MRALVVIRLSRVTEATTSPERQLESCQQLCAQRGWDVVGVAEDLDVSGAVDPFDRKRRPNLARWLAFEEQPFDAIVAYRVDRLTRSVRHLQQLVHWAEDHKKLVVSATEAHFDTTTPFAAVVIALMGTVAQMELEAIKERIRSAVRFNIRAGKYRGSLPPWGYLPARVDGEWRLVPDPVQRERILEVYHRVVDNHEPLHLVAHDLNRRGVLSPKDYFAQLRGREPQGRKWSATALKRSMTSEAMLGYATLNGKTVRDDDGAPLVRAEPILTRGQLEALRAELAKTSRAKPAVSTPSLLLRVLFCAVCGEPAYKFVGGGRKHPRYRCRSTGFPEHCGNGTVVMAEWDAFCEEQVLDLLGDAERLEKVWVAGSDSAVELAEVNAELVDLTSLIGSPAYRAGSPQREALDARIAALAARQEELEGLEARPSGWEWRETGQRFGDWWREQDTAAKNTWLRSMNVRLTFDVRGGLTRTIDFGDLQEYEQHLRLGSVVERSHTGMS

SEQ ID NO: 10178 - protein, 500 aa, synthetic construct
MRALVAIRLSRVTDATTSPERQLASCQQLCAQRGWDVVGVAEDLDVSGAVDPFDRKRRPNLARWLAFEEQPFDVIVAYRVDRLTRSTRHLQQLVRWAEDHKKLVVSATEAHFDTTTPFAAVVIALMGTVAQMELEAIKERIRSAVHFNIRAGKYRGSLPPWGYLPARVDGEWRLVPDPVQRERILEVYHRVVDNHEPLHLVAYDLNRRGVLSPKDYFAQLQGREPQGRKWSATALRRSMTSEAMLGYATLNGKIVRGDDGAPLVRAEPILTREQQEALRAELAKTSRAKPAVSTPSLLLRVLFCAVCGEPAYKFVGGGRKHPRYRCRSMGFPEHCGNGTVVMAEWDAFCEEQVLGLLGDAERLEKVWVAGSDSAVELAEVNAELVDLTSLIGSPAYRAGSPQREALDARIAALAARQEELEGLEARPSGWEWRETGQRFGDWWREQDTAAKNTWLRSMNVRLTFDVRDGLTRTIDFGDLQEYEQHLRLGSAVERLHTGIL

SEQ ID NO: 10179 - protein, 500 aa, synthetic construct
MRALVVIRLSRVTDATTSPERQLESCQQLCAQRGWDVVGVAEDLDVSGAVDPFDRKRRPNLARWLAFEQQPFDVIVAYRVDRLTRSVRHLQQLVHWAEDHKKLVVSATEAHFDTTTPFAAVVIALMGTVAQMELEAIKERIRSAVHFNIRAGKYRGSLPPWGYLPTRVDGEWRLVPDPVQRERILEVYRRVVDNHEPLHLVAHDLNRRGVLSPKDYFAQLRGREPQGRRWSATALKRSMVSVTMLGYTTLNGKIVRDDDGAPLVRAEPILTREQLEALRAELVKTSRAKPAVSTPSLLLRVLFCAVCGEPAYKFVGGGRKHPRYRCRSMGFPEHCGNGTVVMAEWDAFCEEQVLDLLGDAERLEKVWVAGSDSAVELTEVNAELVDLTSLIGSPAYRAGSPQREALDARIAALAARQEELEGLEARPSGWEWRETGQRFGDWWREQDTAAKNTWLRSMNVRLTFDVRGGLTRTIDFGDLQEYEQHLRLGSVVERLRTGMS

SEQ ID NO: 10180 - protein, 500 aa, synthetic construct
MRALVVIRLSRVTDATTSPERQLESCQQLCAQRGWDVVGVAEDLNVSGAVDPFDRKRRPNFARWLAFEEQPFDVIVAYRVDRLTRSTRHLQQLVHWAEDHKKLVVSATEAHFDTTTPFAAVVIALMGTVAQMELEAIKERNRSAAHYNIRAGKYRGSLPPWGYLPTRVDGEWRLVPDPVQRERILEVYHRVVDNHEPLHWVAHDLNRRGVLSPKDYFAQLQGREPQGRKWSATALKRSMISEAMLGYATLNGKTVRDDDGAPLVRAEPILTREQLEALRAELVRTSRAKPAVSTPSLLLRVLFCAVCGEPAYKFAGGGRKHPRYRCRSMGFPKHCGNGTVVMAEWDAFCEEQVLDLLGDAERLEKVWVAGSDTAAELAEVNAELVDLTSLIGSPAYRAGSPQREALDARIAALAARQEELKGLGARPSGWEWRETGQRFGDWWREQDTAAKNTWLRSMNVRLTFDVHGGLTRTIDFGDLQEYEQHLRLGSVVERLRTGMS

SEQ ID NO: 10181 - protein, 500 aa, synthetic construct
MRALVVIRLSRVTDATTSPERQLESCQQLCAQRGWDVVGVAEDLDVSGAVDPFDRKRRPNLARWLAFEEQPFDVIVAYRVDRLTRSTRHLQQLVHWAEDHKKLVVSATEAHFDTTTPFSAVVIALMGTVAQMELEAIKERNRSAAHFNIRAGKYRGSLPPWGYLPARVDGEWRLVPDPVQRERILEVYHRVVDNHEPLHLVAHDLNRRGVLSPKDYFAQLQGREPQGRKWSATALKRSMTSEAMLGYATLNGKTVRGDDGAPLVRAEPILTREQLEALRAELVKTSRAKPAVSTPSLLLRVLFCAVCGEPAYKFAGGGRKHPRYRCRSMGFPKHCGNGTVAMAEWDAFCEEQVLDLLGDAERLEKVWAAGSDSAVELAEVSAELVDLTSLIGSPAYRAGSPQREALDARIAALAARQEELEGLEARPSGWEWRGTGQRFGDWWREQDTAAKNAWLRSMNVRLAFDARGGLTRTIDFGNLREYEQHLRLGSVVERLHTGVS

SEQ ID NO: 10182 - protein, 500 aa, synthetic construct
MRALVVIRLSRVTDATTSPERQLESCQQLCAQRGWDVVGVAEDLDVSGAVDPFDRKRRPNLARWLAFEEQPFDVIVAYRVDRLTRSVRYLQQLVHWAEDHKKLVVSATEAHFDTTTPFAAVVIALMGTVAQMELEAIKERNRSAAHFNIRAGKYRGSLPPWGYLPTRVDGEWRLAPDPVQRERIFEVYHRVVDNHEPLHLVAHDLNRRGVLSPKDYFAQLQGREPQGRKWSTTALKRSMISEAMLGYATLNGKTVRDDSGAPLVRAEPILTRGQLEALRAELVKTSRAKPAASTPSLLLRVLFCAVCGEPAYKFAGGGRKHPRYRCRSMGFPKHCGNGTVAMAEWDAFCEEQVLDLLGDTERLEKVWVAGSDSAVELAEVNAELVDLTSLIGSPAYRAGSPQREALDARIAALAARQEELEGLEARPSGWEWRETGQRFGDWWREQDTAAKNTWLRSMNVRLTFDVRGGLTRTIDFGGLQEYKQHLRLGSVVERFHTGMS

SEQ ID NO: 10183 - protein, 500 aa, synthetic construct
MRALVVIRLSRVTDATTSPERQLESCQQLCAQRGWDVVGVAEDLDVSGAVDPFDRKRRPNLARWLAFEEQPFDAIVAYRVDRLTRSTRHLQQLVRWAEDHKKLVVSATEAHFDTTTPFAAVVIALMGTVAQMELEAIKERSRSAAHFNIRAGKYRGSLPPWGYLPTRVDGEWRLVPDPVQRERILEVYHRVVDNHEPLHLVAHDLNRRGVLSPKDYFAQLRGREPQGRKWSATALKRSMISVAMLGHATLNGKIVRDDDGAPLVRAEPILTREQQEALRAVLVKTSRAKPAVSTPSLLLRVLFCAVCGEPAYKFVGGGRKHPRYRCRSMGFPKHCGNGTVVMTEWDAFCEEQVLDLLGDAERLEKVWVAGSDSAVELAEVNAELVDLTSLIGFPAYRAGSPQREALDARIAALAARQEELEGLEARPSGWEWRGTGQRFGDWWREQDTAAKNTWLRSMNVRLTFDVRGGLTRTIDFGELQEYEQHLRLGSVVERSHTGVS

SEQ ID NO: 10184 - protein, 500 aa, synthetic construct
MRALVVIRLSRVTDATTSPERQLESCQQLCAQRGWDVVGVAEDLDVSGAVDPFDRKRRPNLARWLAFEEQPFDVIVAYRVDRLTRSTRHLQQLVHWAEDHKKLVVSATEAHFDTTTPFAAVVIALMGTVAQMELEAIRERNRSAAHFNIRAGKYRGSLPPWGYLPTRVDGEWRLVPDPVQRERILEVYHRVVDNHEPLHLVAHDLNRRGVLSPKDYFAQLQGREPQGRKWSATALKRSMISEAMLGYATLNGKTVRDDDGAPLVRAEPILTRGQLEALRAELVKTSRAKPAVSTPSLLLRVLFCAVCGEPAYKFAGGGRKHPRYRCRSMGFPKHCGNGTVVMAEWDAFCEEQVLDLLGDAERLEKVWVAGSDSAVELAEVNAELVDLTSLIGSPTYRAGSPQREALDARIAALAARQEELEGLEARPSGWEWRGTGQCFGDWWREQDTAAKNTWLRSMNVRLTFDVRGGLTRTIDFGELQEYEQHLRLGSVVERLHTGMS

SEQ ID NO: 10185 - protein, 500 aa, synthetic construct
MRALVVIRLSRVTDATTSPERQLESCQQLCAQRDWDVVGVAEDLDVSGAVDPFDRKRRPSLARWLAFEEQPFDVIVAYRVDRLTRSVRHLQQLVRWAEDHKKLVVSATEAHFDTTTPFAAVVIALMGTVAQMELEAIRERSRSAAHFNIRAGKYRGSLPPWGYLPARVDGEWRLVPDPVQRERILEVYHRVVDNHEPLHLVAHDLNRRGVLSPKDYFAQLQGREPQGRKWSATALRRSMISVAMLGYATLNGKIVRDDDGAPLVRAEPILTRVQLEALRAELVKTSRAKPAVSTPSLLLRVLFCAVCGEPAYKFVGGGRKHPRYRCRSMGFSEHCGNGTVVMAEWDAFCEEQVLGLLRDTERLEKVWVAGSDSAVDLAEVNAELVDLTSLIGSPAYRTGSPQRGALDARIAALAARQEELEGLEARPSGWEWRGTGQRFGDWWREQDTAAKNTWLRSMNVRLTFDVRGGLTRTIDFGELQEYEQHLRLGSAVERLHTGAS

SEQ ID NO: 10186 - protein, 500 aa, synthetic construct
MRALVVIRLSRVTDATTSPGRQLESCQQLCAQRGWDVVGVAEDLDVSGEVDPFDRKRRPNLARWLAFEEQPFDVIVAYRVDRLTRSTRHLQQLVHWAEDHKKLVVSATEAHFDTTTPFAAVVIALMGTVAQMELEAIKERNRSAAHFNIRAGKYRGSLPPWGYLPARVDGEWRLAPDPVQRERILEVYHRVVDNHEPLHLVAHDLNRRGVLSPKDYFAQLQGREPQGRKWSATALKRSMISEAMLGYATLNGKTVRDDDGAPLVRAEPILTREQLGALRAELVKTSRAKPAVSTPSLLLRVLFCAVCGEPAYKFAGGGRKHPRYRCRSMGFPKHCGNGTVVMAEWDAFCEEQVLDLLGDAERLEKVWVAGSDSAVELAEVNAELVDLTSLIGSPAYRAGSPQREALDARIAALAARQEELEGLEARPSGWEWRGTGQRFGDWWREQDTAAKNTWLRSMNVRLTFDVRGGLTRTIDFGDLQEYEQHLRLGSVVERLHTGMS

SEQ ID NO: 10187 - protein, 500 aa, synthetic construct
MRALVVIRLSRVTDTTTSPERQLESCQQLCAQRGWDVVGVAEDLDVSGAVDPFDRKRRPNLARWLAFEEQPFDAIVAYRVDRLTRSVRYLQQLVHWAEDHKKLVVSATEAHFDTTTPFAAVVIALMGTVAQMELEAIKERNRSAAHFNIRAGKYRGSLPPWGYLPTRVDGEWRLAPDPVQRERILEVYHRVVDNHEPLHLVAHDLNRRGVLSPKDYFAQLQGREPQGRKWSATALKRSMISVTMLGYATLNGKTVRDDGGAPLVRAEPILTREQLEALRAELVRTSRAKPAVSTPSLLLRVLFCAVCGEPAYKFAGGGRKHPRYRCRSMGFPKHCGNGTVAMAEWDAFCEEQVLDLLGDAERLERVWVAGSDSAVELAEVNAELVDLTSLIGSPAYRAGSPQREALDARIAALAARQEELEGLEAHPSGWGWRETGQRFGDWWREQDTAAKNTWLRSMNVRLTFDARGGLTRTIDFGDLQEYEQHLRLGSVVERLHTGMS

SEQ ID NO: 10188 - protein, 500 aa, synthetic construct
MRALVVIRLSRVTDATTSPERQLESCQQLCAQRGWDVVGVAEDLDVSGAVDPFDRKRRPNLARWLAFGEQPFDVIVAYRVDRLTRSVRHLQQLVHWAEDHKKLVVSATEAHFDTTTPFAAVVIALMGTVAQMELEAIKERNRSAAHFNIRAGKYRGSLPPWGYLPTRVDGEWRLVPDPVQRERILEVYHRVVDNHEPLHLVAHDLNRRGVLSPKDYFAQLQGREPQGRKWSATALKRSMTSVAMLGYATLNGKTVRDDDGAPLVRAEPILTRGQLEALRAELVKTSRAKPAVSTPSLLLRVLFCAVCGEPAYKFAGGGRKHPRYRCRSMGFPKHCGNGTVAMAEWDAFCEEQVLDLLGDAERLEKVWVAGSDSAVELAEVNAELVDLTSLVGSPAYRAGSPQREALDARIAALAARREELEGLEARPSGWEWRETGQRFGDWWREQDTAAKNTWLRSMNVCLTFDVRGGLTRTIDFGDLQEYEQRLRLGSVVERLHTGMP

SEQ ID NO: 10189 - protein, 500 aa, synthetic construct
MRALVVIRLSRVTDATTSPERQLESCQQLCAQRGWDVVGVAEDLDVSGAVDPFDRKRRPNLARWLAFEEQPFDAIVAYRVDRLARSIRHLQQLVHWAEDHKKLVVSATEAHFDTTTPFAAVVIALMGTVAQMELEAIKERNRSAAHFNIRAGKYRGSLPPWGYLPTRVDGEWRLVPDPVQRERILEVYHRVVDNHEPLHLVAHDLNRRGVLSPKDYFAQLRGREPQGRKWSATALKRSMISEAMLGYATLNGKTVRDDDGAPLVRAEPILTREQLEALRAELVKTSRARPAVSTPSLLLRVLFCAVCGEPAYKLAGGGRKHPRYRCRSMGFPEHCGNGTVAMAEWDAFCEEQVLDLLGDTERLEKVWVAGSDSAVELAEVNAELVDLTSLIGSSAYRAGSPQREALDARIAALAARQEELEGLEARPSGWEWRETGQRFGDWWREQDTAAKNTWLRSMNVRLTFDVRGGPTRTIDFGDLQEYEQHLRLGSVVERLYTGMS

SEQ ID NO: 10190 - protein, 500 aa, synthetic construct
MRALVVIRLSRVTDATTSPERQLESCQQLCAQRGWDVVGVAEDLSVSGAVNPFDRKRRPSLARWLAFEEQPFDAIVAYRVDRLTRSIRHLQQLVHWAEDHKKLVVSATEAHFDTTTPFAAVVIALMGTVAQMELEAIKERNRSAAHFNIRAGKYRGSLPPWGYLPARVDGEWRLVPDPVQRERILEVYHRVVDNHEPLHLVAHDLNRRGVLSPKDYFAQLQGREPQGRKWSATALKRSMISEAMLGYATLNGKTVRDDDGAPLVRAEPILTRGQLEALRAELVKTSRAKPAVSTPSLLLRVLFCAVCGEPAYKFAGGGRKHPRYRCRSMGFPKHCGNGTVVMAEWDAFCEEQVLDLLGDAECLEKVWVAGSDSAVELAEVNAELVDLTSLIGSPAYRAGSPQREALDARIAALAARQEELEGLGARPSGWEWRETGQRFGDWWREQDTAAKNTWLRSMNVRLTFDVRGGLTRTIDFGDLQEYEQHLRLGSVVERLYTGMS

SEQ ID NO: 10191 - protein, 500 aa, synthetic construct
MRALVVIRLSRVTDATTSPERQLESCQQLCAQRGWDVVGVAEDLDVSGAVDPFDRKRRPNLARWLAFEQQPFDVIVAYRVDRLTRSVRHLQQLVRWAEDHRKLVVSATEAHFDTTTPFAAVVIALMGTVAQMELEAIKERIRSAAHFNIRAGKYRGSLPPWGYLPTRVDGEWRLVPDPVQRERILEVYHRVVDNHEPLHLVAHDLNRRGVLSPKDYFAQLRGREPRGRKWSATALRRSMTSEAMLGYATLNGKTVRDDDGAPLVRAEPILTREQQEALRAELAKTSRAKPAVSTPSLLLRVLFCAVCGEPAYKFVGGGRKHPRYRCRSMGFPEHCGNGTVVMAEWDAFCEEQVLDLLGDAERLEKVWVAGSDSAVELAEVNAELVDLTSLIGSPAYRAGSPQREALDARIAALAARQEELESLEARPSGWEWRETGQRFGDWWREQDTAAKNTWLRSVNVRLTFDVRGGLTRTIDFGDLQEYEQHLRLGSVIERLHTGMS

SEQ ID NO: 10192 - protein, 500 aa, synthetic construct
MRTLVVIRLSRVTDATTSPERQLASCQQLCAQRGWDVVGVAEDLDVSGAVDPFDRKRRPNLARWLAFEERPFDVIVAYRVDRLTRSVRHLQQLVRWAEDHKKLVVSATEAHFDMTTPFAAVVIALMGTVAQMELEAIKERIRSAVHFNIRAGKYRGSLPPWGYLPTRVDGEWRLVPDPVQRERILEVYHRVVDNHEPLHLVAYDLNRRGVLSPKDYFAQLQGREPQGRRWSATALKRSMISVAMLGYATLNGKTVRDDDGAPLVRAEPILTREQQEALRAELAKTSRAKPAVSTPSLLLRVLFCAVCGEPAYKFAGGGRKHPRYRCRSMGSPKHCGNGTVVMAEWDAFCEEQVLGLLGDAERLEKVWVAGSDSAVELAEVSAELVDLTSLIGSPAYRAGSPQREALDARIAALAARQEELEGLEARPSGWEWRETGQRFEDWWREQDTAAKNIWLRSMNIRLTFDVRGGLTRTIDFGELQEYEQHLRLGSVAERLHTGMS

SEQ ID NO: 10193 - protein, 500 aa, synthetic construct
MRALVVIRLSRVTDATTSPERQLESCQQLCAQRGWDVVGVAEDLDVSGAVDPFDRKRRPNLARWLAFEEQPFDVIVAYRVDRLTRSTRHLQQLVHWAEDHKKLVVSATEAHFDTTTPFAAVVIALMGTVAQMELEAIKERIRSAAHFNIRAGKYRGSLPPWGYLPTRVDGEWRLVPDPVQRERILEVYHRVVDNHEPLHLVAHDLNRRGVLSPKDYFAQLRGREPRGRKWSATALKRSMTSVAMLGYATLNGKVVRDNDGAPLVRAEPILTRGQQEALRAELAKTSRAKPAVSTPSLLLRVLFCAVCGEPAYKFVGGGRKHPRYRCRSMGFPKHCGNGTVVMAEWDAFCEEQVLYLLGDAERLEKVWVAGSDSAVELAEVNAELMDLTSLIGSPAYRAGSPQREALDTRIAALAARQEELEGLEARPSGWEWRGTGQRLGDWWREQDTAAKNTWLRSMNVRLTFDVRDGLTRTIDFGDLQEYEQHLRLGSVVERLRTGMS

SEQ ID NO: 10194 - protein, 500 aa, synthetic construct
MRALVVIRLSRVTDATTSPERQLESCQQLCAQRGWDVVGVAEDLDVSGAVDPFDRKRRPNLARWLAFEEQPFDVIVACRVDRLTRSVRHLQQLVHWAEDHKKLVVSATEAHFDTTTPFAAVVIALMGTVAQMELEAIKERNRSAAHFNIRAGKYRGSLPPWGYLPTRVDGEWRLVPDPVQRERILEVYRRVVDNHEPLHLVAHDLNRRGVLSPKDYFAQLRGREPQGRKWSATALKRSMISEAMLGYATLNGKTVRDDDGTPLVRAEPILTREQLEALRAELVKTSRAKPAVSTPSLLLRVLFCAVCGEPAYKFAGGGRKHPRYRCRSMGFPKHCGNGTVAMAEWDAFCEEQVLNLLGDSVRLEKVWVAGSDSAVELAEVNAELVDLTSLIGSPAYRAGSPQREALDARIAALAARQEELEGLGTRPSGWEWHETGQRFGDWWREQDTAAKNTWLRSMNVRLTFDARGGLTRTIDFGDLQEYEQHIRLGGVVERLHTGMS

SEQ ID NO: 10195 - protein, 500 aa, synthetic construct
MRALVVIRLSRVTDATTSPERQLESCQQLCAQRGWDVVGVAEDLDVSGAVDPFDRKRRPNLARWLAFEEQPFDVIVAYRVDRLTRSTRHLQQLVRWAEDHKKLVVSATEAHFDTTTPFAAVVIALMGTVAQMELEAIKERIRSAVHFNIRAGKYRGSLPPWGYLPTRVDGEWRLVPDPVQRERILEVYHRVVDNHEPLHLVAHDLNRRGVLSPKDYFAQLQGREPQGRKWSATALKRSMISVAMLGYATLNGKIVRDDDGAPLVRAEPILTREQLEALRAELVRTSRAKPAVSTPSLLLRVLFCAVCGEPAYKFAGGGRKHPRYRCRSVGFPEHCGNGTVVMAEWDAFCEEQVLDLLGDAERLEKVWVAGSDSAVELAEVNAELVDLTSLIGSPAYRTGSPQREALDARIAALAARQEELEGLEARPSGWEWRGTGQRFGDWWREQDTAAKNTWLRSMNVRLTFDVRGGLTRTIDFGDLQEYEQHLRLGSVVERLHTGMS

SEQ ID NO: 10196 - protein, 500 aa, synthetic construct
MRALVVIRLSRVTDATTSPERQLESCQQLCAQRGWDVVGVAEDLDVSGAVDPFDRKRRPNLARWLAFEEQPFDVIVAYRVDRLTRSTRHLQRLVHWAEDHKKLVVSATEAHFDTTTPFAAIVIALMGTVAQMELEAIKERIRSAVRFNIRAGKYRGSLPPWGYLPTRVDGEWRLVPDPVQRERILEVYHRVVDNHEPLHLVAHDLNRRGVLSPKDYFAQLRGREPRGRKWSATALRRSMTSVAMLGYATLNGKIVRDDDGVPLVRAEPILTREQQEALRAELVKTSRAKPAVSTPSLLLRVLFCAVCGEPAYKFAGGGRKHPRYRCRSMGFPKHCGNGTVVMTEWDTFCEEQVLGLLGDAERLEKVWVAGSDSVVELAEVNAELVDLTSLIGSPAYRAGSPQREALDARIAALAARQGELEGLEARPSGWEWRGTGQRFGDWWREQDTAAKNTWLRSMNVRLTFDVRGGLTRTVDFGDLREYERHLRLGSVVERLRTGMS

SEQ ID NO: 10197 - protein, 500 aa, synthetic construct
MRALVVIRLSRVTDATTSPERQLESCQQLCTQRGWDVVGVAEDLDVSGAVDPFDRKRRPSLARWLAFEEQPFDVIVAYRVDRLTRSTRHLQQLVHWAEDHKKLVVSATEAHFDTTTPFAAVVIALMGTVAQMELEAIKERIRSAAHFNIRAGKYRGSLPPWGYLPARVDGEWRLVPDPVQRERILEVYHRVVGNHEPLHLVAHDLNRRGVLSPKDYFAQLRGREPQGRKWSATALKRSMTSGAMLGYATLNGKIVRDDDGAPLVRAEPILTREQQEALRAELAKTSRAKPAVSTPSLLLRVLFCAVCGEPAYKFVGGGRKHPRYRCRSIGFPKHCGNGTVAMVEWDAFCEEQVLNLLGDAERLEKVWVAGSDSAVELAEVNAELVDLTSLIGSPAYRAGSPQREALDARIAALAARQEKLEGLEARPSGWEWRGTGQRFGDWWREQDTAAKNTWLRSVNVRLTFDVRGGLTRTIDFGELQEYMQHLRLGSEVERLHTGTS

SEQ ID NO: 10198 - protein, 500 aa, synthetic construct
MRALVVIRLSRVTDATTSPERQLESCQQLCAQRGWDVVGVAEDLDVSGAVDPFDRKRRPNLARWLAFEEQPFDVIVAYRVDRLARLTRHLQQLVHWAEDHKKLVVSATEAHFDTTTPFAAVVIALMGTVAQMELEAIKERNRSAAHFNIRAGKYRGSLPPWGYLPTRVDGEWRLAPDPVQRERVLEVYHRVVDNHEPLHLVAHDLNRRGVLSPKDYFAQLRGREPQGRKWSATALKRSMTSEAMLGYATLNGKTVRDDDGAPLVRAEPILTREQLEALRAELVKTSRAKPAVSTPSLLLRVLFCAVCGEPAYKFAGGGRKHPRYRCRSIGFPEHCGNGTVSMAEWDAFCEEQVLDLLGDAERLEKVWVAGSDSAVELAEVNAELVDLTSLIGSPAYRAGSPQREALDARIAALAARQEELEGLEARPSGWVWRETGQRFGDWWHEQDTAAKNTWLRSMNVRLTFDVRGGLTRTIDFGDLQEYEQYLRLGSVVERLHTGMS

SEQ ID NO: 10199 - protein, 500 aa, synthetic construct
MRALVVIRLSRVTDATTSPERQLESCQQLCARRGWDVVGVAEDLDVSGAVDPFDRKRRPNLARWLAFEEQPFDVIVAYRVDRLTRSTRHLQQLVRWAEDHKKLVVSATEAHFDTTTPFAAVVIALMGTVAQMELEAIKERIRSATHFNIRAGKYRGSLPPWGYLPTRVDGEWRLVPDPVQRERILEVYHRVVDNHESLHLVAHDLNRRGVLSPKDYFAQLRGREPQGRKWSATALRRSMTSVAMLGYATLNGKTVRDDDGAPLVRAEPILTRGQQEALRAELVKTSRAKPAVSTPSLLLRVLFCAVCGEPAYKFVGGGRKHPRYRCRSMGFPEHCGNGTVVMAEWDAFCEEQVLDLLGDAERLEKVWVAGSDSAVELAEVNAELVDLTGLIGSPAYRAGSPQREALDARIAALAARQEELEGLEARPSGWEWRETGQRFGDWWREQDTAAKNTWLRSMNVRLTFDVRGGLTRTIDFGDLQEYAQHLRLGSVVERSHTGMS

SEQ ID NO: 10200 - protein, 500 aa, synthetic construct
MRALVVIRLSRVTDATTSPERQLESCQQLCAQRGWDVVGVAEDLDVSGAVDPFDRKRRPNLARWLAFEEQPFDVIVAYRVDRLTRSTRHLQQLVHWAEDHEKLVVSATEAHFDTTTPFAAVVIALMGTVAQMELEAIKERNRSAAHFNIRAGKYRGSLPPWGYLPTRVDGEWRLVPDPVQRERILEVYHRVVDNHEPLHLVAHDLNRRGVLSPKDYFAQLRGREPQGRKWSATALKRSMISEAMLGYATLNGKTVRDDDGAPLVRAEPILTREQLEALRAELVKTSRAKPAVSTPSLLLRVLFCAVCGEPAYKFAGGGRKHPRYRCRSMGFPKHCGNGTVVMAEWDAFCEEQVLNLLGDAERLEKVWVAGSDSAVELAEVNVELVDLTSLIGSPAYRAGSPQREALDARIAALAARQEELEGLEARPSGWEWRETGQRFGDWWREQDTAAKNTWLRSMNVRLTFDVRGGLTRTIDFGDLQEYEQHLRLGSVVERLHAGMS

SEQ ID NO: 10201 - protein, 500 aa, synthetic construct
MRALVVIRLSRVTDATTSPERQLESCQQLCAQRGWDVVGVAEDLDVSGAVDPFDRKRRPNLARWLAFEEQPFDVIVAYRVDRLARSTRHLQQLVHWAEDHKKLVVSATEAHFDTTTPFAAVVIALMGTVAQMELEAIKERNRSAAHFNIRAGKYRGSLPPWGYLPTRVDGEWRLVPDPVQRERILEVYHRVVDNHEPLHLVAHDLNRRGVLSPKDYFAQLRGREPQGRKWSATALKRSMISEAMLGYATLNGKTVRDEDGAPLVRAEPILTREQLEALRAELVKTSRAKPAVSTPSLLLRVLFCAVCGEPAYKSAGGGHKHPRYRCRSMGFPKHCGNGTVAMAEWDAFCEEQVLDLLGDAERLEKVWVAGSDSAVELAEVSAELVDLTGLISSPAYRAGSPQREALDARIAALAARQEELEGLEARPSGWEWRETGQRFGDWWREQDTAAKNTWLRSMNVRLTFDVRGGLTRTIDFGDLQEYEQHLRLGSVVERLHTGMS

SEQ ID NO: 10202 - protein, 500 aa, synthetic construct
MRALVVIRLSRTTDATTSPERQLESCQQLCAQRGWDVVGVAEDLDVSGAVDPFDRKRRPNLARWLAFEEQPFDVIVAYRVDRLTRSVRHLQQLVHWAEDHKKLVVSATEAHFDMTTPFAAVVIALMGTVAQMELEAIKERNRSAAHFNIRAGKYRGSLPPWGYLPTRVDGEWRLVPDPVQRERILEVYHRVVDNHEPLHLVAHDLNRRGVLSPKDYFAQLRGREPQGRRWSATALKRSMISEAMLGYATLNGKTVRDDDGAPLVRAEPILTREQLEALRAELVKTPRAKPAVSTPSLLLRVLFCAVCGEPAYKFAGGGRKHPRYRCRSMGFPKHCGNGTVAMAEWDAFCEEQVLDLLGGAERLEKVWVAGSDSAVELAEVNAELVDLTSLIGSPAYRAGSPQREALDARIAALAARQEELEGLEASPSGWEWRETGQRFRDWWREQDTAAKNTWLRSMNVRLTFDARGGLTRTIDFGDLQEYVQHLRLGSVVERLHTGTS

SEQ ID NO: 10203 - protein, 500 aa, synthetic construct
MRALVVIRLSRVTDATTSPERQLESCQQLCAQRGWDVVGVAEDLDVSGAVDPFDRKRRPNLARWLAFEEQPFDVIVAYRVDRLTRSTRHLQQLVHWAEDHKKLVVSATEAHFDTTTPFAAVVIALMGTVAQMELEAIKERNRSAAHFNIRAGKYRGSLPPWGYLPTRVDGEWRLAPDPVQRERILEVYRRVVDNHEPLHLVAHDLNRRGVLSPKDYFAQLQGREPQGHKWSATALKRSMISEAMLGYATLNGKTVRDDDGAPLVRAEPILTREQLEALRAELVKTSRAKPAVSTPSLLLRVLFCAVCGEPAYKFAGGGRKHPRYRCRSMGFPKHCGNGTVAMAEWDAFCEEQVLDLLGDAERLEKVWVAGSDSAVELAEVSAELVDLTSLIGSPAYRAGSPQREALDSRIAALAARQEELESLGARPSGWEWRETGQRFGDWWREQDAAAKNTWLRSMNVRLTFDARGGLTRTIDFGDLQEYEQHLRLGGVVERLHTGMS

SEQ ID NO: 10204 - protein, 500 aa, synthetic construct
MRALVVIRLSRVTDATTSPERQLESCQQLCAQRGWDVVGVAEDLDVSGAVDPFDRKRRPNLARWLAFEEQPFDVIVAYRVDRLTRSTRHLQQLVRWAEDHKKLVVSATEAHFDTTTPFAAVVIALMGTVAQMELEAIKERIRSAVHFNIRAGRYRGSLPPWGYLPTRVDGEWRLVPDPVQRERILEVYHRVVDNHEPLHLVAHDLNRRGVLSPKDYFAQLQGREPRGRKWSATALKRSMISVAMLGYATLNGKIVRDDDGAPLVRAEPILTREQQEALRAELAKTSRAKPAVSTPSLLLRVLFCAVCGEPAYKFVGGGRKHPRYRCRSMGFPKHCGNGTVAMAEWDAFCEEQVLGLLRDAERLEKVWVAGSDSAVELAEVNAELVDLTSLIGSPAYRAGSPQREALDARIAALAARQEELEGLEARPSGWEWREAGQRFGDWWREQDTAAKNTWLRAMNVRLTFDVRGGLTRTIDFGELQEYVQRLRLGGVVERLRTGVS

SEQ ID NO: 10205 - protein, 500 aa, synthetic construct
MRALVVIRLSRVTDATTSPERQLESCQQLCAQRGWDVVGVAEDLDVSGAVDPFDRKRRPNLARWLAFEEQPFDVIVAYRVDRLTRSTRHLQQLVHWAEDHKKLVVSATEAYFDTTTPFAAVVIALMGTVAQMELEAIKERNRSAAHFNIRAGKYRGSLPPWGYLPTRVDGEWRLVPDPVQRERILEVYHRVVDNHEPLHLVAHDLNRRGVLSPKDYFAQLQGREPQGRKWSATALKRSMISEAMLGYATLNGKIVRDDDGAPLVRAEPILTREQLEALRAELVKASRAKPAVSTPSLLLRVLFCAVCGEPAYKFAGGGRKHPRYRCRSMGFPKHCGNGTVVMAEWDAFCEEQVLNLLGDAERPEKVRVAGSDSAIELAEVNAELVDLTSLIGSQAYRAGSPQREALDARIAALAARQEELEGLGARPSGWEWRETGQRFGDWWREQDTAAKNTWLRSMNVRLTFDVRGGLTRTIDFGDLQEYEQHLRLGSVDERLRTGMS

SEQ ID NO: 10206 - protein, 500 aa, synthetic construct
MRALVVIRLSRVTDATTSPERQLESCQQLCAQRGWDVVGVAEDLNVSGAVDPFDRKRRPNLARWLAFEEQPFDVIVAYRVDRLTRSIRHLQQLVHWAEDHKKLVVSATEAHFDTTTPFAAVVIALMGTVAQMELEAIKERNRSAAHFNIRAGKYRGSLPPWGYLPTRVNGEWRLVPDPVQRERILEVYHRVVDNHEPLHWVAHDLNRRGVLSPKDYFAQLQGREPQGRKWSATALKRSMISEAMLGYVTLNGKTVRGDDGAPLVRAEPILTRVQLEALRAELVKTSRAKPAVSTPSLLLRVLFCAVCGEPAYKLAGGGRKHPRYRCRSMGFPKHCGNGTVTMAEWDAFCEEQVLNLLGDAERLEKVWVAGSDSAVELAEVNAELVDLTSLIGSPVYRAGSPQREALGARIAALAARQEELEGLEARPSGWGWRETGQRFGDWWRELDTAAKNTWLRSMNVRLTFDVRGGLTRTIDFGDLQEYKQHLRLGSVVERLHTGMS

SEQ ID NO: 10207 - protein, 500 aa, synthetic construct
MRALVVIRLSRVTDATTSPERQLESCQQLCAQRGWDVVGVAEDLDVSGAVDPFDRKRRPNLARWLAFEEQPFDVIVAYRVDRLTRSTRHLQQLVRWAEDHKKLVVSATEAHFDTTTPFAAVVIALMGTVAQMELEAIKERIRSAAHFNIRAGKYRGSLPPWGYLPTRVDGEWRLVPDPVQRERILEVYHRVVDNHEPLHLVAHDLNRRGVLSPKDYFAQLQGREPQGRRWSATALKRSMTSGAMLGYATLNGKTVRDDDGAPLVRAEPILTREQQEALRAELAKTSRAKPAVSTPSLLLRVLFCAVCGEPAYKFVGGGRKHPRYRCRSMGSPKHCGNGTVAMAEWDAFCEEQVLDLLGDAERLEKVWVAGSDTAVELAEVNAELVDLTSLIGSPAYRAGSPQREALDARIAALAARQEELESLEARPSGWEWRETGQRFGDWWREQDTAAKNTWLRAMNVRLTFDVRGGLTRTIDFGELQEYGQHLRSGSVVGRLHTGMP

SEQ ID NO: 10208 - protein, 500 aa, synthetic construct
MRALVVIRLSRVTDATTSPERQLESCQQLCAQRGWDVVGVAEDLDVSGAVDPFDRKRRPSLARWLAFEEQPFDVIVAYRVDRLTRSTRHLQQLVHWAEDHKKLVVSATEAHFDTTTPFAAVVIALMGTVAQMELEAIKERNRSAAHFNIRAGKYRGSLPPWGYLPTRVDGEWRLVPDPVQRERILEVYHRVVDNHEPLHLVAHDLNRRGVLSPKDYFAQLQGREPQGRKWSATALKRSMTSVAMLGYATLNGKTVRDDDGAPLVRAEPILTRVQLEALRAELVKTSRAKPAVSTPSLLLRVLFCAVCGEPAYKFAGGGRKHPRYRCRSMGFPKHCGNGTVAMAEWDAFCEEQVLNLLGDAERLERVWVAGSDSAVELAEVNAELVDLTGLIGSPAYRAGSPQREALDARIAALAARQEELEGLEARPSGWEWRETGQRFGDWWREQDTAAKNTWLRSMNVRLTFDARGGLTRTIDFGGLLEYEQHLRLGSVVERLHTGMS

SEQ ID NO: 10209 - protein, 500 aa, synthetic construct
MRALVVIRLSRVTDATTSPERQLESCQQLCAQRGWDVVGVAEDLDVSGAVDPFDRKRRPNLARWLAFEEQPFDVIVAYRVDRLTRSTRHLQQLVHWAEDHKKLVVSATEAHFDTTSPFAAVVIALMGTVAQMELEAIKERIRSAVRFNVRAGKYRGSLPPWGYLPTRVDGEWRLVPDPVQRERILEVYHRVVDNHEPLHLVAHDLNRRGVLSPKDYFAQLQGREPRGRKWSATALKRSMTSEAMLGHATLNGKIVRDDDGAPLMRAEPILTREQQEALRAELAKTSRAKPAVSTPSLLLRVLFCAVCGEPAYKFAGGGRKHPRYRCRSMGSPKHCGNGTVVMAEWDAFCEEQVLNLLGDAERLEKVWVAGSDSAVELAEVNAELVDLTSLIGSPAYRAGSPQREALDARIAALAARHEELEGLEARPSGWEWRGTGQRFGDWWREQDTAAKNTWLRSMNVRLTFDVRGGLTRAIDFGDLQEYEQHLRSGSVAERLRTGTS

SEQ ID NO: 10210 - protein, 500 aa, synthetic construct
MRALVVIRLSRVTDATTSPERQLESCQQLCAQRGWDVVGVAEDLDVSGAVDPFDRKRRPNLARWLAFEERPFDVVVAYRVDRLTRSTRHLQQLVHWAEDHKKLVVSATEAHFDTTTPFAAVVIALMGTVAQMELEAIKERNRSAAHFNIRAGKYRGSLPPWGYLPARVDGEWRLVPDPVQRERILEVYHRVVDNHEPLHLVAHDLNRRGVLSPKDYFAQLRGREPQGRKWSATALKRSMISEAMLGYATLNGKTVRDDDGAPLVRAEPILTREQLEALRAELVKTSRAKPAVSTPSLLLRVLFCAVCGEPAYKFAGGGRKHPRYRCRSMGFPKHCGNGTVVMAEWDAFCEEQVLDLLGDAERLEKVWVAGSDSAVELAEVNAELVDLTSLIGSPAYRAGSPQHEALGARIAALAARQEELEGLEARPSGWEWRGTGQRFGDWWREQDTAAKNTWLRSMNVRLTFDVRGGLTRTIDFGGLQEYERHLRLGSVVERLHTGMS

SEQ ID NO: 10211 - protein, 500 aa, synthetic construct
MRALVVIRLSRVTDATTSPERQLESCRQLCAQRGWDVVGVAEDLDVSGAVDPFDRKRRPNLARWLAFEEQPFDVIVAYRIDRLTRSVRHLQQLVHWAEDHKKLVVSATEAHFDTTTPFAAVVIALMGTVAQMELEAIKERNRSAAHFNIRAGKYRGSLPPWGYLPTRVDGEWRLVPDPVQRERILEVYHRVVDNHEPLHLVAHDLNRRGVLSPKDYFAQLRGREPQGRKWSATALKRSMISEAMLGYATLNGKTVRDDDGAPLVRAEPILARGQLEALRAELVKTSRAKPAVSTPSLLLRVLFCAVCGEPAYKFAGGGRKHPRYRCRSMGFPKHCGNGTVVMAEWDAFCEEQVLDLLGDAERLEKVWVAGSDSAVELAEVNAELVDLTSLIGSPAYRTGSPQREAIDARIAALAARQEELEGLGARPSGWEWRETGQRFGDWWREQDTAAKNTWLRSMNVRLTFDVRGGRTRTIDFGDLQEYEQHLRLGSVVERLHTGMS

SEQ ID NO: 10212 - protein, 500 aa, synthetic construct
MRALVVIRLSRVTDATTSPERQLESCQQLCAQRGWDVVGVAEDLDVSGAVDPFDRKRRPNLARWLAFEEQPFDVIVAYRVDRLTRSTRHLQQLVHWAEDHKKLVVSATEAHFDTTTPFAAVVIALMGTVAQMELEAIKERIRSAVRFNIRAGKYRGSLPPWGYLPTRVDGEWRLVPDPVQRERILEVYHRVVDNHESLHSVAHDLNRRGVLSPKDYFAQLRGREPQGREWSATALKRSMTSVAMLGYATLNGKTVRDDDGAPLVRAEPILTREQLEALRAELAKTSRVKPAVSTPSLLLRVLFCAVCGEPAYKFVGGGRKHPRYRCRSMGFPEHCGNGTVVMAEWDAFCEEQVLDLLGDAERLEKVWVAGSDSSVELAEVNAELVDLTSLIGSPAYRAGSPQREALDARIAALAARQEELESLEARPSGWEWRETGQRFGDWWREQDTAAKNTWLRSMNVRLTFDVRGGLTRTIDFGELQEYEQHLRLGCVVERLHTGMP

SEQ ID NO: 10213 - protein, 500 aa, synthetic construct
MRALVVIRLSRVTDATTSPERQLESCQRLCAQRGWDVVGVAEDLDVSGAVDPFDRKRRPSLARWLAFEEQPFDVIVAYRVDRLTRSTRHLQQLVRWAEDHKKLVVSATEAHFDTTTPFAAVVIALMGTVAQMELEAIKERIRSAVHFNIRAGKYRGSLPPWGYLPARVDGEWRLVPDPVQRERILEVYHRVVDSHEPLHLVAYDLNRRGVLSPKDYFAQLRGREPRGRKWSATALKRSMTSVAMLGYATLNGKTVRDGDGAPLVRAEPILTREQQEALRAELAKTSRAKPAVSTPSLLLRVLFCAVCGEPAYKFAGGGRKHPRYRCRSMGFPEHCGNGTVAMAEWDAFCEEQVLDLLGDAERLEKVWVAGSDSAVELAEVNAELVDLTSLIGSPAYRAGSPQREALDVRIAALAARQEELEGLEARPSGWEWRETGQRFRDWWREQDTAAKNTWLRSMNVRLTFDVRDGLTRTIDFGDLQEYEQHLRLGSVVECLHAGMP

SEQ ID NO: 10214 - protein, 500 aa, synthetic construct
MRALVVIRLSRVTDATTSPERQLESCQQLCAQRGWDVVGVAEDLDVSGAVDPFDRKRRPNLARWLAFEEQPFDVIVAYRVDRLTRSTRHLQQLVHWAEDHKKLVVSATEAHFDTTTPFAAVVIALMGTVAQMELEAIKERNRSAAHFNIRAGKYRGSLPPWGYLPTRVDGEWRLVPDPVQRERILEVYHRVVDNHEPLHLVAHDLNRRGVLSPKDYFAQLQGREPQGRKWSATALKRSMISEAMLGYATLNGKTVRDDDGAPLVRAEPILTRGQLEALRAELAKTSRAKPAVSTPSLLLRVLFCAVCGEPAYKFAGGGRKHPRYRCRSMGFPKHCGNGTVAMAEWDAFCEEQVLNLLGDAERLEKVWVAGSGSAVELAEVNAELVDLTSLIGSPAYRAGSPQREALDARIAALAARQEELEGLEARPSGWEWRGTGQRFGDWWREQDTAARNTWLRSMNVRLTFDVRDGLTRTVDFGDLQEYEQHLRLGSVVERLHTGMS

SEQ ID NO: 10215 - protein, 500 aa, synthetic construct
MRVLVVIRLSRVTDATTSPERQLESCQQLCAQRGWDVVGVAEDLDVSGAVDPFDRKRRPNLARWLAFEEQPFDVIVAYRVDRLTRSTRHLQQLVHWAEDHKKLVVSATEAHFDTTTPFAAVVIALMGTVAQMELEAIKERNRSAAHFNIRAGKYRGSLPPWGYLPTRVDGEWRLVPDPVQRERILEVYHRVVDNHEPLHWVAHDLNRRGVLSPKDYFAQLQGREPQGRKWSATALKRSMTSVAMLGYATLNGKTVRDDDGAPLVRAEPILTRGQLEALRAELVETSRAKPAVSTPSLLLRVLFCAVCGEPAYKFAGGGRKHPRYRCRSMGFPKHCGNGTVVMAEWDAFCEEQVLDLLGDAERLEKVWVAGSDSAVELAEVNAELVDLTSLIGSPAYRAGSPQREALDARIAALAARQEELEGLGARPSGWEWRETGQRFGDWWREQDTAAKNTWLRSMNVRLTFDVRGGLTRTIDFGDLQEYVQHLRLGSVVGRLHTGMS

SEQ ID NO: 10216 - protein, 500 aa, synthetic construct
MRALVVIRLSRVTDATTSPERQLESCQQLCARRGWDVVGVAEDLDVSGAVDPFDRKRRPNLARWLAFEEQPFDAIVAYRVDRLTRSVRHLQQLVHWAEDHKKLVVSATEAHFDTTTPFAAVVIALMGTAAQMELEAIKERNRSAAHFNIRAGKYRGSLPPWGYLPTRVDGEWRLVPDPVQRERILEVYRRVVDNHEPLHLVAHDLNRRGVLSPKDYFAQLRGREPQGRKWSATALKRSMISEAMLGYATLNGKTVRDEDGAPLVRAEPILTREQLEALRAELVKTSRAKPAVPTPSLLLRVLFCAVCGEPAYKFAGGGRKHPRYRCRSMGFPKHCGNGTVAMAEWDAFCEEQVLDLLGDAERLEKVWVAGSDSAVELAEVNAELVDLTSLIGSPAYRASSPQREALDARIAALAARQEELEGLEARPSGWEWRETGQRFGDWWREQDTAAKNTWLRSMNVRLTFDVRGGLTRTIDFGDLQELEQHLRLGSVVERLHTGMS

SEQ ID NO: 10217 - protein, 500 aa, synthetic construct
MRALVVIRLSRVTDATTSPERQLASCQQLCAQRGWDVVGVAEDLDVSGAVDPFDRKRRPNLARWLAFEEQPFDVIVAYRVDRLTRSTRHLQQLVHWAEDHKKLVVSATEAHFDTTTPFAAVVIALMGTVAQMELEAIKERIRSAAHYNIRAGKYRGSLPPWGYLPTRVDGEWRLVPDPVQRERILEVYHRVVDNHESLHSVAHDLNRRGVLSPKDYFAQLRGREPRGRKWSATALKRSMISVAMLGYATLNGKTVRDDDGAPLVRAEPILTREQLEALRAELVKTSRAKPAVSTPSLLLRVLFCAVCGEPAYKFVGGGRKHPRYRCRSMGFPEHCGNGTVVMAEWDAFCEEQVLSLLGDAERLEKVWVAGSDSAVELAEVNAELVDLTSLIGSPAYRTGSPQREALDARIAALAARQGELEGLEARPSGWEWRETGQRFGDWWREQDTAAKNTWLRSMNVRLTFDVRGGLTRTIDFGDLQEYEQHLRLGSAVERLHTGMS

SEQ ID NO: 10218 - protein, 500 aa, synthetic construct
MRALVVIRLSRVTDATTSPERQLESCQQLCAQRGWDVVGVAEDLDVSGAVNPFDRKRRPNLARWLAFEEQPFDVIVAYRVDRLTRSTRHLQQLVHWAEDHKKLVVSATEAHFDTTTPFAAVVIALMGTVAQMELEAIKERIRSAVHFNIRAGKYRGSLPPWGYLPTRVDGEWRLVPDPVQRERILEVYHRVVNNHEPLHLVAHDLNRRGVLSPKDYFAQLRGREPRGRKWSATALKRSMISEAMLGYATLNGKTVRDDDGAPLVRAEPILTREQLEALRAELAKTSRAKPAVSTPSLLLRVLFCAVCGEPAYKFVGGGRKHPRYRCRSMGFPEHCGNGTVVMAEWDAFCEEQVLDLLGDAVRLEKVWVAGSDSAVELAEVNAELVDLTSLIGSPAYRAGSPQREALDARIAALAARQEGLEGLEARPSGWEWRETGQRFGDWWREQDTAAKNTWLRSMNVRLTFDVRGGLTRTIDFGDLQEYEQHLRLGSVAERLHTGMS

SEQ ID NO: 10219 - protein, 500 aa, synthetic construct
MRALVVIRLSRVTDATTSPERQLESCQQLCAQRGWDVVGVAEDLDVSGAVDPFDRKRRPNLARWLAFEEQPFDVIVAYRVDRLTRSTRHLQQLVHWAEDHKKLVVSATEAHFDTTTPFAAVVIALMGTVAQMELEAIKERNRSAAHFNIRAGKYRGSLPPWGYLPTRVDGEWRLVPDPVQRERILEVYHRVVVNHESLHLVAHDLNRRGVLSPKDYFAQLRGREPQGRKWSATALKRSMTSEAMLGYATLNGKTVRDDDGAPLVRAEPILTREQLEALRAELVKTSRAKPAVSTPSLLLRVLFCAVCGEPAYKFAGGGRKHPRYRCRSMGFPKHCGNGTVAMAEWDAFCEEQVLDLLGDAERLEKVWVTGSDSAVELAEVNAELVDLTSLIGSPAYRAGSPQREALDARIAALAARQEELEGLGARPSGWEWRETGRRFGDWWREQDTAAKNTWLRSMNVRLTFDVRGGLTRTVDFGDLQEYEQHLRLGSVVERLHTGVS

SEQ ID NO: 10220 - protein, 500 aa, synthetic construct
MRALVVIRLSRVTDATTSPERQLESCQQLCAQRGWDVVGVAEDLDVSGAVDPFDRKRRPNLARWLAFEEQPFDVIVAYRVDRLTRSTRHLQQLVHWAEDHKKLVVSATEAHFDTTTPFAAVVIALMGTVAQMELEAIKERNRSAAHFNIRAGKYRGSLPPWGYLPTRVDGEWRLVPDPVQRERILEVYRRVVDNHEPLHLVAHDLNRRGVLSPKDYFAQLRGREPQGRKWSATALKRSMTSEAMLGYATLNGKTVRDDDGAPLVRAEPILTREQLEALRAELARTSREKPAVSTPSLLLRVLFCAVCGEPAYKFAGGGRKHPRYRCRSMGFPEHCGNGTVVMAEWDAFCEEQVLNLLGDAERLEKVWVAGSDSAVELAEVNAELADLTSLIGSPAYRAGSPQREALDARIAALAARQEELEGLVARPSGWEWRGTGQRFGDWWREQDIAAKNTWLRSMNVRLTFDVRGGLTRTIDFGNLQEYEQHLRLGSVVERLHTGMS

SEQ ID NO: 10221 - protein, 500 aa, synthetic construct
MRALVVIRLSRVTDATTSPERQLESCQQLCAQRGWDVVGVAEDLDVSGAVDPFDRKRRPNLARWLAFEEQPFDVIVAYRVDRLTRSTRHLQQLVRWAEDHKKLVVSATEAHFDTTTPFAAVVIALMGTVAQMELEAIKERIRSAAHFNIRAGRYRGSLPPWGYLPTRVDGEWRLVPDPVQRERILEVYHRVVDNHEPLHLVAHDLNRRGVLSPKDYFAQLRGREPQGRKWSATALRRSMTSVAMLGYATLNGKTVRDDDGAPLVRAEPILTREQQEALRAELAKTSRAKPAVSTPSLLLRVLFCAVCGEPAYKFVGGGHKRPRYRCRSTGFPKHCGNGTVVMAEWDAFCEEQVLDLLGDAERLERVWVAGSDSAVELAEVNAELVDLTSLIGSPAYRAGSPQREALDARIAALAARQEELEGLGARPSGWEWRETGQRFGDWWREQDTAAKNTWLRSMNVRLTFDVRGGLTRTIDLGDLQEYERHLRLGSVAERLYTGMS

SEQ ID NO: 10222 - protein, 500 aa, synthetic construct
MRALVVVRLSRVTDATTSPERQLASCQQLCAQRGWDVVGVAEDLDVSGAVDPFDRKRRPSLARWLAFEEQPFDVIVAYRVDRLTRSTRHLQQLVHWAEDHKKLVVSATEAHFDTTTPFAAVVIALMGTVAQMELEAIKERIRSAVRFNIRAGKYRGSLPPWGYLPTRVDGEWRLVPDPVQRERILEVYHRVVDNHEPLHLVAHDLNRRGVLSPKDYFAQLQGREPQGRRWSATALKRSMTSVAMLGYATLNGKTVRDDDGAPLVRAEPVLTREQQEALRAELAKTSRAKPAVSTPSLLLRVLFCAVCGEPAYKFVGGGRKHPRYRCRSMGFPKHCGNGTVVMAEWDTFCEEQVLNLLGDAERLEKVWVAGSDSAVELAEVNAELVDLTSLIGSPAYRAGSPQREALDARIAALAARQEELESLEARPSGWEWRGTGQRFGDWWREQDTAAKNIWLRSMNVRLTFDVRGGLTRTIDFGDLQEYERHLRLGSVVERLHTGMS

SEQ ID NO: 10223 - protein, 500 aa, synthetic construct
MRALVVIRLSRVTDATTSPERQLESCQQLCAQRGWDVVGVAEDLNVSGAVDPFDRKRRPNLARWLAFEEQPFDVIVAYRVDRLTRSTRHLQQLVHWAEDHKKLVVSATEAHFDTTTPFAAVVIALMGTVAQMELEAIKERNRSAAHFNIRAGKYRGSLPPWGYLPTRVDGEWRLVPDPVQRERILEVYHRVVDNHEPLHLVAHDLNRRGVLSPKDYFAQLQGREPQGCEWSATALKRSMTSVTMLGYATLNGKTVRDGDGAPLVRAEPILTREQLEALRAELVKTSRAKPAVSAPSLLLRVLFCAVCGEPAYKFAGGGRKHPRYRCRSMGFPKHCGNGTVAMAEWDAFCEEQVLDLLGDAEHLEKVWVAGSDSAVELAEVNAELVDLTSLIGSPAYRAGSPQREALDVRIAALAARQEELEGLEARPSGWEWRETGQRFGDWWREQDSAAKNTWLRSMNVRLTFDVRGGLTRTIDFGDLREYEQHLRLGSVVERLRTGMS

SEQ ID NO: 10224 - protein, 500 aa, synthetic construct
MRALVVIRLSRVTDATTSPERQLESCQQLCAQRGWDVVGVAEDLDVSGAVDPFDRKRRPNLARWLAFEEQPFDAIVAYRVDRLTRSVRHLQQLVHWAEDHKKLVISATEAHFDTTTPFAAVVIALMGTVAQMELEAIKERNRSAAHFNIRAGKYRGSLPPWGYLPTRVDGEWRLAPDPVQRERILEVYHRVVDNHEPLHLVAHDLNRRGVLSPKDYFAQLQGREPQGRKWSATALKRSMISEAMLGYATLDGKTVRDDDGAPLVRAEPILTRGQLEALRAELAKTSRAKPAVSTPSLLLRVLFCAVCGEPAYKFAGGGRKHPRYRCRSMGFPKHCGNGTVVMAEWDAFCEEQVLDLLGDAERLEKVWVAGSDSAAELAEVNAELVDLTSLIGSPAYRAGSPQREALDARIAALAARQEELEGLEARPSGWEWRETGQRFGDWWREQDTAAKNTWLRSMNVRLTFDVRGGLTRTIDFGELQEYEQHLRSGSVVERLHTGMS

SEQ ID NO: 10225 - protein, 500 aa, synthetic construct
MRALVVIRLSRVSDATTSPERQLESCQQLCAQRGWDVVGVAEDLDVSGAVDPFDRKRRPSLARWLAFEEQPFDAIVAYRVDRLTRSARHLQQLVHWAEDHKKLVVSATEAHFDTTTPFAAVVIALMGTVAQMELEAIKERNRSAAHFNIRAGKYRGSLPPWGYLPARVDGEWRLVPDPVQRERILEVYHRVVDNHEPLHLVAHDLNRRGVLSPKDYFAQLRGREPQGRKWSATALKRSMISEAMLGYATLNGKTVRDDDGAPLVRAEPILTRGQLEALRAELVKTSRAEPAVSTPSLLLRVLFCAVCGEPAYKFAGGGRKHPRYRCRSIGFPKHCGNGTVAMAEWDAFCEEQVLDLLGDAERLEKVWVAGSDSAVELAEVNAELVDLTSLIGSPAYRAGSPQREALDARIAALAARQEELEGSGARPSGWEWRETGQRFGDWWREQDTAAKNTWLRSMNVRLTFDVRGGLTRTIDFGDLQEYGQRLRLGSVVERLHTGMS

SEQ ID NO: 10226 - protein, 500 aa, synthetic construct
MRALVVIRLSRVTDATTSPERQLESCRQLCAQRGWDVVGVAEDLDVSGAVDPFDRKRRPNLARWLAFEEQPFDAIVAYRVDRLTRSTRHLQQLVRWAEDHKKLVVSATEAHFDTTTPFAAVVIALMGTVAQMELEAIKERIRSAVRFNIRAGKYRGSLPPWGYLPARVDGEWRLVPDPVQRERILEVYHRVVDNHEPLHLVARDLNRRGVLSPKDYFAQLQGREPQGRKWSATALKRSMISGAMLGYATLNGKTVRDDDGAPLVRAEPILTREQQEALRAELAKTSRAKPAVSTPSLLLRVLFCAVCGEPAYKFAGGGRKHPRYRCRSMGFPKHCGNGTVVMTEWDAFCEEQVLDLLGDAERLEKVWVAGSDSAVELAEVNAELVDLMSLIGSPAYRAGSPQREALDARIAALAARQVELEGLEVRPSGWEWRGTGQHFGDWWREQDTAAKNTWLRSMNVRLTFDVRGGLTRTIDFGDLQEYEQHLRLGSVAERLHTGMS

SEQ ID NO: 10227 - protein, 500 aa, synthetic construct
MRALVVIRLSRVTDATTSPERQLESCQQLCAQRGWDVVGVAEDLDVSGAVDPFDRKRRPNLARWLAFEEQPFDAIVAYRVDRLTRSVRHLQRLVRWAEDHKKLVVSATEAHFDTTSPFAAVVIALMGTVAQMELEAIKERIRSAAHFNIRAGKYRGSLPPWGYLPARVDGEWRLVPDPVQRERILEVYHRVVDNHEPLHLVAYDLNRRGVLSPKDYFAQLRGREPQGREWSATALKRSMISVAMLGYATLNGVTVRDDDGAPLVRAEPILTRAQQEALRAELAKTSRAKPAVSTPSLLLRVLFCAVCGEPAYKFVGGGRKHPRYRCRSMGFPEHCGNGSVAMAEWDAFCEEQVLNLLGDTERLEKVWVAGSDSAVELAEVNAELVDLTSLIGSPAYRAGSPQREALDARIAALAARQEELEGLEARPSGWEWRETGQRFGDWWREQDTAAKNTWLRSMNVRLTFDVRGGLTRTIDFGYLQEYEQHLRLGSVVERLHTGMS

SEQ ID NO: 10228 - protein, 500 aa, synthetic construct
MRALVVIRLSRVTEATTSPERQLESCQQLCAQRGWDVVGVAEDLDVSGAVDPFDRKRRPSLARWLAFEEQPFDVIVAYRVDRLTRSTRHLQQLVRWAEDHKKLVVSATEAHFDTTTPFAAVVIALMGTVAQMELEAIKERIRSAAHFNIRAGKYRGSLPPWGYLPTRVDGEWRLTPDPVQRERILEVYHRVVDNHEPLHLVAHDLNRRGVLSPKDYFAQLRGREPQGRKWSATALRRSMTSVAMLGYATLNGKTVRDDDGAPLVRAEPILTREQLEALRAELAKTSRAKPAVSTPSLLLRVLFCAVCGEPAYKFVGGGRKHPRYRCRSMGFPEHCGNGTVVMAEWDAFCEEQVLDLLGDAERLEKVWVAGSDSAVELAEVNAELVDLTSLIGSPAYRAGSPQREALDARITALAARQEELEGLEARPSGWEWRGTGQRFGDWWREQDTAAKNTWLRSMNVRLTFDVRGGLTRTIDFGELQEYKHHLRLGSEDERLHTGMS

SEQ ID NO: 10229 - protein, 500 aa, synthetic construct
MRALVVIRLSRVTEATTSPERQLESCQQLCAQRGWDVVGVAEDLDVSGAVDPFDRKRRPNLARWLAFEEQPFDVIVAYRVDRLTRSTRHLQQLVHWAEDHKKLVVSATEAHFDTTTPFAAVVIALMGTVAQMELEAIKERIRSAVRFNIRAGKYRGSLPPWGYLPTRVDGEWRLVPDPVQRERILEVYHRVVDNHEPLHLVAHDLNRRGVLSPKDYFAQLRGREPQGRRWSATALKRSMTSVAMLGYATLNGKTVRDDDGAPLARAEPILTREQQEALRAELAKTSRAKPAVSTPSLLLRVLFCAVCGEPAYKFVGGGRKHPRYRCRSMGSPKHCGNGTVVMAEWDAFCEKQVLGLLGDAERLEKVWVAGSDSAVELAEVNAELVDLTSLIGSPAYRAGSPQREALDARIAALAARQEELEGLEARPSGWEWRETGQRFGDWWREQDTAAKNTWLRSMNVRLTFDVRGGLTRTIDFGDLLEYEQHLRLGSVVERLHTGVS

SEQ ID NO: 10230 - protein, 500 aa, synthetic construct
MRALVVIRLSRVTDATTSPERQLESCQQLCAQRGWDVVGVAEDLDVSGAVDPFDRKRRPNLARWLAFEEQPFDVIVAYRVDRLTRSTRHLQQLVHWAEDHKKLVVSATEAHFDTTTPFAAVVIALMGTVAQMELEAIKERNRSAAHFNIRAGKYRGSLPPWGYLPARVDGEWRLVPDPVQRERILEVYHRVVDNHEPLHWVAHDLNRRGVLSPKDYFAQLQGREPQGRKWSATALKRSMISEAMLGYATLNGKTVRDEDGAPLVRAEPILAREQLEALRAELVKTTRAKPTVSTPSLLLRVLFCAVCGEPAYKFAGGGRKHPRYRCRSMGFPKHCGNGTVAMAEWDAFCEEQVLDLLGDAERLEKVWVAGSDSAVELAEVNAELVDLTSLIGSPAYRAGSPQREALDARIAALAARQEELEGLGARPSGWEWRETGQRFGDWWREQDTAAKNTWLRSMNVRLTFDVRGGLTRTIDFGELQEYEQHLRLGSVVERLHTGRS

SEQ ID NO: 10231 - protein, 500 aa, synthetic construct
MRALVVIRLSRVTDATTSPERQLESCQQLCAQRGWDVVGVAEDLDVSGAVGPFDRKRRPNLARWLAFEEQPFDVIVAYRVDRLTRSTRHLQQLVHWAEDHKKLVVSATEAHFDTTTPFAAVVIALMGTVAQMELEAIKERNRSAAHFNIRAGKYRGSLPPWGYLPTRVDGEWRLVPDPVQRERILEVYHRVVDNHEPLHLVAHDLNRRGVLSPKDYFAQLRGREPQGRKWSATALKRSMISEAMLGYATLNGKTVRDDDGAPLVRAEPILTRMQLEALRAELVKTSRAKPAVSTPSLLLRVLFCAVCGEPAYKFAGGGRKHPRYRCRSMGFPKHCGNGTVAMAEWDAFCEEQVLDLLGDAERLEKVWVAGSDSAVELAEVNAELVDLTSLIGSPAYRAGSPQREALDARIAALAARQEELEGSEARPSGWGWRGTGQRFGDWWREQDTAAKNAWLRSMNVRLTFDVRGGLTRTVDFGDLQEYEQHLRLGSVVERLHTGMS

SEQ ID NO: 10232 - protein, 500 aa, synthetic construct
MRALVVIRLSRVTDATTSPERQLESCQQLCAQRGWDVVGVAEDLDVSGAVDPFDRKRRPNLARWLAFEEQPFDVIVAYRIDRLTRSTRHLQQLVHWAEDHKKLVVSATEAHFDTTTPFAAVVIALMGTVAQMELEAIKERNRSAAHFNIRAGKYRGSLPPWGYLPARVDGEWRLVPDPVQRERILEVYHRVVDNHEPLHLVAHDLNQRGVLSPKDYFAQLRGREPRGRKWSATALKRSMISEAMLGYATLNGRTVRDDDGAPLVRAEPILTREQLEALRAELVKTSRAKPAVSTPSLLLRVLFCAVCGEPAYKFAGGGRKHPRYRCRSMGFPKHCGNGTVAMAEWDAFCEEQVLNLLGDAERLEKVWVAGSDSAVELAGVNAELVDLTSLIGSPAYRAGSPQREALDARIAALAARQEELKGLGARPSGWEWRETGQRFGDWWREQDTAAKNTWLRSVNVRLTFDVRGGLTRVIDFGDLQEYEQHLRLGSVVERLHTGVS

SEQ ID NO: 10233 - protein, 500 aa, synthetic construct
MRALVVIRLSRVTDATTSPERQLESCQQLCAQRGWDVVGVAEDLDVSGAVDPFDRRRRPNLARWLAFEEQPFDVIVAYRVDRLTRSVRHLQRLVHWAEDHEKLVVSATEAHFDMTTPFAAVVIALMGTVAQMELEAIKERNRSAAHFNIRAGKYRGSLPPWGYLPTRVDGEWRLVPDPVQRERILEVYHRVVDNHEPLHWVAHDLNRRGVLSPKDYFAQLRGREPQGRKWSATALKRSMTSEAMLGYATLNGKTVRDDDGAPLVRAEPILTREQLEALRAELVKTSRAKPAVSTPSLLLRVLFCAVCGEPAYKFAGGGRKHPRYRCRSVGFPKHCGNGTVAMAEWDAFCEEQVLDLLGDAERLEKVWVAGSDSAVELSEVNAELVDLTSLIGSPAYRAGSPQREALDARIAALAARQEELEGLGARPSGWEWRETGQRFGDWWREQDTAAKNTWLRSMNVRLTFDVRGGLTRMIDFGDLQEYEQHLRLGSVVERLHTGMS

SEQ ID NO: 10234 - protein, 500 aa, synthetic construct
MRALVVIRLSRVTDATTSPERQLESCQQLCARRGWDVVGVAEDLDVSGAVDPFDRKRRPNLARWLAFEERPFDVVVAYRVDRLTRSTRHLQQLVHWAEDHKKLVVSATEAHFDTTTPFAAVVIALMGTVAQMELEAIKERNRSAAHFNIRAGKYRGSLPPWGYLPARVDGEWRLVPDPVQRERILEVYHRVVDNHEPLHLVAHDLNRRGVLSPKDYFAQLRGREPQGRKWSATALKRSMISEAMLGYATLNGKTVRDDDGAPLVRAEPILTREQLEALRAELVKTSRAKPAVSTPSLLLRVLFCAVCGEPAYKFAGGGRKHPRYRCRSMGFPKHCGNGTVVMAEWDAFCEEQVLDLLGDAERLEKVWVAGSDSAVELAEVNAELVDLTSLIGSPAYRAGSPQREALDARIAALAARQEELEGLGARPSGWEWRETGQRFGDWWREQDTAAKNTWLRSMNVRLTFDVRGGLTRTIDFGDLQEYEQHLRLGSVVECSHTGMS

SEQ ID NO: 10235 - protein, 500 aa, synthetic construct
MRALVVIRLSRVTDATTSPERQLESCQQLCAQRGWDVVGVAEDLDVSGAVDPFDRKRRPNLARWLAFEEQPFDVIVAYRVDRLTRSTRHLQQLVHWAEDHKKLVVSATEAHFDTTTPFAAVVIALMGTVAQMELEAIKERIRSAVHFNIRAGKYRGSLPPWGYLPARVDGEWRLVPDPVQRERILEVYHRVVDNHEPLHLVAHDLNRRGVLSPKDYFAQLRGREPQGRKWSATALKRSMTSVAMLGYATLNGKIVRDDDGAPLVRAEPILTREQQEALRAELAKTSRAKPAVSTPSLLLRVLFCAVCGEPAYKFVGGGRKHPRYRCRSMGFPKHCGNGTVVMAEWDAFCEEQVLNLLGDAERLEKVWVAGSDSAVELAEVNAELVDLTSLIGSPAYRAGSPQREALDARVAALAARQEELEGLEARPSGWEWRETGQRFGDWWRKQDTAAKNTWLRSMNVRLTFDVRDGLTRTIDFGDLQEYEQHLRLGSVAERLHTGMS

SEQ ID NO: 10236 - protein, 500 aa, synthetic construct
MRALVVIRLSRVTDATTSPERQLESCQQLCAQRGWDVVGVAEDLDVSGAVDPFDRRRRPNLARWLAFEEQPFDAIVAYRVDRLARSIRHLQQLVHWAEDHKKLVVSATEAHFDTTTPFAAVVIALMGTVAQMELEAIKARNRSAAHFNIRAGKYRGSLPPWGYLPTRVDGEWRLVPDPVQRERILEVYHRVVDNHEPLHLVAHDLNRRGVLSPKDYFAQLRGREPQGRKWSATALKRSMISEAMLGYATLNGKTVRDDDGAPLVRAEPILTREQLEALRAELVKTSRAKPAVSTPSLLLRVLFCAVCGEPAYKFAGGGRKHPRYRCRSMGFPKHCGNGTVAMAEWDAFCEEQVLDLLGDAERLEKVWVAGSDFAVELAEVNAELVDLTSLIGSPAYRAGSPQREALDARIAALAARQEELEGLEARPSGWEWRGTGQRFGDWWREQDAAAKNTWLRSMNVRLTFDVRGGLTRTFDFGDLQEYGQHLRLGSVVERLHTGMS

SEQ ID NO: 10237 - protein, 500 aa, synthetic construct
MRALVVIRLSRVTDATTSPERQLESCQQLCAQRGWGVAGVAEDLDVSGAVDPFDRKRRPNLARWLAFEEQPFDVIVAYRVDRLTRSVRHLQQLVRWAEDHKKLVVSATEAHFDTTTPFAAVVIALMGTVAQMELEAIKERIRSAAHFNIRAGKYRGSLPPWGYLPTRVDGEWRLVPDPVQRERILEVYHRVVDNHEPLHLVAHDLNRRGVLSPKDYFAQLQGREPRGRKWSATALKRSMISGAMLGYATLNGKTVRDNDGAPLVRAEPILTREQQEALRAELAKTSRAKPAVSSPSLLLRVLFCAVCGEPAYKFVGGGRKHPRYRCRSMGFPKHCGNGTVVMTEWDAFCEEQVLDLLGDAERLEKVWVAGSDSAVELAEVNAELVDLTSLIGSPAYRTGSPQREALDARIAALAARQGELEGLEARPSGWEWRGTGQRFGDWWREQDTAAKNTWLRSMNIRLTFDVRGGLTRTIDFGELQEYEQRLRLGSVAERLHTGMS

SEQ ID NO: 10238 - protein, 500 aa, synthetic construct
MRALVVIRLSRVTDATTSPERQLESCQQLCAQRGWDVVGVAEDLDVSGAVDPFDRKRRPNLARWLAFEEQPFDVIVAYRVDRLTRSTRHLQQLVHWAEDHKKLVVSATEAHFDTTTPFAAVVIALMGTVAQMELEAIKERIRSAAHFNIRAGKYRGSLPPWGYLPARVDGEWRLVPDPVQRERILEVYHRVVDNHEPLYLVAHDLNRRGVLSPKDYFAQLRGREPQGRKWSATALKRSMISVAMLGYATLNGKTVRDDDGAPLVRAEPILTREQQEALRAELVKTSRAKPAVSTPSLLLRVLFCAVCGEPAYKFVGGGRKHPRYRCRSMGFPEHCGNGTVAMAEWDAFCEEQVLDLLGDAERLEKVWVAGSDSAVELAEVNAELVDLTSLIGSPAYRAGSPQREALDARIAALAARQGELEGLEARPSGWEWRGTGQRFGDWWREQDTAAKNTWLRSMNVRLTFDVRGGLTRTIDFGDLQEYVQHLRLGSVVERLHTGMS

SEQ ID NO: 10239 - protein, 500 aa, synthetic construct
MRALVVIRLSRVTDATTSPERQLESCQQLCAQRGWDVVGVAEDLDVSGAVDPFDRKRRPNLARWLAFEEQPFDVIVAYRVDRLTRSTRHLQQLVHWAEDHKKLVVSATEAHFDTTTPFAAIVIALMGTVAQMELEAIKERIRSAVHFNIRAGKYRGSLPPWGYLPTRVDGEWRLVPDPVQRERILEVYHRVVDDHEPLHLVAHDLNRRGVLSPKDYFAQLQGREPQGREWSATALRRSMTSVAMLGYATLNGKTVRDDDGAPLVRAEPILTREQQEALRAELAKTSRAKPAVSAPSLLLRVLFCAVCGEPAYKFVGGGRKHPRYRCRSMGLPRHCGNGTVVMAEWDMFCEEQVLNLLGDAERLEKVWVAGSDSAVELAEVNAELVDLTSLIGSPAYRTGSPQREALDARIAALAARQEELGGLEARPSGWEWRESGQRFRDWWREQDTAAKNTWLRSMNVRLTFDARGGLTRTIDFGDLQEYVQHLRLGSVVERLHAGMT

SEQ ID NO: 10240 - protein, 500 aa, synthetic construct
MRALVVIRLSRVTDATTSPERQLESCQQLCAQRGWDVVGVAEDLDVSGAVDPFDRKRRPNLARWLAFEERPFDVIVAYRVDRLTRSTRHLQQLVHWAEDHKKLVVSATEAHFDTTTPYAAVVIALMGTVAQMELEAIKERNRSAAHFNIRAGRYRGSLPPWGYLPTRVDGEWRLVPDPVQRERILEVYHRVVDNHEPLHLVAHDLNRRGVLSPKDYFAQLQGREPQGRKWSATALKRSMISKAMLGYATLNGKTVRDDDGAPLVRAEPILTRGQLEALRAELVQTSRAKPAVSTPSLLLRVLFCAVCGEPAYKFAGGGRKHPRYRCRSMGFPKHCGNGTVAMAEWDAFCEEQVLDLLGDAERLEKVWVAGSDSAVELAEVNAELVDLTSLIGSPAYRAGSQQREALDARIAALAARQEELEGLGARPSGWEWRETGQRFGDWWREQDTAAKNTWLRSMNVRLTFDVRGGLTRTIDFGDLQEYEQHLRLGSVVERLHTGKS

SEQ ID NO: 10241 - protein, 500 aa, synthetic construct
MRALVVIRLSRVTDATTSPERQLESCQQHCAQRGWDVVGVAEDLDVSGAVDPFDRKRRPNLARWLAFEEQPFDVIVAHRVDRLARSIRHLQQLVHWAEDHKKLVVSATEAHFDTTTPFAAVVIALMGTVAQMELEAIRERNRSAAHFNIRAGKYRGSLPPWGYLPTRVDGEWRLVPDPVQRERILEVYHRVVDDHEPLHLVAYDLNRRGVLSPRDYFAQLQGREPQGRKWSATALKRSMISEAMLGYATLNGKTVRDDDGAPLVRAEPILTREQQEALRAELVKTSRAKPAVSTPSLLLRVLFCAVCGEPAYKFAGGGRKHPRYRCRSMGFPKHCGNGTVAMAEWDAFCEEQVLDLLGDAERLEKVWVAGSDSAVELAEVNAELVDLTSLIGSPAYRAGSPQREALDARIAALAARQEGLESLEARSSGWEWRGTGQRFGDWWREQDTAAKNTWLRSMNVRLTFDVRGGLTRTIDFGGLLEYEQHLRLGSVVGRLHTGMS

SEQ ID NO: 10242 - protein, 500 aa, synthetic construct
MRALVVIRLSRVTDATTSPERQLESCQQLCAQRGWDVVGVAEDLDVSGAVDPFDRKRRPNLARWLAFEEQPFDVIVAYRVDRLTRSTRHLQQLVHWAEDHKKLVVSATEAHFDTTTPFAAVVIALMGTVAQMELEAIKERNRSAAHFNIRAGKYRGSLPPWGYLPARVDGEWRLVPDPVQRERILEVYHRVVDNHEPLHLVAHDLNRRGVLSPKDYFAQLRGREPQGRKWSATALKRSMISGAMLGYATLNGKTVRDDDGAPLVRAEPILTRGQLEALRAELVKTSRAKPAVSTPSLLLRVLFCAVCGGPAYKFAGGGRKHPRYRCRSMGFPKHCGNGTVAMAELDAFCEEQVLGLLGDAERLEKVWVAGSDSAVELAEVNAELVDLTSLIGSPAYRAGSPQREALDARIAALAARQEELEGLGARPSGWEWRETGQRFGDWWREQDTATKNTWLRSMNVRLTFDVRGGLTRAIDFGDLQEYEQHLRLGSVVERLHTGMS

SEQ ID NO: 10243 - protein, 500 aa, synthetic construct
MRALVVIRLSRVTDATTSPERQLESCQQLCAQRGWDVVGVAEDLDVSGAVDPFDRKRRPNLARWLAFEERPFDAIVAYRVDRLARSIRHLQQLVHWAEDHKKLVVSATEAHFDTTTPFAAVVIALMGTVAQMELEAIKERNRSAAHFNIRAGKYRGSLPPWGYLPARVDGEWRLVPDPVQRERILEVYHRVVDNHEPLHLVAHDLNRRGVLSPKDYFAQLQGREPQGRKWSATALKRSMISEAMLGYATLNGKTVRDDDGAPLVRAEPILTREQLEALRAELVKTSRAKPAVSTPSLLLRVLFCAVCGEPAYKFAGGGRKHPRYRCRSMGFPKHCGNGTVVMAEWDAFCEEQVLGLLGDAERLEKVWVAGSDSAVELAEVNAELADLTSLIGSPAYRAGSPQREALDARIAALAARQEELEGLEARPSGWEWRETGQRFGDWWREQDTAAKNAWLRSKNVRLTFDVRGGLTRTIDFGDLQEYEQHLRLGSVVERLHTGMS

SEQ ID NO: 10244 - protein, 500 aa, synthetic construct
MRALVVIRLSRVTDATTSPERQLESCQQLCAQRGWDVAGVAEDLDVSGAVDPFDRKRRPNLARWLAFEVQPFDVIVAYRVDRLTRSVRHLQQLVHWAEDHKKLVVSATEAHFDTTTPFAAVVIALMGTVAQMELEAIRERCRSAAHFNIRAGKYRGSLPPWGYLPTRVDGEWRLVPDPVQRERILEVYHRVVDNHEPLHLVAHDLNRRGILSPKDYFAQLQGREPQGREWSATALKRSMTSVAMLGYATLNGKTVRDDDGAPIVRAEPILTREQQGALRAELAKTSRAKPAVSTPSLLLRVLFCAVCGEPAYKFVGGGRKHPRYRCRSMGFPKHCGNGTVVMAEWDAFCEEQVLDLLGDAERLEKVWVAGSDSAVELAEVNAELVDLTSLIGSPAYRAGSPQREALDARIAALAARQEELEGLEARPSGWGWRETGQRFGDWWREQDTAAKNTWLRSMNVRLTFDVRGGLTRAIDFGDLQEYEQHLRLGSAVERLHTGMP

SEQ ID NO: 10245 - protein, 500 aa, synthetic construct
MRALVVIRLSRVTDATTSPERQLESCRQLCAQRGWDVVGVAEDLNVSGAVDPFDRKRRPSLARWLAFEEQPFDVIVAYRVDRLTRSIRHLQQLVHWAEDHKKLVVSATEAHFDTTTPFAAVVIALMGTVAQMELEAIKERNRSAAHFNIRAGKYRGSLPPWGYLPTRVDGEWRLAPDPVQRERILEVYHRVVDNHEPLHLVAHDLNRRGVLSPKDYFAQLQGREPQGRKWSATALKRSMTSEAMLGYATLNGRTVRDDDGAPLVRAEPILTREQLEAIRAELVKTSRAKPAVSTPSLLLRVLFCAVCGEPAYKFAGGGRKRPRYRCRSMGFPKHCGNGTVVMAEWDAYCEEQVLDLLGDAERLEEVWVAGSDSAVELAEVNAELVDLTSLISSPAYRAGSPQREALDARIAALAARQEELEGLEARPSGWGWRGTGQRFGDWWREQDTAAKNTWLRSMNVRLTFDVRGGLTRTIDFGDLREYEQRLRLGSVVERLHTGMS

SEQ ID NO: 10246 - protein, 500 aa, synthetic construct
MRALVVIRLSRVTDATTSPERQLASCQQLCAQRGWDVVGVAEDLDVSGAVDPFDPKRRPSLARWLAFEEQPFDVIVAYRVDRLTRSTRHLQQLVRWAEDHKKLVVSATEAHFDTTTPFAAVVIALMGTVAQMELEAIKERIRSAVHFNIRAGKYRGSLPPWGYLPARVDGEWRLVPDPVQRERILEVYHRAVDNHEPLHLVAHDLNRRGVLSPKDYFAQLQGREPRGRKWSATALKRSMTSVAMLGYATLNGKTVRDDDGAPLVRAEPILTRGQQEALRAELAKTSRAKPAVSTSSLLLRVLFCAVCGEPAYKFAGGGRKHPRYRCRSMGFPKHCGNGTVVMAEWDAFCEEQVLDLLGDAERLEKVWVAGSDSAVELAEVNAELVDLTSLIGSPAYRTGSPQREALDARIAALAARQEELEGLEARPSGWEWRGTGQRFGDWWREQDTAAKNTWLRSMNIRLTFDVRGGLTRTIDFGELQEYERHLRLGSVAERLHTGMS

SEQ ID NO: 10247 - protein, 500 aa, synthetic construct
MRALVVIRLSRVTDATTSPERQLESCQQLCAQRGWDVVGVAEDLDVSGAVDPFDRKRRPNLARWLAFEEQPFDVIVAYRVDRLTRSTRHLQQLVHWAEDHKKLVVSATEAHFDTTTPFAAVIIALMGTVAQMELEAIKERIRSAVHFNIRAGKYRGSLPPWGYLPTRVDGEWRLVPDPVQRERILEVYHRVVDNHEPLHLVAHDLNRRGVLSPKDYFAQLQGREPQGRKWSATALKRSMISVAMLGYATLNGKIVRDDDGAPLVRAEPILTREQQEALRAELAKTSRAKPAVSTPSLLLRVLFCAVCGEPAYKFVGGGRKHPRYRCRSMGFPKHCGNGTVVMAEWDAFCEEQVLDLLGDAERLEKVWVAGSDSSVELAEVNAELVDLTSLIGSPAYRTGSPQREALDARIAALAARQEELEGLEARPSGWEWRGTGQRLGDWWREQDTAAKNTWLRSMNIRLTFDVRGGLTRTIDFGDLREYEQHLRLGSVVERSHTGMS

SEQ ID NO: 10248 - protein, 500 aa, synthetic construct
MRALVVIRLSRVSDATTSPERQLESCQQLCAQRGWDVVGVAEDLDVSGAVDPFDRKRRPNLARWLAFEEQPFDAIVAYRVDRLTRSARHLQQLVHWAEDHKKLVVSATEAHFDTTTPFAAVVIALMGTVAQMELEAIKERNRSAAHFNIRAGKYRGSLPPWGYLPARVDGEWRLVPDPVQRERILEVYHRVVDNHEPLHLVAHDLNRRGVLSPKDYFAQLRGREPQGRKWSATALKRSMISEAMLGYATLNGKTVRDDDGAPLVRAEPILTRGQLEALRAELVKTSRAEPAVSTPSLLLRVLFCAVCGEPAYKFAGGGRKHPRYRCRSMGFPKHCGNGTVAMAEWDAFCEEQVLDLLGDAERLEKVWVAGSDSAVELAEVNAELVDLTSLIGSPAYRAGSPQREALDARIAALAARQEELEGLETRPSGWEWRGTGQRFGDWWREQDTAAKNTWLRSMNVRLTFDVRGGLTRTIDFGDLQEYEQHLRLGSVVERLHTGMS

SEQ ID NO: 10249 - protein, 500 aa, synthetic construct
MRALVVIRLSRVTDATTSPERQLESCQQLCAQRGWDVVGVAEDLDVSGAVDPFDRKRRPNLARWLAFEEQPFDVIVAYRVDRLTRSTRHLQQLVRWAEDHKKLVVSATEAHFDTTTPFAAVVIALMGTVAQMELEAIKERIRSATHFNIRAGKYRGSLPPWGYLPTRVDGEWRLVPDPVQRERILEVYHRVVDNHEPLHLVAYDLNRRGVLSPKDYFAQLRGREPQGREWSATALRRSMTSVAMLGYATLNGKTVRDDDGAPLVRAEPILTREQLEALRAELVKTSRARPAVSTPSLLLRVLFCAVCGEPAYKFVGGGRKHPRYRCRSMGFPKHCGNGTVVMAEWDAFCEEQVLNLLGDAERLEKVWVAGSDSAVELAEVNAELVDLTSLIGSPAYRAGSPQREALDARIAALAARQVELEGLEVHPSGWEWRGTGQRFGDWWREQDTAAKNTWLRSMNVRLTFDVRGGLTRTIDFGDLQEYGQHLRLGSVVERLRTGMS

SEQ ID NO: 10250 - protein, 500 aa, synthetic construct
MRALVVIRLSRVTDATTSPERQLESCQQLCAQRGWDVVGVAEDLDVSGAVDPFDRKRRPNLARWLAFEEQPFDVIVAYRVDRLTRSVRHLQQLVRWAEDHKKLVVSATEAHFDTTTPFAAVVIALMGTVAQMELEAIKERIRSAVHFNIRAGKYRGSLPPWGYLPTRVDGEWRLVPDPVQRERILEVYHRVVDNHEPLHLVAHDLNRRGVLSPKDYFAQLRGREPQGRKWSATALRRSMTSVAMLGYATLNGKTVRDDDGAPLVRAEPILTREQQEALRAELAKTSRAKPAVSTPSLLLRVLFCAVCGEPAYKFVGGGRKHPRYRCRSMGFPKHCGNGTVVMAEWDAFCEEQVLDLLGDAERLEKVWVAGSDSAVELAEVNAELMDLTSLIGSPAYRAGSPQREALGARIAALAARQGELEGLEARPSGWEWRGTGQRFGDWWREQDTAAKNTWLRSMNVRLTFDVHGGLTRTIDFGELQEYMQHLRLGSAVERLHTGMP

SEQ ID NO: 10251 - protein, 500 aa, synthetic construct
MRALVVIRLSRVTDATTSPERQLESCQQLCAQRGWDVVGVAEDLNVSGAVDPFDRKRRPNLARWLAFEEQPFDVIVAYRVDRLTRSIRHLQQLVHWAEDHKKLVVSATEAHFDTTTPFAAVVIALMGTVAQMELEAIKERSRSAAHFNIRAGKYRGSLPPWGYLPTRVDGEWRLVPDPVQRERILEVYHRVVDNHEPLHWVAHDLNRRGVLSPKDYFAQLQGREPQGRKWSATALKRSMISEAMLGYATLNGKTVRNDDGAPLVRAEPILTRGQLEALRAELVKTSRAKPAVSTPSLLLRVLFCAVCGEPAYKFAGGGRKHPRYRCRSMGFPRHCGNGTVVMAEWDAFCEEQVLDLLGDAECLEKVWVAGSDSAVKLAEVNAELVDLTSLIGSPAYHAGSPQREALDARIAALAARQEELEGLETRPSGWEWRETGQRFGDWWREQDTAAKNTWLRSMNVRLTFDARGGLTRTIDFGDLREYEQHSRLGSVVERLHTGMS

SEQ ID NO: 10252 - protein, 500 aa, synthetic construct
MRALVVIRLSRVTEATTSPERQLESCQQLCAQRGWDVVGVAEDLDVSGAVDPFDRKRRPNLARWLAFEEQPFDVIVAYRVDRLTRSTRHLQQLVHWAEDHKKLVVSATEAHFDTTTPFAAVVIALMGTVAQMELEAIKERIRSAVHFNIRAGKYRGSLPPWGYLPTRVEGEWRLVPDPVQRERILEVYHRVVDNHEPLHLVAHDLNRRGVLSPKDYFAQLQGREPQGRKWSATALKRSMISVAMLGYATLNGKIVRDDDGAPLVRAEPILTRGQQEALRAELAKTSRAKPAVSTPSLLLRVLFCAVCGEPAYKFVGGGRKHPRYRCRSKGFPEHCGNGTVVMAEWDAFCEEQVLDLLGGTERLEKVWVAGSDSAVELAEVNAELMDLTSLIGSPAYRAGSPQREALDARIAALAARQEELEGLEARPSGWEWRGTGQRLGDWWREQDTAAKNTWLRSMNVRLTFDARGGLTRTIDFGDLQEYEQHLRSGSVVERLHTGMS

SEQ ID NO: 10253 - protein, 500 aa, synthetic construct
MRALVVIRLSRVTDATTSPERQLESCQQLCAQRGWDVVGVAEDLDVSGAVDPFDRKRRPNLARWLAFEEQPFDAIVAYRVDRLARSIRHLQQLVHWAEDHKKLVVSATEAHFDTTTPFAAVVIALMGTVAQMELEAIKERNRSAAHFNIRAGKYRGSLPPWGYLPTRVDGEWRLVPDPVQRERILEVYHRVVDNHEPLYLVAHDLNRRGVLSPKDYFAQLRGREPQGRKWSATALKRSMISEAMLGYATLNGRTVRDDDGAPLVRAEPILTREQLEAIRAELVKTSRAKPAVSTPSLLLRVLFCAVCGEPAYKFAGGGRKYPRYRCRSMGLPKHCGNGTVAMAEWDAFCEEQVLDLLGDAERLEKVWVAGSGSAVELAEVNAELVDLTSLIGSPAYRAGSPQREALDARIAALAARQEELEGLEARPPGWEWRETGQRFGDWWREQDTAAKNTWLRSMNVRLTFDVRGGLTRTIDFGGLQGYEQHLRLGSVVERLHTRMS

SEQ ID NO: 10254 - protein, 500 aa, synthetic construct
MRALVVIRLSRVTDATTSPERQLESCQQLCAQRGWDVVGVAEDLDVSGAVDPFDRKRRPNLARWLAFEEQPFDAVVAYRVDRLTRSTRHLQQLVRWAEDHKKLVVSATEAHFDTTTPFAAVVIALMGTVAQMELEAIKERIRSAVRFNIRAGKYRGSLPPWGYLPTRVDGEWRLVPDPVQRERILEVYHRVVDNHEPLHLVAHDLNRRGVLSPKDYFAQLRGREPRGRKWSATALRRSMTSEAMLGYATLNGKIVRDNDGAPLVRAEPILTREQQEALRAELAKTSRAKPAVSTPSLLLRVLFCAVCGEPAYKFVGGGRKHPRYRCRSMGFPKHCGNGTVVMTEWDAFCEEQVLNLFGDAERLEKVWVAGSDSAVELAEVNAELVDLTSLIGSPAYRAGSPQREALDARIAALAARQEELEGLEARPSGWVWRETGQRFGDWWREQDTAAKNTWLRSMNIRLTFDVRGGLIRTIDFGELQEYEQHLRSGSVAERLHTGMS

SEQ ID NO: 10255 - protein, 500 aa, synthetic construct
MRALVVIRLSRVTDATTSPERQLESCQQLCAQRGWDVVGVAEDLDVSGAVDPFDRKRRPNLARWLAFEEQPFDVIVAYRVDRLTRSTRHLQQLVRWAEDHKKLVVSATEAHFDTTTPFAAVVIALMGTVAQMELEAIKERIRSAVHFNIRAGKYRGSLPPWGYLPTRVDGEWRLVPDPVQRERILEVYHRVVDNHEPLHLVAHDLNRRGVLSPKDYFAQLQGREPQGRKWSATALKRSMISKAMLGYATLNGKTVRDDDGAPLVRAEPILTRGQLEALRAELAKTSRAKPAVSTPSLLLRVLFCAVCGEPAYKFVGGGRKHPRYRCRSMGSPKHCGNGTVVMAEWDAFCEEQVLNLLGDAERLEKVWVAGSDSAVELAEVNSELVDLTSLIGSPAYRAGSPQREALDARIAALAARQEELEGLEARPSGWEWHGTGQRFGDWWREQDTAAKNTWLRSMNVRLTFDVRGGLTRTIDFGDLQEYGQHLRLSSVVERLHTGRS

SEQ ID NO: 10256 - protein, 500 aa, synthetic construct
MRALVVIRLSRVTDATTSPERQLESCQQLCAQRGWDVIGVAEDLDVSGAVDPFDRRRRPSLARWLAFEEQPFDVIVTYRVDRLTRSVRHLQQLVRWAEDHKKLVVSATEAHFDTTTPFAAVVIALMGTVAQMELEAIKERIRSAVHFNIRAGKYRGSLPPWGYLPARVDGEWRLVPDPVQRERILEVYHRVVDSHEPLHLVAHDLNRRGVLSPKDYFAQLRGREPQGRKWSATALKRSMTSVAMLGYATLNGKTVRNDDGAPLVRAEPILTREQQEALRAELAKTSRAKPAVSTPSLLLRVLFCAVCGEPAYKFVGGGRKHPRYRCRSMGFPEHCGNGTVVMAEWDAFCEEQVLNLLGDAERLEKVWVTGSDSAVELAEVNAELVDLTSLISSPAYRAGSPQREALDVRIAALAARQEELEGLEARPSGWGWRETGQRFRDWWREQDTAAKNAWLRSMNVRLTFDVRGGLTRTIDFGDLQEYEQHLRSGSVVERLHTGTS

SEQ ID NO: 10257 - protein, 500 aa, synthetic construct
MRALVVIRLSRVTDATTSPERQLESCQQLCAQRGWDVVGVAEDLDVSGAVDPFDRKRRPNLARWLAFEEQPFDAIVAYRVDRLTRSVRHLQQLVHWAEDHKKLVVSATEAHFDTTTPFAAVIIALMGTVAQMELEAIKERNRSAAHFNIRAGKYRGSLPPWGYLPTRVDGEWRLAPDPVQRERILEVYHRVVDNHEPLHLVAHDLNRRGVLSPKDYFAQLRGREPQGRKWSATALKRSMISEAMLGYATLNGKTVRDDDGAPLVRAEPILTREQLEALRAELVKASRAKPAVSTPSLLLRVLFCAVCGEPAYKFAGGGRKHPRYRCRSMGFPKHCGNGTVAMAEWDAFCEEQVLDLLGNAERLEKVWVAGSDSAAELAEVNAELVDLSSLIGSPAYRAGSPQREALDARIAALAARQEELESLGARPSGWEWRETGQRFGDWWREQDTAAKNTWLRSMNVRLTFDVRGGLTRTIDFGDLQEYEQHLRLGSVVKRLHTGMS

SEQ ID NO: 10258 - protein, 500 aa, synthetic construct
MRALVVIRLSRVTEATTSPERQLESCQQLCAQRGWDVVGVAEDLDVSGAVDPFDRKRRPNLARWLAFEEQPFDVIVAYRVDRLTRSTRHLQRLVLWAEDHKKLVVSATEAHFDTTTPFAAVVIALMGTVAQMELEAIKERIRSAVRFNIRAGKYRGSLPPWGYLPTRVDGEWRLAPDPVQRERILEVYHRVVDNHEPLHLVAYDLNRRGVLSPKDYFAQLRGREPRGRKWSATALRRSMTSVAMLGYATLNGKIVRDDDGAPLVRAEPILTREQQEALRAELAKTSRAKPAVSTPSLLLRVLFCAVCGEPAYKFVGGGRKHPRYRCRSMGFPKHCGNGTVVMAEWDAFCEEQVLNLLGDAERLEKVWLAGSDSAVELAEVNAELVDLTSLIGSPAYRAGSPQREALDARIAALAARQMELEGLEARPSGWEWRETGQRFRDWWREQDTAAKNTWLRSMNVRLTFDVRGGLTRTIDFGDLQEYEQHLRLGSMVERLHTGTS

SEQ ID NO: 10259 - protein, 500 aa, synthetic construct
MRALVVIRLSRVTDATTSPERQLESCQQLCAQRGWDVVGVAEDLDVSGAVDPFDRKRRPSLARWLAFEEQPFDAIVAYRVDRLTRSTRHLQQLVRWAEDHKKLVVSATEAHFDTTTPFAAVVIALMGTVAQMELEAIKERIRSAVRFNIRAGKYRGSLPPWGYLPARVDGEWRLVPDPVQRERILEVYHRVVDNHEPLHLVAYDLNRRGVLSPKDYFAQLQGREPRGRKWSATALRRSMTSEAMLGYATLNGKTVRDDDGAPLVRAEPILTREQLEALRAELVKTSRAKPAVSTPSLLLRVLFCAVCGEPAYKFVGGGRKHPRYRCRSMGFPEHCGNGTVVMAEWDAFCEEQVLDLLGDAERLEKVWVAGSDSAVELAAVNAELVDLTSLIGSPAYRAGSPQREALDARIAALVARQEELEGSEARPSGWEWRGTGQRLGDWWREQDTAAKNTWLRSMNVRLTFDVRGGLTRTIDFGDLQEYERHLRLVSVAERLRTGMS

SEQ ID NO: 10260 - protein, 500 aa, synthetic construct
MRALVVIRLSRVTDATTSPERQLESCQQLCAQRGWDVVGVAEDLNVSGAVDPFDRKRRPNLARWLAFEEQPFDAIVAYRVDRLTRSTRHLQQLVHWAEDHKKLVVSATEAHFDTTTPFAAVVIALMGTVAQMELEAIKERNRSAAHFNIRAGKYRGSLPPWGYLPARVDGEWRLVPDPVQRERILEVYHRVVDNHEPLHLVAHDLNRRGVLSPKDYFAQLQGREPQGRKWSATALKRSMISEAMLGYATLNGKTVRDDDGAPLVRAEPILTREQQEALRAEIVKTSRAKPAVSTPSLLLRVLFCAVCGEPAYKFAGGGRKHPRYRCRSMGLPKHCGNGTVAMAEWDAFCEEQVLDLLGDAERLEKVWVAGSDSAVELAEVNAELVDLTSLIGSPAYCAGSPQREALDARIAALAARQEELEGLGARPSGWEWRGTGQRFGDWWRVQDTAAKNTWLRSMNVRLTFDVRGGLTRTIDFGDLLEYEQHLRLGSVVERLHTRMS

SEQ ID NO: 10261 - protein, 500 aa, synthetic construct
MRALVVIRLSRVTDATTSPERQLESCQQLCAQRGWDVVGVAEDLDVSGAVNPFDRKRRPNLARWLAFEEQPFDVIVAYRVDRLTRSTRHLQQLVHWAEDHKKLVVSATEAHFDTTTPFAAVVIALMGTVAQMELEAIKERNRSAAHFNIRAGKYRGSLPPWGYLPARVDGEWRLVPDPVQRERILEVYHRVVDNHEPLHLVAHDLNRRGVLSPKDYFAQLQGREPQGRKWSATALKRSMISEAMLGYATLNGKTVRDDDGAPLVRAEPILTREQLEALRAELVKTSRAKPAVSTPSLLLRVLFCAVCGEPAYKFAGGGRKHPRYRCRSMGFPKHCGNGTVVMAEWDAFCEEQVLNLLGDAERLEKVWVAGSDSAVELAEVNAELVDLTSLIGSPAYRAGSPQREALDARIAVLAARQKELEGLEARPSGWGWRETGQRFGDWWREQDTAAKNTWLRSMNVRLTFDVRGGLTRTIDFGVLQEYEQHSRLGSVVERLHTGMS

SEQ ID NO: 10262 - protein, 500 aa, synthetic construct
MRALVVVRLSRVTDATTSPERQLESCQRLCAQRGWDVVGVAEDLDVSGAVDPFDRKRRPNLARWLAFEEQPFDVIVAYRVDRLTRSTRHLQQLVRWAEDHRKLVVSATEAHFDTTTPFAAVVIALMGTVAQMELEAIKERIRSAVRFNIRAGKYRGSLPPWGYLPARVDGEWRLVPDPVQRERILEVYHRVVDNHEPLHLVAHDLNRRGVLSPKDYFAQLRGREPQGRKWSATALKRSMTSVAMLGYATLNGKIVRDDDGAPLVRAEPILTRGQQEALRAELVKTSRAKPAVSTPSLLLRVLFCAVCGEPAYKFVGGGRKHPRYRCRSMGFPKHCGNGTVVMAEWDAFCEEQVLNLLGDAERLEKVWVAGSDSSVELAEVNAELVDLTSLIGSPAYRAGSPQREALDARIAALAARQEELEGLEARPPGWEWRETGQRFGDWWREQDTAAKNTWLRSMNVRLTFDVRGGLTRTIDFGDLQEYEQHLRSGSAVERLRTGMS

SEQ ID NO: 10263 - protein, 500 aa, synthetic construct
MRALVVIRLSRVTDATTSPERQLESCQQLCAQRGWDVVGVAEDLDVSGAVDPFDRKRRPNLARWLAFEEQPFDVIVAYRVDRLTRSTRHLQQLVHWAEDHKKLVVSATEAHFDTTTPFAAVVIALMGTVAQMELEAIKERSRSAAQFNIRAGKYRGSLPPWGYLPTRVDGEWRLVPDPVQRERILEVYRRVVDNHEPLHLVAHDLNRRGVLSPKDYFAQLRGREPRGRKWSATALRRSMISVAMLGYATLNGKIVRDDDGAPLVRAEPILTREQQEALRAELAKTSRAKPAVSTPSLLLRVLFCAVCGGPAYKFAGGGRKHPRYRCRSMGFPEHCGNGTVVMAEWDAFCEEQVLDLLGDAERLEKVWVVGSDSAIELAEVNAELVDLTSLIGSPAYRAGSPQREALDARIVALAARQEELGGLEARPSGWEWRGTGQRFGDWWCEQDTAAKNTWLRSMNVRLTFDVRGELTRTIDFGDLQEYKQHLRLSSVVERLRTGMS

SEQ ID NO: 10264 - protein, 500 aa, synthetic construct
MRALVVIRLSRVTDATTSPERQLESCQQLCAQRGWDVVGVAEDLDVSGAVGPFDRKRRPNLARWLAFEEQPFDVIVAYRVDRLTRSVRHLQQLVHWAEDHKKLVVSATEAHFDTATPFAAVVIALMGTVAQMELEAIKERNRSAAHFNIRAGKYRGSLPPWGYLPTRVDGEWRLVPDPAQRERILEVYHRVVDNHEPLHLVAHDLNRRGVLSPKDYFAQLRGREPQGRKWSATALKRSMISEAMLGYATLNGKTVRDDDGAPLVRAEPILTREQLEALRAELVKTSRAKPAVSTPSLLLRVLFCAVCGEPAYKFAGGGRKHPRYRCRSMGFPKHCGNGTVVMAEWDAFCEEQVLDLLGDAERLEKVWVAGSDSAVELAEVNAELVDLTGLIGSPAYRAGSPQREALDARIAALAARQEELEGLGARPSGWEWRETGQRFGDWWREQDTAAKNAWLRSVNVRLTFDVRGGLTRTIDFGDLQEYEQHLRLGSVVERLHTGMS

SEQ ID NO: 10265 - protein, 500 aa, synthetic construct
MRALVVIRLSRVTDATTSPERQLESCQQLCAQRGWDVAGVAEDLDVSGAVDPFDRKRRPNLARWLAFEEQPFDVIVAYRVDRLTRSTRHLQQLVHWAEDHKKLVVSATEAHFDTTTPFAAVVIALMGTVAQMELEAIRERNRSAAHFNIRAGKYRGSLPPWGYLPARVDGEWRLVPDPVQRERILEVYHRVVDDHESLHLVAHDLNRRGVLSPKDYFAQLQGREPQGRKWSATAIKRSMISEAMLGYATLNGKTVRDDDGAPLVRAEPILTREQLEALRAELVKTSRAKPAVSTPSLLLRVLFCAVCGEPAYKFAGGGRKHPRYRCRSMGFPKHCGNGTVVMAEWDAFCEEQVLGLLGDAERLERVWVAGSDSAVELAEVNAELVDLTSLIGSLAYRAGSPQREALDARIAALAARQEELEGLGARPSGWEWRETGQRFGDWWREQDTAAKNTWLRSMNVRLTFDVRGGLTRTIDFGGLQEYGQHLRLGSVVERLHTGMS

SEQ ID NO: 10266 - protein, 500 aa, synthetic construct
MRALVVIRLSRVTDATTSPERQLESCQQLCAQRGWDVVGVAEDLDVSGAVDPFDRKRRPNLARWLAFEEQPFDAIVAYRVDRLARSVRHLQQLVHWAEDHKKLVVSATEAHFDTTTPFAAVVIALMGTVAQMELEAIKERNRSAAHFNIRAGKYRGSLPPWGYLPTRVDGEWRLVPDPVQRERILEVYHRVVDNHEPLHWVAHDLNRRGVLSPKDYFAQLQGRAPQGRKWSATALKRSMISEAMLGYATLNGKTVRDDDGAPLVRAEPILTREQLEALRAELVKTSRAKPAVSTPSLLLRVLFCAVCGEPAYKFAGGGRKHPRYRCRSMGFPKHCGNGTVAMAEWDAFCEEQVLNLLGDAERLEKVWVAGSDSAVELAEVNAELVDLTSLIGSPAYRAGSPQREALDVRIAALAARQEELEGLGARPSGWEWRETGQRFGDWWREQDTAAKNTWLRSMNVRLTFDVRGGPTRTIDFGDLQEYEQHSRLGSVVERLHTGMS

SEQ ID NO: 10267 - protein, 500 aa, synthetic construct
MRALVVIRLSRVTDATTSPERQLESCQQLCAQRGWDVVGVAEDLDVSGAVDPFDRKRRPNLARWLAFEEQPFDVILAYRVDRLTRSIRHLQQLVHWAEDHKKLVVSATEAHFDTTTPFAAVVIALMGTVAQMELEAIKERIRSAVHFNIRAGKYRGSLPPWGYLPTRVDGEWRLVPDPVQRERILEVYHRVVDNHEPLHLVAYDLNRRGVLSPKDYFAQLQGREPQGRKWSATALKRSMISVAMLGYATLNGKTVRDDDGAPLVRAEPILTRMQLEALRAELVKTSRAKPAVSTPSLLLRVLFCAVCGEPAYKFVGGGRKHPRYRCRSMGFPKHCGNGTVVMAEWDAFCEEQVLDLLGDAERLEKVWVAGSDSAVELAEVNAELVDLTSLIGSPAYRAGSPQREALDARIAALAARQEELEGLEARPSGWVWRETGQRFGDWWREQDTAAKNTWLRSMNVRLMFDVRGGLTRTIDFGDLQEYEQHLRLGSVVERLHTGMS

SEQ ID NO: 10268 - protein, 500 aa, synthetic construct
MRALVVIRLSRVTDATTSPERQLVSCQQLCAQRGWDVVGVAEDLDVSGAVDPFDRKRRPNLARWLAFEEQPFDAIVAYRVDRLTRSTRYLQQLVRWAEDHEKLVVSATEAHFDTTTPFAAVVIALMGTVAQMELEAIKERIRSAMHFNIRAGKYRGSLPPWGYLPTRVDGEWRLVPDPVQRERILEVYHRVVDNREPLHLVARDLNRRGVLSPKDYFAQLRGREPQGRKWSATALKRSMISEAMLGYATLNGRTVRGDDGAPLVRAEPILTREQQEALRAELAKTSRAKPAVSTPSLLLRVLFCAVCGEPAYKFVGGGRKHPRYRCRSMGFPKHCGNGTVVMAEWDAFCEEQVLNLLGDAERLERVWVAGSDSAVELAEVNAELVDLTSLIGSPAYRAGSPQREALDARIAALAARQEVLEGLEARPSGWEWRETGQRFGDWWRGQNTAVKNTWLRSMNVRLTFDVRGGLTRTIDFGELQEYERHLRSGSVAERLRTGMS

SEQ ID NO: 10269 - protein, 500 aa, synthetic construct
MRALVVIRLSRVTDATTSPVRQLESCQQLCAQRGWDVVGVAEDLDVSGAVDPFDRKRRPNLARWLAFEEQPFDVIVAYRVDRLTRSTRHLQQLVHWAEDHEKLVVSATEAHFDTTTPFAAVVIALMGTVAQMELEAIKERIRSAVHFNIRAGKYRGSLPPWGYLPTRVDGEWRLVPDPVQRERILEVYHRVVDNHEPLHLVAHDLNRRGVLSPKDYFAQLQGREPQGRKWSATALKRSMTSVAMLGYATLNGKIVRDDDGAPLVRAEPILTREQLEAVRAELAKTSRAKPAVSTPSLLLRVLFCAVCGEPAYKFVGGGRKHPRYRCRSMGFPKHCGNGTVVMAEWDAFCEEQVLDLLGDAERQEKVWVAGSDFAVELAEVNAELVDLTSLIGSQAYRAGSPQREALDARIAALAARQEELEGLEARPSGWEWRETGQRFGDWWREQDTAAKNTWLRSMNVRLTFDVRGGLTRTIDFGELQEYEQHLRSGSVVERLHTGMS

SEQ ID NO: 10270 - protein, 500 aa, synthetic construct
MRALVVIRLSRVTDATTSPERQLESCQQLCAQRGWDVVGVAEDLDVSGAVDPFDRKRRPNFARWLAFEEQPFDVIVAYRVDRLTRSTRHLQQLVHWAEDHKKLVVSATEAHFDTTTPFAAVVIALMGTVAQMELEAIKERNRSAAHFNIRAGKYRGSLPPWGYLPTRVDGEWRLAPDPVQRERILEVYHRVVDNHEPLHLVAHDLNRRGVLSPKDYFAQLQGREPQGRKWSATALKRSMISEAMLGYATLNGKTVRDDDGAPLVRAEPILTREQLEALRAELVKTSRAKPAVSTPSLLLRVLFCAVCGEPAYKFAGGGRKHPRYRCRSMGFPKHCGNGTVAMAEWDAFCEEQVLGLLGDAKRLEKVWVAGSDSAVELAEVSAELVDLTSLIGSPAYRAGSPQREALDARIAALAARQEELEGLGARPSGWEWRETGQRFGDWWREQDTAAKNTWLRSMNVRLTFDVRGGLTRTIDFGELQEYEQHLRLGSVVERLHTGRS

SEQ ID NO: 10271 - protein, 500 aa, synthetic construct
MRALVVIRLSRVTDATTSPERQLESCQQLCARRGWDVVGVAEDLDVSGAVDPFDRKRRPNLARWLAFEEQPFDVIVAYRVDRLTRSTRHLQQLVHWAEDHKKLVVSATEAHFDTTTPFAAVVIALMGTVAQMELEAIRERNRSAAHFNIRAGKYRGSLPPWGYLPTRVDGEWRLAPDPVQRERILEVYHRVVDDHEPLHLVAHDLNRRGVLSPKDYFAQLQGREPQGRKWSATALKRSMISEAMLGYATLNGKTVRDDDGAPLVRAEPILTREQLEALRAELVKTSRAKPAVSTPSLLLRVLFCAVCGEPAYKFAGGGRKHPRYRCRSMGFPKHCGNGTVAMAEWDAFCEEQVLNLLGDAERLEKVWVAGSDSAVELAEVNAELVDLTSLIGSPAYRAGSPQREALDARIAALAARQEELEGLEARPSGWEWRETGQRFGDWWREQDTAAKNTWLRSMNVRLTFDVRGGLTRTIDFGGLLEYEQHLRLGSVVERLHTGMS

SEQ ID NO: 10272 - protein, 500 aa, synthetic construct
MRALVVIRLSRVTDATTSPERQLASCQQLCAQRGWDVVGVAEDLDVSGAVDPFDRKRRPNLARWLAFEEQPFDVIVAYRVDRLTRSTRHLQQLVHWAEDHKKLVVSATEAHFDTTTPFAAVVIALMGTVAQMELEAIKERIRSAAHFNIRAGKYRGSLPPWGYLPTRVDGEWRLVPDPVQRERILEVYHRVVDNHESLHSVAHDLNRRGVLSPKDYFAQLQGREPQGRKWSATALRRSMISKAMLGYATLNGKTVRDDDGAPLVRAEPILTREQQEALRVELAKTSRAKPAVSTPSLLLRVLFCAVCGEPAYKFVGGGRKHPRYRCRSMGFPEHCGNGTVMMAEWDAFCEEQVLDLLGDAERLEKVWVAGSDSAVERAEVNAELVDLTSLIGSPAYRAGSPQREALDARIAALAARQEELEGLEARPSGWEWRGTGQRLGDWWREQDTATKNTWLRSMNIRLTFDVRGGLTRTIDFGDLQEYERHLRLGSVAERLRTGTS

SEQ ID NO: 10273 - protein, 500 aa, synthetic construct
MRALVVIRLSRVTDATTSPERQLESCQQLCAQRGWDVVGVAEDLDVSGAVDPFDRKRRPNLARWLAFEEQPFDVIVAYRVDRLTRSTRHLQQLVRWAEDHKKLVVSATEAHFDTTTPFAAVVIALMGTVAQMELEAIKERIRSAVHFNIRAGKYRGSLPPWGYLPARVDGEWRLVPDPVQRERILEVYHRVVDNHEPLHLVAYDLNRRGVLSPKDYFAQLQGREPQGRKWSATALKRSMISVAMLGYATLNGKTVRGDDGAPLVRAEPILTRGQQEALRAELVKTSRAKPAVSTPSLLLRVLFCAVCGEPAYKFTGGGRKHPRYRCRSMVFPKHCGNGTVVMAEWDAFCEEQVLNLLGDAERLEKVWVAGSDSAVELAEVNAELVDLTSLIGSPAYRAGSPQREALDARIAALAARQEELEGLEARPSGWEWRETGQRFGDWWHAQDTAAKNTWLRSMNVRLTFDVRGGLTRTIDFGDLQEYEQHLRSGSVAERLHTGMP

SEQ ID NO: 10274 - protein, 500 aa, synthetic construct
MRALVVIRLSRVTEATTSPERQLESCQQLCAQRGWDVVGVAEDLDVSGVVDPFDRKRRPNLARWLAFEEQPFDVIVAYRVDRLTRSTRHLQQLVRWAEDHKKLVVSATEAHFDTTTPFAAVVIALMGTVAQMELEAIKERIRSAVHFNIRAGKYRGSLPPWGYLPTRVDGEWRLVPDPVQRERILEVYHRVVDNHEPLHLVAHDLNRRGVLSPKDYFAQLRGREPQGREWSATALKRSMTSVAMLGYATLNGKIVRDDDGAPLVRAEPILTRGQLEALRAELAKTSRAKPAVSSPSLLLRVLFCAVCGEPAYKFVGGGRKHPRYRCRSMGFPKHCGNGTVVMAEWDAFCEEQVLGLLGDAERLEKVWVAGSDSAVELAEVNAELVDLTSLIGSPAYRAGSPQREALDARIAALAARQEELEGLEARPSGWEWRETGQRFGDWWREQDTAAKNAWLRSMNVRLTFDVRGGLTRTIDFGDLQEYEQHLRLGSAVERLHAGMS

SEQ ID NO: 10275 - protein, 500 aa, synthetic construct
MRALVVIRLSRVTDATTSPERQLESCQQLCAQRGWDVVGVAEDLDVSGAVDPFDRKRRPNLARWLALEERPFDVIVVYRIDRLTRSVRHLQQLVHWAEDHKKLVVSATEAHFDTTTPFAAVVIALMGTVAQMELEAIKERNRSAAHFNIRAGKYRGSLPPWGYLPTRVDGEWRLVPDPVQRERILEVYHRVVDNHEPLHLVAHDLNRRGVLSPKDYFAQLRGREPQGRKWSATALKRSMISKAMLGYATLNGKTVRDDDGAPLVRAEPILTREQLEALRAELVRTSRAKPAVSTPSLLLRVLFCAVCGEPAYKFAGGGRKHPRYRCRSMGFPKHCGNGTVVMAEWDAFCEEQVLDLLGDAERLEKVWVAGSDSAVELTEVNTELVDLTSLIGSPAYRAGSPQREALDARIAALAARQEELEGLEARPSGWEWRETGQRFGDWWREQDTAAKNTWLRSMNVRLTFDVRGGLTRTIDFGDLQEYEQHLRLGSVVERLHTGTS

SEQ ID NO: 10276 - protein, 500 aa, synthetic construct
MRALVVIRLSRVTDATTSPERQLESCQQLCAQRGWDVVGVAEDLDVSGAVDPFDRKRRPNLARWLAFEEQPFDAIVAYRVDRLTRSVRHLQQLVHWAEDHKKLVISATEAHFDTTTPFAAVVIALMGTVAQMELEAIKERNRSAAHFNIRAGKYRGSLPPWGYLPTRVDGEWRLAPDPVQRERILEVYHRVVDNHEPLHLVAHDLNRRGVLSPKDYFAQLQGREPQGRKWSATALKRSMISEAMLGYATLNGKTVRDDDGAPLVRAEPILTREQLEALRAELAKTSRAKPAVSTPSLLLRVLFCAVCGEPAYKFAGGGRKHPRYRCRSMGFPKHCGNGTVVMAEWDAFCEEQVLDLLGDAKRLEKVWVAGSDSAVELTEVNAELVDLTSLLGSPAYRAGSPQREALDARIAALAARQEELEGLEARPSGWEWRETGQRFGDWWREQDTAAKNTWLRAMNVRLTFDVRGGLTRTIDFGDLPEYEQHSRLGSVVERLHTGMS

SEQ ID NO: 10277 - protein, 500 aa, synthetic construct
MRALVVIRLSRVTDATTSPERQLESCQQLCAQRGWDVVGVAEDLDVSGAVDPFDRKRRPNLARWLAFEEQPFDVIVAYRVDRLTRSTRHLQQLVYWAEDHKKLVVSATEAHFDTTTPFAAVVIALMGTVAQMELEAIKERNRSAAHFNIRAGKYRGSLPPWGYLPTRVDGEWRLVPDPVQRERILEVYHRVVDNHEPLHLVAHDLNRRGVLSPKDYFAQLRGREPQGRKWSATALKRSMISEAMLGYATLNGKTVRDDDGAPLVRAEPILSRAQLEALRAELVKTSRAKPAVSTPSLLLRVLFCAVCGEPAYKFAGGGRKHPRYRCRSMGFPKHCGNGTVAMAEWDAFCEEQVLDLLGDAERLEKVWVAGSDSAVELAEVNAELVDLTSLIGSPAYRAGSPQREALDARIAALAARQEELEGLEARPSGWEWRETGQRLGDWWREQDTAAKNTWLRSMNVRLTFDVRGGLTRTIDFGELQEYEQHLRLGSVVERLHTGMS

SEQ ID NO: 10278 - protein, 500 aa, synthetic construct
MRALVVIRLSRVTDATTSPERQLESCQQLCAQRGWDVVGVAEDLDVSGAVDPFDRKRRPNLARWLAFEEQPFDVIVAYRVDRLTRSIRHLQQLVRWAEDHKKLVVSATEAHFDTTTPFAAVVIALMGTVAQMELEAIKERIRSATRFNIRAGKYRGSLPPWGYLPTRVDGEWRLVPDPVQRERILEVYHRVVDNHEPLHLVAHDLNRRGVLSPKDYFAQLRGREPQGRKWSATALKRSMTSVAMLGYTTLNGKTVRDDDGAPLVRAEPILTREQQEALRAELVKTSRAKPAVSTPSLLLRVLFCAVCGEPAYKFVGGGRKHPRYRCRSMGFPKHCGNGTVVMAEWDAFCEEQVLGLLGDAERLEKVWVVGSDSVVELAEVNAELVDLTSLIGSPAYRAGSPQREALDARIAALAARQEELEGLEARPSGWEWRETGQHFGDWWREQDTAAKNTWLRSMNVRLTFDVRGGLTRTIDFGELQEYEQRLRLSSVVERLRTGMS

SEQ ID NO: 10279 - protein, 500 aa, synthetic construct
MRALVVIRLSRVTDATTSPERQLESCQQLCAQRGWDVVGVAEDLDVSGAVDPFDRKRRPNLARWLAFEERPFDVIVAYRVDRLTRSTRHLQQLVHWAEDHKKLVVSATEAHFDTTTPFAAVVIALMGTVAQMELEAIKERNRSAAHYNIRAGRYRGSLPPWGYLPTRVDGEWRLVPDPVQRERILEVYHRVVDNHEPLHLVAHDLNRRGVLSPKDYFAQLQGRKPQGRKWSATALKRSMISEAMLGYATLNGKTVRDDDGAPLVRAEPILTREQLGALRAELVKTSRAKPAVSTPSLLLRVLFCAVCGEPAYKFAGGGRKHPRYRCRSMGFPKHCGNGTVVMAEWDAFCEEQVLNLLGDAERLEKVWVAGSDSAVELAEVNAELVDLTSLIGSPAYRAGSPQREALDARIAALAARQEELEGLEARPSGWEWRGTGQRFGDWWREQDTAAKNTWLRSMNVRLTFDVRGGLTRTIDFGGLQEYEQHLRLGSVVERLHTGMS

SEQ ID NO: 10280 - protein, 500 aa, synthetic construct
MRALVVIRLSRVTDATTSPERQLESCQQLCAQRGWDVVGVAEDLDVSGAVDPFDRKRRPNLARWLAFEEQPFDVIVAYRVDRLTRSTRHLQQLVHWAEDHKKLVVSATEAHFDTTTPFAAVVIALMGTVAQMELEAIKERNRSAAHFNIRAGKYRGSLPPWGYLPTRVDGEWRLVPDPVQRERILEVYHRVVDNHEPLHLVAHDLNRRGVLSPKDYFAQLRGREPQGRKWSATALKRSMTSEAMLGYATLDGKTVRGDDGAPLVRAEPILTRGQLEALRAELVKTSRAKPAVSTPSLLLRVLFCAVCGEPAYKFAGGGRKHPRYRCRSMGFPKHCGNGTVVMAEWDAFCEEQVLNLLGDTEHLEKVWVAGSDSAVELAEVNAELVDLTNLIGSPAYRAGSPQREALDARIAALTARQEELEGLEARPSGWEWHGTGQRFGDWWREQDTAAKNTWLRSMNIRLTFDVRGGLTRTIDLGNLQEYEQYLRLGSVVERLHTGMS

SEQ ID NO: 10281 - protein, 500 aa, synthetic construct
MRAVVVIRLSRVTNATTSPERQLESCQQLCALRGWDVVGVAEDLNVSGAVDPFDRKRRPNLARWLAFEEQPFDVIVAYRVDRLTRSIRHLQQLVHWAEGHKKLVVSATEAHFDTTTPFAAVVIALMGTVAQMELEAIKERIRSAVRFNIRAGKYRGSLPPWGYLPTRVDGEWRLVPDPVQRERILEVYHRVVDNHEPLHLVAHDLNRRGVLSPKDYFAQLRGREPQGRKWSATALKRSMISVAMLGYATLNGKTVRDDDGAPLVRAEPILTREQQEALRAELAKTSRAKPAVPTPSLLLRVLFCAVCGEPAYKFVGGGRKHPRYRCRSMGFPKHCGNGTVVMAEWDVFCEEQVLNLLGDAERLEKVWVAGSDSAVELAEVNAELVDLTSLIGSPAYRAGSPQREALDARIAALAARQEELEGLEARPSGWEWRGTGQRLGDWWREQDTAAKNTWLRSMNIRLTFDVRGGRTRTIDFGDLQEYAQHLRLGSVVERLHAGMP

SEQ ID NO: 10282 - protein, 500 aa, synthetic construct
MRALVVIRLSRVTDATTSPERQLESCQQLCAQRGWDVVGVAEDLDVSGAVDPFDRKRRPNLARWLAFEEQPFDVIVAYRVDRLTRSTRHLQQLVHWAEDHKKLVVSATEAHFDTTTPFAAVVIALTGTVAQMELEAIKERNRSAAHFNIRAGKYRGSLPPWGYLPTRVDGEWRLVPDPVQRERILEVYHRVVDNHEPLHLVAHDLNRRGVLSPKDYFAQLRGREPQGHKWSATALKRSMISEAMLGYATLNGKTVRDDDGAPLVRAEPILTREQLGALRAELVKTSRAKPAVSTPSLLLRVLFCAVCGEPAYKFAGGGRKHPRYRCRSMGFPKHCGNGTVVVTEWDAFCEEQVLDLLGDAERLEKVWVAGSDSAVELAEVNAELVDLTSLIGSPAYRAGSPQREVLDARIAALAARQEELEGLEARPSGWEWRGTGQRFGDWWREQDTAAKNTWLRSMNVRLTFDVRGGLTRTIDFGELQEYEQHLRLGGVVERLHTGMS

SEQ ID NO: 10283 - protein, 500 aa, synthetic construct
MRALVVIRLSRVTDATTSPERQLESCQQLCAQRGWDVVGVAEDLDVSGAVDPFDRKRRPNLARWLAFEEQPFDVIVAYRVDRLTRSTRHLQQLVHWAEDHKKLVVSATEAHFDTTTPFAAVVIALMGTVAQMELEAIKERNRSAAHFNIRAGKYRGSLPPWGYLPSRVDGEWRLAPDPVQRERILEVYHRVVDNHEPLHLVAHDLNRRGVLSPKDYFAQLRGREPQGRKWSATALKRSMTSEAMLGYATLNGKTVRDDDGAPIVRAEPILTREQLEALRAELVKTSRAKPATSTPSLLLRVLFCAVCGEPAYKFAGGGRKHPRYRCRSMGFPKHCGNGTVAMVEWDAFCEEQVLDLLGDAERLEKVWVAGSDSAVELAEVNAELVDLTSLIGSPAYRAGSPQREALDARIAALAARQEELEGLEARPSGWEWRETGQRFGDWWREQDTAAKNAWLRSKNVRLTFDVRGGLTRTIDFGDLQEYEQHSRLGSVVERLHTGMS

SEQ ID NO: 10284 - protein, 500 aa, synthetic construct
MRALVVIRLSRVTDATTSPERQLESCQQLCAQRGWDVVGVAEDLDVSGAVDPFDRKRRPNLARWLAFEEQPFDVIAAYRVDRLTRSVRHLQRLVRWAEDHKKLVVSASEAHFDMTTPFAAVVIALMGTVAQMELEAIKERSRSAAHFNIRAGKYRGSLPPWGYLPTRVDGEWRLVPDPVQRERILEVYHRVVDNHEPLHLVAHDLNRRGVLSPKDYFAQLQGREPQGRKWSATALKRSMISVAMLGYATLNGKTVRDDDGAPLVRAEPILTREQLEALRAELVKTSRAKPAVSTPSLLLRVLFCAVCGEPAYKFVGGGRKHPRYRCRSMGFPKHCGNGTVVMAEWDAFCEEQVLGLLGDAERLEKVWVAGSDSAVELAEVNAELVDLTSLIGSPAYRAGSPQREALDARIAALAARQEELEGLEARPSGWEWRETGQRFGDWWREQDTAAKNAWLRSMNVRLTFDVRGGLTRTIDFGDLQEYEQHLRLGSVVERLHTGMS

SEQ ID NO: 10285 - protein, 500 aa, synthetic construct
MRALVVIRLSRVTDATTSPERQLESCQQLCAQRGWDVVGVAEDLDVSGAVDPFDRKRRPNLARWLAFEEQPFDVIVAYRVDRLTRSTRHLQRLVHWAEDHKKLVVSATEAHFDMTTPFAAVVIALMGTVAQMELEAIKERIRSAVRYNIRAGKYRGSLPPWGYLPTRVDGEWRLVPDPVQRERILEVYHRVVDNHEPLHLVAHDLNRRGILSPKDYFAQLRGREPQGRKWSATALRRSMISVAMLGYATLNGKIVRDDDGAPLVRAEPILTREQLEALRAELAKTSRAKPAVSAPSLLLRVLFCAVCGEPAYKFVGGGRKHPRYRCRSMGFPKHCGNGTVVMTEWDTFCEEQVLGLLGDAERLEKVWVAGSDSSVELAEVNAELVDLTSLIGSPAYRAGSPQREALDARIAALAARQGELEGLEARPSGWEWRGTGQRFGDWWREQDTAAKNTWLRSMNVRLTFDVRGGLTRTIDFGELQEYEQHLRSGSVVERLHTGMS

SEQ ID NO: 10286 - protein, 500 aa, synthetic construct
MRALIVIRLSRVTDATTSPERQLESCQQLCAQRGWDVVGVAEDLDVSGAVDPFDRKRRPNLARWLAFEEQPFDAIVAYRVDRLARSIRHLQQLVNWAEDHKKLVVSATEAHFDTTTPFAAVVIALMGTVAQMELEAIKERNRSAAHFNIRAGKYRGSLPPWGYLPTRVDGEWRLVPDPVQRERILEVYRRVVDNHEPLHLVAHDLNRRGVLSPKDYFAQLRGREPQGRKWSATALKRSMISEAMLGYATLNGKTVRDDDGAPLVRAEPILTREQLEALRAELVKTSRAKPAVSTPSLLLRVLFCAVCGEPAYKFAGGGRKHPRYRCRSMGFPKHCGNGTVAMAEWDAFCEEQVLGLLGDAERLEKVWVVGSDSAVELAEVNAELVDLTSLIGSPAYCAGSPQREALDARIAALAARQEELEGLEARPSGWEWRGTGQRFGDWWREQDTAAKNTWLRSMNVRLTFDVRGGLTRTIDFGELQEYEQHLRLGGVVERLHTGMS

SEQ ID NO: 10287 - protein, 500 aa, synthetic construct
MRALVVIRLSRVTDATTSPERQLESCQQLCAQRGWDVVGVAEDLDVSGAVDPFDRKRRPNLARWLAFEEQPFDAIVAYRVDRLARSTRHLQQLVHWAEDHKKLVVSATEAHFDTTTPFAAVVIALMGTVAQMELEAIKERNRSAAHFNIRAGKYRGSLPPWGYLPTRVDGEWRLVPDPVQRERILEVYHRVVDNHEPLHLVAHDLNRRGVLSPKDYFAQLQGREPQGRKWSATALKRSMTSEAMLGYATLNGKTVRDDDGAPLVRAEPILTREQLEALRAVLVRTSRAKPAVSTPSLLLRVLFCAVCGEPAYKFAGGGRKHPRYRCRSMGFPKHCGNGTVAMAEWDAFCEEQVLDLLGDTERLEKVWVAGSDSAVELAEVNAELVDLTSLIGSPAYRAGSPQREALDARIAALAARQEELEGLETRPSGWEWRETGQRFGDWWREQDTAAKNTWLRSMNVRLTFDARGGLARTIDFGDLQEYEQHLRLGSVVERLHTGMS

SEQ ID NO: 10288 - protein, 500 aa, synthetic construct
MRALVVIRLSRVTDATTSPERQLESCQQLCAQRGWDVVGVAEDLDVSGAVDPFDRKRRPNLARWLAFGEQPFDVIVAYRVDRLTRSVRHLQQLVHWAEDHKKLVVSATEAHFDTTTPFAAVVIALMGTVAQMELEAIKERNRSAAHFNIRAGKYRGSLPPWGYLPTRVDGEWRLVPDPVQRVRILEVYHRVVDNHEPLHLVAHDLNRRGVLSPKDYFAQLRGREPQGRKWSATALKRSMISEAMLGYATLNGKTVRDDDGAPLVRAEPILTREQLEALRAELVKTSRAKPAVSTPSLLLRVLFCAVCGEPAYKFAGGGRKHPRYRCRSMGFSKHCGNGTVAMAEWDAFCEEQVLNLLGDAERLEKVWVAGSDSAVELAEVNAELVDLTSLVGFPAYRAGSPQREALDARIAALAARQEELEGLGARPSGWEWRETGQRFGDWWREQDTAAKNTWLRSMNVRLTFDVRGGLTRTIDFGGLLEYEPHLRLGSVVERLHTGMS

SEQ ID NO: 10289 - protein, 500 aa, synthetic construct
MRALVVIRLSRVTDATTSPERQLESCQQLCAQRGWDVVGVAEDLDVSGAVDPFDRKRRPNLARWLASEEQPFDVIVAYRIDRLTRSTRHLQRLVHWAEDHKKLVVSATEAHFDTTTPFAAVVIALMGTVAQMELEAIKERNRSAAHFNIRAGKYRGSLPPWGYLPTRVDGEWRLVPDPVQRERILEVYHRVVNNHEPLHLVAHDLNRRGVLSPKDYFAQLQGREPQGRKWSATALKRSMTSEAMLGYATLNGKTVRDDDGAPLVRAEPILTREQQEALRAELVKTSRAKPAVSTPSLLLRVLFCAVCGEPAYKSAGGGRKHPRYRCRSMGFPKHCGNGTVAMAEWDAFCEEQVLDLLGDAERLEKVWVAGSDSAVELAEVNAELVDLTSLIGSPAYRAGSPQREALDARIAALAARQEELEDLGARPSGWEWRETGQRFGDWWREQDTAAKNTWLRSMNVRLTFDVRGGLTRTIDFGDLQEYEQHLRLGSVVERLHTGMS

SEQ ID NO: 10290 - protein, 500 aa, synthetic construct
MRALVVIRLSRVTDATTSPERQLESCQQLCAQRGWDVVGVAEDLDVSGAVDPFDRKRRPNLARWLAFEEQPFDVIVAYRVDRLTRSTRHLQQLVHWAEDHKKLVVSATEAYFDTTTPFAAVVIALMGTVAQMELEAIKERNRSAAHFNIRAGKYRGSLPPWGYLPTRVDGEWRLVPDPVQRERILEVYHRVVDNHEPLHLVAHDLNRRGVLSPKDYFAQLRGREPQGRKWSATALKRSMISEAMLGYATLGGKIVRDDDGAPLVRAEPILTREQLEALRAELVKTPRAKPAVSTSSLLLRVLFCAVCGEPAYKFAGGGRKHPRYRCCSMGFPKHCGNGTVAMAEWDAFCEELVLDLLGDAERLEKVWVAGSDSAVELAEVNAELVDLTSLIGSPAYRAGSPQREALDARIAALAARQEELEGLGARPSGWEWRETGQRFGDWWREQDTAAKNTWLRSMNVRLTFDARGGLTRTIDFGDLQEYEQHLRLGSVAERLHTGTS

SEQ ID NO: 10291 - protein, 500 aa, synthetic construct
MRALVVIRLSRVTDATTSPERQLESCQQLCAQRGWDVVGVAEDLDVSGAVDPFNRKRRPNLARWLAFEEQPFDAIVAYRVDRLTRSVRHLQQLVRWAEDHKKLVVSATEAHFDTTTPFAAVVIALMGTVAQMELEAIKERIRSAVHFNIRAGKYRGSLPPWGYLPARVDGEWRLVPDPVQRERILEVYHRVVDNHEPLHLVAHDLNRRGVLSPKDYFAQLQGREPQGRKWSATALKRSMISVAMLGYATLNGKIVRDDDGAPLVRAEPILTRGQQEALRAELAKTSRAKPAVSTPSLLLRVLFCAVCGEPAYKFTGGGRKHPRYRCRSMGFPEHCGNGTVVMAEWDAFCEKQVLGLLGDAERLERVWVAGSDSAVELAEVNAELVDLTSLIGSPAYRTGSPQREALDARIAALAARQEELEGLEARPSGWEWRETGQRFGDWWREQDTAARNTWLRSMNVRLTFDVRGGLTRTIDFGDLQEYGQHLRLGSVAERLHTGMS

SEQ ID NO: 10292 - protein, 500 aa, synthetic construct
MRALVVIRLSRVTDATTSPERQLESCQQLCAQRGWDVVGVAEDLDVSGAVDPFDRKRRPNLARWLAFEEQPFDAIVAYRVDRLTRSVRHLQQLVHWAEDHKKLVVSATEAHFDTTTPFAAVVIALMGTVAQMELEAIKERNRSAAHFNIRAGKYRGSLPPWGYLPTRVDGEWRLAPDPVQRERILEVYHRVVDDHEPLHLVAHDLNRRGVLSPKDYFAQLQGREPQGRKWSATALKRSMISEAMLGYATLNGKTVRDEDGAPLVRAEPILTRGQLEALRAELVKTSRAKPAVSTPSLLLRVLFCAVCGEPAYKFAGGGRKHPRYRCRSMGFPKHCGNGTVVMAEWDAFCEEQVLDLLGDAERLEKVWVAGSDSAVELAEVNAELVDLTSLIGSPAYRAGSPQREALDARIAALATRQEELEGLEARLSGWEWRGTGQRFGDWWREQDTAAKNTWLRSMNVRLTFDVRGGLTRTIDFGGLQEYEQHSRLGSVVERLRTGMS

SEQ ID NO: 10293 - protein, 500 aa, synthetic construct
MRALIVIRLSRVTDATTSPERQLESCQQLCAQRGWDVVGVAEDLDVSGAVDPFDRKRRPNLARWLAFEEQPFDVIVAYRVDRLTRSVRHLQQLVRWAEDHKKLVVSATEAHFDTTTPFAAVVIALMGTVAQMELEAIKERIRSAVHFNICAGKYRGSLPPWGYLPARVDGEWRLVPDPVQRERILEVYRRVVDDHEPLHLVAHDLNRRGVLSPKDYFAQLRGREPQGREWSATALKRSMTSVAMLGYATLNGKTVRDDDGAPLVRAEPILTREQLEALRAELAKTSRARPAVSTPSLLLRVLFCAVCGEPAYKFVGGGRKHPRYRCRSMGLPKHCGNGTVLMTEWDAFCEEQVLDLLGDAERLEKVWVAGSDSSVELAEVNAELVDLTSLIGSPAYRAGSPQREALDARIAALAARQEELEGLEARPSGWEWRETGQRFRDWWREQDTAAKNAWLRLMNVRLTFDVRGGLTRTIDFGDLQEYEQHLRLGSVVERLHTGMS

SEQ ID NO: 10294 - protein, 500 aa, synthetic construct
MRALVVIRLSRVTDATTSPERQLESCQQLCAQRGWDVVGVAEDLDVSGAVDPFDRKRRPNLARWLAFEEQPFDAVVVYRVDRLARSVRHLQQLVHWAEDHKKLVVSATEAHFDTTTPFAAVVIALMGTVAQMELEAIRERNRSAAHFNIRAGKYRGSLPPWGYLPTRVDGEWRLVPDPVQRERILEVYRRVVDNHEPLHLVAYDLNRRGVLSPKDYFAQLQGREPQGRKWSATALKRSLTSEAMLGYATLNGKIVRDDDGAPLVRAEPILTREQLEALRAELVETSRAKPAVSTPSLLLRVLFCAVCGEPAYKFAGGGRKHPRYRCRSMGFPKHCGNGTVAMAEWDAFCEEQVLDLLGDAERLEKVWVAGSDSAVELAEVNAELVDLTSLIGSPAYRAGSPQREALDARIAALAARQEELEGLEARPSGWEWRGTGQCFGDWWREQDTAAKNTWLRSMNVRLTFDVRGGLTRTIDFGELQEYEQHLRLGSVVERLHTGMP

SEQ ID NO: 10295 - protein, 500 aa, synthetic construct
MRALVVIRLSRVTDATTSPERQLESCQQLCAQRGWDVVGVAEDLGVSGAVDPFDRKRRPNLARWLAFEEQPFDVIVAYRVDRLTRSVRHLQQLVHWAEDHKKLVVSATEAHFDTTTPFAAVVIALMGTVAQMELEAIKERNRSAAHFNIRAGKYRGSLPPWGYLPTRVDGEWRLAPDPVQRERILEVYHRVVDNHESLHLVAHDLNRRGVLSPKDYFAQLQGREPQGRKWSATALKRSMISEAMLGYATLNGKTVRDDNGAPLVRAEPILTREQLEALRAELAKTSRAKPAVSTPSLLLRVLFCAVCGEPAYKFAGGGRKHPRYRCRSMGSPKHCGNGTVTMAEWDAFCEEQVLDLLGDTMRLEKVWVAGSDSAVELAEVNAELADLTRLIGSPAYRTGSPQREALDARIAALAARQEELEGLEARPSGWGWRETGQRFGDWWREQDTAAKNTWLRSMNVRLTFDVRGGLTRTIDFGDLQEYEQHLRLGGVVERLHIGMS

SEQ ID NO: 10296 - protein, 500 aa, synthetic construct
MRALVVIRLSRVTDATTSPERQLESCQQLCAQRGWDVVGVAEDLDVSGAVDPFDRKRRPNLARWLAFEEQPFDAIVAYRVDRLTRSTRHLQQLVHWAEDHKKLVVSATEAHFDTTTPFAAVVIALMGTVAQMELEAIKERNRSAAHFNIRAGKYRGSLPPWGYLPTRVDGEWRLVPDPVQRERILEVYRRVVDNHEPLHLVAHDLNRRGVLSPKDYFAQLRGREPQGRKWSATALKRSMISEAMLGYATLNGKTVRDDDGAPLVRAEPILTREQLEALRAELVKTSRAKPAVSTPSLLLRVLFCAVCGEPAYKFAGGGRKHPRYRCRSMGFPKHCGNGTVVMAEWDAFCEEQVLDLLGDAERLEKVWVAGSDSAVELAEVSAELVDLTSLIGSPAYRAGSPQRETLDARIAALAARQEELEGLGACPSGWEWRETGQRFGDWWREQDTAAKNAWLRSMNVRLTFDVRGGLTRTIDFGDLQEYEQHLRLGSVVERLHTGMT

SEQ ID NO: 10297 - protein, 500 aa, synthetic construct
MRALVVIRLSRVTDATTSPERQLESCQQLCAQRGWDVVGVAEDLDVSGAVDPFDRKRRPNLARWLAFEEQPFDVIVAHRVDRLTRSTRHLQQLVRWAEDHKKLVVSATEAHFDTTTPFAAVVIALMGTVAQMELEAIKERIRSAAHFNIRAGKYRGSLPPWGYLPTRVDGEWRLAPDPVQRERILEVYHRVVDNHEPLHLVAHDLNRRGVLSPKDYFAQLRGREPQGRKWSATALKRSMISVAMLGYATLNGKTVRDDNGAPLVRAEPILTRGQQEALRAELAKTSRAKPAVSTPSLLLRVLFCAVCGEPAYKFVGGGRKHPRYRCRSMGFPEHCGNGTVVMAEWDAFCEEQVLNLLGDAERLEKVWVAGSDSAIELAEVNAELVDLTSLIGSPAYRAGSPQREALDARIAALAARQEELEGLEARPSGWEWRGTGQRLRDWWREQDTAAKNTWLRSMNVRLTFDARGGLTRTIDFGDLQEYGQHLRSGSVVERLHTGMS

SEQ ID NO: 10298 - protein, 500 aa, synthetic construct
MRALVVIRLSRVTDATTSPERQLESCQQLCAQRGWDVVGVAEDLDVSGAVDPFDRKRRPNLARWLAFEEQPFDVIVAYRVDRLTRSTRHLQQLVHWAEDHKKLVVSATEAHFDTTTPFAAVVIALMGTVAQMELEAIKERNRSAAHFNIRAGKYRGSLPPWGYLPTRADGEWRLVPDPVQRERILEVYHRVVDNHEPLHLVAHDLNRRGVLSPKDYFAQLQGREPQGRKWSATALKRSMISEAMLGHATLNGKTVRDDDRAPLVRAEPILTREQQEALRAELVKTSRAKPAVSTPSLLLRVLFCAVCGEPAYKFAGGGRKHPRYRCRSMGFPKHCGNGTVVMAEWDAFCEEQVLDLLGDAERLEKVWVAGSDSAVELAEVNAELVDLAGLIGSPAYRAGSPQREALDARIAALAARQEELEGLGARPSGWEWRETGQRFGDWWREQDTAAKNTWLRSMNVRLMFDARGGLTRTIDFGDLQEYEQHLRLGSVVERLHTGRS

SEQ ID NO: 10299 - protein, 500 aa, synthetic construct
MRALVVIRLSRVTDATTSPERQLESCQQLCAQRGWDVVGVAEDLDVSGAVDPFDRKRRPNLARWLAFEEQPFDVIVAYRVDRLTRSTRHLQQLVHWAEDHKKLVVSATEAHFDTTTPFAAVVIALMGTVAQMELEAIKERNRSAAHFNIRAGKYRGSLPPWGYLPTRVDGEWRLVPDPVQRERILEVYHRVVDNHEPLHLVAHDLNRRGVLSPKDYFAQLQGREPQGRKWSATALKRSMTSEAMLGYATLNGKTVRDDDGAPLVRAEPILTRGQLEALHAELVKTSRAKPAVSTPSLLLRVLFCAVCGEPAYKFAGGGRKHPRYRCRSMGFPKHCGNGTVVMAEWDAFCEEQVLDLLGDAERLEKVWVAGSDSAVELAEVNAELVDLTSLIGSPAYRAGSPQREALDARIAALAARREELEGLEARPSGWEWRETGQRFGDWWREQDTAAKNTWLRSMNVRLTFDVRGGLTRTIDFGDLQEHEQHLRLGSVAERLHTGMS

SEQ ID NO: 10300 - protein, 500 aa, synthetic construct
MRALVVIRLSRVTDATTSPERQLASCQQLCAQRGWDVVGVAEDLDVSGAVDPFDRKRRPNLARWLAFEEQPFDVIVAYRVDRLTRSTRHLQQLVHWAEDHKKLVVSATEAHFDTTTPFAAVVIALMGTVAQMELEAIKERIRSAVRFNIRAGKYRGSLPPWGYLPTRVDGEWRLVPDPVQRERILEVYHRVVDNHEPLHLVAHDLNRRGVLSPKDYFAQLRGREPRGRKWSATALRRSMTSEAMLGYATLNGKTVRDDDGAPLVRAEPILTREQLEALRAELAKTSRAKPAVSTPSLLLRVLFCAVCGEPAYKFVGGGRKHPRYRCRSMGFPEHCGNGTVVMAEWDVFCEEQVLNLLGDAERLEKVWVAGSDSAVELAEVNAELADLTSLIGSPAYRAGSPQREALDARIAALAARQEVLEGLEARPSGWEWRGTGQRFGDWWREQDTAAKNTWLRSMNVRLTFDVRGGLTRTIDFGDLQEYEQHLRLGCMVERLHTGMS

SEQ ID NO: 10301 - protein, 500 aa, synthetic construct
MRALVVIRLSRVTDATTSPVRQLESCQQLCAQRGWDVVGVAEDLDVSGAVDPFDRKRRPNLARWLAFEEQPFDVIVAYRVDRLTRSIRHLQQLVHWAEDHKKLVVSATEAHFDTTTPFAAVVIALMGTVAQMELEAIKERIRSAAHFNIRAGKYRGSLPPWGYLPTRVDGEWRLVPDPVQRERILEVYHRVVDNHEPLHLVAHDLNRRGVLSPKDYFAQLRGREPQGRKWSATALKRSMISKAMLGYATLNGKTVRDDDGAPLVRAEPILTHEQQEALRAELVRTSRAKPAVSTPSLLLRVLFCAVCGEPAYKFVGGGRKHPRYRCRSTGFPKHCGNGTVVMAEWDAFCEEQVLDLLGDAERLERVWVAGSDSAVELAEVSAELVDLTSLIGSPAYRAGSPQREALDARIAALAARQEELEGLEARPSGWEWRGTGQRFGDWWREQDTAAKNTWLRSMNVRLTFDVRGGLTRTIDFGDLREYEQHLRSGSVVERSHTGVS

SEQ ID NO: 10302 - protein, 500 aa, synthetic construct
MRTLVVIRLSRVTDATTSPERQLESCQQLCAQRGWDVVGVAEDLDVSGAVDPFDRKRRPNLARWLAFEEQPFDVIVAYRVDRLTRSTRHLQQLVRWAEDHKKLVVSATEAHFDTTTPFAAVVIALMGTVAQMELEAIKERIRSAVRFNIRAGKYRGSLPPWGYLPTRVDGEWRLVPDPVQRERILEVYHRVVDNHEPLHLVAHDLNRRGVLSPKDYFAQLRGREPQGRKWSATALKRSMTSVAMLGYATLNGKIVRDDDGAPLVRAEPILTRGQQEALRAELAKTSRAKPAVSTPSLLLRVLFCAVCGEPAYKFVGGGRKHPRYRCRSMGFPRHCGNGTVVMAEWDAFCEEQVLALLGDAERLEKVWVAGSDSAVELAEVNAELVDLTSLIGSPAYRAGSPQREALDARIAALAARQEELEGLEARPSGWEWRGTGQRFGDWWREQDTAARNTWLRSMNVRLTFDVRGGLTRTIDFGDLQEYEQHLRLGSVVERLHTGTS

SEQ ID NO: 10303 - protein, 500 aa, synthetic construct
MRALVVIRLSRVTDATTSPERQLESCQQLCAQRGWDVVGVAEDLDVSGAVDPFDRKRRPNLARWLAFEEQPFDAIVAYRVDRLTRSVRHLQQLVHWAEDHKKLVVSATEAHFDTTTPFAAVIIALMGTVAQMELEAIKERNRSAAHFNIRAGKYRGSLPPWGYLPTRVDGEWRLAPDPVQRERILEVYHRVVDNHEPLHLVAHDLNRRGVLSPKDYFAQLRGREPQGRKWSATALKRSMISEAMLGYATLNGKTVRDDDGAPLVRAEPILTREQLEALRAELVKASRAKPAVSTPSLLLRVLFCAVCGEPAYKFAGGGRKHPRYRCRSMGFPKHCGNGTVAMAEWDAFCEEQVLDLLGNAERLEKVWVAGSDSAVELAEVNAELVDLSSLIGSPAYRAGSPQREALDARIAALAARQEELEGLGARPSGWEWRETGQRFGDWWREQDTAAKNTWLRSMNVRLTFDVRGGLTRTIDFGNLQEYEQHLRLGSVVERLHTGMS

SEQ ID NO: 10304 - protein, 500 aa, synthetic construct
MRALVVIRLSRVTDATTSPERQLESCQQLCAQRGWDVVGVAEDLDVSGAVDPFDRKRRPNLARWLAYEEQPFDVIVAYRVDRLTRSTRHLQQLVRWAEDHKKLVVSATEAHFDTTTPFAAVVIALMGTVAQMELEAIKERIRSAAHFNIRAGKYRGSLPPWGYLPTRVDGEWRLVPDPVQRERILEVYHRVVDNHEPLHLVAHDLNRRGVLSPKDYFAQLRGREPQGRKWSATALKRSMISAAMLGYATLNGKIVRDDDGAPLVRAEPILTREQLEALRAELAKTSRAKPAVSTPSLLLRVLFCAVCGEPAYKFVGGGRKHPRYRCRSMGFPEHCGNGTVVMAEWDAFCEEQVLNLLGDAERLEKVWVAGSDSAVELAEVNAELVDLTSLIGSPAYRAGSSQREALDARIAALAARQEELEGLEARPSGWEWRGTGQRLGDWWREQDTATKNTWLRSMNVRLAFDVRGGLTRTIDFGELQEYEQHLRSGSVVERLHTGMS

SEQ ID NO: 10305 - protein, 500 aa, synthetic construct
MRALVVIRLSRVTDATTSPERQLESCQQLCAQRGWDVVGVAEDLDVSGAVDPFDRKRRPNLARWLAFEEQPFDVIVAYRVDRLARSTRHLQQLVHWAEDHKKLIVSATEAHFDTTTPFAAVVIALMGTVAQMELEAIKERNRSAAHFNIRAGKYRGSLPPWGYLPTRVDGEWRLVPDPVQRERILEVYHRVVDNHEPLHLVAHDLNRRGVLSPKDYFAQLQGREPQGRKWSATALKRSMISEAMLGYATLNGKTVRDDDGAPLVRAEPILTRGQLEALRAELVKTSRAKPAVSTPSLLLRVLFCAVCGEPAYKFAGGGRKHPRYRCRSMGFPKHCGNGTVAMAEWDAFCEEQVLGLLGDAERLEKVWVAGSDSAVELAEVNAELVDLTSLIGSPAYRAGSPQREALDARIAALAARQEELKGLGARPSGWEWRGTGRRFGDWWREQDTAAKNTWLRSMNVRLTFDVRGGLTRTIDLGDLQEYEQHLRLGSVAERLHTGMS

SEQ ID NO: 10306 - protein, 500 aa, synthetic construct
MRALVVIRLSRVTDATTSPERQLESCRQLCAQRGWDVVGVAEDLDVSGAVDPFDRKRRPNLARWLAFGEQPFDVIVAYRVDRLTRSVRHLQQLVRWAEDHKKLVVSATEAHFDTTTPFAAVVIALMGTVAQMELEAIKERIRSAVRFNIRAGKYRGSLPPWGYLPTRVDGEWRLVPDPVQRERILEVYHRVVDNHEPLHLVAYDLNRRGVLSPKDYFAQLRGREPRGRKWSATALRRSMTSGAMLGYATLNGKTVRDDDGAPLVRAEPILTRGQQEALRAELAKTSRAKPAVSAPSLLLRVLFCAVCGEPAYKFVGGGRKHPRYRCRSIGFPKHCGNGTVVTAEWDAFCEEQVLALLGDAERLEKVWVAGSDSSVELAEVNAELVDLTSLIGSPAYRAGSPQREALDARIAALAARQEELEGLEARPSGWEWRGTGQRFRDWWREQDTAARNTWLRSMNVRLTFDVRGGLTRTIDFGDLQGYERHLRLGSVAERLHTGMS

SEQ ID NO: 10307 - protein, 500 aa, synthetic construct
MRALVVIRLSRVTDATTSPERQLETCQQLCAQRGWDVVGVAEDLNVSGAVDPFDRKRRPNLARWLAFKEQQFDVIVAYRVDRLTRSVRHLQQLVHWAEDHKKLVVSATEAHFDMTTPFAAVVIALMGTVAQMELEAIKERNRSAAHFNIRAGKYRGSLPPWGYLPTRVDGEWRLVPDPAQRERILEVYHRVVDNHEPLHLVAHDLNRRGVLSPKDYFAQLQGREPRGRKWSATALKRSMTSEAMLGYATLNGKTVRDDDGAPLVRAEPILTREQLEALRAELVKASRAKPAVSTPSLLLRVLFCAVCGEPAYKFAGEGRKHPRYRCRSMGFPKHCGNGTVAMAEWDAFCEEQVLDLLGDAERLEKVWVAGSDSAAELAEVNAELVDLTSLIGSPAYRAGSPQREALDARIAALAARQEELEGLEARPSGWGWRETGQRFGDWWREQDTAAKNTWLRSMNVRLTFDVRGGLTRTIDFGELREYEQHLRLGSVVERLRTGMS

SEQ ID NO: 10308 - protein, 500 aa, synthetic construct
MRALVVIRLSRVTDATTSPERQLASCQQLCAQRGWDVVGVAEDLDVSGAVDPFDRKRRPNLAHWLAFEEQPFDVIVTYRVDRLTRSTRHLQRLVLWAEDHKKLVVSATEAHFDTTTPFAAVVIALMGTVAQMELEAIKERIRSAARFNIRAGKYRGSLPPWGYLPARVDGEWRLVPDPVQRERILEVYHRVVDNHEPLHLVAHDLNRRGVLSPKDYFAQLRGREPQGREWSATALKRSMTSVAMLGYATLNGKTVRDDDGAPLVRAEPILTREQQEALRAELAKTSRAKPAVSTPSLLLRVLFCAVCGEPAYKFVGGGRKHPRYRCRSMGFPEHCGNGTVVMAEWDAFCEEQVLNLLGDAERLEKVWVAGSDSAVELAEVSAELVDLTSLIGSPAYRAGSPQREALDARIAALAARQEELEGLEARPSGWGWRETGQRFGDWWREQDTAAKNTWLRSMNVRLTFDVRGGLTRTIDFGELQEYGQHLRLGSVVERLHTGTS

SEQ ID NO: 10309 - protein, 500 aa, synthetic construct
MRALVVIRLSRVTDATTSPERQLESCQQLCAQRGWDVVGVAEDLDVSGAVDPFDRKRRPNLARWLAFEEQPFDVIVAYRVDRLTRSVRHLQQLVHWAEDHKKLVVSATEAHFDTTTPFAAVVIALMGTVAQMELEAIKERNRSAAHFNIRAGKYRGSLPPWGYLPARVDGEWRLVPDPAQRERILEVYHRVVDNHEPLHLVAHDLNRRGVLSPKDYFAQLRGREPQGRRWSATALKRSMISEAMLGYATLNGKTVRGDDGAPLVRAEPILTREQQEALRAELVKTSRAKPAVSTPSLLLRVLFCAVCGKPAYKFAGGGRKHPRYRCRSMGFPKHCGNGTVVMAEWDAFCEEQVLDLLGDAERLEKVWVAGTDSAVELAEVNAELVDLTSLIGSPAYRAGSPQREALDARIAALAARQEELEGLGARPSGWEWRETGQRFGDWWREQNTAAKNTWLRSMNVRLTFDVRGGLTRTIDFGDLQEYEQHSRLASVVERLHTGMS

SEQ ID NO: 10310 - protein, 500 aa, synthetic construct
MRALVVIRLSRVTDTTTSPERQLESCQQLCAQRGWDVVGVAEDLDVSGAVDPFDRKRRPNLARWLAFEEQPFDAIVAYRVDRLTRSTRHLQQLVHWAEDHKKLVVSATEAHFDTTTPFAAVVIALMGTVAQMELEAIKERNRSAAHFNIRAGKYRGSLPPWGYLPTRVDGEWRLVPDPVQRERILEVYHRVVVNHEPLHLVAHDLNRRGVLSPKDYFAQLQGREPQGRKWSATALKRSMISEAMLGYATLNGKTVRDDDGAPLVRAEPILTRVQLEALRAELVKTSRAKPAVPTPSLLLRVLFCAVCGEPAYKFAGGGRKHPRYRCRSMGFPKHCGNGTVAMAEWDAFCEEQVLNLLGDAERLEKVWVAGSDSAVELAEVNAELVDLTSLIGSPAYRAGSPQREALDARIAALAARREELEGLGARPSGWEWRGTGQRFGDWWREQDTAAKNTWLRSMNVRLTFDIRGGLTRTIDFGDLREYEQHIRLGSVVERLHTGVS

SEQ ID NO: 10311 - protein, 500 aa, synthetic construct
MRALVAIRLSRVTEATTSPERQLASCQQLCAQRGWDVVGVAEDLDVSGAVDPFDRKRRPNLARWLAFEEQPFDVIVAYRVDRLTRSTRHLQQLVRWAEDHKKLVVSATEAHFDTTTPFAAVVIALMGTVAQMELEAIKERIRSAVHFNIRAGKYRGSLPPWGYLPTRVNGEWRLVPDPVQRERILEVYHRVVDNHEPLHLVAHDLNRRGVLSPKDYFAQLRGREPQGRKWSATALKRSMISGAMLGYATLNGKTVRDDDGAPLVRAEPILTREQLEALRTELVRTSRAKPAVSTPSLLLRVLFCAVCGEPAYKFAGGGRKHPRYRCRSMGFPKHCGNGTVVMTEWDAFCEEQVLNLLGDAERLEKVWVAGSDSAVELAEVNAELVDLTSLIGSPAYRAGSPQREALGARIAALAARQEELEGLEVRPSGWEWRETGQRFGDWWREQDTAAKNTWLRSMNVRLTFDVRGGLTRTIDFGDLQEYEQRLRLGSVAERLHTGVS

SEQ ID NO: 10312 - protein, 500 aa, synthetic construct
MRALVVIRLSRVTDATTSPERQLESCQQLCAQRGWDVVGVAEDLDVSGAVDPFDRKRRPNLARWLAFEEQPFDVIVAYRVDRLTRSVRHLQQLVHWAEDHKKLVVSATEAHFDTTTPFAAVVIALMGTVAQMELEAIKERNRSAAHFNIRAGKYRGSLPPWGYLPTRVDGEWRLVPDPVQRERILEVYHRVVDNHEPLHLVAHDLNRRGVLSPKDYFAQLQGREPQGRKWSATALKRSMISEAMLGYATLNGGTVRDDDGAPVVRAEPILTRVQLEALRAELVKTSRAKPAVSTPSLLLRVLFCGVCGEPAYKFAGGGRKHPRYRCRSMGFPKHCGNGTVVMAEWDAFCEEQVLDLLGDVERLEKVWVAGSDSAVELAEVNAELVDLTSLIGSPAYRAGSPQREALDARIAALAARQEELEGLKARPSGWERRGTGQRFGDWWHEQDTAAKNTWLRSMNVRLTFDVRGGLTRTIDFGDLQEYEQHLRLGSVVERLHAGMS

SEQ ID NO: 10313 - protein, 500 aa, synthetic construct
MRALVVIRLSRVTDATTSPERQLESCQQLCAQRGWDVVGVAEDLDVSGAVDPFDRKRRPNLARWLAFEEQPFDVIVAYRVDRLTRSTRHLQQLVRWAEDHKKLVVSATEAHFDTTTPFAAVVIALMGTVAQMELEAIKERIRSAVRFNIRAGKYRGSLPPWGYLPARVDGEWRLVPDPVQRERILEVYRRVVDNHEPLHLVAYDLNRRGVLSPKDYFAQLQGREPQGRKWSATALKRSMISGAMLGYATLNGKTVRGGDGAPLVRAEPILTREQQEALRAELAKTSRAKPAVSTPSLLLRVLFCAVCGEPAYKFVGGGRKHPRYRCRSIGLPKHCGNGTVAMVEWDAFCEEQVLNLLGDAERLEKVWIAGSDSAVELAEVNAELVDLMSLIGSPAYRAGTPQREALDARIAALAARQEELEGLEARPSGWEWRGTGQRFGDWWREQDTAAKNAWLRSMNVRLTFDVRGGLTRTIDFGELQEYEQHLRLGSVAERLHTGMS

SEQ ID NO: 10314 - protein, 500 aa, synthetic construct
MRALIVIRLSRVTDATTSPERQLESCQQLCARRGWDVVGVAEDLDVSGAVDPFDRKRRPNLARWLAFGEQPFDVIVAYRVDRLTRSVRHLQQLVHWAEDHKKLVVSATEAHFDTTTPFAAVVIALMGTVAQMELEAIKERNRSAAHFNIRAGKYRGSLPPWGYLPTRVDGEWRLVPDPVQRERILEVYHRVVDNHEPLHLVAHDLNRRGVLSPKDYFAQLRGREPQGRKWSATALKRSMISEAMLGYATLNGKTVRDDDGAPLVRAEPILTREQLEALRAELAKTSRAKPAVSTPSLLLRVLFCAVCGEPAYKYAGGGRKHPRYRCRSMGFPKHCGNGTVVMAEWDAFCEEQVLDLLGDAERLEKVWVAGSDSAVELAEVNAELVDLTSLIGSPAYRAGSPQREALDARIAALAARREELEGLEARPSGWEWRETGQRFGDWWREQDTAAKNTWLRSMNVRLTFDARGGLTRTIDFGDPQEYEQQLRLGSVVERLHTGMS

SEQ ID NO: 10315 - protein, 500 aa, synthetic construct
MRALIVIRLSRVTDATTSPERQLESCQQLCAQRGWDVVGVAEDLDVSGAVDPFDRKRRPNLARWLAFEEQPFDAIVAYRVDRLTRSVRHLQQLVHWAEDHKKLIVSATEAHFDTTTPFAAVVIALMGTVAQMELEAIKERNRSAAHFNIRAGKYRGSLPPWGYLPTRVDGEWRLVPDPVQRERILEVYHRVVDDHEPLHLVAHDLNRRGVLSPKDYFAQLHGREPQGRKWSATALKRSMISEAMLGHATLNGKTVRDDDGAPLVRAEPILTRVQLEALRAELVKTSRAKPAVSTPSLLLRVLFCAVCGEPAYKFAGGGRKHPRYRCRSMGFPKHCGNGTVAMAEWDAFCEEQVLNLLGDAERLEKVWVAGSDSAVELAEVNAELVDLTSLIGSPAYRAGSPQREALDARIAALAARQKELEGLRARPSGWEWRETGQRFGDWWREQGTAAKNAWLRSMNVRLTFDARGGLTRTIGFGDLQEYEQHLRLGSVVERLHTGMS

SEQ ID NO: 10316 - protein, 500 aa, synthetic construct
MRALVVIRLSRVTDATTSPERQLESCQQLCAQRGWDVVGVAEDLDVSGAVDPFDRKRRPNLARWLAFEEQPFDVIVAYRVDRLTRSTRHLQQLVHWAEDHKKLVVSATEAHFDTTTPFAAVVIALMGTVAQMELEAIKERNRSAAHFNIRAGKYRGSLPPWGYLPTRVDGEWRLVPDPVQRERILEVYHRVVDNHEPLHWVAHDLNRRGVLSPKDYFAQLRGREPQGREWSATALKRSMTSEAMLGYATLNGKTVRDDDGAPLVRAEPILTRGQLEALRAELVKTSRAKPAVSTPSLLLRVLFCAVCGEPAYKFAGGGRKHPRYRCRSMGFPKHCGNGTVVMAEWDAFCEEQVLDLLGDAERLEKVWVAGSDSAVELAEVNAELVDLTSLIGSPAYRAGSPQREALDARIAVLAARQEELEGLEARPSGWEWRETGQRFGDWWREQDTAAKNTWLRSMNVRLTFDVHGGLTRTIDFGDLQEYEQHLRLGSVVERLHTGMS

SEQ ID NO: 10317 - protein, 500 aa, synthetic construct
MRALVVIRLSRVTDATTSPERQLESCQQLCAQRGWDVAGVAEDLDVSGAVDPFDRKRRPNLARWLAFEEQPFDVIVAYRVDRLTRSTRHLQQLVHWAEDHKKLVVSATEAHFDTTTPFAAVVIALMGTVAQMELEAIKERIRSAAHFNIRAGKYRGSLPPWGYLPARVDGVWRLVPDPVQRERILEVYHRVVDDHEPLHLVAHDLNRRGVLSPKDYFAQLRGREPQGRKWSATALKRSMISVAMLGYAILNGKIVRDDDGAPLVRAEPILTREQQEALRAELAKTSRATPAVSTPSLLLRVLFCAVCGEPAYKFVGGGRKHPRYRCRSMGLPEHCGNGTVVMAEWDAFCEEQVLDLLGDAERLEKVWVAGSDSAVELAEVNAELVDLTSLIGSPAYRAGSPQREALDVRIAALAARQEELEGLEARPPGWEWRGTGQRFGDWWREQDTAAKNTWLRSMNVRLTFDARGGLTRTIDFGNLQEYVQHLRLGSVDDRLHTGMS

SEQ ID NO: 10318 - protein, 500 aa, synthetic construct
MRALVVIRLSRVTDATTSPERQLESCQQLCAQRGWDVVGVAEDLDVSGAVDPFDRKRRPNLARWLAFEEQPFDVIVAYRVDRLTRSVRHLQQLVHWAEDHKKLVVSATEAHFDTTTPFAAVVIALMGTVAQMELEAIKERIRSAAHFNIRAGKYRGSLPPWGYLPTRVDGEWRLVPDPVQRERILEVYHRVVDNHEPLHLVAYDLNRRGVLSPKDYFAQLRGREPRGRKWSATALRRSMTSVAMLGYATLNGKTVRDDDGAPLVRAEPILTREQLEALRAVLVKTSRARPAVSTPSLLLRVLFCAVCGEPAYKFVGGGRKHPRYRCRSMGSPKHCGNGTVVMTEWDAFCEEQVLDLLGDTERLEKVWVAGSDSAVELAEVNAELVDLTSLIGSPAYRAGSPQREALDARIAALAARQEELEGLEARPSGWEWRETGQRFGDWWREQDTAAKNTWLRSMNVRLTFDVRGGLTRTIDFGDLQEYERHLRLGSVAERLRTGVS

SEQ ID NO: 10319 - protein, 500 aa, synthetic construct
MRALVVIRLSRVTDATTSPERQLESCQQLCAQRGWDVVGVAEDLDVSGAVDPFDRKRRPNLARWLAFEEQPFDVIVAYRVDRLTRSTRHLQQLVHWAEDHKKLVVSATEAHFDTTTPFAAVVIALMGTVAQMELEAIKERNRSAAHFNIRAGKYRGSLPPWGYLPTRVDGEWRLVPDPVQRERILEVYHRVVDNHEPLHLVAHDLNRRGVLSPKDYFAQLQGREPQGRKWSATALKRSMTSEAMLGYATLNGKTVRDDDGAPLVRAEPILTREQLEALRAELVKTSRAKPAVSTPSLLLRVLFCAVCGEPAYKFAGGGRKHPRYRCRSMGFPKHCGNGTVVMAEWDAFCEEQVLGLLGDAERLEKVWVVGSDSVVELAEVNAELVDLMSLIGSPAYRAGSPQREALDARIAALAARQEELEGLEARPSGWEWRETGQRFGDWWREQDTAAKNTWLRSMNVRLTFDVRGGLTRTIDFGDLQEYEQHLRLGGVVGRLHTGTS

SEQ ID NO: 10320 - protein, 500 aa, synthetic construct
MRVLVVIRLSRVTDATTSPERQLESCQQLCTQRGWDVVGVAEDLDVSGAVDPFDRKRRPNLARWLAFEEQPFDVIVAYRVDRLTRSTRHLQQLVHWAEDHKKLVVSATEAHFDTTTPFAAVVIALMGTVAQMELEAIKERNRSAAHFNIRAGKYRGSLPPWGYLPTRVDGEWRLVPDPVQRKRILEVYHRVVDNHEPLHLVAHDLNRRGVLSPKDYFAQLQGREPQGRKWSATALKRSMISEAMLGYATLNGKTVRDDDGAPLVRAEPILTREQLEALRAELVKTSRAKPAVSTPSLLLRVLFCAVCGEPAYKFAGGGRKHPRYRCRSMGFPKHCGNGTVVMAEWDAFCEEQVLDLLGDAERLEKVWVAGSDSAVELAEVNAELVDLTSLIGSPAYRASSPQREALDARIAALAARQEELEGLGARPSGWEWRETGQRFGDWWREQDTAVKNTWLRSMNVRLTFDVRGGLTRTIDFGDLQEYEQHLRLGSVVERLHTGMS

SEQ ID NO: 10321 - protein, 500 aa, synthetic construct
MRALVVIRLSRVTDATTSPERQLESCQQLCAQRGWRVVGVAEDLDVSGAVDPFDRKRRPNLARWLAFEELPFDVIVAYRVDRLTRSIRHLQQLVHWAEDHKKLVVSATEAHFDTTTPFAAVVVALMGTVAQMELEAIKERIRSAVRFNIRAGKYRGSLPPWGYLPTRVDGEWRLVPDPVQRERILEVYHRVVDNHEPLHLVAHDLNRRGVLSPKDYFAQLRGREPQGREWSATALKRSMTSVAMLGYATLNGKIVRDDDGAPLVRAEPILTREQQEALRAELAKTSRAKPAVSTPSLLLRVLFCAVCGEPAYKFVGGGRKHPRYRCRSMGFPEHCGNGTVVMAEWDAFCEEQVLGLLGDAERLEKVWVAGSDSAVELAEVNAELVDLTSLIGSPAYRAGSPQREALDARIAALAARQEELEGLEARPSGWGWRETGQRFGDWWREQDTAAKNTWLRLMNVRLTFDVRGGLTRTIDFGDLQGYEQHLRLGSVVERLHTGMS

SEQ ID NO: 10322 - protein, 500 aa, synthetic construct
MRALVVIRLSRVTDATTSPERQLESCQQLCAQRGWDVVGVAEDLDVSGAVDPFDRKRRPNLARWLAFEEQPFDVIVAYRVDRLTRSTRHLQRLVRWAEDHKKLVVSATEAHFDTTTPFAAVVIALMGTVAQMELEAIKERIRSAAHFNIRAGKYRGSLPPWGYLPTRVDGEWRLVPDPVQRERILEVYHRVVGNHEPLHLVAHDLNRRGVLSPKDYFAQLQGREPQGRKWSATALKRSMISKAMLGYATLNGKIVRDDDGAPLVRAEPILTREQLEALRAELAKTSRAKPAVSTPSLLLRVLFCAVCGEPAYKFVGGGRKHPRYRCRSMGFPKHCGNGTVAMAEWDAFCEEQVLNLLGDAERLEKVWVAGSDSAVELAEVNAELVDLTSLIGSPAYRAGSPQREALDARIAALAARQEELEGLEARPSGWEWRETGQRFGDWWREQDTAAKNTWLRAMNVRLTFDVRGGLTRTIDFGDLREYEQHLRLGSAAERLHTGMS

SEQ ID NO: 10323 - protein, 500 aa, synthetic construct
MRALVVIRLSRVTDATTSPERQLESCQQLCAQRGWDVVGVAEDLDVSGAVDPFDRKRRPNLARWLAFEEQPFDVIVAYRVDRLTRSTRHLQQLVRWAEDHKKLVVSATEAHFDTTTPFAAVVIALMGTVAQMELEAIKERSRSAAHFNIRAGKYRGSLPPWGYLPTRVDGEWRLVPDPVQRERILEVYHRVVANHEPLHLVAYDLNQRGVLSPKDYFAQLQGREPQGRKWSATALKRSMISVAMLGYATLSGKIVRDDDGAPLVRAEPILTREQQEALRAELAKTSRAKPAVSTPSLLLRVLFCAVCGEPAYKFVGGGRRHPRYRCRSTGSPKHCGNGTVVTAEWDAFCEEQVLGLLGDAERLEKVWVAGSDSTVELAEVNAELVDLTSLIGSPAYRAGSPQREALDARIAVLAARQEELEGLEARPSGWEWRGTGQRFVDWWREQDTAAKNTWLRSMNVRLTFDVRGGLTRTIDFGELQEYEQHLRLGSAVERLHTGMP

SEQ ID NO: 10324 - protein, 500 aa, synthetic construct
MRALVVIRLSRVTDATTSPERQLKSCQQLCAQRGWDVAGVAEDLDVSGAVDPFDRKRRPNLARWLAFEERPFDVIVAYRVDRLTRSTRHLQQLVRWAEDHKKLVVSATEAHFDTTTPFAAVVIALMGTVAQMELEAIKERIRSAVHFNIRAGKYRGSLPPWGYLPTRVDGEWRLVPDPVQRERILEVYHRVVDNHEPLHLVAYDLNRRGVLSPKDYFAQLQGREPQGREWSATALKRSMTSEAMLGYATLNGRIVRDDDGAPLVRAEPILTREQLEAFRAELAKTSRAKPAVSTPSLLLRVLFCAVCGEPAYKFAGGGRKHPRYRCRSMGFPKHCGNGTVVMAEWDVFCEEQVLDLLGDAERLEKVWVAGSDSAVELAEVNAELIDLTSLIGSPAYRAGSPQREALDARIAALAARQEELEGLEARPSGWEWRGTGQRFGDWWREQDTAAKNTWLRSMNVRLTFDVRGGLTRTIDFGDLQEYGQHLRLGSAVERLHTGMS

SEQ ID NO: 10325 - protein, 500 aa, synthetic construct
MRTLVVIRLSRVTDATTSPERQLESCQQLCAQRGWDVVGVAEDLDVSGAVDPFDRKRRPNLARWLAFEEQPFDVIVAYRVDRLTRSVRHLQQLVHWAEDHKKLVVSATEAHFDTTTPFAAVVIALMGTVAQMELEAIKERNRSAAHFNIRAGKYRGSLPPWGYLPTRVDGEWRLVPDPVQRERILEVYHRVVDNHESLHLVAHDLNRRGVLSPKDYFAQLRGREPQGREWSATALKRSMVSVAMLGYATLNGKIVRGDDGAPLVRAEPILTREQLEVLRAELVKTSRAKPAVSTPSLLLRVLFCAVCGEPAYKFAGGGRKHPRYRCRSMGFPKHCGNGTVVMAEWDAFCEEQVLDLLGDAERLEKVWVAGSDSAVELAEVNAELVDLTSLIGSPAYRAGSPQREALDACIAALAARQEELESLEARPSGWEWRETGQRFGDWWREQDTAAKNTWLRSMNVRLTFDVRGGLTRTIDFGDLQEYKQHLRLGSAVERLHTGMS

SEQ ID NO: 10326 - protein, 500 aa, synthetic construct
MRALVVIRLSRVTDATTSPERQLESCQRLCAQRGWDVVGVAEDLDVSGAVDPFDRKRRPNLARWLAFEEQPFDVIVAYRVDRLTRSTRHLQQLVHWAEDHKKLVVSATEAHFDTTTPFAAVVIALMGTVAQMELEAIKERIRSATHFNIRAGKYRGSLPPWGYLPTRVDGEWRLVPDLVQRERILEVYHRVVDNHEPLHLVAHDLNRRGVLSPKDYFAQLQGREPQGRKWSATALKRSMTSGAMLGYATLNGKTVRGDDGAPLVRAEPILTREQQGALRAELAKTSRAKPAVSTPSLLLRVLFCAVCGEPAYKFVGGGRKHPRYRCRSMGFPKHCGNGTVVMAEWDAFCEEQVLDLLGDAERLEKVWVAGSDSAVELAEVNAELVDLTSLIGSPAYRAGSPQREALDARIAALAARQGELEGLEARPSGWEWRETGQRLGDWWREQDTAAKNTWLRSMNVRLTFDVRGGLTRTIDFGDLQEYEQHLRLGSVVERLHTGMS

SEQ ID NO: 10327 - protein, 500 aa, synthetic construct
MRALVVIRLSRVTDATTSPERQLESCQQLCAQRGWDVVGVAEDLGVSGAVDPFDRKRRPNLARWLAFEEQPFDVIVAYRVDRLTRSTRHLQQLVHWAEDHKKLVVSATEAHFDTTTPFAAVVIALMGTVAQMELEAIKERIRSAVRFNIRAGKYRGSLPPWGYLPTRVDGEWRLVPDPVQRERILEVYRRVVGNHEPLHLVAHDLNRRGVLSPKDYFAQLRGREPQGRKWSATALRRSMTSEAMLGYATLNGKTVRDDDGAPLVRAEPILTREQQEALRAELVRTSRAKPAVSTPSLLLRVLFCAVCGEPAYKFVGGGRKHPRYRCRSMGFPEHCGNGTVVMTEWDAFCEEQVLDLLGDAERLEKVWVAGSDSAVELAEVNAELVDLTSLIGSTAYRVGSPQREALDARIAALAARQEELEGLEARPSGWEWRGTGQRFGDWWREQDTAARNTWLRSMNVRLAFDVRGGLTRTIDFGDLQEYEQHLRLGSVVERLHAGVS

SEQ ID NO: 10328 - protein, 500 aa, synthetic construct
MRALVVIRLSRVTDATTSPGRQLESCQQLCAQRGWDVVGVAEDLDVSGAVDPFDRKRRPNLARWLAFEEQPFDVIVAYRVDRLTRSTRHLQQLVRWAEDHKKLVVSATEAHFDTTTPFAAVVIALMGTVAQMELEAIKERIRSAAHFNIRAGKYRGSLPPWGYLPTRVDGEWRLVPDPVQRERILEVYRRVVDNHEPLHLVAHDLNRRGVLSPKDYFAQLRGREPQGRKWSATALRRSMISGAMLGYATLNGKTVRDDDGAPLVRAEPILTRVQLEALRAELAKTSRAKPAVSTPSLLLRVLFCAVCGEPAYKFVGGGRKHPRYRCRSMGFPKHCGNGTVVMAEWDAFCEERVLDLLGDAERLEKVWVAGSDSAVELAEVNAELVDLTSLIGSPAYRAGSPQREALDARIAALAARQEELEGLEARPSGWEWRETGQRFGDWWREQDTAAKNTWLRSMNVRLTFDVRGGLTRAIDFGDLQEYEQHLRLGSVVERLRTGMS

SEQ ID NO: 10329 - protein, 500 aa, synthetic construct
MRALVVIRLSRVTDATTSPERQLESCQQLCAQRGWGVVGVAEDLDVSGVVDPFDRKRRPNLARWLAFEEQPFDAIVAYRVDRLTRSVRHLQQLVHWAEDHKKLVVSATEAHFDTTTPFAAVVIALMGTVAQMELEAIKERNRSAAHFNIRAGKYRGSLPPWGYLPTRVDGEWRLVPDPVQRERILEVYHRVVDNHEPLHLVAHDLNRRGVLSPKDYFAQLRGREPQGRKWSATALKRSIISEAMLGYATLNGKTVRDDDGAPLVRAEPILTREQLEALRAELVKTSRAKPAVSTPSLLLRVLFCAVCGEPAYKFAGGGRKHPRYRCRSMGFPKHCGNGTVAMAEWDAFCEEQVLDLLGDAERLEKVWVAGSDSAVELAEVNAELVELTSLIGSPAYRAGSPQREALDARIVALATRQEELEGLKARPSGWEWRETGQRFGDWWREQDTAAKNTWLRSMNVRLTFDVRGGLTRTIDFGDLQEYEQHLRLGSVVERLHAGMS

SEQ ID NO: 10330 - protein, 500 aa, synthetic construct
MRALVVIRLSRVTDATTSPERQLESCQQLCAQRGWNVVGVAEDLDVSGAVDPFDRKRRPNLARWLAFEEQPFDVIVAYRVDRLTRSTRHLQQLVHWAEDHKKLVVSATEAHFDTSTPFAAVVIALMGTVAQMELEAIKERIRSAVRFNIRAGKYRGSLPPWGYLPTRVDGEWRLVPDPVQRERILEVYRRVVDNHEPLHLVAHDLNRRGVLSPKDYFAQLQGREPQGRKWSATALKRSMTSVAMLGYATLNGKTVRDDDGAPLVRAEPILTREQLEALRAELVKTSRAKPAVSTPSLLLRVLFCAVCGEPAYKFAGGGRKHPRYRCRSMRFPEHCGNGTVVMAEWDAFCEEQVLDLLGDAERLEKVWVAGSDSAVELVEVNAELVDLTSLIGSPAYRVGSPQREALDARIAALAARQEELESLEARPSGWEWCATGQRFGDWWRAQDTAAKNTWLRSMNVRLTFDVRGGLTRTIDFGELREYEQHLRLGSVVERLHTGMS

SEQ ID NO: 10331 - protein, 500 aa, synthetic construct
MRALVVIRLSRVTDATTSPERQLESCQQLCAQRGWDVVGVAEDLDVSGAVDPFDRKRRPNLARWLAFEEQPFDVIVAYRVDRLTRSTRHLQQLVHWAEDHKKLVVSATEAHFDTTTPFAAVVIALMGTVAQMELEAIKERNRSAAHFNIRAGKYRGSLPPWGYLPTRVDGGWRLVPDPVQRERILEVYHRVVDDHEPLHLVAHDLNRRGILSPKDYFAQLQGREPQGRKWSATALKRSMISEAMLGYATLNGKTVRDDDGAPLVRAEPILTRVQLEALRAELVKTPRAKPAVSTPSLLLRVLFCAVCGEPAYKFAWGGRKHPRYRCRSMGFPKHCGNGTVAMAEWDAFCEEQVLNLLGDAKRLEKVWVTGSDSAVELAEVNAELVDLTSLIGSPAYRAGSPQREALDARIAALAARQEELEGLEARPSGWEWRETGQRFGDWWREQDTAAKNTWLRSMNVRLTFDVRGGLTRTIDFGDLQEYEQHLRLGSVVERLHTGMS

SEQ ID NO: 10332 - protein, 500 aa, synthetic construct
MRALVVIRLSRVTDATTSPERQLESCQQLCAQRGWDVVGVAEDLDVSGAVDPFDRKRRPNLARWLAFGEQPFDVIVAYRVDRLTRSVRHLQQLVHWAEDHKKLVVSATEAHFDTTTPFAAVVIALMGTVAQMELEAIKERNRSAAHFNIRAGKYRGSLPPWGYLPTRVDGEWRLVPDPVQRERILEVYHRVVDNHEPLHWVAHDLNRRGVLSPKDYFAQLQGREPQGRKWSATALKRSMTSEAMLGYATLNGKTVRDDDGAPLVRAEPILAREQLEALRAELVKTSRAKPAVSTPSLLLRVLFCAVCGKPAYKFAGGGRKHPRYRCRSMGFPKHCGNGTVVMAEWDTFCEKQVLDLLGDAERLEKVWVAGSDSAVELAEVNAELVDLTSLIGSPAYRAGSPQREALDARIAALAARQGELEGLEARPSGWEWRETGQRFRDWWREQDTAAKNTWLRSMNVRLTFDVRGGLTRTIDFGDLREYEQHLRLGSVVERLHTGMS

SEQ ID NO: 10333 - protein, 500 aa, synthetic construct
MRALVVIRLSRVTDATTSPERQLESCQQLCAQRGWDVVGVAEDLDVSGAVNPFDRKRRPNLARWLAFEEQPFDVIVAYRVDRLTRSTRHLQQLVRWAEDHKKLVVSATEAHFDTTTPFAAVVIALMGTVAQMELEAIKERIRSAAHFNIRAGKYRGSLPPWGYLPTRVDGEWRLAPDPVQRERILEVYHRVVVNHEPLHLVAHDLNRRGVLSPKDYFAQLRGREPQGRKWSATALKRSMTSEAMLGYATLNGKVVRDDDGAPLVRAEPILTREQQEALRAELAKTSRAKPAVSTPSLLLRVLFCAVCGEPAYKFVGGGRKHPRYRCRSMGFPKHCGNGTVVVAEWDAFCEEQVLNLLGDAERLEKVWVAGSDSAVELAEVNAELMDLTSLIGSPAYRAGSPQREALDARIAALAARQEELEGLEARPPGWEWRETGQRFGDWWREQDTAAKNTWLRSMNVRLTFDVRGGLTRTIDFGDLQEYVQQLRSGSVVERLHTGMS

SEQ ID NO: 10334 - protein, 500 aa, synthetic construct
MRALVVIRLSRVTDATTSPERQLESCQQLCAQRGWDVVGVAEDLDVSGAVDPFDRKRRPNLARWLAFEEQPFDVVVAYRVDRLTRSVRHLQQLVHWAEDHKKLVVSATEAHFDTTTPFAAVVIALMGTVAQMELEAIKERNRSAAHFNIRAGKYRGSLPPWGYLPTRVDGEWRLVPDPVQRERILEVYHRVVDDHEPLHWVAHDLNRRGVLSPKDYFAQLQGREPQGRKWSATALKRSIISEAMLGYATLNGKTVRDDDGAPLVRAEPILTREQLEAVRAELVKTSRAKPAVSTPSLLLRVLFCAVCGEPAYKFAGGGRKHPRYRCRSMGFPKHCGNGTVVMAEWDAFCEEQVLDLLGDAERLEKVWVAGSDSAVELAEVNAELVDLTSLIGSPAYRAGSPQHEALDARIAALAARQEELEGLEARPSGWEWRETGQRFGDWWREQDTAAKNTWLRSMNVRLTFDVRGGLTRTIDLGDLQEYEQHLRLGSVAERLHTGMS

SEQ ID NO: 10335 - protein, 500 aa, synthetic construct
MRALIVIRLSRVTDATTSPERQLESCQQLCAQRGWDVVGVAEDLDVSGAVDPFDRKRRPNLARWLAFEEQPFDAIVAYRVDRLTRSVRHLQQLVHWAEDHKKLVVSATEAHFDTTTPFAAVVIALMGTVAQMELEAIKERNRSAAHFNIRAGKYRGSLPPWGYLPTRVDGEWRLVPDPVQRERILEVYHRVVDNHEPLHWVAHDLNRRGVLSPKDYFAQLQGREPQGRKWSATALKRSMISEAMLGYATLNGKTVRDDDGAPLVRAEPILTREQLEALRAELVRTSRAKPAVSTPSLLLRVLFCAVCGEPAYKFAGGGRKHPRYRCHSMGFPKHCGNGTVAMAEWDSFCEEQVLGLLGDAERLEKVWVAGSDSAVELAEVSAELVDLTSLIGSPAYRAGSPQREALDARIAALVARQEELEGLEARPSGWEWRGTGQRFGDWWREQDTAAKNAWLRSMNVRLTFDVRGGLTRAIDFGGLQEYEQHLRLGSVVERLHTGMS

SEQ ID NO: 10336 - protein, 500 aa, synthetic construct
MRALVVIRLSRVTEATTSPERQLESCQQLCAQRGWDVVGVAEDLDVSGAVDPFDRKRRPNLARWLAFEEQPFDVIVAYRVDRLTRSIRHLQQLVRWAEDHKKLVVSATEAHFDTTTPFAAVVIALMGTVAQMELEAIKERIRSAAHFNIRAGKYRGSLPPWGYLPTRVDGEWRLVPDPVQRERILEVYHRVVDNHEPLHLVAYDLNRRGVLSPKDYFAQLQGREPQGRKWSATALKRSMISVAMLGYATLNGKIVRDDDGAPLVRAEPILTRGQQEALRAELAKTSRAKPAVSTPSLLLRVLFCAVCGEPAYKFVGGGRKHPRYRCRSMGFPEHCGNGTVVMAEWDAFCEGQVLNLLGDVERLERVWVAGSDSAVELAEVNAELVDLTSLIGSPAYRAGSPQREALDARIAALAARQGELEGLEARPSGWEWRETGQRFGDWWREQDTAAKNTWLRSMNVRLTFDVRGGLTRTIDFGDLQEYEQHLRSGSVVKRLHTGTS

SEQ ID NO: 10337 - protein, 500 aa, synthetic construct
MRALVVIRLSRVTDATTSPERQLESCQQLCAQRGWNVVGVAEDLDVSGAVDPFDHKRRPNLARWLAFEEQPFDVIVAYRVDRLTRSTRHLQQLVRWAEDHKKLVVSATEAHFDTTTPFAAVVIALMGTVAQMELEAIKERIRSAVRFNIRAGKYRGSLPPWGYLPARVDGEWRLVPDPVQRERILEVYHRVVDNHEPLHLVAHDLNRRGILSPKDYFAQLQGREPQGRKWSATALRRSMTSVAMLGYATLNGKTVRDDDGTPLVRAEPILTREQLEALRAELVKTSRAKPAVSTPSLLLRVLFCAVCGEPAYKFTGGGRKHPRYRCRSMGSPKHCGNGTVVMAEWDAFCEEQVLNLLGDAERLEKVWVAGSDSAVELAEVNAELADLTSLIGSPAYRAGSPQREALDARIAALAARQEELEGLEARPSGWEWRETGQRFGDWWREQDTAAKNTWLRSMNVRLTFDVRGGLTRTVDLGDLQEYEQRLRLGSVVERSHAGMS

SEQ ID NO: 10338 - protein, 500 aa, synthetic construct
MRALVVIRLSRVTDATTSPERQLASCQQLCAQRGWDVVGVAEDLDVSGAVDPFDRKRRPNLARWLAFEEQPFDVIVAYRVDRLTRSTRHLQQLVRWAEDHKKLVVSATEAHFDTTTPFAAVVIALMGTVAQMELEAIKERIRSAAHFNIRAGKYRGSLPPWGYLPARVDGEWRLVPDPVQRERILEVYHRVVDNHEPLHLVAHDLNRRGVLSPKDYFALLQGREPQGRKWSATALKRSMISEAMLGYATLNGKTVRGDDGVPLVRAEPILTREQQEALRAELVKTSRAKPAVSTPSLLLRVLFCAVCGEPAYKFVGGGRKHPRYRCRSMGFPEHCGNGTVVMAGWDAFCEEQVLNLLGDVERLEKVWVAGSDSAVELAEVNAELMDLTSLIGSPAYRVGSPQREALDARIAALAARQEELEGLEARPSGWEWRGTGQRLGDWWREQDTAAKNTWLRSMNVRLTFDVRGGLTRTIDFGDLQEYEQHLRLGSVVERIHTGMS

SEQ ID NO: 10339 - protein, 500 aa, synthetic construct
MRALVVIRLSRVTDATTSPERQLESCQQLCAQRGWDVVGVAEDLDVSGAVDPFDHKRRPNLARWLAFEEQPFDVIVAYRVDRLTRSTRHLQQLVHWAEDHKKLVVSATEAHFDTTTPFAAVVIALMGTVAQMELEAIKERIRSAAHFNIRAGKYRGSLPPWGYLPTRVDGEWRLVPDPVQRERILEVYHRVVDNHEPLHLVAHDLNRRGVLSPKDYFAQLQGREPQGRKWSATALKRSMISGAMLGYATLNGKTVRDDVGAPLVRAEPILTREQQEALRAELAKTSRAKPAVSTPSLLLRVLFCAVCGEPAYKFVGGGRKHPRYRCRSTGFPEHCGNGTVVMAEWDAFCEEQVLNLLGDAERLERVWVAGSDSAVELAEVNAELVDLTSLIGSPAYRAGSPQREALDARIAALAARQEELEGLEARPPGWEWRETGQRFGDWWREQDTAAKNTWLRSMNVRLTFDVRGGLTRTIDFGDLQEYEQHLRLGSVTERLHTGMP

SEQ ID NO: 10340 - protein, 500 aa, synthetic construct
MRALVVIRLSRVTDATTSPERQLESCQQLCAQRGWVVVGVAEDLDVSGAVDPFDRKRRPNLARWLAFEEQPFDVIVAYRVDRLTRSTRHLQQLVHWAEDHKKLVVSATEAHFDTTTPFAAVVIALMGTVAQMELEAIKERNRSAAHFNIRAGKYRGSLPPWGYLPTRVDGEWRLVPDPVQRERILEVYHRVVDNHEPLHLVAHDLNRRGVLSPKDYFAQLRGREPQGRKWSATALKRSMISEAMLGYATLNGKTVRDDDGAPLVRAEPILTREQLEALRAELVKASRAKPAVSTPSLLLRVLFCAVCGEPAYKFAGGGRKHPRYRCRSMGFPKHCGNGTVAMAEWDAFCEEQVLDLLGDAERLEKVWVAGSDSAVELAEVIAGLVDLTSLIGSPAYRAGSPQREALDARIAALAARQEELEGLEARPSGWEWRETGQRFGDWWREQDTAAKNTWLRSMNVRLTFDVRGGLTRTIDFGDLQEYEQHLRSGSVVERLHTGTS

SEQ ID NO: 10341 - protein, 500 aa, synthetic construct
MRALVVIRLSRVTDATTSPERQLESCQQLCAQRGWDVVGVAEDLDVSGAVDPFDRKRRPNLARWLAFEEQPFDVIVAYRVDRLTRSTRHLQQLVRWAEDHKKLVVSATEAHFDTTTPFAAVVIALMGTVAQMELEAIKERIRSAAHFNIRAGKYRGSLPPWGYLPTRVDGEWRLVPDPVQRERILEVYHRVVDNHEPLHLVAYDLNRRGVLSPKDYFAQLRGREPRGRKWSATALRRSMISVAMLGYATLNGKIVRDDDGAPLVRAEPILTREQQEALRAELAKTSRAKPAVSTPSLLLRVLFCAVCGEPAYKFVGGGRKHPRYRCRSMGFPEHCGNATVVMTEWDAFCEEQVLDLLGDAERLEKVWLAGSDSAVELAEVNAELVDLTSLIGSPAYRAGSPQREALDARIAALAARQEELEGLGARPSGWGWRGTGQRFRDWWREQDTAAKNTWLRSMNVRLTFDVRGGLTRTIDFGDLQEYEQHLRLGSVVERLHTGMS

SEQ ID NO: 10342 - protein, 500 aa, synthetic construct
MRALVVIRLSRVTDATTSPERQLESCQQLCAQRGWDVVGVAEDLDVSGAVDPFDRKRRPNLARWLAFEEQPFDVIVAYRVDRLTRSVRHLQQLVHWAEDHKKLVVSATEAHFDTTTPFAAVVIALMGTVAQMELEAIKERIRSAAHFNIRAGKYRGSLPPWGYLPTRVDGEWRLMPDPVQRERILEVYHRVVDNHEPLHLVAHDLNRRGVLSPKDYFAQLRGREPQGRKWSATALRRSMTSEAMLGYATLNGKTVRGDDGVPLVRAEPILTREQQEALRAELAKTSRAKPAVSTPSLLLRVLFCAVCGGPAYKFVGGGRKHPRYRCRSMGFPKHCGNGTVVMAEWDAFCEERVLDLLGDTECLEKVWVAGSDSAVELAEVNAELVDLTSLISSPAYRAGSPQREALDARIAALAARQEELEGLEARPSGWEWRGTGQRFGDWWREQDTAAKNTWLRSMNVRLTFDVRGGLTRTIDFGELQEYEQHLRLGSVAERLHAGMS

SEQ ID NO: 10343 - protein, 500 aa, synthetic construct
MRALVVIRLSRVTDATTSPERQLESCQQLCAQRGWDVVGVAEDLDVSGAVNPFDRKRRPNLARWLAFEEQPFDVIVAYRVDRLTRSTRHLQQLVRWAEDHKKLVASATEAHFDTTTPFAAVVIALMGTVAQMELEAIRERIRSAAHFNIRAGKYRGSLPPWGYLPTRVDGEWRLVPDPVQRERILEVYHRVVDNHEPLHLVAHDLNRRGVLSPKDYFAQLRGREPRGRKWSATALKRSMLSVAMLGYATLNGKTVRGDDGAPLVRAEPILTREQLEALRAELAKTSRAKPAVSTPSLLLRVLFCAVCGEPAYKFAGGGRKHPRYRCRSMGLPKHCGNGTVVMAEWDAFCEEQVLGLLGDAVRLEKVWVAGSDSSVELAEVNAELVDLTGLIGSPAYRAGSPQREALDARIAALAARQEELEGLEARPSGWEWRETGQRFGDWWREQDTTAKNTWLRSMNVRLTFDVRGGLTRTIDFGDLQEYEQHLRLGSVVDRLHTGMP

SEQ ID NO: 10344 - protein, 500 aa, synthetic construct
MRALVVIRLSRVTDATTSPERQLESCQQLCAQRGWNVVGVAEDLDVSGAVDPFDRKRRPNLARWLAFEEQPFDVIVAYRVDRLTRSVRHLQQLVRWAEDHKKLVVSATEAHFDTTTPFAAVVIALMGTVAQMELEAIKERIRSAVHFNIRAGKYRGSLPPWGYLPARVDGEWRLVPDPVQRERILEVYHRVVDNHEPLHLVAHDLNRRGVLSPKDYFAQLRGREPQGRKWSATALKRSMISGAMLGYATLNGKIVHDDDGAPLVRAEPILTRGQLEALRAELVKTSRAKPAVSTPSLLLRVLFCAVCGEPAYKFVGGGRKHPRYRCRSMGFPEHCGNGTVVMAEWDVFCEEQVLNLLGDAERLEKVWVAGSDSAVELAEVNAELMDLTSLIGSPAYRAGSPQREALDARIAALAARQEELEGLEARPSGWEWRGTGQRLGDWWREQDTAAKNTWLRSMNVRLTFDARGGLTRTIDFGDLQEYEQHLRLGSVVERLHTGMS

SEQ ID NO: 10345 - protein, 500 aa, synthetic construct
MRALVVIRLSRVTDATTSPERQLESCQQLCAQRGWDVVGVAEDLDVSGAVDPFDRKRRPNLARWLAFEEQPFDVIVAYRVDRLTRSTRHLQQLVHWAEDHKKLVVSATEAHFDTATPFAAVVIALMGTVAQMELEAIKERSRSAAHFNIRAGKYRGSLPPWGYLPTRVDGEWRLVPDPVQRERILEVYHRVVDNHEPLHLVAYDLNRRGVLSPKDYFAQLQGREPQGRKWSATALRRSMTSEAMLGYATLNGKTVRDDDGAPLVRAEPILTREQQGALRAELAKTSRAKPAVSTPSLLLRVLFCAVCGEPAYKFVGGGRKHPRYRCRSMGFPKHCGNGTVVMAEWDAFCEERVLDLLGDAERLEKVWVAGSDSAVELAEVNAELVDLTSLIGSPVYRAGSPQREALDARIAALAARQEELEGLEAHPSGWEWRGTGQRFGDWWREQDTAAKNTWLRSMNVRLTFDVRGGLTRTIDFGDLQEYERHSRLGSVAERLRTGMS

SEQ ID NO: 10346 - protein, 500 aa, synthetic construct
MRALVVIRLSRVTDTTTSPERQLESCQQLCAQRGWDVVGVAEDLDVSGAVDPFDRKRRPNLARWLAFEEQPFDVIVAYRVDRLTRSTRHLQQLVHWAEDHKKLVVSATEAHFDTTTPFAAVVIALMGTVAQMELEAIKERIRSATHFNIRAGKYRGSLPPWGYLPTRVDGEWRLVPDPVQRERILEVYHRVVDNHEPLHLVAHDLNRRGVLSPKDYFAQLRGREPQGRKWSATALKRSMTSEAMLGYATLNGKIVRDDDGAPLVRAEPILTREQLEALRAELVKTSRAKPAVSTPSLLLRVLFCAVCGEPAYKFAGGGRKHPRYRCRSTGFPEHCGNGTVVMAEWDVFCEEQVLSLLGDAERLEKVWVAGSDSAVELAEVNAELVDLTSLIGSPAYRAGSPQREALDVRIAALAARQEELEGLEARPSGWEWRETGQRFGDWWREQDTAAKNTWLRSMNVRLTFDVRGGLARAIDFGDLQEYEQHLRLGSVAERLHTGMS

SEQ ID NO: 10347 - protein, 500 aa, synthetic construct
MRALVVIRLSRVTDATTSPERQLESCQQLCAQRGWDVVGVAEDLDVSGAVDPFDRKRRPNLARWLAFEEQPFDVIVAYRVDRLTRSVRHLQQLVHWAEDHKKLVVSATEAHFDTTTPFAAVVIALMGTVAQMELEAIKERNRSAAHFNIRAGKYRGSLPPWGYLPTRVDGEWRLVPDPVQRERILEVYHRVVDNHEPLHLVAHDLNRRGVLSPKDYFAQLRGREPQGRKWSATALKRSMISEAMLGYATLNGKTVRDDDGAPLVRAEPILTREQLEALRAELVKTSRAKPAVSTPSLLLRVIFCAVCGEPAYKFAGGGRKHPRYRCRSMGFPKHCGNGTVVMAEWDAFCEEQVLDLLGDAERLEKVWVAGSDSAVELAEVNAELVDLTSLIGSPAYRAGSPQREALDARIAALAARQEELEGLEARPPGWEWRETGQRFGDWWREQDTAAKNTWLRSMNVRLTFDVRGGLTRTIDFGDLQEYEQHLRLGSVVERLHTGMS

SEQ ID NO: 10348 - protein, 500 aa, synthetic construct
MRALVVIRLSRVTDATTSPERQLESCQQLCAQRGWDVVGIAEDLDVSGAVDPFDRKRRPNLARWLAFEEQPFDAIVAYRVDRLTRSIRHLQQLVHWAEDHKKLVVSATEAHFDTTTPFAAVVIALMGTVAQMELEAIKERIRSAAHFNIRAGKYRGSLPPWGYLPTRVDGEWRLAPDPVQRERILEVYHRVVDNHEPLHLVAHDLNRRGVLSPKDYFAQLQGREPQGRKWSATALKRSMISVAMLGYATLNGKTVRDDDGVPLVRAEPILTREQQEALRAELAKTSRAKPAVSTPSLLLRVLFCAVCGEPAYKFVGGGRKHPRYRCRSMGFPEHCGNGTVVTTEWDAFCEEQVLGLLGDAERLEKVWVAGSDSAVELAEVNAELMDLTSLIGSPAYRAGSPQREALDARIAALAARQEELEGLEARPSGWEWRETGQRFGDWWREQDTAAKNAWLRSMNVRLTFDVRGGLTRTIDFGDLQEYEQHLRLGSVVERLHTGMS

SEQ ID NO: 10349 - protein, 500 aa, synthetic construct
MRALVVIRLSRVTDATTSPERQLESCQQLCAQRGWDVVGVAEDLDVSGAVDPFDRKRRPNLARWLAFEEQPFDVIVAYRVDRLTRSTRHLQQLVHWAEDHKKLVVSATEAHFDTTTPFAAVVIALMGTVAQMELEAIKERNRSAAHFNIRAGKYRGSLPPWGYLPTRVDGEWRLVPDPVQRERILEVYHRVVDNHEPLHSVAHDLNRRGVLSPKDYFAQLRGREPQGREWSATALKRSMISETMLGYATLNGKTVRDDNGAPLVRAEPILTREQLEALRAELVKTSRAKPAVSTPSLLLRVLFCAVCGEPAYKFAGGGRKHPRYRCRSMGFPKHCGNGTVVMAEWDAFCEEQVLDLLGDTERLEKVWVAGSDSAVELAEVNAELADLTSLIGSPAYRAGSPQREVLDARIAALAARQEELEGLEARPSGWEWRETGQRFGDWWREQDTAAKNTWLRSMNVRLTFDVRGGLTRTIDFGDLQEYEQHLRLGSVVERLHTGMS

SEQ ID NO: 10350 - protein, 500 aa, synthetic construct
MRALVVIRLSRVTDATTSPERQLESCQQLCTQRGWDVVGVAEDLDVSGAVDPFDRKRRPNLARWLAFEEQPFDVIVAYRVDRLTRSVRHLQRLVRWAEDHKKLVVSATEAHFDTTTPFAAVVIALMGTVAQMELEAIKERIRSAVRFNIRAGKYRGSLPPWGYLPARVDGEWRLVPDPVQRERILEVYHRVVDNHEPLHLVAYDLNRRGVLSPKDYFAQLQGREPRGRKWSATALKRSMISVAMLGYATLNGKIVRDDDGAPLVRAEPILTREQQEALRAELVKTSRAKPAVSTPSLLLRVLFCAVCGEPAYKFVGGGRKHPRYRCRSMGFPKHCGNGTVVMAEWDAFCEEQVLDLLGDAERLEKVWVAGSDSAVELAEVNAELVDLTSLIGSPAYRAGSPQREALDARIAALAARQEELEGLEARPSGWEWRETGQRFGDWWREQDTAAKNTWLRSMNVRLTFDARGGPTRTIDFGDLQEYKQHLRLGSVVERLHTGMS

SEQ ID NO: 10351 - protein, 500 aa, synthetic construct
MRALVVIRLSRVTDATTSPERQLESCQQLCAQRGWDVVGVAEDLDVSGAVDPFDRKRRPNLARWLAFEEQPFDVIVAYRVDRLTRSTRHLQQLVHWAEDHKKLVVSATEAHFDTTTPFAAVVIALMGTVAQMELEAIKERNRSAAHFNIRAGKYRGSLPPWGYLPTRVDGEWRLVPDPVQRERILEVYHRVVDNHESLHLVAHDLNRRGVLSPKDYFAQLQGREPQGRKWSATALKRSMISEAMLGYATLNGKTVRDDDGAPLVRAEPILTREQREALRAELVKTSRAKPAVSTPSLLLRVLFCAVCGEPAYKFAGGGRKHPRYRCRSMGFPKHCGNGTVAMAEWDAFCEEQVLDLLGDAKRLEKVWVAGSDSAVELAEVNAELVDLTSLIGSPAYRAGSPQREALDARIAALAARQEELEGLEARPSGWEWRGTGQRFGDWWREQDTAAKNTWLRSMNVRLTFDVRGGLTRTIDFGDLQEYEQHLRLGGVVERLHTGMS

SEQ ID NO: 10352 - protein, 500 aa, synthetic construct
MRALVVIRLSRVTDATTSPERQLESCQQLCAQRGWDVVGVAEDLDVSGAVDPFDRKRRPNLARWLAFEEQPFDAIVAYRVDRLTRSIRHLQQLVHWAEDHKKLVVSATEAHFDTTTPFAAVVIALMGTVAQMELEAIKERIRSAVHFNIRAGKYRGSLPPWGYLPAHVEGEWRLVPDPVQRERILEVYHRVVDNHEPLHLVAHDLNRRGVLSPKDYFAQLQGREPQGRKWSATALKRSMISGAMLGYATLNGKTVRDDDGAPLVRAEPILTRVQLEALRAELDKTSRAKPAVSTPSLLLRVLFCAVCGEPAYKFVGGGRKHPRYRCRSMGFPKHCGNGTVVMAEWDAFCEEQVLNLLGDAEHLEKVWVAGSDSAVELAEVNAELVDLTSLIGSPAYRAGSPQREALDARIAALAARQEELEGLEARPSGWEWRGTGQRFGDWWREQDTAAKNTWLRSMNVRLTFDVRGGLTRTIDFGELQEYEQHLRLGSVAERLHTGMS

SEQ ID NO: 10353 - protein, 500 aa, synthetic construct
MRTLVVIRLSRVTDATTSPERQLESCQQLCAQRGWDVVGVAEDLDVSGAVDPFDRKRRPNLARWLAFEEQPFDVIVAYRVDRLTRSTRHLQQLVHWAEDHKKLVVSATEAHFDTTTPFAAVVIALMGTVAQMELEAIKERNRSAAHFNIRAGKYRGSLPPWGYLPTRVDGEWRLAPDPVQCERILEVYHRVVDNHEPLHLVAHDLNRRGVLSPKDYFAQLQGREPQGRKWSATALKRSMISEAMLGYATLNGKTVRDDDGAPLVRAEPILTREQLEALRAELVKTSRAKPAVSTPSLLLRVLFCAVCGEPAYKFAGGGRKHPRYRCRSMGFPKHCGNGTVTMVEWDAFCEEQVLDLLGDAERLEKVWVAGSDSAVELAEVNAELVDLTSLIGSPAYRAGSPQREALDARIAALAARQEELEGLGARPSGWEWRETGQRFGDWWREQDTAAKNTWLRSMNVRLTFDARGGLTRTIDLGDLHEYEQRLRLGSVVDRLHTGMS

SEQ ID NO: 10354 - protein, 500 aa, synthetic construct
MRALVVIRLSRVTDATTSPERQLESCQQLCAQRGWDVVGVAEDLDVSGAVDPFDRKRRPNLARWLAFEEQPFDVIVAYRVDRLTRSTRHLQQLVHWAEDHKKLVVSATEAHFDTTTPFAAVVIALMGTVAQMELEAIKERNRSAAHFNIRAGKYRGSLPPWGYLPARVDGEWRLVPDPVQRERILEVYHRVVDDHEPLHLVAHDLNWRGVLSPKDYFAQLQGREPQGRKWSATALKRSMISEAMLGYATLNGKTVRGDDGAPLVRAEPILTREQLEALRAELVKTSRAKPAVSTPSLLLRVLFCAVCGEPAYKFAGGGRKHPRYRCRSMGYPKHCGNGTVAMAEWDAFCEEQVLDLLGDAERLEKVWVAGSDSAVELAEVNAELVDLTSLIGSPAYRAGSPQREALDARIAALAARQEELEGLEARPSGWEWRETGQRFGDWWREQDTAAKNTWLRSMNVRLTFDVRGGLTRTIDFGVLQEYEQHLRLDSVVERLHTGMP

SEQ ID NO: 10355 - protein, 500 aa, synthetic construct
MRALVVIRLSRVTDATTSPERQLASCRQLCAQRGWDVVGVAEDLDVSGAVDPFDRKRRPNLARWLAFEEQPFDVIVAYRVDRLTRSIRHLQQLVRWAEDHKKLVVSATEAHFDTTTPFAAVVIALMGTVAQMELEAIKERIRSAVHFNIRAGKYRGSLPPWGYLPTRVDGEWRLVPDPVQRERILEVYHRVVNNHEPLHLVAHDLNRRGVLSPKDYFAQQRGREPQGRKWSATALKRSMTSEAMLGYATLNGKTVRDDEGAPLVRAEPILTREQLEALRAELAKTSRAKPAVSTPSLLLRVLFCAVCGEPAYKFTGGGRKHPRYRCRSMGFLKHCGNGTVVMAEWDAFCEERVLNLLGDAERLEKVWVAGSDSAVELAEVNAELVDLTSLIGSPAYRAGSPQREALDARIAALAARQEELEGLEARPSGWEWRETGQRFRDWWRERDTAAKNTWLRSMNVRLTFDARGGLTRTIDFGELQEYEQHLRLGSVAERLHTGMS

SEQ ID NO: 10356 - protein, 500 aa, synthetic construct
MRALVVIRLSRVTDATTSPERQLESCQQLCAQRGWNVVGVAEDLDVSGAVDPFDRKRRPNLARWLAFEEQPFDVIVAYRVDRLTRSTRHLQQLVHWAEDHKKLVVSATEAHFDTTTPFAAVVIALMGTVAQMELEAIKERIRSAVRFNIRAGKYRGSLPPWGYLPARVDGEWRLVPDPVQRERILEVYHRVVDNHEPLHLVAHDLNRRGVLSPKDYFAQLQGREPQGREWSATALKRSMISGAMLGYATLNGRTVRGDDGVPLVRAEPILTREQREALRAELAKTSRAKPAVSTPSLLLRVLFCAVCGEPAYKFVGGGRKHPRYRCRSMGFPKHCGNGTVVMAEWDAFCEEQVLDLLGDAERLEKVWVAGSDSAVELAEVNAELTDLTSLIGSPAYRAGSPQREALDARIAALAARQEELEGLEARPSGWEWRGTGQRFGDWWREQDTAAKNTWLRSMNVRLTFDVRGGLTRTIDFGDLQEYVQHLRLGSAVERLHTGMS

SEQ ID NO: 10357 - protein, 500 aa, synthetic construct
MRALVVIRLSRVTDATTSPERQLESCQQLCAQRGWDVVGVAEDLDVSGAVDPFDRKRRPNLARWLAFGEQPFDVIVAYRVDRLTRSTRHLQQLVHWAEDHKKLVVSATEAHFDTTTPFAAVVIALMGTVAQMELEAIKERNRSAAHFNIRAGKYRGSLPPWGYLPTRVDGEWRLVPDPVQRERILEVYHRVVDNHEPLHLVAHDLNRRGVLSPKDYFAQLQGREPQGRKWSATALKRSMISEAMLGYATLNGKTVRDDDGAPLVRAEPILTRVQLAALRAVLVRTSRAKPAVSTPSLLLRVLFCAVCGEPAYKFAGGGRKHPRYRCRSMGFPKHCGNGTVAMAEWDAFCEEQVLGLLGDAERLEKVWVTGSDSAVELAEVNAELVDLTSLIGSPAYRAGSPQREALDARIAALAARQEELEGLEARPSGWEWRETGQRFGDWWREQDTAAKNTWLRSMNVRLTFDVRGGLTRTIYFGDLQEYEQHLRLGGVVERSRTGTS

SEQ ID NO: 10358 - protein, 500 aa, synthetic construct
MRALVVIRLSRVTDATTSPERQLESCQQLCAQRGWDVVGVAEDLDVSGAVDPFDRKRRPNLARWLAFEEQPFDVIVAYRVDRLTRSTRHLQQLVHWAEGHKKLVVSATEAHFDTTTPFAAVVIALMGTVAQMELEAIKERIRSAAHFNIRAGKYRGSLPPWGYLPTRVDGEWRLVPDPVQRERILEVYHRVVDNHEPLHLVAHDLNRRGVLSPKDYFAQLRGREPQGRKWSATALKRSMTSGAMLGYATLNGKTVRGDDGAPLVRAEPILTREQWEALRAELVKTSRAKPAVSTPSLLLRVLFCAVCGEPAYKFVGGGRKHPRYRCRSMGFPKHCGNGTVVMAEWDAFCEEQVLDLLGDAERLEKVWVAGSDSAVELAEVNAELVDLTSLIGSPAYRAGSPQREALDARIAALAARQEELEGLEARPSGWEWRGTGQRLGDWWREQDTAAKNTWLRSMNVRLTFDVRGGLTRTIDFGELQEYEQHLRLGSVVGRIHTGMS

SEQ ID NO: 10359 - protein, 500 aa, synthetic construct
MRALVVIRLSRVTDATTSPERQLESCQQLCAQRGWDVVGVAEDLDVSGAVDPFDRKRRPNLARWLAFEEQPFDVIVAYRVDRLTRSTRHLQQLVHWAEDHKKLVVSATEAHFDTTTPFAAVVIALMGTVAQMELEAIKERNRSAAHFNIRAGKYRGSLPPWGYLPARVDGEWRLVPDPVQRERILEVYHRVVDNHEPLHLVAHDLNRRGVLSPKDYFAQLQGREPQGRKWSATALKRSMISEAMLGYATLSGKTVRDDDGAPLVRAEPILTRVQLEALRAELVKTSRAKPAVSTPSLLLRVLFCAVCGEPAYKFAGGGRKHPRYRCRSMGFPKHCGNGTVAMAEWDAFCEEQVLNLLGDAERLEKVWAAGSDSAVELAEVNAELVDLTSLIGSPAYRAGSPQREALDARIAALAARQEELEGLEARPSGWEWRETGQRFGDWWREQDTAAKNTWLRSMNVRLTFDDRGGLTRTIDFGDLQEYEQHLRSGSVVERLHTGTS

SEQ ID NO: 10360 - protein, 500 aa, synthetic construct
MRALVVIRLSRVTDATTSPERQLESCQQLCAQRGWDVVGVAEDLDVSGAVDPFDRKRRPNLARWLAFEEQPFDVIVAYRVDRLTRSTRHLQQLVRWAEDHKKLVVSATEAHFDTTTPFAAVVIALMGTVAQMELEAIKERIRSATHFNIRAGKYRGSLPPWGYLPTRVDGEWRLVPDPVQRERILEVYHRVVVNHEPLHLVAHDLNRRGVLSPKDYFAQLRGREPQGREWSATALKRSMTSVAMLGYATLNGKTVRGDDGAPLVRAEPILTREQQEALRAELVKTSRAKTAVSTPSLLLRVLFCAVCGEPAYKFVGGGRKHPRYRCRSMGLPKHCGNGTVVMAEWDAFCEKQVLNLLGDAERLEKVWVAGSDSAVELAEVNAELVDLTSLIGSPAYRAGSPQREALDARIAALAARQEELESLEARPSGWEWRETGQRFGDWWREQDTASKNTWLRSMNVRLTFDVRGGLTRTIDFGDLQEYERHLRLGSVVERSHTGMS

SEQ ID NO: 10361 - protein, 500 aa, synthetic construct
MRALVVIRLSRVTDATTSPERQLESCQQLCAQRGWDVVGVAEDLDVSGAVDPFDRKRRPNLARWLAFGEQPFDVIVAYRVDRLTRSVRHLQQLVHWAEDHKKLVVSATEAHFDTTTPFAAVVIALMGTVAQMELEAIKERNRSAAHFNIRAGKYRGSLPPWGYLPTRVDGEWRLVPDPVQRERILEVYHRVVDNHEPLHLVAHDLNRRGVLSPKDYFAQLRGREPQGRKWSATALKRSMISEAMLGYATLNGKTVRDDDGAPLVRAEPILTREQLEALRAELAKTSRAKPAVSTPSLLLRVLFCAVCGEPAYKFAGGGRKHPRYRCRSMGFPKHCGNGTVVMAEWDAFCEEQVLDLLGDAERLEKVWVAGSDSAVELAEVNAELVDLTSLIGSPAYRAGSPQREALDARIAALAARQEELEGLEARPSGWEWRETGQRFGDWWREQDTAAKNTWLRSMNVRLTFDVRGGLTRTIDFGDLQEYEQHLRLGGVVERLHTGMS

SEQ ID NO: 10362 - protein, 500 aa, synthetic construct
MRALVVIRLSRVTDATTSPERQLESCQQLCAQRGWDVVGVAEDLDVSGAVDPFDRKRRPNLARWLAFEEQPFDVIVAYRVDRLTRSTRHLQQLIHWAEDHKKLVVSATEAHFDTTTPFAAVVIALMGTVAQMELEAIKERNRSAAHFNIRAGKYRGSLPPWGYLPTRVDGEWRLVPDPVQRERILEVYHRVVDNHEPLHLVAHDLNRRGVLSPKDYFAQLRGREPQGRKWSATALKRSMTSEAMLGYATLNGETVRDDDGAPLVRAEPILTREQLEALRAELVMASRAKPAVPTPSLLLRVLFCAVCGEPAYKFAGGGRKHPRYRCRSMGFPKHCGNGAVAMAEWDAFCEEQVLGLLGDAERLEKVWVAGSDSAVELAEVNAELADLTSLIGSPAYRAGSPQREALDARIAALAARQEELEGLGTRPSGWEWRETGQRFGDWWREQDTAAKNTWLRSMNVRLTFDVRGGLTRTIDFGGLQEYEQHLRLGSVVERLHTGMS

SEQ ID NO: 10363 - protein, 500 aa, synthetic construct
MRALVVIRLSRVTDATTSPERQLESCQQLCAQRGWNVVGVAEDLDVSGAVDPFDRKRRPNLARWLAFEEQPFDVIVAYRVDRLTRSTRHLQQLVHWAEDHKKLVVSATEAHFDTTTPFAAVVIALMGTVAQMELEAIKERNRSAAHFNIRAGKYRGSLPPWGYLPTRVDGEWRLVPDPVQRERILEVYHRVVDNHEPLHLVAHDLNRRGVLSPKDYFAQLQGREPQGRKWSATALKRSMTSEAMLGYATLNGKTVRDDDGAPLVRAEPILTRVQLEALRAVLVKTSRAKPAVSTPSLLLRVLFCAVCGEPAYKFAGGGRKHPRYRCRSMGFPKHCGNGTVVMAEWDAFCEGQVLDLLGDAERLEKIWVAGSDSAVELAEVNAELVDLTSSIGSPAYRTGSPQREAIDARVAALAARQEELEGLGARPSGWEWRETGQRFGDWWREQDTAAKNTWLRSMNVRLTFDVRGGLTRTIDFGDLQEYEQHLRLGSVVERLHTGMS

SEQ ID NO: 10364 - protein, 500 aa, synthetic construct
MRALVVIRLSRVTDTTTSPERQLESCQQLCAQRGWDVVGVAEDLDVSGAVDPFDRKRRPNLARWLAFEEQPFDVIAAYRVDRLTRSVRHLQQLVHWAEDHKKLIVSATEAHFDTTTPFAAVVIALMGTVAQMELEAIKERNRSAAHFNIRAGKYRGSLPPWGYLPTRVDGEWRLVPDPVQRERILEVYHRVVDNHEPLHLVAHDLNRRGVLSPKDYFAQLQGREPQGRKWSATALKRSMISEAMLGYATLNGKTVRDDDGAPLVRAEPILTRKQLEALRAELAKTSRAKPAVSTPSLLLRVLFCAVCGEPAYKFAGGGRKHPRYRCRSMGFPRHCGNGTVAMAEWDAFCEEQVLDLLGDAERLEEVWVAGSDSAVELAEVNAELVDLTSLIGSPAYRAGSPQREALDARIAALTARQEELEGLEARPSGWEWRGTGQRFGDWWYEQDTAAKNTWLRSMNVRLTFDVRGGLTRTIDFGDLQEYEQHLRLGSVVERLHTGMS

SEQ ID NO: 10365 - protein, 500 aa, synthetic construct
MRALVVIRLSRVTDATTSPERQLESCQQLCAQRGWDVVGVAEDLDVSGAVDPFDRKRRPNLARWLAFEEQPFDVIVAYRVDRLTRSTRHLQQLVHWAEDHKKLVVSATEAHFDTTTPFAAVVIALMGTVAQMELEAIKERNRSAAHFNIRAGKYRGSLPPWGYLPTRVDGEWRLVPDPVQRERILEVYRRVVDDHEPLHLVAHDLNRRGILSPKDYFAQLQGREPQGRAWSATALKRSMTSEAMLGYATLNGETVRDDDGAPLVRAEPILTRGQLEALRAELVKTSRAKPAVSTPSLLLRVLFCAVCGEPAYKFAGGGRKHPRYRCRSMGFPKHCGNGTVAMAEWDAFCEEQVLDQLGDAERLEKVWVAGSDSAVELAEVNAELVDLTSLIGSPAYRAGSPQREALDARIAALAARQEELEGLKARPSGWERRGTGQRFRDWWHEQDTAAKNTWLRSMNVRLTFDVRGGLTRTIDFGDLQEYEQHLRLGSVVERLHTGMS

SEQ ID NO: 10366 - protein, 500 aa, synthetic construct
MRALVVIRLSRVTDATTSPERQLESCQQLCAQRGWDVVGVAEDLDVSGAVDPFDRKRRPNLARWLAFEEQPFDVIVAYRVDRLTRSTRHLQQLVHWAEDHKKLVVSATEAHFDTTTPFAAVVIALMGTVAQMELEAIKERNRSAAHFNIRAGKYRGSLPPWGYLPTRVDGEWRLVPDPVQRERILEVYHRVVDNHEPLHLVAHDLNRRGVLSPKDYFAQLRGREPQGRKWSATALKRSMISEAMLGYATLNGKTVRDDDGAPLVRAEPILTREQLEALRAELAKTSRAKPAVSTPSLLLRVLFCAVCGEPAYKFAGGGRKHPRYRCRSMGFPKHCGNGTVVMAEWDAFCEEQVLDLLGDAERLEKVWVAGSDSAVELAEVNAELVDLTSLIGSPAYRAGSPQREALDARIAALAARREELEGLEARPSGWEWRETGQRFGDWWREQDTAAKNTWLRSMNVRLTFDARGGLTRTIDFGDLQEYEQHLRLGSVVERLYTGMS

SEQ ID NO: 10367 - protein, 500 aa, synthetic construct
MRALVVIRLSRVTDATTSPERQLESCRQLCAQRGWDVVGVAEDLDVSGAVDPFDRKRRPNLARWLAFEEQPFDVIVAYRVDRLTRSVRHLQQLVHWAEDHKKLVVSATEAHFDTTTPFAAVVIALMGTVAQMELEAIKERNRSAAHFNIRAGKYRGSLPPWGYLPTRVDGEWRLAPDPVQRERILEVYHRVVDNHEPLHLVADDLNRRGVLSPKDYFAQLQGREPQGRKWSATALRRSMISKAMLGYATLNGKTVRGDDGAPLVRAEPILTREQLEALRAELVKTSRAKPAVSTPSLLLRVLFCAVCGEPAYKFAGGGRKHPRYRCRSMGFPKHCGNGTVTMAEWDAFCEEQVLDLLGDAERLEKVWVAGSDSAVELAEVNAELVDLTSLIGSPVYRAGSPQREALDARIAALAARQGELEGLEARPSGWEWRGTGQRFGDWWREQDIAAKNTWLRSMNVRLTFDVRGGLTRTIDFGDLQEYEQHLRLGSVAERFHTGMS

SEQ ID NO: 10368 - protein, 500 aa, synthetic construct
MRALVVIRLSRVTDATTSPERQLESCQQLCAQRGWDVVGVAEDLDVSGAVDPFDRKRRPNLARWLAFEEQPFDVIVAYRVDRLTRSTRHLQQLVRWAEDHKKLVVSATEAHFDTTTPFAAVVIALMGTVAQMELEAIKERSRSAAHFNIRAGKYRGSLPPWGYLPTRVDGEWRLVPDPVQRERILEVYHRVVDNHEPLHLVAHDLNRRGVLSPKDYFAQLRGREPRGREWSATALKRSMTSVAMLGYATLNGKTVRDDDGAPLVRAEPILTREQQEALRAEFAKTSRAKPAVSTPSLLLRVLFCAVCGEPAYKFVGGGRKHPRYRCRSMGFPKHCGNGTVVMTEWDAFCEEQVLGLLGDAERLERVWVAGSDSAVELAEVNAELVDLTSLIGSPAYRAGSPQREALDARIAALAARQEELEGLEARPSGWEWRETGQRFGDWWREQDTAAKNTWLRSMNVRLTFDVRGGLTRTIDFGDLQEYEQHLRLGSVVERLRTGTP

SEQ ID NO: 10369 - protein, 500 aa, synthetic construct
MRALVVIRLSRVTDATTSPERQLESCQQLCAQRGWDVVGVAEDLDVSGAVDPFDRKRRPNLARWLAFEEQSFDVIVAYRVDRLTRSTRHLQQLVHWAEDHKKLVVSATEAHFDTTTPFAAVVIALMGTVAQMELEAIKERNRSAAHFNIRAGKYRGSLPPWGYLPTRVDGEWRLVPDPVQRERILEVYHRVVDNHEPLHWVAHDLNRRGVLSPKDYFAQLQGREPQGREWSATALKRSMTSVAMLGYATLNGKTVRDDDGAPLVRAEPILTREQLEALRAELVKTSRAKPAVSTPSLLLRVLFCAVCGEPAYKFAGGGRKHPRYRCRSMGFPKHCGNGTVAMAEWDAFCEEQVLDLLGGAERLEKVWVAGSDSAAELAEVNAELVDLTSLLGSPAYRAGSPQREALDARIAALAARQEELEGLEARPSGWEWRETGQRFGDWWHEQDTAAKNTWLRTMNVRLTFDVRGGLTRTIDFGDLQEYKQHLRLGNVVERLHTGMS

SEQ ID NO: 10370 - protein, 500 aa, synthetic construct
MRALVVIRLSRVTDATTSPERQLESCQQLCAQRGWDVVGVAEDLDVSGAVDPFDRKRRPNLARWLAFEEQPFDVIVAYRVDRLTRSVRHLQQLVHWAEDHKKLVVSATEAHFDTTTPFAAVVIALMGTVAQMELEAIKERNRSAAHFNIRAGKYRGSLPPWGYLPARVDGEWRLVPDPVQRERILEVYHRVVDNHEPLHLVAHDLNRRGVLSPKDYFAQLRGREPQGRKWSATALKRSMISEAMLGYATLNGKAVRDDDGAPLVRAEPILTREQLEALRAELVKTSRAKPAVSTPSLLLRVLFCAVCGEPAYKFAGGGRKHPRYRCRSMGFPKHCGNGTVVMAEWDAFCEEQVLDLLGDTERLEKVWVAGSDSAVELAEVNAELADLTSLIGSPAYRAGSPQREVLDARIAALAARQEELEGLEARPSGWEWRETGQRFGDWWREQDTAAKNTWLRSMNVRLTFDVRGGLTRTIDFGDLQEYEQHLRLGSVVERLHTGMS

SEQ ID NO: 10371 - protein, 500 aa, synthetic construct
MRALVVTRLSRVTDATTSPERQLESCQQLCAQRGWDVVGVAEDLDVSGAVDPFDRKRRPNLARWLAFEEQPFDVIVAYRVDRLTRSTRHLQRLVHWAEDHKKLVVSATEAHFDTTTPFAAVVIALMGTVAQMELEAIKERNRSAAHFNIRAGKYRGSLPPWGYLPTRVDGEWRLVPDPVQRERILEVYHRVVDNHEPLHLVAHDLNRRGVLSPKDYFAQLQGREPQGRKWSATALKRSMISEAMLGYATLNGKTVRDDKGAPLVRAEPILTREQLEALRAELVKTSRAKPAVSTPSLLLRVLFCAVCGEPAYKFAGGGRKHPRYRCRSMGFPKHCGNGTVVMAEWDAFCEEQVLDLLGDAERLEKVWVAGSDSAVELAEVNAELVDLTSLIGSPAYRAGSPQREALDARIAALAARQEELEGLGARPSGWEWRETGQRFGDWWREQDTAAKNTWLRSMNVRLTFDVRGGLTRTIDFGDLQEYEKHLRLGSVVERLHTGVS

SEQ ID NO: 10372 - protein, 500 aa, synthetic construct
MRALVVIRLSRVTDVTTSPERQLESCQQLCAQRGWDVVGVAEDLDVSGAVDPFDRKRRPNLARWLAFEEQPFDVIVAYRVDRLTRSVRHLQQLVHWVEDHNKLVVSATEAHFDTTTPFAAVVIALMGTVAQMELEAIKERNRSAAHFNIRAGKYRGSLPPWGYLPTRVDGEWRLVPDPVQRERILEVYHRVVDNHEPLHLVALDLNRRGVLSPKDYFAQLQGREPQGRKWSATALKRSMISEAMLGYATLNGMTVRDGDGVPLVRAEPILTRAQLEALRAELVKTSRAKPAVSTPSLLLRVLFCAVCGEPAYKFAGGGRKHPRYRCRSMGFPKHCGNGTVVMAEWDTFCEEQVLDLLGDAERLEKVWVAGSDSAVELAEVNAELVDLTSLIGSPAYRAGSPQREALDARIAALAARQVELEGLGARPSGWEWRETGQRFGDWWREQDTAAKNTWLRSMNVRLTFDVRGGLTRTIDFGDLQEYEQHLRLGSVVERLHTGMP

SEQ ID NO: 10373 - protein, 500 aa, synthetic construct
MRALVVIRLSRVTDATTSPERQLESCQQLCAQRGWDVVGVAEDLDVSGAVDPFDRKRRPNLARWLAFEEQPFDVIVAYRVDRLTRSTRHLQQLVRWAEDHKKLVVSATEAHFDTTTPFAAVVIALMGTVAQMELEAIKERIRSAVHFNIRAGKYRGSLPPWGYLPTRMDGEWRLVPDPVQRERILEVYHRVVDNHEPLHLVAYDLNRRGVLSPKDYFAQLRGREPQGRKWSATALKRSMISVAMLGYATLNGKIVRDDDGAPSVRAEPILTREQLEALRAELAKTSRAKPAVSTPSLLLRVLFCAVCGEPAYKFVGGGRKHPRYRCRSMGFPEHCGNGTVVMAEWDAFCEEQVLDLLGDAERLERVWVAGSDSAVELAEVNAELIDLTSLIGSPAYRAGSPQREALDARIAALAARQEELEGLEARPSGWEWRGTGQRFGDWWREQDTAAKNTWLRSMNVRLTFDVRGGLTRTIDFGDLQEYEQHLRSGSVAERLHTGMS

SEQ ID NO: 10374 - protein, 500 aa, synthetic construct
MRALVVIRLSRVTDATTSPERQLESCQQLCAQRGWDVVGVAEDLDVSGAVDPFDRKRRPSLARWLTLEEQPFDVIVAYRVDRLTRSTRHLQQLVLWAEDHKKLVVSATEAHFDTTTPFAAVVIALMGTVAQMELEAIKERIRSAAHFNIRAGKYRGSLPPWGYLPARVDGKWRLVPDPVQRERILEVYHRVVDNHEPLHLVAHDLNRRGVLSPKDYFAQLRGREPQGRKWSATALKRSMISEAMLGYATLNGKTVRDDDGTPLVRAEPILTREQQEALRAELAKTSRAKPAVSTPSLLLRVLFCAVCGEPAYKFVGGGRKHPRYRCRSMGFPEHCGNGTVVMTEWDTFCEEQVLGLLGDAERLEKVWVAGSDSAVELAEVGAELVDLTSLIGSPAYRAGSPQREALDARIAALAARQEELEGLEARPSGWEWRETGQRFGDWWREQDTAAKNTWLRSMNVRLTFDVRGGLTRTIDFGDLQEYEQHLRLGSVAERLRTGMS

SEQ ID NO: 10375 - protein, 500 aa, synthetic construct
MRALVVIRLSRVTDATTSPERQLESCQQLCAQRGWDVVGVAEDLNVSGAVDPFDRKRRPNLARWLAFEEQPFDVIVAYRVDRLTRSIRHLQQLVHWGEDHKKLVVSATEAHFDTTTPFAAVVIALMGTVAQMELEAIKERNRSAAHFNIRAGKYRGSLPPWGYLPTRVDGEWRLAPDPVQRERILEVYHRVVDNHEPLHLVAHDLNRRGVLSPKDYFAQLRGREPQGREWSATALKRSMTSEAMLGYATLNGKTVRDDDGAPLVRAEPILTREQLEALRAGLVKTSRAKPAVSTPSLLLRVLFCAVCGEPAYKFAGGGRKHPRYRCRSMGFPKHCGNGTVAMAEWDAFCEEQVLNLLGDAERLEKVWVAGSDSAVELAEVNAELVDLTSLIGSPAYRAGSPQREALDARIAALAARQEELEGLEARPSGWEWRGTGQRFGDWWREQDTAAKNTWLRSMNVRLTFDVRGGLTRTVDFGDLQEYEQRLRLGSVVECLHTGMS

SEQ ID NO: 10376 - protein, 500 aa, synthetic construct
MRALVVIRLSRVTDATTSPERQLESCQQLCAQRGWDVVGVAEDLDVSGAVDPFDRKRRPNLARWLAFEEQPFDVIVAYRVDRLTRSVRHLQQLVHWAEDHKKLVVSATEAHFDTTTPFAAVVIALMGTVAQMELEAIRERSRSAAHFNIRAGKYRGSLPPWGYLPTRVDGEWRLVPDPVQRERILEVYHRVVDNHEPLHLVAYDLNRRGVLSPKDYFAQQRGREPRGCKWSATALKRSMTSVAMLGYATLNGKTVRDDDGAPLVRAEPILTHEQLEALRAELVKTSRAKPAVSTPSLLLRVLFCAVCGEPAYKFVGGGRKHPRYRCRSMGFPEHCGNGTVVMAEWDAFCEEQVLDLLGDAERLEKVWVAGSDSTVELAEVSAELVDLTSLVGSPAYRAGSPQREALDTRIVALATRQEELEGLEARPSGWEWRETGQRFGDWWREQDTAAKNTWLRSMNVRLTFDVRGGLTRTIDLGDLQEYEQHLRLGSVVGRLHTGMS

SEQ ID NO: 10377 - protein, 500 aa, synthetic construct
MRALVVIRLSRVTDATTSPERQLESCQQLCAQRGWDVVGVAEDLDVSGAVDPFDRKRRPNLARWLAFEEQPFDVIVAYRVDRLTRSTRHLQQLVRWAEDHKKLVVSASEAHFDTTTPFAAVVIALMGTVAQMELEAIKERIRSAAHYNIRAGKYRGSLPPWGYLPTRVDGEWRLVPDPVQRERILEVYRRVVDNHEPLHLVAHDLNRRGVLSPKDYFAQLRGREPRGRKWSATALRRSMTSVAMLGYATLNGRTVRDDDGAPLVRAEPILTREQLEALRAELVKTSRAKPAVSTPSLLLRVLFCAVCGEPAYKFVGGGRKHPRYRCRSMGFPKHCGNGTVVMAEWDAFCEEQVLNLLGDAERLEKVWVAGSDSAVELAKVNAELMDLTSLIGSPAYRAGSPQREALDARVAALAARQEELEGLEARPSGWEWRETGQRFGDWWREQDTAAKNTWLRSMNVRLTFDVRGGLTRTIDFGELQEYEQHLRLGSAAERLHTGMS

SEQ ID NO: 10378 - protein, 500 aa, synthetic construct
MRALVVIRLSRVTDATTSPERQLESCQQLCAQRGWDVVGVAEDLDVSGAVDPFDRKRRPNLARWLAFEEQPFDVIVAYRVDRLTRSTRHLQQLVHWAEDHKKLVVSATEAHFDTTTPFAAVVIALMGTVAQMELEAIKERIRSAAHFNIRAGKYRGSLPPWGYLPARVDGEWRLVPDPVQRERILEVYHRVVDNHEPLHLVAHDLNRRGVLSPKDYFAQLRGREPRGRKWSATALRRSMTSEAMLGYATLNGKIVRDDDGAPLVRAEPILTREQQGALRAELAETSRAKPAVSTPSLLLRVLFCAVCGEPAYKFVGGGRKHPRYRCRSMGFPKHCGNGTVAMAEWDAFCEEQVLNLLGGAERLEKVWVAGSDSAVELAEVNAELVDLTSLIGSPAYRAGSPQREALDARIAALAARQEELEGLEARPSGWEWRETGQRFRDWWREQDTAAKNTWLRSMNVRLTFDVRGGLTRTIDFGELQEYEQHLRLGCVVERLHTGMS

SEQ ID NO: 10379 - protein, 500 aa, synthetic construct
MRALVVIRLSRATDATTSPERQLESCQQLCAQRGWDVVGVAEDLDVSGAVDPFDRKRRPNLARWLAFEEQPFDVIVAYRVDRLTRSVRHLQQLVHWAEDHKKLVVSATEAHFDTTTPFAAVVIALMGTVAQMELEAIKERNRSAAHFNIRAGKYRGSLPPWGYLPTRVDGEWRLVPDPVQRERILEVYHRVVDNHEPLHLVAHDLNRRGVLSPKDYFAQLRGREPQGRKWSATALKRSMISEAMLGYATLNGKTVRDDDGAPLVRAEPILTREQLGALRAELVKTSRAKPAVSTPSLLLRVLFCAVCGEPAYKFAGGGRKHPRYRCRSMGFPKHCGNGTVAMAEWDAFCEEQVLDLLGDAERLEKVWVAGSDSAVELAEVNAELVDLTSLIGSPAYRAGSPQREALDARIAALAARQEELEGLEARPSGWEWRETGQRFGDWWREQDTAAKNTWLRSMNVRLTFDVRGGLTRTIDLGDLQEYEQHLRSGSVVERLHTGMS

SEQ ID NO: 10380 - protein, 500 aa, synthetic construct
MRALVVIRLSRVTDATTSPERQLESCRQLCAQRGWDVVGVAEDLDVSGAVDPFDRKRRPNLARWLAFEEQPFDVIVAYRVDRLTRSTRHLQQLVRWAEDHKKLVVSATEAHFDTTTPFAAVVIALMGTVAQMELEAIKERIRSAVHFNIRAGKYRGSLPPWGYLPTRVDGEWRLVPDPVQRERILEVYHRVVDNHEPLHLVAHDLNRRGVLSPKDYFAQLRGREPQGREWSATALRRSMTSVAMLGYATLNGETVRGDDGAPLVRAEPILTREQLEALRAELVKTSRAKPAVSTPSLLLRVLFCAVCGEPAYKFVGGGRKHPRYRCRSMGFPKHCGNGTVAMAEWDAFCEEQVLDLLGDAERLEKVWVAGSDSAVELAEVNAELVDLTSLIGSPAYRAGSPQREALDTRIAALAARQEELEGLEARPSGWEWRETGQRFGDWWREQDTAAKNTWLRSMNVRLTFDVRGGLARTIDFGDLQEYERHLRLGSVAERLHTGMS

SEQ ID NO: 10381 - protein, 500 aa, synthetic construct
MRALVVIRLSRVTDATTSPERQLESCQQLCAQRGWDVVGVAEDLDVSGAVDPFDRKRRPNLARWLAFEEQPFDAIVAYRVDRLTRSVRHLQQLVHWAEDHKKLVVSATEAHFDTTTPFAAVVIALMGTVAQMELEAIKERNRSAAHFNIRAGKYRGSLPPWGYLPTRVGGEWRLVPDPVQRERILEVYHRVVDNHEPLHLVAHDLNRRGVLSPKDYFAQLQGREPQGRKWSATALKRSMTSEAMLGYATLNGKTVRDDDGAPLVRAEPILTREQLEALRAELVKTSRAKPAVSTPSLLLRVLFCAVCGKPAYKFAGGGRKHPRYRCRSMGFPKHCGNGTVVMAEWDAFCEEQVLDLLGDAERLEKVWVAGSDSAVELAEVDAELVDLTSLIGSPAYRAGSPQREALDARIAALAARQEELEGLEARPSGWEWRETGQRFGDWWREQDTAAKNTWLRSMNVRLTFDVRGGLTRTIDFGDLQEYEQHLRLSSVVERLHTGMS

SEQ ID NO: 10382 - protein, 500 aa, synthetic construct
MRALVVIRLSRVTDATTSPERQLESCQQLCAQRGWDVVGVAEDLDVSGAVDPFDRKRRPNLARWLAFGEQPFDAIVAYRVDRLTRSTRHLQQLVHWAEDHKKLVVSATEAHFDTTTPFAAVVIALMGTVAQMELEAIKERIRSAVHFNIRAGKYRGSLPPWGYLPTRVDGEWRLVPDPVQRERILEVYHRVVDNHEPLHLVAHDLNRRGVLSPKDYFAQLQGREPQGRKWSATALKRSMISGAMLGYATLDGKTVRDDDGAPLVRAEPILTREQQETLRAELAKTSRAKPAVSTPSLLLRVLFCAVCGEPAYKFVGGGRKHPRYRCRSMGSPKHCGNGTVVMAEWDVFCEEQVLNLLGDAERLEKVWVAGSDSAVELAEVNAELVDLTSLIGSPAYRAGSPQREALDARIAALAARQEELEGLEARPSGWEWRGTGQRFGDWWGKQDTAAKNTWLRSMNVRLTFDVRGGPTRTIDFGELQEYEQHLRLGSVVERLHTGMS

SEQ ID NO: 10383 - protein, 500 aa, synthetic construct
MRALVVIRLSRVTDATTSPERQLESCRQLCAQRGWDVVGVAEDLDVSGAVEPFDRKRRPNLARWLAFEEQPFDAIVAYRVDRLTRSVRHLQQLVHWAEDHKKLVVSATEAHFDTTTPFAAVVIALMGTVAQMELEAIKERNRSAAHFNIRAGKYRGSLPPWGYLPTRVDGEWRLVPDPVQRERILEVYHRVVDNHEPLHLVAHDLNRRGVLSPKDYFAQLQGREPQGRKWSATALKRSMTSEAMLGYATLNGETVRDDDGAPLVRAEPILTREQLEALRAELVKTSRAKPAVSTPSLLLRVLFCAVCGEPAYKFAGGGRKHPRYRCRSMGFPKHCGNGTVAMAEWDAFCEEQVLDLLGDAERLEKVWVAGSDSAVELAGVNAELVDLTSLIGSPAYRAGSPQREALDARIAALAARQEELEGLEARPSGWEWRETGQRFGDWWREQDTAAKNTWLRSVNVRLTFDVRGGLTRTIDFGDLQEYEQHLRLGSVVERLHTGMS

SEQ ID NO: 10384 - protein, 500 aa, synthetic construct
MRALVVIRLSRVTEATTSPERQLESCQQLCAQRGWDVVGVAEDLDVSGAVDPFDRKRRPNLARWLAFEEQPFDVIVAYRVDRLTRSTRHLQQLVHWAEDHKKLVVSATEAHFDTTTPFAAVVIALMGTVAQMELEAIKERIRSAAHFNVRAGKYRGSLPPWGYLPARVDGEWRLVPDPVQRERILEVYHRVVDNHEPLHLVAHDLNRRGVLSPKDYFAQLRGREPQGRKWSATALKRSMTSVAMLGYATLNGKTVRDDDGAPLVRAEPILTREQLEALRAELIKTSRAKPAVSTPSLLLRVLFCAVCGEPAYKFVGGGRKHPRYRCRSMGFPEHCGNGTVVMAEWDAFCEEQMLDLLGDAERLEKVWVAGSDSAVELAEVSAELVDLTSLIGSPAYRAGSPQRGALDARIAALAARQEELEGLEARPSGWEWRETGQRFGDWWREQDTAAKNTWLRSMNVRLTFDVRGGLTRTIDFGDLQEYEQHLRSGSAVERLHTGMS

SEQ ID NO: 10385 - protein, 500 aa, synthetic construct
MRALVVIRLSRVTDATTSPERQLESCQQLCAQRGWDVVGVAEDLDVSGAVDPFDRKRRPNLARWLAFEEQPFDVIVAYRVDRLTRSTRHLQQLVHWAEDHKKLVVSATEAHFDTTTPFAAVVIALMGTVAQMELEAIKERNRSTAHFNIRAGKYRGSLPPWGYLPTRVDGEWRLVPDPVQRERILEVYHRVVDNHEPLHLVAHDLNRRGVLSPKDYFAQLQGREPQGRKWSATALKRSMISEAMLGYATLNGKTVRDDDGAPLVRAEPILTREQLEALRAELVKTSRAKPAVSTPSLLLRVLFCAVCGEPAYKFAGGGRKHPRYRCRSMGFPKHCGNGTVVMAEWDALCEEQVLDLLGDTERLEKVWVAGSDSAVELAEVNAELADLTSLIGSPAYRAGSPQREVLDARIAALAARQEELEGLEARPSGWEWRETGQCFGDWWREQDTAAKNTWLRSMNVRLTFDVRGGLTRTIDFGDLQVYEQHLRLGSVVERLHTGMS

SEQ ID NO: 10386 - protein, 500 aa, synthetic construct
MRALVVIRLSRVTDATTSPERQLESCQQLCAQRGWDVVGVAEDLDVSGAVDPFDRRRRPNLARWLAFEEQPFDVIVAYRVDRLTRSTRHLQQLVHWAEDHKKLVVSATEAHFDTTTPFAAVVIALMGTVAQMELEAIKERIRSAAHFNIRAGKYRGSLPPWGYLPTRVDGEWRLVPDPVQRERILEVYHRVVDNHEPLHLVAHDLNRRGVLSPKDYFAQLQGREPQGRKWSATALKRSMISVAMLGYATLNGKTVRDDDGAPLVRAEPILTREQQEALRAELAKTSRAKPAVSTPSLLLRVLFCAVCGEPAYKFVGGGRKHPRYRCRSMGFPKHCGNGTVVMAEWDAFCEEQVLDLLGDAERLEKVWVAGSDSAVELAEVNAELVDLTSLIGSPAYRAGSPQREALDARIAALAARQEELEGLEARPSGWEWRGTGQRLGDWWREQDTAAKNTWLRSMNIRLTFDVRGGLTRTIDFGDLQEYEQHLRLGSVVERSHTGTS

SEQ ID NO: 10387 - protein, 500 aa, synthetic construct
MRALVVIRLSRVTDTTTSPERQLESCQQLCAQRGWDVVGVAEDLDVSGAVGPFDRKRRPNLARWLAFEEQPFDVIVAYRVDRLTRSTRHLQQLVHWAEDHKKLVVSATETHFDTTTPFAAVVIALMGTVAQMELEAIKERNRSAAHFNIRAGKYRGSLPPWGYLPTRVDGEWRLAPDPVQRERILEVYHRVVDNHEPLHLVAHDLNRRGVLSPKDYFAQLQGREPQGRKWSATALKRSMISEAMLGYATLNGKTVRDNDGAPLVRAEPILTREQLEALRAELVKASRAKPAVSTPSLLLRVLFCAVCGEPAYKFAGGRRKHPRYRCRSMGFPKHCGNGTVAMAEWDAFCEEQVLNLLGDAERLEKVWVAGSDSAVELAEVNAELVDLTSLIGSPAYRAGSPQREALDARIAALAARQEELEGLGARPSGWEWRETGQRFGDWWREQDAAAKNTWLRSMNVRLTFDVRGGLTRTIDFGDLREYEQHLRLGSAVERLHTGMS

SEQ ID NO: 10388 - protein, 500 aa, synthetic construct
MRALVVIRLSRVTDATTSPERQLESCQQLCAQRGWDVVGVAEDLDVSGAVDPFDRKRRPNLARWLAFEEQPFDVIVAYRADRLTRSTRHLQQLVHWAEDHKKLVVSATEAHFDTTTPFAAVVIALMGTVAQMELEAIKERIRSAVHFNIRAGKYRGSLPPWGYLPTRVDGEWRLVPDPVQRERILEVYHRVVDNHEPLHLVAHDLNRRGVLSPKDYFAQLRGREPRGRKWSATALRRSMTSVAMLGYATLNGKTVRDDDGAPLVRAEPILTREQLEALRAELVKTSRAKPAVSTPSLLLRVLFCAVCGEPAYKFVGGGRKHPRYRCRSMGFPEHCGNGTVVMTEWDAFCEEQVLDLLGDAERLVKVWVAGSDSAVELAEVNAELVDLTSLIGSPAYRAGSPQREALDARIAALAARQEELEGLEARPYGWEWRETGQRFGDWWREQDTAAKNTWLRSMNVRLTFDVRGGLTRAIDFGDLQEYEQHLRLGSVAERLRTGTS

SEQ ID NO: 10389 - protein, 500 aa, synthetic construct
MRALVVIRLSRVTDATTSPERQLESCQQLCAQRGWDVVGVAEDLDVSGAVDPFDRKRRPNLARWLAFEEQPFDVIVAYRVDRLTRSVRHLQQLVHWAEDHKKLVVSATEAHFDTTTPFAAVVIALMGTVAQMELEAIKERNRSAAHFNIRAGKYRGSLPPWGYLPTRVDGEWRLAPDPVQRERILEVYHRVVNNHEPLHLVAHDLNRRGVLSPKDYFAQLQGREPQGRKWSATALKRSMISEAMLGYATLNGKTVRDDGGAPLVRAEPILTRGQLEALRAELAKTSRAKPAVSTPSLLLRVLFCAVCGEPAYKFAGGGRKHPRYRCRSMGFPKHCGNGTVVMAEWDAFCEEQVLDLLGDAERLEKVWITGSDSAVELAEVSAELVDLTSLIGSPAYRAGSPQREALDARIAALAARQEELEGLEVRPSGWEWRETGQRFGDWWREQDTAAKNTWLRSMNVRLTFDVRGGLTRTIDFGDLQEYEQHLRLGSVVERLHTGMS

SEQ ID NO: 10390 - protein, 500 aa, synthetic construct
MRALVVIRLSRVTDATTSPERQLESCQQLCAQRGWDVVGVAEDLDVSGAVDPFDRKRRPNLARWLAFEEQPFDVIVAYRVDRLSRSVRHLQQLVRWAEDHKKLVVSATEAHFDTTTPFAAVVIALMGTVAQMELEAIKERIRSAAHFNIRAGKYRGSLPPWGYLPTRVDGEWRLAPDPVQRERILEVYHRVVDNHEPLHLVAHDLNRRGVLSPKDYFAQLRGREPQGRKWSATALKRSMTSEAMLGYATLNGKTVRDDDGAPLVRAEPILTREQLEALRAELVKTSRAKPAVSTPSLLLRVLFCAVCGEPAYKFVGGGRKHPRYRCRSMGFPKHCGNGTVVMAEWDVFCEEQVLNLLGDAERLERVWVAGSDSAVELAEVNAELMDLTSLIGSPAYRAGSPQREALDARIAALAARQEELEGLEARPSGWEWRETGQRFGDWWREQDTAAKNTWLRSMNVRLTFNARGGLTRTIDFGDLQEYEQHLRIGSVVERLHTGMS

SEQ ID NO: 10391 - protein, 500 aa, synthetic construct
MRALVVIRLSRVTDATTSPERQLESCQQLCAQRGWDVVGVAEDLDVSGAVDPFDRKRRPNLARWLAFEEQPFDAIVAYRVDRLTRSVRHLQQLVHWAEDHKKLVVSATEAHFDTTTPFAAVVIALMGTVAQMELEATKERNRSAAHFNIRAGKYRGSLPPWGYLPTRVDGEWRLVPDPVQRERILEVYHRVVDNHEPLHLVAHDLNRRGVLSPKDYFAQLRGREPQGRKWSATALKRSMISEAMLGYATLNGKTVRGDDGAPIVRAEPILTREQLGALRAELVKTSRAKPAVSTPSLLLRVLFCAVCGEPAYKFAGGGRKHPRYRCRSMGFPKHCGNGTVAMAEWDAFCEEQVLDLLGDAERLEKVWVAGSDSAAELAEVSAELVDLTSLIGSPAYRAGSPQREALDARIAALATRQEELEGLEARPSGWEWRKTGQRFGDWWREQDTAAKNTWLRSMNVRLTFDVRGGLTRTIDFGDLQEYEQHLRLGSVVERLHTGMS

SEQ ID NO: 10392 - protein, 500 aa, synthetic construct
MRALVVIRLSRVTDATTSPERQLESCQQLCAQRGWDVVGVAEDLDVSGAVDPFDRKRRPNLARWLAFEAQPFDVMVAYRVDRLTRSTRHLQQLVRWAEDHKKLVVSATEAHFDTTTPFAAVVIALMGTVAQMELEAIKERIRSAVRFNIRAGKYRGSLPPWGYLPTRVDGEWRLVPDPVQRERILEVYHRVVDNHEPLHLVAYDLNRRGVLSPKDYFAQLQGREPQGRKWSATALKRSMISEAMLGYATLNGETVRDDDGAPLVRAEPILTREQLEALRAELAKTSRAKPAVSTPSLLLRVLFCAVCGEPAYKFAGGGRKHPRYRCRSMGFPKHCGNGTVVMTEWDAFCEEQVLNLLGDAERLEKVWVAGSDSAVELAEVNAELVDLTSLIGSPAYRAGSPQREALDARIAALAARQEELEGLEARLSGWEWRETGQRFGDWWHEQDTAAKNTWLRSMNVRLTFDVRGGLTRTIDFGDLLEYEQHLRLGSVVERLHTGMS

SEQ ID NO: 10393 - protein, 500 aa, synthetic construct
MRALVVIRLSRVTDATTSPERQLESCQQLCAQRGWDVVGVAEDLDVSGAVDPFDRKRRPNLARWLAFEEQPFDVIVAYRVDRLTRSTRHLQQLVHWAEDHKKLVVSATEAHFDTTTPFAAVVIALMGTVAQMELEAIKERNRSAAHFNIRAGKYRGSLPPWGYLPMRVDGEWRLVPDPVQRERILEVYHRVVDDHEPLHWVAHDLNRRGVLSPKDYFAQLQGREPQGRKWSATALKRSMISEAMLGYATLNGKTVRDDDGAPLVRAEPILTREQLEALRAELVKTSRAKPAVSTPSLLLRVLFCAVCGEPAYKFAGGGRKHPRYRCRSMGFPKHCGNGTVAMAEWDAFCEEQVLDLLGDAERLEKVWVAGSDSAVELAEVNAELVDLTSLIGSPAYRASSPQREALDARIAALAARQEELEGLEARPSGWEWRETGQRFGDWWREQDTAAKNTWLRSMNVRLTFDVRGGLTRTIDFGDLQEYEQHLRLGSVVERLHTGMS

SEQ ID NO: 10394 - protein, 500 aa, synthetic construct
MRALVVIRLSRVTDATTSPERQLESCQRLCAQRGWDVVGVAEDLDASGAVDPFDRKRRPNLARWLAFEEQPFDVIVAYRVDRLARSVRHLQQLVHWAEDHKKLVVSATEAHFDTTTPFAAVVIALMGTAAQMELEAIKERNRSAAHFNIRAGKYRGSLPPWGYLPARVDGEWRLVPDPVQRERILEVYHRVVDNHESLHLVAHDLNRRGVLSPKDYFAQLRGREPQGREWSATALKRSMASEAMLGYATLNGKTVRDNDGAPLVRAEPILTREQLEALRAELVKTSRAKPAVSTPSLLLRVLFCAVCGEPAYKLAGGGRKHPRYRCRSIGSPKHCGNGTVAMAEWDAFCEEQVLDLLGDAERLEKVWVAGSDSAVELAEVNAELVDLTSLIGSPAYRAGSPQRVALDARIAALAARQEELEGLGARPSGWEWRGTGQRFGDWWREQDTAAKNTWLRSMNVRLTFDVRGGLTRTIDFGDLQEYEQRLRLGSVVERLHTGMS

SEQ ID NO: 10395 - protein, 500 aa, synthetic construct
MRALVVIRLSRVTDATTSPERQLESCQQLCAQRGWDVVGVAEDLDVSGAVDPFDRKRRPNLARWLAFEQQPFDAIVAYRVDRLTRSVRHLQQLVCWAEDHKKLVVSATEAHFDTTTPFAAVVIALMGTVAQMELEAIKERSRSAAHFNIRAGKYRGSLPPWGYLPTRVDGEWRLVPDPVQRERILEVYHRVVDNHEPLHLVAHDLNRRGVLSPKDYFAQLRGREPRGRKWSATALKRSMISVAMLGYATLNGKIVRGDDGAPLVRAEPILTREQQEALRAELAKTSRAKPAVSTPSLLLRVLFCAVCGEPAYKFVGGGRKHPRYRCRSMGFPEHCGNGTVVMAEWDAFCEEQVLNLLGDAERLEKVWVAGSDSAVELAEVNAELVDLTSLIGSPAYRAGSPQREALDARIAALAARQEELEGLEARPSGWEWRETGQRFGDWWREQNTAAKNTWLRSMNVRLTFDVRGGLTRTIDFGDLQEYERHLRLGSVAERLRTGMS

SEQ ID NO: 10396 - protein, 500 aa, synthetic construct
MRALVVIRLSRVTDATTSPERQLESCQQLCAQRGWDVVGVAEDLDVSGAVDPFDRKRRPNLARWLAFEEQPFDVIVAYRVDRLTRSIRHLQQLVRWAEDHKKLVVSATEAHFDTTTPFAAVVIALMGTVAQMELEAIKERIRSAVHFNIRAGKYRGSLPPWGYLPTRVDGEWRLVPDPVQRERILEVYHRVVDNHEPLHLVAYDLNRRGVLSPKDYFAQLQGREPQGRKWSATALKRSMISGAMLGYATLNGMIVRDGDGAPLVRAEPILTREQQEALRAELAKTSRAKPAVSTPSLLLRVLFCAVCGEPAYKFVGGGRKHPRYRCRSMGFPEHCGNGTVVMAEWDVFCEEQVLNLLGDVERLEKVWVAGSDSAVELAEVNAELMDLTGLIGSPTYRAGTPQREALDARIAALAARQEELEGLEARPSGWEWRETGQRFGDWWREQDTAAKNTWLRSMNVRLTFDVRGGLTRTIDFGDLQEYEQHLRLGSVVERLHTGTS

SEQ ID NO: 10397 - protein, 500 aa, synthetic construct
MRALVVIRLSRVTDGTTSPERQLESCQQLCAQRGWDVVGVAEDLDVSGAVDPFDRKRRPNLARWLAFEEQPFDVIVAYRVDRLTRSVRHLQQLVHWAEDHKKLVVSATEAHFDTTTPFAAVVIALMGTVAQMELEAIKERNRSAAHFNIRAGKYRGSLPPWGYLPARVDGEWRLVPDPVQRERILEVYHRVVDNHEPLHLVAHDLNRRGVLSPKDYFAQLRGREPRGRKWSATALKRSMTSEAMLGYATLNGKTVRGDDGAPLVRAEPILTREQLEALRAELAKTSRAKPAVSTPSLLLRVLFCAVCGEPAYKFVGGGRKHPRYRCRSMGFPKHCGNGTVVMAEWDAFCEEQVLNLLGDAERLEKVWVAGSDSAVELAEVNAELVDLTSLIGSPAYRAGSPQRKALDARIAALAARQEELEGLEARPSGWEWRETGQRFGDWWREQDTAAKNTWLRSMNVRLAFDVRGGLTRTIDFGELQEYEQHLRSGSVVERLHTGMS

SEQ ID NO: 10398 - protein, 500 aa, synthetic construct
MRALVVIRLSRVTDATTSPKRQLESCRQLCAQRGWDVVGVAEDLDVSGAVDPFDRKRRPNLARWLAFEEQPFDAIVAYRVDRLTRSVRHLQQLVRWAEDHRKLVVSATEAHFDTTTPFAAVVIALMGTVAQMELEAIKERSRSAAHFNIRAGKYRGSLPPWGYLPTRVDGEWRLVPDPVQRERILEVYHRVVDYHEPLHLVAHDLNRRGVLSPKDYFAQLQGREPQGRKWSATALKRSMISVAMLGYATLNGKTVRDDDGAPLVRAEPILTREQQEALRAELAKTSRAKPAVSTPSLLLRVLFCAVCGEPAYKFVGGGHKHPRYRCRSMGFPKHCGNGTVVMTEWDTFCEEQVLDLLGDAERLEKVWVAGSDSAVELAEVNAELVDLTSLIGSPAYRAGSPQREALDARIAALAARQGELEGLEARPPGWKWRETGQRFGDWWREQDTAAKNAWLRSMNVRLTFDVRGGLTRTIDFGDLQEYKRHLRLGSVVERLHTGMP

SEQ ID NO: 10399 - protein, 500 aa, synthetic construct
MRALVVIRLSRVTDATTSPERQLESCQQLCAQRGWDVVGVAEDLDVSGAVDPFDRKRRPNLARWLAFEEQPFDVIVAYRVDRLTRSTRHLQQLVHWAEDHKKLVVSATEAHFDTTTPFAAVVIALMGTVAQMELEAIKERSRSAAHFNIRAGKYRGSLPPWGYLPTRVDGEWRLVPDPVQRERILEVYHRVVDNHEPLHLVAHDLNRRGVLSPKDYFAQQQGREPQGRKWSATALRRSMTSEAMLGYATLNGETVRDDDGAPLVRAEPILTREQLEALRAELVKTSRAKPAVSTPSLLLRVLFCAVCGEPAYKFAGGGRKHPRYRCRSMGFPKHCGNGTVVMAEWDAFCEEQVLDLLGDAECLEKVWVAGSDSAIELAEVNAELVDLTSLIGSPAYRAGSPQREALDARIAALVARQEELEGLEARPPGWEWRETGQRFGDWWREQDTAAKNTWLRSMNVRLTFDVRGGLTRTIDFGDLQEYEQYLRLGSVVKRLHTGVS

SEQ ID NO: 10400 - protein, 500 aa, synthetic construct
MRALVVIRLSRVTDATTSPERQLESCQQLCAQRGWDVVGVAEDLDVSGAVDPFDRKRRPNLARWLAFEEQPFDVIVAYRVDRLTRSVRHLQQLVHWAEDHKKLVVSATEAHFDTTTPFAAVVIALMGTVAQMELEAIKERNRSAAHFNIRAGKYRGSLPPWGYLPTRVDGEWRLVPDPVQRERILEVYHRVVDNHEPLHLVAHDLNRRGVLSPKDYFAQLQGREPQGRKWSATALKRSMTSVAMLGYVTLNGKTVRDDDGAPLVRAEPILTREQLEALRAELVKTSRAKPAVSTPSLLLRVLFCAVCGEPAYKFAGGGRKHPRYRCRSMGLPKHCGNGTVVMAEWDAFCEEQVLNLLGDTERLEKVWVAGSDSAVELAEVNAELVDLTSLIGSPAYRAGSPQREALDARIAALAARQEELEGLEARPSGWEWRETGQRFEDWWREQDTAARNTWLRSMNVRLTFDVRGGLTRTIDFGDLQEYEQHSRLGSVVERLHTGMS

SEQ ID NO: 10401 - protein, 500 aa, synthetic construct
MRALVVIRLSRVTDATTSPERQLESCQQLCAQRGWDVIGVAEDLDVSGAVDPFDRKRRPNLARWLALEEQPFDAIVAHRVDRLARSIRHLQQLVHWAEDHKKLVVSATEAHFDTTTPFAAVVIALMGTVAQMELEAIKERNRSAAHFNIRAGKYRGSLPPWGYLPTRVDGEWRLVPDPVQRERILEVYHRVVDNHEPLHLVAHDLNRRGVLSPKDYFAQLQGREPQGRKWSATALKRSMISEAMLGYATLNGKTVRDDDGAPLVRAEPILTREQLEALRAELVKTSRAKPAVSTPSLLLRVLFCAVCGEPAYKFAGGGRKHPRYRCRSMGLPKHCGNGTVVMAEWDAFCEEQVLDLLGDAERLEKVWVAGSDSAVELAEANAELVDLTSLIGSPAYRTGSPQREALDARIAALAARQEELEGLEARPSGWEWRGTGQCFGDWWREQDTAAKNTWLRSMNVRLTFDVRGGLTRTIDFGDLQEYEQHLRLGSVVERLHTGVS

SEQ ID NO: 10402 - protein, 500 aa, synthetic construct
MRALVVIRLSRVTDATTSPERQLESCQQLCAQRGWDVVGVAEDLDVSGAVGPFDRKRRPNLARWLAFEEQPFDAIVAYRVDRLTRSVRHLQQLVHWAEDHKKLVVSATEAHFDTTTPFAAVVIALMGTVAQMELEAIKERNRSAAHFNIRAGKYRGSLPPWGYLPMRVDGEWRLVPDPVQRERILEVYHRVVDNHEPLHLVAHNLNRRGVLSPKDYFAQLQGREPQGRKWSATALKRSMISEAMLGYATLNGMIVRDDDGAPLVRAEPILTREQLEALRAELVKTSRAKPAVSTPSLLLRVLFCAVCGEPAYKFAGGGRKHPRYRCRSMGFPKHCGNGTVVMAEWDAFCEEQVLNLLGDAERLEKVWVAGSDSAVELAEVNAELVDLTSLIGSQAYRTGSPQREALDARIAALAARQEELEGLEARPSGWEWRETGQRFGDWWREQDTAAKNTWLRSMNVRLTFDVRGGLTRTIDFGDLQEYEQHLRLGGVAGRLHTGMS

SEQ ID NO: 10403 - protein, 500 aa, synthetic construct
MRALVVIRLSRVTDATTSPERQLESCQQLCAQRGWDVAGVAEDLDVSGAVDPFDRKRRPNLARWLAFEEQPFDVIVAYRVDRLTRSTRHLQQLVHWAEDHKKLVVSATEAHFDTTTPFAAVVIALMGTVAQMELEAIKERNRSAAHFNIRAGKYRGSLPPWGYLPARVDGEWRLVPDPVQRERILEVYHRVVDNHEPLHSVAHDLNRRGIFSPKDYFAQLQGREPQGRKWSATALKRSMISEAMLGYATLNGKTVRDDDGAPLVRAEPILTRVQLEALRAELVKTSRAKPAVSTPSLLLRVLFCAVCGEPAYKFAGGGRKHPRYRCRSMGFPKHCGNGTVVMAEWDAFCEEQVLDLLGDAERLEKVWVAGSDSAVELAEVNAELVDLTSLIGSPAYRAGSLQREALDARIAALAARQEELEGLEARPSGWEWRETGQRFGDWWREQDTAAKNTWLRSMNVRLTFDIRGGLTRTIDFGDLQEYEQHLRLGSVVERLHTGMS

SEQ ID NO: 10404 - protein, 500 aa, synthetic construct
MRALVVIRLSRVTDATTSPERQLESCQQLCAQRGWDVVGVAEDLDVSGAVDPFDRKRRPNLARWLAFEEQPFDVIVAYRVDRLTRSTRHLQQLVRWAEDHKKLVVSATEAHFDTTTPFAAVVIALMGTVAQMELEAIKERIRSAAHFNIRAGKYRGSLPPWGYLPTRVDGEWRLVPDPVQRERILEVYHRVVDNHEPLHLVAHDLNRRGVLSPKDYFAQLRGREPQGRKWSATALKRSMISEAMLGYATLNGKIVRDDDGAPLVRAEPILTREQQEALRAELVKTSRAKPAVSTPSLLLRVLFCAVCGEPAYKFVGGGRKHPRYRCRSMGFPKHCGNGTVVMAEWDAFCEEQVLNLLGDAERLEKVWVAGSDSAVELAEVNAELVDLTSLIGSPAYRAGSPQREALDARIAALAARQEELEGLEARPSGWEWRETGQRFGDWWREQDTAAKNTWLRSMNVRLTFDVRGGLTRTIDFGDLQEYEQHLRLGSVVERLHTGMS

SEQ ID NO: 10405 - protein, 500 aa, synthetic construct
MRALVVIRLSRVTDATTSPERQLESCQQLCAQRGWDVVGVAEDLDVSGAVDPFDRKRRPNLARWLAFEGQPFDVIVAHRVDRLTRSTRHLQQLVHWAEDHKKLVVSATEAHFDTTTPFAAVVIALMGTVAQMELEAIRERNRSAAHFNIRAGKYRGSLPPWGYLPARVDGEWRLVPDPVQRERILEVYHRVVDNHEPLHLVAHDLNRRGVLSPKDYFAQLQGREPQGRKWSATALKRSMISEAMLGYATLNGKTVRDDDGAPLVRAEPILTREQLEALRAELVKTSRAKPAVSTPSLLLRVLFCAVCGEPAYKFAGGGRKHPRYRCRSMGFSKHCGNGTVAMAEWDAFCEEQVLNLLGDAERLEKVWVAGSDSAVELAEVNAELVDLTSLIGSPAYRAGSPQREALDARIAALAARQEELEGLEARPSGWEWRETGQRFGDWWREQDTAAKNTWLRSMNVRLTFDVRGGLTRTIDFGVPQEYEQHLRLGSVVERLHTGMP

SEQ ID NO: 10406 - protein, 500 aa, synthetic construct
MRALVVIRLSRVTEATTSPERQLESCQQLCAQRGWDVVGVAEDLDVSGAVDPFDRKRRPNLARWLAFEEQPFDVIVAYRVDRLTRSTRHLQQLVLWAEDHKKLVVSATEAHFDTTTPFAAVVIALMGTVAQMELEAIKERIRSAAHFNIRAGKYRGSLPPWGYLPTRVDGEWRLVQDPVQRERILEVYHRVVDNHESLHLVARDLNRRGVLSPKDYFAQLQGREPRGRKWSATALKRSMTSVAMLGYATLNGKIVRDDDGAPLVRAEPILTREQLEALRTELAKTSRAKPAVSTPSLLLRVLFCAVCGEPAYKFVGGGRKHPRYRCRSMGFPKHCGNGTVVMAEWDAFCEEQVLSLLGDAERLEKVWVAGSDSAVELAEVNAELVDLMSLIGSPAYRAGSPQREALDARIAALAARQEELEGLEARPSGWEWRETGQRFGDWWREQDTAAKNTWLRSMNVRLTFDVRGGLTRTIDFGELREYEHHLRLGSVDERLRTRMS

SEQ ID NO: 10407 - protein, 500 aa, synthetic construct
MRALVVIRLSRVTDATTSPERQLESCQQLCAQRGWDVVGVAEDLDVSGAVDPFDRKRRPNLARWLAFEEQPFDVIVAYRVDRLTRSTRHLQQLVHWAEDHKKLVVSATEAHFDTTTPFAAVVIALMGTVAQMELEAIKERNRSAAHFNIRAGKYRGSLPPWGYLPTRVDGEWRLVPDPVQRERILEVYHRVVDNHEPLHLVAHDLNRRGVLSPKDYFAQLQGREPQGRKWSATALKRSMTSEAMLGYATLNGKTVRGDDGAPLVRAEPILTREQLEALRAELVKTSRAKPAVSTPSLLLRVLFCAVCGEPAYKFAGGGRKHPRYRCRSMGFPKHCGNGTVVMAEWDAFCEEQVLDLLGDAERLEKVWVVGSDSAVELAEVNAELVDLTSLIGSPAYRAGSPQREALDARIAALAARQEELEGSEARPSGWEWRETGQRFGDWWRGQDTAAKNTWLRSMNVRLTFDVRGGLTRTIDFGDLQEYEQHLRSGSVVERLHTGTS

SEQ ID NO: 10408 - protein, 500 aa, synthetic construct
MRALVVIRLSRVTDATTSPERQLESCHQLCAQRGWDVVGVAEDLDVSGAVDPFDRKRRPNLARWLAFEEQPFDAIVAYRVDRLTRSTRHLQQLVLWAEDHKKLVVSATEAHFDTTTPFAAVVIALMGTVAQMELEAIKERIRSAAHFNIRAGKYRGSLPPWGYLPARVDGEWRLVPDPVQCERILEVYHRVVDNHEPLHLVAHDLNRRGVLSPKDYFAQLQGREPQGRKWSATALKRSMISVAMLGYATLSGKTVRGDDGAPLVRAEPILTREQQEALRAELAKTSRAKPAVSTPSLLLRVLFCAVCGEPAYKFVGGGRKHPRYRCRSMGFPKHCGNGTVAMAEWDAFCEEQVLDLLGDAERLEKVWVAGSDSAAELAEVNAELVDLTSLISSPAYRAGSPQRVALDARIVALAARQEELEGLEARPSGWEWRGTGQRFGDWWREQDTAARNTWLRSMNVRLTFDVRGGLTRTIDFGDLQEYEQHLRLGSVAERLHTGMS

SEQ ID NO: 10409 - protein, 500 aa, synthetic construct
MRALVVIRLSRVTDATTSPERQLESCQQLCAQRGWDVVGVAEDLDVSGAVNPFDRKRRPNLARWLAFEEQPFDVIVAYRVDRLTRSTRHLQQLVRWAEDHKKLVVSATEAHFDTTTPFAAVVIALMGTVAQMELEAIKERIRSAAHFNIRAGKYRGSLPPWGYLPARVDGEWRLVPDPVQRERILEVYHRVVNNHEPLHLVAYDLNRRGILSPKDYFAQLRGREPRGRKWSATALRRSMTSEAMLGYATLNGKTVRDDDGAPLVRAEPILTREQLEALRAELAKTSRAKPAVSTPSLLLRVLFCAVCGEPAYKFVGGGRKHPRYRCRSMGFPEHCGNGTVVMAEWDAFCEEQVLNLLGDAERLEKVWVAGSDSAVELAEVNAELVDLTSLIGSPAYRAGSPQREALDARIAALAARQVELEGLEARPSGWEWRGTGQRFGDWWREQDTAAKNTWLRSMNVRLTFDVRGGLTRTVDFGELREYEQRLRSGSVSERLHSGMS

SEQ ID NO: 10410 - protein, 500 aa, synthetic construct
MHALVVIRLSRVTDATTSPERQLESCRQLCAQRGWDVVGVAEDLDVSGAVDPFDRKRRPNLARWLAFEQQPFDVIVAYRVDRLTRSIRHLQQLVHWAEDHKKLVVSATEAHFDTTTPFAAVVIALMGTVAQMELEAIKERIRSAAHFNIRAGKYRGSLPPWGYLPARVDGEWRLVPDPVQRERILEVYHRVVDNHEPLYLVAHDLNRRGVLSPKDYFAQLRGREPQGRKWSATALKRSMISVAMLGYATLNGKIVRDDDGAPLVRAEPILTREQQEALRAELVKTSRAKPAVSTPSLLLRVLFCAVCGEPAYKFVGGGRKHPRYRCRSMGFPKHCGNGTVVMAEWDAFCEEQVLDLLGDAERLEKVWVAGSDSAAELTEVNAELVDLTSLIGSPAYRAGSPQREALDARIAALAARQEELEGLKARPSGWEWRGTGQRFGDWWREQDTAAKNTWLRSMNVRLTFDARGGLTRTIDFGDLQEYEQHLRLGSAAERLHTGMS

SEQ ID NO: 10411 - protein, 500 aa, synthetic construct
MRALIVIRLSRVTDATTSPERQLESCQQLCAQRGWDVVGVAEDLDVSGAVDPFDRRRRPNLARWLAFEEQPFDVVVAYRVDRLTRSVRHLQQLVHWAEDHKKLVVSVTEAHFDTTTPFAAVVIALMGTVAQMELEAIRERNRSAAHFNIRAGKYRGSLPPWGYLPARVDGEWRLVPDPVQRERILEVYHRVVDNHEPLHLVAHDLNRRGVLSPKDYFAQLQGREPQGRKWSATALKRSMISEAMLGYATLNGKTVRDDDGVPLVRAEPILTREQLETLRAVLVKTPRAKPAVSTPSLLLRVLFCAVCGEPAYKFAGGGRKHPRYRCRSMGFPKHCGNGTVVMAEWDAFCEEQVLDLLGDAERLEKVWVAGSDSAVELAEVNAELVDLTSLIGSPAYRAGSPQREALDARIAALAARQEELEGLEARPSGWGWRETGQRFGDWWREQDTAAKNTWLRSMNVRLTFDVRGGLTRTIDFGGLQEYEQHLRLGSVVERLHTGMP

SEQ ID NO: 10412 - protein, 500 aa, synthetic construct
MRALVVIRLSRVTDATTSPERQLVSCQQLCAQRGWDVVGVAEDLDVSGAVDPFDRKRRPNLARWLAFEEQPFDVIVAYRVDRLTRSTRHLQQLVLWAEDHKKLVVSATEAHFDTTTPFAAVVIALMGTVAQMELEAIKERIRSAAHFNIRAGKYRGSLPPWGYLPARVDGEWRLVPDPVQRERILEVYHRVVDNHEPLHLVAHDLNRRGVLSPKDYFAQLQGREPRGRKWSATALRRSMTSVAMLGYATLNGKIVRDDDGAPLVRAEPILTREQQEALRAEFVRTSRAKPAVSTPSLLLRVLFCAVCGEPAYKFVGGGRKHPRYRCRSMGFPKHCGNGTVVMAEWDAFCEEQVLDLLGDAERLEKVWVAGSDSAVELAEVSAELVDLTSLIGSPAYRAGSPQREALDARIAALAARQEELEGLEARPSGWEWRETGQRFGDWWREQDTAAKNTWLRSMNVRLTFDVRGGLTRTIDFGDLREYEQHLRSGSVVERLRTGTS

SEQ ID NO: 10413 - protein, 500 aa, synthetic construct
MRALVVIRLSRVTDATTSPERQLESCQQLCAQRGWDVVGVAEDLDVSGAVDPFDRKRRPNLARWLAFEEQPFDVIVAYRVDRLTRSTRHLQQLVHWAEDHKKLVVSATEAHFDTTTPFAAVVVALMGTVAQMELEAIKERSRSAAHFNIRAGKYRGSLPPWGYLPARVDGEWRLVPDPVQRERILEVYHRVVDNHEPLHLVAYDLNRRGVLSPKDYFAQLRGREPQGREWSATALKRSMTSVAMLGYATLNGKIVRDDGGAPLVRAEPILTREQQEALRAELAKTSRAKPAVSTPSLLLRVLFCAVCGEPAYKFVGGGRKHSRYRCRSVGLPKHCGNGTVVMAEWDVFCEEQVLNLLGDAERLEKVWVVGSDSAVELAEVNAELMDLTSLIGSPAYRAGSPQREALDARIAALAARQEELEGLEARTSGWEWRETGQRFGDWWREQDTAAKNTWLRSMNVRLTFDVRGGLTRTVDFGDLREYEQYLRSGSVAERLRTGMS

SEQ ID NO: 10414 - protein, 500 aa, synthetic construct
MRALVVIRLSRVTDATTSPERQLESCQQLCAQRGWDVVGVAEDLDVSGAVDPFDRKRRPNLARWLAFEELPFDVIVAYRVDRLTRSTRHLQQLVHWAEDHKKLVVSATEAHFDTTTPFAAVVIALMGTVAQMELEAIKERNRSAAHFNIRAGKYRGSLPPWGYLPTRVDGEWRLVPDPEQRERILEVYHRVVDNHEPLHLVAHDLNRRGVLSPKDYFAQLRGREPQGRKWSATALRRSMISEAMLGYATLNGKTVRDDDGAPLVRAEPILTREQLEALRAELVKTSRAKPAVSTPSLLLRVLFCAVCGEPAYKFAGGGRKHPRYRCRSMGFPKHCGNGTVVMAEWDAFCEERVLDLLGDVERLEKVWVAGSDSAVELAEVNAELVDLTSLIGSPTYRAGSPQREALDARIAALAARQEELGGLEARPSGWEWRETGQRFGDWWREQDTAAKNTWLRSMNVRLTFDVRGGLTRTIDFGDLQEHEQHLRLGSAVGRLHTGMS

SEQ ID NO: 10415 - protein, 500 aa, synthetic construct
MRALVVIRLSRVTDATTSPERQLESCQQLCAQRGWDVVGVAEDLDVSGAVDPFDRKRRPNLARWLAFEEQPFDVIVAYRVDRLTRSTRHLQQLVHWAEDHKKLVVSATEAHFDTTTPFAAVVIALMGTVAQMELEAIKERNRSAAHFNIRAGKYRGSLPPWGYLPTRVDGEWRLVPDPVQRERILEVYHRVVDNHESLHLVAHDLNRRGVLSPKDYFAQLRGREPQGRKWSATALKRSMISEAMLGYATLNGKTVRDDGGAPLVRAEPILTREQLEALRAGLVKTSRAKPAVSTPSLLLRVLFCAVCGEPAYKFAGGGRKHPRYRCRSMGFPKHCGNGTVVMAEWDAFCEEQVLDLLGDAERLEKVWVAGSDSAVELAEVNAELVDLTSLIGSPVYRAGSPQREALDARIAALAARQEELEGLEARPSGWEWRETGQRFGDWWREQNTAAKNTWLRSMNVRLTFDVRGGLTRTIDFGDLREYEQLLRLGSVVKRLHTGMS

SEQ ID NO: 10416 - protein, 500 aa, synthetic construct
MRALVVIRLSRVTDATTSPERQLESCQRLCAQRGWDVVGVAEDLDVSGAVDPFDRKRRPNLARWLAFEEQPFDVIVAYRVDRLTRSTRHLQQLVHWAEDHKKLVVSATEAHFDTTTPFAAVVIALMGTVAQMELEAIKERNRSAAHFNIRAGKYRGSLPPWGYLPTRVDGEWRLVPDPVQRERILEVYHRVVDNHEPLHLVAHDLNRRGILSPKDYFAQLQGREPQGRKWSATALKRSMISEAMLGYATLNGKTVRGDDGAPLVRAEPILTREQLEALRAELVKTSRAKPAVSTPSLLLRVLFCAVCGEPAYKFAGGGRKHPRYRCRSMGFSKHCGNGTVVMAEWDAFCEEQVLDLLGDAERLEKVWVTGSDSAVELVEVNAELVDLTSLIGSPAYRAGSPQREALDARIVALTARQEELEDLEARPSGWEWRGTGQRFGDWWREQDTAAKNTWLRSMNVRLTFDVRGGLTRTIDFGDLQGYEQHLRLGSVVERLHTGMS

SEQ ID NO: 10417 - protein, 500 aa, synthetic construct
MRALVVIRLSRVTDATTSPERQLASCQQLCAQRGWDVVGVAEDLDVSGAVDPFDRKRRPNLARWLTFEEQPFDVIVAYRVDRLTRSIRHLQQLVHWAEDHKKLVVSATEAHFDTTTPFAAVVIALMGTVAQMELEAIKERIRSAAHFNIRAGKYRGSLPPWGYLPTRVDGEWRLVPDPVQRERILEVYHRVVDNHEPLHLVAHDLNRRGILSPKDYFAQLRGREPQGRKWSATALRRSMTSEAMLGYATLNGKTVRDDNGAPLVRAEPILTRAQQEALRAELAKTSRAKPAVSTPSLLLRVLFCAVCGEPAYKFVGGGRKHPRYRCRSMGFPEHCGNGTVVMAEWDAFCEEQVLDLLGDTERLEKVWVAGSDSTVELAEVNAELVDLTSLIGSPAYRAGSPQREALDARIAALAARQEELEDLEARPSGWEWRETGQRFGDWWREQDTAAKNTWLRSMNVRLTFDVRGGLTRTIDFGDLQEYEQHLRLGSVVERLRTGVS

SEQ ID NO: 10418 - protein, 500 aa, synthetic construct
MRALVVIRLSRVTDATTSPERQLESCRQLCAQRGWDVVGVAEDLDVSGAVDPFDRKRRPNLARWLAFEEQPFDVIVAYRVDRLARSTRHLQQLVRWAEDHKKLVVSATEAHFDTTTPFAAVVIALMGTVAQMELEAIKERIRSAAHFNIRAGKYRGSLPPWGYLPTRVDGEWRLVPDPVQRERILEVYHRVVDNHEPLHLVAHDLNRRGVLSPKDYFAQLRGREPQGRKWSATALKRSMTSEAMLGYATLNGKTVRDDDGAPLVRAEPILTREQREALRAELVKTSRAKPAVSTPSLLLRVLFCAVCGEPAYKFVGGGRKHPRYRCRSMGFPKHCGNGTVVMAEWDAFCEEQMLDLLGDAERLEKVWVAGSDSAVELAEVNAELVDLTSLIGSPAYRAGSPQREALDTRIAALAARQEELEGLEARPSGWEWRGTGQRFGDWWREQNTAAKNTWLRSMNVRLTFDVRGGLTRTIDFGDLQEYEQHSRLGSVVERLHTGMS

SEQ ID NO: 10419 - protein, 500 aa, synthetic construct
MRALVVIRLSRVTDATTSPERQLESCQQLCAQRGWDVVGVAEDLDVSGAVDPFDRKRRPNLARWLAFEEQPFDVIVAYRVDRLTRSTRHLQQLVRWAEDHKKLVVSATEAHFDTTTPFAAVVIALMGTVAQMELEAIKERIRSAVRFNIRAGKYRGSLPPWGYLPTRVDGEWRLVPDPVQRERILEVYHRVVDNHEPLHLVAHDLNRRGVLSPKDYFAQLRGREPQGRKWSATALRRSMTSEAMLGYATLNGKTVRDDDGAPLVRAEPILTREQLEALRAELVRTSRAKPAVSTPSLLLRVLFCAVCGEPAYKFVGGGRKHPRYRCRSMGSPKHCGNGTVVMTEWDTFCEEQVLGLLGNAERLEKVWVAGSDSAVELAEVNAELVDLTSLIGPPAYRAGSPQREALDARIAALAARQEELEGLEARPSGWEWRGTGQRFGDWWREQDTAAKNTWLRSMNVRLTFDVRGGLTRTIDFGELQEYEQHLRSGSVVERLHTGTS

SEQ ID NO: 10420 - protein, 500 aa, synthetic construct
MRALVVIRLSRVTDATTSPERQLESCQQLCAQRGWDVVGVAEDLDVSGAVDPFNRKRRPNLARWLAFEEQPFDVIVAYRVDRLTRSTRHLQQLVHWAEDHKKLVVSATETHFDTTTPFAAVVIALMGTVAQMELEAIKERIRSAAHFNIRAGKYRGSLPPWGYLPTRVEGEWRLVPDPEQRERILEVYHRVVDNHEPLHLVAHDLNRRGVLSPKDYFAQLRGREPRGRRWSATALKRSMISVAMLGYATLNGKIVRDDDGAPLVRAEPILTREQQEALRAELAKTSRAKPAVSTPSLLLRVLFCAVCGEPAYKFAGGGRKHPRYRCRSMGFPKHCGNGTVVMAEWDAFCEEQVLDLLGDAERLEKVWVAGSDSSVELAEVNAELVDLTSLIGSPAYRAGSPQREALDARIAALAARQEELEGLEARPSGWEWRGTGQRFGDWWREQDTAAKNTWLRSMNVRLTFDVRGGLTRTIDFGDLQEYEQHLRSGSVVERLHTGMS

SEQ ID NO: 10421 - protein, 500 aa, synthetic construct
MRALVVIRLSRVTDATTSPERQLASCQQLCAQRGWDVVGVAEDLDVSGAVDPFDRKRRPNLARWLAFEEQPFDIIVAYRVDRLTRSIRHLQQLVRWAEDHKKLVVSATEAHFDTTTPFAAVVIALMGTVAQMELEAIKERIRSAAHFNIRAGKYRGSLPPWGYLPTRVDGEWRLVPDPVQREHILEVYHRVVDNHEPLHLVAHDLNRRGVLSPKDYFAQLQGREPQGRKWSATALKRSMISVAMLGYVTLNGKIVRDDDGAPLVRAEPILTREQQEALRAELAKTSRAKPAVSTPSLLLRVLFCAVCGEPAYKFVGGGRKHPRYRCRSMGFPKHCGNGTVVMAEWDAFCEEQVLDLLGDAERLEKVWVAGSDSAVELAEVNAELVDLTSLIGSPAYRAGSPQREALDARIAALAARQEELEGLEARPSGWEWRGTGQRFGDWWREQDTAAKNTWLRSMNVRLTFDVRGGLTRTIDFGELQEYEQHLRLGSVAERLHTGML

SEQ ID NO: 10422 - protein, 500 aa, synthetic construct
MRALVVIRLSRVTDATTSPERQLESCQQLCAQRGWDVVGVAEDLDVSGAVDPFDRKRRPSLARWLAFEEQPFDAIVAYRVDRLTRSIRHLQQLVHWAEDHKKLVVSATEAHFDTTTPFAAVVIALMGTVAQMELEAIKERIRSAAHFNIRAGKYRGSLPPWGYLPTRVDGEWRLEPDPVQRERILEVYHRVVDNHEPLHLVAHDLNRRGVLSPKDYFAQLRGREPQGRKWSATALRRSMTSEAMLGYATLDGKIVRDDDGAPLVRAEPILTREQQEALRAELAKTSRAKPAVSTPSLLLRVLFCAVCGEPAYKFVGGGRKHPRYRCRSMGFPKHCGNGTVVMAEWDAFCEEQVLDLLGDAERLEKVWVAGSDSAAELAEVNAELVDLTSLIGSPAYRAGSPQREALDARIAALAARQEELEGLEARPSGWEWRGTGQRFGDWWREQDTAAKNTWLRSMNVRLTFDVRGGLTRTIDFGDLQEYEQHSRLGSVVERLHTGMS

SEQ ID NO: 10423 - protein, 500 aa, synthetic construct
MRALVVIRLSRVTDATTSPERQLESCQQLCAQRGWDVAGVAEDLDVSGAVDPFDRKRRPNLARWLAFEEQPFDVIVAYRVDRLTRSVRHLQQLVHWAEDHKKLVVSATEAHFDTTTPFAAVVIALMGTVAQMELEAIKERNRSAAHFNIRAGKYRGSLPPWGYLPTRVDGVWRLVPDPVQRERILEVYRRVVDNHESLHLVAHDLNRRGVLSPKDYFAQLQGREPQGRKWSATALKRSMISEAMLGYATLNGKTVRNDDGAPLVRAEPILTRGQLEALRAELVKTSRAKPAVSTPSLLLRVLFCAVCGEPAYKFAGGGRKHPRYRCRSMGFPKHCGNGTVMMAEWDAFCEEQVLGLLGDAECLEKVWVAGSDSAVELAEVNAELVDLTSLIGSPAYRAGSPQREALDARIAALAARQGELEGLEARPSGWEWRETGQRFGDWWRGQDTAAKNTWLRSMNVRLTFDVRGGLTRTIDFGDLQGYEQHLRLGSVVERLHTGMS

SEQ ID NO: 10424 - protein, 500 aa, synthetic construct
MRALVVIRLSRVTDATTSPERQLESCRQLCAQRGWDVVGVAEDLNVSGAVDPFDRKRRPNLAHWLAFEEQPFDVIVAYRVDRLTRSIRHLQQLVHWAEDHKKLVVSATEAHFDTTTPFAAVVIALMGTVAQMELEAIKERNRSAAHFNIRAGKYRGSLPPWGYLPTRVDGEWRLVPDPVQRERILEVYHRVVDNHEPLHLVAHDLNRRGVLSPKDYFAQLRGREPQGRKWSATALKRSMISEAMLGYATLNGKTVRDDDGAPLVRAEPILTREQLEALRAELVKTSRAKPAVSTPSLLLRVLFCAVCGEPAYKSAGGGRKHPRYRCRSIGFPKHCGNGTVAMAEWDAFCEKQVLDLLGDAERLEKVWVAGSDSAVKLAEVNAELVDLTSLICSPAYRAGSPQREALDARIAALAARQEELEGLEARPSGWEWRETGQRFGDWWREQDTAAKNTWLRSMNVRLTFDVRGGLTRTIDFGDLQEYEQHLRLGSVVERLHTGMS

SEQ ID NO: 10425 - protein, 500 aa, synthetic construct
MRALVVIRLSRVTDATTSPERQLESCQQLCAQRGWDVVGVAEDLDVSGAVDPFDRKRRPSLARWLAFEERPFDVIVAYRVDRLTRSTRHLQQLVHWAEDHKKLVVSATEAHFDTTTPFAAVVIALMGTVAQMELEAIKERIRSAARFNIRAGKYRGSLPPWGYLPTRVDGEWRLVPDPVQRERILEVYHRVVDDHEPLHLVAHDLNRRGVLSPKDYFAQLQGREPQGRKWSATALKRSMTSVAMLGYATLNGKTVRDDDGTPLVRAEPILTREQQEVLRAELVKTSRAKPAVSTPSLLLRVLFCAVCGEPAYKFVGGGRKHPRYRCRSVGSSEHCGNGTVVMAEWDAFCEEQVLDLLGDVERLEKVWVAGSDSAIELAEVSAELVDLTSLIGSPAYRAGSPQREALDARIAALAARQEELEGLEARPPGWEWRETGQCFGDWWREQDTAAKNTWLRSMNVRLTFDVRGGLTRTIDFGDLQEYERYLRLGSVAKRLHTGMS

SEQ ID NO: 10426 - protein, 500 aa, synthetic construct
MRALVVIRLSRVTDATTSPERQLESCQQLCAQRGWDVVGVAEDLDVSGAVDPFDRKRRPNLARWLAFEEQPFDVIVAYRVDRLTRSTRHLQQLVRWAEDHKKLVVSATEAHFDTTTPFAAVVIALMGTVAQMELEAIKERIRSATHFNIRAGKYRGSLPPWGYLPTRVEGEWRLVPDPVQRERILEVYHRVVDNHEPLHLVAHDLNRRGVLSPKDYFAQLRGREPQGRKWSATALRRSMISEAMLGYATLNGNIVRDDDGVPLVRAEPILTREQLEALRAELVKTSRAKPAVSTPSLLLRVLFCAVCGEPAYRFVGGGRKHPRYRCRSMGFPEHCGNGTVVMAEWDAFCEEQVLDLLGDAERLERVWVAGSDSAVELAEVNAELVDLTSLIGSPAYRAGSPQREALNARIAALAARQGELEGLEARPSGWEWRGTGQRFRDWWREQDTAAKNTWLRSMNVRLTFDVRGGLTRAIDFGDLQEYEQRLRSGSVAGRLHTGMS

SEQ ID NO: 10427 - protein, 500 aa, synthetic construct
MRALVVIRLSRVTDATTSPERQLESCQQLCAQRGWDVVGVAEDLDVSGAVDPFDRKRRPNLARWLAFEEQPFDVIVAYRVDRLTRSVRHLQRLVLWAEDHKKLVVSATEAHFDTTTPFAAVVIALMGTVAQMELEAIKERIRSAAHFNIRAGKYRGSLPPWGYLPTRVDGEWRLVPDPVQRERILEVYHRVVDNHEPLHLVAHDLNRRGVLSPKDYFAQLRGREPRGRKWSATALRRSMTSEAMLGYATLNGKTVRDDDGAPLVRAEPILTREQQEALRAELAKTSRAKPAVSTPSLLLRVLFCAVCGEPAYKFVGGGRKHPRYRCRSMGFPKHCGNGTVVMAEWDVFCEEQVLNLLGDVERLEKVWVAGSDSAVELAEVNAELVDLTSLIGSPAYRAGSPQREALDARIAALAARQEELEGLEARPSGWEWRETGQRFGDWWREQDTAAKNIWLRSMNVRLTFDVRGGLTRTIDFGELQEYEQHLCLGSKVERLHTGMS

SEQ ID NO: 10428 - protein, 500 aa, synthetic construct
MRALVVIRLSRVTDATTSPERQLESCQQLCAQRGWDVVGIAEDLDVSGAVDPFDRKRRPNLARWLAFEEQPFDVIVAYRVDRLTRSTRHLQQLVHWAEDHKKLVVSATEAHFDTTTPFAAVVIALMGTVAQMELEAIKERIRSAAHFNIRAGKYRGSLPPWGYLPTRVDGEWRLVPDPVQRERILEVYHRVVDNHEPLHLVAYDLNRRGVLSPKDYFAQLRGREPQGREWSATALKRSMISVAMLGYATLNGKIVRDDDGAPLMRAEPILTREQQEALRAEFAKTSRAKPAVSTPSLLLRVLFCAVCGEPAYKFVGGGRKHPRYRCRSMGFPEHCGNGTVVMAEWDAFCEEQVLGLLGDAERLERVWVAGSDSAVELAEVNAELVDLTSLIGSPAYRAGSPQREALDARIAALAARQEELEGLEARPSGWEWRETGQRFGDWWREQDTAAKNAWLRSMNVRLTFDVRGGLTRTIDFGDLQEYEQHLRLGSVVERLRTGMS

SEQ ID NO: 10429 - protein, 500 aa, synthetic construct
MRALVVIRLSRVTDATTSPERQLESCQQLCAQRGWDVVGVAEDLDVSGAVDPFDRKRRPNLARWLAFEERPFDVIVAYRVDRLTRSARHLQQLVHWAEDHKKLVVSATEAHFDTTTPFAAVVIALMGTVAQMELEAIKERNRSAAHFNIRAGKYRGSLPPWGYLPTRVDGEWRLVPDPVQRERILEVYHRVVDNHEPLHWVAHDLNRRGVLSPKDYFAQLQGREPQGRKWSATALKRSMISEAMLGYATLNGKTVRNDDGAPLVRAEPILTRGQLEALRAELVKTSRAKPAVSTPSLLLRVLFCAVCGEPAYKFAEGGRKHPRYRCRSMGFPKHCGNGTVVMAEWDAFCEEQVLDLLGDAERLEKVWVTGSDSAVELAEVNAELVDLTSLIGSPAYRAGSPQREALDARIAALAARQEELEGLEARPSGWEWRETGQRFGDWWREQDTAAKNTWLRSMNVRLTFDVRGGLARTIDFGDLQEYERHLRLGSVVERLHTGMS

SEQ ID NO: 10430 - protein, 500 aa, synthetic construct
MRALVVIRLSRVTDATTSPERQLESCQQLCAQRGWDVVGVAEDLDVSGAVDPFDRKRRPSLACWLAFEEQPFDVIVAYRVDRLTRSTRHLQQLVRWAEDHKKLVVSATEAHFDTTTPFAAVVIALMGTVAQMELEAIKERSRSAAHFNIRAGKYRGSLPPWGYLPTRVDGEWRLVPDPVQRERILEVYHRVVDNHESLHSVAHDLNRRGVLSPKDYFAQLQGREPQGRKWSATALKRSMTSGAMLGYATLNGKTVRDDDGAPLVRAEPILTREQQEALRAELARTSRAKPAVSTPSLLLRVLFCAVCGEPAYKFVGGGRKHPRYRCRSMGFPKHCGNGTVVMTEWDAFCEEQVLNLLGDAERLEKVWVAGSDSAVELAEVNAELVDLTSLIGSPAYRAGSPQREALDARIAALAARQEELEGLEARPSGWEWRETGQRFGDWWREQDTAAKNTWLRSVNVRLTFDVRGGLTRTIDFGDLQEYEQHLRLGSVAERLRTGMS

SEQ ID NO: 10431 - protein, 500 aa, synthetic construct
MRALVVIRLSRVTDATTSPERQLESCQQLCAQRGWDVVGVAEDLDVSGAVDPFDRKRRPNLARWLAFEEQPFDVIVAYRVDRLARSTRHLQQLVHWAEDHKKLVVSATEAHFDTTTPFAAVVIALMGTVAQMELEAIKERNRSAAHFNIRAGKYRGSLPPWGYLPTRVDGEWRLVPDPVQRERILEVYHRVVGNHEPLHLVAHDLNRRGVLSPKDYFAQLQGREPQGRKWSATALKRSMISEAMLGYATQNGKTVRDDDGAPLVRAEPILTREQLVALRAELVRTSRAKPAVSTPSLLLRVLFCAVCGEPAYKFAGGGRKHPRYRCRSMGFPKHCGNGTVAMAEWDAFCEEQVLDLLGDAERLEKVWVAGSDSAVELAEVNAELVDLTSLIGSPAYRAGSPQREALDARIAALAARQEELEGLEARPSGWEWRETGQRFGDWWREQDTAAKNTWLRLMNVRLTFDVRGGLTRTIDFGDLQEYEQHLRLGGVVECLHTGMS

SEQ ID NO: 10432 - protein, 500 aa, synthetic construct
MRALVVIRLSRVTDATTSPERQLESCQQLCAQRGWDVVGVAEDLDVSGAVDPFDRKRRPNLARWLAFEEQPFDVVVAYRVDRLTRSTRHLQQLVHWAEDHKKLVVSATEAHFDTTTPFAAVVIALMGTVAQMELEAIKERNRSAAHFNIRAGKYRGSLPPWGYLPARVDGEWRLVPDPVQRERILEVYHRVVDNHEPLHLVAHDLNRRGVLSPKDYFAQLQGREPQGRKWSATALRRSMISGAMLGYVTLNGKTVRDDDGAPLVRAEPILTREQLEALRAELVKTSRAKPAVSTPSLLLRVLFCAVCGEPAYKFAGGGRKHPRYRCRSMGFPKHCGNGTVAMAEWDAFCEEQVLDLLGDAERLEKVWVAGSDSAVELAEVNAELVDLTGLIGSPAYRAGSPQREALDARIAALAARQEELEGLEARPSGWGWRGTGQRFGDWWYEQDTAAKNAWLRSMNVRLTFDVRGGLTRTIDFGDLQEYEQHLRLGSVVERLHTGMS

SEQ ID NO: 10433 - protein, 500 aa, synthetic construct
MRALVVIRLSRVTDATTSPGRQLESCQQLCAQRGWDVVGVAEDLDVSGAVDPFDRKRRPNLARWLAFEEQPFDAIVAYRVDRLTRSVRHLQQLVHWAEDHKKLVVSATEAHFDTTTPFAAVVIALMGTVAQMELEAIKERNRSAAHFNIRAGKYRGSLPPWGYLPARVDGEWRLVPDPVQCERILEVYHRVVDNHEPLHWVAHDLNRRGVLSPKDYFAQLQGREPRGCEWSATALKRSMISEAMLGYATLNGKTVRDDDGAPLVRAEPILTREQLEALRAELVKTSRAKPAVSTPSLLLRVLFCAVCGEPAYKFAGGGRKHPRYRCRSMGFPKHCGNGTVVMAEWDAFCEEQVLDLLGDAERLEKVWVAGSDSAVELAEVNAELVDLTSLIGSPAYRAGSPQREALDARIAALAARQEELEGLGARPSGWEWRETGQRFGDWWRGQDTAAKNTWLRSMNVRLTFDVRGELTRTIDFGDLQEYEHHLRLGSVVEHLHIGMS

SEQ ID NO: 10434 - protein, 500 aa, synthetic construct
MRALVVIRLSRVTDATTSPERQLESCQQLCAQRGWDVVGVAEDLDVSGAVDPFDRKRRPNLARWLAFEEQPFDVIVAYRVDRLTRSTRHLQRLVLWAEDHKKLVVSATEAHFDTTTPFAAVVIALMGTVAQMELEAIKERSRSAAHFNIRAGKYRGSLPPWGYLPTRVDGEWRLVPDPVQRERILEVYHRVVDNHEPLHLVAYDLNRRGVLSPKDYFAQLRGREPRGRKWSATALKRSMTSVAMLGYATLNGKIVRDDDGAPLVRAEPILTREQQEALRAELVKTSRAKPAVSTPSLLLRVLFCAVCGEPAYKFTGGGRKHPRYRCRSMGFPEHCGNGTVVMAEWDTFCEEQVLDLLGDAERLEKVWVAGSDSAVELAEVNAELVDLTSLIGSPAYRAGSPQREALDTRIAALAARQEELEGLEARPSGWEWRGTGQRFGDWWREQDTAAKNTWLRSMNVRLTFDVRGGLARTIDFGDLREYEQHLRLGSAAVRLHTGMS

SEQ ID NO: 10435 - protein, 500 aa, synthetic construct
MRALVVIRLSRVTDATTSPERQLESCQQLCAQRGWDVVGVAEDLNVSGAVDPFDRKRRPNLARWLAFEEQPFDVIVAYRVDRLTRSIRHLQQLVHWAEDHKKLVVSATEAHFDTTTPFAAVVIALMGTVAQMELEAIKERNRSAAHFNIRAGKYRGSLPPWGYLPTRVDGEWRLVPDPVQHERILEVYHRVVNNHEPLHLVAHDLNRRGILSPKDYFAQLQGREPQGRKWSATALKRSMISEAMLGYATLNGRTVRDDDGAPLVRAEPILTREQLEALRAELAKTSRAKPAVSAPSLLLRVLFCAVCGEPAYKFAGGGRKHPRYRCRSMGFPKHCGNGTVVMAEWDAFCEEQVLDLLGDAERLEKVWVAGSDSAVELAEVNAELVDLTSLIGSPAYRARSPQREALDARIAALAARREELEGLEVRPSGWEWRGTGQRFGDWWREQDTAAKNTWLRSMNVRLTFDARGGLTRTIDFGDLQEYEQQLRLGSVVERLHTGMS

SEQ ID NO: 10436 - protein, 500 aa, synthetic construct
MRALVVIRLSRVTDATTSPERQLESCQQLCAQRGWDVVGVAEDLDVSGAVDPFDRKRRPNIARWLAFEEQPFDVIVAYRVDRLTRSVRHLQQLVHWAEDHKKLVVSATEAHFDTTTPFAAVVIALMGTVAQMELEAIKERNRSAAHFNIRAGKYRGSLPPWGYLPTRVDGEWRLVPDPVQRERILEVYHRVVDNHEPLHLVAHDLNRRGVLSPKDYFAQLRGREPQGRKWSATALKRSMISEAMLGYATLNGKTVRDDDGAPLVRAEPILTREQLEALRAELVKTSRAKPAVSTPSLLLRVLFCAVCGEPAYKFAGGGRKHPRYRCRSMGFPRHCGNGTVTMAEWDAFCEEQVLDLLGDAERLEKVWVAGSDSAVELAEVNAELVDLTSLIGSPAYRAGSPQREALGARIAALAARQEELEGLEARPPGWEWRETGQRFGDWWREQDTAAKNTWLRSMNVRLTFDVRGGLTRTIDFGDLQEYEQHLRLGSVVERLHTGMS

SEQ ID NO: 10437 - protein, 500 aa, synthetic construct
MRALVVIRLSRVTDATTSPERQLESCQQLCAQRGWDVVGVAEDLDVSGAVDPFDRKRRPNLARWLAFEEQPFDAIVAYRVDRLTRSTRHLQQLVHWAEDHKKLVVSATEAHFDTTTPFAAVVIALMGTVAQMELEAIKERNRSAAHFNIRAGKYRGSLPPWGYLPARVDGEWRLVPDPVQRERIFEVYHRVVDNHEPLHLVAHDLNRRGVLSPKDYFAQLQGREPRGRKWSATALKRSMISEAMLGYATLNGKTVRDDDGAPLVRAEPILTRVQLEALRAELVKTSRAKPAVSTPSLLLRVLFCAVCGEPAYKFAGGGRKHPRYRCRSMGFPKHCGNGTVVMAEWDAFCEEQVLDLLGDAERLEKVWVAGSDSAVELAEVNAELVGLTCLIGSPAYCAGSPQREALDARIVALAARQEELEGLEARPSGWEWRGTGQRFGDWWREQDTAAKNTWLRSMNVRLTFDVRGGLTRTIDFGDLREYEQHLRLGSVVERLHTGMS

SEQ ID NO: 10438 - protein, 500 aa, synthetic construct
MRALVVIRLSRVTDTTTSPERQLESCQQLCAQRGWDVVGVAEDLDVSGAVDPFDRKRRPNLARWLAFEEQPFDVIVAYRVDRLTRSIRHLQQLVLWAEDHKKLVVSATEAHFDTTTPFAAVVIALMGTVAQMELEAIKERIRSAVHFNIRAGRYRGSLPPWGYLPTRVDGEWRLVPDPVQRERILEVYHRVVDNHEPLHLVAYDLNRRGVLSPKDYFAQLQGREPQGRKWSATALKRSMTSVAMLGYATLNGKIVRDDDGAPLVRAEPILTREQLEALRAELVRTSRAKPAVSTPSLLLRVLFCAVCGEPAYKFVGGGRKHPRYRCRSMGFPEHCGNGTVVVAEWDAFCEEQVLDLLGDTERLEKVWVAGSDSAVELAEVNAELVDLTSLIGSPAYRAGSPQREALDARIAALAARQEELEGLEARPSGWEWRETGQRFRDWWREQDAAAKNTWLRSMNVRLTFDVRGGLTRTIDFGELQEYEQHLRLGSVTERLHTGMS

SEQ ID NO: 10439 - protein, 500 aa, synthetic construct
MRALVVIRLSRVTDATTSPERQLESCQQLCAQRGWDVVGVAEDLDVSGAVDPFDRKRRPNLARWLAFEEQPFDVIVAYRVDRLTRSTRHLQQLVRWTEDHKKLVVSATEAHFDTTTPFAAVVIALMGTVAQMELEAIKERIRSAAHFNIRAGKYRGSLPPWGYLPARVDGEWRLVPDPVQRERILEVYHRVVDNHEPLHLVAHDLNRRGVLSPKDYFAQLQGREPQGRKWSATALKRSMTSGAMLGYATLNGKIVRDDDGAPLVRAEPILTREQQEALRAELAKTSRAKPAVSTPSLLLRVLFCAVCGEPAYKFVGGGRKHPRYRCRSMGFPEHCGNGTVVMAEWDAFCEEQVLDLLGDAERLEKVWVAGSDSAVELAEVNAELVDLTSLIGSPAYRAGSPQREALDARIAALAARQEELEGLEARPSGWEWRETGQRFGDWWREQDTAAKNTWLRSMNVRLTFDVRGGLTRAIDFGDLQEYEQHLRLGSVVERLHTGMS

SEQ ID NO: 10440 - protein, 500 aa, synthetic construct
MRALVVIRLSRVTDATTSPERQLESCQQLCAQRGWDVVGVAEDLDVSGAVDPFDRKRRPNLARWLAFEEQPFDVIVAYRVDRLTRSTRHLQQLVHWAEDHKKLVVSATEAHFDTTTPFAAVVIALMGTVAQMELEAIKERNRSAAHFNIRAGKYRGSLPPWGYLPTRVDGEWRLVPDPVQRERILEVYHRVVDDHEPLHLVAHDLNRRGVLSPKDYFAQLQGREPQGRKWSATALKRSMISEAMLGYATLNGKTVRDDDGAPLVRAEPILTREQLEALRAELVKTPRAKPAVSTPSLLLRVLFCAVCGEPAYKFAGGGRKHPRYRCRSMGFPKHCGNGTVAMAEWDAFCEEQVLDLLGDAERLERVWVAGSDSAVELAEVNAELVDLTSLIGSPAYRAGSPQREALDARIAALAARQEELEGLEARPSGWEWRETGQRFGDWWREQDTAAKNTWLRSMNVRLTFDVRGGLTRTIDFGDLQEYEQHVRLGSVVERLRTGMS

SEQ ID NO: 10441 - protein, 500 aa, synthetic construct
MRALVVIRLSRVTDATTSPERQLESCQQLCAQRGWDVVGVAEDLDVSGAVDPFDRKRRPNLARWLAFEEQPFDVIVAYRVDRLTRSTRHLQQLVHWAEDHKKLVVSATEAHFDTTTPFAAVVIALMGTVAQMELEAIKERNRSAAHFNIRAGKYRGSLPPWGYLPTRVDGEWRLVPDPVQRERILEVYHRVIDNHEPLHWVAHDLNRRGVLSPKDYFAQLQGREPQGRKWSATALKRSMISEAMLGYATLNGKTVRDDDGAPLVRAEPILTREQLEALRAELVKTSRAKPAVSTPSLLLRVLFCAVCGEPAYKFAGGGRKHPRYRCRSMGFSKHCGNGTVAMAEWDAFCEEQVLNLLGDAERLEKVWAAGSDSAAELAEVNAELVDLTSLIGSPAYRAGSPQREALDARIAALAARQEELEGLEARPSGWVWRETGQRFGDWWREQDTAAKNTWLRSMNVRLTFDVRGGLTRTIDFGDLQEYEQYLRLGSVVERLHTGMP

SEQ ID NO: 10442 - protein, 500 aa, synthetic construct
MRALVVIRLSRVTDATTSPERQLESCQQLCAQRGWDVVGVAEDLDVSGAIDPFDRKRRPNLARWLAFEEQPFDVIVACRVDRLTRSTRHLQQLVHWAEDHKKLVVSATEAHFDMTTPFAAVLIALMGTVAQMELEAIRERNRSAAHFNIRAGKYRGSLPPWGYLPTRVDGEWRLVPDPVQRERILEVYHRVVDNHEPLHLVAHDLNRRGVLSPKDYFAQLQGREPQGRKWSATALKRSMVSEAMLGYATLNGKTVRDDDGAPLVRAEPILTREQLEALRAELVKTPRAKPAVSTPSLLLRVLFCAVCGEPAYKFAGGGRKHPRYRCRSMGFPKHCGNGTVAMAEWDAFCEEQVLDLLGDAERLEKVWVAGSDSAVELAEVSAELVDLTSLIGSPAYRAGSPQREALDARIAALAARQEGLEGSGSRPSGWEWRKTGQRFGDWWREQDTAAKNTWLRSMNVRLTFDVRGGLTRTINFGDLQEYEQHLRLGSVVERLHTGRS

SEQ ID NO: 10443 - protein, 500 aa, synthetic construct
MRALVVIRLSRVTDATTSPERQLESCQQLCAQRGWDVVGVAEDLDVSGAVDPFDRKRRPNLARWLAFEEQPFDAIVAYRVDRLTRSTRHLQQLVHWAEDHKKLVVSATEAHFDTTTPFAAVVIALMGTVAQMELEAIKERIRSAAHFNIRAGKYRGSLPPWGYLPTRVDGEWRLVPDPVQRERILEVYHRVVDSHEPLHLVAYDLNRRGVLSPKDYFAQLRGREPQGRKWSATALKRSMISGAMLGYATLNGKIVRDDDGAPLVRAEPILTREQQEALRAELVRTSRAKPAVSTPSLLLRVLFCAVCGEPAHKFVGGGRKHPRYRCRSMVFPEHCGNGTVVMAEWDAFCEEQVLNLLGDAERLEKVWVAGSDSAVELAEVNAELVDLTSLIGSPAYRAGSPQREALDARIAALAAHQGELESLEARPSGWEWRETGQRFGDWWREQDTAAKNTWLRSMNVRLTFDVRGGLTRTIDFGDLQEYEQHLRLGSVVKRLRTGMS

SEQ ID NO: 10444 - protein, 500 aa, synthetic construct
MRALVVIRLSRVTDATTSPERQLESCQQLCAQRGWDVVGVAEDLDVSGAVDPFDRKRRPNLARWLAFEEQPFDVIVAYRVDRLTRSTRHLQQLVRWAEDHKKLVVSATEAHFDTTTPFAAVVIALMGTVAQMELEAIKERIRSAVRFNIRAGKYRGSLPPWGYLPTRVDGEWRLVPDPVQRERILEVFHRVVDNHEPLHLVAHDLNRRGVLSPKDYFAQLRGREPQGRKWSATALKRSMISVAMLGYATLNGKIVRGDDGAPLVRAEPILTREQQEALRAELVKTSRAKPAVSTPSLLLRVLFCAVCGEPAYKFVGGGRKHPRYRCRSMGFPKHCGNGTVVVTEWDAFCEEQVLNLLGDAERLEKVWVAGSDPAVELAEVNAELVDLTSLIGSPAYRAGSPQREALDARIAALAARQEVLEGLEARPSGWGWRGTGQRFGDWWREQDTAARNTWLRSMNVRLTFDVRGGLTRTIDFGDLQEYEQHSRLGSVVERLHTGMS

SEQ ID NO: 10445 - protein, 500 aa, synthetic construct
MRALVVIRLSRVTDATTSPERQLESCQQLCAQRGWDVVGVAEDLDVSGAVDPFDRKRRPNLARWLAFEEQPFDVIVAYRVDRLTRSTRHLQQLVRWAEDHKKLVVSATEAHFDTTTPFAAVVIALMGTVAQMELEAIKERIRSAVRFNIRAGKYRGSLPPWGYLPTRVDGEWRLVPDPVQRERILEVYHRVVDNHEPLHLVAHDLNRRGVLSPKDYFAQLQGREPQGRKWSATALKRSMISVAMLGYATLNGKTVRDDDGAPLVRAEPILTRGQQEALRAELAKTSRAKPAVSAPSLLLRVLFCAVCGEPAYKFVGGGRKHPRYRCRSMVFPKHCGNGTVAMAEWDAFCEEQVLNLLGDAERLEKVWVVGSDSAAELAEVNAELADLTSLIGSPAYRAGSPQREALDARIAALAARQEELEGLEACPSGWEWRETGQRFRDWWREQDTAAKNTWLRSMNVRLTFDARGGLTRTIDFGELQEYERHLRLGSVAERLHTGMS

SEQ ID NO: 10446 - protein, 500 aa, synthetic construct
MRALVVVRLSRVTDATTSPERQLESCQQLCAQRGWDVVGVAEDLDVSGAVDPFDRKRRPNLARWLAFEEQPFDVIVAYRVDRLTRSTRHLQQLVHWAEDHKKLVVSATEAHFDTTTPFAAVVIALMGTVAQMELEAIKERNRSAAHFNIRAGKYRGSLPPWGYLPTRVDGEWRLMPDPVQRERILEVYHRVVDNHEPLHLVAHDLNRRGVLSPKDYFAQLQGREPQGRKWSATALKRSMISEAMLGYATLNGKTVRDDDGAPLVRAEPILTREQLEALRAELVKTSRAKPAVSTPSLLLRVLFCAVCGEPAYKFAGGGRKHPRYRCRSMGFPKHCGNGTVAMAEWDAFCEEQVLNLLGDAKRLEKVWVAGSDSAVELAEVNAELVDLTSLIGSPAYRAGSPQREALDARIAALAARREVLEGLEARPSGWEWRETGQRFGDWWREQDTAAKNTWLRSMNVRLTFDVRGGLTRTIDFGDLQEYEQHLRSGSVVERLHTGMS

SEQ ID NO: 10447 - protein, 500 aa, synthetic construct
MRALVVTRLSRVTDATTSPERQLESCQQLCAQRGWDVVGVAEDLDVSGAVDPFDRKRRPNLARWLAFEEQPFDVIVAYRVDRLARSTRHLQQLVHWAEDHKKLVVSATEAHFDTTTPFAAVVIALMGTVAQMELEAIKERNRSAAHFNIRAGKYRGSLPPWGYLPTRVDGEWRLVPDPVQRERILEVYHRVVDNHEPLHWVAHDLNRRGVLSPKDYFAQLQGREPQGRKWSATALKRSMISEAMLGYATLNGKTVRDDDGAPLVRAEPILTREQLEALRAELVKTSRAKPAVPTPSLLLRVLFCAVCGEPAYKLAGGGRKHPRYRCRSTGFPKHCGNGTVAMAEWDAFCEEQVLDLLGDAERLEKVWVAGSDSAVELAEVNAELVDLTSLIGSPAYRAGSPQREALDARIAALAARQEELEGLEARPSGWEWRETGQRFGDWWREQDTAAKNTWLRSMNVRLTFDVRGGLTRTVDFGDLQEYEQHLRSGSVVERLHTGVS

SEQ ID NO: 10448 - protein, 500 aa, synthetic construct
MRALVVIRLSRVTDATTSPERQLESCQQLCAQRGWDVVGVAEDLDVSGAVDPFDRKRRPNLARWLAFEEQPFDVIVAYRVDRLTRSTRHLQQLVRWAEDHKKLVVSATEAHFDTTTPFAAVVIALMGTVAQMELEAIKERSRSAAHFNIRAGKYRGSLPPWGYLPTRVDREWRLVPDPVQRERILEVYHRVVDNREPLHLVAHDLNQRGVLSPKDYFAQLRGRVPQGRKWSATALKRSMTSVAMLGYATLNGKIVRVDDGAPLVRAEPILTREQLEALRAELARTSRAKPAVSTPSLLLRVLFCAVCGEPAYKFVGGGRKHPRYRCRSMGFPEHCGNGTVVMAEWDAFCEEQVLDLLGDAERLEKVWVAGSDSAVELAEVNAELVDLTSLIGSPIYRAGSPQREALDARIAALAARQEELEGLEACPSGWEWRGTGQRFGDWWREQDTAAKNTWLRSMNVRLTFDVRGGLTRTIDFGELREYEQHLRLGCVVKRLHTGMS

SEQ ID NO: 10449 - protein, 500 aa, synthetic construct
MRALIVIRLSRVTDATTSPERQLESCQQLCAQRGWDVVGVAEDLDVSGAVNPFDRKRRPNLARWLAFEEQPFDVIVAYRVDRLTRSVRHLQRLVRWAEDHKKLVVSATEAHFDMTTPFAAVVIALMGTVAQMELEAIKERIRSAVHFNIRAGKYRGSLPPWGYLPTRVDGEWRLVPDPVQRERILEVYHRVVDNHEPLHSVAHDLNQRGVLSPKDYFAQLRGREPQGREWSATALKRSMISGAMLGYATLNGKTVRGDDGAPLVRAEPILTREQQEALRAELVKTSRAKPAVSTPSLLLRVLFCAVCGEPAYKFVGGGRKHPRYRCRSMGFPEHCGNGTVVMAEWDAFCEEQVLDLLGDAERLEKVWVAGSDSAVELAEVNAELVDLTSLVGSPAYRAGSPQREALDARIAALAARQEELEGLEARPSGWEWRETGQRFGDWWREQDTAAKNTWLRSMNVRLTFDVRGGLTRTIDFGDLQEYEQHLRLGSVVERLHTGMS

SEQ ID NO: 10450 - protein, 500 aa, synthetic construct
MRALVVIRLSRVTDATTSPERQLESCQQLCTQRGWDVVGVAEDLDVSGAVDPFDRKRRPNLARWLAFEEQPFDVIVAYRVDRLTRSTQHLQQLVRWAEDHKKLVVSATEAHFDTTTPFAAVVIALMGTVAQMELEAIKERIRSAAHFNIRAGKYRGSLPPWGYLPTRVDGEWRLVPDPVQRERILEVYHRVVDNHEPLHLVARDLNRRGVLSPKDYFAQLQGREPQGRKWSATALKRSMTSEAMLGYATLNGKVVRDDDGAPLVRAEPILTREQQEALRAELAKTSRAKPAVSTPSLLLRVLFCAVCREPAYKFVGGGRKHPRYRCRSMGFPEHCGNGTVVMAEWDAFCEEQVLDLLGDAERLEKVWVAGSDSAVELAEVNAELADLTSLIGSPAYRAGSPQREALDARIAALAARQEELEGLEARPSGWEWRGTGQRFGDWWREQDTAAKNTWLRSMNIRLTFDVRGGLTRTIDFGELQEYEQRLRLGSVAERLHTGMS

SEQ ID NO: 10451 - protein, 500 aa, synthetic construct
MRALVVIRLSRVTDATTSPERQLASCQQLCAQRGWDVVGVAEDLDVSGAVDPFDRKRRPNLARWLAFEEQPFDVIVAYRVDRLTRSTRHLQQLVLWAEDHKKLVVSATEAHFDTTTPFAAVVIALMGTVAQMELEAIKERIRSAAHYNIRAGKYRGSLPPWGYLPTRVDGEWRLVPDPVQRERILEVYHRVVDNHEPLHLVAHDLNRRGVLSPKDYFAQLRGREPRGRKWSATALKRSMISGAMLGYATLNGKTVRGDDGAPLVRAEPILTRGQQEALRAELVRTSRAKPAVSTPSLLLRVLFCAVCGEPAYKFVGGGRKHPRYRCRSMGFPKHCGNGTVVVAEWDAFCEEQVLNLLGDAERLEKVWVAGSDSAVELAEVNVELVDLTSLIGSPAYRAGSTQREALDARIAALAARQEELESLEARPSGWEWRGTGQRFGDWWREQDTAAKNTWLRSMNVRLTFDVRGGLTRTIDFGELQEYEQHLRLGGVVERLHTGMS

SEQ ID NO: 10452 - protein, 500 aa, synthetic construct
MRALVVIRLSRVTDATTSPERQLESCQQLCAQRGWDVVGVAEDLNVSGAVDPFDRKRRPSLARWLAFEEQPFDVIVAYRVDRLTRSIRHLQQLVHWAEDHKKLVVSATEAHFDTTTPFAAVVIALMGTVAQMELEAIKERNRSAAHFNIRAGKYRGSLPPWGYLPTRVDGEWRLVPDPVQRERILEVYHRVVDNHEPLHLVAHDLNRRGVLSPKDYFAQLRGREPQGRKWSATALKRSLVSEAMLGYATLNGKTVRDDDGAPLVRAEPILTREQLEALRAELAKTSRAKPAVSTPSLLLRVLFCAVCGEPAYKFAGGGRKHPRYRCRSMGFPKHCGNGTVAMAEWDAFCEEQVLDLLGDAERLEKVWVAGSDSAVELAEVNAELVDLTSFIGSPAYRAGSPQREALDARIAALAARQEELEGLEARPSGWEWRGTGQRFGDWWREQDTAAKNAWLRSMNVRLTFDVRGGLTRTVDFGDLQEYEQHLRLGSVVERLHTGMS

SEQ ID NO: 10453 - protein, 500 aa, synthetic construct
MRALVVIRLSRVTDATTSPERQLEACQQLCAQRGWDVVGVAEDLDVSGAVDPFDRKRRPNLARWLAFEEQPFDVIVAYRVDRLTRSTRHLQQLVRWAEDHKKLVVSATEAHFDTTTPFAAVVIALMGTVAQMELEAIKERIRSAVHFNIRAGKYRGSLPPWGYLPTRVDGEWRLVPDPVQRERILEVYHRVVDNHEPLHLVAHDLNRRGVLSPKDYFAQLRGREPQGREWSATALKRSMTSVAMLGYATLNGKTVRDDDGAPLVRAEPILTREQQGALRAELVKTSRAKPAVSTPSLLLRVLFCAVCGEPAYKFVGGGRKHPRYRCRSMGFPKHCGNGTVVMAEWDAFCEEQVLNLLGDVERLEKVWVAGSDSSVELAEVNAELVDLTSLIGSPAYRAGSPQREALDARIAALAARQEELEGLEARPSGWEWRGTGQRFGDWWREQDTTAKNTWLRSMNVRLTFDVRGGPTRTIDFGDLQEYEQHLRLGSVVERLHTGMP

SEQ ID NO: 10454 - protein, 500 aa, synthetic construct
MRALVVIRLSRVTDATTSPERQLESCQQLCAQRGWDVVGVAEDLDVSGAVDPFDRKRRPNLARWLAFEEQPFDVIVAYRVDRLTRSTRHLQQLVHWAEDHEKLVVSATEAHFDTTTPFAAVVIALMGTVAQMELEAIKERNRSAAHFNIRAGKYRGSLPPWGYLPARVDGEWRLVPDPVQRERILEVYHRVVDNHEPLHLVAHDLNRRGVLSPKDYFAQLQGREPQGRKWSATALKRSMISEAMLGYATLNGKTVRDDDGAPLVRAEPILTREQLEALRAELVKTSRARPAVSTPSLLLRVLFCAVCGEPAYKFAGGGRKHPRYRCRSMGSPKHCGNGAVVMAEWDAFCEEQVLNLLGDAERLEKVWVVGSDSAVELAEVNAELVDLTSLIGSPAYRAGSPQREALDARIAALAARQEELEGLGARPSGWEWRETGQRFGDWWREQDTAAKNTWLRSMNVRLTFDVRGGLTRTIDFGDLQEYEQHLRLGSVVERLHAGMS

SEQ ID NO: 10455 - protein, 500 aa, synthetic construct
MRALVVIRLSRVTDATTSPERQLESCQQLCAQRGWDVVGVAEDLDVSGAVDPFNRKRRPNLARWLAFEEQPFDVIVAYRVDRLTRSTRHLQQLVRWAEDHKKLVVSATEAHFDTTTPFAAVVIALMGTVAQMELEAIKERIRSAAHFNIRAGKYRGSLPPWGYLPTRVDGEWRLVPDPVQRERILEVYHRVVDNHEPLHLVAHDLNRRGVLSPKDYFAQLQGREPQGRKWSATALKRSMISGAMLGYATLNGKIVRDDDGAPLVRAEPILTREQQEALRAELAKTSRAKPAVSTPSLLLRVLFCAVCGEPAYKFVGGGRKHPRYRCRSMGFPEHCGNGTVVMTEWDTFCEEQVLGLLGNVERLEKVWVAGSDSAVELAEVNAELVDLTSLIGSPAYRAGSPQREALDARIAALAARQVELESLEARPSGWEWRGTGQRFVDWWREQDTAAKNTWLRSMNVRLTFDVRGGLARTIDLGDLQEYVQHLRLGSMVERLHTEMP

SEQ ID NO: 10456 - protein, 500 aa, synthetic construct
MRALVVIRLSRVTDATTSPERQLESCRQLCAQRGWGVVGVAEDLDVSGAIDPFDRKRRPNLARWLAFEELPFDAIVAYRVDRLTRSVRHLQQLVHWAEDHKKLVVSATEAHFDTTTPFAAVVIALMGTVAQMELEAIKERIRSAVHFNIRAGKYRGSLPPWGYLPTRVDGEWRLAPDPTQRERILEVYHRVVDNHEPLHLVAHDLNRRGVLSPKDYFAQLQGREPQGRKWSATALKRSMISAAMLGYATLNGKTVRDDDGAPLVRAEPILTREQQEALRAELAKTSQAKPAVSTPSLLLRVLFCAVCGEPAYKFVGGGRKHPRYRCRSMGFPKHCGNGTVVMAEWDVFCEEQVLNLLGDAERLEKVWVAGSDSAVELAEVNAELVDLTSLIGSPAYRAGSPQREALDARIAALAARQEELEGLEARPSGWEWRGTGQRLGDWWREQDTAAKNTWLRSMNVRLTFDVRGGLTRTIDFGDLQEYERHLRLGSVVERLHTGMS

SEQ ID NO: 10457 - protein, 500 aa, synthetic construct
MRALVVIRLSRVTDATTSPERQLESCQQLCAQRGWDVVGVAEDLDVSGAVDPFDRKRRPNLARWLAFEEQPFDVIVAYRVDRLTRSTRHLQQLVLWAEDHKKLVVSATEAHFDTTTPFAAVVIALMGTVAQMELEAIKERVRSAVRFNIRAGKYRGSLPPWGYLPTRVDGEWRLVPDPVQRERILEVYHRVVDNHEPLHLVAHDLNRRGALSPKDYFAQLRGREPQGRKWSATALKRSMISVAMLGYATLNGKIVRDDDGAPLVRAEPILTREQQEALRAELAKTSRAKPAVSTPSLLLRVLFCAVCGEPAYKFVGGGRKHPRYRCRSMGFPEHCGNGTVAMAEWDAFCEEQVLDLLGDAERLEKVWVAGSDSAVELAEVNVELVDLTSLIGSPAYRAGSPQREALDARIAALAARQEELESLEARPSGWEWRGTGQRFGDWWREQDTAAKNTWLRSMNVRLTFDVRGGLTRTIDFGDLQEYEQHLRLGSVVERLHTGMS

SEQ ID NO: 10458 - protein, 500 aa, synthetic construct
MRALVVIRLSRVTDATTSPERQLESCQQLCAQRGWVVVGVAEDLDVSGAVDPFDRKRRPNLARWLAFEQQPFDVIVAYRVDRLTRSTRHLQQLVHWAEDHKKLVVSATEAHFDTTTPFAAVVIALMGTVAQMELEAIKERIRSAVRFNIRAGKYRGSLPPWGYLPTRVDGEWRLVPDPVQRERILEVYHRVVDNHEPLHLVAHDLNRRGVLSPKDYFAQLRGREPQGREWSATALRRSMTSVAMLGYATLNGKTVRDDDGAPLVRAEPILTREQQEALRAELAKTSRAKPAVSTPSLLLRVLFCAVCGEPAYKFVGGGRKHPRYRCRSMGFPKHCGNGTVAMAEWDAFCEEQVLNLLGDAERLEKVWVAGSDSAVELAEVNAELVDLTRLIGSPAYRVGSPQREALDARIAALAARQEELEGLEARPSGWEWRETGQRFGDWWREQDTAAKNTWLRLMNVRLTFDARGGLTRTIDFGDLQEYEQHLRLGSVVERLHAGRS

SEQ ID NO: 10459 - protein, 500 aa, synthetic construct
MRALVVIRLSRVTDATTSPERQLESCQQLCAQRGWDVVGVAEDLNVSGAVDPFDRKRRPNLARWLAFEEQPFDVIVAYRVDRLTRSIRHLQQLVHWAEDHKKLVVSATEAHFDTTTPFAAVVIALMGTVAQMELEAIKERNRSAAHFNIRAGKYRGSLPPWGYLPMRVDGEWRLVPDPVQRERILEVYHRVVDNHEPLHLVAHDLNRRGVLSPKDYFAQLQGREPQGRKWSATALKRSMISEAMLGYATLNGKTVRDDDGAPLVRAEPILTRGQLEALRTELVKTSRAKPAVSTPSLLLRVLFCAVCGEPAYKFAGGGRKHPRYRCRSMGFPKHCGNGTVVMAEWDAFCEEQVLDLLGDVERLEKVWVAGSDSAVELAEVNAELVDLTSLIGSPAYRAGSPQREALDARIAALAARQEELEGLEARPSGWEWRETGRRFGDWWREQDTAAKNTWLRSMNVRLTFDVRGRLTRTIDFGDLQEYEQHLRLGSVVERLHTGMS

SEQ ID NO: 10460 - protein, 500 aa, synthetic construct
MRALVVIRLSRVTDATTSPERQLESCQQLCAQRGWDVVGVAEDLDVSGAVDPFDRKRRPNLARWLAFEEQPFDVIVAYRVDRLTRSTRHLQQLVRWAEDHKKLVVSATEAHFDTTTPFAAVVIALMGTVAQMELEAIKERIRSAVHFNVRAGKYRGSLPPWGYLPARVDGEWRLVPDPVQRERILEVYHRVVDNHEPLHLVAHDLNRRGILSPKDYFAQLRGREPRGRKWSATALRRSMTSEAMLGYATLNGKTVRDDDGAPLVRAEPILTREQLEALRTELARTSRAKPAVSTPSLLLRVLFCAVCGEPAYKFVGGGRKHPRYRCRSMGFPKHCGNGTVVMAEWDEFCEERVLDLLGDAERLEKVWVAGSDSAVELAEVNAELVDLTSLIGSPAYRAGSPQREALDARIAALAARQEELESLEARPSGWEWRGTGQRFGDWWREQDTAAKNTWLRSMNVRLTFDVRGGLTRAIDFGDLQEYGQRLRLGGVVERFHTGMP

SEQ ID NO: 10461 - protein, 500 aa, synthetic construct
MRVLIVIRLSRVTDATTSPVRQLESCQQLCAQRGWDVVGVAEDLDVSGAVDPFDRKRRPNLARWLAFEEQPFDAIVAYRVDRLTRSVRHLQQLIHWAEDHKKLVVSATEAHFDTTTPFAAVVIALMGTVAQMELEAIKERNRSAAHFNIRAGKYRGSQPPWGYLPTRVDGEWRLVPDPVQRERILEVYHRVVDNHEPLHLVAHDLNRRGVLSPKDYFAQLQGREPQGRKWSATALKRSMISEAMLGYATLNGKTVRNDDGAPLVRAEPILTRGQLEALRAELVKTSRAKPAVSTPSLLLRVLFCAVCGEPAYKFAGGGRKHPRYRCRSMGFPKHCGNGTVVMAGWDAFCEEQVLDLLGDAERLEKVWVAGSDSAVELAEVNAELVDLTSLVGSPAYRADSPQREALDARIAALAARQEELEGLEARPSGWEWRGTGQRFGDWWREQDTAAKNTWLRSMNVRLTFDVRGGLTRTIDFGDLQEYEQHLRLGSVVERLHTGMS

SEQ ID NO: 10462 - protein, 500 aa, synthetic construct
MRALVVIRLSRVTDATTSPERQLESCQQLCAQRGWDVVGVAEDLDVSGAVDPFDRKRRPNLARWLAFERQPFDVIVAYRVDRLTRSTRHLQQLVLWAEDHKKLVVSATEAHFDTTTPFAAVVIALMGTVAQMELEAIKERIRSAVRFNIRAGKYRGSLPPWGYLPARVDGEWRLVPDPVQRERVLEVYHRVVDNHEPLHLVAYDLNRRGVLSPKDYFAQLRGREPQGRKWSATALKRSMISVAMLGYATLNGKTVRDDDGAPLVRAEPILTREQQEALRAELAKTSRAKPAVSTPSLLLRVLFCAVCGEPAYKFVGGGRRHPRYRCRSMGFPKHCGNGTVVMAEWDAFCEEQVLDLLGDAERLEKVWVAGSDSAVELAEVNAELMDLTSLIGSPAYRAGSPQREALDARIAALAARQEELEGLEARPSGWEWRETGQRFGDWWREQDTAAKNTWLRSMNVRLTFDVRGGLTRTIDFGDLQEYEQHLRLGSEVGRLHAGTS

SEQ ID NO: 10463 - protein, 500 aa, synthetic construct
MHALVVIRLSRVTDATTSPERQLESCQQLCAQRGWDVVGVAEDLDVSGAVDPFDRKRRPNLARWLAFEEQPFDVIVAYRVDRLTRSTRHLQQLVHWAEDHKKLVVSATEAHFDTTTPFAAVVIALMGTVAQMELEAIKERNRSAAHFNIRAGKYRGSLPPWGYLPTRVDGEWRLVPDPVQRERILEVYHRVVDNHEPLHLVAHDLNRRGVLSPKDYFAQLRGREPQGRKWSATALKRSMISEAMLGYATLNGKTVRDDDGVPLVRAEPILTREQLEALRAELVKTSRAKPAVSTPSLLLRVLFCAVCGEPAYKFAGGGRKHPRYRCRSMGFPKHCGNGTVAMAEWDALCEEQVLDLLGDAERLEKVWVAGSDSAVELAEVNAELVDLTSLIGSPAYRAGSPQREALDARIAALAARQEELEGLEARPSGWEWRGTGQRFGDWWREQDTAAKNTWLRSMNVRLTFDVRGGLTRTIDFGDLQEYEQHLRLGSVVERLHTGMS

SEQ ID NO: 10464 - protein, 500 aa, synthetic construct
MRALVVIRLSRVTDATTSPERQLESCQQLCAQRGWDVVGVAEDLDVSGAVNPFDRKRRPNLARWLAFEEQPFDVIVAYRVDRLTRSTRHLQQLVHWAEDHKKLVVSATEAHFDTTTPFAAVVIALMGTVAQMELEAIRERNRSAAHFNIRAGKYRGSLPPWGYLPARVGGEWRLVPDPVQRERILEVYHRVVDDHEPLHLVAHDLNRRGVLSPKDYFAQLQGREPQGRKWSATALKRSMISGAMLGYATLNGKTVRDDDGAPLVRAEPILTREQLEALRAELVKTSRARPAVSTPSLLLRVLFCAVCGEPAYKFAGGGRKHPRYRCRSMGFPKHCGNGTAAMAEWDAFCEEQVLNLLGDAERLEKVWVAGSDSAVELAEVNAELVDLTSLVGSPAYRAGSPQREALDARIAALTARQEELGGLEARPSGCEWRGTGQRFGDWWREQDTAAKNTWLRSMNVRLTFDVRGGLTRTIDFGDLQEYEQHLRSGSVVERLHTGMS

SEQ ID NO: 10465 - protein, 500 aa, synthetic construct
MRALVVIRLSRVTDATTSPERQLESCQQLCAQRGWDVVGVAEDLNVSGAVDPFDRKRRPNLARWLAFEEQPFDVIVAYRVDRLTRSTRHLQQLVHWAEDHKKLVVSATEAHFDTTTPFAAAVIALMGTVAQMELEAIKERNRSAAHFNIRAGKYRGSLPPWGYLPTRVDGEWRLVPDPVQRERILEVYHRVVDNHEPLHLVAHDLNRRGVLSPKDYFAQLQGREPQGRRWSATALKRSMISKAMLGYATLNGKTVRDDDGAPLVRAEPILTREQLEALRAELVKTSRAKPAVSTPSLLLRVLFCAVCGEPAYKFAGGGRKHPRYRCRSMGFPKHCGNGTVVMAEWDAFCEEQVLNLLGDAERLEKVWAAGSDSAVELAEVNAELVDLTSLIGSPAYRASSPQREALDARIAALAARQEELEGLGTRPSGWEWRETGQRFGDWWREQDTAAKNTWLRSMNVRLTFDVRGGLTRTIDFGDLQEYEQHLRLGSVVERLHTGMS

SEQ ID NO: 10466 - protein, 500 aa, synthetic construct
MRALIVIRLSRVTDATTSPERQLESCQQLCAQRGWDVVGVAEDLDVSGAVDPFDRKRRPNLARWLAFEEQPFDVIVAYRVDRLTRSVRHLQQLVHWAEDHKKLVVSATEAHFDTTTPFAAVVIALMGTVAQMELEAIKERNRSAAHFNIRAGKYRGSLPPWGYLPTRVDGEWRLVPDPVQRERILEVYHRVVDNHEPLHWVAHDLNRRGVLSPKDYFAQLQGREPQGRKWSATALKRSMISEAMLGYATLNGKTVRDDDGAPLVRAEPILTREQLEALRAELAKTSRAKPAVSTPSLLLRVLFCAVCGEPAYKFAGGGRKHPRYRCRSMGFPKHCGNGTVAMAEWDAFCEEQVLDLLGDAERLGKVWVAGSDSAVELAEVNAELVDLTSLIGSPAYRAGSPQREALDARIAALAARQEELEGLEARPSGWEWRGTGQRFGDWWREQDTAAKNTWLRSMNVRLTFDVRGGLTRTIDFGDLQEYEQLLRLGSVVERLHTGMS

SEQ ID NO: 10467 - protein, 500 aa, synthetic construct
MRALVVIRLSRVTDATTSPERQLESCQQLCAQRGWDVVGVAEDLDVSGAVDPFDRKRRPNLARWLAFEEQPFDVIVAYRVDRLTRSTRHLQQLVHWAEDHKKLVVSATEAHFDTTTPFAAVVIALMGTVAQMELEAIKERNRSAAHFNIRAGKYRGSLPPWGYLPTRVDGEWRLVPDPVQRERILEVYHRVVDNHEPLYFVAHDLNRRGVLSPKDYFAQLRGREPQGRKWSATALKRSMTSEAMLGYATLNGKTIRDEDGAPLVRAEPILTREQLEALRAELVKTSRAKPAVSTPSLLLRVLFCAVCGEPAYKFAGGGRRHPRYRCRSMGFPKHCGNGTVTMAEWDAFCEEQVLDLLGDAERLEKVWVAGSDSAVELAEVNAELVDLTSLIGSPAYRAGSPQREALDARIAALAARQEELEGLEARPSGWEWRETGQRFGDWWREQDTAAKNTWLRSMNVRLTFDARGGLTRTIDFGDLQEYEQHLRSGSVVERLHTGMS

SEQ ID NO: 10468 - protein, 500 aa, synthetic construct
MRALVVIRLSRVTDATTSPERQLESCQQLCAQRGWDVVGVAEDLDVSGAVDPFDRKRRPNLARWLAFGEQPFDVIVAYRVDRLTRSVRHLQQLVHWAEDHKKLVISATEAHFDTTTPFAAVVIALMGTVAQMELEAIKERNRSAAHFNIRAGKYRGSLPPWGYLPTRVDGEWRLVPDPVQRERILEVYHRVVDNHEPLHSVAHDLNRRGVLSPKDYFAQLQGREPQGRKWSATALKRSMISEAMLGYATLNGKTVRDDDGAPLVRAEPILTREQLEALRAELVKTSRAKPAVSTPSLLLRVLFCAVCGEPAYKFAGGGRKHPRYRCRSMGFPKHCGNGTVVMAEWDTFCEEQVLDLLGDAERLEKVWVAGSDSTVELAEVNAELVDLTSLIGSPVYRAGSPQREALDARIAALAARQEELEGLEARPSGWEWRETGQRFGDWWREQDTAAKNTWLRSMNVRLTFDVRGGLTRSIDFGDLQEYEQHLRLGSVVERLHTGMS

SEQ ID NO: 10469 - protein, 500 aa, synthetic construct
MRALVVIRLSRVTDATTSPERQLESCQQLCAQRGWDVVGVAEDLDVSGAVDPFDRKRRPNLARWLAFEEQPFDVIVAYRVDRLTRSVRHLQQLVHWAEDHKKLVVSATEAHFDTTTPFAAVVIALMGTVAQMELEAIRERNRSAAHFNIRAGKYRGSLPPWGYLPTRVDGEWRLVPDPVQRERILEVYHRVVDNHEPLHLVAHDLNRRGVLSPKDYFAQLRGREPQGRKWSATALKRSMTSEAMLGYATLNGKTVRDDDGAPLVRAEPILTRGQLEALRAELVKTPRAKPAVSTPSLLLRVLFCAVCGEPAYKFAGGGRKHPRYRCRSMGFPKHCGNGTVVMAEWDAFCEEQVLNLLGDAERLEKVWVAGSGSAVELSEVNAELVDLASLIGSPAYRAGSPQREALDARIAALAARQEELEGLEARPSGWEWRETGQRFGDWWREQNTAAKNTWLRSMNVRLTFDVRGELTRTIDFGDLQEYEQHLRLGSAVERLHTGMS

SEQ ID NO: 10470 - protein, 500 aa, synthetic construct
MRALVVIRLSRVTDATTSPERQLESCQQLCAQRGWDVVGVAEDLDVSGAVDPFDRKRRPNLARWLAFEEQPFDVIVAYRVDRLTRSTRHLQQLVHWAEDHKKLVVSATEAHFDTTTPFAAVVIALMGTVAQMELEAIKERNRSAAHFNIRAGKYRGSLPPWGYLPTRVDGEWRLVPDPVQRERILEVYRRVVDNHEPLHLVAHDLNRRGVSSPKDYFAQLRGREPQGRKWSATALKRSMISEAMLGYATLNGKTVRDDDGAPLVRAEPILTREQLEALRAELVKTSRAKPVVSTPSLLLRVLFCAVCGEPAYKLAGGGRKHPRYRCRSMGFPKHCGNGTVAMAEWDAFCEEQVLDLLGDAERLEKVWVAGSGSAVELAEANAELVDLTSLIGSPAYRAGSPQREALDARIAALAARQEELEGLEARPPGWEWRGTGQRFGDWWREQDTAAKNTWLRSMNVRLTFDVRGGLTRTIDFGDLQEYEQHLRLGSVAERLHTGMS

SEQ ID NO: 10471 - protein, 500 aa, synthetic construct
MRALVVIRLSRVTDATTSPERQLESCQQLCAQRGWDVVGVAEDLDVSGAVDPFDRKRRPSLARWLAFEEQPFDAVVAYRVDRLTRSVRHLQRLVRWAEDHKKLVVSATEAHFDTTTPFAAVVIALMGTVAQMELEAIKERSRSAAHFNIRAGKYRGSLPPWGYLPTRVDGEWRLVPDPVQRERILEVYHRVVDNHEPLHLVAHDLNRRGVLSPKDYFAQLRGREPRGRKWSATALRRSMTSEAMLGYATLNGKTVRDDDGAPLVRAEPILTREQQEALRAELAKTSRAKPAVSTPSLLLRVLFCAVCGEPAYKFVGGGRRHPRYRCRSMGSPKHCGNGSVVMAEWDAFCEEQVLNLLGDAERLERVWVAGSDSAVELAEVNAELVDLTSLLGSPAYRAGSPQREALDTRIAALAARQEELEGLEARPSGWEWRETGQRFGDWWREQDTAAKNTWLRSMNVRLTFDVRGGLTRTIDFGDLQEYEHHLRSGSAVERLHTGMS

SEQ ID NO: 10472 - protein, 500 aa, synthetic construct
MRALVVIRLSRVTDATTSPERQLESCQQLCAQRGWDVVGVAEDLDVSGAVDPFDRKRRPNLARWLAFGEQPFDVIVAYRVDRLTRSVRQLQQLVHWAEDHKKLVVSATEAHFDTTTPFAAVVIALMGTVAQMELEAIKERNRSAAHFNIRAGKYRGSLPPWGYLPTRVGGEWRLVPDPVQRERILEVYHRVVDDHEPLHWVAHDLNRRGVLSPKDYFAQLQGREPQGRKWSATALKRSMISEAMLGYATLNGKTVRDDDGAPLVRAEPILTREQLEALRAELVKTSRAKPAVSTPSLLLRVLFCAVCGEPAYKFAGGGRKHPRYRCRSMGFPKHCGNGTVAVAEWDAFCEEQVLGLLGDAERLEKVWVTGSDSAVELAEVNAELVDLTSLIGSPAYRAGSPQREALDARIAALAARQEELEGLEARPSGWEWRGTGQRFGDWWREQDTAVKNTWLRSMNVRLTFDVRGGLTRTIDFGDLLEYEQHLRLGSVVERSHTGMS

SEQ ID NO: 10473 - protein, 500 aa, synthetic construct
MRALVVIRLSRVTDATTSPERQLESCQQLCTQRGWDVVGVAEDLDVSGAVDPFDRKRRPNLARWLAFEEQPFDVIVAYRVDRLTRSTRHLQQLVRWAEDHKKLVVSATEAHFDTTTPFAAVVIALMGTVAQMELEAIKERIRSAVRFNIRAGKYRGSLPPWGYLPTRVDGEWRLVPDPVQRERILEVYHRVVDNHEPLHLVAHDLNRRGVLSPKDYFAQLRGREPQGRKWSATALKRSMISVAMLGYATLNGKTVRDDDGAPLVRAEPILTREQLEALRAELAKTSRAKPAVSTPSLLLRVLFCAVCGEPAYKFVGGGRKHPRYRCRSMGFPKHCGNGTVVMAEWDAFCEEQVLDLLGDAERLEKVWVAGSDSAVELAEVNAELVDLTSLIGSPAYRAGSPQREALDARIATLAARQEELEGLEARPSGWEWRETGQRLRDWWREQDTAAKNTWLRSMSVRLTFDVRGGLTRTIDFGELQEYEQHLRSGSVVERLRAGMS

SEQ ID NO: 10474 - protein, 500 aa, synthetic construct
MRALVVIRLSRVTDATTSPERQLESCRQLCAQRGWDVVGVAEDLDVSGAVDPFDRKRRPNLARWLAFEEQPFDVIVAYRVDRLTRSTRHLQQLVHWAEDHKKLVVSATEAHFDTTTPFAAVVIALMGTVAQMELEAIKERNRSAAHFNIRAGKYRGSLPPWGYLPTRVDGEWRLVPDPVQRERILEVYHRVVDNHEPLHLVAHDLNWRGVLSPKDYFAQLQGREPQGRKWSATALKRSMISEAMLGYATLNGKTVRDDDGAPLVRAEPILTREQLEALRAELVKTSRAKPAVSTPSLLLRVLFCAVCGEPAYKFAGGGRKHPRYRCRSMGFPKHCGNGTVAMAEWDAFCEEQVLDLLGDAERLNKVWVAGSDSAVELAEVNAELVDLTSLIGSPAYRAGSPQREALDARIAALAARQEELEGLEARPSGWEWRETGQRFGDWWREQDTAAKNAWLRSMNVRLTFDVRGGLTRTIDFGELQEYEQYLRLGSVVERFHTGRS

SEQ ID NO: 10475 - protein, 500 aa, synthetic construct
MRALVVVRLSRVTDATTSPERQLESCQQLCAQRGWDVVGVAEDLDVSGAVDPFDRKRRPNLARWLAFEEQPFDVIVAYRVDRLTRSTRHLQQLVHWAEDHKKLVVSATEAHFDTTTPFAAVVVALMGTVAQMELEAIKERNRSAAHFNIRAGKYRGSLPPWGYLPTRVDGEWRLVPDPVQRERILEVYHRVVDNHEPLHWVAHDLNQRGVLSPKDYFAQLQGREPQGRKWSATALKRSMISEAMLGYATLNGKTVRDDDGAPLVRAEPILTREQLEALRAELVKTSRAKPAVSTPSLLLRVLFCAVCGEPAYKFAGGGRKHPRYRCRSMGFPKHCGNGTVAMAEWDAFCEEQVLGLLGGAERLEKVWVAGSDSAVELAEVNAELVDLTSLIGSPAYCAGSPQREALDARIAALAARQEELEGLEARPSGWEWRGTGQRFGDWWREQDTAAKNTWLRSMNVRLTFDVRSGLTRTINFGDLQEYEQHLRLGSVVERLHTGMS

SEQ ID NO: 10476 - protein, 500 aa, synthetic construct
MRALVVIRLSRVTDATTSPERQLESCQQLCAQRGWDVVGVAEDLDVSGAVDPFDRKRRPNLARWLAFEEQPFDVIVAYRVDRLTRSVRHLQQLVHWAEDYKKLVVSATEAHFDTTTPFAAVVIALMGTVAQMELEAIKERNRSAAHFNIRAGKYRGSLPPWGYLPTRVDGEWRLVPDPVQRERILEVYHRVVDNHEPLHWVAHDLNRRGVLSPKDYFAQLQGREPQGRKWSATALKRSMISGAMLGYATLHGKTVRDDDGAPLVRAEPILTREQLEALRAELVKTSRTKPAVSTPSLLLRVLFCAVCGEPAYKFAGGGRKHPRYRCRSMGFPKHCGNGTVVMAEWDAFCEEQVLDLLGDAERLEKVWVAGSGSAVELAEVNAELVDLTSLISSPAYRVGSPQREALDARVAALAARQEELEGLEARPPGWEWRETGQRFGDWWREQDTAAKNAWLRSMNVRLTFDARGGLTRTIDFGDLQEYEQHLRLGSVVERLHTGMS

SEQ ID NO: 10477 - protein, 500 aa, synthetic construct
MRALVVIRLSRVTDATTSPERQLESCQQLCAQRGWDVVGAAEDLDVSGAVDPFDRKRRPNLARWLAFEEQPFDVIVAYRVDRLTRSTRHLQQLVRWAEDHKKLVVSATEAHFDTTTPFAAVVIALMGTVAQMELEAIKERTRSAVRFNIRAGKYRGSLPPWGYLPTRVDGEWRLVPDPVQRERILEVYHRVVDNHESLHLVAHDLNGRGVLSPKDYFAQLRGREPQGRKWSATALKRSMTSVAMLGYATLNGKTVRDDDGAPLVRAEPILTREQQEALHAELAKTSRAKPAVSTPSLLLRVLFCAVCGEPAYKFVGGGRKHPRYRCRSMGIPKHCGNGTVAMAEWDAFCEEQVLGLLGDAERLEKVWVAGSDSAVELAEVNAELVDLTSLIGSPAYRAGSPQREALDARIAALAARQEELEGLEARPSGWEWRGTGQRFGDWWREQDTAAKNTWLRAMNVRLTFDVRGGLTRTVDFGDLREYERHLRLGSEAERLRTGMS

SEQ ID NO: 10478 - protein, 500 aa, synthetic construct
MRALVVIRLSRVTDATTSPERQLESCQQLCAQRGWDVVGVAEDLDVSGAVDPFDRKRRPYLARWLAFEEQPFDAIVAYRVDRLTRSIRHLQQLVHWAEDHKKLVVSATEAHFDTTTPFAAVVIALMGTVAQMELEAIKERIRSAVHFNIRAGKYRGSLPPWGYLPTRVDGEWRLVPDPVQRERILEVYHRVVDNHEPLHLVAYDLNRRGVLSPKDYFAQLQGREPQGREWSATALKRSMTSGAMLGYATLNGKTVRDDDGAPLVRAEPILTREQQEALRAELAKTSRAKPAVSTPSLLLRVLFCAVCGEPAYKFVGGGRKHPRYRCRSMGFPKHCGNGTVVMAEWDAFCEKQVLGLLGDAERLEKVWVAGSDSAAELAEVSAELVDLTSLIGSPAYRAGSPQREALDARIAALAARQEELEGLEARPSGWEWRGTGQRLGDWWREQDTAAKNTWLRSMNVRLTFDVRGGLTRTIDFGELQEYEQHLRLGSVAERLHTGMS

SEQ ID NO: 10479 - protein, 500 aa, synthetic construct
MRALVVIRLSRVTDATTSPERQLESCQQLCAQRGWDVVGVAEDLDVSGAVDPFDRKRRPNLARWLAFEEQPFDAIVAHRVDRLTRSVRHLQQLVRWAEDHKKLVVSATEAHFDTTTPFAAVVIALMGTVAQMELEAIKERIRSAAHFNIRAGKYRGSLPPWGYLPTRVDGEWRLVPDPVQRERILEVYHRVVDNHEPLHLVAHDLNRRGVLSPKDYFAQLRGREPQGREWSATALKRSMTSVAMLGYATLNGKTVRDDDGAPLVRAEPILTREQLEALRAELVKTSRAKPAVSTPSLLLRVLFCAVCGEPAYKLAGGGRKHPRYRCRSMGFPEHCGNGTVVMAEWDAFCEEQVLNLLGDAERLEKVRVAGSDSAVELAEVNAELVDLTSLIGSPVYRAGSPQREALDARIAALATRQEELEGLEARPSGWEWRKTGQRFGDWWREQDTAAKNTWLRLMNVRLTFDVRGGLTRTIDFGDLQEYEQHLRLGSAVEHLHTGMS

SEQ ID NO: 10480 - protein, 500 aa, synthetic construct
MRALVVIRLSRVTDATTSPERQLESCQQLCSQRGWDVVGVAEDLDVSGAVDPFDRKRRPNLARWLAFEEQPFDVIVAYRVDRLTRSVRHLQQLVHWAEDHKKLVVSATEAHFDTTTPFAAVVIALMGTVAQMELEAIKERNRSAAHFNIRAGKYRGSLPPWGYLPTRVDGEWRLVPDSVQRERILEVYRRVVDNHEPLHLVAHDLNRRGVLSPKDYFAQLQGREPRGRKWSATALKRSMISEAMLGYATLNGKTVRDDDGAPLVRAEPILTRVQLEALRAELAKTSRARPAVSTPSLLLRVLFCAVCGEPAYKFAGGGRKHPRYRCRSMGFPKHCGNGTVVMAEWDAFCEEQVLNLLGDAERLEKVWVAGSDSAVELAEVNAELVDLTSLIGSPAYRAGSPQRETLDARIAALAARQGELEGLEARPSGWEWRETGQRFGDWWREQDTAAKNTWLRSMNVRLTFDVRGGLTRTIDFGDLQEYEQHLRLGSVVERLHTGMS

SEQ ID NO: 10481 - protein, 500 aa, synthetic construct
MRALVVIRLSRVTDATTSPERQLESCQQLCAQRGWDVIGVAEDLDVSGAVDPFDRKRRPNLARWLAFEEQPFDAIVAYRVDRLTRSVRHLQQLVHWAEDHKKLVVSATEAHFDTTTPFAAVVIALMGTVAQMELEAVKERNRSAAHFNIRAGKYRGSLPPWGYLPTRVDGEWRLVPDPVQCERILEVYHRVVDNHEPLHLVAHDLNRRGVLSPKDYFAQLRGREPQGRKWSATALKRSMISEAMLGYATLNGRTVRDDDGAPLVRAEPILTREQLEALRAELVKTSRAKPAVSTPSLLLRVLFCAVCGEPAYKFAGGGRKHPRYRCRSMGFPKHCGNGTVAMAEWDAFCEEQVLDLLGDAERLEKVWVVGSDSAVELAEVNAELVDLTNLIGSPAYRAGSPQREALDARIAALAARQEELEGLGARPSGWEWRETGLRFGDWWREQDTAAKNTWLRSMNVRLTFDVRGGLTRAIDFGDLQEYEQHLRLGSVVERLHTGMS

SEQ ID NO: 10482 - protein, 500 aa, synthetic construct
MHALVVIRLSRVTDATTSPERQLESCQQLCAQRGWDVVGVAEDLDVSGAVDPFDRKRRPNLARWLAFEEQPFDVIVAYRVDRLTRSVRHLQQLVHWAEDHKKLVVSATEAHFDTATPFAAVVIALMGTVAQMELEAIKERNRSAAHFNIRAGKYRGSLPPWGYLPTRVDGEWRLAPDPVQRERILEVYHRVVDNHEPLHLVAHDLNRRGVLSPKDYFAQLQGREPQGRKWSATALKRSMISEAMLGYATLNGKTVRDDDGAPLVRAEPILTREQLEALRAELVKTSRAKPAVSTPSLLLRVLFCAVCGEPAYKFAGGGRKHPRYRCRSMGFPKHCGNGTVAMVEWDAFCEEQVLDLLGDAERLEKVWVAGSDSAVELAEVNAELVDLTSLIGSPAYRAGSPQREALDARIAALAARQEELEGLGARPSGWEWRETGQRFGDWWREQDTAAKNTWLRSMNVRLTFDVRGGLTRTIDFGDLQEYEQHLRLGSVVERLHTGMS

SEQ ID NO: 10483 - protein, 500 aa, synthetic construct
MRALVVIRLSRVTDATTSPERQLESCQQLCAQRGWDVVGVAEDLDVSGAVDPFDRKRRPNLARWLAFEEQPFDVIVAYRVDRLTRSIRHLQQLVHWAEDHKKLVVSATEAHFDTTTPFAAVVIALMGTVAQMELEAIKERIRSAVHFNIRAGKYRGSLPPWGYLPARVDGEWRLAPDPVQREHILEVYRRVVDNHEPLHLVAHDLNRRGVLSPKDYFAQLRGREPQGREWSATALKRSMISVAMLGYATLNGKIVRDDDGAPLVRAEPILTREQQEALRAELAKTSRAKPAVSTPSLLLRVLFCAVCGEPAYKFVGGGRKHPRYRCRSMGFPKHCGNGTVVMAEWDTFCEEQVLNLLGDAERLEKVWVAGSDSAVELAEVNAELVDLTSLIGSPAYRAGSPQREALDARIAALAARQEELEGLEARPSGWEWRGTGQRLGDWWREQDTAAKNTWLRSMNVRLTFDVRGGLTRTIDFGDLQEYERHLRLGGVVERLHTGMS

SEQ ID NO: 10484 - protein, 500 aa, synthetic construct
MRALVVIRLSRVTDATTSPERQLESCQQLCAQRGWGVVGVAEDLDVSGAVDPFDPKRRPNLARWLAFEEQPFDVIVAYRVDRLARSTRHLQRLVHWAEDHKKLVVSATEAHFDTTTPFAAVVIALMGTVAQMELEAIKERIRSAAHFNIRAGKYRGSLPPWGYLPTRVEGEWRLVPDPVQRERILEVYHRVVDNHEPLHLVAYDLNRRGVLSPKDYFAQLRGREPQGREWSATALKRSMTSVAMLGYATLNGKTVRGDDGAPLVRAEPILTRGQQEALRAELAKTSRAKPAVSTPSLLLRVLFCAVCGEPAYKFVGGGRKRPRYRCRSMGFPKHCGNGTVVMAEWDAFCEEQVLDLLGDAERLEKVWVAGSDSAVELAEVNAELVDLMSLIGSPAYRAGSPQREALDARIAALAARQEELEGLEARPSGWEWRGTGQRFGDWWREQDTAAKNTWLRSMNVRLTFDARGGLTRTIDFGDLQEYEQHLRLGSVVERLHTGMS

SEQ ID NO: 10485 - protein, 500 aa, synthetic construct
MRALVVIRLSRVTDATTSPERQLESCQQLCAQRGWDVVGVAEDLDVSGAVDPFDRKRRPNLARWLAFEEQPFDVIVAYRVDRLTRSVRHLQQLVHWAEDHRKLVVSATEAHFDTTTPFAAVVIALMGTVAQMELEAIKERIRSAVRFNIRAGKYRGSLPPWGYLPTRVDGEWRLVPDPVQRGRILEVYHRVVGNHEPLHLVAHDLNRRGVLSPKDYFAQLRGREPQGRKWSATALRRSMTSEAMLGYATLNGKTVRDDDGAPLVRAEPILTREQQEALRAELAKTSRAKPAVSTPSLLLRVLFCAVCGEPAYKFVGGGRKHPRYRCRSMGSPKHCGNGTVVMAEWDAFCEEQVLDLLGDAERLEKVWVAGSDSAVELAEVNAELVDLTSLIGSPAYRAGSPQREALDARIAALAARQEELEGLEARPSGWEWRGTGQRLGDWWREQDTAAKNTWLRSMNIRLTFDVRGGLTRTIDFGELQEYEQHLRSGSVVERLHTGMS

SEQ ID NO: 10486 - protein, 500 aa, synthetic construct
MRALVVIRLSRVTDATTSPERQLESCQQLCAQRGWDVVGVAEDLNVSGAVDPFDRKRRPSLARWLAFEEQPFDVIVAYRVDRLTRSIRHLQQLVHWAEDHEKLVVSATEAHFDTTTPFAAVVIALMGTVAQMELEAIKERNRSAAHFNIRAGKYRGSLPPWGYLPTRVDGEWRLVPDPVQRERILEVYHRVVDNHEPLHLVAHDLNRRGVLSPKDYFAQLQGREPQGRKWSATALKRSMTSEAMLGYATLNGKTVRDDDGAPLVRAEPILTRGQLEALRAELVKTSRAKPAVSTPSLLLRVLFCAVCGEPAYKFAGGGRKHPRYRCRSMGFPKHCGNGTVAMAEWDAICEEQVLDLLGDAERLEKAWVAGSDSAVELAEVNAELVDLTSLIGSPAYRAGSPQRVALDARIAALAARQEELEGLEARPSGWEWRGTGQRFGDWWREQDTAAKNAWLRSMNVRLTFDVRGGLTRSIDFGDLQEYEQHLRLGSVVERLHTRMS

SEQ ID NO: 10487 - protein, 500 aa, synthetic construct
MRALVVIRLSRVTDATTSPERQLESCQQLCAQRGWDVVGVAEDLDVSGAVDPFDRKRRPNLARWLAFEEQPFDAIVAYRVDRLTRSVRHLQRLVHWAEDHEKLVVSATEAHFDTTTPFAAVVIALMGTVAQMELEAIKERNRSAAHFNIRAGKYRGSLPPWGYLPTRVDGEWRLVPDPVQRERILEVYRRVVDNHEPLHLVAHDLNRRGVLSPKDYFAQLRGREPQGRKWSATALRRSMISEAMLGYATLNGKTVRDDDGAPLVRAESILTRGQLEALRAELVKTSRAKPAVSTPSLLLRVLFCAVCGEPAYKFAGGGRKHPRYRCRSMGFPKHCGNGTVVMAEWDAFCEEQVLGLLGDAERLEKVWVAGSDSAVELAEVNAELVDLTSLIGSPAYRAGSPQREALDARIAALAARQGELEGLEARPSGWVWRETGQRFGDWWREQDTAAKNTWLRSMNVRLTFDVRGGLTRTIDFGDLQEYEQHLRLGSVVERLHTGMS

SEQ ID NO: 10488 - protein, 500 aa, synthetic construct
MRALVVIRLSRVTDATTSPERQLESCQQLCAQRGWDVVGVAEDLDVSGAVDPFDRKRRPNLARWLAFEEQPFDVIVAYRVDRLTRSTRHLQQLVHWAEDHKKLVVSATEAHFDTTTPFAAVVIALMGTVAQMELEAIKERIRSAAHFNIRAGKYRGSLPPWGYLPTRVDGEWRLVPDPVQRERILEVYHRVVDNHEPLHLVAHDLNRRGVLSPKDYFAQLQGREPQGRKWSATALRRSMISVAMLGYATLNGKTVRDDDGAPLVRAEPILTRGQQEALRAELAKTSRAKPAVSTPSLLLRVLFCAVCGEPAYKFVGGGRKHPRYRCRSMGFPKHCGNGTVVMAEWDAFCEEQVLDLLGDAERLEKVWVVGSDSAVELAEVNAELVDLTSLIGSPAYRAGSPQREALDARIAALAARQEELESLEARPSGWEWRKTGQRFGDWWREQDTAAKNTWLRSMNVRLTFDVRGGLTRTIDFGDLQEYEQHLRLGSVVERLHTGMS

SEQ ID NO: 10489 - protein, 500 aa, synthetic construct
MRALVVIRLSRVTDATTSPERQLESCQQLCAQRGWDVVGVAEDLDVSGAVDPFDRKRRPNLARWLAFEEQPFDVIVAYRVDRLTRSTRHLQQLVHWAEDHKKLVVSATEAHFDTTTPFAAVVIALMGTVAQMELEAIKERNRSAAHFNIRAGKYRGSLPPWGYLPTRVDGEWRLVPDPVQRERILEVYHRVVDNHEPLHLVAHDLNRRGVLSPKDYFAQLQGREPQGRKWSATALKRSMISEAMLGYATLNGKTVRDDDGAPLVRAEPILTREQLEALRAELVKTSRAKPAVSTPSLLLRVLFCAVCGEPAYKFAGGGRKHPRYRCRSMGFPKHCGNGTVVMAEWDAFCEEQVLDLLGDAERLEKVWVAGSDSAVELAEVNAELVDLTSLIGSPAYRVGSPQREALDARIAALAARQEELEGLGARPSGWEWRETGQRFGDWWREQDTAAKNTWLRSMNVRLTFGVRGGLTRTIDFGDLQEYEQHLRLGSVVERLHTGMS

SEQ ID NO: 10490 - protein, 500 aa, synthetic construct
MRALVVIRLSRVSDATTSPERQLESCQQLCAQRGWDVVGVAEDLDVSGAVDPFDRKRRPNLARWLAFEEQSFDVIVAYRVDRLTRSVRHLQQLVHWAEDHKKLVVSATEAHFDTTTPFAAVVIALMGTVAQMELEAIKERNRSAAHFNIRAGKYRGSLPPWGYLPTRVDGEWRLVPDPVQRERILEVYHRVVDNHESLHLVAHDLNRRGVLSPKDYFAQLRGREPQGRKWSATALKRSMISEAMLGYATLNGKTVRDDDGAPLVRAEPILTRAQLEALRSELVKTSRAKPAVSTPSLLLRVLFCAVCGEPAYKFAGGGRKHPRYRCRSMGFPKHCGNGTVVMAEWDAFCEEQVLDLLGDAERLEKVWVAGSDSAVELAEVNAELVDLTSLIGSPAYRAGSPQREALDARIAALAARQEELEGLEARPSGWEWRETGQRFGDWWREQDTAAKNTWLRSMNVRLTFDVRGGLTRTIDFGDLLEYEQHLRLGSVVERLHTGMS

SEQ ID NO: 10491 - protein, 500 aa, synthetic construct
MRALVVIRLSRVTDATTSPERQLESCQQLCAQRGWDVIGVAEDLDVSGAVDPFDRKRRPNLARWLAFEEQPFDVIVAYRVDRLTRSIRHLQQLVHWAEDHKKLVVSATEAHFDTTTPFAAVVIALMGTVAQMELEAIKERIRSAVHFNIRAGKYRGSLPPWGYLPARVDGEWRLAPDPVQRERILEVYHRVVDNHEPLHLVAYDLNRRGVLSPKDYFAQLRGREPQGREWSATALKRSMTSVAMLGYATLNGKIVRDDDGAPLVRAEPILTREQLEALRAELAKTSRAKPAVSAPSLLLRVLFCAVCGEPAYKFVGGGRKHPRYRCRSMGFPEHCGNGTVVMAEWDAFCEEQVLDLLGDAERLEKVWVAGSDSAVELAEVNAELVDLTSLIGSPAYRAGSPQREALDARIAALAARQEELEGLEARPSGWEWRETGQRFGDWWREQDTAAKNTWLRSMNVRLTFDVRGGLTRTIDFGDLQEYVQHLRLGSVVERLHTGMS

SEQ ID NO: 10492 - protein, 500 aa, synthetic construct
MRALVVIRLSRVTDATTSPERQLESCQQLCAQRGWDVVGVAEDLDVSGAVDPFDRKRRLNLARWLAFEEQPFDVIVAYRVDRLTRSVRYLQQLVHWAEDHKKLVVSATEAHFDTTTPFAAVVIALMGTVAQMELEAIKERNRSAAHFNIRAGKYRGSLPPWGYLPARVDGEWRLVPDPVQRERILEVYHRVVDNHEPLHLVAHDLNRRGVLSPKDYFAQLQGREPQGRKWSATALKRSMTSEAMLGHATLNGKTVRDDDGAPLVRAEPILTREQLEALRAELVRTSRAKPAVSTPSLLLRVLFCAVCGEPAYKFAGGGRKHPRYRCRSMGFPKHCGNGTVVMAEWDAYCEEQVLDLLGDAERLEKVWVAGSDSAVELTEVNAELVDLTSLIGSPAYRAGSPQREALDARIAALATRQEELEGLKARPSGWEWRETGQRFGDWWREQDTAAKNTWLRSMNVRLTFDARGGLTRTIDFGDLQEYEQHLRLGSVVERLHAGMS

SEQ ID NO: 10493 - protein, 500 aa, synthetic construct
MRVLIVIRLSRVTDATTSPERQLESCHQLCAQRGWDVVGVAEDLGVSGAVDPFDRKRRPNLARWLAFEEQPFDVIVAYRVDRLTRSIRHLQQLVHWAEDHKKLVVSATEAHFDTTTPFAAVVIALMGTVAQMELEAIKERNRSAAHFNIRAGKYRGSLPPWGYLPARVDGEWRLVPDPVQRERILEVYHRVVDNHEPLHLVAHDLNRRGVLSPKDYFARLQGREPQGRKWSATALKRSMISKAMLGYATLNGKTVRDDDGAPLVRAEPILTRGQLEALRAELVKTSRAKPAVSTPSLLLRVLFCAVCGEPAYKFAGGGRKHPRYRCRSMGFSKHCGNGTVVMAEWDAFCEEQVLDLLGDAERLEKVWVAGSDSAVELAEVNAELVDLTSLIGSPAYRAGSPQREALDARIAALTARQEELEGLEARPSGWEWRETGQRFGDWWREQDTTTKNTWLRSMNVRLTFDVRGGLTRTIDFGDLQEYEQHLRLGSVVERLHTGMS

SEQ ID NO: 10494 - protein, 500 aa, synthetic construct
MRALVVIRLSRVTDATTSPERQLESCQQLCAQRGWDVVGVAEDLDVSGAVDPFDRKRRPNLARWLAFEEQPFDVIVAYRVDRLTRSVRHLQQLVRWAEDHKKLVVSATEAHFDTTTPFAAVVIALMGTVAQMELEAIKERIRSAVHFNIRAGKYRGSLPPWGYLPTRVDGEWRLAPDPVQRERILEVYHRVVNNHEPLHLVAHDLNRRGVLSPKDYFAQLRGREPRGRKWSATALKRSMTSVAMLGYATLNGKTVRDDDGAPLVRAEPILTREQQEALRAELAKTSRARPAVSTPSLLLRVLFCAVCGEPAYKFVGGGRKHPRYRCRSMGFPEHCGNGTVVMAEWDAFCEEQVLGLLGDAERLEKVWVAGSDSAVELAEVNAELVDLTSLIGSPAYRAGSPQREALDARIAALAARQEELEGLEARPSGWEWRETGQRFGDWWREQDTAAKNTWLRSMNVRLTFDVRGGLTRTIDFGDLQEYEQHLRLGSVAERLHTGMS

SEQ ID NO: 10495 - protein, 500 aa, synthetic construct
MRALVVIRLSRVTDATTSPERQLVSCQQLCTQRGWDVVGVAEDLDVSGAVDPFDRKRRPNLARWLAFEEQPFDVIVAYRVDRLTRSIRHLQQLVHWAEDHRKLVVSATEAHFDTTTPFAAVVIALMGTVAQMELEAIKERSRSAAHFNIRAGKYRGSLPPWGYLPARVDGEWRLVPDPVQRERILEVYHRVVDNHEPLHLVAHDLNRRGVLSPKDYFAQLRGREPQGRKWSATALKRSMISEVMLGYATLNGKTVRDDDGAPLVRAEPILTREQLEALRAELVKTSRAKPAVSTPSLLLRVLFCAVCGEPAYKFAGGGRKHPRYRCRSMGFPKHCGNGTVAMAEWDAFCEEQVLDLLGDAERLEKVWVAGSDSAVEHAEVNAELVDLTSLVGSPAYRAGSPQREALDTRIAALAARQEELKGLEARPSGWEWRETGQRFGDWWREQDTAAKNTWLRSMNVRLTFDVRGGLTRTIDFGDLQEYEQHLRLGSVAERLHTGMS

SEQ ID NO: 10496 - protein, 500 aa, synthetic construct
MRALVVIRLSRVTDATTSPERQLESCQQLCAQRGWDVVGVAEDLDVSGAVDPFDRKRRPNLARWLAFEEQPFDVIVAYRVDRLARSIRHLQQLVHWAEDHKKLVVSATEAHFDTTTPFAAVVIALMGTVAQMELEAIKERSRSAAHFNIRAGKYRGSLPPWGYLPTRVDGEWRLVPDPVQRERILEVYHRLVDNHEPLHLVAHDLNRRGVLSPKDYFAQLQGREPRGRKWSATALKRSLISEAMLGYATLNGKTVRDDGGAPLVRAEPILTREQQEALRAELVKTSRAKPAVSTPSLLLRVLFCAVCGEPAYKFAGGGRKHPRYRCRSMGFPKHCGNGTVAMVEWDAFCEEQVLDLLGDAERLEKVWVAGSDSAVELAEVNAELVDLTSLIGSPAYRAGSPQREALDARIAALAARQEELEGLEARPSAWEWRETGQRFGDWWREQDTAAKNTWLRSMNVRLTFDVRGGLTRTIDFGDLQEYEQHLRLGSVVERLHTGMT

SEQ ID NO: 10497 - protein, 500 aa, synthetic construct
MRALVVIRLSRVTDATTSPERQLESCQQLCAQRGWDVVGVAEDLDVSGAVDPFDRKRRPNLARWLAFEEQPFDAIVAYRVDRLTRSIRHLQQLVHWAEDHKKLVVSATEAHFDTTTPFAAVVIALMGTVAQMELEAIKERSRSAAHFNIRAGKYRGSLPPWGYLPARVDGEWRLAPDPVQRERILEVYHRVVDDHEPLHLVAHDLNRRGVLSPRDYFAQLRGREPQGRKWSATALKRSMISEAMLGYATLNGKTVRDDDGAPLVRAEPILTREQQEALRAELVKTSRAKPAVSTPSLLLRVLFCAVCGEPAYKFAGGGRRHPRYRCRSMGFPKHCGNGTVAMAEWDAFCEEQVLNLLGDAERLEKVWVAGSDSAVELAGVNAELVDLTSLIGSPAYRAGSPQREALDARIAALAARQEELGGLEARPSGWEWRETGQRFEDWWREQDTAAKNTWLRSMNVRLTFDVRGGLTRTIDFGDLQEYEQHLRLGSVVERLHTGMS

SEQ ID NO: 10498 - protein, 500 aa, synthetic construct
MRALVVIRLSRVTDATTSPERQLESCQQLCAQRGWDVVGVAEDLDVSGAVDPFDRKRRPNLARWLAFGEQPFDVIVAYRVDRLTRSVRHLQQLVHWAEDHKKLVVSATEAHFDTTTPFAAVVIALMGTVAQMELEAIKERSRSAAHFNIRAGKYRGSLPPWGYLPTRVDGEWRLVPDPVQRERILEVYHRVVDNHEPLHLVAHDLNRRGVLSPKDYFAQLRGREPQGRKWSATALKRSMISVAMLGYATLNGKIVRDGDGAPLVRAEPILTREQLEALRAELVKTSRAKPAVSTPSLLLRVLFCAVCGEPAYKFSGGGRKHPRYRCRSMGFPKHCGNGTVAMAEWDAFCEEQVLGLLGDAERLEKVWVASSDSAVELAEVSAELVDLTSLIGSPAYRADSPQREALDARIAALAARQEELEGLEARPSGWEWRETGQRFGDWWREQDTAAKNTWLRSMNVRLTFDVRGGLTHTIDFGDLREYEQHLRLGSVVERLHTGMS

SEQ ID NO: 10499 - protein, 500 aa, synthetic construct
MRALVVIRLSRVTDATTSPERQLESCQQLCAQRGWGVVGVAEDLDVSGAVDPFDRKRRPNLARWLAFEEQPFDVIVAYRVDRLTRSIRHLQQLVHWAEDHKKLVVSATEAHFDTTTPFAAVVIALMGTVAQMELEAIKERSRSAAHFNIRAGKYRGSLPPWGYLPARVDGEWRLVPDPVQRERILEVYHRVVDNHEPLHLVAHDLNRRGVLSPRDYFAQLRGREPQGRKWSATALKRSMISEAMLGYATLNGKIVRDDDGAPLVRAEPILTREQLEALRAELVKTSRAKPAVSTPSLLLRVLFCAVCGEPAYKFAGGGRKHPRYRCRSMGFPKHCGNGTVTMAEWDAFCEEQVLGLLGDAERLEKVWVAGSDSAVELAEVNAELVDLTSLIGSPAYRVGSPQREALDARIAALAARQEELEGLEARPSGWEWRETGQRFEDWWRKQDAAAKNTWLRSMNVRLTFDVRGGLTRTIDFGDLQEYEQHLRLGGVVERLHTGMS

SEQ ID NO: 10500 - protein, 500 aa, synthetic construct
MRALVVIRLSRVTDATTSPERQLESCQQLCAQRGWDVVGVAEDLDVSGAVDPFDRKRRSNLARWLAFEEQPFDVIVAYRVDRLARSIRHLQQLVHWAEDHKKLVVSATEAHFDTTTPFAAVVIALMGTVAQMELEAIKERSRSAAHFNIRAGKYRGSLPPWGYLPARVDGEWRLVPDPVQRERILEVYHRVVGNHEPLHLVAHDLNRRGVLSPKDYFAQLRGREPQGRKWSATALKRSMISEAMLGYATLSGKTVRDNDGAPLVRAEPILTREQLEALRAELVKTSRAKPAVSTPSLLLRVLFCAVCGEPAYKFAGGGRKHPRYRCRSMGFPKHCGNGTVAMAEWDAFCEEQVLDLLGDAERLEKVWVAGSDSAAELAEVNAELVDLTSLIGSPAYRVGSPQREALDARIAALAARQEELEGLEARPSGWEWRETGQRFGDWWREQDTAAKNIWLRSMNVRLTFDVRGGLTRTIDFGDLQEYGQHLRLGSVVERLRTGMS

SEQ ID NO: 10501 - protein, 500 aa, synthetic construct
MRALVVIRLSRVTDATTSPERQLESCLQLCAQRGWDVVGVAEDLDVSGAVDPFDRKRRPNLARWLAFEEQPFDVIVAYRVDRLTRSTRHLQQLVHWAEDHKKLVVSATEAHFDTTTPFAAVVIALMGTVAQMELEAIKERSRSAAHFNIRAGKYRGSLPPWGYLPTRVDGEWRLVPDPVQRERILEVYHRVVDNHEPLHLVAHDLNRRGVLSPKDYFAQLQGREPQGRKWSATALKRSMISEVMLGYATLNGKTVRGDDGAPLVRAEPILTREQQEALRAELVKTSRAKPAVSTPSLLLRVLFCAVCGEPAYKFAGGGRKHPRYRCRSMGFPKHCGNGTVAMAEWDVFCEEQVLDLLGDAERLEKVWVAGSDSAVELAEVNAELVDLTSLIGSPAYRAGSPQREALDARIAALAARQEELEGSEARPSGWEWRETGQRFGDWWREQDTATKNTWLRSMNVRLTFDVRGGLTRTIDFGDLLEYVQHLRLGSVVERLRTGMS

SEQ ID NO: 10502 - protein, 500 aa, synthetic construct
MRALVVIRLSRVTDATTSPERQLESCQQLCAQRGWDVVGVAEDLDVSGAVDPFDRKRRPNLARWLAFEEQPFDVIVAYRVDRLTRSTRHLQQLVHWAEDHKKLVVSATEAHFDTTTPFAAVVIALMGTVAQMELEAIKERSRSAAHFNIRAGKYRGSLPPWGYLPTRADGEWRLAPDPVQRERILEVYHRVVDNHEPLHLVAHDLNRRGVLSPKDYFAQLQGREPQGRKWSATALKRSMISEAMLGYATLNGKTVRDDSGAPLVRAEPILTREQLEALRAELVKTSRAKPAVPTPSLLLRVLFCAVCGEPAYKFAGGGRKHPRYRCRSMGFPKHCGNGTVAMAEWDAFCEEQVLDLLGDAERLEKVWVAGSDSAVELAEVNAELVDLTSLIGSPAYRVDSPQREALDARIAALAARQEELEGLEARPSGWEWRETGQRFGDWWREQDTAAKNTWLRSMNVRLTFDVRGGLTRTIDFGDLQEYEQRLRLGSVVERLHTGMS

SEQ ID NO: 10503 - protein, 500 aa, synthetic construct
MRALVVIRLSRVTDATTSPERQLESCQQLCAQRGWDVVGVAEDLDVSGAVDPFDRKRRPNLARWLAFEEQPFDVIVAYRVDRLTRSTRHLQQLVLWAEDHKKLVVSATEAHFDTTTPFAAVVIALMGTVAQMELEAIRERSRSAAHFNIRAGKYRGSLPPWGYLPARVDGEWRLVPDPVQRERILEVYHRVVDNHEPLHLVAHDLNRRGVLSPKDYFAQLQGREPQGRKWSATALKRSMTSEAMLGYATLNGKIVRDDDGAPLVRAEPILTREQLEALRAELVKTSRAKPAVSTPSLLLRVLFCAVCGEPAYKFAGGGRKHSRYRCRSMGFPKHCGNGTVAMTEWDAFCEEQVLNLLGDAERLEKVWVAGSDSAVELAEVNAELVDLTSLIGSPAYRAGSPQREALDARIAALAARQEELEGLEARPSGWEWRETGQRFGDWWREQDTAAKNTWLRSMNVRLTFDVRGGLTRTIDFGDLQEYGQHLRLGSVVERLHTGMS

SEQ ID NO: 10504 - protein, 500 aa, synthetic construct
MRALVVIRLSRVTDATTSPERQLESCQQLCAQRGWDVVGVAEDLDVSGAVDPFDRKRRPNLARWLAFEEQPFDAIVAYRVDRLTRSIRHLQQLVHWAEDHKKLVVSATEAHFDTTTPFAAVVIALMGTVAQMELEAIKERSRSAAHFNIRAGKYRGSLPPWGYLPARVDGEWRLVPDPVQRERILEVYHRVVDNHEPLHSVAHDLNRRGVLSPKDYFAQLRGREPQGRKWSATALKRSMISGAMLGYATLNGKTVRDDDGAPLVRAEPILTREQLEALRAELVKTSRAKPAVSTPSLLLRVLFCAVCGEPAYKFAGGGRKHPRYRCRSMGFPKHCGNGTVAMAEWDALCEEQVLGLLGDAERLEKVWVAGSDSAVELAEVNAELVDLTSLIGSPAYRAGSPQREALDARIAALAARQGELEGLEARPSGWEWRETGQRFGDWWREQDTAAKNTWLRSMNVRLTFDVRGGLTRTIDFGDLQEYEQHSRLGSVVGRLHTGMS

SEQ ID NO: 10505 - protein, 500 aa, synthetic construct
MRALVVIRLSRVTDATTSPERQLESCQQLCAQRGWDVVGVAEDLDVSGAVDPFDRKRRPNLARWLAFEERPFDVIVAYRVDRLARTIRHLQQLVHWAEDHKKLVVSATEAHFDTTTPFAAVVIALMGTVAQMELEAIKERNRSAAHFNIRAGKYRGSLPPWGYLPTRVDGEWRLVPDPVQRERILEVYHRVVDNHEPLHLVAHDLNRRGVLSPKDYFAQLRGREPQGRKWSATALKRSMISEAMLGYATLNGKTVRDDDGAPLVRAEPILAREQLEALRAELVKTSRAKPAVSTPSLLLRVLFCAVCGEPAYKFAGGGRKHPRYRCRSMGFPKHCGNGTVATAEWDAFCEEQVLNLLGDAERLEKVWVAGSDSAVELAEVNAELVDLTSLIGSPAYRAGSPQREALDARIAALVARQEELEGLEVRPSGWEWRGTGQRFGDWWREQDTVAKNTWLRSMNVRLTFDVRGGLTRTFDFGDLQEYEQHLRLGSVVERLHTGMS

SEQ ID NO: 10506 - protein, 500 aa, synthetic construct
MRALVVIRLSRVTDATTSPERQLESCQQLCAQRGWDVVGVAEDLDVSGAVDPFDRKRRPNLARWLAFEEQPFDAIVAYRVDRLTRSIRHLQQLVHWAEDHKKLVVSATEAHFDTTTPFAAVVIALMGTVAQMELEAIRERSRSAAHFNIRAGKYRGSLPPWGYLPARVDGEWRLVPDPVQRERILEVYHRVVDNHEPLHLVAHDLNRRGVLSPKDYFAQLQGREPQGRKWSATALKRSMISVAMLGCATLNGKTVRDDDGAPLVRAEPILTREQLEALRAELVKTSRAEPAVSTPSLLLRVLFCAVCGEPAYKFAGGGRKHPRYRCRSMGFPKHCGNGTVAMAEWDAFCEEQVLGLLGDVERLEKVWVAGSDSAVKLAEVNAELVDLTSLIGSPAYRAGSPQREALDARIAALAARQEELEGLEARPSGWEWRGTGQRFGDWWREQDTAAKNTWLRSMNVRLTFDVRGGLTRTIDFGDLQGYEQHLRLGSVVERLHTGMS

SEQ ID NO: 10507 - protein, 500 aa, synthetic construct
MRALVVIRLSRVTDATTSPERQLESCQQLCAQRGWDVVGVAEDLDVSGAVDPFDRKRRPNLARWLAFEGQPFDVIVAYRVDRLARSIRHLQRLVHWAEDHKKLVVSATEAHFDTTTPFAAVVIALMGTVAQMELEAIKERSRSAAHFNIRAGKYRGSLPPWGYLPARVDGEWRLAPDPVQRERILEVYHRVVDDHEPLHLVAHDLNRRGVLSPRDYFAQLRGREPQGHKWSATALKRSMISEAMLGYATLNGKIVRDDDGAPLVRAEPILTRGQLEALRAELVKTSRAEPAVSTPSLLLRVLFCAVCGEPAYKFAGGGRKHPRYRCRSMGFPKHCGNGTVAMAEWDAFCEEQVLNLLGDAERLEKVWVAGSDSAVELAEVDAELVDLTSLIGSPAYRAGSPQREALDARIAALAARQEELEGLEARPSGWEWRETGQRFGDWWREQDTAAKNTWLRSMNVRLTFDVRGGLTRTIDFGDLQEYEQHLRSGSVVERLHTGMP

SEQ ID NO: 10508 - protein, 500 aa, synthetic construct
MRALVVIRLSRVTDATTSPERQLESCQQLCAQRGWDVVGVAEDLDVSGAVDPFDRKRRPNLARWLAFEEQPFDVIAAYRVDRLTRSIRHLQQLVHWAEDHKKLVVSATEAHFDTTTPFAAVVIALMGTVAQMELEAIRERNRSAAHFNIRAGKYRGSLPPWGYLPARVDGEWRLVPDPVQRERILEVYHRVVDNHEPLHLVAHDLNRRGVLSPKDYFAQLQGREPQGRKWSATALKRSMISVAMLGYATLNGKTVRDDDGAPLVRAEPILTRGQLEALRAELVKTSRAKPAVSAPSLLLRVLFCAVCGEPAYKFAGGGRKHPRYRCRSMGFPKHCGNGTVAMAEWDAFCEEQVLNLLGDAERLEKVWVAGSDSAVELAEVNAELVDLTSLIGSPAYRAGSPQREALDARIAALAARQEELEGLEARPSGWEWRGTGQRFGDWWREQDTAAKNAWLRSMNVRLTYDVRGGLTRTIDFGDLQEYEQHLRLGSVVERLHTGMS

SEQ ID NO: 10509 - protein, 500 aa, synthetic construct
MRALVVIRLSRVTDATTSPERQLESCQQLCAQRGWGVVGVAEDLDVSGAVDPFDRKRRPNLARWLAFEEQPFDVIVAYRVDRLTRSVRHLQQLVHWAEDHKKLVVSATEAHFDTTTPFAAVVIALMGTVAQMELEAIKERSRSAAHFNIRAGKYRGSLPPWGYLPTRVDGEWRLAPDPVQRERILEVYHRVVDNHEPLHLVAHDLNRRGVLSPKDYFAQLQGREPQGRKWSATALKRSMISVAMLGYATLNGKTVRDDDGAPLVRAEPILTREQLEALRVELVKTSRAKPAVSTPSLLLRVLFCAVCGEPAYKFAGGGRKHPRYRCRSMGFPKHCGNGTVAMAEWDAFCEEQVLGLLGDVERLEKVWVAGSDSAVKLAEVNAELVDLTGLIGSPAYRAGSPQRETLDARIAALAARQEELEGLEARPSGWEWRGTGQRFGDWWREQDTAAKNTWLRSMNVRLTFDVRGGLTRTIDFGDLQEYEQHLRLGSVVERLHTGMS

SEQ ID NO: 10510 - protein, 500 aa, synthetic construct
MRALVVIRLSRVTDATTSPERQLESCQQLCAQRGWDVVGVAEDLDVSGAVDPFDRKRRPNLARWLAFEEQPFDVIVAYRVDRLTRSVRHLQQLVHWAEDHKKLVASATEAHFDTTTPFAAVVIALMGTVAQMELEAIKERSRSAAHFNIRAGKYRGSLPPWGYLPARVDGEWRLEPDPVQRERILEVYHRVVDNHEPLHLVAHDLNRRGVLSPRDYFAQLQGREPQGRKWSATALKRSMISKAMLGYATLNGKIVRDDDGAPLVRAEPILTCEQLEALRAELVKTSRAKPAVSTPSLLLRVLFCAVCGEPAYKFAGGGRKHPRYRCRSMGFPKHCGNGTVAMAEWDAFCEEQVLDLLGDAERLEKVWVAGSDSAVELAEVNAELVDLTSLIGSPAYRAGSLQREALDARIAALAARQEELEGLEARPSGWEWRGTGQCFGDWWREQDTAAKNAWLRSMNVRLTFDVRGGLTRTIDFGDLQEYEQHLRLGSVVERLHTGMS

SEQ ID NO: 10511 - protein, 500 aa, synthetic construct
MRALVVIRLSRVTDATTSPERQLESCQQLCAQRGWDVVGVAEDLDVSGAVDPFDRKRRPNLARWLVFEEQPFDAIVAYRVDRLTRSIRHLQQLVHWAEDHKKLVVSATEAHFDTTTPFAAVVIALMGTVAQMELEAIKERNRSAAHFNIRAGKYRGSLPPWGYLPTRVDGEWRLAPDPVQRERILEVYHRVVNNHEPLHLVAHDLNRRGVLSPKDYFAQLQGREPQGRKWSATALKRSMISEAMLGYATLNGKIVRDDDGAPLVRAEPILTREQLEALRAELVKTSRAKPAVSTPSLLLRVLFCAVCGEPAYKFAGGGRKHPRYRCRSMGFPKHCGNGTVAMAEWDAFCEEQVLGLLGDAERLEKVWVAGSDSAVELAEVNAELVDLTSLIGSPTYRTGSPQREALDARIAALAARQGELEGLEARPSGWEWRGTGQRFGDWWREQDTAAKNTWLRSMNVRLTFDVRGGLTRTIDFGELQEYGRHLRLGSVVERLHTGMS

SEQ ID NO: 10512 - protein, 500 aa, synthetic construct
MRALVVIRLSRATDATTSPERQLESCQQLCAQRGWDVVGVAEDLDVSGAVDPFDRKRRPNLARWLAFEEQPFDVIVAYRVDRLTRSVRHLQQLVHWAEDHKKLVVSATEAHFDTTTPFAAVVIALMGTVAQMELEAIKERSRSAAHFNIRAGKYRGSLPPWGYLPARVDGEWRLVPDPVQRERILEVYHRVVDNHEPLHLVAHDLNRRGVLSPKDYFAQLRGREPQGRKWSATALKRSMISVAMLGYATLCGKTVRDDDGAPLVRAEPILTREQLEALRAELVKTSRAKPAVSTPSLLLRVLFCAVCGEPAYKFAGGGRKHPRYRCRSMGFPKHCGNGTVAMAEWDAFCEEQVLNLLGDAERLEEVWVAGSDSAVELAEVNKELVDLTSLIGSPAYHAGSPQREALDARIAALAARQEELEGSEAHPSGWEWRGTGQRFGDWWREQDTAAKNTWLRSMNVRLTFDVRGGLTRTIDFGDLQEYEQRLRLGSVVERLHTGMS

SEQ ID NO: 10513 - protein, 500 aa, synthetic construct
MRALVVIRLSRVTDATTSPERQLESCQQLCAQRGWDVVGVAEDLDVSGAVDPFDCKRRPNLARWLAFEEQPFDVIVAYRVDRLARSIRHLQQLVHWAEDHKKLVVSATEAHFDTTTPFAAVVIALMGTVAQMELEAIKERSRSAAHFNIRAGKYRGSLPPWGYLPTRVDGEWRLVPDPVQRERILEVYHRVVDNHEPLHLVAHDLNRRGVLSPRDYFAQLRGREPQGRKWSATALKRSMISEVMLGYATLNGRTVRDDDGAPLVRAEPILTREQLEALRAELVKTSRAKPAVSTPSLLLRVLFCAVCGEPAYKFAGGGRKHPRYRCRSMGFPKHCGNGTVATAEWDAFCEEQVLDLLGDTERLEKVWVAGSDSAIELAEVNAELVDLTSLIGSPAYRAGSPQREALDARIAALAARQEELESLEARPPGWEWRETGQRFGDWWREQDTAAKNTWLRSMNVRLTFDVRGGLTRTIDFGDLQEYEQHLRLGNAVERLHTGMS

SEQ ID NO: 10514 - protein, 500 aa, synthetic construct
MRALVVIRLSRVTDATTSPERQLESCQQLCAQRGWDVVGVAEDLDVSGAVDPFDRKRRPNLARWLAFEERPFDVIVAYRVDRLTRSIRHLQQLVRWAEDHKKLVVSATEAHFDTTTPFAAVVIALMGTVAQMELEAIKERNRSAAHFNIRAGKYRGSLPPWGYLPTRVDGVWRLVPDPVQRERILEVYHRVVDNHEPLHLVAHDLNRRGVLSPKDYFAQLRGREPQGRKWSATALKRSMISVAMLGYATLNGKTVRDDDGAPLVRAEPILTREQLEALRAELVKTSRAKPAVSTPSLLLRVLFCAVCGEPAYKFSGGGRKHPRYRCRSMGFPKHCGNGTVAMAEWDAFCEEQVLDLLGDAERLEKVWVAGSDSAVELAEVNAELVDLTSLIGSPAYRAGSPQREALDARIAALAARQGELEGLEARPSGWEWRETGQRFGDWWREQDTAAKNTWLRSMNVRLTFDVRGGLTRTIDFGDLQEYEQHLRLGSVVERLHTGMS

SEQ ID NO: 10515 - protein, 500 aa, synthetic construct
MRTLVVIRLSRVTDATTSPERQLESCQQLCAQRGWDVVGVAEDLDVSGAVDPFDRKRRPNLARWLAFEEQPFDAIVAYRVDRLTRSVRHLQQLVHWAEDHKKLVVSATEAHFDTTTPFAAVVIALMGTVAQMELEAIRERNRSAAHFNIRAGKYRGSLPPWGYLPARVDGAWRLVPDPVQRERILEVYHRVVDNHEPLHLVAHDLNRRGVLSPKDYFAQLQGREPQGRKWSATALKRSMISEAMLGYATLSGKTVRDDDGAPLVRAEPILTREQLEALRTELVKTSRAKPAVSTPSLLLRVLFCAVCGEPAYKFAGGGRKHPRYRCRSMGFPKHCGNGTVAMAEWDAFCEEQVLDLLGDAERLEKVWVAGSNSAVELAEVNAELADLTSLIGSPAYRAGSPQREALDARIAALAARQEELEGLEARLSGWEWRGTGQRFGDWWREQDTAARNTWLRSMNVRLTFDVRGGLTRTIDFGDLLEYEQHLRLGSVVERLHTGMS

SEQ ID NO: 10516 - protein, 500 aa, synthetic construct
MRALVVIRLSRVTDATTSPERQLESCQQLCAQRGWDVVGVAEDLDVSGAVDPFDCKRRPNLARWLAFEEQPFDVIVAYRVDRLARSIRYLQQLVHWAEDHKKLVVSATEAHFDTTTPFAAVVIALMGTVAQMELEAIKERSRSAAHFNIRAGKYRGSLPPWGYLPARVDGEWRLAPDPVQRERILEVYHRVVDNHEPLHLVAHDLNRRGILSPKDYFAQLRGREPQGRKWSATALRRSMISEAMLGYATLDGKTVRDDDGAPLVRAEPILTREQLEALRAELVKTSRAKPAVSTPSLLLRVLFCAVCGEPAYKFAGGGRKHPRYRCRSMGYPKHCGNGTVALAEWDAFCEEQVLDLLGDAERLEKVWVAGSDSAVELAEVNAELVDLTSLIGSPAYRAGSPQREALDARIAALAARQGELEGLEARPSGWEWRETGQRFGDWWREQDTAAKNTWLRSMNVRLTFDVRGGLTRTIDFGDLQEYEQHSRLGSVVERLHTGMS

SEQ ID NO: 10517 - protein, 500 aa, synthetic construct
MRALVVIRLSRVTDATTSPERQLESCQQLCAQRGWDVVGVAEDLDVSGAVDPFDRKRRPNLARWLASEEQPFDVIVAYRVDRLARSIRHLQQLVHWAEDHKKLVVSATEAHFDTTTPFAAVVIALMGTVAQMELEAIKERNRSAAHFNIRAGKYRGSLPPWGYLPTRVDGEWRLVPDPVQRERILEVYHRVVDNHEPLRLVAHDLNRRGVLSPKDYFAQLRGREPQGRKWSATALKRSMTSEAMLGYATLNGKTVRNDDGAPLVRAEPILTREQLEALRAELVKTSRAKPAVSTPSLLLRVLFCAVCGEPAYKFAGGGRKHPRYRCRSMGFPKHCGNGTVAMAEWDAFCEEQVLDLLGDAERLEKVRVAGSDSAVELAEVNAELVDLTSLIGSPAYRAGSPQREALDARIAALAARQEELEGLEARPSGWEWRETGQRFRDWWREQDTAAKNTWLRSMNVRLTYDVRGGLTRTIDFGDLQEYEQDLRLGSVVERLHTGMS

SEQ ID NO: 10518 - protein, 500 aa, synthetic construct
MRALVVIRLSRVTDATTSPERQLGSCQQLCAQRGWDVVGVAEDLDVSGAVDPFDRKRRPNLARWLASEEQPFDVIVAYRVDRLTRSIRHLQQLVHWAEDHKKLVVSATEAHFDTTTPFAAVVIALMGTVAQMELEAIKERNRSAAHFNIRAGKYRGSLPPWGYLPTRVDGEWRLVPDPVQRERILEVYHRVVDNHEPLHLVAHDLNRRGVLSPKDYFAQLRGREPQGRKWSATALKRSMISEAMLGYATLNGKTVRNDDGAPLVRAEPILTRGQLEALRAELVKTSRAKPAVSTPSLLLRVLFCAVCGEPAYKFAGGGRKHSRYRCRSMGLPKHCGNGTVAMAEWDAFCEEQVLNLLGDAERLEKVWVAGSDSAVKLAEVNAELVDLTSLIGSPAYRAGSPQREALDARIAALAARQEELEGLGARPSGWEWRETGQRFGDWWREQDTAAKNTWLRSMNVRLTFDVRGGLTRTIDFGDLQEYEQHLRLGSVVERLHAGVS

SEQ ID NO: 10519 - protein, 500 aa, synthetic construct
MRALVVIRLSRVTDATTSPERQLESCQQLCAQRGWDVVGVAEDLDVSGAVDPFDRKRRPNLARWLAFEEQPFDVIVAYRVDRLTRSIRHLQQLVHWAEDHKKLVVSATEAHFDMTTPFAAVVIALMGTVAQMELEAIKERSRSAAHFNIRAGKYRGSLPPWGYLPTRVDGEWRLAPDPVQRERILEVYHRVVDNHEPLHLVAHDLNRRGVLSPRDYFAQLQGREPQGRKWSATALKRSMISEAMLGYATLNGKIVRDDDGAPLVRAEPILTREQLEALRAGLVKTSRAKPAVSTPSLLLRVLFCAVCGEPAYKFTGGGRKHPRYRCRSMGFPKHCGNGTVAMAEWDAFCEEQVLNLLGDAERLEKAWVAGSDFAVELAEVNAELVDLTSLIGSPAYRAGSPQREALDARIAALAARQGELEGLEARPPGWEWRETGQRFGDWWREQNTAAKNTWLRSMNVRLTFDVRGGLTRTIDFGDLQEYEQHSRLGSVVERLHTGMS

SEQ ID NO: 10520 - protein, 500 aa, synthetic construct
MRALVVIRLSRVTDATTSPERQLESCQQLCAQRGWDVVGAAEDLDVSGAVDPFDRKRRPNLARWLAFEEQPFDVIVAYRVDRLTRSVRHLQQLVHWAEDHKKLVVSATEAHFDTTTPFAAVVIALMGTVAQMELEAIKERNRSAAHYNIRAGKYRGSLPPWGYLPTRVDGEWRLVPDPVQRERILEVYHRVVDNHEPLHLVAHDLNRRGVLSPKDYFAQLRGREPQGRKWSATALKRSMISEAMLGYATLDGKTVRDDDGAPLVRAEPILTREQQEALRAELVKTSRAKPAVSTPSLLLRVLFCAVCGEPAYKFAGGGRKHPRYRCRSMGFPKHCGNGTVAVAEWDAFCEEQVLDLLGDAERLEKVWVAGSDSAVELAEVSTELVDLTSLIGSPAYRAGSPQREALDARIAALAARQEELEGLEARPSGWGWRETGQRFGDWWREQDTAAKNTWLRSMNVRLTFDVRGGLTRTIDFGDLQEYEQHSRLGSVVERLHTGMS

SEQ ID NO: 10521 - protein, 500 aa, synthetic construct
MRALVVIRLSRVTDATTSPERQLESCQQLCAQRGWHVAGVAEDLDVSGAVEPFDRKRRPNLARWLAFEEQPFDVIVAYRVDRLTRSIRHLQQLVHWAEDHKKLVVSATEAHFDTTTPFAAVVIALMGTVAQMELEAIKERNRSAAHFNIRAGKYRGSLPPWGYLPTRVNGEWRLVPDPVQRERILEVYQRVVDNHEPLHLVAHDLNRRGVLSPRDYFAQLRGREPQGRKWSATALKRSMISEAMLGYATLNGKTVRGDDGAPLVRAEPILTREQLEAIRAELVKTSRAKPAVSTPSLLLRVLFCAVCGEPAYKFAGGGRKHPRYRCRSMGFPKHCGNGTVAMAEWDAFCEEQVLNLLGGAERLEKVWVAGSDSAVELAEVNAELVDLTSLIGSPAYRAGSPQREALDARIAALAARQEELKGLEARPSGWEWRETGQRFGDWWREQDTAAKNTWLRSMNVRLTFDVRGGLTRTIDFGDLQEYEQHLRLGSVVERLHTGMS

SEQ ID NO: 10522 - protein, 500 aa, synthetic construct
MRALVVIRLSRVTDATTSPERQLESCQQLCAQRGWNVVGVAEDLDVSGAVDPFDRKRRPNLARWLAFEEHPFDVIVAHRVDRLTRSTRHLQQLVHWAEDHKKLVVSATEAHFDTTTPFAAVVIALMGTVAQMELEAIKERSRSAAHFNIRAGKYRGSLPPWGYLPTRVDGEWRLAPDPVQRERILEVYHRVVDNHEPLHLVAHDLNRRGVLSPKDYFAQLQGREPQGRKWSATALKRSMISEAMLGYATLNGKIVRDDDGAPLVRAEPILTREQLEALRAELVKTSRAKPAVSTPSLLLRVLFCAVCGEPAYKFAGGGRKHLRYRCRSMGFPKHCGNGTVVMAEWDAFCEEQVLDLLGDAGRLEKVWVAGSDSAVELAEVSAELVDLTSLIGSPAYRAGSPQREALDARIAALAARQEELEGLEARPSGWEWRETGQRFGDWWREQDTAAKNTWLRSMNVRLTFDVRGGLTRTIDFGDLQEYEQHLRLGSVVERLHTGMS

SEQ ID NO: 10523 - protein, 500 aa, synthetic construct
MRALVVIRLSRVTDATTSPERQLESCQQLCAQRGWDVVGVAEDLDVSGAVDPFDRKRRPNLARWLAFEEQPFDAIVAYRVDRLARSIRHLQQLVHWAEDHKKLVVSATEAHFDTTTPFAAVVIALMGTVAQMELEAIKERSRSAAHFNIRAGKYRGSLPPWGYLPARVDGEWRLVPDPVQRERILEVYHRVVDNHEPLHLVAHDLNRRGVLSPKDYFAQLQGREPQGRKWSATALKRSMISEAMLGYATLSGKTVRDDDGAPLVRAEPILTREQQEALRAELVKTSRAKPAVSTPSLLLRVLFCAVCGEPAYKFAGGGRKHPRYRCRSMGFLKHCGNGTVAMAEWDAFCEEQVLDLLGDAERLEKVWVAGSDSAVELAEVNAELVDLTSLIGSPAYRAGSPQREALDARIAALAARQEELEGLEARPSGWEWRETGQRFGDWWREQGTAAKNTWLRSMSVRLTFDVRGGLTRTIDFGDLQEYEQHLRSGSVVGRLHTGMS

SEQ ID NO: 10524 - protein, 500 aa, synthetic construct
MRALVVIRLSRVTDATTSPERQLESCQQLCAQRGWDVVGVAEDLDVSGAVDPFDRKRRPNLARWLAFEEQPFDVVVAYRVDRLTRSIRHLQQLVHWAEDHRKLVVSATEAHFDTTTPFAAVVIALMGTVAQMELEAIKERNRSAAHFNIRAGKYRGSLPPWGYLPTRVDGEWRLVPDPVQRERILEVYHRVVDNHEPLHLVAHDLNRRGVLSPRDYFAQLRGREPQGRKWSATALKRSMISVAMLGYATLDGKTVRDDDGAPLVRAEPILTREQLEALRAELVKTSRAKPAVSTPSLLLRVLFCAVCGEPAYKFAGGGRKHPRYRCRSMGFPKHCGNGTVAMAEWDAFCEEQVLDLLGDAERLEKVWVAGSDSAVELAEVNAELVDLTSSIGSPAYRAGSPQREALDARIAALAARQEELEGLEARPSGWVWRETGQRFGDWWREQDTAAKNTWLRSMNVRLTFDVRGGLTRTIDFGDLQEYEQHLRLGSVAERLHTGMS

SEQ ID NO: 10525 - protein, 500 aa, synthetic construct
MRALVVIRLSRVTDATTSPERQLESCRQLCAQRGWDVAGVAEDLDVSGAVDPFDRKRRPNLARWLAFEEQPFDAIVAYRVDRLTRSIRHLQQLIHWAEDHKKLVVSATEAHFDTTTPFAAVVIALMGTVAQMELEAIKERNRSAAHFNIRAGKYRGSLPPWGYLPARVDGEWRLVPDPVQRERILEVYHRVVNNHEPLHLVAHDLNRRGVLSPKDYFAQLRGREPQGRKWSATALKRSMISEAMLGYATLNGKTVRDDDGAPLVRAEPILTREQLETLRAELVKTSRTKPAVSTPSLLLRVLFCAVCGEPAYKFAGGGRKHPRYRCRSMGFPKHCGNGTVAMAEWDAFCEEQVLGLLGDAERLEKVWVAGSDSAVELAEVNAELVDLTSLIGSPAYRAGSPQREALDARIAALAARQEELEGLEARPSGWEWRETGQRFGDWWREQDTAARNTWLRSMNVRLTFDVRGGLTRTIDFGDLQEYEQHLRLGSVAERLHTGMS

SEQ ID NO: 10526 - protein, 500 aa, synthetic construct
MRALVVIRLSRVTDATTSPERQLESCQQLCAQRGWDVVGVAEDLDVSGAVDPFDRKRRPNLARWLAFEEQPFDAIVAYRVDRLTRSIRHLQQLVHWAEDHKKLVVSATEAHFDTTTPFAAVVIALMGTVAQMELEAIKERNRSAAHFNIRAGKYRGSLPPWGYLPTRVDGEWRLAPDPVQRERILEVYHRVVDNHEPLHLVAHDLNRRGVLSPKDYFAQLQGREPQGRKWSATALKRSMISEAMLGYATLNGETVRDDDGAPLVRAEPILTREQLEALRAVLVKTSRAKPAVSTPSLLLRVLFCAVCGEPAYKFAGGGRKHPRYRCRSMGFPKHCGNGTVAMAEWDAFCEEQVLDLLGDAERLEKVWVAGSDSAVELAEVNAELVDLTSLIGSPAYRAGSPQREALDARIAALAARQEELEGLEARPSGWEWRETGQRFGDWWREQDTAAKNTWLRSMNVRLTFDVRGGLTRTIDFGDLQEYEQHLRLGSVVERLHTGMS

SEQ ID NO: 10527 - protein, 500 aa, synthetic construct
MRALVVIRLSRVTDTTTSPERQLESCQQLCAQRGWDVVGVAEDLDVSGAVDPFDRKRRPNLARWLAFEEQPFDAIVACRVDRLTRSIRHLQQLVHWAEDHKKLVVSATEAHFDTTTPFAAVVIALMGTVAQMELEAIKERSRSAAHFNIRAGKYRGSLPPWGYLPTRVDGEWRLAPDPVQRERILEVYHRVVDNHEPLHLVAHDLNRRGVLSPKDYFAQLRGREPQGRKWSATALKRSMSSEAMLGYATLNGKTVRDDDGAPLVRAEPILTREQLEALRAELVKTSRAKPAVSTPSLLLRVLFCAVCGEPAYKFAGGGRKHSRYRCRSMGFPKHCGNGTVAMAEWDAFCEERVLELLGDAERLEKVWVAGSDSAVELAEVNAELVDLTSLIGSPAYRAGSPQREALDARIAALAARQGELEGLEARPSGWEWRGTGQRFGDWWREQDTAAKNTWLRSMNVRLTFDVRGGLTRTIDFGDLQEYEQHLRLGSVVERLHTGMS

SEQ ID NO: 10528 - protein, 500 aa, synthetic construct
MRALVVIRLSRVTDATTSPERQLESCQQLCAQRGWDVVGVAEDLDISGAVDPFDRKRRPNLARWLAFEEQPFDVIVAYRVDRLTRSTRYLQQLVHWAEDHKKLVVSATEAHFDTTTPFAAVVIALMGTVAQMELEAIKERSRSAAHFNIRAGKYRGSLPPWGYLPARVDGEWRLVPDPVQRERILEVYHRVVDDHEPLHLVAHDLNRRGVLSPKDYFAQLRGREPQGRKWSATALKRSMISEAMLGYATLNGKTVRDDDGAPLVRAEPILTREQLEALRAELVKTSRAKPAVSTPSLLLRVLFCAVCGEPAYKFAGGGRKHPRYRCRSMGFPKHCGNGTVAMAVWDAFCEEQVLGLLGDAERLEKVWVAGSDSAVELAEVNAELVDLMSLIGSPAYRAGSPQREALDARIAALAARQEELEGLEARPSGWEWRETGQRFGDWWREQDTAAKNTWLRSMNVRLTFDVRGGLTRTIDFGDLQEYEQHLRSGSVVERLHSGMS

SEQ ID NO: 10529 - protein, 500 aa, synthetic construct
MRALVVIRLSRVTDATTSPERQLESCQQLCAQRGWDVVGVAEDLDVSGAVDPFDRKRRPNLARWLAFEEQPFDVIVAYRVDRLTRSTRHLQQLVHWAEDHKKLVVSATEAHFDTTTPFAAVVIALMGTVAQMELEAIKERSRSAAHFNIRAGKYRGSLPPWGYLPTRVDGEWRLAPDPVQRERILEVYHRVVDNHEPLHLVAHDLNRRGVLSPKDYFAQLQGREPQGRKWSATALKRSMISEAMLGYATLNGKTVRDDDGAPLVRAEPILTREQQEALRAELVKTSRAKPAVSTPSLLLRVLFCAVCGEPAYRFSGGGRKHPRYRCRSMGFPKHCGNGTVAMAEWDAFCEEQVLDLLGDAERLEKVWVAGSDSAVELAEVNAELVDLTSLVGSPAYRAGSPQREALDARIAALATRQEELEGLESRPSGWEWRETGQRFGDWWREQDTAAKNTWLRSMNVRLTFDVRGGLTRTTDFGDLQEYEQHLRLGNMVERLHTGMS

SEQ ID NO: 10530 - protein, 500 aa, synthetic construct
MRALVVIRLSRVTDATTSPERQLESCQQLCAQRGWDVVGVAEDLDVSGAVDPFDRKRRPNLARWLAFEEQPFDVIVAYRVDRLARSIRYLQQLVHWAEDHKKLVVSATEAHFDTTTPFAAVVIALMGTVAQMELEAIKERSRSAAHFNIRAGKYRGSLPPWGYLPARVDGEWRLVPDPVQRERILEVYHRVVDNHEPLHLVAHDLNRRGVLSPKDYFAQLQGREPQGRKWSATALKRSIISEVMLGYATLNGKTVRDDDGAPLVRAEPILTREQLEAVRAELVKASRAKPAVSTPSLLLRVLFCAVCGEPAYKFVGGGRKHSRYRCRSMGFPKHCGNGTVAMAEWDAFCEEQILNLLGDAERLEKVWVAGSDSAVELAEVNAELVDLTSLIGSPAYRAGSPQREALDARIAALAARQEELEGLEARPSGWEWRGTGQRFGDWWREQDTAAKNTWLRSMSVRLTFDVRGGLTRTVDFGDLQEYEQHLRLGSVVERLHTGMS

SEQ ID NO: 10531 - protein, 500 aa, synthetic construct
MRALVVIRLSRVTDATTSPERQLESCQQLCAQRGWGVVGVAEDLDVSGAVDPFDRKRRPNLARWLAFEEQPFDVIVAYRVDRLTRSTRHLQQLVHWAEDHKKLVVSATEAHFDTTTPFAAVVIALMGTVAQMELEAIKERNRSAAHFNIRAGKYRGSLPPWGYLPTRVDGEWRLVPDPVQRERILEVYHRVVDNHEPLHLVAHDLNRRGVLSPKDYFAQLRGREPQGRKWSATALKRSMISEAMLGYATLNGKTVRDDDGAPLVRAEPILTREQLEALRAELVRTSRAKPAVSTPSLLLRVLFCAVCGEPAYKFAGGGRKHPRYRCRSMGFPKHCGNGTVAMAEWDAFCEEQVLGLLGDAERLEKVWVAGSDSAVELAEVNAELVDLMSLIGSPAYRAGSPQREALDARIAALAARQEELEGLEARPSGWEWRETGQRFGDWWREQDTAAKNTWLRSMNVRLTFDVRGGLTRTIDFGDLQEYEQHLRLGSVVERLHTGMS

SEQ ID NO: 10532 - protein, 500 aa, synthetic construct
MRALVVIRLSRVTDATTSPERQLESCQQLCAQRGWDVVGVAEDLDVSGAVDPFDRKRRPNLARWLAFEEQPFDVIVAYRVDRLTRSIRHLQQLVHWAEDHKKLVVSATEAHFDTTTPFAAVVIALMGTVAQMELEAIKERSRSAAHFNIRAGKYRGSLPPWGYLPARVDGEWRLVPDPVQRERILEVYHRVVDNHEPLHLVAHDLNRRGVLSPKDYFAQLRGREPQGRKWSATALKRSMISEAMLGYATLNGKTVRDDDGAPLVRAEPILTREQLEALRAVLVKTSRAKPAVSTPSLLLRVLFCAVCGEPAYKFAGGGRKHPRYRCRSMGFPKHCGNGTVAMAEWDAFCEEQVLNLLGNAERLEKVWVAGSDSAVELAEVNAELVDLTSLIGSPAYRAGSPQREALDARIAALAARQEELEGLEARPSGWEWRETGQRFGDWWLEQDTAAKNTWLRSMNVRLTFDVRGGLTRTIDFGDLQEYEQHLRLGSVVERLHTGMS

SEQ ID NO: 10533 - protein, 500 aa, synthetic construct
MRALVVIRLSRVTDATTSPERQLESCQQLCAQRGWDVVGVAEDLDVSGAVDPFDHKRRPNLARWLAFGEQPFDVIVAYRVDRLARSIRHLQQLVHWAEDHKKLVVSATEAHFDTTTPFAAVVIALMGTVAQMELEAIKERNRSAAHFNIRAGKYRGSLPPWGYLPARVDGEWRLVPDPVQRERILEVYHRVVDNHEPLHLVAHDLNRRGVLSPKDYFAQLRGREPQGRKWSATALKRSMISEAMLGYATLNGKTVRDGDGAPLVRAEPILTREQLEALRAELVKTSRAKPAVSAPSLLLRVLFCAVCGEPAYKFAGGGRKHPRYRCRSMGFPKHCGNGTVAMAEWDAFCEEQVLNLLGDAERLEKVWVAGSDSAVELAEVNAELVDLTSLIGSPAYRAGSPQRKALDARIAALAARQEELEGLEARPSGWEWRGTGQCFGDWWREQDTAAKNTWLRSMNVRLTFDVRGGLTRTIDFGDLQEYEQHLRLGSVVERLHTGMS

SEQ ID NO: 10534 - protein, 500 aa, synthetic construct
MRALVVIRLSRVTDATTSPERQLESCQQLCAQRGWNVVGVAEDLDVSGAVDPFDRKRRPNLARWLAFEEQPFDVIVAYRVDRLARSVRHLQQLVRWAEDHKKLVVSATEAHFDTTTPFAAVVIALMGTVAQMELEAIKERSRSAAHFNIRAGKYRGSRPPWGYLPMRVDGEWRLVPDPVQRERILEVYHRVVDNHEPLHLVAHDLNRRGVLSPKDYFAQLQGREPQGRKWSATALKRSMISVAMLGYATLNGKTVRDDDGAPLVRAEPILTREQLEALRAELVKTSRAKPAVSTPSLLLRVLFCAVCGEPAYKFTGGGRKHPRYRCRSMGFPKHCGNGTVAMAEWDAFCEEQVLDLLGDAERLEKVWVAGSDSAVELAEVNAELVDLTSLIGSPAYRAGSPQREALDARIAALAARQEELGGLEARPSGWKWRETGQRFGDWWREQDTAAKNTWLRSMNVRLTFDVRGGLTRTIDFGDLQEYEQHLRLGSVVERLHTGMS

SEQ ID NO: 10535 - protein, 500 aa, synthetic construct
MRALVVIRLSRVTDATTSPERQLESCQQLCAQRGWDVVGVAEDLDVSGAVDPFDRKRRPNLARWLAFEEQPFDVIVAYRVDRLTRSTRHLQQLVHWADDHKKLVVSATEAHFDTTTPFAAVVIALMGTVAQMELEAIKERSRSAAHFNIRAGKYRGSLPPWGYLPARVNGVWRLVPDPVQRERILEVYHRVVNNHEPLHLVAHDLNRRGVLSPRDYFAQLQGRELRGRKWSATALKRSMISEAMLGYATLNGKIVRDDDGAPLVRAEPILTREQLEALRAELVKTSRAKPAVSTPSLLLRVLFCAVCGEPAYKFAGGGRKHPRYRCRSMGFPKHCGNGTVAVAEWDTFCEEQVLDLLGDAERLEKVWVAGSDSAVELAEVNAELVDLTSLIGSPAYRAGSPQREALDARIAALAARQEELEGLEARPSGWEWREIGQRFGDWWREQDTAAKNAWLRSMNVRLTFDVRGGLTRTIDFGDLQEYEQHLRLGSVVERLHTGMS

SEQ ID NO: 10536 - protein, 500 aa, synthetic construct
MRALVVIRLSRVTDATTSPERQLESCQQLCAQRGWDVVGVAEDLDVSGAVDPFDRKRRPNLARWLAFEEQPFDVIVAYRVDRLTRSIRHLQRLVHWAEDHKKLVVSATEAHFDTTTPFAAVTIALMGTVAQMELEAIKERSRSAAHFNIRAGKYRGSLPPWGYLPTRVDGEWRLAPDPVQRERILEVYHRVVDDHEPLHSVAHDLNRRGVLSPRDYFAQLQGREPRGRKWSATALKRSMISEAMLGYVTLNGKTVRDDDGAPLVRAEPILTREQLEALRAELVKTSRAKPAVSTPSLLLRVLFCAVCGEPAYKFAGGGRKHPRYRCRSIGFPEHCGNGTVAMAEWDAFCEEQVLGLLGDAERLEKVWVAGSDSAVELAEVNAELVDLTSLIGSPAYRAGSPQREALDARIAALAARQEELEGLEARPSGWEWRETGQRFGDWWREQDTAAKNTWLRSMNVRLTFDVRGGLTRTIDFGDLQEYEQHLRLGSVVERLRAGMS

SEQ ID NO: 10537 - protein, 500 aa, synthetic construct
MRALVVIRLSRVTDATTSPERQLESCQQLCAQRGWDVVGVAEDLDVSGAVDPFDRKRRPNLARWLAFEERPFDVIVAYRVDRLARSIRHLQQLVHWAEDHKKLVVSATEAHFDTTTPFAAVVIALMGTVAQMELEAIKERNRSAAHFNIRAGKYRGSLPPWGYLPTRVDGEWRLVPDPVQRERILEVYHRVVDDHEPLHLVAHDLNRRGVLSPRDYFAQLRGREPQGRKWSATALKRSMISEAMLGHATLNGKTVRDEDGAPLARAEPILTREQLEALRAELVKTSRARPAVSTPSLLLRVLFCAVCGEPAYKFAGGGRKHPRYRCRSMGFPKHCGNGTVATAEWDAFCEEQVLDLLGDTERLEKVWVAGSDSAIELAEVNAELVDLTSLIGSPAYRAGSPQREALDARMAALAARQEELEGLEARPSGWEWRETGQRFGDWWREQDTAAKNTWLRSMNVRLTFDVRGGLTRTIDFGDLQEYEQHLRLGNAVERLHTGKS

SEQ ID NO: 10538 - protein, 500 aa, synthetic construct
MRALVVIRLSRVTDATTSPERQLESCQQLCAQRGWDVVGVAEDLDVSGAVDPFDRKRRPNLARWLAFEEQPFDVIVAYRVDRLTRSTRHLQQLVHWADDHKKLVVSATEAHFDTTTPFAAVVIALMGTVAQMELEAIKERSRSAAHFNIRAGKYRGSLPPWGYLPARVDGVWRLVSDPVQRERILEVYHRVVNNHEPLHLVAHDLNRRGVLSPKDYFAQLQGREPQGRKWSATALKRSMISEAMLGYATLNGKTVRDDDGAPLVRAEPILTREQQEALRAELVKTSRAKPAVSTPSLLLRVLFCAVCGEPAYKFAGGGRKHPRYRCRSMGFPKHCGNGTVAMAEWDAFCEEQVLGLLGDAERLEKVWVAGSDSAVELAEVNAELVDLTSLIGSPAYRAGSPQREALDARIAALAARQEELEGLEARPSGWEWRETGQRFGDWWREQDTAAKNTWLRSMNVRLTFDVRGELTRTIDFGDLQEYEQHLRLGSVVERLHTGRS

SEQ ID NO: 10539 - protein, 500 aa, synthetic construct
MRALVVIRLSRVTDATTSPERQLESCQQLCAQRGWDVVGVAEDLDVSGAVDPFDRKRRPNLARWLAFEEQPFDVIVAYRVDRLTRSTRHLQQLVHWAEDHKKLVVSATEAHFDTTTPFAAVVIALMGTVAQMELEAIKERSRSAAHFNIRAGKYRGSLPPWGYLPTRVDGEWRLVPDPVQRERILEVYHRVVDDHEPLHLVAHDLNRLGVLSPKDYFAQLQGREPRGRKWSATALKRSMISEAMLGYATLNGKTVRDDDGAPLERAEPILTRGQLEALRAELVKTSRAKPAVSTPSLLLRVLFCAVCGEPAYKFTGGGRKHPRYRCRSMGFPKHCGNGTVAMAEWDAFCEEQVLNLLGDAERLEKVWVAGSDFAVKLAEVNAELVDLTSLIGSPAYRAGSPQREALDARIAALAARQEELEGLEARPSGWGWRETGQPFGDWWREQDTAAKNTWLRSMNVRLTFDVRGGLTRTIDFGDLQEYEQHLRLGSVVERLHTGMS

SEQ ID NO: 10540 - protein, 500 aa, synthetic construct
MRALVVIRLSRVTDATTSPERQLESCQQLCAQRGWDVVGVAEDLDVSGAVDPFDRMRRPNLARWLAFEEQPFDVIVAYRVDRLTRSTRHLQQLVHWAEDHKKLVVSATEAHFDTTTPFAAVVIALMGTVAQMELEAIKERNRSAAHFNIRAGKYRGSLPPWGYLPTRVDGEWRLAPDPVQRERILEVYHRVVDNHEPLHLVAHDLNRRGVLSPKDYFAQLQGREPQGRKWSATALKRSMISEAMLGYATLNGKTVRDDDGAPLVRAEPILTREQQEALRAELAKTSRAKPAVSTPSLLLRVLFCAVCGEPAYKFAGGGRRHPRYRCRSMGFPKHCGNGTVAIAEWDAFCEEQVLNLLGDAERLEKVWVAGSDSAVELAEVNAELVDLTSLIGSPAYRAGSPQREALDARIAALAARQEELEGLEARPSGWEWRETGQRFGDWWREQDTAAKNTWLRSMSVRLTFDVRGGMTRTIDFGDLLEYEQHLRLGSVVERLHTGTT

SEQ ID NO: 10541 - protein, 500 aa, synthetic construct
MRALVVIRLSRVTDATTSPERQLESCQQLCAQRGWDVVGVAEDLDVSGAVDPFDRKRRPNLARWLAFEERPFDVIVAYRVDRLTRSIRHLQQLVRWAEDHKKLVVSATEAHFDTTTPFAAVVIALMGTVAQMELEAIKERNRSAAHFNIRAGKYRGSLPPWGYLPTRVDGAWRLVPDPVQRERILEVYHRVVDNHEPLHLVAHDLNRRGVLSPKDYFAQLRGREPQGRKWSATALKRSMISVAMLGYATLNGKTVRDDDGAPLVRAEPILTREQLEALRAELVKTSRAKPAVSTPSLLLRVLFCAVCGEPAYKFSGGGRKHPRYRCRSMGFPKHCGNGTVAMAEWDAFCEEQVLDLLGDAERLEKVWVAGSDSAVELAEVNAELVDLTSLIGSPAYRAGSPQREALDARIAALAARQGELEGLEARPSGWEWRETGQRFGDWWREQDTAAKNTWLRSMNVRLTFDVRGGLTRTIDFGDLQEYEQHLRLGSVVERLHTGMS

SEQ ID NO: 10542 - protein, 500 aa, synthetic construct
MRALVVIRLSRVTDATTSPERQLESCQQLCAQRGWDVVGVAEDLDVSGAVDPFDRKRRPNLARWLAFEEQPFDVIVAYRVDRLTRSTRHLQQLVRWAEDHKKLVVSATEAHFDTTTPFAAVVIALMGTVAQMELEAIKERNRSAAHFNIRAGKYRGSLPPWGYLPTRVDGVWRLVPDPVQRERILEVYHRVVDNHEPLHLVAHDLNRRGVLSPRDYFAQLRGREPQGRKWSATALKRSMISEAMLGYATLNGKTVRDDDGAPLVRAEPILTREQLEALRAVLVKTSRAKPAVSTPSLLLRVLFCAVCGEPAYKFAGGGRKHPRYRCRSMGFPKHCGNGTAAMAEWDAFCEEQVLNLLGDAERLEKVWVAGSDSAVELAEVNAELVDLTSLIGSPAYRAGSPQREALDARIAALAARQEELEGLEARPSGWEWRETGQRFGDWWLEQDTAAKNTWLRSMNVRLTFDVRGGLTRTIDFGDLREYEQHLRLGSVVERLHTGMS

SEQ ID NO: 10543 - protein, 500 aa, synthetic construct
MRALVVIRLSRVTDATTSPERQLESCQQLCAQRGWDVVGVAEDLDVSGAVDPFDRKRRPNLARWLAFEEQPFDVIVAYRVDRLTRSVRHLQQLVHWAEDHKKLVVSATEAHFDTTTPFAAVVIALMGTVAQMELEAIKERNRSAAHFNIRAGKYRGSLPPWGYLPARVDGEWRLVPDPVQRERILEVYHRVVDNHEPLHLVAHDLNRRGVLSPRDYFAQLRDREPQGRRWSATALKRSMISEAMLGYATLNGKTVRDDDGAPLVRAEPILTREQLEALRAELVKTSRAKPAVSTPSLLLRVLFCAVCGEPAYKFAGGGRKHPRYRCRSMGFPKHCGNGTVAMAEWDAFCEEQVLGLLGDVERLEKVWVAGSDSAVKLAEVNAELVDLTGLIGSPAYRAGSPQREALDARIAALAARQEELEGLEARPSGWEWRGTGQRFGDWWREQDTAAKNTWLRSMNVRLMFDVRGGLTRTIDFGDLQEYEQHLRLGSVVERLHTGMS

SEQ ID NO: 10544 - protein, 500 aa, synthetic construct
MRALVVIRLSRVTDATTSPERQLESCQQLCAQRGWDVVGVAEDLDVSGAVDPFDRKRRPNLARWLAFEERPFDVIVAYRVDRLTRSIRHLQQLVHWAEDHKKLVVSATEAHLDTTTPFAAVVIALMGTVAQMELEAIKERSRSAAHFNIRAGKYRGSLPPWGYLPTRVDGVWRLVPDPVQRERILEVYHRVVDNHEPLHLVAHDLNRRGVLSPKDYFAQLRGREPQGRKWSATALKRSMISVAMLGYATLNGKTVRDDDGAPLVRAEPILTREQLEALRAELVKTSRAKPAVSTPSLLLRVLFCAVCGEPAYKFAGGGRKHPRYRCRSMGFPRHCGNGTVAMAEWDAFCEEQVLDLLGDAERLEKVWVAGSDSAVELAEVNAELVDLTSLIGSPSYRAGSPQREALDARIAALAARQEELEGLEARPSGWEWRETGQRFGDWWREQDTAAKNTWLRSMNVRLTFDVRGGLTRTIDFGDLQEYEQQLRLGSVVERLHTGMS

SEQ ID NO: 10545 - protein, 500 aa, synthetic construct
MRALVVIRLSRVTDATTSPERQLESCQQLCAQRGWDVVGVAEDLDVSGAVDPFDRKRRPNLARWLAFEEQPFDAIVAYRVDRLTRSIRHLQQLVHWAEDHKKLVVSATEAHFDTTTPFAAVVIALMGTVAQMELEAIKERNRSAAHFNIRAGKYRGSLPPWGYLPTRVDGEWRLAPDPVQRERILEVYHRVVDNHEPLHLVAHDLNRRGVLSPKDYFAQLRGREPQGRKWSATALKRSMTSEAMLGYATLNGKTVRDDDGAPLVRAEPILTREQLEALRAELVKTSRAKPAVSTPSLLLRVLFCAVCGEPAYKFAGGGRKHPRYRCRSMGFPKHCGNGTVAMAEWDGFCEEQVLDLLGDAERLEKVWVAGSDFAVELAEVNAELVDLTSLISSPAYRAGSPQRGALDARIAALAARQEELEGLEARPSGWEWRETGQRFGDWWREQDTAAKNTWLRSMNVRLTFDVRGGLTRTIDFGDLQEYEQQLRLGSVVERLHTGMS

SEQ ID NO: 10546 - protein, 500 aa, synthetic construct
MRALVVIRLSRVTDATTSPERQLESCQQLCAQRGWDVVGVAEDLDVSGAVDPFDRKRRPSLARWLAFEEQPFDVIVAYRVDRLARSVRHLQQLVQWAEDHEKLVVSATEAHFDTTTPFAVVVIALMGTVAQMELEAIKERNRSAAHFNIRAGKYRGSLPPWGYLPTCVDGEWRLVPDPVQRERILEVYRRVVDNHEPLHLVAHDLNRRGVLSPRDYFAQLRGREPQGRKWSATALKRSMISEAMLGHATLNGKTVRDGDGAPLVRAEPILTREQLEALRAELVKTSRAKPAVSTPSLLLRVLFCAVCGEPAYKFAGGGRRHPRYRCRSMGFPKHCGNGTVAMAEWDAFCEEQVLDLLGDAERLEKVWVAGSDSAVELAEVNAELVDLTSLIGSTAYRAGSPQREALDARIAALAARQEELEGLEARPSGWEWRETGQRFGDWWREQDTAAKNAWLRSMNVRLTFDVRGGLTRTIDFGDLQEHEQHLRLGNVVERSHTGMS

SEQ ID NO: 10547 - protein, 500 aa, synthetic construct
MRALVVIRLSRVTDATTSPERQLESCQQLCAQRGWDVVGAAEDLDVSGAVDPFDRKRRPNLARWLAFEEQPFDVIVAYRVDRLTRSIRHLQQLVHWAEDHKKLVVSATEAHFDMTTPFAAVVIALMGTVAQMELEAIKERSRSAAHFNIRAGKYRGSLPPWGYLPTRVDGEWRLAPDPVQRERILEVYHRVVDNHEPLHLVAHDLSRRGVLSPKDYFAQLQGREPQGRKWSATALKRSMISVAMLGYATLNGKTVRDDDGVPLVRAEPILTREQLEALRAELVKTSRAKPAVSTPSLLLRVLFCAVCGEPAYKFAGGGRKHPRYRCRSMGFPKHCGNGTVAMAEWDAFCEEQVLGLLGDAERLEKVWVAGSDSAVELAEVSAELVDLTSLIGSPAYRAGSPQREALDARIAALAARQEELEGLEARPSGWEWRETGQRFGDWWREQNTAAKNTWLRSMNVRLTFDARGGLTRTIDFGDLQEYEQHLRLGSVVKRLHTGMS

SEQ ID NO: 10548 - protein, 500 aa, synthetic construct
MRALVVIRLSRVTDATTSPERQLESCQQLCAQRGWGVVGVAEDLDVSGAVDPFDRKRRPNLARWLAFEEQPFDVIVAYRVDRLTRSVRHLQRLVHWAEDHKKLVVSATEAHFDTTTPFAAVVIALMGTVAQMELEAIKERSRSAAHFNIRAGKYRGSLPPWGYLPTRVDGEWRLVPDPVQRERILEVYHRVVDNHEPLHLVAHDLNRRGVLSPKDYFAQLQGREPQGRKWSATALKRSMISGAMLGYATLNGKTVRDDDGAPLVRAEPILTREQLEALRAELVKTSRAKPAVSTPSLLLRVLFCAVCGEPAYRFAGGGRKHPRYRCRSMGFPKHCGNGTVATAEWDAFCEEQVLDLLGDAERLEKVWVAGSDSAVELAEVNAELVDLTSLIGSPAYRAGSPQREALDARIAALAARQEELEGLEARPSGWEWRETGQRFGDWWREQDTAAKNTWLRSMNVRLTFDVRGGPTRTIDFGDLQEYEQHLRLGSVVERLHTGMS

SEQ ID NO: 10549 - protein, 500 aa, synthetic construct
MRALVVIRLSRVTDATTSPERQLESCQQLCAQRGWDVVGVAEDLDVSGAVDPFDRKRRPNLARWLAFEGQPFDVIVAYRVDRLARSIRHLQQLVHWAEDHKKLVVSATEAHFDTTTPFAAVVIALMGTVAQMELEAIKERNRSAAHFNIRAGKYRGSLPPWGYLPTRVDGEWRLAPDPVQRERILEVYHRVVNHHEPLHLVAHDLNRRGVLSPKDYFAQLQGREPQGRKWSATALKRSMISEAMLGYATLNGKVVRDDDGAPLVRAEPILTREQLEALRAELVKTSRAKPAVSTPSLLLRVLFCAVCGEPAYKFAGGGRKHPRYRCRSMGFPKHCGNGTVAMAEWNAFCEEQVLDLLGDAERLEKVWVVGSNSAVELAEVNAELVDLTSLIGSPAYRAGSPQREALDARIAAQAARQEVLEGLEARPSGWEWRETGQRFGDWWREQDTAAKNTWLRSMNVRLTFDVRGGLTRTIDFGDLLEYEQHLRLGSVVERLHTGMS

SEQ ID NO: 10550 - protein, 500 aa, synthetic construct
MRALVVIRLSRVTDATTSPERQLESCQQLCAQRGWDVVGVAEDLDVSGAVDPFDRKRRPNLARWLAFEEQPFDVIAAYRVDRLTRSTRHLQQLVHWAEDHKKLVVSATEAHFDTTTPFAAVVIALMGTVAQMELEAIRERSRSAAHFNIRAGKYRGSLPPWGYLPTRVDGEWRLAPDPAQRERIFEVYHRVVDNHEPLHLVAHDLNRRGVLSPKDYFAQLQGREPQGRKWSATALKRSMISEAMLGYATLNGKTVRDDDGAPLVRAEPILTRKQLEALRAELVKTSRAKPAVSTPSLLLRVLFCAVCGEPAYKFSGGGRKHPRYRCRSMGFPKHCGNGTVAMAEWDAFCEEQVLDLLGDAERLEKVWVAGSDSAVELAEVNAELVDLTSLIGSPAYRAGSPQREALDARVAALAARQEELEGLEARPSGWEWRETGQRFGDWWREQDIAAKNTWLRSMNVRLTFDVRGGLTRTIDFGDLQEYEQHLRLGSAVERLHTGVS

SEQ ID NO: 10551 - protein, 500 aa, synthetic construct
MRALVVIRLSRVTDATTSPERQLESCQQLCAQRGWDVVGVAEDLDVSGAVDPFDRKRRPNLARWLAFEEQPFDVIVAYRVDRLTRSVRHLQQLVHWAEDHKKLVVSATEAHFDTTTPFAAVVIALMGTMAQMELEAIKERSRSAAHFNIRAGKYRGSLPPWGYLPTRVDGEWRLVPDPVQRERILEVYHRVVDNHEPLHLVAHDLNRRGVLSPKDYFAQLRGREPQGRKWSATALKRSMISVAMLGYATLNGKIVRDDDGAPLVRAEPILAREQLEALRAELAKTSRAKPAVSTPSLLLRVLFCAVCGEPAYKFTGGGRKHPRYRCRSMGFPKHCGNGTVAMAEWDAFCEEQVLDLLGDAERLEKVWVAGSDSAVELAEVNAELVDLTSLIGSPAYRAGSPQREALDARIAALAARQEELEGLEARPPGWEWRETGQRFGDWWREQDTVAKNTWLRSMNVRLTFDVRGGLTRSIDFGDLREYEQHLRLGSVVERLHTGMS

SEQ ID NO: 10552 - protein, 500 aa, synthetic construct
MRALVVIRLSRVTDATTSPERQLESCQQLCAQRGWGVVGVAEDLDVSGAVDPFDRKRRPNLARWLAFEEQPFDVIVAYRVDRLTRSIRHLQQLVHWAEDHKKLVVSATEAHFDTTTPFAAVVIALMGTVAQMELEAIKERNRSAAHFNIRAGKYRGSLPPWGYLPTRVDGEWRLAPDPVQRERILEVYHRVVDNHEPLHSVAHDLNRRGVLSPKDYFAQLQGREPQGRKWSATALKRSMISGAMLGYATLNGKIVRDDDGAPLVRAEPILTREQLEALRAELVKTSRAKPAVSTPSLLLRVLFCAVCGEPAYKFAGGGRKHPRYRCRSMGFPKHCGNGTVAMAEWDAFCEEQVLDLLGDAERLEKVWVAGSDSAVELAEVNAELVDLTSLVGSPAYRAGSPQREALDARIAALAARQEELEGLEARPSGWEWRETGQRFGDWWREQDTAAKNTWLRSMNVRLTFDVRGGLTRTIDFGDLQEYEQHLRLGSVVERLHTGMS

SEQ ID NO: 10553 - protein, 500 aa, synthetic construct
MRALVVIRLSRVTDATTSPERQLESCQQLCAQRGWDVVGVAEDLDVSGAVDPFDRKRRPNLARWLAFEEQPFDVIVAYRVDRLTRSIRHLQQLVHWAEDHKKLVASATEAHFDTTTPFAAVTIALMGTVAQMELEAIKERSRSAAHFNIRAGKYRGSLPPWGYLPTRVDGEWRLAPDPVQRERILEVYHRVVDNHEPLHLVAHDLNRRGVLSPKDYFAQLRGREPQGRKWSATALKRSMTSEAMLGYATLNGKTVRDDDGAPLVRAEPILTREQLEALRAELVKTSRAKPAVSTPSLLLRVLFCAVCGEPAYKFAGGGRKHPRYRCRSMGFPKHCGNGTVAMAEWDAFCEEQVLGLLGDAERLEKVWVAGSDSAIELAEVNAELLDLTSLIGSPAYRAGSPQREALDARIAALAARQEELEGLEARPSGWEWRETGQRFGDWWREQDTAAKNTWLRSMNVRLTFDVRGGLTRTIDFGDLQEYEQRLRLGSVVERLHTGMS

SEQ ID NO: 10554 - protein, 500 aa, synthetic construct
MRALVVIRLSRVTDATTSPERQLESCQQLCAQRGWDVVGVAEDLDVSGAVDPFDRKRRPNLARWLAFEEQPFDVIVAYRVDRLTRSIRHLQQLVHWAEDHKKLVVSATEAHFDMTTPFAAVVIALMGTVAQMELEAIKERNRSAAHFNIRAGKYRGSLPPWGYLPARVDGEWRLVPDSVQRERILEVYHRVVDNHEPLHLVAHDLNRRGVLSPKDYFAQLQGREPQGRKWSATALKRSMTSEAMLGYATLNGETVRDDDGAPLVRAEPILTREQLEALRAELVKTSRAKPAVSTPSLLLRVLFCAVCGEPAYKFSGGGRKHPRYRCRSMGFPKHCGNGTVAMAEWDAFCEEQVLDLLGDAERLEKVWVAGSDSAVELAEVSAELVDLTSLIGSPAYRAGSPQREALDARIAALAARQEELEGLEARPSGWEWRRTGQRFGDWWRVQNTAAKNTWLRSMNVRLAFDVRGGLTRTIDFGDLQEYEQHLRLGSVVERLHTGMS

SEQ ID NO: 10555 - protein, 500 aa, synthetic construct
MRALVVIRLSRVTDATTSPERQLESCQQLCAQRGWDVVGVAEDLDVSGAVDPFDRKRRPNLARWLAFEEQPFDAIVAYRVDRLTRSIRHLQQLVHWAEDHKKLVVSATEAHFDTTTPFAAVVIALMGTVAQMELEAIKERSRSAAHFNIRAGKYRGSLPPWGYLPARVDGEWRLAPDPVQRERILEVYHRVVDDHEPLHLVAHDLNRRGVLSPRDYFAQLRGREPQGRKWSATALKRSMISEAMLGYATLNGKTVRDDDGAPLVRAEPILTREQQEALRAELVKTSRAKPAVSTPSLLLRVLFCAVCGEPAYKFTGGGRRHPRYRCRSMGFPKHCGNGTVAMAEWDAFCGEQVLNLLGDAERLEKVWVAGSDSAVELTEVNAELVDLTSLIGSPAYRAGSQQREALDARIAALAARQEELEGLEARPSGWEWRETGQRFRDWWREQDTAAKNTWLRSMNVRLTFDVRGGLTRTIDFGDLQEYEQHLRLGNVVERLHTGMS

SEQ ID NO: 10556 - protein, 500 aa, synthetic construct
MRALVVIRLSRVTDATTSPERQLESCQQLCAQRGWDVVGVAEDLDVSGAVDPFDRKRRPNLARWLAFEGQPFDVIVAYRVDRLTRSIRHLQQLVHWAEDHKKLVVSATEAHFDTTTPFAAVVIALMGTVAQMELEAIKERNRSAAHYNIRAGKYRGSLPPWGYLPARVDGEWRLVPDPVQRDRILEVYHRVVDNHEPLHLVAHDLNRRGVLSPKDYFAQLRGREPQGRKWSATALKRSMISEAMLGYATLNGKTVRDEDGAPLVRAEPILTRGQLEALRAELVKTSRAKPAVSTPSLLLRVLFCAVCGEPAYKFAGGGRKHPRYRCRSMGFPKHCGNGTVAMAEWDAFCEEQVLDQLGDAECLEKVWVAGSDSAVELAEVNAELVDLTSLIGSPAYRAGSLQREALDARIAALAARQEELEGLEARPSGWEWRGTGQRFGDWWREQDTATKNAWLRSMNVRLTFDVRGGLTRTIDFGDLQEYEQHLRLGSVVERLHTGMS

SEQ ID NO: 10557 - protein, 500 aa, synthetic construct
MRALVVIRLSRVTDATTSPERQLESCRQLCAQRGWDVVGVAEDLDVSGAVDPFDRKRRPNLARWLAFEEQPFDVIVAYRVDRLTRSTRHLQQLVHWAEDHRKLVVSATEAHFDTTTPFAAVVIALMGTVAQMELEAIKERSRSAAHFNIRAGKYRGSLPPWGYLPTRVDGEWRLVLDPVQRERILEVYHRVVDNHEPLHLVAHDLNRRGVLSPRDYFAQLQGREPQGRKWSATALKRSMISEAMLGYATLNGKIVRDDDGAPLVRAEPILTREQQEALRAGLVKTSRAKPAVSTPSLLLRVLFCAVCGEPAYKFAGGGRKHPRYRCRSMGFPKHCGNGTVAMAEWDAFCEEQVLNLLGDAERLEKVWVAGPDSAVELAEVNAELVDLTSLIGSPAYRAGSPQREALDARIAALAARQEELEGLETRSSGWEWRGTGQRFGDWWHEQDTAAKNTWLRSMNVRLTFDVRGGLTRTIDFGELQEYEQHLRLGSVVERLHTGMS

SEQ ID NO: 10558 - protein, 500 aa, synthetic construct
MRALVVIRLSRVTDATTSPERQLESCQQLCAQRGWDVVGVAEDLDVSGAVDPFDRKRRPNLARWLAFEEQPFDVIVAYRVDRLTRSTRRLQQLVHWAEDHKKLVVSATEAHFDTTTPFAAVVIALMGTVAQMELEAIKERNRSAAHFNIRAGKYRGSLPPWGYLPARVDGEWRLVPDPVQRERILEVYHRVVDNHEPLHLVAHDLNRRGVLSPRDYFAQLRGREPQGRKWSATALKRSMISEVMLGYATLNGRTVRDDDGAPLVRAEPILTREQLEALRAELVKTSRAKPAVSTPSLLLRVLFCAVCGEPAHKFAGGGRKHPRYRCRSMGFPKHCGNGTVATAEWDAFCEEQVLDLLGDTERLEKVWVAGSDSAIELAEVNAELVDLTSLIGSPAYRAGSPQREALDARIAALAARQEELESLEARPPGWEWRETGQRFGDWWREQDTAAKNTWLRSMNVRLTFDVRGGLTRTIDFGDLQEYEQHLRLGNAVERLHTGMS

SEQ ID NO: 10559 - protein, 500 aa, synthetic construct
MRALVVIRLSRVTDATTSPERQLESCQQLCAQRGWDVVGVAEDLDVSGAVDPFDRKRRPNLARWLAFEEQPFDVIVAYRVDRLARSIRHLQQLVHWAEDHEKLVVSVTEAHFDTTTPFAAVVIALMGTVAQMELEAIKERSRSAAHFNIRAGKYRGSLPPWGYLPTRVDGEWRLVPDPVQRERILEVYHRVVDNHEPLHLVAHDLNRRGALSPRDYFAQLRGREPQGRKWSATALKRSMISEAMLGYATLNGRTVRDDDGAPLVRAEPILTREQLEALRAELVKTSRAKPAVSTPSLLLRVLFCAVCGEPAYKFAGGGRKHPRYRCRSMGFPKHCGNGTVAMAEWDAFCEEQVLGLLGDVERLEKVWVAGSDSAAELAEVSAELVDLTSLIGSPAYRAGSPQREALDARIAALAARQEELEGLEARPSGWEWRETGQRFGDWWREQDTAAKNTWLRSMNVRLTFDVRGGLTRTIDFGDLQEYERHLRLGGVVERLHTGMS

SEQ ID NO: 10560 - protein, 500 aa, synthetic construct
MRALVVIRLSRVTDATTSPERQLESCQQLCAQRGWDVVGVAEDLDVSGAVDPFDRKRRPNLARWLAFEEQPFDVIVAYRVDRLTRSTRHLQQLVHWADDHKKLVVSATEAHFDTTTPFAAVVIALMGTVAQMELEAIKERSRSAAHFNIRAGKYRGSLPPWGYLPARVGGVWRLVPDPVQRERILEVYHRVVNNHEPLHLVAHDLNRRGVLSPKDYFAQLQGREPQGRKWSATALKRSMISEAMLGYATLNGKTVRDDDGAPLVRAEPILTREQLEALRAELVKTSRAKPAVSTPSLLLRVLFCAVCGEPAYKFAGGGRKHPRYRCRSMGFPKHCGNGTVAMAEWDAFCEERVLDLLGDAERLEKVWVAGSDSAVELAEVNAELVDLTSLIGSPAYRAGSPQREALDARIAALAARQEELEGLEARPSGWEWRETGQRFGDWWREQDTAAKNTWLRSMNVRLTFDVRGGLTRTIDFGDLREYEQHLRSGSVVERLRTGMS

SEQ ID NO: 10561 - protein, 500 aa, synthetic construct
MRALVVIRLSRVTDATTSPERQLESCQQLCAQRGWDVVGVAEDLDVSGAVDPFDRKRRPNLARWLAFEEQPFDVIVAYRVDRLARSIRHLQQLVHWADDHKKLVVSATEAHFDTTTPFAAVVIALMGTVAQMELEAIKERSRSAAHFNIRAGKYRGSLPPWGYLPARVDGVWRLVPDPVQRERILEVYHRVVNNHEPLHLVAHDLNRRGVLSPKDYFAQLQGREPQGRKWSATALKRSMTSEAMLGYATLNGKTVRDDDGAPLVRAEPILAREQQEALRAELVKTSRAKPAVSTPSLLLRVLFCAVCGEPAYKFAGGGRKHPRYRCRSMGFPKHCGNGTVAMAEWDAFCEEQVLGLLGDAERLEKVWVAGSDSAVELAEVNAELVDLTSLIGSPAYRAGSPQREALDARIAALAARQKELEGLEARPSGWEWRETGQRFGDWWREQDTAAKNTWLRSMNVRLTFDVRGELTRTIDFGDLQEYEQHLRLGSVVERLHTGMP

SEQ ID NO: 10562 - protein, 500 aa, synthetic construct
MRALVVIRLSRVTDATTSPERQLESCQQLCAQRGWDVVGVAEDLDVSGAVDPFDRKRRPNLARWLAFEGQPFDVIVAYRVDRLTRSIRHLQQLVHWAEDHKKLVVSATEAHFDTTTPFAAVVIALMGTVAQMELEAIKERNRSAAHYNIRAGKYRGSLPPWGYLPARVDGEWRLVPDPVQRDRILEVYHRVVDNHEPLHLVAHDLNRRGVLSPKDYFAQLRGREPQGRKWSATALKRSMISEAMLGYATLNGKTVRDEDGAPLVRAEPILTRGQLEALRAELVKTSRAKPAVSTPSLLLRVLFCAVCGEPAYKFAGGGRKHPRYRCRSMGFPKHCGNGTVAMAEWDAFCEEQVLDLLGDAERLEKVWVAGSDSAVELAEVNAELVDLTSLIGSPAYRAGSLQREALDARIAALAARQEELEGLEARPSGWEWRGTGQRFGDWWREQDTATKNAWLRSMNVRLTFDVRGGLTRTIDFGDLQEYEQHLRLGSVVERLHTGMS

SEQ ID NO: 10563 - protein, 500 aa, synthetic construct
MRALVVIRLSRVTDATTSPERQLESCQQLCAQRGWDVVGVAEDLDVSGAVDPFDRKRRPNLARWLAFEEQPFDVIVAYRVDRLTRSVRHLQQLVHWAEDHKKLVVSATEAHFDTTTPFAAVVIALMGTVAQMELEAIKERSRSAAHFNIRAGKYRGSLPPWGYLPARVDGEWRLVPDPVQRERILEVYHRVVDNHEPLHLVAHDLNRRGVLSPKDYFAQLRGREPQGRKWSATALKRSMISVAMLGYATLCGKTVRDDDGAPLVRAEPILTREQLEALRAELVRTSRAKPAVSTPSLLLRVLFCAVCGEPAYKFAGGGRKHPRYRCRSMGFPKHCGNGTVAMAEWDAFCEEQVLNLLGDAERLEKVWVAGSDSAVELAEVNKELVDLTSLIGSPAYRAGSPQREALDARIAALAARQEELEGLVARPSGWEWRGTGRRFGDWWRELDTAAKNTWLRSMNVRLTFDVRDGLTRTIDFGDLQEYEQHLRLGSVVERSHTGMT

SEQ ID NO: 10564 - protein, 500 aa, synthetic construct
MRALVVIRLSRVTDATTSPERQLESCQQLCAQRGWDVVGVAEDLDVSGAVDPFDRKRRPNLARWLAFEEQPFDVIVAYRVDRLTRSTRHLQQLVHWAEDHKKLVVSATEAHFDTTTPFAAVVIALMGTVAQMELEAIKERTRSAAHFNIRAGKYRGSLPPWGYLPTRVDGEWRLVPDPVQRERILEVYHRVVDNHEPLHLVAHDLNRRGVLSPKDYFAQLRGREPQGRKWSATALKRSMISEAMLGYATLNGKTVRDDDGAPLVRAEPILTREQLEALRAELVKTSRAKPAVSTPSLLLRVLFCAVCGEPAYKFAGGGRKHPRYRCRSMGFPKHCGNGTVAMAEWDAFCEEQVLDLLGDTERLEKVWVAGSDSAVELAEVNAELVDLTSLIGSSAYRAGSSQREALDARIAALAARQEELEGLEARPSGWEWRETGQRFGDWWREQDTAAKNTWLRSMNVRLTFDVRGGLTRTIDFGDLQEYEQHLRLGSVVERLHTGMS

SEQ ID NO: 10565 - protein, 500 aa, synthetic construct
MRALVVIRLSRVTDATTSPERQLESCQQLCAQRGWDVVGVAEDLDVSGAVDPFDRKRRPNLARWLAFEEQPFDVIVAYRVDRLTRSTRHLQQLVHWAEDHEKLVVSATEAHFDTTTPFAAVVIALMGTVAQMELEAIKERSRSAAHFNIRAGKYRGSLPPWGYLPARVDGVWRLVPDPVQRERILEVYHRVVNNHEPLHLVAHDLNRRGVLSPKDYFAQLQGREPQGRKWSATALKRSMISEAMLGYATLNGKTVRDDDGAPLVRAEPVLTRGQLEALRAELVKTSRAKPAVSTPSLLLRVLFCAVCGEPAYKFAGGGRKHPRYRCRSMGFPKHCGNGTVAMAEWDAFCEEQVLDLLGDAERLEKVWVAGSDSAVELAEVNAELVDLTSLIGSPAYRAGSPQREALDARIAALAARQEELGGLEARLSGWEWRKTGQRFGDWWREQDTAAKNTWLRSMNVRLTFDVRGGLTRTIDFGDLQEYEQHLRLGSVVERLHTGMS

SEQ ID NO: 10566 - protein, 500 aa, synthetic construct
MRALVVIRLSRVTDATTSPERQLESCQQLCARRGWDVVGVAEDLDVSGAVDPFDRKRRPNLARWLAFEEQPFDAIVAYRVDRLTRSIRHLQQLVHWAEDHKKLVVSATEAHFDTTTPFAAVVIALMGTVAQMELEAIKERSRSAAHFNIRAGKYRGSLPPWGYLPARVDGEWRLAPDPVQRERILEVYHRVVDDHEPLHLVAHDLNRRGVLSPRDYFAQLRGREPQGRKWSATALKRSMISEAMLGYATLNGKTVRDDDGAPLVRAEPILTREQQEALRAELVKTSRAKPAVSTPSLLLRVLFCAVCGEPAYKFAGGGRRHPRYRCRSMGSPKHCGNGTVAMAEWDAFCEEQVLNLLGDAERLEKVWVAGSDSAVELTEVNAELVDLTSLIGSPAYRAGSQQREALDARIAALAARQEELEGLEARPSGWEWRETGQRFRDWWREQDTTAKNTWLRSMNVRLTFDVRGGLTRAIDFGDLQEYEQHLRLGSVIERLHTGMS

SEQ ID NO: 10567 - protein, 500 aa, synthetic construct
MRALIVIRLSRVTEATTSPERQLESCQQLCAQRGWGVVGVAEDLDVSGAVDPFDRKRRPNLARWLAFEEQPFDVIVAYRVDRLTRSVRHLQRLVHWAEDHKKLVVSATEAHFDTTTPFAAVVIALMGTVAQMELEAIKERSRSAAHFNIRAGKYRGSLPPWGYLPTRVDGEWRLVPDPVQRERILEVYHRVVDNHEPLHSVAHDLNRRGVLSPKDYFAQLRGREPQGRKWSATALKRSMISGAMLGYATLYGKTVRDDDGAPLVRAEPILTREQQEALRAELAKASRAKPAVSTPSLLLRVLFCAVCGEPAYKFAGGGRKHPRYRCRSMGFLKHCGNGTVAMAEWDAFCEEQVLDLLGDAERLEKVWVAGSDSAVKLAEVNAELMDLTSLIGSPAYRAGSPQREALDARIAALAARQEELEGLEARPSGWEWRGTGQRFGDWWREQDTAVKNTWLRSMNVRLTFDVRGGLTRTIDFGDLQEYVQHLRLGSVVERLHTGMS

SEQ ID NO: 10568 - protein, 500 aa, synthetic construct
MRALVAIRLSRVTEATTSPERQLESCQQLCAQRGWDVVGVAEDLDVSGAVDPFDRKRRPNLARWLAFEEQPFDVIVAYRVDRLTRSIRHLQQLVHWAEDHKKLVVSATEAHFDTTTPFAAVVIALMGTVAQMELEAIKERNRSAAHFNIRAGKYRGSLPPWGYLPTRVDGEWRLVPDPVQRERILEVYHRVVNNHEPLHLVAHDLNQRGVLSPKDYFAQLQGREPQGRKWSATALKRSMISEAMLGYATLSGKTVRDDDGAPLVRAEPILTREQQEALRAELVKTSRAKPAVSTPSLLLRVLFCAVCGEPAYKFAGGGRKHMRYRCRSMGFPKHCGNGTVAMAEWDAFCEEQVLDLLGDAERLEKVWVAGSDSAVELAEVNAELVDLTSLIGSPAYRAGSPQREALDARIAALAARQEELEGLEACPSGWEWRETGQRFGDWWREQDTAAKNTWLRSMNVRLTFDVRGGLTRTIDFGDLQEYEQHLRLGGVVERLHTGTS

SEQ ID NO: 10569 - protein, 500 aa, synthetic construct
MRALVVIRLSRVTDATTSPERQLESCQQLCAQRGWDVVGVAEDLDVSGAVDPFDRKRRPNLARWLAFEEQPFDVIVAYRVDRLARSIRHLQQLVHWAEDHKKLVVSATEAHFDTTTPFAAVVIALMGTVAQMELEAIKERSRSAAHFNIRAGKYRGSLPPWGYLPTRVDGEWRLAPDPVQRERILEVYHRVVDNHEPLHLVAHDLNRRGVLSPKDYFAQLQGREPQGRKWSATALKRSMISVAMLGYATLNGETVRDDDGAPLVRAEPILTREQLEALRAELVKTSRAKPAVSTPSLLLRVLFCAVCGEPAYKFAGGGRRHPRYRCRSMGFPKHCGNGTVAMAEWDAFCEEQVLDLLGDAERLEKVWVAGSDSAVELAEVNAELEDLTSLIGSPAYRAGSPQREALDARIAALAARQEELEGLEARPSGWEWRETGQRFGDWWREQDTAAKNTWLRSMNVRLTFDVRGGLTRTIDFGDLQEYEQHLRLGSEVERLHTGMS

SEQ ID NO: 10570 - protein, 500 aa, synthetic construct
MRALVVIRLSRVTDATTSPERQLESCQQLCAQRGWDVVGVAEDLDVSGAVDPFDRKRRPNLARWLAFEEQPFDVIVAYRVDRLARSIRHLQQLVHWAEDHKKLVVSATEAHFDTTTPFAAVVIALMGTVAQMELEAIKERSRSAAHFNIRAGKYRGSLPPWGYLPTRVDGEWRLVPDPVQRERILEVYHRVVNNHEPLHLVAHDLNRRGVLSPKDYFAQLQGREPQGRKWSATALKRSMISEAMLGYATLNGKTVRDDDGAPLVRAEPILTREQREALRAELVKTSRAKPAVSTPSLLLRVLFCAVCGEPAYKFAGGGRKHPRYRCRSMGFPKHCGNGTVAMAEWDAFCEEQVLGLLGDAERLEKVWVAGSDSAVELAEVNVELVDLTSLIGSPAYRTGSPQREALDARIAALAARQEGLEGLEARPSGWEWRGTGQRFGDWWREQDTAAKNTWLRSMNVRLTFDVRGGLTRTIDFGDLQEYEQHLRLGSVVERLHTGMS

SEQ ID NO: 10571 - protein, 500 aa, synthetic construct
MRALVVIRLSRVTDATTSPERQLESCQQLCAQRGWDVVGVAEDLDVSGAVDPFDRKRRPNLARWLAFEEQPFDVIVAYRVDRLTRSTRHLQQLVHWAEDHKKLVVSATEAHFDTTTPFAAVVIALMGTVAQMELEAIKERNRSAAHFNIRAGKYRGSLPPWGYLPTRVDGEWRLVPDPVQRERILEVYHRVVDNHEPLHLVAHDLNRRGVLSPRDYFAQLQGREPQGRKWSATALKRSMISGAMLGYATLNGKTVRDDDGAPLVRAEPILTREQLEALRAELVKTSRAKPAVSTPSLLLRVLFCAVCGEPAYKFSGGGRKHPRYRCRSMGFPKHCGNGTVAMAEWDAFCEEQVLDLLGDAERLEKVWVAGSDSAVELAEVNAGLVDLTSLIGSLAYRAGSPQREALDARIAALAARQEELEGLEARPSGWEWRGTGQRFGDWWREQDTAAKNTWLRSMNVRLTFDVRGGLTRTIDYGDLQEYKQHLCLGSVVERLHTGMS

SEQ ID NO: 10572 - protein, 500 aa, synthetic construct
MRALVVIRLSRVTDATTSPERQLESCQQLCAQRGWDVVGVAEDLDVSGAVDPFDRKRRPNLARWLAFEEQPFDVIVVYRVDRLARSIRHLQQLVHWAEDHKKLVVSATEAHFDTTTPFAAVVIALMGTVAQMELEAIKERSRSAAHFNIRAGKYRGSLPPWGYLPARVDGEWRLVPDPVQRERILEVYHRVVDNHEPLHLVAHDLNRRGVLSPKDYFAQLQGREPQGRKWSATALKRSMISGAMLGYATLSGKTVRDDDGAPLVRAEPILTREQLEALRAELVKTSRAKPAVSTPSLLLRVLFCAVCGEPAYKFAGGGRKHPRYRCRSMGFLKHCGNGTVAMAEWDAFCEEQVLDLLGDAERLEKVWVAGSDSAVELAEVNAELVDLTSLIGSPAYRAGSPQREALDARIAALAARQEELEGLEARPSGWEWRGTGQRFGDWWCEQDTAAKNTWLRSMNVRLTFDVRGGLTRTIDFGDLQEYVQHLCLGSVVERLHTGMS

SEQ ID NO: 10573 - protein, 500 aa, synthetic construct
MRALVVIRLSRVTDATTSPERQLESCQQLCAQRGWDVVGVAEDLDVSGAVDPFDRKRRPNLARWLAFEERPFDVIVAYRVDRLARSIRHLQQLVHWAEDHKKLVVSATEAHFDTTTPFAAVVIALMGTVAQMELEAIKERSRSAAHFNIRAGKYRGSLPPWGYLPARVDGEWRLVPDPVQRERILEVYHRVVDNHEPLHLVAHDLNRRGVLSPKDYFAQLQGREPQGRKWSATALKRSMISGAMLGYATLSGKTVRDDDGAPLVRAEPILTREQQEALRAELAETSRAKPAVSTPSLLLRVLFCAVCGEPAYKFTGGGRKHSRYRCRSMGFPKHCGNGTVAMAEWDAFCEEQVLNLLGDAGRLEKVWVAGSDSAVELAEVNAELVDLTSLIGSPAYRAGSLQREALDARIAALAARQEELEGLEARPSGWEWRATGQRFGDWWREQDTAAKNTWLRLMNVRLTFDVRGGLTRTIDFGDLQEYEQHLRLGSVVERLHTGMS

SEQ ID NO: 10574 - protein, 500 aa, synthetic construct
MRALVVIRLSRVTDATTSPERQLESCQQLCAQRGWDVVGVAEDLDVSGAVDPFDRKRRPNLSRWLAFEEQPFDVIVAYRVDRLTRSVRHLQQLVHWAEDHKKLVVSATEAHFDTTTPFAAVVIALMGTVAQMELEAIKERNRSAAHFNIRAGKYRGSLPPWGYLPTRVDGEWRLAPDPVQRERILEVYHRVVDNHEPLHLVAHDLNRRGVLSPRDYFAQLRGREPRGRKWSATALKRSMISEAMLGYATLNGKTVRDDDGAPLVRAEPILTREQQEALRAELVKASRAKPAVSTPSLLLRVLFCAVCGEPAYKFAGGGRKHSRYRCRSMGFPKHCGNGTVAMAEWDAFCEEQVLDLLGDAERLEKVWVAGSDSAVELAEVNAELVDLTSLIGSPAYRARSPQREALDARIAALAARQEVMEGLEARPSGWEWRGTGQRFGDWWREQDTAAKNTWLRSMNVRLTFDVRGGLTRTIDFGDLQEYEQHLRLGGVVERLHTGMP

SEQ ID NO: 10575 - protein, 500 aa, synthetic construct
MRALVVIRLSRVTDATTSPERQLESCQQLCAQRGWDVVGVAEDLDVSGAIDPFDRKRRPNLARWLAFEEQPFDVIAAYRVDRLTRSIRHLQQLVHWAEDHKKLVVSATEAHFDTTTPFAAVVIALMGTVAQMELEAIKERNRSAAHFNIRAGKYRGSLPPWGYLPTRVDGEWRLAPDPVQRERILEVYHRVVDNHEPLHLVAHDLNRRGVLSPRDYFARLRGREPQGRKWSATALKRSMISVAMLGYATLNGKTVRDDDGAPLVRAEPILTREQLEALRAELVKTSRAKPAVSTPSLLLRVLFCAVCGEPAYKFAGGGRKHPRYRCRSMGFPKHCGNGTVAMAEWDAFCEEQVLNLLGDAERLEKVWVAGSDSAVELAEVSTELVDLTSLIGSPAYRAGSPQREALDARIAALAARQEELEGLESRPSGWEWRETGQRFGDWWREQDTAAKNTWLRSMNVRLTFDVRGGLTRTIDFGDLQEYGQHLRLGSVVGRLRTGMS

SEQ ID NO: 10576 - protein, 500 aa, synthetic construct
MRALAVIRLSRVTDATTSPERQLESCQQLCAQRGWDVVGVAEDLDVSGAVDPFDRKRRPNLARWLAFEEQPFDVIVAYRVDRLTRSTRHLQQLVHWAEDHKKLIVSATEAHFDTTTPFAAVVIALMGTVAQMELEAIKERSRSAAHFNIRAGKYRGSLPPWGYLPTRVDGEWRLVPDPVQRERILEVYRRVVDNHEPLHLVAHDLNRRGVLSPKDYFAQLQGREPQGRKWSATALKRSMTSEAMLGHATLNGKTVRDDDGAPLVRAEPILTREQLEALRAELVKTSRTKPAVSTPSLLLRVLFCAVCGEPAYKFSGGGRKHPRYRCRSMGYPKHCGNGTVAMAEWDAFCEEQVLDLLGDSERLEKVWVAGSDSAIELAEVNAELVDLTSLIGSPAYRAGSPQREALDARIAALAARQEELEGLEARPSGWEWRETGQRFGDWWREQDTAAKNTWLRSMNVRLTFDVRGGLTRTIDFGDLQEHEQHLRLGSVVERLHTGMS

SEQ ID NO: 10577 - protein, 500 aa, synthetic construct
MRALVVIRLSRVTDATTSPERQLESCQQLCAQRGWDVVGVAEDLDVSGAVDPFDRKRRPNLARWLAFEERPFDVIVAYRVDRLTRSTRHLQQLVHWAEDHKKLVVSATEAHFDTTTPFAAVVIALMGTVAQMELEAIKERSRSAAHFNIRAGKYRGSLPPWGYLPTRVDGEWRLVPDPVQRERILEVYHRVVDNHEPLHLVAHDLNRRGVLSPKDYFAQLQGREPQGRKWSATALKRSMTSGAMLGYATLNGKTVRDDDGAPLVRAEPILTREQLEALRAELVKTSRAKPAVSTPSLLLRVLFCAVCGEPAYKFAGGGRKHSRYRCRSMGFPRHCGNGTVAMAEWDAFCEEQVLDLLGNAERLEKVWVAGSDSAVELAEVSAELVDLTSLIGSPAYRAGSPQREALDARIAALAARQEELEGLEARPSGWEWRETGQRFGDWWREQDTAAKNTWLRSMNVRLTFDVRGGLTRTIDFGDLQEYEQHLRLGSVVERLHTGMS

SEQ ID NO: 10578 - protein, 500 aa, synthetic construct
MRALVVIRLSRVTDATTSPERQLESCQQLCAQRGWDVVGVAEDLDVSGAVDPFDRKRRPNLARWLAFEEQPFDVIVAYRVDRLARSIRHLQQLVHWAEDHKKLVVSATEAHFDTTTPFAAVVIALMGTVAQMELEAIKERSRSAAHFNIRAGKYRGSLPPWGYLPARVDGEWRLVPDPVQRERILEVYHRVVDNHEPLHLVAHDLNRRGVLSPKDYFAQLQGREPQGRKWSATALKRSMISVAMLGYATLNGKTVRDDDGAPLVRAEPILTREQLEALRAELVKTSRAKPAVSTPSLLLRVLFCAVCGEPAYKFAGGGRKHPRYRCRSMGFPKHCGNGTVAMAEWDAFCEEQVLGLLGDVERLEKVWVAGSDSAVKLAEVNAELVDLTSLIGSPAYRAGSPQREALDARIAALAARQEELEGLEARPSGWEWRGTGQRFGDWWREQDTAAKNTWLRSMNVRLTFDVRGGLTRTIDFGDLQEYEQHLRLGSVVERLHTGMS

SEQ ID NO: 10579 - protein, 500 aa, synthetic construct
MRALVVIRLSRVTDATTSPERQLESCQQLCAQRGWDVVGVAEDLDVSGAVDPFDRKRRPNLARWLAFEEQPFDVIVAYRVDRLTRSVRHLQQLVHWAEDHKKLVVSTTEAHFDTTTPFAAVVIALMGTVAQMELEAIKERNRSAAHFNIRAGKYRGSLPPWGYLPTRVDGEWRLVPDPVQRERILEVYHRVVDNHEPLHLVAHDLNRRGVLSPRDYFAQLRGREPQGRKWSATALKRSMISEAMLGYVTLNGKIVRDDDGAPLVRAEPILTREQLEALRAELVKTSRAKPAVSTPSLLLRVLFCAVCGEPAYKFAGGGRKHPRYRCRSMGSPKHCGNGTVAMAEWDAFCEEQVLNLLGDAERLEKVWVAGSDSAVELGEVNAELVDLTSLIGSPAYRAGSPQREALDARIAALAARQEELEGLEARPSGWEWRETGQRFGDWWREQDTAAKNTWLRSMNVRLTFDVRGGLTRTIDFGDLQEYEQHSRLGSVVERLHTGMS

SEQ ID NO: 10580 - protein, 500 aa, synthetic construct
MRALVVVRLSRVTDATTSPERQLESCQQLCAQRGWDVVGVAEDLDVSGAVDPFDRKRRPSLARWLAFEEQPFDAIVAYRVDRLTRSIRHLQQLVHWAEDHKKLVVSATEAHFDTTTPFAAVVIALMGTVAQMELEAIKERNRSAAHFNIRAGKYRGSLPPWGYLPARVDGEWRLVPDPVQRERIFEVYHRVVDNHEPLHLVAHDLNRRGVLSPKDYFAQLRGREPQGRKWSATALKRSMTSEAMLGYATLNGKTVRDDDGAPLVRAEPILTREQLEALRAELVKTSRAKPAVSTPSLLLRVLFCAVCGEPAYKFAGGGRKHPRYRCRSMGFPKHCGNGTVAMAEWDAFCEEQVLGLLGDAERLEKVWVAGSDSAVELAEVNAELVDLMSLIGSPAYRAGSPQREALDARIAALAARQEELEGLEARPSGWEWRETGQRFGDWWREQDTAAKNTWLRSMNVRLTFDVRGGLTRTIDFGDLQEYEQHLRSGSVVERLHSGMS

SEQ ID NO: 10581 - protein, 500 aa, synthetic construct
MRALVVIRLSRVTDATTSPERQLESCQQLCAQRGWDVVGVAEDLDVSGAVDPFDHKRRPNLARWLAFEEQPFDVIVAYRVDRLTRSTRHLQQLVHWAEDHKKLVVSATEAHFDTTTPFAAVVIALMGTVAQMELEAIKERSRSAAHFNIRAGKYRGSLPPWGYLPTRVDGEWRLAPDPVQRERILEVYHRVVDNHEPLHLVAHDLNRRGVLSPKDYFAQLQGREPQGRKWSATALKRSMISEAMLGYATLNGKIVRDDDGAPLVRAEPILTREQLEALRAELVKTSRAKPAVPTPSLLLRVLFCAVCGEPAYKFAGGGRKHPRYRCRSMGFPKHCGNGTVAMAEWDAFCEEQVLDLLGDAERLEKVWVAGSDSAVELAEVNAELVDLTSLIGSPAYRVDSPQREALDARIAALAARQEELEGLEARPSGWEWRETGQRFGDWWREQDTAAKNTWLRSMNVRLTFDVRGGLTRTIDFGDLQEYEQRLRLGSVVERLHTGMS

SEQ ID NO: 10582 - protein, 500 aa, synthetic construct
MRALVVIRLSRVTDATTSPERQLESCQQLCAQRGWDVVGVAEDLDVSGAVDPFDHKRRPNLARWLAFEEQPFDVIVAYRVDRLTRSTRHLQRLVHWAEDHKKLVVSATEAHFDTTTPFAAVVIALMGTVAQMELEAIKERNRSAAHYNIRAGKYRGSLPPWGYLPTRADGEWRLVPDPVQRERILEVYHRVVDNHEPLHLVAHDLNRRGVLSPKDYFAQLRGREPRGRKWSATALKRSMISEAMLGYATLNGKTVRDDDGAPLVRAEPILTREQLEALRAELVKTSRAKPAVSTPSLLLRVLFCAVCGEPAYKFSGGGRKHPRYRCRSMGFPKHCGNGTVAMAEWDAFCEEQVLDLLGDAERLEKVWVAGSDSAVELAEVNAELVDLTSLIGSPAYRTGSPQREALDARIAALAARQEELEGLEARPSGWEWRGTGQRFGDWWREQDTAAKNTWLRSMNVRLTFNVRGGLTRTIDFGDLQEYEQHLRLGGVVERLHTGMS

SEQ ID NO: 10583 - protein, 500 aa, synthetic construct
MRALVVIRLSRVTDATTSPERQLESCQLLCAQRGWDVVGVAEDLDVSGAVNPFDRKRRPNLARWLAFEEQPFDVIVAYRVDRLTRSTRHLQQLVHWAEDHKKLVVSATEAHFDTTTPFAAVVIALMGTVAQMELEAIKERSRSAAHFNIRAGKYRGSLPPWGYLPTRVDGEWRLVPDPVQRERILEVYHRVVDNHEPLHLVAHDLNRRGVLSPKDYFAQLQGREPQGRKWSATALKRSMISEAMLGYATLNGRIVRDDDGAPLVRAEPILTREQLEALRAELVKTSRAKPAVSTPSLLLRVLFCAVCGEPAYKFAGGGRKHSRYRCRSMGFPKHCGNGTVAMAEWDAFCEEQVLDLLGDAERLEKVWVAGSDSAVELAEVSAELVDLTSLIGSPAYRAGSPQREALDARIAALAARQEELEGLEARPSGWGWRGTGQRFGDWWREQDTAAKNTWLRSMNVRLTFDIRGGLTRTFDFGDLQEYGQHLRLGSVVERLHTGMS

SEQ ID NO: 10584 - protein, 500 aa, synthetic construct
MRALVVIRLSRVTEATTSPERQLESCQQLCAQRGWDIVGVAEDLNVSGAVDPFDRKRRPNLARWLAFEEQPFDVIVAYRVDRLTRSIRHLQRLVHWAEDHKKLVVSATEAHFDTTTPFAAVVIALMGTVAQMELEAIRERNRSAAHFNIRAGKYRGSLPPWGYLPTRVDGEWRLVPDPVQRERILEVYHRVVDNHEPLHLVAHDLNQRGVLSPRDYFAQLQGREPQGRKWSATALKRSMISEAMLGYATLNGMTVRDDDGAPLERAEPILTREQQEALRAELVKTSRAKPAVSTPSLLLRVLFCAVCGEPAYKFAGGGRKHSRYRCRSMGLPKHCGNGTVAMAEWDAFCEEQVLDLLGDAERLEKVWVVGSDSAVELAEVNAELVDLTNLIGSPAYRAGSPQREALDARIAALAARQEELEGLEARPSGWEWRGTGQRFGDWWREQDTAAKNTWLRSMNVRLTFDVRGGLTRTIDFGDLQEYERHLRLGGVVERLHTGMS

SEQ ID NO: 10585 - protein, 500 aa, synthetic construct
MRALVVIRLSRVTDATTSPERQLESCQQLCAQRGWDVVGVAEDLDVSGAVDPFDRKRRPNLARWLAFEEQPFDVIVAYRVDRVTRSVRHLQQLVHWAEDHKKLVVSATEAHFDTTTPFAAVVIALMGTVAQMELEAIKERNRSAAHFNIRAGKYRGSLPPWGYLPTRVDGEWRLVPDPVQRERILEVYHRVVDNHEPLHLVAHDLNRRGVLSPRDYFAQLRGREPRGRKWSATALKRSMISEAMLGYATLNGKTVRDDDGAPLVRAEPILTREQLEALRAELVKTSRAKPAVSTPSLLLRVLFCAVCGEPAYKFAGGGRKHPRYRCRSMGFPKHCGNGTVAMAEWDAFCEEQVLDLLGDAERLEKVWVSGSDSAVELAEVNAGLVDLTSLIGSPAYRAGSPQRVALDARIAALAARQEELEGLEARPSGWEWRETGQRFRDWWREQDTAAKNTWLRSMNVRLTFDVRGGLTRTIDFGDLQEYEQHLRLGSVVERLHTGMS

SEQ ID NO: 10586 - protein, 500 aa, synthetic construct
MRALVVIRLSRVTDATTSPERQLESCQQLCAQRGWDVVGVAEDLDVSGAVDPFDRKRRPNLARWLASEEQPFDVIVAYRIDRLTRSIRHLQQLVHWAEDHKKLVVSATEAHFDTTTPFAAVVIALMGTVAQMELEAIKERNRSAAHYNIRAGKYRGSLPPWGYLPTRVDGEWRLVPDPVQRERILEVYHRVVDNHESLHLVAHDLNRRGVLSPKDYFAQLRGREPQGRKWSATALKRSMTSEAMLGYATLNGKTVRDDDGAPLVRAEPILTRGQLEALRAELVKTSRVKPAVSTPSLLLRVLFCAVCGEPAYKFAGGGRKHPRYRCRSMGFPKHCGNGTVAMAEWDAFCEEQVLDLLGDAERLEKVWVTGSDSAVELAEVNAELVDLTSLIGSPAYRAGSPQREALDARIAALAARQGELEGLEARPSGWEWRETGQRFGDWWREQDTAAKNTWLRSMNVRLTFDVRGGLTRTIDFGDLQEYEQHLRLGSVVERSHTGMS

SEQ ID NO: 10587 - protein, 500 aa, synthetic construct
MRALVVIRLSRVTDATTSPERQLESCQQLCAQRGWDVVGVAEDLDVSGAVDPFDRKRRPNLARWLAFEEQPFDVIVVYRVDRLTRSIRHLQQLVHWAEDHKKLVVSATEAHFDTTTPFAAVVIALMGTVAQMELEAIKERNRSAAHFNIRAGKYRGSLPPWGYLPARVDGEWRLVPDPVQRERILEVYHRVVDNHEPLHLVAHDLNRRGVLSPRDYFAQLQGREPQGRKWSATALKRSMVSEAMLGHATLNGETVRNDDGAPLVRAEPILTREQLEALRAELVKTSRAKPAVSTPSLLLRVLFCAACGEPAYKFAGGGRKHLRYRCRSMGFPKHCGNGTVAMAEWDAFCEEQVLDLLGDAERLERVWVAGSDSAVELAEVNAELVDLTSLISSPAYRAGSPQREALDARIAALAARQEELEGLEARPSGWEWRGTGQRFEDWWREQDTAAKNAWLRSMNVRLTFDVRGGLTRTIDFGDLQEYEQHLRLGSVVERLHTGMS

SEQ ID NO: 10588 - protein, 500 aa, synthetic construct
MRALVVIRLSRVTDATTSPERQLESCQQLCAQRGWDVVGVAADLDVSGAVDPFDRKRRPNLARWLAFEEQPFDVIVAYRVDRLTRSTRHLQQLVHWADDHKKLVVSATEAHFDTTTPFAAVVIALMGTVAQMELEAIKERSRSAAHFNIRAGKYRGSLPPWGYLPARVDGVWRLVPDPVQRERILEVYHRVVNNHEPLHLVAHDLNRRGVLSPKDYFAQLQGREPQGRKWSATALKRSMISEAMLGFATLNGKTVRDDDGAPLVRAEPILTREQLEALRAELVKTSRAKPAVSTPSLLLRVLFCAVCGEPAYKFAGGGRKHPRYRCRSMGFPKHCGNGTVAMAEWDAFCEEQVLDLLGDAERLEKVWVAGSDSAVELAEVNAELVDLTGLTGSPAYRAGSPQREALDARIAALAARQEELEGLEARPSGWEWRETGQRFRDWWREQDTAARNAWLRSMNVRLTFDVRGGLTRTIDFGDLQEYEQHLRLGSVVERLHTGMS

SEQ ID NO: 10589 - protein, 500 aa, synthetic construct
MRALVVIRLSRVTDATTSPERQLESCQQLCAQRGWDVVGVAEDLDVSGAVDPFDRKRRPNLARWLAFEERPFDVIVAYRVDRLTRSIRHLQQLVHWAEDHKKLVVSATEAHFDTTTPFAAVVIALMGTVAQMELEAIKERSRSAAHFNIRAGKYRGSLPPWGYLPARVDGEWRLVPDPVQRERILEVYHRVVDNHEPLHLVAHDLNRRGVLSPKDYFAQLRGREPQGRKWSATALKRSMISVAMLGYATLCGKTVRDDDGAPLVRAEPILTREQLEALRAELVKTSRAKPAVSTPSLLLRVLFCAVCGEPAYKFAGGGRKHPRYRCRSMGFPKHCGNGTVAMAEWDAFCEEQVLNLLGDAERLEKVWVAGSDSAVELAEVNKELVDLTSLIGSPAYRAGSPQREALDARIAALAARQEELEGLEARPSGWEWRGTGQRFGDWWRELDTAAKNTWLRSMNVRLTFDVRDGLTRTIDFGDLQEYEQHLRLGSVVERSHTGMS

SEQ ID NO: 10590 - protein, 500 aa, synthetic construct
MRALVVIRLSRVTDATTSPERQLASCQQLCAQRGWDVVGVAEDLDVSGAVDPFDRKRRPNLARWLAFEEQPFDVIVAYRVDRLARSIRYLQQLVHWAEDHKKLVVSATEAHFDTTTPFAAVVIALMGTVAQMELEAIKERSRSAAHFNIRAGKYRGSLPPWGYLPARVDGEWRLVPDPVQRERILEVYHRVVDNHEPLHLVAHDLNRRGVLSPKDYFAQLQGREPQGRKWSATALKRSIISEVMLGYATLNGKTVRDDDGAPLVRAEPILTREQLEAVRAELVKASRAKPAVSTPSLLLRVLFCAVCGEPAYKFVGGGRKHSRYRCRSMGFPKHCGNGTVAMAEWDAFCEEQILNLLGDAERLEKVWVAGSDSAVELAEVNAELVDLTSLIGSPAYRAGSPQREALDARIAALAARQEELEGLEARPSGWEWRGTGQRFGDWWREQDTAAKNTWLRSMNVRLTFDVRGGLTRTVDFGDLQEYEQHLRLGSVVERLHTGMS

SEQ ID NO: 10591 - protein, 500 aa, synthetic construct
MRALIVIRLSRVTEATTSPERQLESCQQLCAQRGWDVVGVAEDLDVSGAVDPFDRKRRPNLARWLAFEEQPFDVIVAYRVDRLTRSTRHLQQLVHWAEDHKKLVVSATEAHFDTTTPFAAVVIALMGTVAQMELEAIKERSRSAAHFNIRAGKYRGSLPPWGYLPTRVDGEWRLVPDPVQRERILEVYHRVVDNHEPLHLVAHDLNRRGVLSPKDYFAQLRGREPQGRKWSATALKRSMISEAMLGYATLGGKTVRDDDGAPLVRAEPILTREQLEALRAELAKTSRAKPAVSTPSLLLRVLFCAVCGEPAYKFAGGGRKHPRYRCRSMGFPKHCGNGTVAMAEWDAFCEEQVLDLLGDAERLEKVWVAGSDSAVELAEVNAELVDLTSLIGSPAYRAGSPQREALDARIAALAARQEELEGLEARPSGWEWRETGQRFRDWWREQDTAAKNTWLRSMNVRLTFDVRGGLTRTIDFGDLQEYEQHLRLGSVVERLHTGMS

SEQ ID NO: 10592 - protein, 500 aa, synthetic construct
MRALVVIRLSRVTEATTSPERQLESCQQLCAQRGWDVVGVAEDLDVSGAVDPFDRKRRPNLARWLAFEEQPFDVIVAYRVDRLARSVRHLQRLVHWAEDHKKLVVSATEAHFDTTTPFAAVVIALMGTVAQMELEAIKERNRSAAHFNIRAGKYRGSLPPWGYLPARVDGEWRLVPDPVQRERILEVYHRVVDNHEPLHLVAHDLNRRGVLSPKDYFAQLRGREPQGRAWSATALRRSMISEAMLGYATLNGKTVRDDDGAPLVRAEPILTREQQEALRAELVKTSRAKPAVSTPSLLLRVLFCAVCGEPAYKFAGGGRKHPRYRCRSMGFPKHCGNGTVAMAEWDAFCEEQVLGLLGDAERLEKVWVAGSDSAVELAEVNAELVDLTSLIGSPAYRAGSPQREALDARIAALAARQEELEGLEARLSGWEWRETGQRFGDWWREQDTAAKNTWLRSMNVRLTFDVRGGLTRTIDFGDLQEYEQHLRLGSVVERLHTGMS

SEQ ID NO: 10593 - protein, 500 aa, synthetic construct
MRALVVIRLSRVTDATTSPERQLESCQQLCAQRGWDVVGVAEDLDVSGAVDPFDRKRRPNLARWLAFEEQPFDVIVAYRVDRLTRSTRHLQQLVHWAEDHKKLVVSATEAHFDTTTPFAAVVIALMGTVAQMELEAIKERSRSAAHFNIRAGKYRGSLPPWGYLPTRVDGEWRLVPDPVQRERILEVYHRVVDNHEPLHLVAHDLNRRGVLSPKDYFAQLRGREPQGREWSATALKRSMTSEAMLGYATLNGKTVRDDDGAPLVRAEPILTREQLEALRAELVKTSRAKPAVSTPSLLLRVLFCAVCGEPAYKFAGGGRKHPRYRCRSMGFPKHCGNGTVAMAEWDAFCEEQVLDLLGDAERLEKVWVAGSDSAVELGEVNAELVDLTSLIGSPAYRAGSPQREALDARIAALAARQEELEGLEARPSGWEWRETGQRFGDWWREQDTAAKNTWLRSMNVRLTFDVRGGLTRTIDFGDLQEYEQHLRLGSVVERLHTGMS

SEQ ID NO: 10594 - protein, 500 aa, synthetic construct
MRALVVIRLSRVTDATTSPERQLESCQQLCAQRGWDVAGVAEDLDVSGAVDPFDHKRRPNLARWLAFEEQPFDVIVAYRVDRLTRSTRHLQQLVHWAEDHKKLVVSATEAHFDTTTPFAAVVIALMGTVAQMELEAIKERNRSAAHFNIRAGKYRGSLPPWGYLPTRVDGEWRLVPDPVQRERILEVYHRVVDNHEPLHLVAHDLNRRGVLSPKDYFAQLQGREPQGRKWSATALKRSMTSEAMLGYATLNGKTVRDDDGAPLVRAEPILTREQLETIRAELVKTSRAKPAVSTPSLLLRVLFCAVCGEPAYKFAGGGRKHSRYRCRSMGFPKHCGNGTVAMAEWDALCEERVLDLLGDAERLEKVWVAGSDSAVELAEVNAELVDLTSLIGSPAYRAGSPQREALDARIAALAARQEELEGLEARPSGWEWRGTGQRFGDWWREQDTAAKNTWLRSMNVRLTFDVRGGLARTIDLGDLQEYEQHLRLGSVVERLHTGMP

SEQ ID NO: 10595 - protein, 500 aa, synthetic construct
MRALVVIRLSRVTDATTSPERQLESCQQLCAQRGWDVVGVAEDLDVSGAVDPFDRKRRPNLARWLAFGEQPFDVIVAYRVDRLARSIRHLQQLVHWAEDHKKLVVSATEAHFDTTTPFAAVVIALMGTVAQMELEAIKERSRSAAHFNIRAGKYRGSLPPWGYLPTRVDGEWRLAPDPVQRERILEVYHRVVDNHEPLHLVAHDLNRRGVLSPKDYFAQLQGREPQGRKWSATALKRSMISEAMLGHATLDGKTVRDDDGAPLVRAEPILTREQLETLRAVLVKTSRAKPAVSTPSLLLRVLFCAVCGEPAYKFAGGGRKHPRYRCRSMGFPKHCGNGTVAMAEWDAFCEEQVLNLLGDAERLEKVWVAGSDSAVELAGVNAELVDLTSLIGSPAYRVGSPQREALDARIAALAARQEELEGLEARPSGWEWRGTGQRFGDWWREQDTAAKNTWLRSMNVRLTFDVRGGLTRTIDFGDLQEYELHLRSGGVVERLHTGMS

SEQ ID NO: 10596 - protein, 500 aa, synthetic construct
MRALVVIRLSRVTDATTSPERQLESCQQLCAQRGWNVVGVAEDLDVSGAVDPFDRKRRPNLARWLAFEEQPFDVIVAYRVDRLTRSTRHLQQLVRWAEDHKKLVVSATEAHFDTTTPFAAVVIALMGTVAQMELEAIKERSRSAAHFNIRAGKYRGSLPPWGYLPTRVDGEWRLAPDPVQRERILEVYHRVVDNHEPLHSVAHDLNRRGVLSPKDYFAQLRGREPQGRKWSATALKRSMTSEAMLGYATLNGKTVRDDGGAPLVRAEPILTRGQLEALRAELVKTSRVKPAVSTPSLLLRVLFCAVCGEPAYKFAGGGRKHPRYRCRSMGFPKHCGNGTVAMAEWDAFCEEQVLNLLGDAERLEKVWVAGSDSAVEFAEVNAELVDLTSLIGSPAYRAGSPQREALDARIAALAARQEELEGLVARPSGWEWRETGQRFGDWWREQDTAAKNTWLRSMNVRLTFDVRGGLTRTIDFGDLREYEQHLRLGSVVERLHTGTS

SEQ ID NO: 10597 - protein, 500 aa, synthetic construct
MRALVVVRLSRVTDATTSPERQLGSCQQLCAQRGWDVVGVAEDLDVSGAVDPFDRKRRPNLARWLAFEEQPFDVIVAYRVDRLTRSTRHLQRLVHWAEDHKKLVVSATEAHFDTTTPFAAVVIALMGTVAQMELEAIKERSRSAAHFNIRAGKYRGSLPPWGYLPARVDGEWRLVPDPVQRERILEVYHRVVDNHEPLHLVAHDLNRRGVLSPKDYFAQLRGREPQSRKWSATALKRSMISEAMLGYATLNGKTVRDDDGAPLVRAEPILTREQLEALRAVLAKTSRAKPAVSAPSLLLRVLFCAVCGEPAYKFAGGGRKHPRYRCRSMGFPKHCGNGTVAMAEWDAFCEEQVLNLLGDAERLEKVWVAGSDSAVELAEVNAELVDLTSLIGSPAYRAGSPQRKALDARIAALAARQEELEGLEARPSGWEWRETGQRFGDWWREQDTAAKNTWLRSMNVRLTFDVRGGLARTIDFGDLQEYEQHLRLGSVVERLHTGMS

SEQ ID NO: 10598 - protein, 500 aa, synthetic construct
MRALVVIRLSRVTDATTSPERQLESCQQLCAQRGWDVVGVAEDLDVSGAVDPFDRKRRPNLARWLAFEEQPFDVIVAYRVDRLTRSVRHLQQLVHWAEDHKKLVVSATEAHFDTTTPFAVVVIALMGTVAQMELEAIKERSRSAAHFNIRAGKYRGSLPPWGYLPARVDGEWRLVPDPVQRERILEVYHRVVDNHEPLHLVAHDLNRRGVLSPKDYFAQLRGREPQGRKWSATALKRSMISEAMLGYATLCGKTVRDDDGAPLVRAEPILTREQLEALRAELVKTSRATPAVSTPSLLLRVLFCAVCGEPAYKFAGGGRKHPRYRCRSMGFPKHCGNGTVAMAEWDAFCEEQVLNLLGDAERLEKVWVAGSDSAVELAEVNAELVGLTSLIGSPAYRAGSPQREALDARIAALAARQEELEGLEARPSGWEWRGTGQRFGDWWREQDTAAKNTWLRSLNVRLTFDVRGGLTRTIDFGDLQEYGQHLRLGSVVERLHTGMS

SEQ ID NO: 10599 - protein, 500 aa, synthetic construct
MRALVVIRLSRVTDATTSPERQLESCQQLCAQRGWDVVGVAEDLDVSGAVDPFDRKRRPNLARWLASEEQPFDVIVAYRVDRLTRSVRHLQQLVHWAEDHKKLVVSATEAHFDTTTPFAAVVIALMGTVAQMELEAIRERSRSAAHFNIRAGKYRGSLPPWGYLPTRVDGEWRLVPDPVQRERILEVYHRVVDNHEPLHSVAHDLNRRGVLSPKDYFAQLQGREPQGRKWSATALKRSMISEAMLGYATLNGKIVRDDDGVPLVRAEPILTREQLEALRAELVKTSRAKPAVSTPSLLLRVLFCAVCGEPAYKFSGGGRKHPRYRCRSMGFPKHCGNGTVAMAEWDAFCEEQVLDLLGDAERLEKVWVAGSDSAVELAEVNAELVDLASLIGSPAYRAGSPQREALDARIAVLAARQGELEGLEAHPSGWEWRETGQRFGDWWREQDTAAKNTWLRSMNVRLTFDVRGGLTRTIDFGDLQEYEQHLRLGSVVERLHTGMS

SEQ ID NO: 10600 - protein, 500 aa, synthetic construct
MRALVVIRLSRVTDATTSPERQLGSCQQLCAQRGWDVVGVAEDLDVSGAVDPFDRKRRPSLARWLAFEEQPFDAIVAYRVDRLTRSIRHLQQLVHWAEDHKKLVVSATEAHFDTTTPFAAVVIALMGTVAQMELEAIKERNRSAAHFNIRAGKYRGSLPPWGYLPTRVDGEWRLVPDPVQRERILEVYHRVVDNHEPLHLVAHDLNRRGVLSPKDYFAQLRGREPQGRKWSATALKRSMISEAMLGYATLNGKTVRDDDGAPLVRAEPILTREQQEALRAELVKTSRAKPAVSTPSLLLRVLFCAVCGEPAYKFSGGGRKHPRYRCRSMGFPKHCGNGTVAMAEWDAFCEEQVLDLLGDAERLEKVWVAGSDSAVELAEVNAELVDLTSLIGSPAYRAGSPQREALDARIAALAARQGELEGLEARPSGWEWRETGQRFGDWWREQDTAAKNTWLRSMNVRLTFDVRGGLTRTIDFGDLQEYEQHLRLGSVVERLHTGMS

SEQ ID NO: 10601 - protein, 500 aa, synthetic construct
MRALVVIRLSRVTDATTSPERQLESCQQLCAQRGWDVAGVAEDLDVSGAVDPFDRKRRPNLARWLAFEEQPFDVIVAYRVDRLTRSTRHLQQLVHWAEDHKKLVVSATEAHFDTTTPFAAVVIALMGTVAQMELEAIKERSRSAAHFNIRAGKYRGSLPPWGYLPTRVDGEWRLVPDPVQRERILEVYHRVVNNHEPLHLVAHDLNRRGVLSPKDYFAQLQGREPQGRKWSATALKRSMISEAMLGYATLNGKTVRDDDGAPLVRAEPILTREQQEALCAELVKTSRAKPAVSTPSLLLRVLFCAVCGEPAYKFAGGGRKHPRYRCRSMGFPKHCGNGTVAMAEWDASCEEQVLGLLGDAERLEKVWVAGSDSAVELAEVNAELVDLTSLIGSPAYRAGSPQREALDARIAALAARQEELEGLEARLSGWEWRETGQRFGDWWREQDTAAKNTWLRSMNVRLTFDVRGGLTRTIDFGDLREYEQHLRLGSVVERLHTGMS

SEQ ID NO: 10602 - protein, 500 aa, synthetic construct
MRALVVIRLSRVTDATTSPERQLESCQQLCAQRGWDVVGVAEDLDVSGAVDPFDRKRRPNLARWLAFEEQPFDVIVAYRVDRLARSIRHLQQLVHWAEDHKKLVVSATEAHFDTTTPFAAVVIALMGTVAQMELEAIKERNRSAAHFNIRAGKYRGSLPPWGYLPTRVDGEWRLAPDPVQRERILEVYHRVVDNHEPLHLVAHDLNRRGVLSPRDYFARLRGREPQGRKWSATALKRSMISVAMLGYATLNGKTVRDDDGAPLVRAEPILTREQLEALRAELVKTSRAKPAVSTPSLLLRVLFCAVCGEPAYKFAGGGRKHPRYRCRSMGFPKHCGNGTVAMAEWDAFCEEQVLNLLGDAERLEKVWVAGSDSAVELAEVSTELVDLTSLIGSPAYRAGSPQREALDARIAALAARQEELEGLESRPSGWEWRETGQRFGDWWREQDTAAKNTWLRSMNVRLTFDVRGGLTRTIDFGDLQEYGQHLRLGSVVGRLRTGMS

SEQ ID NO: 10603 - protein, 500 aa, synthetic construct
MRALVVIRLSRVTDATTSPERQLESCQQLCAQRGWDVVGVAEDLDVSGAVDPFDRKRRPNLARWLAFEEQPFDAIVAYRVDRLTRSIRHLQQLVHWAEDHKKLVVSATEAHFDTTTPFAAVVIALMGTVAQMELEAIKERNRSAAHFNIRAGKYRGSLPPWGYLPTRVDGEWRLVPDPVQRERILEVYRRVVDNHEPLHLVAHDLNRRGVLSPKDYFAQLRGREPQGRKWSATALKRSMISEAMLGYATLNGKTVRDDDGAPLVRAEPILTREQLEALRAELVKTSRAKPAVSAPSLLLRVLFCAVCGEPAYKFAGGGRKHPRYRCRSMGFPKHCGNGTVAMAEWDAFCEEQVLDLLGDAERLEKVRVAGSDSAVELAEVNAELVDLTSLIGSPAYRAGSPQREALDARIAALAARQEELEGLEARPSGWKWRETGQRFGDWWREQDTAARNTWLRSMNVRLTFDVRGGLTRTIDFGDLQEYEQHLRLGSVDERLHTGMS

SEQ ID NO: 10604 - protein, 500 aa, synthetic construct
MRALVVIRLSRVTDATTSPERQLESCQQLCAQRGWDVVGVAEDLDVSGAVDPFDRKRRPNLARWLVFEEQPFDVIVAYRVDRLARSIRHLQQLVHWAEDHKKLVVSATEAHFDTTTPFAAVVIALMGTVAQMELEAIKERTRSAAHFNIRAGKYRGSLPPWGYLPTRVDGEWRLVPDPVQRERILEVYHRVVDNHEPLHLVAHDLNRRGVLSPKDYFAQLQGREPQGRKWSATALKRSMISEAMLGYATLNGKTVRDDDGAPLVRAEPILTREQREALRAELVKTSRAKPAVSTPSLLLRVLFCAVCGEPAYKFAGGGRKHPRYRCRSMGFPKHCGNGTVAMVEWDAFCEEQVLGLLGDAERLEKVWVAGSDSAVELAEVNAELVDLTSLIGSPAFRAGSPQREALDARIAALAARQEKLEGLEARPSGWEWRETGQRFGDWWREQDTAAKNAWLRSMNVRLTFDARGGLTRTIDFGDLQAYEQHLRLGSVVERLHTGMS

SEQ ID NO: 10605 - protein, 500 aa, synthetic construct
MRALVVIRLSRVTDATTSPERQLESCQQLCAQRGWDVVGVAEDLDVSGAVDPFDRKRRPNLARWLAFEEQPFDVIVAYRVDRLTRSTRHLQQLVHWAENHKKLVVSATEAHFDTTTPFAAVVIALMGTVAQMELEAIKERSRSAAHFNIRAGKYRGSLPPWGYLPTRVDGEWRLAPDPVQRERILEVYHRVVDNHEPLHLVAHDLNRRGVLSPKDYFAQLQGREPQGRKWSATALKRSMISVAMLGYATLNGKIVRDDDGAPLVRAEPILTREQLEALRAELVKTSRAKPAVSTPSLLLRVLFCAVCGEPAYKFAGGGRKHPRYRCRSMGFPKHCGNGTVAMAEWDAFCEEQVLDLLGDAKRLEKVWVAGSDSAVELAEVNAELVDLTSLIGSPAYRAGSPQRGVLDARIAALAARQEELEGLEARPSGWEWRETGQRFGDWWREQDTAAKNTWLRSMNVRLTFDVRGGLTRTIDFGDLQECEQHLRLGSVVERLHTGMP

SEQ ID NO: 10606 - protein, 500 aa, synthetic construct
MRALVVIRLSRVTDATTSPERQLESCQQLCAQRGWDVVGVAEDLDVSGAVDPFDRKRRPNLARWLAFEEQPFDVIVAYRVDRLTRSTRHLQQLVHWAEDHKKLVVSATEAHFDTTTPFAAVVIALMGTVAQMELEAIKERNRSAAHFNIRAGKYRGSLPPWGYLPTRVDGEWRLAPDPVQRERILEVYHRVVDNHEPLHLVAHDLNRRGVLSPKDYFAQLQGREPQGRKWSATALKRSMTSEAMLGYATLNGKTVRDDDGAPLVRAEPILTREQLEALRAELVKTSRAKPAVSTPSLLLRVLFCAVCGEPAYKFAGGGRKHPRYRCRSMGFPKHCGNGTVATAEWDAFCEEQVLDLLGDAERLEKVWVAGSDSAVELAEVNAELVDLTSLIGSPAYRAGSPQREALDARIAALAARQEELEGLEARPSGWEWRETGQRFGDWWREQDTAAKNTWLRSMNVRLTFDVRGGLTRTIDFGDLQEYEQHLRLGSVVERLHTGMS

SEQ ID NO: 10607 - protein, 500 aa, synthetic construct
MRALVVIRLSRVTDATTSPERQLESCQQLCAQRGWDVVGVAEDLDVSGAIDPFDRKRRPNLARWLAFEEQPFDVIVAYRVDRLTRSIRHLQQLVHWAEDHKKLVVSATEAHFDMTTPFAAVVIALMGTVAQMELEAIKERNRSAAHFNIRAGKYRGSLPPWGYLPTRVDGEWRLVPDPVQRERILEVYHRVVDNHEPLHLVAHDLNRRGVLSPRDYFAQLRGREPQGRKWSATALKRSLISEAMLGYATLNGKTVRDDDGAPLVRAEPILTREQLEALRAELVKTSRAKPAVSTPSLLLRVLFCAVCGEPAYKFAGGGRKHPRYRCRSMGFPKHCGNGTVAMAEWDAFCEEQVLGLLGDAERLEKVWVAGSDSAVELAEANAELVDLTSLIGSPAYPAGSPQREALDARIAALAARQEELEGLEARPSGWEWRETGQRFGDWWREQDTAAKNTWLRSMNVRLTFDVRGGLTRTIDFGDLQEYKQHSRLGSVVERLHTGMS

SEQ ID NO: 10608 - protein, 500 aa, synthetic construct
MRALAVIRLSRVTDATTSPERQLGSCQQLCAQRGWDVVGVAEDLDVSGAVDPFDRKRRPNLARWLAFEEQPFDVIVAYRVDRLTRSIRHLQQLVHWAEDHKKLVVSATEAHFDTTTPFAAVVIALMGTVAQMELEAIKERSRSAAHFNIRAGKYRGSLPPWGYLPARVDGEWRLVPDPVQRERILEVYHRVVDNHEPLHLVAHDLNRRGVLSPKDYFAQLRGREPQGRKWSATALKRSMISEAMLGYATLNGETVRDDDGAPLVRAEPILTREQLEALRAELVKTSRAEPAVSTPSLLLRVLFCAVCGEPAYKFSGGGRKHPRYRCRSMGFPKHCGNGTVAMAEWDAFCEEQVLDLLGDAERLEKVWVAGSDSAVELAEVNAELVDLTSLIGSPAYRAGSPQREALDARIAALAARQEELEGLEARPSGWEWRETGQRFGDWWREQDTAAKNAWLRSMNVRLTFDVRGGLTRTIDFGDLQEYEQHLRLGSVVERLRTGMS

SEQ ID NO: 10609 - protein, 500 aa, synthetic construct
MRALVVIRLSRVTDATTSPERQLESCQQLCAQRGWDVVGVAEDLDVSGAVDPFDRKRRPNLARWLAFEEQPFDAIVAYRVDRLTRSIRHLQQLVHWAEDHKKLVVSATEAHFDTTTPFAAVVIALMGTVAQMELEAIKERNRSAAHFNIRAGKYRGSLPPWGYLPARVDGEWRLVPDPVQRERILEVYHRVVDNHEPLHLVAHDLNRRGVLSPKDYFAQLRGREPQGREWSATALKRSLTSEAMLGYATLNGKIVRGGDGAPLVRAEPILTREQLEALRAELVKTSRAKPAVSTPSLLLRVLFCAVCGEPAYKFSGGGRKHPRYRCRSMGFPKHCGNGTVAMAEWDAFCEEQVLDLLGDAERLEKVWVAGSDSAVELAEVNAELVDLTSLIGSPAYRAGSPQREALDARIAALAARQAELEGLEARPSGWEWRETGQRFGDWWREQDTAAKNTWLRSMNVRLTFDVRGGLTRTIDFGDLQEYEQHLRLGSVVERLHTGMS

SEQ ID NO: 10610 - protein, 500 aa, synthetic construct
MRALVVIRLSRVTDATTSPERQLESCQQLCAQRGWDVVGVAEDLDVSGAVDPFDRKRRPNLARWLAFEEQPFDVIVAYRVDRLARSIRYLQQLVHWAEDHKKLVVSATEAHFDTTTPFAAVVIALMGTVAQMELEAIKERSRSAAHFNIRAGKYRGSLPPWGYLPARVDGEWRLVPDPVQRERILEVYHRVVDNHEPLHLVAHDLNRRGVLSPKDYFAQLQGREPQGRKWSATALKRSIISEVMLGYATLNGKTVRDDDGAPLVRAEPILTREQLEAVRAELVKASRAKPAVSTPSLLLRVLFCAVCGEPAYKFVGGGRKHSRYRCRSMGFPKHCGNGTVAMAEWDAFCEEQILNLLGDAERLEKVWVAGSDSAVELAEVNAELVDLTSLIGSPAYRAGSPQREALDARIAALAARQEELEGLEARPSGWEWRGTGQRFGDWWREQDTAAKNTWLRSMNVRLTFDVRGGLTRTVDFGDLQEYEQHLRLGSVVERLHTGMS

SEQ ID NO: 10611 - protein, 500 aa, synthetic construct
MRALVVIRLSRVTDATTSPERQLESCQQLCAQRGWDVVGVAEDLDVSGAVDPFDRKRRPNLARWLAFEEQPFDVIVAYRVDRLTRSVRHLQQLVHWAEDHKKLVVSATEAHFDTTTPFAAVVIALMGTVAQMELEAIKERSRSAAHFNIRAGKYRGSLPPWGYLPTRVDGEWRLVPDPVQRERILEVYHRVVDDHEPLHLVAHDLNRRGVLSPRDYFAQLQGREPQGRKWSATALKRSMISEAMLGYATLNGKTVRDDDGAPLVRAEPILTRGQLEALRAELVKTSRAKPAVSTPSLLLRVLFCAVCGEPAYKFAGGGRKHPRYRCRSMGFPKHCGNGTVAMAEWDAFCEEQVLDLLGDAERLEKVWVAGSDSAVELAEVDAELVDLTSLIGSPAYRAGSPQREALDARIAALAARQEELEGLEARPSGWEWRETGQRFGDWWREQDTAAKNTWLRSMNVRLTFDVRGGLTRTIDFGDLQEYEQHLRLGSVVERLHTGMS

SEQ ID NO: 10612 - protein, 500 aa, synthetic construct
MRALVVIRLSRVTDATTSPERQLESCQQLCAQRGWDVVGVAEDLDVSGAVDPFDRKRRPNLARWLAFEEQPFDVIVAYRVDRLTRSIRHLQQLVHWAEDHKKLVVSATEAHFDTTTPFAAVVIALMGTVAQMELEAIKERSRSTAHFNIRAGKYRGSLPPWGYLPTRVDGEWRLVPDPVQRERILEVYHRVVDNHEPLHLVAHDLNRRGVLSPRDYFAQLRGREPQGRKWSATALKRSMISEAMLGYATLNGRTVRDDDGAPLVRAEPILTREQLEALRAELVKTSRAKPAVSTPSLLLRVLFCAVCGEPAYKFAGGGRKHPRYRCRSMGFPKHCGNGTVAMAEWDAFCEEQVLDLLGDAERLEKVWVAGSDSALELAEVNVELVDLMSLIGSPAYRAGSPQREALDARIAALAARQEELEGLEARPSGWEWRETGQRFGDWWREQDTAAKNTWLRSMNVRLTFDVRGGLTRTVDFGDLQEYEQHLRLGSVVERLHTGMS

SEQ ID NO: 10613 - protein, 500 aa, synthetic construct
MRALVVIRLSRVTDATTSPERQLESCQQLCAQRGWDVVGVAEDLDVSGAVDPFDRKRRPNLARWLAFEEQPFDAIVAYRVDRLTRSIRHLQQLVHWAEDHKKLVVSATEAHFDTTTPFAAVVIALMGTVAQMELEAIKERNRSAAHFNIRAGKYRGSLPPWGYLPTRVDGEWHLAPDPVQRERILEVYHRVVDNHEPLHLVAHDLNRRGVLSPRDYFAQLQGREPQGRKWSATALKRSMISGAMLGYATLNGKTVRDDDGAPLVRAEPILTREQLEAIRAELVKTSRARPAVSTPSLLLRVLFCAVCGEPAYKFAGGGRKHPRYRCRSMGFPKHCGNGTVAMAEWDAFCEEQVLDLLGDAERLEKVWVAGSDSAVELAEVNAELVDLTSLIGSPAYHAGSPQREALDARIAALAARQEELEGLEARPSGWEWRGTGQRFGDWWREQDTAAKNTWLRSMNVRLTFDVRGGLTRSIDFGDLQEYEQHLRLGSVVERLHTGMS

SEQ ID NO: 10614 - protein, 500 aa, synthetic construct
MRALVVIRLSRVTDATTSPERQLESCQQLCAQRGWDVVGVAEDLDVSGAVDPFDRKRRPNLARWLAFEERPFDVIVAYRVDRLARSIRHLQQLVHWAEDHKKLVVSATEAHFDTTTPFAAVVIALMGTVAQMELEAIKERNRSAAHFNIRAGKYRGSLPPWGYLPTRVDGEWRLVPDPVQRERILEVYHRVVDDHEPLHLVAHDLNRRGVLSPRDYFAQLRGREPQGRKWSATALKRSMISEAMLGHATLNGKTVRDEDGAPLVRAEPILTREQLEALRAELVKTSRARPAVSTPSLLLRVLFCAVCGEPAYKFAGGGRKHPRYRCRSMGFPKHCGNGTVATAEWDAFCEEQVLDLLGDTERLEKVWVAGSDSAIELAEVNAELVDLTSLIGSPAYRAGSPQREALDARMAALAARQEELEGLEARPSGWEWRETGQRFGDWWREQDTAAKNTWLRSMNVRLTFDVRGGLTRTIDFGDLQEYEQHLRLGNAVERLHTGMS

SEQ ID NO: 10615 - protein, 500 aa, synthetic construct
MRALVVIRLSRVTDATTSPERQLESCQQLCAQRGWDVVGVAEDLDVSGAVDPFDRKRRPNLARWLAFEEQPFDVIVAYRVDRLTRSVRHLQQLVHWAEDHKKLVVSATEAHFDTTTPFAAVVIALMGTVAQMELEAIKERSRSAAHFNIRAGKYRGSLPPWGYLPTRVDGEWRLVPDPVQRERILEVYHRVVDNHEPLHLVAHDLNRRGVLSPKDYFAQLRGREPQGRKWSATALKRSMISEAMLGYATLNGKTVRDDDGAPLVRAEPILTRKQLEALRAELVKTSRAKPAVSTPSLLLRVLFCAVCGEPAYKFAGGGRKHPRYRCRSMGFPKHCGNGTVAMAEWDAFCEEQVLDLLGDAERLEKVWVAGSDSAVELAEVNAELVDLTSLIGSPAYRAGSPQREALDARIAALAARQEELEGLEARPSGWEWRKTGQRFGDWWREQDTAAKNTWLRSMNVRLTFDVRGGLTRTIDFGDLQEYEQHLRLGSVVERLHSGMS

SEQ ID NO: 10616 - protein, 500 aa, synthetic construct
MRALVVIRLSRVTDATTSPERQLESCQQLCAQRGWDVVGVAEDLDVSGAVDPFDRKRRPNLARWLAFEEQPFDVIVAYRVDRLARSIRHLQQLVHWAEDHKKLVVSATEAHFDTTTPFAAVVIALMGTVAQLELEAIKERNRSAAHFNIRAGKYRGSLPPWGYLPTRVDGEWRLAPDPVQRERILEVYHRVVDNHEPLHLVAHDLNRRGVLSPRDYFAQLRGREPQGRKWSATALKRSMISEVMLGYATLNGKTVRDDDGAPLVRAEPILTREQLEALRAELVKTSRAKPAVSTPSLLLRVLFCAVCGEPAYKFAGGGRKHPRYRCRSMGFPKHCGNGTVAMAEWDAFCEEQVLDLLGDAERLEKVWVAGSDSAVELAEVNAELVDLTSLIGSPAYRAGSPQREALDARIAALAARQEELEGLEARPSGWEWRGTGQRFGDWWREQDTEAKNTWLRSMNVRLTFDVRGGLTRTIDFGDLQEYELHLRLGSVVERLHTGMS

SEQ ID NO: 10617 - protein, 500 aa, synthetic construct
MRALVVIRLSRVTDATTSPERQLESCQQLCAQRGWDVVGVAEDLDVSGAVDPFDRKRRPNLARWLAFEEQPFDVVVAYRVDRLTRSIRHLQQLVHWAEDHKKLVVSATEAHFDTTTPFAAVVIALMGTVAQMELEAIKERSRSAAHFNIRAGKYRGSLPPWGYLPTRVDGEWRLVPDPVQRERILEVYHRVVDNHEPLHLVAHDLNRRGVLSPKDYFAQLQGREPQGRKWSATALKRSMISEAMLGHATLNGKTVRDDDGAPLVRAEPILTREQLEAVRAELVKTSRAKPAVSTPSLLLRVLFCAVCGEPAYKFAGGGRKHPRYRCRSMGFPKHCGNGTVAMAEWDAFCEEQVLDLLGDAERLEKVWVAGSDSAVELAEVNAELVDLTSLIGSPAYRTGSPQREALDARTAALAARQEELEGLEARPSGWEWRGTGQRFGDWWREQGTAAKNNWLRSMNVRLTFDVRGGLTRTIDFGDLQEYEQHLRLGSVVERLHTGMS

SEQ ID NO: 10618 - protein, 500 aa, synthetic construct
MRALVVIRLSRVTDATTSPERQLESCQQLCAQRGWDVVGVAEDLDVSGAVDPFDRKRRPNLARWLAFEEQPFDVIVAYRVDRLTRSTRHLQQLVHWAEDHKKLVASATEAHFDTTTPFAAVVIALMGTVAQMELEAIKERNRSAAHFNIRAGKYRGSLPPWGYLPSRVDGEWRLVPDPVQRERILEVYHRVVDNHEPLHLVAHDLNRRGVLSPKDYFAQLRGREPQGRKWSATALKRSMTSEAMLGYATLNGKTVRDDDGAPLVRAEPILTREQLEALRAELVKTSRAKPAVSTPSLLLRVLFCAVCGEPAYKFAGGGRKHPRYRCRSMGFSKHCGNGTVAMAGWDAFCEEQVLDLLGDAERLEKVWVAGSDSAVELAEVNAELVDLTSLIGSPAYRAGSPQREALDARIAALAARQEELEGLEARPSGWEWRETGQRFGDWWREQDTAAKNTWLRSMNVRLTFDVRGGLTRTIDFGDLREYEQHLRLGSVVERLHSGMS

SEQ ID NO: 10619 - protein, 500 aa, synthetic construct
MRALVVIRLSRVTDATTSPERQLESCQQLCAQRGWDVVGVAEDLDVSGAVDPFDRKRRPNLARWLAFEEQPFDVIVAYRVDRLARSIRHLQQLVHWAEDHKKLVVSATEAHFDTTTPFAAVVIALMGTVAQMELEAIKERNRSAAHFNIRAGKYRGSLPPWGYLPTRVNGEWRLVPDPVQRERILEVYHRVVDNHEPLHLVAHDLNRRGVLSPKDYFAQLRGREPQGRKWSATALKRSMISEAMLGYATLNGKTVRDGDGAPLVRAEPILTREQLEAIRAELVKTSRAKPAVSTPSLLLRVLFCAVCGEPAYKFAGGGRKHPRYRCRSMGFPKHCGNGTVAMAEWDAFCEEQVLDLLGDAERLEKVWVAGSDSAVELAEVNAELVDLTSLISSPAYRAGSPQREALDARIAALAARQEELEGLEARPSGWGWRETGQRFGDWWREQDTAAKNTWLRSMGVRLTFDVRGGLTRTIDFGDLQEYEQHLRLGNAVERLHTGMS

SEQ ID NO: 10620 - protein, 500 aa, synthetic construct
MRALVVIRLSRVTDATTSPERQLESCQQLCARRGWDVVGVAEDLDVSGAVDPFDRKRRPNLARWLAFEEQPFDVIVAYRVDRLARSIRHLQQLVHWAEDHKKLVVSATEAHFDTTTPFAAVVIALMGTVAQMELEAIKERNRSAAHFNIRAGKYRGSLPPWGYLPTRVDGEWRLVPDPVQRERILEVYHRVVDDHEPLHLVAHDLNRRGVLSPKDYFAQLRGREPQGRKWSATALKRSMISEAMLGYATLNGKIVRDDDGAPLVRAEPILTREQLEALRAELVKTSRAKPAVSTPSLLLRVLFCAVCGEPAYKFAGGGRKHPRYRCRSMGFPKHCGNGTVAMAEWDAFCEEQVLDLLGDAERLEKVWVAGSDSAVELAEVNAELVDLTSLVGSPAYRAGSPQREALDARIAALAARQEELGGLEARPSGWEWRETGQRFGDWWREQDTAAKNTWLRSMNVRLMFDVRGGLTRTIDFGDLQEYEQHLRLGSVVERLHTGMS

SEQ ID NO: 10621 - protein, 500 aa, synthetic construct
MRALVVIRLSRVTDATTSPERQLESCQQLCAQRGWDVVGVAEDLDVSGAVDPFDRKRRPNLARWLAFEEQPFDVIVAHRVDRLTRSIRHLQQLVHWAEDHKKLVVSATEAHFDTTTPFAAVVIALMGTVAQMELEAIKERSRSAAHFNIRAGKYRGSLPPWGYLPARVDGEWRLVPDPVQRERILEVYHRVVDNHEPLHLVAHDLNRRGVLSPKDYFAQLQGREPQGRKWSATALKRSMISETMLGYATLNGKTVRDDDGAPLVRAEPILTREQLEALRAELVKTSRAKPAVSTPSLLLRVLFCAVCGEPAYKFAGGGRKHPRYRCRSMGFPKHCGNGTVAVAEWDAFCEEQVLGLLGDVERLEKVWVAGSDSAVKLAEVNAELVDLTGLIGSPAYRAGSPQREALDARIAALAARQEELEGLEARPSGWEWRGTGQRFGDWWREQDTAAKNTWLRSMNVRLTFDVRGGLTRTIDYGDLHEYGQHLRLGSVVERLHTGMS

SEQ ID NO: 10622 - protein, 500 aa, synthetic construct
MRALVVIRLSRVTDATTSPERQLESCQQLCAQRGWDVVGVAEDLDVSGAVDPFDHKRRPNLARWLAFEERPFDVIVAYRVDRLTRSTRHLQQLVHWAEDHKKLVVSATEAHFDTTTPFAAVVIALMGTVAQMELEAIKERSRSAAHFNIRAGKYRGSLPPWGYLPTRVDGEWRLVPDPEQRERILEVYHRVVDNHEPLHLVAHDLNRRGVLSPKDYFAQLRGREPQGRKWSATALKRSMISEAMLGYATLNGKTVRDDDGAPLVRAEPILTREQQEALRAELVKTSRAKPAVSTPSLLLRVLFCAVCGEPAYKFAGGGRKHPRYRCRSMGFPKHCGNGTVAMAEWDAFCEEQVLDLLGDAERLEKVWVAGSDSAVELAEVNAELVDLTSLIGSPAYRAGSPQREALDARIAALAARQEELEGLEARPSGWEWRETGQRFGDWWREQDTAAKNTWLRSMNVRLTFDVRGGLTRTIDFGDLQEYEQHLRLGSVVERLHTGMS

SEQ ID NO: 10623 - protein, 500 aa, synthetic construct
MRALVVIRLSRVTDATTSPERQLESCQQLCAQRGWDVVGVAEDLDVSGAVDPFDRKRRPNLARWLAFEEQPFDVIVAYRVDRLARSIRHLQQLVHWAEDHKKLVVSATEAHFDTTTPFAAVVTALMGTVAQMELEAIRERNRSAAHFNIRAGKYRGSLPPWGYLPARVDGEWRLVPDPVQRERILEVYHRVVDNHEPLHLVAHDLNRRGVLSPKDYFAQLRGREPQGRKWSATALKRSMISEAMLGYATLNGKTVRDDDGAPLVRAEPILTREQLEALRAELVKTSRAKPAVSTPSLLLRVLFCAVCGEPAYKFAGGGRKHSRYRCRSMGFPKHCGNGTVAMAEWDAFCEEQVLDLLGDAERLEKVWVAGSDSAVELAEVNAELVDLTSLIGSPAYRAGSPQRDALDARIAALAARQEGLEGLEARPSGWEWRETGQRFGDWWREQDTAAKNTWLRSMNVRLTFDVRGGLTRTIDFGDLQEYEQHLRLGSVVERLHTGMS

SEQ ID NO: 10624 - protein, 500 aa, synthetic construct
MRALVVIRLSRVTEATTSPERQLESCQQLCAQRGWDVVGVAEDLDVSGAVDPFDRKRRPNLARWLVFEEQPFDVIVAYRVDRLARSIRHLQQLVHWAEDHKKLVVSATEAHFDTTTPFAAVVIALMGTVAQMELEAIRERNRSAAHFNIRAGKYRGSLPPWGYLPTRVDGEWRLAPDPVQRERILEVYHRVVDNHEPLHLVAHDLNRRGVLSPKDYFAQLQGREPQGRKWSATAIKRSMTSKAMLGYATLNGKTVRDDDGAPLVRAEPILTREQLEALRAELVKTSRAKPAVSTPSLLLRVLFCAVCGEPAYKFAGGGRKHPRYRCRSMGFPKHCGNGTVAMAEWDAFCEEQVLDLLGDAKRLEKVWVAGSDSAVELAEVNAELVDLMGLIGSPAYRAGSPQREALDARIAALAARQEELEGLEARPSGWEWRETGQRFEDWWREQDTAAKNTWLRSMNVRLTFDVRGGLTRTIDFGDLQEYEQHLRLGSVVERLHTGMS

SEQ ID NO: 10625 - protein, 500 aa, synthetic construct
MRALVVIRLSRVTDATTSPERQLESCQQLCAQRGWDVVGVAEDLDVSGAVDPFDRKRRPNLARWLAFEEQPFDVIVAYRVDRLTRSTRHLQQLVLWAEDHKKLVVSATEAHFDTTTPFAAVVIALMGTVAQMELEAIKERSRSAAHFNIRAGKYRGSLPPWGYLPTRVDGEWRLAPDPVQRERILEVYHRVVDNHEPLHLVAHDLNRRGVLSPKDYFAQLQGREPQGRKWSATALKRSMISEAMLGYATLNGKTVRDDSGAPLVRAEPILTREQLEALRAELVKTSRAKPAVPTPSLLLRVLFCAVCGEPAYKFAGGGRKHPRYRCRSMGFPKHCGNGTVAMAEWDAFCEEQVLDLLGDAERLEKVWVAGSDSAAELAEVSAELVDLTSLIGSPAYRAGSPQREALDARIAALAARQEELEGLEARPSGWEWRETGQRFGDWWREQDTAAKNTWLRSMNVRLTFDVRGGLTRTIDFGDLQEYEQHLRLGSVVERLHTGMS

SEQ ID NO: 10626 - protein, 500 aa, synthetic construct
MRALVVIRLSRVTDATTSPERQLESCQQLCAQRGWDVVGVAEDLDVSGAVDPFDRKRRPNLARWLAFEERPFDVIVAYRVDRLTRSIRHLQQLVHWAEDHKKLVVSATEAHFDTTTPFAAVVIALMGTVAQMELEAIKERSRSAAHFNIRAGKYRGSLPPWGYLPTRVDGEWRLAPDPVQRERILEVYHRVVDNHEPLHLVAHDLNRRGVLSPKDYFAQLQGREPQGRKWSATALKRSMISVAMLGYATLNGKTIRDDDGAPLVRAEPILTREQLEALRAELAKPSRAKPAVSTPSLLLRVLFCAVCGEPAYKFAGGGRKHPRYRCRSMGFPKHCGNGTVAMAEWDAFCEEQVLDLLGDAERLEKVWVAGSDSAVELAEVNADLVDLTSLIGSPAYRAGSPQRKALDARIAALAARREELEGLEARPSGWEWRETGQRFGDWWREQDTAAKNTWLRSMNVRLSFDVRGGLTRTIDFGDLQEYEQHLRLGSVVERPHTGTS

SEQ ID NO: 10627 - protein, 500 aa, synthetic construct
MRALVVVRLSRVTDATTSPERQLESCQQLCAQRGWDVVGVAEDLDVSGAVDPFDRKRRPNLARWLAFEEQPFDAIVAYRVDRLTRSIRHLQQLVHWAEDHKKLVVSATEAHFDTTTPFAAVVIALMGTVAQMELEAIKERNRSAAHFNIRAGKYRGSLPPWGYLPTRVSGEWRLVPDPVQRERILEVYHRVVDNHEPLHLVAHDLNRRGVLSPRDYFAQLRGREPQGRKWSATALKRSMISEAMLGYATLNGKTVRDDDGAPLVRAEPILTREQLEAIRAELVKTSRAKPAVSTPSLLLRVLFCAVCGEPAYKFAGGGRKHPRYRCRSMGFPKHCGNGTVAMAEWDAFCEEQVLDLLGDAERLEKVWVAGSDSAVELAEVNAELVDLTSLIGSPAYRADSPQREALDARIAALAARQGELEGLEARPSGWEWRETGQRFGDWWREQDTAAKNTWLRSMNVRLTFDVRGGLTRTIDFGNLQEYEQHLRLGGVVERLHTGMS

SEQ ID NO: 10628 - protein, 500 aa, synthetic construct
MRALVVVRLSRVTDATTSPERQLESCQQLCAQRGWDVVGVAEDLDVSGAVDPFDRKRRPNLARWLAFEEQPFDVIVAYRVDRLARSIRHLQQLVHWAGDHKKLVVSATEAHFDTTTPFAAVVIALMGTVAQMELEAIKERSRSAAHFNIRAGKYRGSLPPWGYLPTRVDGEWRLVPDPVQRERILEVYHRVVDNHEPLHLVAHDLNRRGVLSPRDYFAQLRGREPQGRRWSATALKRSMISEAMLGYATLNGRTVRDDDGAPLVRAEPILTREQLEALRAELVKTSRAKPAVSTPSLLLRVLFCAVCGEPAYKFAGGGRKHPRYRCRSMGFPKHCGNGTVAMAEWDAFCEEQVLDLLGDAERLEKVWVAGSDSAVELAEVNAELVDLTSLIGSQAYRAGSPQREALDARIAALAARQEELEGLGARPSGWEWRETGQRFGDWWREQNTAAKNTWLRSMNVRLTFDVRGGLTRTIDFGDLQEYEQHLRSGSGVERLHTGMS

SEQ ID NO: 10629 - protein, 500 aa, synthetic construct
MRALVVTRLSRVTDATTSPERQLESCQQLCAQRGWDVVGVAEDLDVSGAVDPFDRKRRPNLARWLAFEEQPFDVIVAYRVDRLTRSVRHLQQLVHWAEDHKKLVVSATEAHFDTTTPFAAVVIALMGTVAQMELEAIKERSRSAAHFNIRAGKYRGSLPPWGYLPARVDGEWRLVPDPVQRERILEVYHRVVDNHEPLHLVAHDLNRRGVLSPKDYFAQLRGREPQGRKWSATALKRSMTSEAMLGYATLNGKTVRGDDGAPLVRAEPILTREQLEALRAELVKPSRAKPAVSTPSLLLRVLFCAVCGEPAYKFTGGGRKHPRYRCRSMGFPKHCGNGTVAMAEWDAFCEEQVLDLLGDAERLEKVWVAGSDSAVELAEVNAELVDLTSLIGSPAYRAGSPQREALDARIAALAARQEELEGLEARPSGWEWRETGQRFGDWWREQDTAAKNTWLRSMNVRLTFDVRGGLTRTTDFGDLQEYAQHLRLGSVVERLHTGMS

SEQ ID NO: 10630 - protein, 500 aa, synthetic construct
MRALVVIRLSRVTDATTSPERQLESCQQLCAQRGWDVVGVAEDLDVSGAVDPFDRKRRPNLARWLAFEEQPFDVIVAYRVDRLTRSVRHLQQLVHWAEDHKKLVVSATEAHFDTTTPFAAVVIALMGTVAQMELEAIKERSRSAAHFNIRAGKYRGSLPPWGYLPTRVDGEWRLAPDPVQRERILEVYHRVVDNHEPLHLVAHDLNRRGVLSPKDYFAQLRGREPQGRKWSATALKRSMISGAMLGYATLNGKTVRDDDGAPLVRAEPILTREQLEALRAELAKTSRAKPAVSTPSLLLRVLFCAVCGEPAYKFSGGGRKHPRYRCRSMGFPKHCGNGTVAMAEWDAFCEEQVLDLLGDAERLEKVWVAGSDSAVELAEVNAELVDLTSLIGSPAYRAGSPQREALDARIAALAARQEELEGLEARPSGWEWRETGQRFGDWWREQDTAAKNTWLRSMNVRLTFDVRGGLTRTIDFGDLQEYEQHLRLGSVVGRLHTGMP

SEQ ID NO: 10631 - protein, 500 aa, synthetic construct
MRTLVVIRLSRVTDATTSPERQLESCQQLCAQRGWDVVGVAEDLDVSGAVDPFDRKRRPNLARWLAFEERPFDVIVAYRVDRLTRSIRHLQQLVHWAEDHKKLVVSATEAHFDTTTPFAAVVIALMGTVAQMELEAIKERSRSAAHFNIRAGKYRGSLPPWGYLPTRVDGEWRLAPDPVQRERILEVYHRVVDNHEPLHLVAHDLNRRGVLSPKDYFAQLQGREPQGRKWSATALKRSMISVAMLGYATLNGKTVRDDDGAPLVRAEPILTRGQLEALRVELVKTSRAKPAVSTPSLLLRVLFCAVCGEPAYKFAGGGRKHPRYRCRSMGFPKHCGNGTVAMAEWDAFCEEQVLDLLGDAERLEKVWVAGSDSAVELAEVNAELVDLTSLIGSPAYRAGSPQREALDARIAALAARQEELESLEARPSGWVWRETGQRFGDWWREQDTAAKNTWLRSMNVRLTFDVRGGLTRTIDFGDLQEYEQHLRLGSVVERLHTGMS

SEQ ID NO: 10632 - protein, 500 aa, synthetic construct
MRALVVIRLSRVTDATTSPERQLESCQQLCAQRGWAVVGVAEDLDASGAVDPFDCKRRPNLARWLAFEEQPFDVIVAYRVDRLTRSVRHLQQLVHWAEDHKKLVVSATEAHFDTTTPFAAVVIALMGTVAQMELEAIKERSRSAAHFNIRAGKYRGSLPPWGYLPTRVDGEWRLAPDPVQRERILEVYHRVVDNHEPLHLVAHDLNRRGVLSPKDYFAQLRGREPQGRKWSATALKRSMISEAMLGYATLNGKTVRGDDGAPLVRAEPILTREQLEALRAELVKTSRAKPAVSTPSLLLRVLFCAVCGEPAYKFAGGGRKHPRYRCRSMGFPKHCGNGTVAMAEWDAFCEEQVLDLLGDAERLEKVWVAGSDSAVELAEVNAELVDLTSLIGSPAYRAGSPQREALDARIAALAARQEELEGLEARPSGWEWRGTGQRFGDWWREQDTAAKNTWLRSMNVRLTFDVRGGLTRTIDLGDLQEYEQHLRLGSVVERSHTGMP

SEQ ID NO: 10633 - protein, 500 aa, synthetic construct
MRALVVIRLSRVTDATTSPERQLESCQQLCAQRGWDVVGVAEDLDVSGAVDPFDRKRRPNLARWLAFEEQPFDVIVAYRVDRLTRSVRHLQQLVHWAEDHKKLVVSATEAHFDTTTPFAAVVIALMGTVAQMELEAIKERSRSAAHFNIRAGKYRGSLPPWGYLPARVDGEWRLVPDPVQRERILEVYHRVVDNHEPLHLVAHDLNRRGVLSPKDYFAQLRGREPQGRKWSATALKRSMISVAMLGYATLCGKTVRDDDGAPLVRAEPILTREQLEALRAELVKTSRAKPAVSTPSLLLRVLFCAVCGEPAYKFAGGGRKHPRYRCRSMGFPKHCGNGTVAMAEWDAFCEEQVLDLLGDAERLEKVWVAGSDSAVELAEVNAELVDLTSLIGSPAYRAGSPQREALDARIAALAARQEELEGSEARPSGWEWRETGQRFGDWWREQDTAAKNIWLRSMNVRLTFDARGGLTRTIDFGDLQEYGRHLRLGSVVERLHTGMS

SEQ ID NO: 10634 - protein, 500 aa, synthetic construct
MRALVVIRLSRVTDATTSPERQLESCQQLCARRGWDVVGVAEDLDVSGAVDPFDRKRRPNFARWLAFEEQPFDVIVAYRVDRLTRSIRHLQQLVHWAEDHKKLVVSATEAHFDTTTPFAAVVIALMGTVAQMELEAIRERSRSAAHFNIRAGKYRGSLPPWGYLPARVDGEWRLVPDPVQRERILEVYHRVVDNHEPLHLVAHDLNRRGVLSPRDYFAQLQGREPQGREWSATALKRSMISGAMLGYATLNGKTVRDDDGAPLVRAEPILTREQQEALRAELVKTSRARPAVSTPSLLLRVLFCAVCGEPAYKFAGGGRKHPRYRCRSMGFPKHCGNGTVAMAEWDAFCEEQVLDLLGDAERLERVWVAGSDSVVELAEVNAELVDLTSLIGSPAYRAGSPQREALDARIAALAARQEELEGLEARPSGWEWRETGQRFGDWWREQDTAAKNTWLRSMNVRLTFDVRGGLTRTIDFGDLQEYVQHLRLGSVVERLHTGMS

SEQ ID NO: 10635 - protein, 500 aa, synthetic construct
MRALVVIRLSRVTDATTSPERQLESCQQLCAQRGWDVVGVAEDLDVSGAVDPFDGKRRPNLARWLAFEEQPFDVIVAYRVDRLTRSTRHLQQLVHWAEDHKKLVVSATEAHFDTTTPFAAVVIALMGTVAQMELEAIKERSRSAAHFNIRAGKYRGSLPPWGYLPTRVDGEWRLVPDPVQRERILEVYHRVVDNHEPLHLVAHDLNRRGVLSPKDYFAQLRGREPQGRKWSATALKRSMISEAMLGYTTLNGKTVRDGDGAPLVRAEPILTREQQEALRAELVKTSRAKPAVSAPSLLLRVLFCAVCGEPAYKFSGGGRKHPRYRCRSMGFPKHCGNGTVAMAEWDAFCEEQVLDLLGDAKRLEKVWVAGSDSAVELAEVSAELVDLTSLIGSPAYRAGSPQREALDARIAALAARQEELEGSEARPSGWEWRETGQRFGDWWRGQDTAAKNTWLRSMNIRLTFDVRGGLTRTIDFGDLQEYEQHLRLGSVVERLHTGMS

SEQ ID NO: 10636 - protein, 500 aa, synthetic construct
MRALVVIRLSRVTDATTSPERQLESCQQLCAQRGWDVVGVAEDLDVSGAVDPFDRKRRPNLARWLAFEEQPFDVIVAYRVDRLTRSVRHLQQLVHWAEDHKKLVVSATEAHFDTTTPFAAVVIALMGTVAQMELGAIKERSRSAAHFNIRAGKYRGSLPPWGYLPARVDGEWRLVPDPVQRERILEVYHRVVDNHEPLHLVAHDLNRRGVLSPRDYFAQLRGREPQGRKWSATALKRSMISEAMLGYATLNGRTVRDDDGAPLVRAEPILTREQLEALRAELVKTSRAKPAVSTPSLLLRVLFCAVCGEPAYKFAGGGRKHPRYRCRSMGSPKHCGNGTVAMAEWDAFCEEQVLDLLGDAERLEKVWVAGSDSALELVEVNVELVDLMSLIGSPAYRAGSPQREALDARIAALAARQGELEGLEARPSGWEWRETGQRFGDWWREQDTAAKNTWLRSMNVRLTFDVRGGLTRTVDFGDLQEYEQHLRLGSVVERLHTGMS

SEQ ID NO: 10637 - protein, 500 aa, synthetic construct
MRALVVIRLSRVTDATTSPERQLESCQQLCAQRDWDVVGVAEDLDVSGAVDPFNRKRRPNLARWLAFEEQPFDVIVAYRVDRLTRSIRHLQQLVHWAEDHKKLVVSATEAHFDTTTPFAAVVIALMGTVAQMELEAIKERSRSAAHFNIRAGKYRGSLPPWGYLPARVDGEWRLVPDPVQRERILEVYHRVVDNHEPLHLVAHDLNRRGVLSPKDYFAQLQGREPQGRKWSATALKRSMISGAMLGYTTLSGKTVRDDDGAPLVRAEPILTREQQEALRAELVKTSRAKPAVSTPSLLLRVLFCAVCGEPAYKFAGGGRKHPRYRCRSMGFPKHCGNGTVAMAEWDAFCEEQVLNLLGDAERLERVWVAGSDSAAELAEVNAELVDLTSLIGSPAYRAGSPQREALDARIAALAARQEELEGLEARPSGWEWRGTGQRFGDWWREQDTAAKNAWLRSMNVRLTFDVRGGLTRTIDFGDLQEYEQHLRSGSVVGRLHTGMS

SEQ ID NO: 10638 - protein, 500 aa, synthetic construct
MRALVVIRLSRVTDATTSPERQLGSCQQLCAQRGWDVVGVAEDLDVSGAVDPFDRKRRPNLARWLAFEEQPFDVIVAYRVDRLTRSTRHLQQLIHWAEDHKKLVVSATEAHFDTTTPFAAVVIALMGTVAQMELEAIKERSRSAAHFNIRAGKYRGSLPPWGYLPTRVDGEWRLVPDPVQRERILEVYHRVVDNHEPLHLVAHDLNRRGVLSPKDYFAQLRGREPQGRKWSATALKRSMISEAMLGYATLNGKTVRDDDGAPLVRAEPILTREQLEAVRAKLVKTSRAKPAVSTPSLLLRVLFCAVCGEPAYKFAGGGRKHPRYRCRSMGFPKHCGNGTVAMAEWDAFCEEQVLDLLGDAERLEKVWVAGSDSAVELAEVNAELVDLTSLISSPAYRAGSPQREALDARIAALAARQEELEGLEARPSGWEWRETGQRFGDWWREQDTAAKNTWLRSMGVRLTFDVRGGLTRTIDFGELQEYEQHLRLSSVVERLHTGMS

SEQ ID NO: 10639 - protein, 500 aa, synthetic construct
MRALVVIRLSRVTDATTSPERQLESCQQLCAQRGWDVVGVAEDLDVSGAVDPFDRKRRPDLARWLALEEQPFDVIVAYRVDRLTRSTRHLQQLVHWAEDHKKLVVSATEAHFDTTTPFAAVVIALMGTVAQMELEAIKERSRSAAHFNIRAGKYRGSLPPWGYLPTRVDGEWRLVPDPVQRERILEVYHRVVDNHEPLHLVAHDLNRRGVLSPKDYFAQLQGREPQGRKWSATALKRSMISEAMLGYATLNGKIVRNDDGAPLVRAEPILTRGQLEALRAELVKTSRAKPAVSTPSLLLRVLFCAVCGEPAYKFAGGGRKHPRYRCRSMGFPKHCGNGTVAMAEWDAFCEEQVLDLLGDAERLEKVWVAGSDSAVELAEVNAELVDLTSLIGSPAYRAGSPQREALDARIAALAARQEELEGLEARPAGWEWRETGQRFGDWWREQNTAVKNTWLRSMNVRLTFDVRGGLTRTIDFGDLQEYEQHLRLGNMVERLHTEMS

SEQ ID NO: 10640 - protein, 500 aa, synthetic construct
MRALVVIRLSRVTDATTSPERQLKSCQQLCAQRGWDVVGVAEDLDVSGAVDPFDRKRRPSLARWLAFEEQPFDVIVAYRVDRLTRSTRHLQQLVHWAEDHKKLVVSATEAHFDTTTPFAAVVIALMGTVAQMELEAIKERTRSAAHFNIRAGKYRGSLPPWGYLPARVDGEWRLAPDPVQRERILEVYHRVVDNHEPLHLVAHDLNRRGVLSPKDYFAQLQGREPQGRKWSATALKRSMISEAMLGYATLNGKIVRDDNGAPLVRAEPILTREQLEALRAELVKTSRAKPAVSTPSLLLRVLFCAVCGEPAYKFAGGGRRHPRYRCRSMGFPKHCGNGTVAMAEWDAFCEEQVLNLLGDEERLEKVWVAGSDSAAELAEVNVELVDLTSLISSPAYRAGSPQREALDARIAALAARQEELEGLEARPSGWEWRGTGRRFGDWWREQDTATKNTWLRSMNVRLTFDVRGGLTRTIDFGDLQEYEQHLRLGSVVERLHTGMS

SEQ ID NO: 10641 - protein, 500 aa, synthetic construct
MRALVVIRLSRVTDATTSPERQLESCQQLCAQRGWDVVGVAEDLDVSGSVDPFDRKRRPNLARWLAFEKQPFDVIVAYRVDRLARSIRHLQQLVHWAEDHKKLVVSATEAHFDTTTPFAAVVIALMGTVAQMELEAIRERSRSAAHFNIRAGKYRGSLPPWGYLPTRVDGEWRLVPDPVQRERILEVYHRVVDDHEPLHLVAHDLNRRGVLSPKDYFAQLQGREPQGRKWSATALKRSMISVAMLGYATLNGKTVRDDDGAPLVRAEPILTREQLEALRAELVKTSRAKPAVSTPSLLLRVLFCAVCGEPAYKFAGGGRKHPRYRCRSMGFPKHCGNGTVAMAEWDAFCEDQVLDLLGDAERLEKVWVAGSDSAVELAEVNAELVDLMSLIGSPAYRAGSPQREALDARIAALAARQEELEGLEARPSGWEWRETGQRFGDWWREQDTAAKNTWLRSMNVRLTFDARGGLTRTIDSGDLREYEQHLHLGSVVERLHTGMS

SEQ ID NO: 10642 - protein, 500 aa, synthetic construct
MRALVVIRLSRVTDATTSPERQLESCQQLCAQRGWDVVGVAEDLDVSGAVDPFDRKRRPNLARWLAFEEQPFDVIVAYRVDRLTRSTRHLQQLVRWAEDHKKLVVSATEAHFDTTTPFAAVVIALMGTVAQMELEAIKERNRSAAHFNIRAGKYRGSLPPWGYLPTRVDGVWRLVPDPVQRERILEVYHRVVDNHEPLHLVAHDLNRRGVLSPRDYFAQLRGREPQGRKWSATALKRSMVSEAMLGYATLDGKTVRDDDGAPLVRAEPILTREQLGALRAELVKTSRAKPAVSTPSLLLRVLFCAVCGEPAYKFAGGGRKHPRYRCRSMGFPKHCGNGTVAMAEWDAFCEEQVLDLLGDAERLEKVWVVGSDSAVELAEVNAELVDLTSLIGSPAYRAGSPQREALDARIAALAARQEELEGLEARPSGWEWRETGQRFEDWWREQDTAAKNTWLRSMNVRLTFDVRGGLTRTIDFGDLQEYEQHLRLGSVVERLHTGMS

SEQ ID NO: 10643 - protein, 500 aa, synthetic construct
MRALVVIRLSRVTDATTSPERQLESCQQLCAQRDWDVVGVAEDLDVSGAVDPFDRKRRPNLARWLAFEEQPFDVIVAYRVDRLTRSIRHLQQLVHWAEDHKKLVVSATEAHFDTTTPFAAVVIALMGTVAQMELEAIKERSRSAAHFNIRAGKYRGSLPPWGYLPARVDGEWRLVPDPVQRERILEVYHRVVDNHEPLHLVAHDLNRRGVLSPKDYFAQLQGREPQGRKWSATALKRSMISGAMLGYATLSGKTVRDDDGAPLVRAEPILTREQQEALRAELVKTSRAKPAVSTPSLLLRVLFCAVCGEPAYKFAGGGRKHPRYRCRSMGFPKHCGNGTVAMAEWDAFCEEQVLNLLGDAERLERVWVAGSDSAAELAEVNAELVDLTSLIGSPAYRAGSPQREALDARIAALAARQEELEGLEARPSGWEWRGTGQRFGDWWREQDTAAKNAWLRSMNVRLTFDVRGGLTRTIDFGDLQEYEQRLRLGSAVERLHTGMP

SEQ ID NO: 10644 - protein, 500 aa, synthetic construct
MRALVVIRLSRVTDATTSPERQLESCQQLCAQRGWDVVGVAEDLDVSGAVDPFDRKRRPNLARWLAFEEQPFDVIVAYRVDRLTRSTRHLQQLVHWAEDHKKLVVSATEAHFDTTTPFAAVVIALMGTVAQMELEAIKERSRSAAHFNIRAGKYRGSLPPWGYLPARVDGEWRLVPDPVQRERILEVYHRVVDNHEPLHLVAHDLNRRGVLSPKDYFAQLQGREPQGRKWSATALKRSMISEAMLGYATLNGKTVRNDDGAPLVRAEPILTREQLEALRAELVKTSRAKPAVSTPSLLLRVLFCAVCGEPAYKFAGGGRKHPRYRCRSMGFPKHCGNGTVAMAEWDAFCEEQVLDLLGDAERLEKVWVAGSDSAVELAEVNAELVDLTSLICSPAYRAGSPQREALDARIAALAARQEELEGLEARPPGWEWRETGQRFGDWWCEQDTAAKNAWLRSMNVRLTFDVRGGLTRTIDFGDLREYEQHLRLGSVVERLHTGMS

SEQ ID NO: 10645 - protein, 500 aa, synthetic construct
MRALVVIRLSRVTDATTSPERQLESCQQLCAQRGWDVVGVAEDLDVSGAVDPFDHKRRPNLARWLAFEEQPFDVIVAYRVDRLTRSTRHLQQLVHWAEDHKKLVVSATEAHFDTTTPFAAVVIALMGTVAQMELEAIKERSRSAAHFNIRAGKYRGSLPPWGYLPTRVDGEWRLAPDPVQRERILEVYHRVVDNHEPLHLVAHDLNRRGVLSPKDYFAQLQGREPQGRKWSATALKRSMTSEAMLGYATLNGKTVRDDDGAPLVRAEPILTREQLEALRAELVKTSRAKPAVSTPSLLLRVLFCAVCGKPAYKFSGGGRKHPRYRCRSMGFPKHCGNGTVAMAEWDAFCEEQVLDLLGDAERLEKVWVAGSDSAVELAEVNAELVDLTSLIGSPAYRAGSPQREALDARIAALAARQEELEGLEARPSGWEWRETGQRFGDWWREQDTAAKNTWLRSMNVRLTFDVRGGLTRTIDFGDLQEYEQHLRLGSVVERLHTGMP

SEQ ID NO: 10646 - protein, 500 aa, synthetic construct
MRALVVIRLSRVTDATTSPERQLESCQQLCAQRGWDVVGIAEDLDVSGAVDPFDRKRRPNLARWLAFEEQPFDVIVAYRIDRLTRSIRHLQQLVHWAEDHKKLVVSATEAHFDTTTPFAAVVIALMGTVAQMELEAIKERNRSAAHFNIRAGKYRGSLPPWGYLPTRVDGEWRLVPDPVQRERILEVYRRVVDNHEPLHLVAHDLNRRGVLSPRDYFAQLRGREPQGRKWSATALKRSMISEAMLGYATLNGKTVRDDDGAPLVRAEPILTREQLEALRAELVKTSRAKPAVSTPSLLLRVLFCAVCGEPAYKFAGGGRKHPRYRCRSMGFPKHCGNGTVAMAEWDAFCEEQVLDLLGDAERLEKVWVAGSDSAVELAEVNAELVDLTGSIGSPAYRAGSPQREALDARIAALAARQEELEGLEARPSGWEWRETGQRFRDWWREQDTAAKNTWLRSMNVRLTFDVRGGLTRTIDFGDLQEYVQHLRLGSVVERLHTGMS

SEQ ID NO: 10647 - protein, 500 aa, synthetic construct
MRALVVIRLSRVTDATTSPERQLESCQQLCAQRGWDVVGVAEDLDVSGAVDPFDRKRRPNLARWLAFEEQPFDVIVAYRVDRLARSIRHLQQLVHWAEDHKKLVVSATEAHFDTTTPFAAVVIALMGTVAQMELEAIKERNRSAAHFNIRAGKYRGSLPPWGYLPTRVDGEWRLVPDPVQRERILEVYRRVVDNHEPLHLVAHDLNRRGVLSPKDYFAQLQGREPQGHKWSATALKRSMVSEAMLGYATLNGKTVRDDDGAPLVRAEPILTREQREALRAELVKTSRAKPAVSTPSLLLRVLFCAVCGEPAYKFTGGGRKHPRYRCRSMGFPKHCGNGTVAMVEWDAFCEEQVLDLLGDAERLEKVWVAGSDSAVELAEVNAELVDLTSLIGSPAYRAGSPQREALDARIAALAARQEELEGLEARPSGWEWRETGQRFGDWWREQDTAAKNSWLRSMNVRLTFDVRGGLTRTIDFGDLQEYEQHLRLGSVVERLHTGMS

SEQ ID NO: 10648 - protein, 500 aa, synthetic construct
MRALVVIRLSRVTDATTSPERQLESCQQLCAQRGWDVVGVAEDLDVSGAVDPFDRKRRPNLARWLAFKEQPFDVIVAYRVDRLTRSIRHLQQLVHWAEDHKKLVVSATEAHFDTTTPFAAVVIALMGTVAQMELEAIKERNRSAAHFNIRAGKYRGSLPPWGYLPTRVDGEWRLVPDPVQRERILEVYHRVVVNHEPLHLVAHDLNRRGVLSPRDYFAQLRGREPQGREWSATALKRSMISEAMLGYATLSGKTVRDGDGAPLVRAEPILTREQQEALRAELVKTSRAKPAVSTPSLLLRVLFCAVCGEPAYKFAGGGRKHPRYRCRSMGFPKHCGNGTVAMAEWDAFCEEQVLDLLGDAERLEKVWVAGSDSAVELAEVNAELVDLTSLVGSPAYRTGSPQREALDARIAALAARQEELEGLEARPSGWEWRETGQRFGDWWREQDTAAKNTWLRSMNVRLTFDVRGGLTRTIDFGDLQEYEQHLRLGSVVEHLHTGMS

SEQ ID NO: 10649 - protein, 500 aa, synthetic construct
MRALVVIRLSRVTDATTSPERQLESCRQLCAQRGWDVVGVAEDLDVSGAVDPFDRKRRPNLARWLAFEEHPFDVIVAYRVDRLTRSTRHLQQLVHWAEDHKKLVVSATEAHFDTTTPFAAVVIALMGTVAQMELEAIKERSRSATHFNIRAGKYRGSLPPWGYLPARVDGKWRLVPDPVQRERILEVYHRVVDNHEPLHLVAHDLNRRGVLSPKDYFAQLRGREPQGRKWSATALKRSMTSEAMLGHATLNGKTVRDDDGAPLVRAEPILTREQLEALRAELVKTSRAKPAVSTPSLLLRVLFCAVCGEPAYKFTGGGRKHPRYRCRSMGFPKHCGNGTVAMAEWDAFCEEQVLGLLGDAERLEKVWVAGSDSAVELAEVNAELVDLTSLIGSPAYRAGSPQREALDARIAALAARQGELEGLEARPSGWEWRETGQRFGDWWREQDTAAKNTWLRSMNVRLTFDVRGGLTRTIDFGDLREYEQHLRLGSVVGRLHTGTS

SEQ ID NO: 10650 - protein, 500 aa, synthetic construct
MRALVVIRLSRVTETTTSPERQLESCQQLCAQRGWDVVGVAEDLDVSGAVDLFDRKRRPNLARWLAFEEQPFDVIVAYRVDRLTRSIRHLQQLVHWAEDHKKLVVSATEAHFDTTTPFAAVVIALMGTVAQMELEAIKERNRSAAHFNIRAGKYRGSLPPWGYLPTRVDGEWRLAPDPVQRERILEVYHRVVDNHEPLHLVAHDLNRRGVLSPKDYFAQLQGREPQGRKWSATALKRSMISEAMLGHATLNGKTVRDDDGAPLVRAEPILTREQQEALRAELVKTSRAKPAVSTPSLLLRVLFCAVCGEPAYKFSGGGRKHPRYRCRSMGFPKHCGNGTVAMAEWDAFCEEQVLGLLGDAERLEKVWVAGSDSAVELAEVNAELVDLTSLIGSPAYRAGSPQREALDTRIAALAARQEELEGLGARPSGWEWRETGQRLGDWWREQDTAAKNTWLRSMNVRLTFDVRGGLTRTIDFGDLQEYEQHLRLGSVVERLHTGMS

SEQ ID NO: 10651 - protein, 500 aa, synthetic construct
MRALVVIRLSRVTDATTSPERQLESCRQLCAQRGWNVVGVAEDLDVSGAVDPFDRKRRPNLARWLAFEEQPFDVIVAYRVDRLTRSTRHLQQLVHWAEDHKKLVVSATEAHFDTTTPFAAVVIALMGTVAQMELEAIKERNRSAAHFNIRAGKYRGSLPPWGYLPTRVNGEWRLAPDPVQRERILEVYHRVVDNHEPLHLVAHDLNRRGVLSPKDYFAQLQGREPQGRKWSATALKRSMISEAMLGYATLNGKTVRDGNGAPLVRAEPILTREQQEALRAELVKTSRAEPAVSTPSLLLRVLFCAVCGEPAYRFAGGGRKHPRYRCRSMGFPKHCGNGTVAMVEWDAFCEKQVLDLLGDAERLEKVWVAGSDSAVELAEVNAELVDLTSLIGSPAYRAGSPQRKALDARIAALAARQEELEGLEARPSGWEWRETGQRFGDWWREQDTAAKNTWLRSMNVRLTFDVRGGLTRTIDFGDLQEYEQHLRLGSVVERLHTGMS

SEQ ID NO: 10652 - protein, 500 aa, synthetic construct
MRALVVIRLSRVTDATTSPERQLESCQQLCAQRGWDVVGVAEDLDVSGAVNPFDRKRRPNLARWLAFEEQPFDVIVAYRVDRLARSIRHLQQLVHWAEDHKKLVVSATEAHFDTTTPFAAVVIALMGTVAQMELEAIKERSRSAAHFNIRAGKYRGSLPPWGYLPTRVDGEWRLVPDPVQRERILEVYRRVVDNHEPLHLVAHDLNRRGILSPKDYFAQLRGREPQGRKWSATALKRSMTSEAMLGYATLNGKTVRNDDGAPLVRAEPILTHEQLEALRAELVKTSRAKPAVSTPSLLLRVLFCAVCGEPAYRFAGGGRKHPRYRCRSMGFPKHCGNGTVAMAEWDAFCEEQVLDLLGDAERLEKVWVAGSDSAVELAEVNAELVDLTSLIGSPAYRAGSPQREALDARIAALAARQEELEGLEARPSGWEWRETGQRFGDWWREQDTAAKNAWLRSMNVRLTFDVRGGLTRTIDFGDLQEYEQHLRLGSVVERLHTGMS

SEQ ID NO: 10653 - protein, 500 aa, synthetic construct
MRALVVIRLSRVTDATTSPERQLESCQQLCAQRGWDVVGVAEDLDVSGAVDPFDRKRRPNLARWLAFEEQPFDVIVAYRVDRLARSIRHLQQLVHWAEDHKKLVVSATEAHFDTTTPFAAVVIALMGTVAQMELEAIKERSRSAAHFNIRAGKYRGSLPPWGYLPTRVDGEWRLVPDPVQRERILEVYHRVVDNHEPLHLVAHDLNRRGVLSPRDYFAQLRGREPQGRKWSATALKRSMISEAMLGYATLNGRTVRDDDGAPLVRAEPILTREQLEALRAELVKTSRAKPAVSTPSLLLRVLFCAVCGEPAYKFAGGGRKHPRYRCRSMGFPKHCGNGTVATAEWDAFCEEQVLDLLGDTERLEKVWVAGSDSAIELAEVNAELVDLTSLIGSPAYRAGSPQREALDARIAALAARQEELEGLEARPSGWEWRETGQRFGDWWREQDTAAKNTWLRSMNVRLTFDVRGGLTRTIDFGDLQEYEQHLRSGSVVERLHTGMS

SEQ ID NO: 10654 - protein, 500 aa, synthetic construct
MRALVVIRLSRVTDATTSPERQLESCQQLCAQRGWDVVGVAEDLDVSGTVDPFDRKRRPNLARWLAFEEQPFDVIVAYRVDRLTRSVRHLQQLVHWAEDHKKLVVSATEAHFDTTTPFAAVVIALMGTVAQMELEAIKERNRSAAHFNIRAGKYRGSLPPWGYLPTRVDGEWRLVPDPVQRERILEVYHRVVDDHEPLHLVAHDLNRRGVLSPKDYFAQLRGREPQGRKWSATALKRSMISVAMLGYATLNGETVRDDDGAPLVRAEPILTREQREALCAELVKTSRAKPAVSTPSLLLRVLFCAVCGEPAYRFVGGGRKHPRYRCRSMGFPKHCGNGTVAMAEWDAFCEEQVLDLLGDAERLEKVWVAGSDSAVELAEVSAELVDLTSLIGSPAYRAGSPQREALDARIAALAARQEELEGLEARPSGWEWRGTGQRFGDWWREQDTAAKNTWLRSMNVRLTFDVRGGLTRTIDFGDLLEYEQHLRLGSVVERLHTGLS

SEQ ID NO: 10655 - protein, 500 aa, synthetic construct
MRALVVIRLSRVTEATTSPERQLESCQQLCAQRGWDVVGVAEDLDVSGAVDPFDRKRRPNLARWLAYEEQPFDVIVAYRVDRLTRSVRHLQQLVHWAEDHEKLVVSATEAHFDTTTPFAAVVIALMGTVAQMELEAIKERSRSAAHFNIRAGKYRGSLPPWGYLPTRVDGEWRLVPDPVQRERILEAYRRVVDNHEPLHLVAHDLNRRGVLSPKDYFAQLRGREPQGRKWSATALKRSMISEAMLGYATLSGKTVRDDDGAPLVRAEPILTRGQLEALRAELVKTSRAKPAVSTPSLLLRVLFCAVCGEPAYKFAGGGRKHPRYRCRSMGFPKHCGNGTVAMAEWDAFCEEQVLGLLGDVERLEKVWVAGSDSAVKLAEVNAELVDLTGLIGSPAYRAGSPQREALDARIAALAARQEELEGLEARPSGWEWRGTGQRFGDWWREQDTAAKNTWLRSMNVRLTFDVRGGLTRTIDFGDLQEYEQHLRLGSVVERLHTGMS

SEQ ID NO: 10656 - protein, 500 aa, synthetic construct
MRALVVIRLSRVTDATTSPERQLESCQQLCAQRGWDVVGVAEDLDVSGAVDPFDRKRRPNLARWLAFEEQPFDVVVAYRVDRLARSIRHLQQLVHWAEDHKKLVVSATEAHFDTTTPFAAVVIALMGTVAQMELEAIKERSRSAAHFNIRAGKYRGSLPPWGYLPTRVDGEWRLVPDPVQHERILEVYHRVVDNHEPLHLVAHDLNRRGVLSPKDYFAQLQGREPQGRKWSATALKRSMISEAMLGYATLNGKTVRDDDGAPLVRAEPILTREQQEALRAELVKTSRAKPVVSTPSLLLRVLFCAVCGEPAYKFAGGGRKHSRYRCRSMGFPKHCGNGTVAMAEWDAFCEEQVLDLLGDAERLEKVWVAGSDSAAELAEVNAELVDLTSLIGSPAYRAGSPQREALDARIAALAARQEELEGLEARPSGWEWRETGQRFGDWWREQDTAAKNTWLRSMNVRLTFDVRGGLTRTIDFGDLQEYEQHLRLGSAVERLHTGMP

SEQ ID NO: 10657 - protein, 500 aa, synthetic construct
MRALVVIRLSRVTDATTSPERQLESCQQLCARRGWDVVGVAEDLDVSGAVNPFDRKRRPNLARWLAFEEQPFDVIVAYRVDRLTRSTRHLQQLVHWAEDHKKLVVSATEAHFDTTTPFAAVVIALMGTVAQMELEAIKERSRSAAHFNIRAGKYRGSLPPWGYLPTRVDGEWRLVPDPVQRERILEVYHRVVDNHEPLHLVAHDLNRRGVLSPKDYFAQLRGREPQGRKWSATALKRSMISEAMLGYATLNGKTVRDDDGAPLVRAEPILTREQQEALRAELVKTSRAKPAVSTPSLLLRVLFCAVCGEPAYKFAGGGRKHPRYRCRSMGFPKHCGNGTVAMAEWDAFCEEQVLNLLGDAERLEKVWVAGSDSAVELAEVNAELVDLTSLIGSPAYRAGSTQREALDARIAALAARQEELEGLEARPSGWEWHETGQRFGDWWREQDTAAKNTWLRTMNVRLTYDVRGGLTRTIDFGDLQEYEQHLRSGSVVERLHTGMS

SEQ ID NO: 10658 - protein, 500 aa, synthetic construct
MHALVVIRLSRVTDATTSPERQLESCQQLCAQRGWDVVGVAEDLDVSGAVDPFDRKRRPNLARWLAFEERPFDVIVAHRVDRLTRSIRHLQQLVHWAEDHKKLVVSATEAHFDTTTPFAAVVIALMGTVAQMELEAIKERNRSAAHFNIRAGKYRGSLPPWGYLPTRVDGVWRLVPDPVQRERILEVYHRVVDNHEPLHLVAHDLNRRGVLSPKDYFAQLRGREPQGRKWSATALKRSMISVAMLGYATLNGKTVRDDDGAPLVRAEPILTREQQEALRAELVKTSRAKPAVSTPSLLLRVLFCAVCGEPAYKFAGGGRKHPRYRCRSMGFPKHCGNGTVAMAEWDAFCEEQVLNLLGDAERLEKVWVAGSDSAVELAEVNAELVDLTSLIGSPAYRAGSTQREALDARIAALAARQEELEGLEARPSGWEWRGTGQRFGDWWREQDTAAKNTWLRTMNVRLTYDVRGGLTRTIDFGDLQEYEQHLRSGSVVERLHTGMS

SEQ ID NO: 10659 - protein, 500 aa, synthetic construct
MRALVVIRLSRVTDATTSPERQLESCQQLCAQRGWDVVGVAEDLDVSGAVDPFDRKRRPNLARWLAFEEQPFDVIVAYRVDRLTRSTRHLQQLVHWAEDHKKLVVSATEAHFDTTTPFAAVVIALMGTVAQMELEAIKERNRSAAHFNIRAGKYRGSLPPWGYLPTRVNGEWRLVPDPVQRERILEVYHRVVDNHEPLHLVAHDLNRRGVLSPRDYFAQLRGREPQGRKWSATALKRSMISEAMLGYATLNGKTVRDDDGAPLVRAEPILTREQLEAIRAELVKTSRAKPAVSTQSLLLRVLFCAVCGEPAYKFAGGGRKHPRYRCRSMGFPKHCGNGTVAMAEWDAFCEEQVLNLLGGAERLEKVWVAGSDSAVELAEVNAELVDLTSLIGSPAYRAGSPQRESLDARIAALAARQEELEGLEARPSGWEWRETGQRFGDWWREQDTAAKNTWLRSMNVRLTFDVRGGLTRTIDFGDLQEYEQHLRLGSVVERLHTGMS

SEQ ID NO: 10660 - protein, 500 aa, synthetic construct
MRALVVIRLSRVTDATTSPERQLESCQQLCAQRGWDVVGVAEDLDVSGAVDPFDRKRRPNLARWLAFEEQPFDVIVAYRVDRLTRSTRHLQQLVHWAEDHKKLVVSATEAHFDTTTPFAAVVIALMGTVAQMELEAIKERNRSAAHFNIRAGKYRGSLPPWGYLPTRVDGEWRLAPDPVQRERILEVYHRVVDNHDPLHLVVHDLNRRGVLSPKDYFAQLRGREPQGRKWSATALKRSMTSEAMLGYATLNGKTVRNDDGAPLVRAEPILTREQLEALRAELAKTSRAKPAVSTPSLLLRVLFCAVCGEPAYKFSGGGRKHPRYRCRSMGFPKHCGNGTVAMVEWDAFCEEQVLDLLGDAERLEKVWVVGSDSAVELAEVNAELVDLTSLIGSPAYRAGSPQREALDARIAALAARQEELEGLEARPSGWEWRETGQRFGDWWREQDTAAKNTWLRSMNVRLTFDVRGGLTRTIDFGDLQEYEQHLRLGSVVERLHTGMS

SEQ ID NO: 10661 - protein, 500 aa, synthetic construct
MRALVVIRLSRVTDATTSPERQLESCQQLCAQRGWDVVGVAEDLDVSGAVDPFDRKRRPNLARWLAFEEQPFDVIVAYRVDRLTRSVRHLQQLVHWAEDHKKLVVSATEAHFDTTTPFAAVVIALMGTVAQMELEAIKERSRSAAHFNIRAGKYRGSLPPWGYLPARVDGEWRLVPDPVQRERILEVYHRVVDNHEPLHLVAHDLNRRGVLSPKDYFAQLRGREPQGRKWSATALKRSMISVAMLGYATLCGKTVRDDDGAPLVRAEPILTREQLEALRAELVKTSRAKPAVSTPSLLLRVLFCAVCGEPAYKFAGGGRKHPRYRCRSMGFPKHCGNGTVAMAEWDAFCEEQVLNLLGDAERLEKVWVAGSDSAVELAEVNKELVDLTSLIGSPAYRAGSPQREALDARIAALAARQEELEGLEARPSGWEWRGTGQRFGDWWRELDTAAKNTWLRSMNVRLTFDVRDGLTRTINFGDLQEYEQHLRLGSVVERSHTGMS

SEQ ID NO: 10662 - protein, 500 aa, synthetic construct
MRALVVIRLSRVTDATTSPERQLESCQQLCAQRGWDVVGVAEDLDVSGAVDPFDRKRRPNLARWLAFEERPFDAIVAYRVDRLARSVRHLQQLVHWAKDHKKLVVSATEAHFDTTTPFAAVVIALMGTVAQMELEAIKERSRSAAHFNIRAGKYRGSLPPWGYLPTRVDGEWRLVPDPVQRERILEVYHRVVDNHEPLHLVAHDLNRRGVLSPKDYFAQLRGREPQGRKWSATALKRSMISEAMLGYATLNGKTVRDDDGAPLVRAEPILTREQLEALRAELVKTSRVKPAVSTPSLLLRVLFCAVCGEPAYKFAGGGRKHPRYRCRSMGFPKHCGNGTVAMAEWDAFCEEQVLNLLGDAERLEKVWVAGSDSAVELAEVNAELVDLTSLIGSPAYRAGSPQREALGARIAALAARQEELEGLEARPSGWEWRETGKRFGDWWREQDTAAKNTWLRSMNVRLTFDVRGGLTRTVDFGDLREYEQHLRLGSVVERLHTGMS

SEQ ID NO: 10663 - protein, 500 aa, synthetic construct
MRALVIIRLSRVTEATTSPERQLETCQQLCAQRGWDVVGVAEDLDVSGAVDPFDRKRRPNLARWLAFEEQPFDVIVAYRVDRLARSIRHLQQLVHWAEDHKKLVVSATEAHFDTTTPFAAVVIALMGTVAQMELEAIKERNRSAAHFNIRAGKYRGSLPPWGYLPTRVDGEWRLAPDPVQRERILEVYHRVVDDHEPLHLVAHDLNRRGVLSPRDYFAQLQGREPQGRKWSATALKRSMISEAMLGYATLNGKTVRDDDGAPLVRAEPILTRGQLEALRAELVKTSRGKPAVSTPSLLLRVLFCAVCGEPAYKFAGGGRKHPRYRCRSMGFPKHCGNGTVAMAEWDAFCEEQVLDLLGDAERLEKVWVAGSDSAVELAEVNAELVDLTSLIGSPAYRAGSPQREALDARIAALAARQEELEGLEARPSGWEWRETGQRFGDWWREQDTAAKNTWLRSMNVRLTFDVRGGLTRTIDFGDLQEYEQHLRLGSVVERLHTGMS

SEQ ID NO: 10664 - protein, 500 aa, synthetic construct
MRALVVIRLSRVTDATTSPERQLGSCQQLCAQRGWDVVGVAEDLDVSGAVEPFDRKRRPNLARWLAFEEQPFDVIVAYRVDRLARSIRHLQQLVHWAEDHKKLVVSATEAHFDTTTPFAAVVIALMGTVAQMELEAIKERSRSAAHFNIRAGKYRGSLPPWGYLPSRVDGEWRLVPDPVQRERILEVYHRVVDNHEPLHLVAHDLNRRGVLSPKDYFAQLQGREPQGRKWSATALKRSMISEAMLGYATLNGKTVRDDDGAPLVRAEPILTRVQLEALRAELVKTSRAKPAVSTPSLLLRVLFCAVCGEPAYKFAGGGRKHPRYRCRSMGFPKHCGNGTVAMAEWDAFCEEQVLDLLGDAERLEKVWVAGSDSAVELAEVNAELVDLTSLIGSPAYRAGSPQREALDARIAALAARQEELEGLEARPSGWEWRETGQCFGDWWREQDTAAKNTWLRSMNVRLTFDVRGGLTRTIDFGDLQEYEQHLRLGSVVERLHTKMS

SEQ ID NO: 10665 - protein, 500 aa, synthetic construct
MRVLVVIRLSRVTDATTSPERQLESCQQLCAQRGWDVVGVAEDLDVSGAVDPFDRKRRPNLARWLAFEEQPFDVIVAYRVDRLTRSTRHLQQLVHWAEDHKKLVVSATEAHFDTTTPFAAVVIALMGTVAQMELEAIKERSRSAAHFNIRAGKYRGSLPPWGYLPTRVDGEWRLVPDPVQRERILEVYHRVVDNHEPLHLVAHDLNRRGVLSPKDYFAQLRGREPQGRKWSATALKRSMISEAMLGYATLNGKTVRDDDGAPLVRAEPILTREQQEALRAELVKTSRAKPAVSTPSLLLRVLFCAVCGEPAYKFAGGGRKHPRYRCRSMGFPKHCGNGTVAMAEWDVFCEEQVLDLLGDAERLEKVWVAGSDSAVELAEVNAELVDLTSLIGSPAYRAGSPQREALDARIAALAARQEELEGLEARPSGWEWRETGQRFGDWWREQDTAAKNTWLRSMNVRLTFDVRGGLTRTIDFGDLQEYEQHLRLGSVVERLRTGMS

SEQ ID NO: 10666 - protein, 500 aa, synthetic construct
MRALVVIRLSRVTDATTSPERQLESCQQLCAQRGWDVVGVAEDLDVSGAVDPFDRKRRPNLARWLAFEEQPFDVIVAYRVDRLARSIRHLQQLVHWAEDHKKLVVSATEAHFDTTTPFAAVVIALMGTVAQMELEAIKERSRSAAHFNIRAGKYRGSLPPWGYLPTRVDGEWRLAPDPVQRERILEVYRRVVDNHEPLHLVAHDLNRRGVLSPRDYFAQLRGREPQGRKWSATALKRSMTSEAMLGYATLNGKTVRDDDGAPLVRAEPILTREQLEALRAELVKTSRAKPAVSTPSLLLRVLFCAVCGEPAYKFAGGGRKHPRYRCRSMGFPKHCGNGTVAMAEWDAFCEEQVLNLLGDAERLEKVWVAGSDSAVELAEVDAELVDLTSLTGSPAYRAGSPQREALDARIAALAARQEELEGLEARPSGWEWRGTGQRFGDWWREQDTAAKNTWLRSMNVRLTFDVRGGLTRTIDFGDLQEHEQHLRLSSVVERLHTGMS

SEQ ID NO: 10667 - protein, 500 aa, synthetic construct
MRALVVIRLSRVTDATTSPERQLESCQQLCAQRGWDVVGVAEDLDVSGAVDPFDRKRRPNLARWLAFEERPFDVIVAYRVDRLARSIRHLQQLVHWAEDHKKLVVSATEAHFDTTTPFAAVVIALMGTVAQMELEAIKERSRSAAHFNIRAGKYRGSLPPWGYLPTRVDGEWRLVPDPVQRERILEVYHRVVDNHEPLHLVAHDLNRRGVLSPKDYFAQLRGREPQGRKWSATALKRSMVSEAMLGYATLNGKTVRDDDGAPLVRAEPILTREQLEASRAELVKTSRAKPAVSTPSLLLRVLFCAVCGEPAYKFAGGGRKHPRYRCRSMGFPKHCGNGTVAMAEWDAFCEEQVLNLLGDAERLEKVWVAGSDSAVELAEVNAELVDLTSLIGSPAYRAGSPQREALDARIAALAARQEELEGLGARPSGWEWRETGQRFGDWWREQDTAAKNTWLRSMNVRLTFDVRGGLTRTIDFGDLQEYERHLRLGSVVERLHTGMS

SEQ ID NO: 10668 - protein, 500 aa, synthetic construct
MRALVVIRLSRVTDATTSPERQLESCQQLCAQRGWDVVGVAEDLDVSGAVDPFDRKRRPNLARWLAFEEQPFDVIVAYRVDRLTRSIRHLQQLVHWAEDHKKLVASATEAHFDTTTPFAAVTIALMGTVAQMELEAIKERSRSAAHFNIRAGKYRGSLPPWGYLPTRVDGEWRLAPDPVQRERILEVYHRVVDNHEPLHLVAHDLNRRGVLSPKDYFAQLRGREPQGRKWSATALKRSMTSEAMLGYATLNGKTVRGDDGAPLVRAEPILTREQLEALRAELVKTSRAKPAVSTPSLLLRVLFCAVCGEPAYKFAGGGRKHPRYRCRSMGFPKHCGNGTVAMAEWDAFCEEQVLDLLGDAERLEKVWVAGSDSAVELAEVNAELVDLTSLIGSPAYHAGSPQREALDARIAALAARQEELEGLEVRPSGWEWRETGQRFGDWWREQDTAAKNTWLRSMNVRLTFDVRGGLTRTIDFGDLQEYEQHSRLGSVVERSHTGMS

SEQ ID NO: 10669 - protein, 500 aa, synthetic construct
MRALVVIRLSRVTDATTSPERQLESCRQLCAQRGWDVVGVAEDLDVSGAVDPFDRKRRPNLARWLAFEERPFDVIVAYRVDRLTRSIRHLQQLVHWAEDHKKLVVSATEAHFDTTTPFAAVVIALMGTVAQMELEAIKERSRSAAHFNIRAGKYRGSLPPWGYLPTRVDGEWRLAPDPVQRERILEVYHRVVDNHEPLHLVAHDLNRRGVISPRDYFAQLQGREPQGRKWSATALKRSMTSEAMLGYATLNGKTVRDDDGAPLVRAEPILTREQLEALRAELVKTSRAKPAVSTPSLLLRVLFCAVCGEPAYKFSGGGRKHPRYRCRSMGFPKHCGNGTVAMAEWDAFCEEQVLDLLGDAERLEKVWVAGSDSAVELAEVNAELVDLTSLIGSPAYRAGSPQREALDARIAALAARQEELEGLEARPSGWEWRRTGQRLGDWWREQDTAAKNSWLRSMNVRLTFDVRGGLTRTIDFGDLLEYEQHLRLGSVVERLHTGMP

SEQ ID NO: 10670 - protein, 500 aa, synthetic construct
MRALVVIRLSRVTDATTSPERQLESCQQLCAQRGWDVVGVAEDLDVSGAVDPFDRKRRPNLARWLAFEEQPFDVIVAYRVDRLARSIRHLQQLVHWAEDRKKLVVSATEAHFDTTTPFAAVVIALMGTVAQMELEAIKERSRSAAHFNIRAGKYRGSLPPWGYLPARVDGVWRLVPDPAQRERILEVYHRVVNNHEPLHLVAHDLNRRGVLSPKDYFAQLQGREPQGRKWSATALKRSMISEAMLGYATLNGKTVRDDDGAPLVRAEPILTRGQLEALRAELVKTSRAKPAVSTPSLLLRVLFCAVCGEPAYKFAGGGRKHPRYRCRSMGFPKHCGNGTVAMAEWDAFCEEQVLNLLGDAERLEKVWVAGSDSAVEHAEVNAELVDLTSLIGSPAYRAGSPQREALDARIAALAARQEELEGLEARPSGWEWRETGQRFGDWWREQDTAAKNTWLRSMNVRLTFDVRGGLTRTIDFGDLQEYAQHLRLGSVVERLRTGMS

SEQ ID NO: 10671 - protein, 500 aa, synthetic construct
MRALVVIRLSRVTDATTSPERQLESCQQLCAQRGWDVVGVAEDLGVSGAVDPFDRKRRPNLARWLAFEEQPFDVIVAYRVDRLARSIRHLQQLVLWVEDHKKLVVSATEAHFDTTTPFAAVVIALMGTVAQMELEAIKERNRSAAHFNIRAGKYRGSLPPWGYLPTRVDGEWRLVPDPVQRERILEVYHRVVDNHEPLHLVAHDLNRRGVLSPKDYFAQLRGREPQGRKWSATALKRSMISEAMLGYATLNGKTVRDDDGAPLVRAEPILTREQLEALRAELVRTSRAKPAVSTPSLLLRVLFCAVCGEPAYKFAGGGRKHPRYRCRSMGFPKHCGNGTVAMAEWDAFCEEQVLGLLGDAERLEKVWVAGSDSAVKLAEVNAELVDLTGLVGSPAYRAGSPQREALDARIAALAARQEELEGLEARPSGWEWRGTGQRFGDWWREQDTAAKNTWLRSMNVRLTFDVRGGLTRTIDFGDLQEYEQHLRLGSVVERLHTGMS

SEQ ID NO: 10672 - protein, 500 aa, synthetic construct
MRALVVIRLSRVTDATTSPERQLESCQQLCAQRGWDVVGVAEDLDVSGAVDPFDRKRRPNLARWLAFEEQPFDVIVAYRVDRLARSIRHLQQLVHWAEDHKKLVVSATEAHFDTTTPFAAVVIALMGTVAQMELEAIKERNRSAAHFNIRAGKYRGSLPPWGYLPTRVDGEWRLVPDPVQRERILEVYHRVVDNHESLHLVAHDLNRRGVLSPKDYFAQLRGREPQGRKWSATALKRSMISEAMLGYATLNGKTVRDGDGAPLVRAEPILTREQLEALRAVLVKTSRAKPAVSTPSLLLRVLFCAVCGEPAYKFAGGGRKHSRYRCRSMGFPKHCGNGTVAMAQWDAFCEEQVLNLLGDAERLEKVWVAGSDSAAELAEVNAELVDLTSLIGSPAYRAGSPQRETLDARIAALTARQEELEGLEARPSGWEWRETGQRFGDWWREQDTAAKNTWLRSMNVRLTFDVRGGLTRTIDFGELQEYEQHLRLGRVVERLHTGMS

SEQ ID NO: 10673 - protein, 500 aa, synthetic construct
MRALVVIRLSRVTDATTSPERQLESCQQLCAQRGWDVVGVAEDLDVSGAVDPFDRKRRPNLARWLAFEEQPFDVIVAYRVDRLTRSVRHLQQLVHWAEDHKKLVVSATEAHFDTTTPFAAVVIALMGTVAQMELEAIKERNRSAAHFNIRAGKYRGSLPPWGYLPTRVDGEWRLVPDPVQRERILEVYHRVVDNHEPLHLVAHDLNRRGVLSPKDYFAQLRGREPQGRKWSATALKRSMISEAMLGYATLNGKTVRDDDGAPLVRAEPILTREQREALRAELVKTSRAKPTVSTPSLLLRVLFCAVCGEPAYKFAGGGRKHPRYRCRSMGFPKHCGNGTVAMAEWDAFCEEQVLDLLGDVERLEKVWVAGSDSAVELAEVNAELVDLTSLIGSPAYRVGSPQREALDARVAALAARQEELEGLEARPSGWEWRETGQRLGDWWREQDTAAKNTWLRSMNVRLTFDVRGGLTRTIDFGDLQEYEQHLRLGSVVERLHTGMS

SEQ ID NO: 10674 - protein, 500 aa, synthetic construct
MRALVVIRLSRVTDATTSPERQLESCQQLCTQRGWDVVGVAEDLDVSGAVDPFDRKRRPSLARWLAFEEQPFDVIVAYRVDRLARSIRHLQQLVHWAEDHKKLVVSATEAHFDTTTPFAAVVIALMGTVAQMELEAIKERSRSAAHFNIRAGKYRGSLPPWGYLPARVDGEWRLAPDPVQRERILEVYHRVVDNHEPLHLVAHDLNRRGVLSPKDYFAQLQGREPQGRKWSATALKRSMISEAMLGYATLNGKTVRDDDGAPLVRAEPILTRGQLEALRAELVKTSRAKPAVSTPSLLLRVLFCAVCGEPAYKFAGGERKHSRYRCRSMGFPKHCGNGTVAMAEWDAFCEEQVLDLLGDAERLEKVWVAGSDSAVELAEVNAELVDLTSLIGSPAYRAGSPQREVLDARIAALAARQEELEGLEARPSGWEWRETGQRFGDWWREQDTAAKNTWLRSMNVRLTFDVRGGLTRTIDFGDLQEYEQHLRLGSMVERLHTGMS

SEQ ID NO: 10675 - protein, 500 aa, synthetic construct
MRALVVIRLSRVTDATTSPERQLESCQQLCAQRGWDVVGVAEDLDVSGAVDPFDRKRRPNLARWLAFEEQPFDVIVAYRVDRLTRSIRHLQQLVHWAEDHKKLVVSATEAHFDTTTPFAAVVIALMGTVAQMELEAIKERNRSAAHFNIRAGKYRGSLPPWGYLPARVDGEWRLVPDPVQRERILEVYHRVVDDHEPLHLVAHDLNRRGVLSPRDYFAQLQGREPQGRKWSATALKRSMISEAMLGHATLNGKTVRNDDGAPLVRAEPILTREQLGALRAELVKTSRAKPAVSTPSLLLRVLFCAVCGEPAYKFAGGGRKHPRYRCRSMGFPKHCGNGTVAMAEWDAFCEEQVLNLLGDAERLEKVWVAGSDSAVELAEVNAELVDLTSLVGSPAYRAGSPQREALDARIAALAARQEELEGLEARPSGWEWRGTGQRFGDWWREQDTAAKNTWLRSMNVRLTFDVRGGLTRTIDFGDLQEYEQHLRLGSVVERLHTGVS

SEQ ID NO: 10676 - protein, 500 aa, synthetic construct
MRALVVIRLSRVTDATTSPERQLESCQQLCAQRGWDVVGVAEDLDVSGAVDPFDRKRRPNLARWLAFEEQPFDVIVAYRVDRLARSIRHLQQLVHWAEDHKKLVVSATEAHFDTTTPFAAVVIALMGTVAQMELEAIKERNRSAAHFNIRAGKYRGSLPPWGYLPTRVDGEWRLVPDPVQRERILEVYHRVVDNHEPLHSVAHDLNRRGVLSPKDYFAQLQGREPRGRKWSATALKRSMISEAMLGYATLSGKTVRDDDGAPLVRAEPILTREQQEALRAELVKTSRAKPAVSTPSLLLRVLFCAVCGEPAYKFAGGGRKHPRYRCRSMGFPKHCGNGTVAMAEWDTFCEEQVLDLLGDAVRLEKVWVAGSDSAVELAEVNAELVDLTSLIGSPAYRAGSPQREALDARIAALAARQGELEGLEARPSGWEWRETGQRFGDWWREQDTAAKNTWLRSMNVRLTFDVRGGLTRTIDFGDLQEYEQHLRLGSVVERLHTGMS

SEQ ID NO: 10677 - protein, 500 aa, synthetic construct
MRALVVIRLSRVTDATTSPERQLESCQQLCAQRGWDVVGVAEDLDVSGAVDPFDRKRRPNLARWLAFEEQPFDAIVAYRVDRLARSIRHLQQLVHWAEDHKKLVVSATEAHFDTTTPFAAVVIALMGTVAQMELEAIKERNRSAAHFNIRAGKYRGSLPPWGYLPTRVDGEWRLVPDPVQRERILEVYHRVVDNHEPLHLVAHDLNRRGVLSPRDYFAQLRGREPQGRKWSATALKRSMISEAMLGYATLNGKTVRDDDGAPLVRAEPILTREQLEALRAELVKTSRAKPAVSTPSLLLRVLFCAVCGEPAYKFAGGGRKHPRYRCRSMGFPKHCGNGTVTMAEWDAFCEKQVLDLLGDAERLEKVWVAGSDSAVELAEVNAELVDLTSLIGSPAYRAGSPQRGALDARIAALAARREELEGLEARPSGWEWRETGQRFGDWWHEQDTAAKNIWLRSMNVRLTFDVRGRLARTIDFGDLQEYEQHLRLGSAVERSHTGMS

SEQ ID NO: 10678 - protein, 500 aa, synthetic construct
MRALVVIRLSRVTDATTSPERQLESCQQLCAQRGWDVVGVAEDLDVSGAVDPFDRKRRPNLARWLALEEQPFDVIVAYRVDRLTRSVRHLQRLVHWAEDHKKLVVSATEAHFDTTTPFAAVVIALMGTVAQMELEAIKERSRSAAHFNIRAGKYRGSLPPWGYLPTRVDGEWRLVPDPVQRERILEVYRRVVDNHEPLHLVAHDLNRRGVLSPKDYFAQLRGREPQGRKWSATALKRSMISEAMLGHATLNGKTVRGDDGAPLVRAEPILTREQLEALRAELVKTSRAKPAVSTPSLLLRVLFCAVCGEPAYKFAGGGRKHPRYRCRSMGFPKHCGNGTVAMAEWDAFCEEQVLDLLGDAERLEKVWVAGSDSAVELAEVNAELVDLTSLIGSPAYRAGSPQREALDARIAALAARQEELEGLEARPSGWEWRETGQCFGDWWREQDTAAKNTWLRSMNVRLTFDVRGGLTRTIDFGDLQEYEQHTRLGSVVERLHTGMS

SEQ ID NO: 10679 - protein, 500 aa, synthetic construct
MRALVVIRLSRVTDATTSPERQLESCQQLCAQRGWDVVGVAEDLDVSGAVNPFDRKRRPNLARWLAFEERPFDVIVAYRVDRLTRSIRHLQQLVHWAEDHRKLVVSATEAHFDTTTPFAAVTIALMGTVAQMELEAIKERSRSAAHFNIRAGKYRGSLPPWGYLPTRVDGEWRLAPDPVQRERILEVYHRVVDNHEPLHLVAHDLNRRGVLSPKDYFAQLQGREPQGRKWSATALKRSMISEAMLGYATLNGKTVRDDDGAPLVRAEPILTREQQEALRAELVRTSRAKPAVSTPSLLLRVLFCAVCGEPAYKFLGGGRKHPRYRCRSMGFPKHCGNGTVAMAEWDAFCEEQVLNLLGDAERLEKVWVAGSDSAVELAEVNTELVDLTSLIGSPAYRAGSPQREALDARIAALAARQEELEGLEARPSGWEWRGTGQRFGDWWREQDTAAKNIWLRSMNVRLTFDVRGGLTRTIDFGDLQEYEQHLRLGSVVERLHTGMS

SEQ ID NO: 10680 - protein, 500 aa, synthetic construct
MRALVVIRLSRVTDATTSPERQLESCQQLCAQRGWDVVGVAEDLDVSGAVDPFDRRRRPNLARWLAFEEQPFDVIVAYRVDRLARSIRHLQQLVHWAEDHKKLVVSATEAHFDTTTPFAAVVIALMGTVAQMELEAIKERSRSAAHFNIRAGKYRGSLPPWGYLPARVDGEWRLVPDPVQRERILEVYHRVVDNHEPLHLVAHDLNRRGVLSPKDYFAQLRGREPQGRKWSATALKRSMISVAMLGYATLCGKTVRDDDGAPLARAEPILTREQLEALRAELVKTSRAKPAVSTPSLLLRVLFCAVCGEPAYKFAGGGRKHPRYRCRSMGFPKHCGNGTVAMAEWDAFCEEQVLNLLGDAERLEKVWVAGSDSAVELAEVNKELVDLTSLIGSPAYRAGSPQREALDARIAALAARQEELEGLEARPSGWEWRETGQRFGDWWREQDTAAKNTWLRSMNVRLTFDVRGGLTRAIDFGDLQEYEQHLRLGSVVERLHTGMS

SEQ ID NO: 10681 - protein, 500 aa, synthetic construct
MRALVVIRLSRVTDATTSPERQLESCQQLCAQRGWDVVGAAEDLDVSGAVDPFDRKRRPNLARWLAFEEQPFDVIVAYRVDRLTRSIRHLQQLVHWAEDHKKLVVSATEAHFDMTTPFAAVVIALMGTVAQMELEAIKERSRSAAHFNIRAGKYRGSLPPWGYLPTRVDGEWRLAPDPVQRERILEVYHRVVDDHEPLHLVAHDLNRRGVLSPKDYFAQLQGREPQGRKWSATALKRSMISVTMLGYATLNGKTVRDDDGAPLVRAEPILTREQLEALRAELVKTSRAKPAVSTPSLLLRVLFCAVCGEPAYKFAGGGRKHPRYRCRSMGFPKHCGNGTVAMAEWDAFCEEQVLSLLGDAERLEKVWVAGSDSAVELAEVNAELVDLTSLSGSPAYRAGSPQREALDARIAALAARQEELEGLEARLSGWEWRETGQRFRDWWREQDTAAKNTWLRSMNVRLTFDVRGGLTRTIDLGDLQEYEQHLRLGSVVERLHTGMS

SEQ ID NO: 10682 - protein, 500 aa, synthetic construct
MRALVVIRLSRVTDATTSPERQLESCQQLCAQRGWDVVGVAEDLDVSGAVDPFDRKRRPNLARWLAFEEQPFDVIVAYRVDRLARSIRHLQQLVHWAEDHKKLVASATEAHFDTTTPFAAVVIALMGTVAQMELEAIKERSRSAAHFNIRAGKYRGSLPPWGYLPARVDGEWRLVPDPVQRERILEVYHRVVDNHEPLHLVAHDLNRRGVLSPKDYFAQLRGREPQGRKWSATALKRSMISEAMLGYATLNGKTVRDDDGAPLVRAEPILTREQLEALRAELVKTSRAKPAVSTPSLLLRVLFCAVCGEPAYKFAGGGRKHPRYRCRSMGFPKHCGNGTVAMAEWDAFCEERVLGLLGDTERLEKVWVAGSDSAVELAEVNAELVDLTSLIGSPAYRAGSPQREALDARIAALAARQEELEGLEARPSGWVWRETGQRFGDWWREQDTAAKNTWLRSMNVRLTFDVRGGLTRTIDFGDLQEYEQHLRLGSVVERLHTGMS

SEQ ID NO: 10683 - protein, 500 aa, synthetic construct
MRALVVIRLSRVTDATTSPERQLESCQQLCAQRGWDVVGVAEDLDVSGAVDPFDRKRRPNLARWLAFEEQPFDVIVAYRVDRLTRSTRHLQQLVHWADDHKKLVVSATEAHFDTTTPFAAVVIALMGTVAQMELEAIKERSRSAAHFNIRAGKYRGSLPPWGYLPARVDGVWRLVPDPVQRERILEVYHRVVNNHEPLHLVAHDLNRHGVLSPKDYFAQLQGREPRGRKWSATALKRSMISEAMLGYATLNGKTVRDDDGAPLVRAEPILTREQQEALRAELVKTSRAKPAVSTPSLLLRVLFCAVCGEPAYKFAGGGRKHPRYRCRSMGFPKHCGNGTVAMAEWDAFCEEQVLGLLGDAERLEKVWVAGSDSAVELAEVNAELVDLTSLIGSPAYRAGSPQREALDARIAALAARQEELEGLEARPSGWEWRETGQRFGDWWRERDTAAKNTWLRSMNVRLTFDVRGGLTRTIDFGDLQEYERHSRLGSVVGRLHTGMS

SEQ ID NO: 10684 - protein, 500 aa, synthetic construct
MRALVVIRLSRVTDATTSPERQQGSCQQLCAQRGWDVVGVAEDLDVSGAVDPFDRKRRPNLARWLAFEEQPFDVIVAYRVDRLARSTRHLQQLVHWAEDHKKLVVSATEAHFDTTTPFAAVVIALMGTVAQMELEAIKERSRSAAHFNIRAGKYRGSLPPWGYLPTRVDGEWRLVPDPVQRERILEVYHRVVDNHEPLHLVAHDLNRRGVLSPKDYFAQLRGREPQGRKWSATALKRSMISEAMLGYATLNGKTVRDDDGALLVRAEPILTREQQEALRAELVKTSRAKPAVSTPSLLLRVLFCAVCGEPAYKFAGGGRKHPRYRCRSMGFPKHCGNGTVAMAEWDAFCEEQVLGLLGDAERLEKVWVAGSDSAVELAEVNAELVDLTSLIGSPAYRAGSPQREALDARIAALAARQEELEGLEARPSGWEWRETGQRFGDWWREQDTAAKNTWLRSMNIRLTFDVRGGLTRTIDFGDLQEYEQHLRLGSVVERLHTGMS

SEQ ID NO: 10685 - protein, 500 aa, synthetic construct
MRALVVIRLSRVTDATTSPERQLESCQQLCAQRGWDVVGVAEDLDVSGAVDPFDRKRRPNLARWLAFEEQPFDVIVAYRVDRLTRSIRHLQQLVHWAEDHKKLVVSATEAHFDTTTPFAAVVIALMGTVAQMELEAIKERSRSAAHFNIRAGKYRGSLPPWGYLPARVDGEWRLVPDPVQRERILEVYHRVVDDHEPLHLVAHDLNRRGVLSPKDYFAQLRGREPQGRKWSATALKRSMISEAMLGYATLNGKTVRDDDGAPLVRAEPILTREQQEALRAELVKTSRAKPAVSTPSLLLRVLFCAVCGEPAYKFAGGGRKHPRYRCRSMGFPKHCGNGTVAMAEWDAFCEEQVLDLLGDAERLEKVWVAGSDSAAELAEVNAELVDLTSLIGSPAYRAGSPQREALDARIAALAARQEELEGLEARPSGWEWRETGQRFGDWWREQDTAAKNTWLRSMNVRLTFDVRGGLTRTIDFGDLQEYEQHLRSGSVVERLHTGMS

SEQ ID NO: 10686 - protein, 500 aa, synthetic construct
MRALVVIRLSRVTDATTSPERQLESCQQLCAQRGWDVVGVAEDLDVSGAVDPFDRKRRPNLARWLAFEEQPFDVIVAYRVDRLARSIRHLQQLVHWAEDHKKLVVSATEAHFDTTTPFAAVVIALMGTVAQMELEAIKERNRSAAHFNIRAGKYRGSLPPWGYLPARVDGEWRLVPDPVQRERILEVYHRVVDNHEPLHLVAHDLNRRGVLSPKDYFAQLRGREPQGRKWSATALKRSMTSEAMLGYATLNGETVRDDDGAPLVRAEPILTRGQLEALRAELVKTSRAKPAVSTPSLLLRVLFCAVCGEPAYKFAGGGRKHPRYRCRSMGFPKHCGNGTVAMAEWDAFCEEQVLGLLGDAERLEKVWVAGSDSAIELAEVDAELVDLMSLIGSPAYRAGSPQREALDARIAALAARQEELEGLEARPSGWKWRETGQRFGDWWREQDTAAKNTWLRSMNVRLTFDVRGGPTRTIDFGDLQKYEQHLRLGSVVERLHPGTS

SEQ ID NO: 10687 - protein, 500 aa, synthetic construct
MRALVVIRLSRVTDATTSPERQLESCQQLCAQRGWGVVGVAEDLDVSGAVDPFDRKRRPSLARWLAFEEQPFDVIVAYRVDRLARSIRHLQQLVHWAEDHKKLVVSATEAHFDTTTPFAAVVIALMGTVAQMELEAIKERSRSAAHFNIRAGKYRGSLPPWGYLPTRVDGEWRLAPDPVQRERILEVYHRVVDDHEPLHSVAHDLNRRGVLSPRDYFAQLQGREPRGRKWSATALKRSMISEAMLGYVTLNGKTVRDDDGAPLVRAEPILTREQLEALRAELVKTSRAKPAVSTPSLLLRVLFCAVCGEPAYKFAGGGRKHPRYRCRSMGFPKHCGNGTVAMAEWDAFCEEQVLDLLRDAERLEKVWVAGSDSAVELAEVSAELVDLTSLIGSPAYRAGSPQREALDARIAALAARQEELEGLEARPSGWEWRGTGQRFGDWWREQDTAAKNTWLRSMNVRLTFDVRGGLTRTIDFGDLQEYEQHLRSGSVVERLHTGMS

SEQ ID NO: 10688 - protein, 500 aa, synthetic construct
MRALVVIRLSRVTDATTSPERQLESCQQLCAQRGWDVVGVAEDLDVSGAVDPFDHKRRPNLARWLAFEEQPFDVIVAYRVDRLTRSTRHLQQLVHWAEDHKKLVVSVTEAHFDTTTPFAAVVIALMGTVAQMELEAIKERSRSAAHFNIRAGKYRGSLPPWGYLPTRVDGEWRLAPDPVQRERILEVYHRVVDNHEPLHLVAHDLNRRGVLSPKDYFAQLQGREPQGRKWSATALKRSMTSEAMLGYATLNGKTVRDDDGAPLVRAEPILTREQLEALRAELVKTSRAKPAVSTPSLLLRVLFCAVCGEPAYKFSGGGRKHPRYRCRSMGFPKHCGNGTVAMAEWDAFCEEQVLDLLGDAERLEKVWVAGSDSAVELAEVNAELVDLTSLIGSPAYRAGSPQREALDARIAALAARQEELEGLEARPFGWEWRETGQRFGDWWREQDTAAKNTWLRSMNVRLTFDVRGGLTRTIDFGDLQEYEQHLRLGSVVERLHTGMP

SEQ ID NO: 10689 - protein, 500 aa, synthetic construct
MRALVVIRLSRVTDATTSPERQLESCQQLCAQRGWDVVGVAEDLDVSGAVDPFDRKRRPNLARWLAFEEQPFDVIVAYRVDRLARSIRHLQQLVHWAEDHKKLVVSATEAHFDTTTPFAAVVIALMGTVAQMELEAIKERSRSAAHFNIRAGKYRGSLPPWGYLPTRVDGEWRLAPDPVQRERILEVYHRVVDNHEPLHLVAHDLNRRGVLSPKDYFAQLQGREPQGRKWSATALKRSMISEAMLGYATLNGKIVRDDDGAPLVRAEPILTREQLEALRAELVKTSRAKPAVSTPSLLLRVLFCAVCGEPAYKFAGGGRKHLRYRCRSMGFPKHCGNGTVVMAEWDAFCEEQVLDLLGDAERLEKVWVAGSDSAVELAEVSAELVDLTSLIGSPAYRAGSPQREALDARIAALAARQEELEGLEARPSGWEWRETGQRFGDWWCEQDTAAKNAWLRSMNVRLTFDVRGGLTRTIDFGDLQEYEQHLRLGSVVERLHTGMS

SEQ ID NO: 10690 - protein, 500 aa, synthetic construct
MRALVVIRLSRVTDATTSPERQLESCQQLCAQRGWDVVGVAEDLDVSGAVDPFDRKRRPNLARWLAFEEQPFDAIVAYRVDRLTRSIRHLQQLVHWAEDHKKLVVSATEAHFDTTTPFAAVVIALMGTVAQMELEAIRERNRSAAHFNIRAGKYRGSLPPWGYLPTRVDGEWRLVPDPVQRERILEVYHRVVDNHEPLHLVAHDLNRRGVLSPKDYFAQLRGREPQGRKWSATALKRSMTSEAMLGYATLNGKTVRNDDGAPLVRAEPILTREQLEALRAELVKTSRAKPAVSTPSLLLRVLFCAVCGEPAYKFAGGGRKHPRYRCRSMGFPKHCGNGTVAMAEWDAFCEEQVLNLLGDAERLEKVWVAGSDSAVELAEVNAELVDLTSLICSPAYRAGSPQREALDARIAALAARQEELEGLEARPSGWEWRETGQRFGDWWREQDTAAKNTWLRSMNVRLMFDVRGGLTRTIDFGDLQEYEQHLRSGSVVERLHTGMS

SEQ ID NO: 10691 - protein, 500 aa, synthetic construct
MRALVVIRLSRVTDATTSPERQLESCQQLCAQRGWDVVGVAEDLDVSGAVDPFDRKRRPNLARWLAFEEQPFDVIVAYRVDRLARSIRHLQQLVHWAEDHKKLVVSATEAHFDTTTPFAAVVIALMGTVAQMELEAIKERNRSAAHFNIRAGKYRGSLPPWGYLPARVDGVWRLVPDPVQRERILEVYHRVVDNHEPLHLVAHDLNRRGVLSPRDYFAQLRGREPQGRKWSATALKRSMISEAMLGYAILNGRTVRDDDGAPLVRAEPILTREQLEALRAELVKTSRAKPAVSTPSLLLRVLFCAVCGEPAYKFAGGGRKHPRYRCRSMGFPKHCGNGTVAMAEWDAFCEEQVLNLLGDAERLEKVWVAGSDSAVELAEVNAELADLTSLIGSPAYRAGSTQREALDARIAALAARQEELEGLEARPSGWEWRETGQRFGDWWREQDTAAKNTWLRTMNVRLTYDVRGGLTRTIDFGDLQEYEQHLRSGSVVERLHTGMS

SEQ ID NO: 10692 - protein, 500 aa, synthetic construct
MRALVVIRLSRVTDATTSPERQLESCQQLCAQRGWDVVGVAEDLDVSGAVDPFDRKRRPNLARWLAFEEQPFDVIVAYRVDRLTRSIRHLQQLVHWAEDHKKLVVSATEVHFDTTTPIAAVVIALMGTVAQMELEAIKERSRSAAHFNIRAGKYRGSLPPWGYLPTRVDGEWRLAPDPVQRERILEVYHRVVDNHEPLHLVAHDLNRRGVLSPKDYFAQLQGREPQGRKWSATALKRSMISEAMLGYATLNGKTVRDDDGAPLVRAEPILTRGQLEALRAELVKTSRAKPAVSTPSLLLRVLFCAVCGEPAYKFSGGGRKHPRYRCRSMGFPKHCGNGTVAMAEWDAFCEEQVLDLLGDAERLEKVWVAGSDSAVELAEVNAELVDLTSLIGSPAYRAGSPQREALDARIAALAARQEELEGLEARPSGWEWRGTGQRFGDWWREQDTAAKNTWLRSMNVRLTFDARGGLTRTIDFGDLQEYEQHLRLGSVVEHLHTGMS

SEQ ID NO: 10693 - protein, 500 aa, synthetic construct
MRALVVIRLSRVTDATTSPERQLESCQQLCAQRGWDVVGVAEDLDVSGAVDPFDRKRRPNLARWLAFEEQPFDVIVAYRVDRLARSIRHLQQLVHWAEDHKKLVVSATEAHFDTTTPFAAVVIALMGTVAQMELEAIKERSRSAAHFNIRAGKYRGSLPPWGYLPTRVDGEWRLAPDPVQRERILEVYLRVVDNHEPLHLVAHDLNRRGVLSPKDYFAQLQGREPQGRKWSATALKRSMISEAMLGYATLNGKTVRDDDGVPLVRAEPILTREQLEALRAELVKTSRAKPAVTTPSLLLRVLFCAVCGEPAYKFAGGGRKHPRYRCRSMGFPKHCGNGTVAMAEWDAFCEEQVLDLLGDAERLEKVWVAGSDSAVELAEVNAELVDLTSLIGSPAYRAGSPQREALDARIAALAARQEELEGLEARPSGWEWRKTGQRFGDWWREQDTAAKNTWLRSMNVRLTFDVRGGLTRTIDFGDLQEYEQHLRLGSVVERLHSGMS

SEQ ID NO: 10694 - protein, 500 aa, synthetic construct
MRALVVIRLSRVTDATTSPERQLESCQQLCAQRGWDVVGVAEDLDVSGAVDPFDRKRRPNLARWLAFEEQPFDVIVAYRVDRLTRSTRHLQQLVHWADDHKKLVVSATEAHFDTTTPFAAVVIALMGTVAQMELEAIKERSRSAAHFNIRAGKYRGSLPPWGYLPARVGGVWRLVPDPVQRERILEVYRRVVDNHEPLHLVAHDLNRRGVLSPKDYFAQLRGREPQGRKWSATALKRSMISGAMLGYATLNGKTVRDDDGAPFVRAEPILTREQLEALRAELVRTSRAKPAVSTPSLLLRVLFCAVCGEPAYKFAGGGRKHPRYRCRSMGFPKHCGNGTVAMAEWDAFCEEQVLGLLGDVERLEKVWVAGSDSAVKLAEVNAELVDLTSLIGSPAYRAGSPQREALDARITALAARQEELEGLEARPSGWEWRETGQRFGDWWREQDTAAKNTWLRSMNVRLTFDVRGGLTRTIDFGDLQEYEQHLRLGSVVERLHTGMS

SEQ ID NO: 10695 - protein, 500 aa, synthetic construct
MRALVVIRLSRVTDATTSPERQLESCQQLCAQRGWDVVGVAEDLDVSGAVDPFDRKRRPNLARWLAFEEQPFDAIVAYRVDRLTRSIRHLQQLVHWAEDHKKLVVSATEAHFDTTTPFAAVVIALAGTVAQMELEAIKERSRSAAHFNIRAGKYRGSLPPWGYLPTRVDGEWRLVPDPVQRERILEVYHRVVDNHEPLHLVAHDLNRRGVLSPKDYFAQLRGREPQGRKWSATALKRSMTSEAMLGYATLNGKTVRGDDGAPLVRAEPILTREQLEALRAELVKTSRAKPAVSTPSLLLRVLFCAVCGEPAYKFAGGGRKHSRYRCRSMGFSKHCGNGTVAMAEWDAFCEEQVLDLLGDAERLEKVWVAGSDSAVELAEVNAELVDLTSLIGSPAYRAGSPQREALDARIAALAARQEELEGLEARLSGWEWRETGQRFGDWWREQDTAAKNTWLRSMNVRLTFDVRGGLTRTIDFGDLQEYEQHLRLGSVVGRLHTGMS

SEQ ID NO: 10696 - protein, 500 aa, synthetic construct
MRALVVIRLSRVTDATTSPERQLESCQQLCAQRGWDVVGVAEDLDVSGAVDPFDRKRRPNLARWLAFEEQPFDVIVAYRVDRLSRSIRHLQQLVHWAEDHKKLVVSATEAHFDTTTPFAAVVIALMGTVAQMELEAIKERSRSAAHFNIRAGKYRGSLPPWGYLPMRVDGEWRLVPDPVQRERILEVYHRVVDNHEPLHLVAHDLNRRGVLSPKDYFAQLRGREPQGRKWSATALKRSMISEAMLGYATLNGKTVRDGDGAPLVRAEPILTREQLEAIRAELVKTSRAKPAVSTPSLLLRVLFCAVCGEPAYKFAGGGRKHPRYRCRSMGFPKHCGNGTVAMAEWDAFCEEQVLDLLGDAERLEKVWVAGPDSAVELAEVNAELVDLTSLIGSPAYRAGSPQREALDARIAALAARQEELEGLEARPSGWEWRGTGQRFGDWWREQDTAAKNTWLRSMNVRLAFDVRGGLTRTIDFGDLQEYEQHLRLGGVVERLHTGMS

SEQ ID NO: 10697 - protein, 500 aa, synthetic construct
MRALVVIRLSRVTDATTSPERQLESCQQLCAQRGWDVVGVAEDLDVSGAVDPFDRKRRPNLARWLAFEEQPFDVIVAYRVDRLTRSTRHLQQLVHWAEDHRKLVVSATEAHFDTTTPFAAVVIALMGTVAQMELEAIKERSRSAAHFNIRAGKYRGSLPPWGYLPTRVDGEWRLVPDPVQHERILEVYHRVVDNHEPLHLVAHDLNRRGVLSPKDYFAQLQGREPQGRKWSATALKRSMISEAMLGYATLNGKTVRDDDGAPLVRAEPILTREQQEALRAELVKTSRAKPAVSTPSLLLRVLFCAVCGEPAYKFAGGGRKHPRYRCRSMGFPKHCGNGTVAMAEWDAFCEEQVLDLLGDAERLEKVWVAGSDSAVELAEVDAELVDLTSLIGSPAYRAGSPQREALDARIVALAARQKELEGLEARPSGWEWRKTGQRFGDWWREQDTAARNTWLRSMNVRLTFDVRGGLTRTIDFGDLQEYVQHLRLGSVVERLHTGMS

SEQ ID NO: 10698 - protein, 500 aa, synthetic construct
MRALVVIRLSRVTDATTSPERQLESCQQLCAQRGWDVVGVAEDLDVSGSVDPFDRKRRPNLARWLAFEEQPFDVIVAYRVDRLTRSIRHLQQLVHWAEDHKKLVVSATEAHFDMTTPFAAVVIALMGTVAQMELEAIKERNRSAAHFNIRAGKYRGSLPPWGYLPTRVDGEWRLAPDPVQRERILEVYHRVVDNHEPLHLVAHDLNRRGVLSPRDYFAQLRGREPQGRKWSATALKRSLISEAMLGYATLNGKTVRDDDGAPLARAEPILTREQLEALRTELVKTSRAKPAVSTPSLLLRVLFCAVCGEPAYKFAGGGRKHSRYRCRSMGFPKHCGNGTVAMTEWDAFCEEQVLNLLGDAERLEKVWVAGSDSAVELAEVNAELVDLTSLIGSPAYRAGSPQREALDARIAALAARQEELEGLEARPSSWEWRETGQRFGDWWREQDTAAKNIWLRSMNVRLTFDVRGGLTRTIDFGDLQEYEQHLRLGSVVERLHTGMS

SEQ ID NO: 10699 - protein, 500 aa, synthetic construct
MRALVVIRLSRVTDATTSPERQLESCQQLCAQRGWDVVGVAEDLDVSGAVDLFDRKRRPNLARWLAFEEQPFDVIVAYRVDRLTRSIRHLQRLVHWAEDHKKLVVSATEAHFDTTTPFAAVVIALMGTVAQMELEAIKERNRSAAHFNIRAGKYRGSLPPWGYLPTRVDGEWRLVPDPVQRERILEVYHRVVDNHEPLHLVAHDLNRRGVLSPKDYFAQLRGREPQGRKWSATALKRSMISEAMLGYATLNGKTVRDDDGAPLVRAEPILTREQQEALRAELAKTSRAKPAVSTPSLLLRVLFCAVCGEPAYKFAGGGRKHPRYRCRSMGFLKHCGNGTVAMAEWDAFCEEQVLDLLGDAERLEKVWVAGSDSAVELAEVNAELVDLTSLIGSPAYRAGSPQREALDARIAALAARQEELESLEARPSGWEWRETGQRFGDWWREQDTAAKNTWLRSMNVRLTFDVRGGLTRTIDFGDLQEYEQHLRLGSVVERLHTGMS

SEQ ID NO: 10700 - protein, 500 aa, synthetic construct
MRALVVIRLSRVTDATTSPERQLESCQQLCAQRGWDVVGVAEDLDVSGAVDPFDRKRRPNLARWLAFEEQPFDVIVAYRVDRLTRSIRHLQQLVHWAEDHKKLVVSATEAHFDMTTPFAAVVIALMGTVAQMELEAIKERSRSAAHFNIRAGKYRGSLPPWGYLPTRVDGEWRLAPDPVQRERILEVYHRVVDNHEPLHLVAHDLNRRGVLSPRDYFAQLQGREPQGRKWSATALKRSMISEAMLGYATLNGKIVRDDDGAPLVRAEPILTREQLEALRAELVKTSRAKPAVSTPSLLLRVLFCAVCGEPAYKFTGGGRKHPRYRCRSMGFPKHCGNGTVAMAEWDAFCEEQVLNLLGDAERLEKVWVAGSDFAVELAEVNAELVDLTSLIGSPAYRAGSPQREALDARIAALAARQGELEGLEARPPGWEWRETGQRFGDWWREQNTAAKNTWLRSMNVRLSFDVRGGLTRTIDFGDLQEYGQHSRLGSVVERLHTGMS

SEQ ID NO: 10701 - protein, 500 aa, synthetic construct
MRALVVIRLSRATDATTSPERQLESCQQLCAQRGWDVVGVAEDLDVSGAVDPFDRKRRPNLARWLAFEEQPFDAIVAYRVDRLTRSIRHLQQLVHWAEDHKKLVVSATEAHFDTTTPFAAVVIALMGTVAQMELEAIKERNRSAAHFNIRAGKYRGSLPPWGYLPTRVDGEWRLVPDPVQRERILEVYHRVVDNHEPLHLVAHDLNRRGVLSPRDYFAQLRGREPQGRKWSATALKRSMISEVMLGYATLNGKTVRDDDGAPLVRAEPILTREQLEALRAELVKTPRAKPAVSTPSLLLRVLFCAVCGEPAYKFAGGGRKHSRYRCRSMGFPKHCGNGTVAMAQWDAFCEEQVLDLLGDAERLEKVWVAGSDSAVELAEVNAELVDLTSLIGSPAYRTGSPQREALDARIAALAARQEELEGLEARPSGWEWRGTGQRFGDWWREQDTAAKNTWLRSMNVRLTFDARGGLTRTIDFGDLQEYEQHLRLGSVVERLHTGMS

SEQ ID NO: 10702 - protein, 500 aa, synthetic construct
MRALVVIRLSRVTDATTSPERQLESCQQLCAQRGWDVVGVAEDLDVSGAVDPFDRKRRPNLARWLASEEQPFDVIVAYRVDRLTRSVRHLQQLVHWAEDHKKLVVSATEAHFDTTTPFAAVVIALMGTVAQMELEAIKERSRSAAHFNIRAGKYRGSLPPWGYLPARVDGEWRLVPDPVQRERILEVYHRVVDNHEPLHLVAHDLNRRGVLSPRDYFAQLRGREPQGRKWSATALKRSMISEAMLGHATLNGKTVRDEDGAPLVRAEPILTREQLEALRAELVKTSRAKPAVSTPSLLLRVLFCAVCGEPAYKFAGGGRKHPRYRCRSMGFPKHCGNGTVAMAEWDAFCEEQVLDLLGDAERLEKVWIAGSDSAVELAEVSAELVDLTSLIGSPAYRAGSPQREALDARIAALAARQEELEGLEARPSGWEWRETGQRFGDWWREQDTAAKNTWLRSMNVRLTFDVRGGLTRTIDFGDLQEYEQHSRLGSEVERLRTGMS

SEQ ID NO: 10703 - protein, 500 aa, synthetic construct
MRALVAIRLSRVTDATTSPERQLESCQQLCAQRGWDVVGVAEDLDVSGAVDPFDRKRRPNLARWLTFEEQPFDVIVAYRVDRLTRSVRHLQQLVHWAEDHKKLVVSATEAHFDTTTPFAAVVIALMGTVAQMELEAIKERSRSAAHFNIRAGKYRGSLPPWGYLPARVDGEWRLVPDPVQRERILEVYHRVVDNHEPLHLVAHDLNRRGVLSPKDYFAQLRGREPRGREWSATALKRSMTSEAMLGYATLNGKIVRDDDGAPLVRAEPILTREQLEALRAELIKTSRAKPAVSTPSLLLRVLFCAVCGEPAYKFAGGGRKHPRYRCRSMGFPKHCGNGTVAMAEWDAFCEEQVLGLLGDAERLEKVWIAGSDSAVELAEVNAELVDLTSLISSPAYRAGSPQREALDARIAALAARQEELEGLEARPSGWEWRETGQRFGDWWREQDTAAKNTWLRSMNVRLTFDVRGGLTRTIDFGDLQEYEQHLRLGSVVERLHTGMS

SEQ ID NO: 10704 - protein, 500 aa, synthetic construct
MRALVVIRLSRVTDATTSPECQLESCQQLCAQRGWDVVGVAEDLDVSGAVDPFDRKRRPNLARWLVFEEQSFDAVVAYRVDRLTRSIRHLQQLVHWAEDHKKLVVSATEAHFDTTTPFAAVVIALMGTVAQMELEAIKERSRSAAHFNIRAGKYRGSLPPWGYLPTRVDGEWRLAPDPVQRERILEVYHRVVDNHEPLHLVAHDLNRRGVLSPKDYFAQLRGREPQGRKWSATALKRSMTSEAMLGYATLNGKTVRDDDGAPLVRAEPILTREQLEALRAELVKTSRAKPAVSTPSLLLRVLFCAVCGEPAYKFAGGGRKHPRYRCRSMGFPKHCGNGTVAMAEWDAFCEEQVLDLLGDAERLEKVWVAGSDSAVELAEVNAELVDLTSLIGSPAYRAGSPQREALDARIAALAARQEELEGLEARPSGWEWRETGQRFGDWWREQDTVAKNTWLRSMNVRLTFDVRGGLTRTIDFGDLQEYVQHLRLGSVVERLHTGMS

SEQ ID NO: 10705 - protein, 500 aa, synthetic construct
MRALVVIRLSRVTDATTSPERQLESCQQLCAQRGWDVAGVAEDLDVSGAVDPFDRKRRPNLARWLAFEEQPFDVIVAYRVDRLARSIRHLQQLVHWAEDHKKLVVSATEAHFDTTTPFAAVVIALMGTVAQMELEAIKERSRSAAHFNIRAGKYRGSLPPWGYLPTRVDGEWRLAPDPVQRERILEVYHRVVDNHEPLHLVAHDLNRRGVLSPKDYFAQLQGREPQGRKWSATALKRSMISVAMLGYATLNGKTVRDDDGVPLVRAEPILTREQLEALRAELVKTSRAKPAVSTPSLLLRVLFCAVCGEPAYKFAGGGRKHPRYRCRSMGFPKHCGNGTVAMAEWDAFCEEQVLGLLGDVERLEKVWVAGSDSAVKLAEVNAELVDLTGLIGSPAYRAGSPQREALDARIAALAARQEELEGLEARPSGWEWRGTGQRFGDWWREQDTAAKNTWLRSMNVRLTFDVRGGLTRTIDFGDLQEYEQHLRLGSVVERLHTGMS

SEQ ID NO: 10706 - protein, 500 aa, synthetic construct
MRALVVIRLSRVTDATTSPERQLESCQQLCAQRGWDVVGVAEDLDVSGAVDPFDRKRRPNLARWLAFEKQPFDVIVAYRVDRLARSVRHLQQLVRWAEDHKKLVVSATEAHFDTTTPFAAVVIALMGTVAQMELEAIKERNRSAAHFNIRAGKYRGSLPPWGYLPTRVDGEWRLVPDPAQRERILEVYHRVVDNHEPLHLVAHDLNRRGVLSPKDYFAQLRGREPQGRKWSATALKRSMVSEAMLGYATLNGKTVRDDDGAPLVRAEPILTREQLEALRAELVKTSRAKPAVSTPSLLLRVLFCAVCGEPAYKFTGGGRKHSRYRCRSMGFPTHCGNGTVAMTEWDAFCEKQVLDLLGDEERLEKVWVAGSDSAVELAEVNAELVDLTSLIGSPAYRAGSPQREALDARIAALAARQVELEGLEARPSGWEWRKTGQRFGDWWREQDTAAKNTWLRSMNVRLTFDVRGGLTRTIDFGDLQEYEQHLRLGSVVERLHTGMS

SEQ ID NO: 10707 - protein, 500 aa, synthetic construct
MRALVVIRLSRVTDATTSPERQLESCQQLCAQRGWDVVGVAEDLDVSGVVDPFDRKRRPNLARWLAFEEQPFDVIVAYRVDRLTRSTRHLQQLVHWAEDHKKLVVSATEAHFDTTTPFAAVVIALMGTVAQMELEAIKERNRSAAHFNIRAGKYRGSLPPWGYLPTRVDGEWRLVPDPVQRERILEVYHRVVDNHEPLHLVAHDLNRRGVLSPKDYFAQLRGREPQGRKWSATALKRSMTSEAMLGYATLNGKTVRDDDGAPLVRAEPILTREQLEALRAELVKTSRAKPAVSTPSLLLRVLFCAACGEPAYKFAGGGRKHPRYRCRSMGFPKHCGNGTVAMVEWDAFCEEQVLGLLGDAERLEKVWVAGSDSAVELAEVNAELADLTGLIGSPAYRAGSPQREALDARIAALAARQEELEGLEARPSGWEWRETGQRFGDWWREQDTAAKNTWLRSMNVRLTFDVRGGLARTIDLGDLREYEQHLRLGSVVERLHTGMS

SEQ ID NO: 10708 - protein, 500 aa, synthetic construct
MRALVVIRLSRVTDATTSPERQLESCQQLCAQRGWDVVGVAEDLDVSGAVDPFDRRRRPNLARWLAFEELPFDVIVAYRVDRLARSIRHLQQLVHWAEDHKKLVVSATEAHFDTTTPFAAVVIALMGTVAQMELEAIKERSRSAAHFNIRAGKYRGSLPPWGYLPTRVGGEWRLAPDPVQRERILEVYHRVVDNHEPLHLVAHDLNRRGVLSPKDYFAQLRGREPQGRKWSATALKRSMISEAMLGYATLNGKTVRDDDGAPLVRAEPILTREQLEALRAELVKTSRTKPAVATPSLLLRVLFCAVCGEPAYKFAGGGRKHPRYRCRSMGFPKHCGNGTVAMAEWDAFCEEQVLDLLGDAERLEKVWVAGSDSAVELAEVNAELVDLTSLIGSPAYRAGSPQREALGARIAALAARQEELEGLEARPSGWEWRGTGQRFGDWWREQDTTAKNTWLRSMNVRLTFDVRGGLTRTIDFGDLQEYERHLRLGSVDERLHTGMP

SEQ ID NO: 10709 - protein, 500 aa, synthetic construct
MRALVVIRLSRVTDATTSPERQLESCQQLCAQRGWDVVGVAEDLDVSGAVDPFDHKRRPNLARWLAFEEQPFDAIVAYRVDRLTRSIRHLQQLVHWAEDHKKLVVSATEAHFDTTTPFAAVVIALMGTVAQMELEAIRERNRSAAHFNIRAGKYRGSLPPWGYLPTRVDGEWRLVPDPVQRERILEVYHRVVDNHEPLHLVAHDLNRRGVLSPKDYFAQLQGREPQGRKWSATALKRSMISKAMLGYATLNGKTVCDDDGAPLVRAEPILTREQLEALRAELVKTPRAKPAVSTPSLLLRVLFCAVCGEPAYKFAGGGRKHPRYRCRSMGFPKHCGNGTVAMAEWDVFCEEQVLDLLGDAERLEKVWVAGSDSAAELAEVNAELVDLTSLIGSPAYRAGSPQREALDARIAALAARQEELEGLEARPSGWEWRETGQRFGDWWREQDTAAKNAWLRSVNVRLTFDVRGGLTRTIDFGDLQEYEQHLRLGSVAERSHTGMS

SEQ ID NO: 10710 - protein, 500 aa, synthetic construct
MRALVVIRLSRVTDATTSPERQLESCQQLCAQRGWDVVGVAEDLDVSGAVNPFDRKRRPNLARWLAFEEQPFDAIVAYRVDRLTRSIRHLQQLVHWAEDHKKLVVSATEAHFDTTTPFAAVVIALMGTVAQMELEAIKERNRSAAHFNIRAGKYRGSLPPWGYLPTRVDGEWRLVPDPVQRERILEVYHRVVDNHEPLHLVAHDLNRRGVLSPKDYFAQLRGREPQGRKWSATALKRSMVSKAMLGYATLNGKTVRDDDGAPLVRAEPILTREQLEALRAELVKTSRAKPAVSTPSLLLRVLFCAVCGEPAYKFAGGGRKHPRYRCRSMGFLKHCGNGTVAMVEWDAFCEEQVLNLLGDAERLEKVWVAGSDSAVELAEVNAELVDLTSLIGSPAYRAGSPQREALDARIAALAARQEELEGLEARPSGWEWRGTGQRFGDWWREQDTVAKNTWLRSMNVRLTFDVRGGLTRTIDFGDLQEYEQRLRLGSVVERLHTGMS

SEQ ID NO: 10711 - protein, 500 aa, synthetic construct
MRALVVIRLSRVTDATTSPERQLESCQQLCAQRGWDVVGVAEDLDVSGAVDPFDRKRRPNLARWLAFEEQPFDVIVAYRVDRLARSIRYLQQLVHWAEDHKKLVVSATEAHFDTTTPFAAVVIALMGTVAQMELEAIKERSRSAAHFNVRAGKYRGSLPPWGYLPARVDGEWRLVPDPVQRERILEVYHRVVDNHEPLHLVAHDLNRRGVLSPKDYFAQLRGREPQGRKWSATALKRSMTSEAMLGYATLSGKTVRDDDGAPLVRAEPILSREQLEALRAELVKTSRAKPAVSTPSLLLRVLFCAVCGEPAYKFTGGGRKHPRYRCRSMGFPKHCGNGTVAMAEWDAFCEEQVLGLLGDTERLEKVWVAGSDSAVELAEVNAELMDLTSLIGSPAYRAGSPQREALDARIAALAARQEELEGLEARPSGWEWRETGQRFGNWWREQDTAAKNTWLRSMNVRLTFDVRGGLTHTIDFGDLQEYEQHLRLGSVVERLHTGMS

SEQ ID NO: 10712 - protein, 500 aa, synthetic construct
MRALVVIRLSRVTDATTSPERQLESCQQLCAQRGWDVVGVAEDLDVSGAVDPFDRKRRPNLARWLASEEQPFDVIVAYRVDRLTRSTRHLQQLVHWAEDHRKLVVSATEAHFDTTTPFAAVVIALMGTVAQMELEAIKERSRSAAHFNIRAGKYRGSLPPWGYLPTRVDGEWRLVPDPVQHERILEVYHRVVDNHEPLHLVAHDLNRRGVLSPKDYFAQLQGREPQGRKWSATALKRSMISGAMLGYATLNGKTVRDDDGAPLVRAEPILTREQLEALRAELVKTSRAKPAVSTPSLLLRVLFCAVCGEPAYKFSGGGRKHPRYRCRSMGFPKHCGNGTVAMAEWDAFCEEQVLDLLGDAERLEKVWVAGSDSVAELAEVNAELVDLTSLIGSPAYRAGSPQREALDARIAALAARQEELEGLEARPSGWEWRRTGQRFGDWWREQNTAAKNTWLRSMNVRLTFDVRGGLTRTVDFGDLQEYEQHLRLGSAVERLHTGMS

SEQ ID NO: 10713 - protein, 500 aa, synthetic construct
MRVLVVIRLSRVTDATTSPERQLESCQQLCAQRGWDVVGVAEDLDVSGAVDPFDRKRRPNLARWLAFEEQPFDVIVAYRVDRLARSIRHLQQLVRWAEDHKKLVVSATEAHFDTTTPFAAVVIALMGTVAQMELEAIKERNRSAAHFNIRAGKYRGSLPPWGYLPARVDGVWRLVPDPVQRERILEVYHRVVDNHEPLHLVAHDLNRRGVLSPRDYFAQLRGREPQGRKWSATALKRSMVSEAMHGYATLNGKTVRGDDGAPLVRAEPILTRGQLEALRAELVKTSRAKPAVSTPSLLLRVLFCAVCGEPAYKFAGGGRRHPRYRCRSMGFPKHCGNGTVAMAEWDAFCEEQVLDLLGDAERLEKVWVAGSDSAVELAEVNAELVDLTSLIGSPAYRAGSPQREALDARIAALAARQEELEGLEARPSGWEWRETGQRFGDWWREQDTAAKNAWLRSMNVRLTFDVRGGLTRTIDFGDLQEYEQHLRLGNVAERLHTGMS

SEQ ID NO: 10714 - protein, 500 aa, synthetic construct
MRALVVIRLSRVTDATTSPERQLESCQQLCAQRGWDVVGVAEDLDVSGAVDPFDRKRRPNLARWLAFEEQPFDVIVAYRIDRLTRSIRHLQQLVHWAEDHKKLVVSATEAHFDTTTPFAAVVIALMGTVAQMELEAIKERNRSAAHFNIRAGKYRGSLPPWGYLPTRVNGGWRLVPDPVQRERILEVYHRVVDNHEPLHLVAHDLNRRGVLSPRDYFAQLRGREPQGRKWSATALKRSMISEAMLGYATLNGKTVRDDDGAPLVRAEPILTREQLEAIRAELAKTSRAKPAVSTPSLLLRVLFCAVCGEPAYKFAGGGRKHPRYRCRSMGFPKHCGNGTVAMAEWDAFCEEQVLNLLGGAERLEKVWVAGSDSAVELAEVNAELVDLTSLIGSPAYRAGSPQREALDARIAALAARQEELEGLEARPSGWEWRETGQRFGDWWREQDTAAKNTWLRSMNVRLTFDVRGGLTRTTDFGDLQEYEQHLRLGSVVERLHTGMS

SEQ ID NO: 10715 - protein, 500 aa, synthetic construct
MRALVVIRLSRVTDATTSPERQLESCQQLCAQRGWDVVGVAEDLDVSGAVDPFDRKRRPNLARWLAFEEQPFDVIVAYRVDRLARSIRHLQQLVHWAEDHKKLVVSATEAHFDTTTPFAAVVIALMGTVAQMELEAIKERNRSAAHFNIRAGKYRGSLPPWGYLPTRVDGEWRLVPDPVQRERILEVYHRVVDNHEPLHLVAHDLNRRGVLSPKDYFAQLKGREPQGRKWSATALKRSMISEAMLGYATLNGKTVRDDDGAPLVRAEPILTREQQEALRAELVKTSRAKPAVPTPSLLLRVLFCAVCGEPAYKFAGGGRKHPRYRCRSMGFPKHCGNGTVAMAEWDAFCEEQVLDLLGDAERLEKVWVAGSDSAVELAEVNAELVDLTSLIGSPAYRAGSPQREALDARIAALAARQEELEGLEARLSGWEWRETGQRFGDWWREQDTAAKNTWLRSMNIRLTFDVRGGLTRTIDFGDLQEYERHLRLGSVVERLHTGMS

SEQ ID NO: 10716 - protein, 500 aa, synthetic construct
MRALVVIRLSRVTDATTSPERQLESCQQLCAQRGWDVVGVAEDLDVSGAVDPFDRKRRPNLARWLAFEEQPFDVIVAYRVDRLARSIRHLQQLVHWAEDHKKLVVSATEAHFDTTTPFAAVVIALMGTVAQMELEAIKERNRSAAHFNIRAGKYRGSLPPWGYLPARVDGEWRLVPDPVQRERILEVYHRVVDNHEPLHLVAHDLNRRGVLSPKDYFAQLQGREPQGRKWSATALKRSMISEAMLGYATLNGKTVRDDDGAPLVRAEPILTREQLEALRAELVKTSRAKPAVLTPSLLLRVLFCAVCGEPAYKFAGGGRKHPRYRCRSMGFPKHCGNGTVAMAEWDAFCEEQVLDLLGDAERLEKVWVAGSDSAAELAEVSAELVDLTGLIGSPAYRAGSPQRETLDARIAALAARQEELESLEAHPSGWEWRGTGQCFGDWWREQDTAAKNTWLRSMNVRLTFDVRGGLTRTIDFGDLREYEQHLRLGSVVERLHTGMS

SEQ ID NO: 10717 - protein, 500 aa, synthetic construct
MRALVVIRLSRVTDATTSPERQLESCQQLCAQRGWDVAGVAEDLDVSGAVDPFDRKRRPNLARWLAFEEQPFDVIVAYRVDRLTRSTRHLQQLVHWAEDHKKLVVSATEAHFDTTTPFAAIVIALMGTVAQMELEAIKERNRSAAHFNIRAGKYRGSLPPWGYLPTRVDGEWRLVPDPVQRERILEVYHRVVDNHEPLHLVAHDLNRRGVLSPKDYFAQLQGREPQGRKWSATALKRSMISEAMLGYATLNGKTVRDDDGAPLVRAEPILTRGQQEALRAELVKTSRAKPAVSTPSLLLRVLFCAVCGEPAYKFAGGGRKHPRYRCRSMGFPKHCGNGTVAMAEWDAFCEEQVLDLLGDAERLEKVWVAGSDSAVELAEVNAELVDLMSLIGSPAYRAGSPQREALDARIAALAARQEELEGLEARPSGWEWRGTGQRFEGWWREQDTAAKNTWLRSMNVRLTFDVRGGLTRTIDFGDLQEYEQHLRLGSVVERLHTGMS

SEQ ID NO: 10718 - protein, 500 aa, synthetic construct
MRALVVIRLSRVTDATTSPERQLESCQQLCAQRGWDVVGVAEDLDVSGAVDPFDRKRRPNLARWLAFEEQPFDVIVAYRVDRLTRSIRHLQQLVHWAEDHKKLVVSATEAHFDTTTPFAAVTIALMGTVAQMELEAIKERSRSAAHFNIRAGKYRGSLPPWGYLPTRVDGEWRLAPDPVQRERILEVYHRVVDDHEPLHSVAHDLNRRGVLSPRDYFAQLQGREPRGRKWSATALKRSMISEAMLGYATLNGKTVRDDDGAPLVRAEPILTREQLEALRAELVKTSRARPAVSTPSLLLRVLFCAVCGEPAYKFAGGGRKHPRYRCRSMGFPKHCGNGTVGMAEWDAFCEEQVLDLLGDAERLEKVWVAGSDSAVELAEVNAELVDLMSLIGSPAYRAGSPQREALDARIAALAARQEELEGLEARPSGWEWRETGQRFGDWWREQDTAAKNTWLRSMNVRLTFDVRGELTRTIDFGDLQEYEQHLRLGSVVERLHTGMS

SEQ ID NO: 10719 - protein, 500 aa, synthetic construct
MRALVVIRLSRVTDATTSPERQLESCQQLCAQRGWDVVGVAEDLDVSGAVDPFDRKRRPNLARWLAFEEQPFDVIVAYRVDRLTRSTRHLQQLVHWAEDHKKLVVSATEAHFDTTTPFAAVVIALMGTVAQMELEAIKERNRSAAHFNIRAGKYRGSLPPWGYLPTRVDGEWRLVPDPVQRERILEVYHRVVDNHEPLHLVAHDLNRRGVLSPKDYFAQLQGREPQGRKWSATALKRSMISGAMLGYATLNGKIVRDDDGAPLVRAEPILTREQLEALRAEFVKTSRAKPAVSTPSLLLRVLFCAVCGEPAYKFAGGGRKHPRYRCRSMGFPKHCGNGTVAMAEWDAFCEEQVLNLLGDAERLEKVWVAGSDSAVELAEVNAELVDLTSLIGSPAYRAGSPQREALDARIAALAARQEELGGLEARPSGWEWRETGQRFGDWWREQDTAAKNTWLRSMNVRLTFDVRGGLTRTIDLGDLQEYEQHLRLGGVVERLHTGAS

SEQ ID NO: 10720 - protein, 500 aa, synthetic construct
MRALVVIRLSRVTDATTSPERQLESCQQLCAQRGWDVVGVAEDLDVSGAVDPFDRKRRPNLARWLAFEEQPFDVIVAYRVDRLTRSTRHLQQLVHWAEDHKKLVVSATEAHFDTTTPFAAVVIALMGTVAQMELEAIKERNRSAAHFNIRAGKYRGSLPPWGYLPTRVDGEWRLAPDPVQRERILEVYHRVVDNHEPLHLVAHDLNRRGVLSPRDYFAQLQGREPQGRKWSATALKRSMISEAMLGYATLNGKIVRDDDGAPLVRAEPILTREQLEALRAELVKTSRAKPAVSTPSLLLRVLFCAVCGEPAYKFTGGGRKHPRYRCRSMGFPKHCGNGTVAMAEWDAFCEEQVLNLLGDAERLEKVWVAGSDFAVELAEVNAELVDLTSLIGSPAYRAGSPQREALDARIAALAARQGELEGLEARPPGWEWRETGQRFGDWWREQNTAAKNTWLRSMNVRLTFDVRGGLTRTIDFGDLQEYEQHLRLGSVVEHLHTGMS

SEQ ID NO: 10721 - protein, 500 aa, synthetic construct
MRALVVIRLSRVTDATTSPERQLESCQQLCAQRGWDVVGVAEDLDVSGAVDPFDRKRRPNLARWLAFEEQPFDVIVAYRVDRLARSIRHLQRLVHWAEDHKKLVVSATEAHFDTTTPFAAVVIALMGTVAQMELEAIKERNRSAAHFNIRAGKYRGSLPPWGYLPTRVDGEWRLVPDPAQRERILEVYRRVVDNHEPLHLVAHDLNRRGVLSPRDYFAQLRGREPQGRKWSATALKRSMISEAMLGYATLNGKTVRDDDGAPLVRAEPILTREQLEALRAELVKTSRAKPAVSTPSLLLRVLFCAVCGEPAYKFAGGGRKHPRYRCRSMGFPKHCGNGTVAMAEWDAFCEEQVLDLLGDAERLEKVWVAGSDSAVELAEVNAELVDLTSLIGSPAYRAGSPQREALDARIAALAARQEELEGLEARPSGWELRETGQRFGDWWREQDTAAKNTWLRSMNVRLTFDVRGGLTRTIDFGDLQEYEQHLRLGSVVERLHTGMS

SEQ ID NO: 10722 - protein, 500 aa, synthetic construct
MRALVVIRLSRVTDTTTSPERQLESCQQLCAQRGWDVVGVAEDLDVSGAVDPFDRKRRPNLARWLAFEEQPFDAIVAYRVDRLTRSIRHLQQLVHWAEDHKKLVVSATEAHFDTTTPFAAVVIALMGTVAQMELEAIKERNRSAAHFNIRAGKYRGSLPPWGYLPTRVDGEWRLAPDPVQRERILEVYHRVVDNHEPLHLVAHDLNRRGVLSPKDYFAQLRGREPQGRKWSATALKRSMTSEAMLGYATLNGKTVRDDDGAPLVRAEPILTREQLEALRAELVKTSRAKPAVSTPSLLLRVLFCAVCGEPAYKFAGGGRKHSRYRCRSMGLPKHCGNGTVAMAEWDAFCEEQVLDLLGDAERLEKVWVAGSDSAVELAEVNAELVDLTSLIGSPAYRAGSPQREALDARIAALAARQEELEGLEARPSGWEWRETGQRFGDWWREQDTAAKNTWLRSMNVRLTFDVRGGLTRSIDFGDLQVYEQHLRLGSVVERLHTGMS

SEQ ID NO: 10723 - protein, 500 aa, synthetic construct
MRALVVIRLSRVTDATTSPERQLESCQRLCTQRGWDVVGVAEDLDVSGAVDPFDRKRRPNLARWLAFEEQPFDVIVAYRVDRLARSIRHLQQLVHWAEDHKKLVVSATEAHFDTTTPFAAVVIALMGTVAQMELEAIKERNRSAAHFNIRAGKYRGSLPPWGYLPARVDGEWRLVPDPVQRERILEVYHRVVDNHEPLHLVAHDLNRRGVLSPRDYFAQLRGREPRGRKWSATALKRSMISEAMLGYATLNGKTVRDDDGAPLVRAEPILTREQLEALRVELAKTSRAKPAVSTPSLLLRVLFCAVCGEPAYKFAGGGRKHPRYRCRSMGFPKHCGNGTVAMAEWDAFCEEQVLNLLGDAERLEKVWVAGSDSAVELAEVNAELVDLTSLIGSPAYRAGSPQREALDARIAALAARREELEGLEARPSGWEWRETGRRFGDWWREQDTAAKNTWLRTMNVRLTFDVRGGLTRTIDFGDLRVYEQHLCLGSVVERLHTGMS

SEQ ID NO: 10724 - protein, 500 aa, synthetic construct
MRALVVIRLSRVTDATTSPERQLESCQQLCAQRGWDVVGVAEDLDVSGAVDPFDRKRRPNLARWLAFEEHPFDVIVAYRVDRLTRSVRHLQQLVHWAEDHKKLVVSATEAHFDTTTPFAAVVIALMGTVAQMELEAIRERNRSAAHFNIRAGKYRGSLPPWGYLPTRVDGEWRLVPDPVQRERILEVYHRVVVNHEPLHLVAHDLNRRGVLSPRDYFAQLRGREPQGRKWSATALKRSMISEAMLGYATLNGKTVRDDDGAPLVRAEPILTREQQEALRAELVKTSRAKPAVSTPSLLLRVLFCAVCGEPAYKFAGGGRKHPRYRCRSMGFPKHCGNGTVAMAEWDAFCEEQVLNLLGDAERLEKVWVAGSDSAVELAEVNAELVDLTSLIGSPAYRAGSPQREALDARIAALAARQEELAGLEARPSGWEWRKTGRRFGDWWREQDTAAKNTWLRSMNVRLTFDVRGGLTRTIDFGDLQEYEQHLRLGSVVERLHTGMS

SEQ ID NO: 10725 - protein, 500 aa, synthetic construct
MRALVVIRLSRVTDATTSPERQLESCQQLCAQRGWDVVGVAEDLDVSGAVDPFDRKRRPNLARWLAFEEQPFDAIVAYRVDRLTRSIRHLQQLVHWAEDHKKLVVSATEAHFDTTTPFAAVVIALMGTVAQMELEAIKERNRSAAHFNIRAGKYRGSLPPWGYLPTRVDGEWRLAPDPVQRERILEVYHRVVDNHEPLHLVAHDLNRRGVLSPKDYFAQLRGREPQGRKWSATALKRSMISEAMLGYATLNGKTVRDDDGAPLVRAEPILTREQLGALRAELVKTSRAKPAVSTPSLLLRVLFCAVCGEPAYKFTGGGRKHPRYRCRSMGFPKHCGNGTVAMAEWDAFCEEQVLDLLGDAERLERVWVAGSDSAVELAEVNTELVDLTSLIGSPAYRAGSPQREALDARIAALAARQEELEGLEARPSGWEWRETGQRFGDWWREQDTAAKNTWLRSMNVRLTFDVRGGLTRTIVFGDLQEYEQHLRLGSVVERLHTGMS

SEQ ID NO: 10726 - protein, 500 aa, synthetic construct
MRALVVIRLSRVTDATTSPERQLESCQQLCAQRGWDVVGVAEDLDVSGAVDPFDRKCRPNLARWLAFEEQPFDVIVAYRVDRLTRSTRHLQQLVHWAEDHKKLVVSATEAHFDTTTPFAAVVIALMGTVAQMELEAIKERNRSAAHFNIRAGKYRGSLPPWGYLPTRVDGEWRLVPDPVQRERILEVYHRVVDNHEPLHLVAHDLNRRGVLSPKDYFAQLRGRVPQGRKWSATALKRSMISKAMLGYATLNGKTVRDDDGAPLVRAEPILTREQLEALRAELVKTSRAKPAVSTPSLLLRVLFCAVCGEPAYKFSGGGRKHPRYRCRSMGFPKHCGNGTVAMAEWDAFCEEQVLDLLGDAERLEKVWVAGSDSAVELAEVNAELVDLTSLIGSPAYRAGSPQREALGARIAALVARQEELEGLEARPSGWEWRETGQRFGDWWREQDTAAKNTWLRSMNVRLTFDVRGGLTRTVDFGDLQGYEQHLRLGSVVERIHTGMS

SEQ ID NO: 10727 - protein, 500 aa, synthetic construct
MRALVVIRLSRVTDATTSPERQLESCQQLCAQRGWDVVGVAEDLDVSGSVDPFDRKRRPNLARWLAFEEQPFDVIVAYRVDRLARSIRHLQQLVHWAEDHKKLVVSATEAHFDTTTPFAAVVIALMGTVAQMELEAIKERSRSAAHFNIRAGKYRGSLPPWGYLPTRVDGEWRLAPDPVQRERILEVYHRVVDNHEPLHWVAHDLNRRGVLSPKDYFAQLRGREPQGREWSATALKRSMISVAMLGYVTLNGKIVRDDDGAPLVRAEPILTREQLEALRAELVKTSRAKPAVSTPSLLLRVLFCAVCGEPAYKFAGGGRKHPRYRCRSMGFPKHCGNGTVAMAEWDAFCEEQVLGLLGDAERLEKVWVAGSDSAVELAEVNAELVDLTSLIGSPAYRVCSPQREALDARIAALAARQEELEGLEARPSGWEWRETGQRFGDWWREQDTAAKNTWLRSMNVRLSFDVRGGLTRTIDFGELQEYEQHLRLGNVVERLRTGMS

SEQ ID NO: 10728 - protein, 500 aa, synthetic construct
MRALVVIRLSRVTDATTSPERQLESCQQLCAQRGWDVVGVAEDLDVSGAVDPFDRKRRPSLARWLAFEEQPFDVIVAYRVDRLARSIRHLQQLVHWAEDHKKLVVSATEAHFDTTTPFAAVVIALMGTVAQMELEAIKERSRSAAHFNIRAGKYRGSLPPWGYLPTRVDGEWRLVPDPVQRERILEVYRRVVDNHEPLHLVAHDLNRRGVLSPKDYFAQLRGREPQGRKWSATALKRSMISEAMLGHATLNGKTVRDDDGAPLVRAEPILTREQLEALRAELVKTSRAKPAVSTPSLLLRVLFCAVCGEPAYKFSGGGRKHPRYRCRSMGFPKHCGNGTVAMAEWDAFCEEQVLDLLGDAERLEKVWVAGSDSAVELAEVNAELVDLTSLIGSPAYRAGSPQREALDARIAALAARQAELEGLEARPSGWEWRETGQGFGDWWREQDTAAKNTWLRSMNVRLTFDVRGGLTRTIDFGDLQEYEQHLRLGSVVERLHTGMS

SEQ ID NO: 10729 - protein, 500 aa, synthetic construct
MRALVVVRLSRVTDATTSPERQLESCQQLCAQRGWDVVGVAEDLDVSGAVDPFDRKRRSSLARWLAFEEQPFDVIVAYRVDRLARSIRHLQRLVHWAEDHKKLVVSATEAHFDTTTPFAAVVIALMGTVAQMELEAIKERSRSAAHFNIRAGKYRGSLPPWGYLPTRVDGEWRLAPDPVQRERILEVYHRVVDNHEPLHLVAHDLNRRGVLSPKDYFAQLRGREPQGRKWSATALKRSMISEAMLGYATLNGKTVRDDDGAPLVRAEPILTRGQLEALRAELVKSSRAKPAVSTPSLLLRVLFCAVCGEPAYKFAGGGRKHPRYRCRSMGFPKHCGNGTVAMAEWDAFCEEQVLNLLGDAERLEKVWVAGSDSAVELAEVNAELVDLTSLIGSPAYRAGSPQREALDARVAALAARQEELEGLEARPSGWEWRETGQRFGDWWREQDTAAKNAWLRSMNVRLTFDVRGGLTRTIDFGDLQGYEQHLRLGSVVERLHTGMS

SEQ ID NO: 10730 - protein, 500 aa, synthetic construct
MRALVVIRLSRVTDATTSPERQLESCQQLCAQRGWDVVGVAEDLDVSGAVDPFDRKRRPNLARWLAFEEQPFDVIVAYRVDRLTRSVRHLQQLVHWAEDHKKLIVSATEAHFDTTTPFAAVVIALMGTVAQMELEAIKERSRSAAHFNIRAGKYRGSLPPWGYLPARVDGEWRLVPDPVQRERILEVYHRVVDNHEPLHLVAHDLNRRGILSPKDYFAQLQGREPQGRKWSATALKRSMISEAMLGYATLNGKTVRDDDGAPLVRAEPILTREQQEALRAELAKTSRAKPAVSTPSLLLRVLFCAVCGEPAYKFAGGGRRHPRYRCRSMGFPKHCGNGTVAMAEWDAFCEEQVLNLLGDAERLEKVWVAGSDSAVELAEVNAELVDLTSLIGSPAYRAGSPQREALDARIAALAARQEELEGLEARPSGWEWRETGQRFGDWWREQDTAAKNTWLRSMNVRLTFDVSGGLTRTIDFGVLQEYEQHLRLGSVVERLHTGMS

SEQ ID NO: 10731 - protein, 500 aa, synthetic construct
MRALVVIRLSRVTDATTSPERQLESCQQLCAQRGWDVVGVAEDLDVSGAVDPFDRKRRPNLARWLAFEEQPFDVIVAYRIDRLTRSTRHLQQLVHWAEDHKKLVVSATEAHFDTTTPFAAVVIALMGTVAQMELEAIKERSRSAAHFNIRAGKYRGSLPPWGYLPTRVDGEWRLVPDPVQRERILEVYHRVVDNHEPLHLVAHDLNRRGVLSPRDYFAQLRGREPQGRKWSATALKRSMVSEAMLGYATLNGKTVRDDDGAPLVRAEPILTREQLEALRAELVKTSRAKPAVSTPSLLLRVLFCAVCGEPAYKFAGGGRKHSRYRCRSMGFPKHCGNGSVAMAEWDAFCEERVLDLLGDAERLEKVWVAGSDPAVELAEVSAELVDLTSLIGSPAYRAGSPQREALDARIAALAARQEELEGLEARPSGWEWRGTGQRFGDWWREQDTAAKNTWLRSMNVRLTFDVRGGLTRTIDFGDLQEYEQHLRLGSVVERLHTGMS

SEQ ID NO: 10732 - protein, 500 aa, synthetic construct
MRALVVIRLSRVTDATTSPERQLESCQQLCAQRGWDVVGVAEDLDVSGAVDPFDRKRRPNLARWLAFEGQPFDVIVAYRVDRLARSIRHLQQLVHWAEDHKKLVVSATEAHFDTTTPFAAVVIALMGTVAQMELEAIKERIRSAAHFNIRAGKYRGSLPPWGYLPARVDGEWRLAPDPVQRERILEVYHRVVDNHEPLHLVAHDLNRRGVLSPKDYFAQLQGREPQGRKWSATALKRSMISEAMLGYATLNGKTVRDDDGAPLVRAEPILTREQLEALRAELVKTSRAKPAVSTPSLLLRVLFCAVCGEPAYKFAGGGRKHPRYRCRSMGFPKHCGNGTVAMAEWDAFCEEQVLDLLGDAERLEKVWVAGPDSAVELAEVNAELVDLTRLIGSPAYRAGSPQREALDARIAALAARQEELEGLEARPSGWEWRETGQRFGDWWREQDTAAKNTWLRSMNVRLTFDVRGGLTRTIDFGDLQEYEQHLRLGSVVERLHAGMS

SEQ ID NO: 10733 - protein, 500 aa, synthetic construct
MRALVVIRLSRVTEATTSPERQLESCQQLCAQRGWDVVGVAEDLDVSGAVDPFDRKRRPNLARWLAFEEQPFDAIVAYRVDRLTRSIRHLQQLVHWAEDHKKLVVSATEAHFDTTTPFAAVVIALMGTVAQMELEAIKERNRSAAHFNIRAGKYRGSLPPWGYLPTRVDGEWRLAPDPVQRERILEVYHRVVDNHEPLHLVAHDLNRRGVLSPKDYFAQLRGREPQGRKWSATALKRSMTSEAMLGYATLNGKTVRNDDGAPLVRAEPILTREQLEALRAELVKTSRAKPAVSTPSLLLRVLFCAVCGEPAYKFAGGGRKHPRYRCRSMGFPKHCGNGTVAMAEWDAFCEEQVLDLLGDAERLEKVWVAGSDSAVELAEVNAELVDLTSLIGSPAYRAGSPQREALDARIAALVARQEELEGLEARPSGWEWRGTGQRFGDWWREQDAATKNTWLRSMNIRLTFDVRGGLTRTIDFGDLQEYEQHLRSGSVVERLHTGMS

SEQ ID NO: 10734 - protein, 500 aa, synthetic construct
MRALVVIRLSRVTDATTSPERQLESCQQLCAQRGWDVVGVAEDLDVSGAVDPFDRKRRPNLARWLAFREQPFDVIVAYRVDRLTRSTRHLQQLVHWAEDHKKLVVSATEAHFDTTTPFAAVVIALMGTVAQMELEAIKERNRSAAHFNIRAGKYRGSLPPWGYLPTRVDGEWRLVPDPVQRERILEVYHRVVDNHEPLHLVAHDLNRRGVLSPRDYFAQLQGREPQGRKWSATALKRSMISGAMLGYATLNGKTVRDDDGAPLVRAEPILTREQLEALRAELVKTSRAKPAVSTPSLLLRVLFCAVCGEPAYKFAGGGRKHPRYRCRSMGFPKHCGNGTVAMAEWDAFCEEQVLDLLGDAERLEKVWVAGSDSAVELAEVSAELVDLTSLVGSPAYRAGSPQREALDARIAALAARQEELEGSEARPSGWEWRETGQRFGDWWREQDTAAKNTWLRSMNVRLTFDVRGGLTRTVDFGDLQEYEQHLRLGSVVERLRTGMS

SEQ ID NO: 10735 - protein, 500 aa, synthetic construct
MRALAVIRLSRVTDATTSPERQLESCQQLCAQRGWDVVGVAEDLDVSGAVDPFDRKRRPNLARWLAFEEQPFDVIVAYRVDRLTRSIRHLQQLVHWAEDHKKLVVSATEAHFDMTTPFAAVVIALMGTVAQMELEAIKERSRSAAHFNIRAGKYRGSLPPWGYLPTRVDGEWRLAPDPVQRERILEVYHRVVDNHEPLHLVAHDLNRRGVLSPKDYFAQLRGREPQGRKWSATALKRSMISEAMLGHATLNGKTVRDDDGAPLVRAEPILTREQLEALRAELVKTSRAKPAVSTPSLLLRVLFCAVCGEPAYKFAGGGHKHPRYRCRSMGFPEHCGNGTVAMAEWDAFCEEQVLDLLGDAERLEKVWVAGSDSAVELAEVNAELVDLTSLIGSPAYRAGSPQREALDARIAALAARQEELEGLEARPSGWEWRETGQRFGDWWREQGTAAKNTWLRSMNVRLTFDVRGRLTRTIDFGDLQEYVQRLRLGGVAERLHTGMS

SEQ ID NO: 10736 - protein, 500 aa, synthetic construct
MRALVVIRLSRVTDTTTSPERQLESCQQLCAQRDWNVVGVAEDLDVSGAVDPFDRKRRPNLARWLAFEEQPFDVIVAYRVDRLARSIRHLQQLVHWAEDHKKLVVSATEAHFDTTTPFAAVVIALMGTVAQMELEAIKERSRSAAHFNIRAGKYRGSLPPWGYLPTRVNGEWRLVPDPVQRERILEVYHRVVDNHEPLHLVAHDLNRRGVLSPRDYFAQLRGREPQGRKWSATALKRSMISEAMLGYATLNGKTVRDDDGAPLVRAEPILTREQLEAIRAELVKTSRAKPAVSTPSLLLRVLFCAVCGEPAYKFAGGGRKHSRYRCRSMGFPKHCGNGTVAMAQWDAFCEEQVLNLLGDAERLEKVWVAGSDSAVELAEVNAELVDLTSLIGSPAYRAGSPQREALDARIAALAARQEELEGLEARPSGWEWRETGQRFGDWWREQDTAAKNTWLRSMNVRLTFDVRGGLTRTIDFGDLQEYEQHLRLGSVVERLHTGMS

SEQ ID NO: 10737 - protein, 500 aa, synthetic construct
MRALVVIRLSRVTDATTSPERQLESCQQLCAQRGWDVVGVAEDLDVSGAVDPFDRKRRPNLARWLAFEERPFDVIVAYRVDRLTRSTRHLQQLVHWAEDHKKLVVSATEAHFDTTTPFAAVVIALMGTVAQMELEAIKERSRSAAHFNIRAGKYRGSLPPWGYLPTRVDGEWRLVPDPVQRERILEVYHRVVDNHEPLHLVAHDLNRRGVLSPKDYFAQLQGREPQGRKWSATALKRSMTSGAMLGYATLNGKTVRDDDGAPLVRAEPILTREQLEALRAELVKTSRAKPAVSTPSLLLRVLFCAVCGEPAYKFAGGGRKHSRYRCRSMGFPRHCGNGTVAMAEWDAFCEEQVLDLLGDAERLEKVWVAGSNSAVELAEVNAELVDLTSLIGSPAYRAGTPQREALDARIAALAARQEELEGLEARPSGWEWRETGQRFGDWWREQDTAAKNTWLRSMNVRLTFDVRGGLTRTIDLGDLQEYEQHLRLGSVVEHLHTGMS

SEQ ID NO: 10738 - protein, 500 aa, synthetic construct
MRALVVIRLSRVTDATTSPERQLESCQQLCAQRGWDVVGVAEDLDVSGAVDPFDHKRRPNLARWLAFEKQPFDVIVAYRVDRLTRSTRHLQQLVHWAEDHKKLVVSATEAHFDTTTPFAAVVIALMGTVAQMELEAIRERNRSAAHFNIRAGKYRGSLPPWGYLPTRVDGEWRLVPDPVQRERILEVYHRLVDNHEPLHLVAHDLNRRGVLSPRDYFAQLRGREPQGRKWSATALKRSMISEAMLGYATLNGRTVRDDDGAPLVRAEPILTREQLEALRAELVKTSRAKPAVSTPSLLLRVLFCAVCGEPAYKFAGGGRKHPRYRCRSMGFPKHCGNGTVATAEWDAFCEEQVLDLLGDTERLEKVWVAGSDSAIELAEVNAELVDLASLIGSPAYRAGSPQREALDARIAALAARQEELEGLEARPSGWEWRETGQRFGDWWREQDTAAKNTWLRSMNVRLTFDVRGGLTRTIDFGDLQEYEQHLRLGNAVERLHTGMS

SEQ ID NO: 10739 - protein, 500 aa, synthetic construct
MRALVVIRLSRVTDATTSPERQLESCQQLCAQRGWDVVGVAEDLDVSGAVDPFDRKRRPNLARWLAFEEQPFDVIVAYRIDRLTRSIRHLQQLVHWAEDHKKLVVSATEAHFDTTTPFAAVVIALMGTVAQMELEAIKERNRSAAHFNIRAGKYRGSLPPWGYRPTRVDGEWRLVPDPVQRERILEVYHRVVDNHEPLHLVAHDLNRRGVLSPKDYFAQLQGREPQGRKWSATALKRSMTSEAMLGYATLNGKTVRNDDGAPLVRAEPILTREQLEALRAELVKTSRAKPAVSTPSLLLRVLFCAVCGEPAYKFAGGGRKHPRYRCRSMGFPKHCGNGTVAMAEWDTFCEEQVLDLLGDAERLEKVWVAGSDSAVELAEVNAELVDLASLIGSPAYRAGSPQREALDARIAALAARQEELEGLEARPSGWEWRETGQRFEDWWREQDTAAKNTWLRSMNVRLTFDVRGGLTRTIDFGDLQEYEQHLRLGSVVERLHTGMS

SEQ ID NO: 10740 - protein, 500 aa, synthetic construct
MRALVVIRLSRVTDATTSPERQLESCQQLCAQRGWDVAGVAEDLDVSGAVDPFDRKRRPNLARWLAFEEQPFDVIVAYRVDRLARSIRHLQQLVHWAEDHEKLVVSATEAHFDTTTPFAAVVIALMGTVAQMELEAIKERNRSAAHFNIRAGKYRGSLPPWGYLPARVDGEWRLVPDPVQRERILEVYHRVVDNHEPLHLVAHDLNRRGVLSPKDYFAQLRGREPQGRKWSATALKRSMISEAMLGYVTLNGKIVRDDDGAPLVRAEPILTREQLEALRAELVKTSRAKPAVSTPSLLLRVLFCAVCGEPAYKFAGGGRKHPRYRCRSMGSPKHCGNGTVAMAEWDAFCEEQVLNLLGDAERLEKVWIAGSDSAVELAGVSAELVDLTSLIGSPAYRAGSPQREALDARIAALAARQEELEGLEARPSGWEWRGTGQRFGDWWREQDTAAKNTWLRSMNVRLTFDVRGGLTRTIDFGDLQEHEQHLRSGSVVERLRTGMS

SEQ ID NO: 10741 - protein, 500 aa, synthetic construct
MRALVVIRLSRVTDATTSPERQLESCQQLCAQRGWDVVGVAEDLDVSGAVDPFDRKRRPNLARWLAFEEQPFDVIVAYRVDRLTRSTRHLQQLVHWAEDHKKLVVSATEAHFDTTTPFAAVVIALMGTVAQMELEAIKERTRSAAHFNIRAGKYRGSLPPWGYLPARVGGEWRLAPDPVQRERILEVYHRVVDNHEPLHLVAHDLNRRGVLSPRDYFAQLRGREPQGRKWSATALKRSMISEAMLGHATLNGKTVRDEDGAPLVRAEPILTREQLEALRAELVKTPRAKPAVSTPSLLLRVLFCAVCGEPAYKFSGGGRKHPRYRCRSMGFPKHCGNGTVAMAEWDAFCEEQVLDLLGDAERLEKVWVAGSDSAVELAEMNAELVDLTSLIGSPAYRAGSPQREALDARIAALAARQGELEGLEAHPSGWEWRETGQRFGDWWREQDTAAKNTWLRSMNVRLTFDVRGGLTRTIDLGDLQEYEQHLRLGSVVERLHTGMS

SEQ ID NO: 10742 - protein, 500 aa, synthetic construct
MRALVVIRLSRVTDATTSPERQLESCQQLCAQRGWDVVGVAEDLDVSGAVDPFDRKRRPNLARWLAFEEQPFDVIVAYRVDRLTRSIRHLQQLVHWAEDHKKLVASATEAHFDTTTPFAAVTIALMGTVAQMELEAIKERSRSAAHFNIRAGKYRGSLPPWGYLPTRVDGEWRLAPDPVQRERILEVYHRVVDNHEPLHLVAHDLNRRGVLSPKDYFAQLRGREPQGRKWSATALKRSMTSEAMLGYATLNGKTVRDDDGAPLVRAEPILAREQLEALRAELVKTSRAKPAVSTPSLLLRVLFCAVCGEPAYKFAGGGRKHPRYRCRSMGFPKHCGNGTVATAEWDAFCEEQVLSLLGDAERLEKVWVAGSDSAVELAEVNAELVDLTSLIGSPDYRAGSPQRGALDARIAALAARQEELEGLEARPPGWEWRETGQRFGDWWREQDTTAKNTWLRSMNVRLTFDVRGGLTRTIDFGDLQEYEQHLRSGGVVDRLYTGMS

SEQ ID NO: 10743 - protein, 500 aa, synthetic construct
MRALVVIRLSRVTDATTSPERQLESCQQLCAQRGWDVVGVAEDLDVSGAVDPFDRKRRPNLARWLAFEEQPFDVIVAYRVDRLTRSTRHLQQLVRWAEDHEKLVVSATEAHFDTTTPFAAVVIALMGTVAQMELEAIKERNRSAAHFNIRAGKYRGSLPPWGYLPARVDGEWRLVPDPVQRERILEVYHRVVDNHEPLHLVAHDLNRRGVLSPKDYFAQLQGREPQGRKWSATALKRSMISETMLGYATLNGMTVRDDDGAPLVRAEPILTREQLEALRAELVKTSRAKPAVSTPSLLLRVLFCAVCGEPAYKFSGGGRKHPRYRCRSMGFPKHCGNGTVAMAEWDAFCEEQVLDLLGDAERLEKVWVAGSDSAVELAEVSAELVDLTSLTGSPSYRAGSPQREALDARIAALAARQEELEGLEARPSGWEWRETGQRFGDWWREQDTAAKNTWLRSMNVRLTFDVRGGLTRTIDFGDLQEYEQHLRLGSVVERLRTGMS

SEQ ID NO: 10744 - protein, 500 aa, synthetic construct
MRALVVIRLSRVTDATTSPERQLESCQQLCAQRGWDVVGVAEDLDVSGAVDPFDRKRRPNLARWLAFEEQPFDVIVAYRVDRLTRSVRHLQQLVHWAEDHKKLVVSATEAHFDTTTPFAAVVIALMGTVAQMELEAIKERSRSAAHFNIRAGKYRGSLPPWGYLPTRVDREWRLAPDPVQRERILEVYHRVVDNHEPLHLVAHDLNRRGVLSPKDYFAQLQGREPQGRKWSATALKRSMISVAMLGYATLNGKTVRDDDGAPLVRAEPILTREQLEALRAELVKTSRAKPAVSTPSLLLRVLFCAVCGEPAYKFAGGGRKHPRYRCRSMGFPEHCGNGTVAMAEWDAFCEEQVLGLLGDVERLEKVWVAGSDSAVKLAEVNAELVDLTGLIGSPAYRAGSPQREALDARIAALAARQEELEGLEARPSGWEWRGTGQRFGDWWREQDTTAKNTWLRSMNVRLTFDVRGGLTRTIDFGDLQEYEQHLRLGSVVERLHTGMS

SEQ ID NO: 10745 - protein, 500 aa, synthetic construct
MRALVAIRLSRVTDATTSPERQLESCQQLCAQRGWDVVGVAEDLDVSGAVDPFDRKRRPNLARWLAFEEQPFDVIVAYRVDRLTRSTRHLQQLIHWAEDHKKLVVSATEAHFDTTTPFAAVVTALMGTVAQMELEAIKERSRSAAHFNIRAGKYRGSLPPWGYLPTRVDGEWRLVPDPVQRERILEVYHRVVDNHEPLHLVAHDLNRRGVLSPKDYFAQLRGREPQGRKWSATALKRSMISEAMLGYATLNGKTVRDDDGAPLVRAEPILTREQLEAVRAVLVKTSRAKPAVSTPSLLLRVLFCAVCGEPAYKFAGGGRKHPRYRCRSMGFPKHCGNGTVAMAEWDAFCEEQVLDLLGDAERLEKVWVAGSDSAVELAEVNAELVDLTSLIGSPAYRTGSPQREALDARIAALAARQEELEGLEARPSGWEWRGTGQRFGDWWCKQGTAAKNNWLRSMNVRLTFDVRGGLTRTIDFGDLQEYEQHLRLGSVVERLHTGMS

SEQ ID NO: 10746 - protein, 500 aa, synthetic construct
MRALVVIRLSRVTDATTSPERQLESCQQLCAQRDWDVVGVAEDLDVSGAVDPFDRKRRPNLARWLAFEEQPFDVIVAYRVDRLTRSIRHLQQLVRWAEDHKKLVVSATEAHFDTTTPFAAVVIALMGTVAQMELEAIKERNRSAAHFNIRAGKYRGSLPPWGYLPTRVDGEWRLAPDPVQRERILEVYHRVVDNHEPLHLVAHDLNRCGVLSPRDYFAQLQGREPQGRKWSATALKRSMTSVAMLGYATLNGKTVRDDDGAPLVRAEPILTREQLEALRAELVKTSRAKPAVSTPSLLLRVLFCAVCGEPAYKFAGGGRKHPRYRCRSMGFPKHCGNGTVAMAEWDAFCEEQVLDLLGDAERLEKVWVVGSDSAVELAEVNAELVDLTSLIGSPAYRVGSPQREALDARIAALAARQEELEGLETRPSGWEWRETGQRFGDWWREQDTAAKNTWLRSMNVRLTFDVRGGLTRTIDFGDLREYEQHLRLSSVVERLHTGMS

SEQ ID NO: 10747 - protein, 500 aa, synthetic construct
MRALVVIRLSRVTEATTSPERQLESCQQLCAQRGWDVVGVAEDLDVSGAVDPFDRKRRPNLARWLAFEEQPFDVIVAYRVDRLTRSTRHLQQLVHWAEDHKKLVVSATEAHFDTTTPFAAVVIALMGTVAQMELEAIKERNRSAAHFNIRAGKYRGSLPPWGYLPTRVDGEWRLVPDPVQRERILEVYHRVVDDHEPLHSVAHDLNRRGVLSPKDYFAQLRGREPQGREWSATALKRSMTSEAMLGYATLNGKTVRDEDGAPLVRAEPILTREQQEALRAELVKTSRAKPAVSTPSLLLRVLFCAVCGEPAYKFSGGGRKHPRYRCRSMGFPKHCGNGTVAMAEWDAFCEEQVLDLLGDAERLEKVWVAGSDSAVELAEVNAELVDLTSLIGSPAYRAGSPQREALDARIAALAARQEELEGLEARPSGWEWRRTGQRFGDWWREQNTAAKNTWLRSMNVRLTFDVRGGLTRTVDFGDLQECEQHLRLGCVVERLHTGMS

SEQ ID NO: 10748 - protein, 500 aa, synthetic construct
MRALVVIRLSRITDATTSPERQLESCQQLCAQRGWDVVGVAEDLDVSGAVDPFDRKRRPSLARWLAFEEQPFDVIVAYRIDRLTRSVRHLQQLVHWAEDHKKLVVSATEAHFDTTTPFAAVVTALMGTVAQMELEAIKERNRSAAHFNIRAGKYRGSLPPWGYLPTRVDGEWRLAPDPVQRERILEVYHRVVDNHEPLHLVAHDLNRRGVLSPKDYFAQLQGREPQGRKWSATALKRSMISEAMLGYATLNGKTVRDDDGAPLVRAEPILTREQQEALRAVLVKTSRTKPAVSTPSLLLRVLFCAVCGEPAYKFAGGGRKHPRYRCRSMGFPKHCGNGTVAMAEWDAFCEEQVLGLLGDAERLEKVWVAGSDSAVELAEVNAELVDLTSLVSSPAYRAGSPQREALDVRIAALAARQEELEGLEARPSGWEWRETGQRFGDWWREQDTAAKNAWLRSMNVRLTFDVRGGLTRTIDFGDLQEYERHLRLGSEVERLHIGTS

SEQ ID NO: 10749 - protein, 500 aa, synthetic construct
MRALVVIRLSRVTDATTSPERQLESCQQLCAQRGWDVVGVAEDLDVSGAVDPFDRKRRPNLARWLAFEEQPFDVIVAYRVDRLTRSTRHLQQLVHWAEDHKKLVVSATEAHFDTTTPFAAVVIALMGTVAQMELEAIKERNRSAAHFNIRAGKYRGSLPPWGYLPTRVNGEWRLVPDPVQRERILEVYHRVVDNHEPLHLVAHDLNRRGVLSPRDYFAQLQGREPQGRKWSATALKRSMISGTMLGYATLNGKTVRDDDGAPLVRAEPILTREQLEALRAELAKTSRAKPAVSTPSLLLRVLFCAVCGEPAYKFSGGGRKHPRYRCRSMGFPKHCGNGTVAMVEWDAFCEEQVLDLLGDAERLEKVWVAGSDSAAELAEVNAELVDLTSLIGSPAYRAGSPQREALDARIAALTARQDELKGLEARPSGWEWRETGQRFGDWWREQDTTAKNTWLRSMNVRLTFDVRGGLTRTIDFGDLQEYEQHLRLGGVVERLHTGMS

SEQ ID NO: 10750 - protein, 500 aa, synthetic construct
MRALVVIRLSRVTDATTSPERQLESCQQLCAQRGWDVVGVAEDLDVSGAVDPFDRKRRPNLARWLAFEEQPFDVIVAYRVDRLARSIRHLQQLVHWAEDHKKLVVSATEAHFDTTTPFAAVVIALMGTVAQMELEAIKERSRSAAHFNIRAGKYRGSLPPWGYLPTRVDGEWRLAPDPVQRERILEVYRRVVDNHEPLHLVAHDLNRRGVLSPRDYFAQLRGREPQGRKWSATALKRSMTSEAMLGYATLNGKTVRDDDGAPLVRAKPILTREQLEAIRAELVKTSRAKPAVSTPSLLLRVLFCAVCGEPAYKFAGGGRKHPRYRCRSMGFPKHCGNGTVAMAEWDAFCEEQVLNLLGGAERLEKVWVAGSDSAVELAEVNAELVDLTSLIGSPAYRAGSPQREALYARIAALAARQEELEGLEARPSGWEWRETGQRFGDWWREQDTAAKNTWLRSMNVRLTFDVRGGLTRTIDFGDLQEYEQHLRLGSVVERLHTGMS

SEQ ID NO: 10751 - protein, 500 aa, synthetic construct
MRALVVIRLSRVTDATTSPERQLESCQQLCAQRGWDVVGVAEDLDVSGAVDPFDRKRRPNLARWLAFEEQPFDVIVAYRVDRLARSIRHLQQLVRWAEDHKKLVVSATEAHFDTTTPFAAVVIALMGTVAQMELEAIKERSRSAAHFNIRAGKYRGSLPPWGYLPARVDGEWRLVPDPVQRERILEVYHRVVNYHEPLHLVAHDLNRRGVLSPKDYFARLQGREPQGRKWSATALKRSMISEAMLGYATLNGKTVRDDDGAPLVRAEPILTREQLEALRAELVKTSRAKPAVSTPSLLLRVLFCAVCGEPAYKFAGGGRKHPRYRCRSMGFPKHCGNGTVAMAEWDAFCEEQVLDLLGDTERLEKVWVAGSDSAVELAEVNAELVDLTSLIGSPAYRAGSPQREALDARIAALAARQEELEGLEARPSGWEWRETGQRFGDWWHEQDTAAKNTWLRSMNVRLTFDVRGGLTRTIDFGDLQEYEQHLRSGGVVERLHTGMS

SEQ ID NO: 10752 - protein, 500 aa, synthetic construct
MRALVVIRLSRVTDATTSPERQLESCRQLCAQRGWDVVGVAEDLDVSGAVDPFDRKRRPNLARWLAFEGQPFDVIVAYRVDRLARSIRHLQQLVHWAEDNKKLVVSATEAHFDTTTPFAAVVIALMGTVAQMELEAIKERSRSAAHFNIRAGKYRGSLPPWGYLPARVDGEWRLVPDPVQRERILEVYHRVVDNHEPLHLVAHDLNRRGVLSPKDYFAQLQGREPQGRKWSATALKRSMISVAMLGYATLNGKIVRDDDGAPLVRAEPILTREQLEALRAEFVKTSRAKPAVSTPSLLLRVLFCAVCGEPAYKFAGGGRKHPRYRCRSMGFPKHCGNGTVAMAEWDAFCEEQVLNLLGDAERLEKVWVAGSDSAVKLAEVNAELVDLTGLIGSPAYRAGSPQREALDARIAALAARQEELEGLEARPSGWEWRGTGQRFGDWWREQDTAAKNTWLRSMNVRLTFDVRGGLTRTIDFGDLQEYEQHLRLGSVVERLHTGMS

SEQ ID NO: 10753 - protein, 500 aa, synthetic construct
MRALVVIRLSRVTDATSSPERQLESCQQLCAQRGWDVVGVAEDLDVSGAVDPFDHKRRPNLARWLAFEEQPFDVIVAYRVDRLTRSVRHLQRLVHWAEDHKKLVVSATEAHFDTTTPFAAVVIALMGTVAQMELEAIKERSRSAAHFNIRAGKYRGSLPPWGYLPTRVDGEWRLAPDPVQRERILEVYHRVVDNHEPLHLVAHDLNRRGVLSPKDYFAQLQGREPQGRKWSATALKRSMISVAMLGYATLNGKTVRDDDGAPLVRAEPILTRGQLEALRAELVKTSRAKPAVSTPSLLLRVLFCAVCGEPAYKFAGGGRKHPRYRCRSMGFPKHCGNGTVAMAEWDAFCEEQVLDLLGDAERLEKVWVAGSDSAVELAEVNAELVDLTSLIGSPAYRAGSPQREALDARIAALAARQEELEGLEAHPSGWEWRETGQRFGDWWREQDTAAKNTWLRSMNVRLTFDVRGGLTRTIDFGDLQEYEQHLRLGSVVERLHTGMS

SEQ ID NO: 10754 - protein, 500 aa, synthetic construct
MRALVVIRLSRVTDATTSPERQLESCQQLCAQRGWDVVGVAEDLDVSGAVDPFDRKRRPNLARWLAFEEQPFDVIVAYRVDRLARSIRHLQQLVHWAEDHKKLVVSATEAHFDTTTPFAAVVIALMGTVAQMELEAIKERNRSAAHFNIRAGKYRGSQPPWGYLPARVDGEWRLVPDPVQRERILEVYHRVVDNHEPLHLVAHDLNRRGVLSPKDYFAQLRGREPQGRKWSATALKRSMISEAMLGYATLNGKTVRDDDGAPLVRAEPILTREQLEAVRAELVKTSRAKPAVSTPSLLLRVLFCAVCGEPAYKFAGGGRKHSRYRCRSMGFPKHCGNGTVAMAEWDAFCEEQVLDLLGDAERLEKVWVAGSDSAVELAEVNAELVDLTGLIGSPAYRAGSPQREALDARIAALAARQEELEGLEARPSGWEWRETGQRFGDWWREQDTAAKNTWLRSMNVRLTFDVRGGLTRTIDFGDLQEYEQHLRLGSVVERLHTGMS

SEQ ID NO: 10755 - protein, 500 aa, synthetic construct
MRALVVIRLSRVTDATTSPERQLESCQQLCARRGWDVVGVAEDLDVSGAVDPFDRKRRPNLARWLAFEEQPFDVIVAYRVDRLTRSTRHLQQLVHWAEDHKKLVVSATEAHFDTTTPFAAVVIALMGTVAQMELEAIKERSRSAAHFNIRAGKYRGSLPPWGYLPARVDGEWRLVPDPVQRERILEVYHRVVDNHEPLHLVAHDLNRRGVLSPKDYFAQLQGREPQGRKWSATALKRSMISGAMLGYATLSGKTVRDDDGAPLVRAEPILTREQQEALRAELAKTSRAKPAVSTPSLLLRVLFCAVCGEPAYKFTGGGRKHPRYRCRSMGFPKHCGNGTVAMAEWDAFCEEQVLDLLGDAERLEKVWVAGSDSAVELAEVNAELVDLTSLIGSPAYRAGSPQREALDARIAALAARQGELEGLEARPSGWEWRETGQRFGDWWREQDAAAKNTWLRSMNVRLTFDVRGGLTRTIDFGDLQEYGQHLCLGSAVERLHTGMS

SEQ ID NO: 10756 - protein, 500 aa, synthetic construct
MRALVVIRLSRVTDATTSPERQLESCRQLCAQRGWNVVGVAEDLDVSGAVDPFDRKRRPNLARWLAFEEQPFDVIVAYRVDRLTRSTRHLQQLVHWAEDHKKLVVSATEAHFDTTTPFAAVVIALMGTVAQMELEAIEERNRSAAHFNIRAGKYRGSLPPWGYLPTRVNGEWRLAPDPVQRERILEVYHRVVDNHEPLHLVAHDLNRRGVLSPKDYFAQLQGREPQGRKWSATALKRSMISEAMLGYATLNGKTVRDGNGAPLVRAEPILTREQQEALRAELVKTSRAEPAVSTPSLLLRVLFCAVCGEPAYRFAGGGRKHPRYRCRSMGFPKHCGNGTVAMVEWDAFCEKQVLDLLGDAERLEKVWVAGSDSAVELAEVNAELVDLTSLIGSPAYRAGSPQRKALDARIAALAARQEELEGLEARPSGWEWRETGQRFGDWWREQDTAAKNTWLRSMNVRLTFDVRGGLTRTIDFGDLQEYEQHLRLGSVVERLHTGMS

SEQ ID NO: 10757 - protein, 500 aa, synthetic construct
MRALVVIRLSRVTEATTSPERQLESCQQLCAQRGWDVVGVAEDLDVSGAVDPFDRKRRPNLARWLAFEEQPFDVIVAYRVDRLARSIRHLQQLVHWAEDHKKLVVSATEAHFDTTTPFAAVVIALMGTVAQMELEAIKERSRSAAHFNIRAGKYRGSLPPWGYLPARVDGEWRLVPDPVQRERILEVYHRVVDNHEPLHLVAHDLNRRGVLSPKDYFAQLQGREPQGRKWSATALKRSMISEAMLGYVSLNGKTVRDDDGAPLVRAEPILTREQLEALRAELVKTSRAKPAVSTPSLLLRVLFCAVCGEPAYKFAGGGRKHPRYRCRSMGFPKHCGNGTVATAEWDAFCEEQVLDLLGDTERLEKVWVAGSDSAIELAEVNAELVDLTSLIGSPAYRAGSPQREALDARIAALATRQEELEGLEARPSGWEWRETGQRFRDWWREQDTAAKNTWLRSMNVRLTFDVRGGLTRTIDFGDLQEYEQHLRLGSVVERLHTGTS

SEQ ID NO: 10758 - protein, 500 aa, synthetic construct
MRALVVIRLSRVTDATTSPERQLESCRQLCAQRGWDVVGVAEDLDVSGAVDPFDRKRRPNLARWLAFGEQPFDVIVAYRVDRLARSIRHLQQLVHWAEDHKKLVVSATEAHFDTTTPFAAVVIALMGTVAQMELEAIKERNRSAAHYNIRAGKYRGSLPPWGYLPARVDGEWRLVPDPVQRERILEVYHRVVDNHEPLHLVAHDLNRRGVLSPKDYFAQLQGREPQGRKWSATALKRSMTSEAMLGYATLNGKTVRDDDGAPLVRAEPILTREQLEALRAELVKASRAKPAVSTPSLLLRVLFCAVCGEPAYKFAGGGRKHPRYRCRSMGFPKHCGNGTVAMAEWDAFCEEQVLDLLGDVERLEKVWVAGSDSAVKLAEVNAELVDLTGLIGSPAYRVGSPQREALDARIAALAARQEELEGLEARPSGWEWRGTGQRFGDWWREQDTAAKNTWLRSMNVRLTFDVRGGLTRTIDLGDLQEYEQHLRLGSVVERLHTGMS

SEQ ID NO: 10759 - protein, 500 aa, synthetic construct
MRALVVIRLSRVTDATTSPERQLESCQQLCAQRGWDVVGVAEDLDVSGAVDPFDRKRRPNLARWLAFEEQPFDVIVAYRVDRLTRSVRHLQQLVHWAEDHKKLVVSATEAHFDTTTPFAAVVIALMGTVAQMELEAIKERNRSAAHFNIRAGKYRGSLPPWGYLPTRVDGEWRLVPDPVQRERILEVYHRVVDNHEPLHLVAHDLNRRGVLSPKDYFAQLRGREPQGRKWSATALKRSMISVAMLGYATLNGKTVRGDDGAPLVRAEPILTREQLEALRAELVKTSRAKPAVSTPSLLLRVLFCAVCGEPAYKFSGGGRKHPRYRCRSMGFPKHCGNGTVAMAEWDAFCEEQVLDLLGDAERLEKVWVAGSDSAVELAEVNAELVDLTSLIGSPAYRAGYPQREALDARIAALAARQEELEGLEARPSGWEWRGTGQRFGDWWREQDTAAKNTWLRSMNVRLTFDVRGGLTRTIDFGDLQGYEQHLRLGNVVERLHTGMS

SEQ ID NO: 10760 - protein, 500 aa, synthetic construct
MRALVVIRLSRVTDATTSPERQLESCQQLCAQRGWDVVGVAEDLDVSGAVDPFDRKRRPNLARWLAFEEQPFDVIVAYRVDRLTRSTRHLQQLVHWADDHKKLVVSATEAHFDTTTPFAAVVIALMGTVAQMELEAIKERSRSAAHFNIRAGKYRGSLPPWGYLPARVDGVWRLVPDPVQRERILEVYHRVVNSHEPLHLVAHDLNRRGVLSPRDYFAQLRGREPQGRKWSATALKRSMTSEAMLGYATLNGKTVRDDDGAPLVRAEPILTREQLEALRAELAKTSRAKPAVSTPSLLLRVLFCAVCGEPAYKFAGGGRKHLRYRCRSMGFPKHCGNGTVAMAEWDAFCEEQVLGLLGDAERLEKVWVAGSDSAVELAGVNAELVDLTSLIGSPAYRAGSPQREALDARIAALAARQEELEGLEARPSGWEWRETGQRFGDWWREQDTAAKNTWLRSMNVRLTFDVRGGLTRTIDFGDLQEYEQHLRSGSVVERLYTGMS

SEQ ID NO: 10761 - protein, 500 aa, synthetic construct
MRALVVIRLSRVTDATTSPERQLGSCQQLCAQRGWDVVGVAEDLDVSGAVDPFDRKRRPNLARWLAFEEQPFDVIVAYRVDRLTRSTRHLQQLVHWAEDHKKLVVSATEAHFDTTTPFAAVVIALMGTVAQMELEAIKERSRSAAHFNIRAGKYRGSLPPWGYLPTRVDGEWRLVPDPVQRERILEVYHRVVDNHEPLHLVAHDLNRRGVLSPKDYFAQLRGREPQGRKWSATALKRSMISEAMLGYTTLNGKTVRDDDGAPLVRAEPILTREQLEAVRAELVKTSRAKPAVSTPSLLLRVLFCAVCGEPAYKFAGGGRKHPRYRCRSMGFPKHCGNGTVAMAEWDAFCEEQVLDLLGDAERLEKVWVAGSDSAVELAEVNAELVDLTSLIGSPAYRTGSPQREALDARIAALAARQGELEGLEARPSGWEWRETGQRFGDWWREQDTAAKNTWLRSMNVRLTFDVRGGLTRAIDFGDLQEYEQHLRLGSVVERLHTGMS

SEQ ID NO: 10762 - protein, 500 aa, synthetic construct
MRALVVIRLSRVTDATTSPERQLESCQQLCAQRGWDVVGVAEDLDVSGAVDPFDRRRRPNLARWLAFEEQPFDVIVAYRVDRLARSVRHLQQLVRWAEDHKKLVASATEAHFDTTTPFAAVVIALMGTVAQMELEAVKERNRSAAHFNIRAGKYRGSLPPWGYLPTRVDGEWRLVPDPVQRERILEVYRRVVDNHEPLHLVAHDLNRRGVLSPRDYFAQLRGRGPQGRKWSATALKRSMISEAMLGYATLNGRTVRDEDGAPLVRAEPILTREQLEVLRAELVKTSRAKPAVSTPSLLLRVLFCAVCGEPAYKFTGGGRKHPRYRCRSMGFPKHCGNGTVAMAEWDAFCEEQVLDLLGDAERLEKVWVAGSNSAVELAEVNAELVDLTSLIGSPAYRAGSPQREALDARIAALAARQEELEGLEARPSGWEWRETGQRFGDWWREQDTAAKNTWLRSMNVRLTFDVRGGLTRTIDFGDLQEYEQYLRLGSEVERLHTGMS

SEQ ID NO: 10763 - protein, 500 aa, synthetic construct
MRALVVIRLSRVTDATTSPERQLESCQQLCAQRGWDVVGVAEDLDVSGAVDPFDRKRRPNLARWLAFEEQPFDVIVTYRVDRLTRSIRHLQQLVHWAEDHKKLVVSATEAYFDTTTPFAAVVIALMGTVAQLELEAIKERSRSAAHFNIRAGKYRGSLPPWGYLPTRVDGEWRLAPDPVQRERILEVYHRVVNNHEPLHLVAHDLNRRGVLSPKDYFAQLQGREPQGRKWSATALKRSMTSEAMLGYATLNGKTVRDDDGAPLVRAEPILTREQLEALRAELIKTSRAKPAVSTPSLLLRVLFCAVCGEPAYKFSGGGRKHPRYRCRSMGFPKHCGNGTVAMAEWDAFCEEQVLDLLGDAERLEKVWVAGSDSAVELAEVNAELVDLTSLIGSPAYRAGSPQREALDARIAALAARQAELEGLEARPSGWEWRETGQGFGDWWREQDTAAKNTWLRSMNVRLTFDVRGGLTGTIDFGDLQEYEQRLRLGSVVERLHTGMS

SEQ ID NO: 10764 - protein, 500 aa, synthetic construct
MRALVVIRLSRVTDATTSPERQLESCQQLCAQRGWDIVGVAEDLDVSGAVDPFDRKRRPNLARWLAFEEQPFDVIVAYRVDRLTRSIRHLQQLVHWAEDHKKLVVSTTEAHFDTTTPFAAVVIALMGTVAQMELEAIKERNRSAAHFNIRAGKYRGSLPPWGYLPTRADGEWRLVPDPVQRERILEVYHRVVDNHEPLHLVAHDLNRRGVLSPRDYFAQLRGREPQGRRWSATALKRSMISEAMLGYATLNGKTVRDGDGAPLVRAEPILTREQQEALRAELVKTSRAKPAVSTPSLLLRVLFCAVCGEPAYKFAGGGRKHPRYRCRSMGFPKHCGNGTVAMAEWDAFCEERVLDLLGDAERLEKVWVAGSDSAVELAEVNAELVDLTSLIGSPAYRAGSPQREALDARIAALAARQEELEGLEARPSGWEWRETGQRFRDWWREQDTAAKNTWLRSMNVRLTFDVRGELTRTIDFGDLQEYEQHLRLGSGVERLHTGMS

SEQ ID NO: 10765 - protein, 500 aa, synthetic construct
MRTLVVIRLSRVTDATTSPERQLESCQQLCAQRGWDVVGVAEDLDVSGAVDPFDRKRRPNLARWLAFEEQPFDVIVAYRIDRLARSIRHLQQLVHWAEDHKKLVVSATEAHFDTTTPFAAVVIALMGTVAQMELEAIKERSRSAAHFNIRAGKYRGSLPPWGYLPTRVDGEWRLAPDPVQRERILEVYHRVVDNHESLHLVAHDLNRRGVLSPKDYFAQLQGREPQGRKWSATALKRSMISEAMLGYATLNGKIVRDDDGAPLVRAEPILTREQLEALRAELVKTSRAKPAVPTPSLLLRVLFCAVCGEPAYRFSGGGRKHPRYRCRSMGFPKHCGNGTVAMAEWDAFCEEQVLDLLGDAERLEKVWVAGSDSAVELAEVNAELVDLTSLIGSPAYRAGSPQRETLDARIAALAARQGELEGLEARPSGWEWRETGQRFGDWWREQDTAAKNAWLRSMNVRLTFDVRGGPTRTIDFGDLQEYEQHLRLGSVVERLHTGMS

SEQ ID NO: 10766 - protein, 500 aa, synthetic construct
MRALVVIRLSRVTDATTSPERQLESCQQLCAQRGWDVVGVAEDLDVSGAVDPFDRKRRPNLARWLAFEEQPFDVIVAYRVDRLTRSTRHLQRLVHWAEDHKKLVVSATEAHFDTTTPFAAVVTALMGTVAQMELEAIKERSRSAAHFNIRAGKYRGSLPPWGYLPARVDGEWRLVPDPVQRERILEVYHRVVDDHEPLHLVAHDLNRRGVLSPKDYFAQLQGREPQGRKWSATALKRSMISEAMLGYVTLNGKIVRGDDGAPLVRAEPILTREQLEALRAELVKTSRAKPAVSTPSLLLRVLFCAVCGEPAYKFAGGGRKHPRYRCRSMGFPKHCGNGTVAMAEWDAFCEEQVLNLLGDAGRLEKVWVAGSDSAVELAEVNAELVDLTSLIGSPAYRAGSLQREALDARIAALAARQEELEGLEARPSGWEWRETGQRFGDWWREQDTAAKNTWLRTMNVRLTFDVRGGLTRTIDLGELLEYEQHLRSGGVVERLHTGMA

SEQ ID NO: 10767 - protein, 500 aa, synthetic construct
MRALVVIRLSRVTEATTSPERQLESCQQLCAQRGWDVVGVAEDLDVSGAVDPFDRERRPNLARWLAFEEQPFDVIVAYRVDRLTRSTRHLQQLVHWAEDHKKLVVSATEAHFDTTTPFAAVVIALMGTVAQMELEAIKERNRSAAHFNIRAGKYRGSLPPWGYLPTRVDGEWRLAPDPVQRERILEVYHRVVDNHEPLHSVAHDLNRRGVLSPKDYFAQLQGREPQGRKWSATALKRSMISVAMLGYATLNGKTVRDDDGAPLVRAEPILTRGQLEALRAELVKTSRAKPAVSTPSLLLRVLFCAVCGEPAYKFAGGGRKHPRYRCRSMGFPKHCGNGTVAMAEWDAFCEEQVLDLLGDAERLEKVWVAGSDSAVELAEVNAELVDLTSLIGSPAYRAGSPQREALDARIAALAARQEELEGLEARPSGWEWRETGQRFGDWWREQDTAAKNTWLRSMNVRLTFDVRVGLTRTIDFGDLQEYGQHLRSGSVVERLHTGMS

SEQ ID NO: 10768 - protein, 500 aa, synthetic construct
MRALVVIRLSRVTDATTSPERQLESCQQLCAQRGWDVVGVAEDLDVSGAVDPFDRKRRPNLARWLAFEEQPFDVIVAYRVDRLTRSVRHLQQLVHWAEDHKKLVVSATEAHFDTTTPFAAVVIALMGTVAQMELEAIKERNRSAAHFNIRAGKYRGSLPPWGYLPTRVDGEWRLVPDPVQRERILEVYHRVVNNHEPLHLVAHDLNRRGVLSPKDYFAQLQGREPQGRKWSATALKRSMISVAMLGYATLNGKTVRDDDGAPLVRAEPILTREQQEALRTELVKTSRAKPAVSTPSLLLRVLFCAVCGEPAYKFSGGGRKHPRYRCRSMGFPKHCGNGTVAMAEWDAFCEEQVLDLLGDAERLEKVWVAGSDSAVELAEVNAELVDLTSLIGSPAYRADSPQREALDARIAALAARQEELEGLEARPSGWEWRETGQRFGDWWREQDTAAKNTWLRSMNVRLTFDVRGGLTRTIDFGDLQEYERHLRLGSVVERLHTGMS

SEQ ID NO: 10769 - protein, 500 aa, synthetic construct
MRALVVIRLSRVTDATTSPKRQLESCQQLCAQRGWDVVGVAEDLDVSGAVDPFDRKRRPNLARWLAFEEQPFDVIVAYRVDRLARSIRHLQQLVHWAEDHKKLVVSATEAHFDTTTPFAAVVIALMGTVAQMELEAIRERNRSAAHFNIRAGKYRGSLPPWGYLPTRVDGVWRLVPDPVQRERILEVYHRVVDNHEPLHLVAHDLNQRGVLSPKDYFAQLRGREPQGREWSATALKRSMTSEAMLGYATLNGKIVRDDDGAPLVRAEPILTREQLEALRAELVKTSRAEPAVSTPSLLLRVLFCAVCGEPAYRFAGGGRKHPRYRCRSMGFPKHCGNGTVAMAEWDAFCEEQVLGLLGDAERLEKVWVAGSGSAVELAEVSAELVDLTSLIGSPAYRVGSPQREALDARIAALAARQEKLEGLEARPSGWEWRETGQRFGDWWREQDTAAKNTWLRSMNVRLTFDVRGGLTRTIDFGDLQEYEQHLRLGSVVERLHTGMS

SEQ ID NO: 10770 - protein, 500 aa, synthetic construct
MRALVVIRLSRVTDATTSPERQLESCQQLCAQRGWDVVGVAEDLDVSGAVDPFDRKRRPNLARWLAFEEQPFDAIVAYRVDRLARSIRHLQQLVHWADDHKKLVVSATEAHFDTTTPFAAVVIALMGTVAQMELEAIKERSRSAAHFNIRAGKYRGSLPPWGYLPARVDGVWRLVPDPVQRECILEVYHRVVNDHEPLHIVAHDLNRRGVLSPKDYFAQLQGREPQGRKWSATALKRSMISEAMLGYATLNGKTVRDDDGAPLVRAEPILTRGQLEALRAELVKTSRAKPAVSTPSLLLRVLFCAVCGEPAYKFAGGGRKHPRYRCRSMGYPKHCGNGTVAMAEWDAFCEEQVLDLLGDAERLEKVWVAGSDSAVELAEVNAELVDLTSLIGSPAYRAGSPQREALDARIAALAARQEELEGLEARPSGWEWRGTGQRFGDWWREQDTAAKNTWLRSMNVRLTFDVRGGLTRTIDFGDLREYEQHLRLGSVVERLHTGMS

SEQ ID NO: 10771 - protein, 500 aa, synthetic construct
MRALVVTRLSRVTDATTSPERQLESCQQLCAQRGWDVVGVAEDLDVSGAVDPFDRKRRPNLARWLAFEEQPFDVIVAYRVDRLTRSVRHLQQLVHWAEDHKKLVVSATEAHFDTTTPFAAVVIALMGTVAQMELEAIKERSRSAAHFNIRAGKYRGSLPPWGYLPARVDGEWRLVPDPVQRERILEVYRRVVDNHEPLHLVAHDLNRRGVLSPKDYFAQLQGREPQGRKWSATALKRSMISEAMLGYATLNGKTVRDDDGAPLVRAEPILTREQLEALRAVLAKTSRAKPAVSTPSLLLRVLFCAVCGEPAYKFAGGGRKHPRYRCRSMGFPKHCGNGTVTMAEWDAFCEEQVLNLLGDAERLEKVWVAGSDSAVELAEVNAELVDLTSLIGSPAYRAGSPQREALDARIAALAARQEELEGLEARPSGWEWRETGQRFGDWWREQDTAAKNTWLRSMSVRLTFDVRGGLTRTIDFGDLQEYEQHLRLGSVVERLHTGMS

SEQ ID NO: 10772 - protein, 500 aa, synthetic construct
MRALVVIRLSRVTEATTSPERQLESCQQLCAQRGWDVVGVAEDLDVSGAVDPFDRKRRPNLARWLAFEEQPFDVIVAYRVDRLTRSVRHLQRLVHWAEDHKKLVVSATEAHFDTTTPFAAVVIALMGTVAQMELEAIKERSRSAAHFNIRAGKYRGSLPPWGYLPTRVDGEWRLVPDPVQRERILEVYHRAVDNHEPLHLVAHDLNRRGVLSPRDYFAQLRGREPQGRRWSATALKRSMISEAMLGYATLNGKTVRGDDGAPLVRAEPILTREQLEALRAELVKTSRAKPAVSTPSLLLRVLFCAVCGEPAYKFAGGGRKHPRYRCRSMGFPKHCGNGTVAMAEWDAFCEEQVLNLLGDAERLEKVWVAGSDSAVELAEVNAELVDLTSLIGSPTYRTGSPQREALDARIAALAARQEELEGLEARPSGWEWRGTGQRFGDWWREQDTAAKNTWLRSMNVRLTFDVRGELTRTIDFGDLQEYEQHLRLGSVVERLHTGMS

SEQ ID NO: 10773 - protein, 500 aa, synthetic construct
MRALVVIRLSRVTDATTSPERQLESCQQLCAQRGWDVVGVAEDLDVSGAVDPFDRKRRPNLARWLAFEEQPFDVIVAYRIDRLARSIRHLQQLVHWAEDHKKLVVSATEAHFDTTTPFAAVVIALMGTVAQMELEAIKERSRSAAHFNIRAGKYRGSLPPWGYLPTRVVGEWRLVPDPVQRERILEVYHRVVDNHEPLHLVAHDLNRRGVLSPKDYFAQLRGREPQGRKWSATALKRSMISEAMLGYATLNGKTVRDDDGAPLVRAEPILTREQLEALRAELVKTSRAKPAVSTPSLLLRVLFCAVCGEPAYKFAGGGRKHPRYRCRSMGFPKHCGNGTVAMAEWDAFCEEQVLNLLGDAERLEKVWVAGSDSAVELAEVSAELVDLTSLIGSPAYRAGSPQREALDARIAALAARQEELEGLEARPSGWEWRETGRRFGDWWREQDTAAKNTWLRTMNVRLTFDVRGGLTRTIDFGDLQEYEQHLCLGSVVERPHTGMS

SEQ ID NO: 10774 - protein, 500 aa, synthetic construct
MRALVVIRLSRVTDATTSPERQLESCQQLCAQRGWDVVGVAEDLDVSGAVDPFDRKRRPNLARWLAFEVQPFDAIVAYRVDRLTRSIRHLQQLVHWAEDHKKLVASATEAHFDTTTPFAAVVIALMGTVAQMELEAIKERNRSAAHFNIRAGKYRGSLPPWGYLPARVDGEWRLVPDPVQRERILEVYHRVVDNHEPLHLVAHDLNRRGVLSPKDYFAQLRGREPQGRKWSATALKRSLTSEAMLGYATLNGKIVRDDDGAPLVRAEPILTREQLEALRAELVKTSRAKPAVSTPSLLLRVLFCAVCGEPAYKFAGGGRKHSRYRCRSMGFPKHCGNGTVAMAEWDAFCEKQVLDLLGDAERLEKVWVAGSDSAVELTEVNAELVDLTSLIGSPAYRAGSPQREALDARIAVLAARQEELEDLEARPSGWEWRETGQRFGDWWREQDTAAKNTWLRSMNVRLTFDVRGGLTRTIDFGDLQEYEQHLRLGSVVERLHAGMS

SEQ ID NO: 10775 - protein, 500 aa, synthetic construct
MRALVVIRLSRVTDATTSPERQLESCQQLCAQRGWDVVGVAEDLDVSGAVDPFDRKRRPNLARWLAFEEQPFDVIVAYRVDRLTRSIRHLQQLVHWAEDHKKLVVSATEAHFDTTTPFAAVTIALMGTVAQMELEAIKERSRSAAHFNIRAGKYRGSLPPWGYLPTRVDGEWRLVPDPVQRERILEVYHRVVDNHEPLHLVAHDLNRRGVLSPKDYFAQLRGREPQGRKWSATALKRSMTSEAMLGYATLNGKTVRDDGGAPLVRAEPILTREQQEALRAELVKTSRAKPAVSTPSLLLRVLFCAVCGEPAYKFAGGGRKHPRYRCRSMGFPKHCGNGTVAMAEWDAFCEEQVLNLLGDAERLEKVWVAGSDSAVELAEVNAELVDLTSLIGSPAYRAGSPQREALDARIAALAARQEELEGLEARPSGWEWRETGQRFGDWWHEQDTATKNTWLRSMNVRLTFDARGGLTRTIDYGDLREYEQHLRSGSVVERLHTGMS

SEQ ID NO: 10776 - protein, 500 aa, synthetic construct
MRALVVIRLSRVTDATTSPERQLESCQQLCAQRGWDVVGVAEDLDVSGAVDPFDRKRRPNLARWLAFEEQPFDVIVAYRVDRLTRSVRHLQQLVHWAEDHKKLVVSATEAHFDTTTPFAAVVIALMGTVAQMELEAIKERSRSAAHFNIRAGKYRGSLPPWGYLPARVDGEWRLVPDPVQRERILEVYHRVVDNHEPLHLVAHDLNRRGVLSPKDYFAQLQGREPQGRKWSATALKRSMISEAMLGYATLNGKTVRDDDGAPLVRAEPILTREQQEALRAELVKTSRAKPAVSTPSLLLRVLFCAVCGEPAYKFSGGGRKHPRYRCRSMGFPKHCGNGTVAMAEWDAFCEEQVLDLLGDAERLEKVWVAGSDSAVELAGVNAELVDLTSLIGSPAYRAGSPQREALDARIAVLAARQEELEGLEARPSGWEWRGTGQRFGDWWREQDTAAKNTWLRSMNVRLTFDVRGGQTRTIDFGDLQEHEQHLRLGSVVERLHTGMS

SEQ ID NO: 10777 - protein, 500 aa, synthetic construct
MRALVVIRLSRVTDATTSPERQLESCQQLCAQRGWDVVGVAEDLDVSGAVDPFDRRRRPNLARWLAFEEQPFDVIVAYRVDRLTRSTRHLQQLVHWAEDHKKLVVSATEAHFDTTTPFAAVVIALMGTVAQMELEAIKERNRSAAHFNIRAGKYRGSLPPWGYLPTRVDGEWRLVPDPVQRERILEVYHRVVDNHEPLHLVAHDLNRRGVLSPKDYFAQLQGREPQGRKWSATALKRSMISEAMLGYATLNGKTVRDDDGAPLVRAEPILTREQQEALRAELVKTSRAKPAVSTPSLLLRVLFCAVCGEPAYKFAGGGRKHPRYRCRSMGFPKHCGNGTVAMAEWDAFCEEQVLGLLGDAERLEKVWVAGSDSAVELAEVSAELVDLTSLIGSPAYRVGSPQREALDARIAALAARQEKLEGLEARPSGWEWRETGQRFGDWWREQNTAAKNTWLRSMNVRLTFDVRGGLTRTIDFGDLQEYEQHLRLGSAVERLHTGMS

SEQ ID NO: 10778 - protein, 500 aa, synthetic construct
MRALVVIRLSRVTDATTSPERQLESCQQLCAQRGWDVVGVAEDLDVSGAVDPSDRKRRPNLARWLAFEEQPFDVIVAYRVDRLTRSVRHLQQLVHWAEDHKKLVVSATEAHFDTTTPFAAVVIALMGTVAQMELEAIKERSRSAAHFNIRAGKYRGSLPPWGYLPARVDGEWRLVPDPVQRERILEVYHRVVDNHEPLHLVAHDLNRRGVLSPKDYFAQLRGREPQGRKWSATALKRSMISVAMLGYATLCGKTVRDDDGAPLVRAEPILTREQLEALRAELVKTSRAKPAVSTPSLLLRVLFCAVCGEPAYKFAGGGRKHPRYRCRSMGFPKHCGNGTVAMAEWDAFCEEQVLNLLGDAERLEKVWVAGSDSAVELAEVNKELVDLTSLIGSPAYRAGSPQREALDARIAALAARQEELEGLEARPSGWEWRGTGQRFGDWWRELDTAAKNTWLRSMNIRLTFDVRDGLTRTIDFGDLQEYEQHLRLGSVVERSHTGMS

SEQ ID NO: 10779 - protein, 500 aa, synthetic construct
MRALVVIRLSRVTDATTSPERQLESCQQLCAQRGWDVVGVAEDLDVSGAVDPFDRKRRPNLARWLAFEEQPFDVIVAYRVDRLARSIRHLQQLVHWAEDHKKLVVSATEAHFDTTTPFAAVVIALMGTVAQMELEAIKERSRSAAHFNIRAGKYRGSLPPWGYLPTRVDGEWRLVPDPVQRERILEVYHRVVDNHEPLHLVAHDLNRRGVLSPRDYFAQLRGREPQGRKWSATALKRSMISEAMLGYATLNGRTVRDDDGAPLVRAEPILTREQLEALRAELVKTSRAKPAVSTPSLLLRVLFCAVCGEPAYKFAGGGRKHPRYRCRSMGFPKHCGNGTVAMAEWDAFCEEQVLDLLGDAERLEKVWVAGSDSAVELAEVNAELVDLTSLISSPAYRAGSPQREALDARIAALAARQEELEGLEARPSGWEWRGTGQRFGDWWREQDSAAKNTWLRSMNVRLTFDVRGGLTRTIDFGDLQEHEQRLRSGSVVGRLHTGMS

SEQ ID NO: 10780 - protein, 500 aa, synthetic construct
MRALVVIRLSRVTDATTSPERQLESCRQLCAQRGWDVVGVAEDLDVSGAVDPFDRKRRPNLARWLAFEEQPFDVIVAYRVDRLTRSTRHLQQLVHWAEDHKKLVVSATEAHFDTTTPFAAVVIALMGTVAQMELEAIKERSRSAAHFNIRAGKYRGSLPPWGYLPTRVDGEWRLAPDPVQRERILEVYHRVVDNHEPLHLVAHDLNRRGVLSPKDYFAQLQGREPQGRKWSATALKRSMISEAMLGYATLNGKTVRDDDGAPLVRAEPILTREQLEALRAELVRTSRAKPAVSTPSLLLRVLFCAVCGEPAYKFAGGGRKHPRYRCRSMGFPKHCGNGTVAMAEWDAFCEEQVLDLLGDAERLEKVWVAGSDSAVELAEVNAELVDLTSLIGSPTYRAGSPQREALDARIAALAARQEELEGLEARPSGWEWRETGQRFGDWWREQDTAAKNTWLRSMNVRLTFDVRGGLTRMIDFGDLQEYEQHLRIGSVVERLHTGMS

SEQ ID NO: 10781 - protein, 500 aa, synthetic construct
MRALVVIRLSRVTDATTSPERQLESCQQLCAQRGWDVVGVAEDLDVSGAVDPFDRKRRPNLARWLAFEEQPFDVIVAYRVDRLTRSVRHLQQLVHWAEDHKKLVVSATEAHFDTTTPFAAVVIALMGTVAQMELEAIKERSRSAAHFNIRAGKYRGSLPPWGYLPARVDGEWRLVPDPVQRERILEVYHRVVDNHEPLHLVAHDLNRRGVLSPKDYFAQLRGREPQGRKWSATALKRSMISVAMLGYATLCGKTVRDDDGAPLVRAEPILTREQLEALRAELVKTSRAKPAVSTPSLLLRVLFCAVCGEPAYKFAGGGRKHPRYRCRSMGFPKHCGNGTVAMAEWDAFCEEQVLNLLGDAERLERVWVAGSDSAVELAEVNKELVDLTSLIGSPAYRAGSPQREALDARIAALAARQEELEGLEACPSGWEWRETGQRFGDWWREQDTAAKNTWLRSMNVRLTFDVRGGLTRTIDFGELQEYEQHLRLGSVVERLHTGMS

SEQ ID NO: 10782 - protein, 500 aa, synthetic construct
MRALVVIRLSRVTDATTSPERQLESCQQLCAQRGWDVVGVAEDLDVSGAVDPFDRKRRPDLARWLAFEEQPFDVIVAYRVDRLTRSTRHLQRLVHWAEDHKKLVVSATEAHFDTTTPFAAVVIALMGTVAQMELEAIKERTRSAAHFNIRAGKYRGSLPPWGYLPTRVDGEWRLVPDPVQRERILEVYHRVVDNHEPLHLVAHDLNRRGVLSPKDYFAQLRGREPQGRKWSATALKRSMISEAMLGYATLNGETVRGDDGAPLVRAEPILTRGQLEALRAELVKTSRAKPAVSAPSLLLRVLFCAVCGEPAYKFAGGGRKHPRYRCRSMGFPKHCGNGTVAMAEWDAFCEEQVLDLLGDAERLEKVWVAGSDSAVELAEVNAELVDLTSLIGSPAYRAGSPQREALDARIAVLAARQEELEGLEARPSGWEWRGTGQRFGDWWREQDTAAKNTWLRSMNVRLTFDVRGGLTRTIDFGDLQEYEQHLRLGSVVERLHTGMS

SEQ ID NO: 10783 - protein, 500 aa, synthetic construct
MRALVVIRLSRVTETTTSPERQLESCQQLCAQRGWDVVGVAEDLDVSGAVDLFDRKRRPNLARWLAFEEQPFDVIVAYRVDRLTRSIRHLQQLVHWAEDHKKLVVSATEAHFDTTTPFAAVVIALMGTVAQMELEAIKERNRSAAHFNIRAGKYRGSLPPWGYLPTRVDGEWRLVPDPVQRERILEVYHRVVDNHEPLHLVAHDLNRRGVLSPKDYFAQLQGREPQGRKWSATALKRSMISEAMLGHATLNGKTVRDDDGAPLVRAEPILTREQQEALRAELVKTSRAKPAVSTPSLLLRVLFCAVCGEPAYKFSGGGRKHPRYRCRSMGFPKHCGNGTVAMAEWDAFCEGQVLGLLGDAERLEKVWVAGSDSAVELAEVNAELVDLTSLIGSPAYRADSPQREALGARIAALAARQEELEGLEARPSGWEWRETGQRFGDWWREQDTAAKNTWLRSMNVRLTFDVRGGLTRTIDLGGLQEYEQHLRSGSVVERLHTGMS

SEQ ID NO: 10784 - protein, 500 aa, synthetic construct
MRALVVIRLSRVTDATTSPERQLESCQQLCAQRGWDVVGVAEDLDVSGAVDPFDRKRRPNLARWLAFEEQLFDVIVAYRVDRLTRSTRHLQQLVHWAEDHKKLVVSATEAHFDTTTPFAAVVIALMGTVAQMELEAIKERSRSAAHFNIRAGKYRGSLPPWGYLPTRVDGEWRLVPDPVQRERILEVYHRVVDNHESLHLVAHDLNRRGVLSPKDYFAQLRGREPQGRKWSATALKRSMTSEAMLGYATLNGKTVRDDDGAPLVRAEPILTREQLEALRAELVKTSRAKPAVSTPSLLLRVLFCAVCGEPAYKFAGGGRKHPRYRCRSMGFPKHCGNGTVAMAEWDAFCEEQVLNLLGDAERLEKVWVAGSDSAVELAEVNAELVDLTSLIGSPAYRAGSPQREALDARIAVLAARQEELEGLEARPSGWEWRETGQRFGDWWREQGTAAKNIWLRSMNVRLTFDVRGGLTRTIDLGDLQEYEQHLRLGSVVERLHTGMS

SEQ ID NO: 10785 - protein, 500 aa, synthetic construct
MRALVVIRLSRVTDATTSPERQLESCQQLCAQRGWDVVGVAEDLDVSGAVDPFDRKRRPNLARWLAFEEQPFDVIVAYRVDRLTRSTRHLQQLVHWAEDHRKLVVSATEAHFDTTTPFAAVVIALMGTVAQMELEAIKERNRSAAHFNIRAGKYRGSLPPWGYLPTRVDGEWRLVPDPVQHERILEVYHRVVDNHEPLHLVAHDLNRRGVLSPKDYFAQLQGREPQGRKWSATALKRSMISEAMLGYATLNGKTVRDDDGAPLVRAEPILTREQQEALRAELVKTSRAKPAVSTPSLLLRVLFCAVCGEPAYKFAGGGRKHPRYRCRSMGFPKHCGNGTVAMAEWDAFCEEQVLNLLGDAERLEKVWVAGSDSAVELAEVNAELVDLTSLIGSPAYRAGSTQREALDARIAALAARQEELEGLEARPSGWEWRETGQRFGDWWREQDTAAKNTWLRTMNVRLTYDVRGGLTRTIDFGDLQEYEQHLRSGSVVERLHTGMS

SEQ ID NO: 10786 - protein, 500 aa, synthetic construct
MRALVVIRLSRVTDATTSPERQLESCQQLCAQRGWDVVGVAEDLDVSGSVDPFDRKRRPNLARWLAFGEQPFDVIVAYRVDRLARSIRHLQQLVHWAEDHKKLVVSATEAHFDTTTPFAAVVIALMGTVAQMELEAIKERNRSAAHFNIRAGKYRGSLPPWGYLPARVDGEWRLVPDPVQRERILEVYHRVVDNHEPLHLVAHDLNRRGVLSPKDYFAQLRGREPQGRKWSATALKRSMISEAMLGYATLNGKTVRDDDGVPLVRAEPILTREQLEALRAELVKTSRAKPAVSTPSLLLRVLFCAVCGEPAYKFAGGGRKHSRYRCRSMGFPKHCGNGTVAMAEWDAFCEEQVLDLLGDAERLEKVWVAGSDSAVELAEVSAELVDLTSLIGSPAYRAGSPQREALDARIAALAARQEELEGLEARPSGWEWRETGQRFGDWWREQDTATKNTWLRSMNVRLTFDVRGGLTRTIDFGDLREYEQHLRLGGVVERLHTGMS

SEQ ID NO: 10787 - protein, 500 aa, synthetic construct
MRALVVIRLSRVTDATTSPERQLESCQQLCAQRGWDVVGVAEDLDVSGAVDPFDRKRRPNLARWLAFEEQPFDVIVAYRVDRLTRSIRHLQQLVHWAEDHKKLVVSATEAHFDTTTPFAAVVIALMGTVAQMELEAIKERSRSAAHFNIRAGKYRGSLPPWGYLPARVDGEWRLVADPVQRERILEVYHRVVDDHEPLHLVAHDLNRRGVLSPKDYFAQLRGREPQGRKWSATALKRSMISEAMLGYATLNGKTVRDDDGAPLVRAEPILTREQQEALRAELVKTSRAKPAVSTPSLLLRVLFCAVCGEPAYKFAGGGRKHPRYRCRSMGFPKHCGNGTVAMAEWDAFCEEQVLGLLGDAERLEKVWVAGSDSAVELAEVNAELVDLTSLIGSPAYRAGSPQREALDARIAALAARQEELEGLEARPSGWEWRETGQRFGDWWREQDTAAKNTWLRSMNVRLTFDVRGGLTRTIDFGDLQEYEQHLRLGSVAERLHTGMS

SEQ ID NO: 10788 - protein, 500 aa, synthetic construct
MRALVVIRLSRVTDATTSPERQLESCRQLCAQRGWDVVGVTEDLDVSGAVDPFDRKRRPNLARWLAFEEQPFDVIVAYRVDRLTRSVRHLQRLVHWAEDHKKLVVSATEAHFDTTTPFAAVVIALMGTVAQMELEAIKERSRSAAHFNIRAGKYRGSLPPWGYLPTRVDGEWRLVPDPVQRERILEVYRRVVDNHEPLHLVAHDLNRRGVLSPKDYFAQLRGREPQGRKWSATALKRSMISEAMLGYAILNGKTVRDDDGAPLVRAEPILTREQLEAIRAELVKTSRAKPAVSTPSLLLRVLFCAVCGEPAYKFAGGGRKHSRYRCRSMGFPKHCGNGTVAMAEWDAFCEERVLDVLGDAERLEKVWVAGSDSAAELAEVNAELVDLTSLIGSPVYRVGSPQREALDARIAALAARQEELEGLEARPSGWEWRETGQRFRDWWREQDTAAKNAWLRSMNVRLTFDVRGGLTRTIDFGDLQEYEQHLRLGSVVERFHTGMS

SEQ ID NO: 10789 - protein, 500 aa, synthetic construct
MRALVVIRLSRVTDATTSPERQLESCQQLCAQRGWDVVGVAEDLDVSGAVDPFDRKRRPNLARWLAFEEQPFDVIVAYRVDRLTRSTRHLQQLVHWAEDHKKLVVSATEAHFDTTTPFAAVVIALMGTVAQMELEAIKERSRSAAHFNIRAGKYRGSLPPWGYLPTRVDGEWRLVPDPVQRERILEVYHRVVDNHEPLHFVAHDLNRRGVLSPKDYFAQLQGREPQGRKWSATALKRSMTSEAMLGYVTLNGKTVRDDDGAPLVRAEPILTREQLEALRAALVKTSRAKPAVSTPSLLLRVLFCAVCGEPAYKFAGGGRKHPRYRCRSMGFPKHCGNGTVAMAEWDAFCEEQVLDLLGDAERLEKVWVAGSDSAAELAEVNAELVDLTSLIGSPAYRAGSPQREALDARIAALAARQEELEGLEARPSGWEWRETGQRFGDWWCEQDAAAKNTWLRSMNVRLTFDVRGGLTRTIDFGDLQEYEQHLRLGSVVERLHTGMS

SEQ ID NO: 10790 - protein, 500 aa, synthetic construct
MRALVVIRLSRVTDATTSPERQLESCQQLCAQRGWDVVGVAEDLDVSGAVDPFDRKRRPNLARWLAFEEQPFDVIVAYRVDRLTRSTRHLQQLVHWAEDHKKLVVSATEAHFDTTTPFAAVVIALMGTVAQMELEAIKERNRSAAHFNIRAGKYRGSLPPWGYLPARVDGEWRLVPDPVQRERILEVYHRVVNNHEPMHLVARDLNQRGVLSPKDYFAQLQGREPQGRKWSSTALKRSMTSEAMLGYATLNGKTVRDDDGAPLVRAEPILTREQLEALRAELVKTSRAKPAVSTPSLLLRVIFCAVCGEPAYKFSGGGRKHPRYRCRSMGFPKHCGNGTVAMAEWDAFCEEQVLDLLGDAERLEKVWVAGSDSAVELAEVNAELVDLTSLIGSPAYRAGSPQREALDARIAALAARQAELEGLEARPSGWEWCETGQGFGDWWREQDTAAKNTWLRSMNVRLTFDVRGGLTRTIDFGDLQEYERHLRLGSVVERLHTGMS

SEQ ID NO: 10791 - protein, 500 aa, synthetic construct
MRALVVIRLSRVTDATTSPERQLESCQQLCAQRGWDVVGVAEDLDVSGAVDPFDRKRRPNLARWLAFEEQPFDVIVAYRVDRLTRSTRHLQQLVHWAEDHKKLVVSATEAHFDTTTPFAAVVIALMGTVAQMELEAIKERSRSAAHFNIRAGKYRGSLPPWGYLPTRVDGEWRLVPDPVQRERILEVYHRVVDNHEPLHLVAHDLNRRGVLSPKDYFAQLRGREPQGRKWSATALKRSMISEAMLGYATLNGKTVRDDDGAPLVRAEPILTRGQLEALRAELVKTSRAKPAVSTPSLLLRVLFCAVCGEPAYKFAGGGRKHPRYRCRSMGFPKHCGNGTVAMAEWDAFCEEQVLDLLGDAERLEKVWVAGSDSAVELAEVNAELVDLTSLISSPAYRAGSPQREALDARIAALAARQEELEGLEARPSGWEWRETGQRFGDWWREQDTAAKNTWLRSMDVRLTFDVRGGLTRTIDFGDLQEYEQHLRLGGVVERLHTGMS

SEQ ID NO: 10792 - protein, 500 aa, synthetic construct
MRALVVIRLSRVTDATTSPERQLESCQQLCAQRGWDVVGVAEDLDVSGAVDPFDRKRRPNLARWLAFEEQPFDVIVAYRVDRLARSIRHLQQLVHWAEDHKKLVVSATEAHFDTTTPFAAVVIALMGTVAQMELEAIKERSRSAAHFNIRAGKYRGSLPPWGYLPTRVDGEWRLVPDPVQRERILEVYHRVVDNHEPLHLVAHDLNRCGVLSPKDYFAQLRGREPQGRKWSATALKRSMISEAMLGYATLNGKTVRDDDGAPLVRAEPILTREQLEALRAELVKTSRAKPAVSTPSLLLRVLFCAVCGEPAYKFFGGGRKHPRYRCRSMGFPKHCGNGTVAMAEWDAFCEEQVLDLLGDAERLEKVWVAGSDSAVELAEVNAELVDLTSLIGSPAYRAGSPQREALDARIAALAARQGELEGLEARPSGWEWRETGQRFRDWWREQDTAAKNTWLRSMNVRLTFDIRGGLTRTIDFGDLQEYEQHLRLGGVVERLRTGMS

SEQ ID NO: 10793 - protein, 500 aa, synthetic construct
MRALVVIRLSRVTDATTSPERQLESCQQLCAQRGWDVVGVAEDLDVSGAVDPFDRKRRPNLASWLAFEEQPFDAIVAYRVDRLTRSIRHLQQLVHWADDHKKLVVSATEAHFDTTTPFAAVVIALMGTVAQMELEAIKERSRSAAHFNIRAGKYRGSLPPWGYLPARVDGVWRLVPDPVQRERILEVYHRVVNDHEPLHLVAHDLNRRGVLSPKDYFAQLQGREPQGRKWSATALKRSMISEAMLGYATLNGKTVRDDDGAPLVRAEPILTREQQEALRAELVKTSRAEPAVSAPSLLLRVLFCAVCGEPAYKFAGGGRKHPRYRCRSMGFPKHCGNGTVAMAEWDAFCEEQVLGLLGDAERLEKVWVAGSDSAVELAEVNAELVDLTSLIGSPAYRAGSPQREALDARIAALAARQEELEGLEARPSGWEWRETGQRFGDWWREQDTAAKNTWLRSMNVRLTFDARGGLTRTIDFGDLQEYEQHLRLGSVVERLHTGMS

SEQ ID NO: 10794 - protein, 500 aa, synthetic construct
MRALVVIRLSRVTDATTSPERQLESCQQLCAQRGWDVVGVAEDLDVSGAVDPFDRKRRPNLARWLAFGEQPFDVIVAYRVDRLARSIRHLQQLVHWAEDHKKLVVSATEAHFDTTTPFAAVVIALMGTVAQMELEAIRERNRSAAHFNIRAGKYRGSLPPWGYLPTRVDGEWRLVPDPVQRERILEVYHRVVVNHEPLHLVAHDLNRHGVLSPRDYFAQLRGREPQGRKWSATALKRSMISEAMLGYATLNGKTVRDDGGAPLVRAEPILTREQLGALRAELVKTSRAKPAVSTPSLLLRVLFCAVCGEPAYKFAGGGRKHPRYRCRSMGFPKHCGNGTVAMAQWDAFCEEQVLNLLGDAERLEKVWVAGSDSADELAEVNAELVDLTSLIGSPAYRAGSPQREALDARIAALAARQEELEGLEARPSGWEWRETGQRFGDWWREQDTAAKNTWLRSMNVRLTFDVRGGLTRTIDFGDLQEYEQHLRLGSVVERLHTGMS

SEQ ID NO: 10795 - protein, 500 aa, synthetic construct
MRALVVIRLSRVTDATTSPERQLESCRQLCAQRGWDVVGVAEDLDVSGAVDPFDRKRRPNLARWLAFEEQPFDVIVAYRVDRLARSIRHLQQLVHWAEDHKKLVVSATEAHFDTTTPFAAVVIALMGTVAQMELEAIKERNRSAAHFNIRAGKYRGSLPPWGYLPTRVDGEWRLAPDPVQRERILEVYHRVVDNHEPLHLVAHDLNRRGVLSPKDYFAQLQGREPLGRKWSATALKRSMTSEAMLGYATLNGKTVRGDDGAPLVRAEPILTRVQLEAVRAELVKTSRAKPAVSTPSLLLRVLFCAVCGEPAYKFAGGGRKHPRYRCRSMGFPKHCGNGTVAMAEWDAFCEEQVLDLLGDAERLEKVWVAGSDSAVELAEVSAELVDLTSLIGSPAYRAGSPQREALDARIAALAARQEELEGLEARPSGWEWRGTGQRFGDWWREQDTAAKNTWLRSMNVRLTFDVRGGLTRTIDFGDLQEYEQHLRLGSVVERLHTGRS

SEQ ID NO: 10796 - protein, 500 aa, synthetic construct
MRALVVIRLSRVTDATTSPERQLESCQQLCAQRGWDVVGVAEDLDVSGAVDPFDRKRRPNLARWLAFEEQPFDVIVAYRVDRLTRSVRHLQQLVHWAEDHKKLVVSATEAHFDTTTPFAAVVIALMGTVAQMELEAIKERIRSAAHFNIRAGKYRGSLPPWGYLPTRVNGEWRLAPDPVQRERILEVYHRVVDNHEPLHLVAHDLNRRGVLSPKDYFAQLRGRKPQGRKWSATALKRSMISEAMLGYATLNGKTVRNDDGAPLVRAEPILTREQLEALRAELVKTSRAKPAVSTPSLLLRVLFCAVCGEPAYKFSGGGRKHPRYRCRSMGFPEHCGNGTVAMAEWDAFCEEQVLDLLGDAERLEKVWVAGSDSAVELAEVNAELVDLTSLIGSPACRAGSPQREALDARIAALAARQAELEGLEARPSGWVWRETGQGFGDWWREQDTAAKNTWLRSMNVRLTFDVRGGLTRTIDFGDLQEYEQHLRLGSVVERLHTGMS

SEQ ID NO: 10797 - protein, 500 aa, synthetic construct
MRALVVIRLSRVTDATTSPERQLESCQQLCAQRGWDVVGVAEDLDVSGAVDPFDRKRRPNLARWLAFEEQPFDVIVAYRVDRLTRSTRHLQQLVHWAEDHRKLVVSATEAHFDTTTPFAAVVIALMGTVAQMELEAIKERSRSAAHFNIRAGKYRGSLPPWGYLPTRVDGEWRLVPDPVQHERILEVYHRVVDNHEPLHLVAHDLNRRGVLSPKDYFAQLQGREPQGRKWSATALKRSMISEAMLGYATLNGKTVRDDDGAPLVRAEPILTREQQEALRAELVKTSRAKPAVSTPSLLLRVLFCAVCGEPAYKFAGGGRKHPRYRCRSMGFPKHCGNGTVAMAEWDAFCEEQVLNLLGDAERLEKVWVAGSDSAVELAEVNAELVDLTSLIGSPAYRAGSTQREALDARIAALAARQEELEGLEARPSGWEWRGTGQRFGDWWREQDTAAKNTWLRTMNVRLTYDVRGGLTRTIDFGDLQEYEQHLRSGSVVERLHTGMS

SEQ ID NO: 10798 - protein, 500 aa, synthetic construct
MRALVVVRLSRVTDATTSPERQLESCQQLCAQRGWDVVGVAEDLDVSGAVDPFDRKRRPNLARWLAFEEQPFDVIVVYRVDRLTRSTRHLQQLVHWAEDHKKLVVSATEAHFDTTTPFAAVVIALMGTVAQMELEAIRERSRSAAHFNIRAGKYRGSLPPWGYLPTRVDGEWRLVPDPVQRERILEVYHRVVDNHEPLHLVAHDLNRRGVLSPKDYFAQLQGREPQGRKWSATALKRSMTSEAMLGYATLNGKTVRDDDGAPLVRAEPILTREQLEALRAVLVKTSRAKPAVSTPSLLLRVLFCAVCGEPAYKFAGGGRKHPRYRCRSMGFPKHCGNGTVAMAEWDAFCEEQVLDLLGDAERLEKVWVAGSDSAVELAEVNAELVDLTSLIGSPAYRAGSPQREALDARIAALAARQEELEGLEARPSGWEWRGTGQRFGDWWREQGAAAKNTWLRSMNVRLTFDVRGGLTPTIDFGDLQEYEQHLRLGSVVEPLHTGMS

SEQ ID NO: 10799 - protein, 500 aa, synthetic construct
MRALVVIRLSRVTDATTSPERQLESCQQLCAQRGWDVVGVAEDLDVSGAVNPFDRKRRPNLARWLAFEEQPFDAIVVYRVDRLSRSIRHLQKLVHWAEDHKKLVVSATEAHFDTTTPFAAVVIALMGTVAQMELEAIRERNRSAAHFNVRAGKYRGSLPPWGYLPTRVDGEWRLVPDPVQRERILEVYRRVVDNHEPLHLVAHDLNRRGVLSPRDYFAQLRGREPQGRKWSATALKRSMISEAMLGYATLNGKTVRDDDGAPLVRAEPILTREQLEALRAELVKTSRAKPAVSTPSLLLRVLFCAVCGEPAYKFAGGGRKHPRYRCRSMGFPKHCGNGTVAMAEWDAFCEEQVLDLLGDAERLEKVWVAGSDSAVELAEVNAELVDLTGSIGSPAYRAGSPQREALDARIAALAARQEELEGLEARPSGWEWRETGQRFRDWWREQDTAAKNTWLRSMNVRLTFDVRGGLTRTIDFGDLQEYEQHLRLGSVVERLHTGMS

SEQ ID NO: 10800 - protein, 500 aa, synthetic construct
MRALVVVRLSRVTDTTTSPERQLESCQQLCAQRGWDVVGVAEDLDVSGAVDPFDRKRRPNLARWLAFEEQPFDVIVAYRVDRLARSIRHLQQLVHWAEDHKKLVVSATEAHFDTTTPFAAVVIALMGTVAQMELEAIKERSRSAAHFNIRAGKYRGSLPPWGYLPTRVDGEWRLVPDPVQRERILEVYHRVVDNHEPLHLVAHDLNRRGVLSPKDYFAQLRGREPQGRKWSATALKRSMTSEAMLGYATLNGKTVRDDDGAPLVRAEPILTRGQLEALRAELVKTSRAKPAVSTPSLLLRVLFCAVCGEPAYKFAGGGRKHPRYRCRSMGFPKHCGNGTVATAEWDAFCEEQVLSLLGDAERLEKVWVAGSDSAVELAEVNAELVDLTSLIGSPDYRAGSPQRGALDARIAALAARQEELEGLEARPPGWEWRETGQRFGDWWREQDTTAKNTWLRSMNVRLTFDVRGGLTRTIDFGDLQEYEQHLRSGGVVDRLYTGMS

SEQ ID NO: 10801 - protein, 500 aa, synthetic construct
MRALVVIRLSRVTDATTSPERQLESCQQLCAQRGWDVVGVAEDLDVSGAVDPFDRKRRPNLARWLAFEERPFDVIVAYRVDRLARSIRHLQQLVHWAEDHKKLVVSVTEAHFDTTTPFAAVVIALMGTVAQMELEAIKERSRSAAHFNIRAGKYRGSLPPWGYLPTRVDGEWRLVPDPVQRERILEVYHRVVDNHEPLYLVAHDLNRRGVLSPRDYFAQLRGRGPQGRKWSATALKRSMISEAMLGYATLNGRTVRDDDGAPLVRAEPILTREQQEALRAELVKTSRAKPAVSTPSLLLRVLFCAVCGEPAYKFAGGGRKHPRYRCRSMGFPKHCGNGTVAMAEWDAFCEEQVLDLLGDAERLEKVWVAGSDSAVELAEVNAELVDLTSLIGSPAYRAGSTQREALDARVAALAARQEELEGLEARPSGWEWRETGQRFGDWWREQDTAAKNTWLRSMNVRLTFDVRGGLTRTIDFGDLQEYEQHLRLGSVVERLHTGMS

SEQ ID NO: 10802 - protein, 500 aa, synthetic construct
MRALVVIRLSRVTETTTSPERQLESCQQLCAQRGWDVVGVAEDLDVSGAVDLFDRKRRPNLARWLAFEEQPFDVIVAYRVDRLTRSIRHLQQLVHWAEDHKKLVVSATEAHFDTTTPFAAVVIALMGTVAQMELEAIKERNRSAAHFNIRAGKYRGSLPPWGYLPTRVDGEWRLAPDPVQRERILEVYHRVVDNHEPLHLVAHDLNRRGVLSPKDYFAQLQGREPQGRKWSATALKRSMISEAMLGHATLNGKTVRDDDGAPLVRAEPILTREQQEALRAELVKTSRAKPAVSTPSLLLRVLFCAVCGEPAYKFSGGGRKHPRYRCRSMGFPKHCGNGTVAMAEWDAFCEEQVLGLLGDAERLEKVWVAGSDSAVELAEVNAELVDLTSLIGSPAYRAGSPQREALDARIATLAARQEELEGLEARPSGWEWRETGQRFEDWWREQDTAVKNTWLRSMNVRLTFDVRGGLTRTIDLGGLQAYEQHLRSGSVVERLHTGMS

SEQ ID NO: 10803 - protein, 500 aa, synthetic construct
MRALVVIRLSRVTDATTSPERQLESCQQLCAQRGWDVAGVAEDLDVSGAVNPFDRKRRPNLARWLAFEEQPFDAIVAYRVDRLARSIRHLQQLVHWAEDHKKLVVSATEAHFDTTTPFAAVVIALMGTVAQMELEAIKERNRSAAHFNIRAGKYRGSLPPWGYLPTRVDGEWRLVPDPVQRERILEVYRRVVDNHEPLHSVAHDLNRRGVLSPKDYFAQLRGREPQGRRWSATALKRSMISEAMLGYATLNGKTVRDEDGAPLVRAEPILTREQLEALRAELVKTSRAKPAVTTPSLLLRVLFCAVCGEPAYKFAGGGRKHPRYRCRSMGFTKHCGNGTVAMAEWDSFCEEQVLDLLGDVERLEKVWVVGSDSAVELAEVNAELVDLTSLIGSPAYRAGSPQREALDARIAALASRQEELGGLEARPSGWEWRETGQRFGDWWREQDTAAKNTWLRSMNVRLTFDVRGGLTRTIDFGDLQEYEQHLRLGSVVERLHTGMS

SEQ ID NO: 10804 - protein, 500 aa, synthetic construct
MRALVVIRLSRVTDATTSPERQLESCQQLCAQRGWDVVGVAEDLDVSGAVDPFDRKRRPNLARWLAFEERPFDVIVAYRVDRLTRSIRHLQQLVHWAEDHKKLVVSATEAHFDTTTPFAAVVIALMGTVAQMELEAIRERSRSAAHFNIRAGKYRGSLPPWGYLPTRVDGEWRLAPDPVQRERILEVYHRVVDNHEPLHLVAHDLNRRGVLSPRDYFAQLQGREPQGRKWSATALKRSMISGAMLGYATLNGKTVRDDDGAPLVRAEPILTREQLEALRAELVKTPRAKPAVSTPSLLLRVLFCAVCGEPAYKFAGGGRKHPRYRCRSMGFPKHCGNGTVAMAEWDAFCEEQVLDLLGDAERLEKVWVAGSDSAVELAEANAELVDLTSLIGSPAYRAGSPQREALDARIAALAARQEELEGLEARPSGWEWRETGQRFGDWWREQDAAAKNTWLRSMNVRLTFDVRGGLTRTIDFGDLQEYEQHLRLGSVVERLHAGMS

SEQ ID NO: 10805 - protein, 500 aa, synthetic construct
MRALVVIRLSRVTDATTSPERQLESCQQLCAQRGWDVVGVAEDLDVSGAVDPFDRKRRPNLARWLAFEEQPFDVIVAYRIDRLTRSIRHLQQLVHWAEDHKKLVVSATEAHFDTTTPFAAVVIALMGTVAQMELEAIKERNRSAAHFNIRAGKYRGSLPPWGYLPTRVDGEWRLVPDPVQRERILEVYHRVVVNHEPLHLVAHDLNRHGVLSPRDYFAQLRGREPQGRKWSATALKRSMISEAMLGYATLNGKTVRDDGGAPLVRAEPILTREQLGALRAELVKTSRAKPAVSTPSLLLRVLFCAACGEPAYKFAGGGRKHPRYRCRSMGFPKHCGNGTVAMAEWDAFCEEQVLNLLGDAERLEKVWVAGSDSAVELAEVNAELVDLTSLIGSPAYRVGSPQREALDARIAALAARQEELEGLEARPSGWEWRGTGQRFGDWWREQDTAAKNTWLRSMNVRLTFDVRGGLTRTIDFGDLQEYELHLRSGGVVERLHTGMS

SEQ ID NO: 10806 - protein, 500 aa, synthetic construct
MRALVVIRLSRVTDATTSPERQLESCQQLCAQRGWDVVGVAEDLDVSGAVDPFDRKRRPNLARWLAFEEQPFDAIVAYRVDRLTRSIRHLQQLVHWAEDHKKLVVSATEAHFDTTTPFAAVVIALMGTVAQMELEAIKERNRSAAHFNIRAGKYRGSLPPWGYLPTRVDGEWRLAPDPVQRERILEVYHRVVDNHEPLHLVAHVLNRRGVLSPKDYFAQLRGREPQGRKWSATALKRSMTSEAMLGYATLNGKTVRDDNGAPLVRAEPILTREQLEALRAELDKTSRAKPAVTTPSLLLRVLFCAVCGEPAYKFTGGGRKHPRYRCRSMGFPKHCGNGTVAMAEWDAFCEEQVLGLLGDVERLEKVWVAGSDSAVKLAEVNAELVDLTGLIGSPAYRAGSPQREALDARIAALAARQEELEGLEARPSGWEWRGTGQRFGDWWREQDTAAKNTWLRSMNVRLTFDVRGGLTRTIDFGDLQEYEQHLRLGSVVERLHTGMS

SEQ ID NO: 10807 - protein, 500 aa, synthetic construct
MRALVVIRLSRVTDATTSPERQLESCHQLCAQRGWDVVGVAEDLDVSGAVDPFDRKRRPNLARWLAFEEQPFDVIVAYRVDRLTRSVRHLQQLVHWAEDHKKLVVSATEAHFDTTTPFAAVVIALMGTVAQMELEAIKERNRSAAHFNIRAGKYRGSLPPWGYLPTRVNGEWRLVPDPVQRERILEVYHRVVDNHEPLHLVAHDLNRRGVLSPRDYFAQLRGREPQGRKWSATALKRSMISEAMLGYATLNGRTVRDDDGAPLVRAEPILTREQLEALRAELVKTPRAKPAVSTPSLLLRVLFCAVCGEPAYKFAGGGRKHPRYRCRSMGFPKHCGNGTVATAEWDAFCEEQVLDLLGDTERLEKVWVAGSDSAIELAEVNAELVDLTSLIGSPAYRAGSPQREALDARIAALAARQEELEGLEARPSGWEWRETGQRFGDWWREQDAAAKNTWLRSMNVRLTFDVRGGLTRTIDFGDLQEYEQHLRLGNAVERLHTGMS

SEQ ID NO: 10808 - protein, 500 aa, synthetic construct
MRALVVIRLSRVTDATTSPERQLESCQQLCAQRGWDVVGVAEDLDVSGAVDPFDRKRRPNLARWLAFEEQPFDVIVAYRVDRLTRSVRHLQQLVHWAEDHKKLVVSATEAHFDTTTPFAAVVIALMGTVAQMELEAIKERSRSAAHFNIRAGKYRGSLPPWGYLPARVDGEWRLVPDPVQRERILEVYHRVVDNHEPLHLVAHDLNRRGVLSPKDYFAQLRGREPQGRKWSATALKRSMISVAMLGYATLCGKTVRDDDGAPLVRAEPILTREQLEALRAELGKTSRAKPAVSTPSLLLRVLFCAVCGEPAYKFAGGGRKHPRYRCRSMGFPKHCGNGTVAMAEWDAFCEEQVLNLLGDAERLEKVWVAGSDSAVELAEVNKELVDLTGLIGSPAYRAGTPQREALDARIAALAARQEELESLGARPSGWEWRETGQCFGDWWREQDTAAKNTWLRSMNVRLTFDVRGGLTRAIDFGDLQEYEQHLRLGSVVERLHPGMS

SEQ ID NO: 10809 - protein, 500 aa, synthetic construct
MRALVVIRLSRVTEATTSPERQLESCQQLCAQRGWDVVGVAEDLDVSGAVDPFDRKRRPNLARWIAFEEQPFDVIVAYRVDRLARSIRHLQQLVHWAEDHKKLVVSATEAHFDTTTPFAAVVIALMGTVAQMELEAIKERNRSAAHFNIRAGKYRGSLPPWGYLPTRVNGEWRLVPDPVQRERILEVYHRVVDNHEPLHLVAHDLNRRGVLSPKDYFAQLQGREPQGRKWSATALKRSMTSEAMLGYATLNGKTVRDDDGAPLVRAEPILTREQREALRAELVKTSRAKPAVSTPSLLLRVLFCAVCGEPAYKFAGGGRRHSRYRCRSMGFPKHCGNGTVAMAEWDAFCEERVLDLLGDAERLEKVWVAGSDSAVELAEVNAELVDLTSLVGSPAYRAGSPQREALDARIAALVARQEELEGLEARPSGWEWRETGQRFGDWWREQDTAAKNTWLRSMNVRLTFDVRGGLTRTINFGDLQEYEQHSRLGSVVERLHTGMS

SEQ ID NO: 10810 - protein, 500 aa, synthetic construct
MRALVVIRLSRVTDATTSPERQLESCQQLCAQRGWDVVGVAEDLDVSGAVDPFDRKRRPNLARWLAFEEQPFDVIVAYRVDRLTRSVRHLQQLVHWAEDHKKLVVSATEAHFDTTTPFAAVVIALMGTVAQMELEAIKERSRSAAHFNIRAGKYRGSLPPWGYLPARVDGEWRLVPDPVQRERILEVYHRVVDNHEPLHLVAHDLNRRGVLSPKDYFAQLRGREPQGRKWSATALKRSMISEAMLGYATLNGKTVRDYDGAPLVRAEPILTRGQLEALRAVLVRTSRAKPAVSTPSLLLRVLFCAVCGEPAYKFAGGGRKHPRYRCRSMGFPEHCGNGTVAMAEWDAFCEEQVLGLLGDAERLEKVWVAGSDSAVELAEVNAELVDLTSLIGSPAYRAGSPQREALDARIAALAARQEELEGLEARPSGWEWRETGQRFGDWWREQDTAAKNTWLRSMNVHLTFDVRGGPTRTIDFGDLQEYEQHLRLGSVVERLHTGMS

SEQ ID NO: 10811 - protein, 500 aa, synthetic construct
MRALVVIRLSRVTDATTSPERQLESCQQLCAQRGWDVVGVAEDLDVSGAVDPFDRKRRPNLARWLAFEEQPFDVIVAYRVDRLARSIRHLQQLVHWAEDHKKLVVSATEAHFDTTTPFAAVVIALMGTVAQMELEAIKERNRSAAHFNIRAGKYRGSLPPWGYLPTRVDGEWRLVPDPVQRERILEVYHRVVDNHEPLHLVAHDLNRRGVLSPKDYFAQLQGREPQGRKWSATALKRSMTSEAMLGYATLNGKTVRDDDGAPLVRAEPILTREQLEALRAELVKTSRAKPAVSTPSLLLRVLFCAVCGEPAYKFAGGGRKHPRYRCRSMGFPKHCGNGTVATAEWDTFCEEQVLNLFGDAERLEKVWVAGSDSAVEFAEVNAELVDLTSLIGSPAYRAGSPQREALDARIAALAARQEELEGLEARPSGWEWRETGQRFGDWWREQDTAAKNTWLRSMNVRLTFDVRGGLTRTIDFGDLQEYVQHLRLGSVVERLHTGMS

SEQ ID NO: 10812 - protein, 500 aa, synthetic construct
MRALVVIRLSRVTDATTSPERQLESCQQLCAQRGWDVVGVAEDLDVSGSVDPFDRKRRPNLARWLAFEEQPFDVIVAYRVDRLARSIRHLQQLVHWAEDNKKLVVSATEAHFDTTTPFAAVVIALMGTVAQMELEAIKERSRSAAHFNIRAGKYRGSLPPWGYLPARVDGEWRLVPDPVQRERILEVYHRVVNNHEPLHLVAHDLNRRGVLSPKDYFAQLQGREPQGRKWSATALKRSMISEAMLGYATLNGKTVRDDDGAPLVRAEPILTREQQEALRAELVKTSRAKPAVSTPSLLLRVLFCAVCGEPAYKFAGGGRKHPRYRCRSMGFPKHCGNGTVAMAEWDAFCEEQVLGLLGDAERLEKVWVAGSDSAVELAEVNAELVDLTSLIGSPAYRAGSPQREALDARIAALAARQEELEGLEARPSGWEWRETGQRFGDWWREQDTAAKNTWLRSMNVRLTFDVRGELTRTIDFGDLQEYEQHLRLGRVVERLHTGVP

SEQ ID NO: 10813 - protein, 500 aa, synthetic construct
MRALVVIRLSRVTDATTSPERQLESCQQLCAQRGWDVVGVAEDLDVSGAVDPFDRKRRPNLARWLAFEEQPFDVIVAYRVDRLARSIRHLQQLVHWAEDHKKLVVSATEAHFDTTTPFAAVVIALMGTVAQMELEAIKERSRSAAHFNIRAGKYRGSLPPWGYLPSRVDGEWRLVPDPVQRERILEVYHRVVDNHEPLHLVAHDLNRRGVLSPKDYFAQLQGREPQGRKWSATALKRSMISEAMLGYATLNGKTVRDDDGAPLVRAEPILTRVQLEALRAELVKTSRAKPAVSTPSLLLRVLFCAVCGEPAYKFAGGGRKHPRYRCRSMGFPKHCGNGTVAMAEWDTFCEEQVLDLLGDVERLEKVWVAGSDSAVKLAEVNAELVDLTGLIGSPAYRAGSPQREALDARIAALAARQEELEGLEARPSGWEWRGTGQRFGDWWREQDTAAKNTWLRTMNVRLTFDVRGGLTRTIDFGDLQEYEQHLRLGSEAERLHTGMS

SEQ ID NO: 10814 - protein, 500 aa, synthetic construct
MRALVVIRLSRVTDATTSPERQLESCQQLCAQRGWDVVGVAEDLDVSGAVDPFDRKRRPNLARWLAFEERPFDVIVAYRVDRLTRSIRHLQQLVHWAEDHKKLVVSATEAHFDTTTPFAAVVIALMGTVAQMELEAIRERNRSAAHFNIRAGKYRGSLPPWGYLPARVDGEWRLVPDPVQRERILEVYHRVVDNHEPLHLVAHDLNRRGVLSPKDYFAQLRGREPQGRKWSATALKRSMISEAMLGYATLNGKTVRDDDGAPLVRAEPILTREQLEALRAELVKTSRAKPAVSTPSLLLRVLFCAVCGEPAYKFAGGGRKHPRYRCRSMGFPKHCGNGTVAMAEWDAFCEEQVLNLLGDAERLEKVWVAGSDSAIELAEVNAELVDLTSLIGSPAYRTGSPQREALDARIAALAARQEELEGLEARPSGWEWRETGQRFGDWWREQDTAAKNTWLRSMNVRLTFDVRGGLTRTIDFGDLQEYEQHLRSGSVVERLRTGMS

SEQ ID NO: 10815 - protein, 500 aa, synthetic construct
MRALVVIRLSRVTDATTSPERQLESCRQLCAQRGWDVVGVAEDLDVSGAVDPFDRKRRPNLARWLAFEEQPFDAIVAYRVDRLTRSIRHLQQLVHWAEDHKKLVISATEAHFDTTTPFAAVVIALMGTVAQMELEAIKERNRSAAHFNIRAGKYRGSLPPWGYLPTRVEGEWRLVPDPVQRERILEVYHRVVDNHEPLHWVAHDLNRRGVLSPKDYFAQLQGREPQGRKWSATALKRSMISEAMLGYATLNGKTVRDDHGAPLVRAEPILTREQLEALRAELVKTSRAKPAVSTPSLLLRVLFCAVCGEPAYKFAGGERKHPRYRCRSMGFPKHCGNGTVAMAEWDAFCEEQVLNLLGDAERLEKVWVAGSDSAVELAEVNAELVDLTSLIGSPAYRAGSPQREALDARIAALAARQEELEGSEARPSGWEWRGTGQRFGDWWREQDTAAKNTWLRSMNVRLTFDVRGGRTRTIDLGDLQEYEQHLRLGSVVERLHTGMS

SEQ ID NO: 10816 - protein, 500 aa, synthetic construct
MRALVVIRLSRVTEATTSPERQLESCQQLCAQRGWDVVGVAEDLDVSGAVDPFDRKRRPNLARWLAFEEQPFDVIVAYRVDRLTRSIRHLQQLVHWAEDHKKLVVSATEAHFDMTTPFAAVVIALMGTVAQMELEAIKERSRSAAHFNIRAGKYRGSLPPWGYLPTRVDGEWRLAPDPGQRERILEVYHRVVDNHEPLHLVAHDLNRRGVLSPKDYFAQLQGREPQGRKWSATALKRSMTSEAMLGYATLNGKIVRDDGGAPLVRAEPILTRGQLEALRAELVKTSRAKPAVSTPSLLLRVLFCAVCGEPAYKFAGGGRKHPRYRCRSMGFPKHCGNGTVAMAEWDAFCEEQVLDLLGDAERLEKVWVAGSDSAVELAEVNAELVDLTSLISSPAYRVGSPQREALDARIAALAARQEELEGLEARPSGWEWRETGQRFGDWWREQDTAAKNTWLRSMNVRLTFDVRGGLTRTIDFGDLQEYEQHLRLGSVVERLHTGMS

SEQ ID NO: 10817 - protein, 500 aa, synthetic construct
MRALVVIRLSRVTDATTSPERQLESCQQLCAQRGWDVVGVAEDLDVSGAVDPFDRKRRPNLARWLAFEEQPFDAIVAYRVDRLTRSIRHLQQLVHWAEDHKKLVVSATEAHFDTTTPFAAVVIALMGTVAQMELEAIKERNRSAAHFNIRAGKYRGSLPPWGYLPTRVDGEWRLVPDPVQRERILEVYHRVVDNHEPLHLVAHDLNRRGVLSPKDYFAQLRGREPQGRKWSATALKRSMISEAMLGHATLNGKTVRGDDGAPLVRAEPILTREQLEALRAELVKTSRAKPAVSTPSLLLRVLFCAVCGEPAYKFAGGGRKHPRYRCRSMGFPKHCGNGTVAMAEWDAFCEEQVLNLLGDAERLEKVWVAGSDSAVELAEVNAELVDLTSLIGSPAYRAGSPQREALDARIAALAARQEELEGLEARPSGWEWRETGQRFGDWWREQDTAAKNTWLRSMNVRLTFDVRGGLTRTIDFGDLQEYEQHLRLGSVVERLHTGMS

SEQ ID NO: 10818 - protein, 500 aa, synthetic construct
MRALVVIRLSRVTDATTSPERQLESCQQLCAQRGWDVVGVAEDLDVSGAVDPFDRKRRPNLARWLAFEEQPFDAIVAYRVDRLARSIRHLQQLVHWAEDHKKLVVSATEAHFDTTTPFAAVVIALMGTVAQMELEAIKERSRSAAHFNIRAGKYRGSLPPWGYLPARVDGEWRLVPDPVQRERILEVYHRVVDNHEPLHLVAHDLNRRGVLSPKDYFAQLQGREPQGRKWSATALKRSMISEAMLGYATLNGKIVRDDDGAPLVRAEPILTREQLEALRAEFVKTSRAEPAVSTPSLLLRVLFCAVCGEPAYKFAGGGRKHPRYRCRSMGFPKHCGNGTVAMAEWDAFCEEQVLDLLGDAERLEKVWVAGSDSAVELAEVNAELVDLMSLIGSPAYRAGSPQREALDARIAALAARQEELEGLEARPSGWEWRRTGQRFGDWWREQNTAAKNTWLRSMNVRLTFDVRGGLTRTIDFGDLQEYEQHLRLGSVAERLHTGMS

SEQ ID NO: 10819 - protein, 500 aa, synthetic construct
MRALVVIRLSRVTDATTSPERQLESCQQLCAQRGWDVVGVAEDLDVSGAVDPFDRKRRPNLARWLAFEEQPFDVIVAYRVDRLTRSVRHLQQLVHWAEDHKKLVVSATEAHFDTTTPFAAVVIALMGTVAQMELEAIKERSRSAAHFNIRAGKYRGSLPPWGYLPTRVDGEWRLVPDPVQRERILEVYHRVVDNHEPLHLVAHDLNRRGVLSPKDYFAQLRGREPQGRKWSATALKRSMISEAMLGYATLNGKTVRDDDGAPLVRAEPILTREQLEALRAELVKTSRAKPAVSTPSLLLRVLFCAVCGEPAYKFAGGGRKHPRYRCRSMGFPKHCGNGTVAMAEWDAFCEEQVLDLLGDAERLEKVWVAGSDSAVELAEVNAELVDLTSLIGSPAYRTGSPQREALDARIAALAARQEELEGLEARPSGWEWRETGQRFGDWWREQDTAAKNTWLRSMNVRLTFDVRGGPTRTIDFGDLQGYEQHLRLGSMVERLRTGTS

SEQ ID NO: 10820 - protein, 500 aa, synthetic construct
MRALVVIRLSRVTDATTSPERQLESCQQLCAQRGWDVVGVAEDLDVSGAVDPFDRKRRPNLARWLAFEEQPFDVIVAYRVDRLARSIRHLQQLVHWAEDHKKLVVSATEAHFDTTTPFAAVVIALMGTVAQMELEAIKERSRSAAHFNIRAGKYRGSLPPWGYLPIRVDGEWRLVPDPVQRERILEVYHRVVDNHEPLHLVAHDLNRRGVLSPKDYFAQLRGREPQGRKWSATALKRSMTSEAMLGYATLNGKTVRDDDGAPLVRAEPILTREQLEALRAELVKTSRAKPAVTTPSLLLRVLFCAVCGEPAYKFTGGGRKHPRYRCRSMGLPKHCGNGTVAMVEWDAFCEEQVLDLLGDAERLEKVWVAGSNSAVELAEVNAELVDLTGLIGSPAFRAGSPQREALDARIAALAARQEELEGLEARPSGWEWRGTGQRFGDWWREQDTAAKNTWLRSVNVRLTFDVRGGLTRTVDFGDLQEYEQHLRSGSVVERLHTGMS

SEQ ID NO: 10821 - protein, 500 aa, synthetic construct
MRALVVIRLSRVTDATTSPERQLESCQQLCAQRGWDVVGVAEDLDVSGAVDPFDRKRRPNLARWLAFEEQPFDVIVAYRVDRLTRSVRHLQQLVHWAEDHRKLVVSATEAHFDTTTPFAAVVIALMGTVAQMELEAIKERSRSAAHFNIRAGKYRGSLPPWGYLPARVDGEWRLVPDPVQRERILEVYHRVVANHEPLHLVARDLNRRGVLSPRDYFAQLRGREPQGRKWSATALKRSMISEAMLGHATLNGKTVRDEDGAPLVRAEPILTREQLEALRAELVKTSRAKPAVSTPSLLLRVLFCAVCGEPAYKFAGGGRKHPRYRCRSMGFPKHCGNGTVAMAEWDAFCEEQVLDLLGDAERLEKVWVAGSDSAVELAEVNAELVDLTSLIGSPAYRAGSPQREALDARIAALAARQEELEGLEARPSGWEWRETGQRFGDWWREQDTAVKNTWLRSMNVRLTFDVRGEPTRTIDFGDLQEYEQHLRLGSVVERLHTGMS

SEQ ID NO: 10822 - protein, 500 aa, synthetic construct
MRALVVIRLSRVTDATTSPERQLESCQQLCAQRGWDVVGVAEDLDVSGAVDPFDRKRRPNLARWLAFEEQPFDVIVAYRVDRLTRSTRHLQQLVHWAEDHKKLVVSATEAHFDTTTPFAAVVIALMGTVAQMELEAIRERSRSAAHFNIRAGKYRGSLPPWGYLPTRVDGEWRLVPDPVQRERILEVYHRVVDNHEPLHLVAHDLNRRGVLSPKDYFAQLQGREPQGRKWSATALKRSMISGAMLGYATLNGKAVRDDDGAPLVRAEPILTREQQEALRAELVKTSRAKPAVSTPSLLLRVLFCAVCGEPAYKFSGGGRKHPRYRCRSMGFPKHCGNGTVAMAEWDAFCEEQMLDLLGDAERLEKVWVAGSDSAVELAEVNAELVDLTSLIGSPAYRAGSPQREALDARIAALAARQGELEGLEARPSGWEWRETGQRFGDWWREQDTAAKNTWLRSMNVRLTFDVRGGLTRTIDFGDLQEYEQHLRLGSVVERLHTGMS

SEQ ID NO: 10823 - protein, 500 aa, synthetic construct
MRALVVIRLSRVTDATTSPERQLESCQQLCAQRGWGVVGVAEDLDVSGAVDPFDRKRRPNLARWLAFEEQPFDVIVAYRVDRLTRSTRHLQQLVLWAEDHKKLVVSATEAHFDTTTPFAAVVIALMGTVAQMELEAIKERNRSAAHFNIRAGKYRGSLPPWGYLPTRVDGEWRLVPDPVQRERILEVYHRVVDNHEPLHLVAHDLNRRGVLSPKDYFAQLRGREPQGRKWSATALKRSMISEAMLGYATLNGKTVRDDDGAPLVRAEPILTREQLEALRAELVKTSRAEPAVSTPSLLLRVLFCAVCGEPAYKFAGGGRRHPRYRCRSMGFPKHCGNGTVAMAEWDAFCEEQVLDLLGDAERLEKVWVAGSDSAVELAEVNAELVDLTSLIGSPAYRARSPQREALDARIAALAARQEELEGLEARPSGWEWRGTGQRFGDWWREQDTAAKNTWLRSMNVRLTFDVRGGLTRTIDFGDLQEYEQHLRLGNVVERLHTGMS

SEQ ID NO: 10824 - protein, 500 aa, synthetic construct
MRALVVIRLSRVTDATTSPERQLESCQLLCAQRGWDVVGVAEDLDVSGAVNPFDRKRRPNLARWLAFEEQPFDVIVAYRVDRLTRSTRHLQQLVHWAEDHKKLVVSATEAHFDTTTPFAAVVIALMGTVAQMELEAIKERSRSAAHFNIRAGKYRGSLPPWGYLPTRVDGEWRLVPDPVQRERILEVYHRVVDNHEPLHLVAHDLNRRGVLSPKDYFAQLQGREPQGRKWSATALKRSMISEAMLGYATLNGKTVRDDDGAPLVRAEPILTREQQEALRAELVKTSRAKPVVSTPSLLLRVLFCAVCGEPAYKFAGGGRKHPRYRCRSMGFPKHCGNGTVAMAEWDVFCEEQVLSLLGDAERLEKVWVAGSDSAVELAEVNAELVDLTSLIGSPAYRVGSPQREALDARIAALAARQEELEGLEARPSGWEWRGTGQRFGDWWREQDTAAKNAWLRSMNVRLTFDVRGGLTRTIDFGDLQEYEQHLRLGSVVERLHTGMS

SEQ ID NO: 10825 - protein, 500 aa, synthetic construct
MRALVVIRLSRVTDATTSPERQLESCQQLCAQRGWDVVGVAEDLDVSGAVDPFDRKRRPNLARWLAFEEQPFDAIVAYRVDRLTRSIRHLQQLVRWAEDHKKLVVSATEAHFDTTTPFAAVVIALMGTVAQMELEAIKERSRSAAHFNIRAGKYRGSLPPWGYLPTRVDGEWRLVPDPVQRERILEVYHRVVDNHEPLHSVAHDLNRRGVLSPKDYFAQLRGREPQGRKWSATALKRSMISVTMLGYATLNGKIVRDDSGAPLVRAEPILTREQLEALRAELVKTSRAKPAVSTPSLLLRVLFCAVCGEPAYKFAGGGRKHPRYRCRSMGFPKHCGNGTVAMAEWDAFCEEQVLDLLGDAERLEKVWVAGADSAVELAEVNAELVDLTSLIGSPAYRAGSPQREALDARIAALAARQEELEGLEARPSGWEWRETGQRFGDWWREQDTVAKNTWLRSMNVRLTFDVRGGLTRTIDFGELQEYEQHLRLGSVVERLHTGMS

SEQ ID NO: 10826 - protein, 500 aa, synthetic construct
MRALVVIRLSRVTDATTSPERQLESCQQLCAQRGWDVVGVAEDLDVSGAVDPFDRKRRPNLARWLAFEEQPFDVIVAYRVDRLARSIRHLQRLVHWAEDHKKLVVSATEAHFDTTTPFAAVVIALMGTVAQMELEAIKERNRSAAHFNIRAGKYRGSLPPWGYLPTRVDGEWRLVPDPVQRERILEVYHRVVDNHEPLHLVAHDLNRRGVLSPRDYFAQLQGREPQGRKWSATALKRSMISGAMLGYATLNGKTVRDDDGAPLVRAEPILTREQLEALRAELVKTSRAKPAVSTPSLLLRVLFCAVCGEPAYKFAGGGRKHSRYRCRSMGFPKHCGNGTVAMAEWDAFCEEQVLDLLGDAERLEKVWVAGSDSAVELAEVNAELVDLTSLIGSPAYRASSPQREVLDARIAALAARQEELEGLEARPSGWEWRETGQRFGDWWRGQDTAAKNAWLRSMNVRLTFDVRGGLTRTIDFGDLQEYEQHLRLGSVVERLHTGMS

SEQ ID NO: 10827 - protein, 500 aa, synthetic construct
MRALVVIRLSRVTDATTSPERQLESCQQLCAQRGWVVVGVAEDLDVSGAVDPFDRKRRPNLARWLAFEEQPFDVIVAYRVDRLTRSIRHLQQLVHWAEDHKKLVVSATEAHFDTTTPFAAVTIALMGTVAQMELEAIKERSRSAAHFNIRAGKYRGSLPPWGYLPTRVDGEWRLAPDPVQRERILEVYHRVVDNHEPLHLVAHDLNRRGVLSPKDYFAQLQGREPRGRKWSATALKRSMISEAMLGYATLSGKTVRDDDGAPLVRAEPILTREQREALRAELVKTSRAKPAVSTPSLLLRVLFCAVCGEPAYKFAGGGRKHPRYRCRSMGFPKHCGNGTVAMAEWDAFCEEQVLGLLGDAKRLEKVWVAGSDSAVELAEVNAELLDLTSLIGSPVYRAGSPQREALDARIAALAARQEELEGLEARPSGWEWRETVQRFGDWWREQDTAAKNTWLRSMNVRLTFDVRGGLTRTIDFGDLQEYEQRLRLGSVAERLHTGMS

SEQ ID NO: 10828 - protein, 500 aa, synthetic construct
MRALVVIRLSRVTDATTSPERQLESCQQLCAQRGWDVVGVAEDLDVSGAVDPFDRKRRPNLARWLAFEEQPFDVIVAYRVDRLTRSTRHLQQLVHWAEDHKKLVVSATEAHFDTTTPFAAVVIALMGTVAQMELEAIKERNRSAVHFNIRAGKYRGSLPPWGYLPTRVDGEWRLVPDPVQRERILEVYHRVVDNHEPLHLVAHDLNRRGVLSPKDYFAQLRGREPQGRKWSATALKRSMISEAMLGYATLNGKTVRDDDGAPLVRAEPILTREQLEALRAELVKTSRVRPAVSTPSLLLRVLFCAVCGEPAYKFAGGGRKHPRYRCRSMGFPKHCGNGTVAMAEWDAFCEEQVLDLLGDAERLEKVWVAGSDSAVELAEVNAELVDLMSLIGSPAYRAGSPQREALDARIAALAARQEELEGLEARPSGWEWRETGQRFGDWWREQDTAAKNTWLRSMNVRLTFDVRGGLTRTIDFGDLQEYVQHLRLGSVVERLHTGMS

SEQ ID NO: 10829 - protein, 500 aa, synthetic construct
MRALVVIRLSRVTDATTSPERQLESCQQLCAQRGWDVVGVAEDLDVSGAVDPFDRKRRPNLARWLAFEEQPFDVIVAYRVDRLARSIRHLQQLVHWAEDHKKLVVSATEAHFDTTTPFAAVVIALMGTVAQMELEAIKERNRSAAHFNIRAGKYRGSLPPWGYLPTRVDGEWRLVPDPVQRERILEVYRRVVNNHEPLHLVAHDLNRRGVLSPKDYFAQLQGREPQGRKWSATALKRSMTSEVMLGYATQNGKTVRDDDGAPLVRAEPILTREQLEALRAELVKTSRAKPAVSTPSLLLRVLFCAVCGEPAYKFAGGGRKHPRYRCRSMGFPKHCGNGTVAMAEWDAFCEEQVLDLLGDAERLEKVWVAGSDSAVELAEVNAELVDLTSLIGSPAYRAGSPQREALDARIAALAARQEELEGLEARPSGWEWRETGQRFGDWWREQDTAAKNTWLRSMNVRLTFDARGGLTRTIDFGDLQEYEQHLRLGGVVERLHTGMS

SEQ ID NO: 10830 - protein, 500 aa, synthetic construct
MRALVVIRLSRVTDATTSPERQLESCQQLCAQRGWDVVGVAEDLDVSGAVDPFDRKRRPNLARWLAFEEQPFDVIVAYRVDRLTRSTRHLQQLVHWAEDHKKLVVSATEAHFDTTTPFAAVVIALMGTVAQMELEAIKERNRSAAHFNIRAGKYRGSLPPWGYLPTRVDGEWRLVPDPVQRERILEVYHRVVDNHEPLHLVAHDLNRRGVLSPKDYFAQLRGREPQGRKWSATALKRSMISAAMLGYATLNGKTVRDEDGAPLVRAEPILTREQLEALRAELVKTSRAEPAVSTPSLLLRVLFCAVCGEPAYKFAGGGRKHPRYRCRSMGFPKHCGNGTVAMAEWDAFCEEQVLDLLGDAERLEKVWVAGSDSAVELAEVNAELVDLTSLISSPAYRAGSPQREALDARIAALAARQEELEGLEARPSGWEWRETGQRFGDWWRVQDTAAKNTWLRSMNVRLTFDVRGGLTRTIDFGDLLEYEQHLRLGRVVERLRTGMS

SEQ ID NO: 10831 - protein, 500 aa, synthetic construct
MRALVVIRLSRVTDATTSPERQLESCQQLCAQRGWDVVGVAEDLDVSGAVDPFDRKRRPNLARWLAFEEQPFDVIVAYRVDRLARSIRHLQRLVHWAEDHKKLVVSATEAHFDTTTPFAAVVIALMGTVAQMELEAIKERSRSAAHFNIRAGKYRGSLPPWGYLPTRVDGEWRLVPDPVQRERILEVYHRVVDNHEPLHLVAHDLNRRGVLSPKDYFAQLRGREPQGRKWSATALKRSMTSEAMLGYATLNGKTVRDDDGAPLVRAEPILTREQLEALRAVSVKTSRAKPAVSTPSLLLRVLFCAVCGEPAYKFAGGGRKHPRYRCRSMGFPKHCGNGTVAMAEWDAFCEEQVLDLLGDAERLEKVWVAGSDSAVELAEVNAELVDLTSLIGSPAYRAGSPQREALDARIAALAARQEELEGLEARPHGWEWRETGQRFGDWWREQDTAAKNTWLRSMNVRLTFDVRGGLTRTIDFGDLQEYVQHLRLGGVVERLHTGMP

SEQ ID NO: 10832 - protein, 500 aa, synthetic construct
MRALVVIRLSRVTDATTSPERQLESCQQLCAQRGWDVVGVAEDLDVSGAADPFDRKRRPNLARWLASEEQPFDVIVAYRVDRLARSIRHLQQLVHWAEDHKKLVVSATEAHFDTTTPFAAVVIALMGTVAQMELEAIKERSRSAAHFNIRAGKYRGSLPPWGYLPTRVDGEWRLVLDPVQRERILEVYHRVVDNHEPLHLVAHDLNRRGVLSPRDYFAQLRGREPQGRKWSATALKRSMISVAMLGYATLNGKTVRDDDGAPLVRAEPILTREQLEALRAELVKTSRTKPAVATPSLLLRVLFCAVCGEPAYKFAGGGRKHPRYRCRSMGFPKHCGNGTVAMAEWDAFCEEQVLDLLGDAERLEKVWVAGSDSAVELAEVNAELVDLTSLIGTPAYRAGSPQREALGARIAALAARQEELEGLEARPSGWEWRGTGQRFGDWWREQDTTAKNTWLRSMNVRLTFDVSGGLTRTIDFGDLQEYERHLRLGNVDERLHTGMS

SEQ ID NO: 10833 - protein, 500 aa, synthetic construct
MRALVVVRLSRVTDATTSPERQLESCQQLCAQRGWDVVGVAEDLDVSGVVDPFDRKRRPNLARWLAFEEQPFDVIVAYRVDRLARSIRHLQQLVHWAEDHKKLVVSATEAHFDTTTPFAAVVIALMGTVAQMELEAIKERNRSAAHFNIRAGKYRGSLPPWGYLPARVDGEWRLVPDPVQRERILEVYHRVVDNHEPLHLVAHDLNRRGVLSPRDYFAQLQGREPQGRKWSATALKRSMISEAMLGYATLNGKTVRDDDGAPLVRAEPILTRGQLEALRAELVKTSRAKPAVSTPSLLLRVLFCAVCGEPAYKFAGGGRKHPRYRCRSMGFPKHCGNGTVAMAEWDAFCEEQVLDLLGDAERLEKVWVVGSDSAIELAEVNAELVDLTSLIGSPAYRAGSPQREALDARIAALAARQEELEGSEAHPSGWEWRETGQRFGDWWREQDTAAKNTWLRSMNVRLTFDVRGGLTRTIDFGDLQEYEQHLRLGSVVERLHTGMS

SEQ ID NO: 10834 - protein, 500 aa, synthetic construct
MRALVVIRLSRVTDATTSPERQLESCQQLCAQRGWDVVGVAEDLDVSGAVDPFDRKRRPNLARWLAFEEQPFDVIVAYRVDRLTRSVRHLQQLVHWAEDHKKLVVSVTEAYFDTTTPFAAVVIALMGTVAQLELEAIKERSRSAAHFNIRAGKYRGSLPPWGYLPTRVDGEWRLAPDPVQRERILEVYHRVVDNHEPLHLVAHDLNRRGVLSPRDYFAQLRGREPQGRKWSATALKRSMISEAMLGYATLNGKTVRDDDGAPLVRAEPILTREQLEALRAVLVKTSRAKPAVSTPSLLLRVLFCAVCGEPAYKFAGGGRKHPRYRCRSMGFPKHCGNGTVAMAEWDAFCEEQVLDLLGDAERLEKVWVAGSDSAVELAEVSAELVDLTSLIGFPAYRAGSPQREALDARIAALAARQEELEGLEARPPGWEWRETGQRFGDWWREQDTAAKNTWLRSMNVRLTFDVRGGLTRTIDFGDLQEYEQHLRLGSVVERLHTGMS

SEQ ID NO: 10835 - protein, 500 aa, synthetic construct
MRALVVIRLSRVTDATTSPERQLESCQQLCAQRGWDVVGVAEDLDVSGAVDPFDRKRRPSLARWLAFEEQPFDAIVAYRVDRLARSIRHLQQLVHWAEDHKKLVVSATEAHFDTTTPFAAVVIALMGTVAQMELEAIKERSRSAAHFNIRAGKYRGSLPPWGYLPARVDGEWRLVPDPVQRERILEVYHRIVDNHEPLHLVAHDLNRRGVLSPKDYFAQLRGREPQGRKWSATALKRSMTSEAMLGYATLNGKTVRDDDGAPLVRAEPILTREQLEALRAELVKTSRAKPAVSTPSLLLRVLFCAVCGEPAYKFSGGGRKHPRYRCRSMGFPKHCGNGTVAMAEWDAFCEEQVLDLLGDAERLEKVWVAGSDSAVELAEVNAELVDLTSLIGSPAYRAGSPQREALDARIAALAARQEGLEGVEARPPGWEWRETGQRFGDWWREQDTAAKNSWLRSMNVRLTFDVRGGPTRTIDFGDLQEYEQHLRLGSVVERLHTGMS

SEQ ID NO: 10836 - protein, 500 aa, synthetic construct
MRALVVIRLSRVTDATTSPERQLESCQQLCAQRGWDVVGVAEDLDVSGAVDPFDRKRRPNLARWLAFEEQPFDVIVAYRVDRLTRSVRHLQQLVHWAEDHKKLVVSATEAHFDTTTPFAAVVIALMGTVAQMELEAIKERSRSAAHFNIRAGKYRGSLPPWGYLPARVDGEWRLVPDPVQRERILEVYHRVVDNHEPLHLVAHDLNRRGVLSPKDYFAQLRGREPQGRKWSATALKRSMISVAMLGYATLCGKTVRDDDGAPLVRAEPILTREQLEALRAELVKTSRAKPAVSTPSLLLRVLFCAVCGEPAYKFAGGGRKHPRYRCRSMGFPKHCGNGTVAMAEWDAFCEEQVLDLLGDAERPEKVWVAGSDSAVELAEVNAELVDLTSLIGSPAYRAGSPQREALDTRIAALAARQEELKGLEARPSGWEWRETGQRFGDWWREQDTAAKNAWLRSMNVRLTFDVRGGLTRAIDFGDLQEYKQHLRLGSVVERLHTGMS

SEQ ID NO: 10837 - protein, 500 aa, synthetic construct
MRALVVIRLSRVTDATTSPERQLESCQQLCAQRGWDVVGVAEDLDVSGVVDPFDRKRRPNLARWLAFEEQPFDAIVAYRVDRLTRSIRHLQQLVHWAEDHKKLVVSATEAHFDTTTPFAAVVIALMGTVAQMELEAIKERSRSAAHFNIRAGKYRGSLPPWGYLPARVDGEWRLVPDPVQRERILEVYHRVVDNHEPLHSVAHDLNRRGVLSPKDYFAQLRGREPQGRKWSATALKRSMISEAMLGYATLNGKTVRDDDGAPLVRAEPILTREQLEALRAELVKTSRAKPAVSTPSLLLRVLFCAVCGEPAYKFAGGGRKHPRYRCRSMGFPKHCGNGTVAMAEWDAFCEEQVLGLLGDAERLEKVWVAGSDSAVELAEVNAELVDLTSLIGSPAYRAGSPQREALDARIAALAARQGELEGSEARPSGWEWRETEQRFGDWWREQDTAAKNTWLRSMNVRLTFDVRGGLTRTIDFGDLQEYEQHSRLGSVVGRLHTGMS

SEQ ID NO: 10838 - protein, 500 aa, synthetic construct
MRALVVIRLSRVTDATTSPERQLESCQQLCAQRGWDVVGVAEDLDVSGAVDPFDRKRRPNLARWLAFEERPFDVIVAYRVDRLTRSIRHLQQLVHWAEDHKKLVVSATEAHFDTTTPFAAVVIALMGTVAQMELEAIKERSRSAAHFNIRAGKYRGSLPPWGYLPTRVDGEWRLAPDPVQRERILEVYHRVVDNHEPLHLVAHDLNRRGVLSPKDYFAQLQGREPQGRKWSATALKRSMISVAMLGYATLNGKTVRDDDGAPLVRAEPILTRGQLEALRVELVKTSRAKPAVSTPSLLLRVLFCAVCGEPAYKFAGGGRKHPRYRCRSMGFPKHCGNGTVAMAEWDAFCEEQVLDLLGDAERLEKVWVAGSDSAVELAEVNAELVDLTSLIGSPAYRAGSPQREALDARIAALAARQEELESLEAHPSGWVWRETGQRFGDWWREQDTAAKNTWLRSMNVRLTFDVRGGLTRTIDFGDLQEYEQHLRLGSVVERLRTGMS

SEQ ID NO: 10839 - protein, 500 aa, synthetic construct
MRALVVVRLSRVTDATTSPERQLESCQQLCAQRGWDVVGVAEDLDVSGAVDPFDRKRRPNLARWLAFEEQLFDAIVAYRVDRLTRSIRHLQQLVHWAEDHKKLVVSATEAHFDTTTPFAAVVIALMGTVAQMELEAIKERNRSAAHFNIRAGKYRGSLPPWGYLPTRVDGEWRLVPDPVQRERILEVYRRVVDNHEPLHLVAHDLNRRGVLSPKDYFAQLRGREPQGRKWSATALKRSMTSEAMLGYATLNGKTVRDDDGAPLVRAEPILTREQLEALRAELAKTSRAKPAVSTPSLLLRVLFCAVCGEPAYKFAGGGRKHPRYRCRSMGFPKHCGNGTVAMAEWDAFCEEQVLNLLGDAERLEKVWVTGSDSAVELAEVNAELVDLTSLIGSPAYRAGSPQREALDARIAALAARQEELEGLEARPSGWEWRGTGQRFGDWWREQDTAAKNTWLRSMNVRLTFDVHGGLTRTIDFGDLQEYEQHLRLGSVVERLHTGMS

SEQ ID NO: 10840 - protein, 500 aa, synthetic construct
MRALVVIRLSRVTDATTSPERQLESCQQLCAQRGWDVVGVAEDLDVSGAVDPFDRKRRPNLARWLAFEEQPFDVIVAYRVDRLARSIRHLQQLVHWAEDHKKLVVSATEAHFDTTTPFAAVVIALMGTVAQMELEAIKERSRSAAHFNIRAGKYRGSLPPWGYLPTRVDGEWRLAPDPVQRERILEVYHRVVDNHEPLHLVAHDLNQRGVLSPRDYFAQLQGREPQGRKWSATALKRSMISEAMLGYATLNGKTVRDDDGAPLVRAEPILTREQLEALRAELVKTSRAKPAVSTPSLLLRVLFCAVCGEPAYKFAGGGRKHPRYRCRSMGFPKHCGNGTVAMAEWDAFCEEQVLDLLGDAERLEKVWVAGSDSAVELAEVNAELVDLMSLIGSPAYRAGSPQREALDARIAALAARQEELEGLEVRPSGWGWRETGQRFGDWWREQDTAAKNTWLRSMNVRLTFDVRGGLTRTIDFGDLQEYEQHLRLGSVVERLHTGMP

SEQ ID NO: 10841 - protein, 500 aa, synthetic construct
MRALVVIRLSRVTDATTSPERQLESCQQLCAQRGWDVVGVAEDLDVSGTVDPFDRKRRPSLARWLAFEEQPFDVIVAYRVDRLARSIRHLQQLVHWAEDHKKLVVSATEAHFDTTTPFAAVVIALMGTVAQMELEAIKERNRSAAHFNIRAGKYRGSLPPWGYLPTRVGGEWRLAPDPVQRERILEVYHRVVDNHEPLHLVAHDLNRRGVLSPKDYFAQLQGREPQGRRWSATALKRSMISVAMLGYATLNGKTVRDGDGAPLVRAEPILTREQLEALRAELVKTSRTKPAVATPSLLLRVLFCAVCGEPAYKFAGGGRKHPRYRCRSMGFPKHCGNGTVAMAEWDAFCEEQVLDLLGDAERLEKVWVAGSDSAVELAEVNAELVDLTSLIGSPAYRAGSPQREALGARIAALAARQEELEGLEARPSGWEWRGTGQRFGDWWREQDTTAKNTWLRSMNVRLTFDVRGGLTRTIDFGDLQEYERHLRLGSVDERLHTGMP

SEQ ID NO: 10842 - protein, 500 aa, synthetic construct
MRALIVVRLSRVTDATTSPERQLESCQQLCAQRGWDVVGVAEDLDVSGAVDPFDRKRRPNLARWLAFEEQPFDAIVAYRVDRLTRSIRHLQQLVHWAEDHKKLVVSATEAHFDTTTPFAAVVIALMGTVAQMELEAIRERNRSAAHFNIRAGKYRGSLPPWGYLPTRVDGEWRLVPDPVQRERILEVYHRVVDNHEPLHLVAHDLNRRGVLSPKDYFAQLRGREPQGRKWSATALKRSMTSEAMLGYATLNGKTVRNDDGAPLVRAEPILTREQLEALRAELVKTSRAKPAVSTPSLLLRVLFCAVCGEPAYKFAGGGRKHPRYRCRSMGFPKHCGNGTVAMAEWDAFCEEQVLNLLGDAERLEKVWVAGSDSAVELAEVNAELVDLTSLICSPAYRAGSPQREALDARIAALAARQEELEGLEARPSGWEWRETGQRFGDWWREQDTAAKNTWLRSMNVRLTFDVRGGLTRTIDFGDLQEYEQHLRLGSVVERLRTGMS

SEQ ID NO: 10843 - protein, 500 aa, synthetic construct
MRALVVIRLSRVTDATTSPERQLESCQQLCAQRGWDVVGVAEDLDVSGAVDPFDRMRRPNLARWLAFEEQPFDVIVAYRVDRLTRSTRHLQQLVHWAEDHKKLVVSATEAHFDTTTPFAAVVIALMGTVAQMELEAIKERNRSAAHFNIRAGKYRGSLPPWGYLPTRVDGEWRLAPDPVQRERILEVYHRVVDNHEPLHLVAHDLNRRGVLSPKDYFAQLQGREPQGRKWSATALKRSMISEAMLGYATLDGKTVRDDDGAPLVRAEPILTREQQEALRAELAKTSRAKPAVSTPSLLLRVLFCAVCGEPAYKFAGGGRRHPRYRCRSMGFPKHCGNGTVAMAEWDAFCEEQVLNLLGDAERLEKVWVAGSDSAIELAEVNAELVDLTSLVGSPAYRAGSPQREALDARIAALAARQEELEGLEARPSGWEWRETGQRFGDWWREQDTAAKNTWLRSMNVRLTFDVSGGLTRTIDFGDLQEYEQHLRLGSVVGRLHTGMS

SEQ ID NO: 10844 - protein, 500 aa, synthetic construct
MRALVVIRLSRVTDATTSPERQLESCQQLCARRGWDVVGVAEDLDVSGAVDPFDRKRRPNLASWLAFEEQPFDAIVAYRVDRLTRSIRHLQQLVHWADDHKKLVVSATEAHFDTTTPFAAVVIALMGTVAQMELEAIKERNRSAAHFNIRAGKYRGSLPPWGYLPTRVDGEWRLAPDPVQRERILEVYHRVVDNHEPLHLVAHDLNRRGVLSPKDYFAQLQGREPQGRKWSATALKRSMISEAMLGYATLNGKIVRDDDGAPLVRAEPILTREQLEALRAELVKTSRAKPAVSTPSLLLRVLFCAVCGEPAYKFVGGGRKHPRYRCRSMGFPKHCGNGTVAMAEWDAFCEEQVLDLLGDAERLEKVWVAGSDSAVELAEVNAELVDLTSLIGSPAYRAGSPQREALDARIAALAARQEELEGLEARPSGWGWRETGQRFGDWWREQDTAAKNSWLRSMNVRLTFDVRGGLTRTIDFGDLQEYEQHLRLGSVVERLHTGMS

SEQ ID NO: 10845 - protein, 500 aa, synthetic construct
MRALVVIRLSRVTDATTSPERQLESCQQLCAQRGWDVVGVAEDLDVSGAVDPFDRKRRPNLARWLAFEGQPFDVIVAYRVDRLARSIRHLQQLVHWAEDHKKLVVSATEAHFDTTTPFAAVVIALMGTVAQMELEAIRERNRSAAHFNIRAGKYRGSLPPWGYLPTRVDGEWRLVPDPVQRERILEVYHRVVDNHEPLHLVAHDLNRRGVLSPKDYFAQLQGREPQGRKWSATALKRSMTSGAMLGYATLSGKTVRDDGGAPLVRAEPILTREQQEALRAELVKTSRAKPAVSTPSLLLRVLFCAVCGEPAYKFAGGGRKHPRYRCRSMGFPKHCGNGTVAMAEWDAFCEEQVLNLLGDAERLEKVWVAGSDSAVELAGVNAELVDLTSLIGSPAYRAGSPQREALNARIAALAARQEELEGLEARPFGWEWRETGQRFGDWWREQDTAAKNAWLRSMNVRLTFDVRGGLTRTIDFGDLQEYEQHLRLGSVVERLHTGMS

SEQ ID NO: 10846 - protein, 500 aa, synthetic construct
MRALVVIRLSRVTDATTSPERQLESCRQLCAQRGWDVVGVAEDLDVSGAVDPFDRKRRPNLARWLAFEEQPFDAIVAYRVDRLTRSIRHLQQLVHWAEDHKKLVVSATEAHFDTTTPFAAVVIALMGTVAQMELEAIKERNRSAAHFNIRAGKYRGSLPPWGYLPARVDGEWRLVPDPVQRERILEVYHRVVNNHEPLHLVAHDLNRRGVLSPRDYFAQMQGREPQGRKWSATALKRSMTSEAMLGHATLNGKTVRDDGGAPLVRAEPILAREQLEALRAELVKTSRAKPAVSTPSLLLRVLFCAVCGEPAYKFAGGGRKHPRYRCRSMGFPKHCGNGTVAMAEWDAFCEEQVLGLLGDAERLEKVWVAGSDSAVELAEVNAELVDLTSSIGSPAYRAGSPQREALDARIAALAARQEELKGLEARPSGWELRETGQRFGDWWREQDTAAKNTWLRSMNVRLTFDVRGGLTRTIDFGDLQEYEQHLRLGSVVERLHTGMS

SEQ ID NO: 10847 - protein, 500 aa, synthetic construct
MRALVVIRLSRVTDATTSPERQLVSCQQLCAQRGWDIVGVAEDLDVSGAVDPFDRKRRPNLARWLAFEEQPFDVIVAYRVDRLTRSVRHLQQLVHWAEDHKKLVVSATEAHFDTTTPFAAVVIALMGTVAQMELEAIKERNRSAAHFNIRAGKYRGSLPPWGYLPTRVDGEWRLVPDPVQRERILEVYHRVVDNHEPLHLVAHDLNRRGVLSPKDYFAQLRGREPQGRKWSATALKRSMTSEAMLGYATLNGKTVRDDDGAPLVRAEPILTGGQLEALRAELVKTSRAKPAVSTPSLLLRVLFCAVCGEPAYKFAGGGRKHPRYRCRSMGFPKHCGNGTVAMAEWDAFCEEQVLDLLGDAERLEKVWVAGSDSAVELAEVNAELVDLMSLIGSPAYRAGSPQREALDARIAALAARQEELEGLEARPSGWEWRETGQRFGDWWREQDTAAKNTWLRSMNVRLTFDVRGGLTRTIDFGDLQEYEQHLRLGSVVERLHTGMS

SEQ ID NO: 10848 - protein, 500 aa, synthetic construct
MRALVVIRLSRVTDATTSPERQLESCQQLCAQRGWDVVGVAEDLDVSGAVDPFDCKRRPNLARWLAFEEQPFDVIVAYRVDRLTRSVRHLQQLVHWAEDHKKLVVSATEAHFDTTTPFAAVVIALMGTVAQMELEAIKERSRSAAHFNIRAGKYRGSLPPWGYLPTRVDGEWRLVPDPVQRERILEVYHRVVDNHEPLHLVAHDLNRRGVLSPRDYFAQLRGREPRGRKWSATALKRSMISEAMLGYATLNGETVRDDDGAPLVRAEPILTREQLEALRAELVKTSRAKPAVSTPSLLLRVLFCAVCGEPAYKFAGGGRKHPRYRCRSMGFPKHCGNGTVAMAEWDAFCEEQVLDLLGDAERLEKVWVAGSDSAVELAEVNAELVDLTSLIGSPAYRTGSPQREALDARIAALAARQEELEGSEARPSGWEWRGTGQRFGDWWREQDTAAKNTWLRSTNVRLTFDARGGLTRTIDFGDLQEYEQHLRLGSVVERLHTGMS

SEQ ID NO: 10849 - protein, 500 aa, synthetic construct
MRALVVIRLSRVTDATTSPERQLESCQQLCAQRGWDVVGVAEDLDVSGAVDPFDRKRRPNLARWLAFEEQPFDVVVAYRVDRLARSIRHLQQLVHWAEDHKKLVVSATEAHFDTTTPFAAVVIALMGTAAQMELEAIKERNRSAAHFNIRAGKYRGSLPPWGYLPARVDGVWRLVPDPVQRERILEVYHRVVDNHEPLHLVAHDLNRRGVLSPRDYFAQLRGREPQGRKWSATALKRSMVSEAMLGYATLNGKTVRGDDGAPLVRAEPILTREQLEALRAELVKTSRAKPAVSTPSLLLRVLFCAVCGEPAYKFAGGGRKHPRYRCRSMGFPKHCGNGTVAMAEWDAFCEEQVLDLLGDAERLEKVWVAGSDSAVELAEVNAELVDLTSLIGSPAYRAGSPQREALDARIAALAARQEELEGLEARPSGWEWRETGQRFGDWWREQDTAAKNAWLRSMNVRLTFDVRGGLTRTIDFGDLQEYEQHLRLGSVAERLYTGMS

SEQ ID NO: 10850 - protein, 500 aa, synthetic construct
MRALVVIRLSRVTDATTSPERQLESCQQLCAQRGWDVVGVAEDLDVSGAVDPFDRKRRPNLARWLAFEEQPFDVIVAYRVDRLARSIRHLQQLVHWAEDHKKLVVSATEAHFDTTTPFAAVVIALMGTVAQMELEAIKERSRSAAHFNIRAGKYRGSLPPWGYLPTRVDGEWRLVPDPVQRERILEVYRRVVDNHEPLHLVAHDLNRRGVLSPKDYFAQLQGREPQGRKWSATALKRSMISEAMLGYATLNGKTVRDDDGAPLVRAEPILTREQLEALRAELVKTSRAKPAVSTPSLLLRVLFCAVCGEPAYKFAGGGRKHPRYRCRSMGFPKHCGNGTVAMAEWDAFCEEQVLNLLGDAERLEKVWVAGSDSAVELAEVNAELVDLTSLIGSPAYRAGSPQREALDARIAALAARQGELEGLEARPSGWEWRETGQRFGDWWREQDTAAKNTWLRSMNVRLTFDVRGGLTRTIDFGDLQEYEQHLRLGSVVERLHTGMS

SEQ ID NO: 10851 - protein, 500 aa, synthetic construct
MRALVVIRLSRVTDATTSPERQLESCQQLCAQRGWDVVGVAEDLDVSGAVDPFDRKRRPNLARWLAFEEQPFDVIVAYRVDRLARSIRHLQQLVHWAEDHKKLVVSATEAHFDTTTPFAAVVIALMGTVAQMELEAIKERSRSAAHFNIRAGKYRGSLPPWGYLPTRVDGEWRLVPDPVQRERILEVYHRVVDNHEPLHSVAHDLNRRGVLSPKDYFAQLRGREPQGREWSATALKRSMTSVAMLGYATLNGKTVRGDDGAPLVRAEPILTREQLEALRAELVKTSRVKPAVSTPSLLLRVLFCAVCGEPAYKFAGGGRKHPRYRCRSMGFPKHCGNGTVAMAEWDAFCEEQVLDLLGDAERLEKVWVAGSDSAVELAEVNAELVDLTSLIGSPAYRAGSPQREALDARIAALAARQEELEGLEARPSGWEWRETGQRFGDWWREQDTAAKNTWLRSMNVRLTFDVRGGLTRTIDFGDLREYEQHLRLGSVVERLHTGMS

SEQ ID NO: 10852 - protein, 500 aa, synthetic construct
MRALVVVRLSRVTDATTSPERQLESCQQLCAQRGWDVVGVAEDLDVSGAVDPFDRKRRPNLARWLASEEQPFDVIVAYRVDRLARSIRHLQQLVHWAEDHKKLVVSATEAHFDTTTPFAAVVIALMGTVAQMELEAIKERSRSAAHFNIRAGKYRGSLPPWGYLPTRVDGEWRLAPDPVQRERILEVYHRVVDNHEPLHLVAHDLNRRGVLSPRDYFAQLRGREPQGRKWSATALKRSMISKAMLGYATLNGKTVRDDDGAPLVRAEPILTREQLEALRAELVKTSRAKPAVSTPSLLLRVLFCAVCGEPAYKFAGGGRKHSRYRCRSMGFPKHCGNGTVAMTEWDAFCEEQVLNLLGDAERLEKVWVAGSDSAVELAEVNAELVDLTSLIGSPAYRAGSPQREALDARIAALAARQEELEGLEARPSGWEWRETGQRFGDWWREQDTAAKNTWLCSMNVRLTFDVRGGLTRTIDFGDLQEYGQHLRLGSVVERLHTGMS

SEQ ID NO: 10853 - protein, 500 aa, synthetic construct
MRALVVIRLSRVTDATTSPERQLESCQQLCAQRGWDVVGVAEDLDVSGAVDPFDRKRRPNLARWLAFEEQPFDAIVAYRVDRLTRSIRHLQQLVHWAEDHKKLVVSATEAHFDTTTPFAAVVIALMGTVAQMELEAIKERNRSAAHFNIRAGKYRGSLPPWGYLPTRVDGEWRLAPDPVQRERILEVYHRVVDNHEPLHLVAHDLNRRGVLSPKDYFAQLQGREPQGRKWSATALKRSMISEAMLGYATLNGKTVRDDDGAPLVRAEPILAREQLEALRAELVKTSRAKPAVSTPSLLLRVLFCAVCGEPAYKFAGGGRKHPRYRCRSMGFPKHCGNGTVAMAEWDAFCEEQVLGLLGDAERLEKVWVAGSDSAVELAEVNAELVDLTSLIGSPAYRAGSPQREALDARIAALAARQEELEGLEARPSGWERRGTGQRFGDWWREQDSAAKNTWLRSMNVRLTFDVRGGLTRTIDFGDLQEYEQHLRLGSVVERLHTGMP

SEQ ID NO: 10854 - protein, 500 aa, synthetic construct
MRALVVIRLSRVTDATTSPERQLESCQQLCAQRGWDVVGVAEDLDVSGAVDPFDRKRRPNLARWLAFEEQPFDVIVAYRVDRLTRSVRHLQQLVHWAEDHKKLVVSATEAHFDTTTPFAAVVIALMGTVAQMELEAIKERSRSAAHFNIRAGKYRGSLPPWGYLPARVDGEWRLVPDPVQRERILEVYHRVVDNHEPLHLVAHDLNRRGVLSPKDYFAQLRGREPQGRKWSATALKRSMISVAMLGYATLCGKTVRDDDGAPLVRAEPILTREQLEALRAELVKTSRAKPAVSTPSLLLRVLFCAVCGEPAYKFAGGGRKHPRYRCRSMGFPKHCGNGTVAMAEWDAFCEEQVLNLLGDAERLEKVWVAGSDSAVELAEVNKELVDLTSLIGSPAYRAGSPQREALDARIAALAVRQEELEGLEARPSGWEWRGTGQRFGDWWREQDTAAKNTWLRSMNVRLTFDARGGPTRTIDFGDLQEYEQHLRSGSVVERLHTGMS

SEQ ID NO: 10855 - protein, 500 aa, synthetic construct
MRALVVIRLSRVTDATTSPERQLESCQQLCAQRGWDVVGVAEDLDVSGAVDPFDRKRRPNLARWLAFEEQPFDVIVAYRVDRLARSIRHLQQLVHWAEDHKKLVVSATEAHFDTTTPFAAVVIALMGTVAQMELEAIKERSRSAAHFNIRAGKYRGSLPPWGYLPTRVDGEWRLVPDPVQRERILEVYHRVVDNHEPLHLVAHDLNRRGVLSPKDYFAQLRGREPQGRKWSATALKRSMISEAMLGYATLNGKTVRDDDGAPLVRAEPILTREQLEALRAELVKTSRAKPAVSTPSLLLRVLFCAVCGEPAYKFFGGGRKHPRYRCRSMGFPKHCGNGTVAMAEWDAFCEEQVLDLLGDAERLEKVWVAGSDSAVELAEVNAELVDLTSLIGSPAYRAGSPQREALDARIAALAARQGELEGLEARPSGWEWRETGQRFRDWWREQDTAAKNTWLRSMNVRLTFDVRGGLTRTIDFGDLQEYEQHLRLCSVVERLHTGMS

SEQ ID NO: 10856 - protein, 500 aa, synthetic construct
MRALVVIRLSRVTDATTSPERQLESCQQLCAQRGWDVVGVAEDLDVSGAVDPFDRKHRPNLACWLAFEEQPFDVIVAYRVDRLTRSTRHLQQLVHWAEDHKKLVVSATEAHFDTTTPFAAVVIALMGTVAQMELEAIKERSRSAAHFNIRAGKYRGSLPPWGYLPTRVDGEWRLVPDPVQRERILEVYHRVVDNHEPLHLVAHDLNRRGVLSPKDYFARLRGREPQGRKWSATALKRSMISEAMLGYATLNGKTVRDDSGAPLVRAEPILTREQLEALRAELVKTSRAKPAVSTPSLLLRVLFCAVCGEPAYKFAGGGRKHPRYRCRSMGFPKHCGNGTVAMAEWDAFCEEQVLNLLGDAERLEKVWVAGSDSAVELAEVNAELVDLTSLIGSPAYRAGSPQREALDARIAALAARQEELEGLEARPSGWEWRGTGQRFGDWWREQDTAAKNTWLRSMNVRLTFDVRGGLTRTIDFGDLQEYEQHLRLGGVVERLHTGMS

SEQ ID NO: 10857 - protein, 500 aa, synthetic construct
MRALVVIRLSRVTDATTSPERQLESCQQLCAQRGWDVVGVAEDLDVSGAVDPFDRKRRPNLARWLAFEEQPFDVIVAYRVDRLARSIRHLQQLVHWAEDHKKLVVSATEAHFDTTTPFAAVAIALMGTVAQMELEAIKERSRSAAHFNIRAGKYRGSLPPWGYLPTRVDGEWRLAPDPVQRERILEVYHRVVDNHEPLHLVAHDLNRRGVLSPKDYFAQLRGREPQGRKWSATALKRSMTSEAMLGYATLNGKTVRDDNGAPLVRAEPILTREQLEALRAELVKTSRAKPAVSTPSLLLRVLFCAVCGEPAYKFAGGGRKHPRYRCRSMGFPKHCGNGTVAMAEWDAFCEEQVLDLLGDAERLEEAWVAGSDSAVELAEVNAELVDLTSLIGSPSYRAGSPQREALDARIAALAARQEELEGLEARPSGWEWRETGQRFGDWWREQDTAAKNTWLRSMNVRLTFDVRGGLTRTIDFGDLQEYEQHLRLGSVVERLRTGMS

SEQ ID NO: 10858 - protein, 500 aa, synthetic construct
MRALVVIRLSRVTDATTSPERQLESCQQLCAQRGWDVVGVAEDLDVSGAVDPFDRKRRPNLARWLAFEEQPFDAIVAYRVDRLTRSIRHLQQLVHWAEDHKKLVVSATEAHFDTTTPFAAVVIALMGTVAQMELEAIKERSRSAAHFNIRAGKYRGSLPPWGYLPTRVDGEWRLAPDPVQRERILEVYHRVVDSHEPLHLVAHDLNRRGVLSPKDYFAQLRGREPQGRKWSATALKRSMISEAMLGYATLNGKTVRDDDGAPLVRAEPILTREQLEALRAELVKTSRAKPAVSTPSLLLRVLFCAVCGEPAYKFAGGGRKHPRYRCRSMGFPKHCGNGTVAMAEWDAFCEEQVLNLLGDAERLEKVWVAGSDSAVELAEVNAELVDLTSLIGSPAYRAGSPQREALDARIAALAARQEELGGLEARPSGWEWRETGQRFGDWWREQDTAAKNTWLRSMNVRLTFDVRGGLTRTVDFGDLQEYERHSRLGSVVERLHTGMS

SEQ ID NO: 10859 - protein, 500 aa, synthetic construct
MRALVVIRLSRVTDATTSPERQLESCQQLCAQRGWDVVGVAEDLDVSGAVDPFDRKRRPNLARWLAFEEQPFDVIVAYRVDRLTRSVRHLQQLVRWAEDHKKLVVSATEAHFDTTTPFAAVVIALMGTVAQMELEAIKERSRSAAHFNIRAGKYRGSLPPWGYLPTRVDGEWRLVPDPVQRERILEVYHRVVDDHEPLHWVAHDLNRRGVLSPKDYFAQLQGREPQGRKWSATALKRSMISEAMLGYATLNGKTVRDDDGAPLVRAEPILTREQLEALRAELVKTSRAKPAVSTPSLLLRVLFCAVCGEPAYKFAGGGRKHPRYRCRSMGFPKHCGNGTVALAEWDAFCEEQVLGLLGDTERLEKVWVAGSDSAVELAEVNAELVDLTSLIGSPVYRAGSPQREALDARIAALAARQEELEGLEARPSGWEWRVTGQRFGDWWREQDTAAKNTWLRSMNVRLTFDVRGGLTRTIDFGDLQEYEQHLRLGSVVERLHAGTS

SEQ ID NO: 10860 - protein, 500 aa, synthetic construct
MRALVVIRLSRVTDATTSPERQLESCQQLCAQRGWDVVGVAEDLDVSGAVDPFDRKRRPNLARWLAFEEQPFDVIVAYRVDRLARSIRHLQQLVHWAEDHKKLVVSATEAHFDTTTPFAAVVIALTGTVAQMELEAIKERSRSAAHFNIRAGKYRGSLPPWGYLPTRVDGEWRLVPDPVQRERILEVYHRVVDNHEPLHLVAHDLNRRGVLSPKDYFAQLQGREPQGRKWSATALKRSMTSEAMLGYATLNGKIVRDDDGAPLVRAEPILTREQLEALRAELVKTSRAKPAVSTPSLLLRVLFCAVCGEPAYKFAGGGRKHPRYRCRSMGFPKHCGNGTVAMAEWDAFCEEQVLDLLGDVERLEKVWVAGSDSAVELAEVNAELVDLTSLIGSPAYRAGSPQREALDTRIAALAARQEELEGLEARPSGWEWRETGQRFGDWWREQDTAAKNTWLRSMNVRLTFDVRGGLTRTIDFGDLQEYEQHLRLGSVVERLHTGMS

SEQ ID NO: 10861 - protein, 500 aa, synthetic construct
MRALVVIRLSRVTDATTSPERQLESCQQLCAQRGWDVVGVAEDLDVSGAVDPFDRKRRPNLARWLAFEEQPFDVVVAYRVDRLTRSIRHLQQLVHWAEDHKKLVVSATEAHFDTTTPFAAVTIALMGTVAQMELEAIKERSRSAAHFNIRAGKYRGSLPPWGYLPTRVDGEWRLAPDPVQRERILEVYHRVVDDHEPLHSVAHDLNRRGVPSPRDYFAQLQGREPRGRKWSATALKRSMISGAMLGYVTLNGKTVRDDDGAPLVRAEPILTREQLEALRAELVKTSRAKPAVSTPSLLLRVLFCAVCGEPAYKFAGGGRKHPRYRCRSMGFPEHCGNGTVAMAEWDAFCEEQVLGLLGDAERLEKVWVAGSDSAVELAEVNAELVDLTSLIGSPAYRAGSPQREALDARIAALAARQGELEGLEARPSGWEWRETGQRFGNWWREQDTAAKNTWLRSMNVRLTFDVRGGLTRTIDFGDLQEYEQHLRLGSVVERLHTGMS

SEQ ID NO: 10862 - protein, 500 aa, synthetic construct
MRALVVIRLSRVTDATTSPERQLESCQQLCAQRGWDVVGVAEDLDVSGAVDPFDCKRRPNLARWLAFEEQPFDVIVAYRIDRLTRSVRHLQQLVHWAEDHKKLVVSATEAHFDTTTPFAAVVIALMGTVAQMELEAIKERTRSAAHFNIRAGKYRGSLPPWGYLPTRVDGEWRLVPDPVQRERILEVYHRVVDNHEPLHLVAHDLNRRGVLSPRDYFAQLQGREPQGRKWSATALKRSMISEAMLGYATLNGKTVRDDDGAPLVRAEPILTREQREALRAELVKTSRAKPAVSTPSLLLRVLFCAVCGEPAYKFAGGGRKHPRYRCRSMGFPKHCGNGTVAMAEWDAFCEDQVLDLLGDAERLEKVWVAGSDSAVELAEVNAELVDLTSLIGSPAYRAGSPQREALDARIAALAARQEELEGLEARLSGWEWRETGQRFGDWWREQDTAAKNTWLRSMNVRLTFDVRGGLTRTIDFGDLREYEQHLRLGSVVERLHTRMS

SEQ ID NO: 10863 - protein, 500 aa, synthetic construct
MRALVVIRLSRVTDATTSPERQLESCQQLCAQRGWDVVGVAEDLDVSGAVDPFDRKRRPNLARWLAFEEQPFDVIVAYRVDRLTRSVRHLQRLVHWAEDHKKLVVSATEAHFDTTTPFAAVVIALMGTVAQMELEAIRERSRSAAHFNIRAGKYRGSLPPWGYLPTRVDGEWRLVPDPAQRERIFEVYHRVVDNHEPLHLVAHDLNRRGVLSPRDYFAQLQGREPQGRKWSATALKRSMISEAMLGYATLNGKTVRDDDGAPLVRAEPILTRGQLEALRAELVKTSRAKPVVSTPSLLLRVLFCAVCGEPAYKFSGGGRKHPRYRCRSMGFPKHCGNGTVAMAEWDAFCEEQVLDLLGDTERLEKVWVAGSDSAVELAEVNAELMDLTSLIGSPAYRAGSPQRDALDARIAALAARQEELEGLEARPSGWEWRETGQRFGDWWREQDTAAKNTWLRSMNVRLTFDVRGGLTRTIDFGDLQGYEQHLRLGSVVERLHTRMS

SEQ ID NO: 10864 - protein, 500 aa, synthetic construct
MRALVVIRLSRVTDATTSPERQLESCQQLCAQRGWDVVGVAEDLDVSGAVDPFDRKRRPNLARWLAFEEQPFDVIVAYRVDRLTRSTRHLQQLVHWAEDHKKLVVSATEAHFDTTTPFAAVVIALMGTVAQMELEAIKERSRSAAHFNIRAGKYRGSLPPWGYLPTRVDGEWRLAPDPVQRERILEVYHRVVDNHEPLHLVAHDLNRRGVLSPRDYFAQLQGREPQGRKWSATALKRSMISEAMLGYATLNGKIVRDDDGAPLVRAEPILTREQQEALRAELVKTSRAKPAVSTPSLLLRVLFCAVCGEPAYRFAGGGRKHPRYRCRSMGFPKHCGNGTVAMAEWDAFCEEQVLDLLRDAERLEKVWVAGSDSAVELAEVNAELVDLTSLIGSPAYRAGSPQREALDARIAALAARQEELEGLEARPSGWEWRGTGQRFGDWWREQDTAAKSTWLRSMNVRLTFDVRGGLTRTIDFGDLQEYEQHLRSGSVVERLHTGMS

SEQ ID NO: 10865 - protein, 500 aa, synthetic construct
MRALVVIRLSRVTDATTSPERQLESCQQLCAQRGWDVVGVAEDLDVSGAVDPFDRKRRPNLARWLAFEEQPFDVIVAYRVDRLTRSTRHLQQLVHWAEDHKKLVVSATEAHFDTTTPFAAVVIALMGTVAQMELEAIKERNRSAAHFNIRAGKYRGSLPPWGYLPTRVDGEWRLVPDPVQRERILEVYHRVVDNHEPLHLVAHDLNRRGVLSPRDYFAQLQGREPQGRKWSATALKRSMISGAMLGYATLNGKTVRDDDGAPLVRAEPILTREQLEALRAELVKTSRAKPAVSAPSLLLRVLFCAVCGEPAYKFAGGGRKHPRYRCRSMGFPKHCGNGTVAMAEWDAFCEEQVLDLLGDAERLEKVWVAGSDSAVELAEVSAELVDLTSLIGSPAYRAGSPQREALDARIAALAARQEELEGLEARPSGWEWRETGQRFGDWWREQDTAAKNTWLRSMNVRLTFDVRGGLTRTIDFGDLQEYEQHLRLGGVVERSHTGMS

SEQ ID NO: 10866 - protein, 500 aa, synthetic construct
MRALVVIRLSRVTDATTSPERQLVSCQQLCAQRGWDVVGVAEDLDVSGAVDPFDRKRRPSLARWLAFEEQPFDVIVAYRVDRLTRSIRHLQQLVHWAEDHKKLVVSATEAHFDTTTPFAAVVIALMGTVAQMELEAIKERNRSAAHFNIRAGKYRGSLPPWGYLPTRVDGEWRLVPDPVQRERILEVYHRVVDNHEPLHLVAHDLNRRGVLSPKDYFAQLRGREPQGRKWSATALKRSMVSEAMLGHATLNGKTVRDDDGAPLVRAEPILTREQLEALRAELVKTSRAKPAVSTPSLLLRVLFCAVCGEPAYKFAGGGRKHPRYRCRSMGFPKHCGNGTVATAEWDAFCEEQVLDLLGDTERLEKVWVAGSDSAIELAEVNAELVDLTSLIGSPAYRAGSPQREALDARIAALAARQEELEGLEARPSGWEWRETGQRFGDWWREQDTAAKNTWLRSMNVRLTFDVRGGLTRTIDFGDLQEYEQHLRLGNAVERLHTGMS

SEQ ID NO: 10867 - protein, 500 aa, synthetic construct
MRALVVIRLSRVTDATTSPERQLESCQQLCAQRGWDVVGVAEDLDVSGAVDPFDRKRRPNLARWLAFEEQPFDVIVAYRVDRLTRSTRHLQQLVHWAEDHKKLVVSATEAHFDTTTPFAAVVIALMGTVAQMELEAIKERSRSAAHFNIRAGKYRGSLPPWGYLPTRVDGEWRLVPDPVQRERILEVYHRVVVNREPLHLVAHDLNRRGVLSPKDYFAQLRGREPQGREWSATALKRSMLSEAMLGYATLNGKTVRDDDGAPLVRAEPILTREQQEALRAELVKTSRAKPAVSTPSLLLRVLFCAVCGEPAYKFAGGGRKHPRYRCRSMGFPKHCGNGTVAMAEWDAFCEEQVLDLLGDAERLEKVWVAGSDSAAGLAEVNAELVDLTNLIGSPAYRAGSPQREALDARIAALAARQAELEGLEARPSGWEWRETGQRFGDWWREQDTAAKNTWLRSMNVRLTFDVRGGLTRTIDFGILQEYEQHLRLGSVVERLHTGMS

SEQ ID NO: 10868 - protein, 500 aa, synthetic construct
MRALIVIRLSRVTDATTSPERQLESCQQLCAQRGWDVVGVAEDLDVSGAVDPLDRKRRPNLARWLAFEEQPFDVIVAYRVDRLTRSTRHLQQLVHWAEDHKKLVVSATEAHFDTTTPFAAVVIALMGTVAQMELEAIKERSRSAAHFNIRAGKYRGSLPPWGYLPARVDGEWRLVPDPVQRERILEVYHRVVDNHEPLHLVAHDLNRRGVLSPKDYFAQLRGREPQGRKWSATALKRSMISEAMLGYATLNGKIVRDDDGAPLVRAEPILTREQLEALRAELAKTSRAEPAVSTPSLLLRVLFCAVCGEPAYKFAGGGRRHPRYRCRSMGFPKHCGNGTVAMAEWDAFCEEQVLNLLGDAERLEKVWVAGSDSAVELAEVNAELVDLTSLIGSPAYRAGSPQREALDARIAALAARQEELEGLEARPSGWEWRGTGQRFGDWWREQDTAAKNTWLRSMNVRLTFDVRGGLARTIDFGDLQEYEQHLRLGSVVERLHTGMS

SEQ ID NO: 10869 - protein, 500 aa, synthetic construct
MRALVVIRLSRVTDATTSPERQLESCQQLCAQRGWDVVGVAEDLDVSGAVNPFDRKRRPNLARWLAFEEQPFDVIVAYRVDRLTRSTRHLQQLVHWAEDHEKLVVSATEAHFDTTTPFAAVVIALMGTVAQMELEAIKERNRSAAHFNIRAGRYRGSLPPWGYLPTRVDGEWRLVPDPVQRERILEVYHRVVDNHEPLHLVAHDLNRRGVLSPRDYFAQLRGREPQGRKWSATALKRSMTSEAMLGYATLNGKTVRDDDGAPLVRAEPILTREQLEALRAELVKTSRAKPAVSTPSLLLRVLFCAVCGEPAYKFAGGGRKHPRYRCRSMGFPKHCGNGTVAMAEWDAFCEEQVLDLLGGAERLEKVWVASSDPAVELAEVNAELVDLTSLIGSPAYRAGSPQREALDARIAALAARQEELEGLKARPSGWEWRETGQRFGDWWREQDTAAKNIWLRSMNVRLTFDVRGGLTRTIDFGDLQEYEQHLRLGSVVERLHTGMS

SEQ ID NO: 10870 - protein, 500 aa, synthetic construct
MRALVVIRLSRVTDATTSPERQLESCQQLCAQRGWDVVGVAEDLDVSGAVDPFDRKRRPNLARWLASEEQPFDVIVAYRVDRLARSIRHLQQLVHWAEDHKKLVVSATEAHFDTTTPFAAVVIALMGTVAQMELGAIKERSRSAAHFNIRAGKYRGSLPPWGYLPTRVDGEWRLVPDPVQRERILEVYHRVVDNHEPLHLVAHDLNRRGVLSPRDYFAQLRGREPQGRKWSATALKRSMISVAMLGYATLNGRTVRDDDGAPLVRAEPILTREQLEALRAELVKTSRAKPAVSTPSLLLRVLFCAVCGEPAYKFAGGGRKHPRYRCRSMGFPKHCGNGTVAMAEWDAFCEEQVLDLLGDAERLEKVWVAGSDSAAELAEVNAELVDLTSLVGSSAYRAGSPQREALDARIAALAARQEELEGLEARPSGWEWRETGQRFGDWWREQDTAAKNIWLRTMNVRLTFDVRGGLTRTIDFGDLQEYEQHLRSGSVVERLHTGMS

SEQ ID NO: 10871 - protein, 500 aa, synthetic construct
MRALVVIRLSRVTDATTSPERQLESCQQLCAQRGWDVVGVAEDLDVSGAVDPFDRKRRPNLARWLAFGEQPFDVIVAYRVDRLARSIRHLQQLVHWAEDHKKLVVSATEAHFDTTTPFAAVVIALMGTVAQMELEAIKERSRSAAHFNIRAGKYRGSLPPWGYLPTRVDGEWRLAPDPVQRERILEVYHRVVDNHEPLHLVAHDLNRRGVLSPKDYFAQLQGREPQGRKWSATALKRSMISEAMLGHATLDGKTVRDDDGAPLVRAEPILTREQLETLRAVLAKTSRARPAVSTPSLLLRVLFCAVCGEPAYKFAGGGRKHPRYRCRSMGFPKHCGNGTVAMAEWDAFCEEQVLNLLGDAERLEKVWVAGSDSAVELAEVNAELVDLTSLIGSPAYRVGSPQREALDARIAALAARQEELEGLEARPSGWEWRGTGQRFGDWWREQDTAAKNTWLRSMNVRLTFDVRGGLTRTIDFGDLQEYELHLRSGGVVERLHTGMS

SEQ ID NO: 10872 - protein, 500 aa, synthetic construct
MRALVVIRLSRVTDATTSPERQLESCQQLCAQRGWDVVGVAEDLDVSGAVDPFDRKRRPNLARWLAFEEQPFDVIVAYRVDRLTRSVRHLQRLVHWAEDHKKLVVSTTEAHFDTTTPFAAVVIALMGTVAQMELEAIKERSRSAAHFNIRAGKYRGSLPPWGYLPTRVGGEWRLAPDPVQRERILEVYHRVVDNHEPLHLVAHDLNRRGVLSPKDYFAQLQGREPQGRRWSATALKRSMISVAMLGYATLNGKTVRDDDGAPLVRAEPILTREQLEALRAELVKTSRTKPAVATPSLLLRVLFCAVCGEPAYKFAGGGRKHPRYRCRSMGFPKHCGNGTVAMAEWDAFCEEQVLDLLGDAERLEKIWVAGSDSAVELAEVNAELVDLTSLIGSPAYRAGSPQREALGARIAALAARQEELEGSEARPSGWEWRGTGQRFGDWWCEQDTAAKNTWLRSMNVRLTFDVRGGLTRTIDFGDLQKYEQHLRLGSVVERSHTGMS

SEQ ID NO: 10873 - protein, 500 aa, synthetic construct
MRALVVIRLSRVTDATTSPERQLESCQQLCAQRGWDVVGVAEDLDVSGAVDPFDRKRRPNLARWLAFEEQPFDVIVAYRVDRLARSTRHLQQLVHWAEDHKKLVVSATEAHFDTTTPFAAVVIALMGTVAQMELEAIKERNRSAAHYNIRAGKYRGSLPPWGYLPTRVDGEWRLAPDPVQRERILEVYHRVVDNHEPLHLVAHDLNRRGVLSPKDYFAQLQGREPQGRKWSATALKRSMISEAMLGYATLNGKTVRDDGGAPLVRAEPILTRGQLEALRAELVRTSRAEPAVSTPSLLLRVLFCAVCGEPAYKFAGGGRKHPRYRCRSMGFPKHCGNGTVAMAEWDAFCEEQVLDLLGGVERLEKVWVAGSDSAVELAEVNAELVDLTSLIGSPAYRAGSPQREALDARIAALAARQEGLEGLEARPSGWEWRGTGQRFGDWWREQDTAAKNTWLRSMNVRLTFDVRGGLTRTIDFGDLQEYEQHLRLGSVVERLHTGMS

SEQ ID NO: 10874 - protein, 500 aa, synthetic construct
MRALVVIRLSRVTDATTSPERQLESCQQLCAQRGWDVVGVAEDLDVSGSVDPFDRKRRPNLARWLAFEEQPFDVIVAYRVDRLTRSVRHLQQLVHWAEDHKKLVVSATEAHFDTTTPFAAVVIALMGTVAQMELEAIRERSRSAAHFNIRAGKYRGSLPPWGYLPARVDGEWRLVPDPVQRERILEVYHRVVDNHEPLHLVAHDLNRRGVLSPKDYFAQLQGREPQGRKWSATALKRSMISEAMLGYATLNGKIVRDDDGAPLVRAEPILTREQLGALRAELAKTSRAKPAVSTPSLLLRVLFCAVCGEPAYKFAGGGRKHPRYRCRSMGFPKHCGNGTVAMAEWDAFCEEQVLDLLGDAERLEKVWVAGSDSAVELAEVNAELVDLTSSIGSPAYRAGSPQREALDARIAALAARQEELEGLEARPSGWEWRVTGQRFGDWWREQDTAAKNTWLRSMNVRLTFDVRGGLTRTIDFGDLQEYEQHLRLGSVVERLHTGMP

SEQ ID NO: 10875 - protein, 500 aa, synthetic construct
MRALVVIRLSRVTDATTSPERQLESCQQLCARRGWDVVGVAEDLDVSGAVDPFDRKRRPNLARWLAFEEQPFDVIVAYRVDRLARSIRHLQQLVHWAEDHKKLVVSASEAHFDTTTPFAAVVIALMGTVAQMELEAIKERSRSAAHFNIRAGKYRGSLPPWGYLPARVDGEWRLVPDPVQRERILEVYHRVVDNHEPLHLVAHDLNRRGVLSPKDYFAQLQGREPQGRKWSATALKRSMISEAMLGYATLNGKTVRDDDGAPLVRAEPILTREQLEALRAELVKTSRAKPAVSTPSLLLRVLFCAVCGEPAYKFTGGGRKHPRYRCRSMGFPKHCGNGTVAMAEWDAFCEEQVLDLLGDAERLEKVWVAGSDSAVGLAEVNAELVDLTSLIGSPAYRAGSPQREALDARIAALAARQEELEGLEARPSGWEWRETGQRFGDWWREQDTAAKNTWLRSMNVRLTFDVRGGLTRTIDFGDLQEYEQHLRLGGVVERLHTGMS

SEQ ID NO: 10876 - protein, 500 aa, synthetic construct
MRALVVIRLSRVTDATTSPERQLESCQQLCAQRGWDVVGVAEDLDVSGAVDPFDRKRRPNLARWLAFEEQPFDVVVAYRVDRLTRSIRHLQQLVHWAEDHKKLVVSATEAHFDTTTPFAAVVIALMGTVAQMELEAIKERNRSAAHFNIRAGKYRGSLPPWGYLPTRVDGEWRLVPDPVQRERILEVYHRVVDNHEPLHLVAHDLNRRGVLSPKDYFAQLRGREPQGRKWSATALKRSMISVAMLGYATLCGKTVRDDDGAPLVRAEPILTREQLEALRAELVKTSRAKPAVSTPSLLLRVLFCAVCGEPAYKFAGGGRKHPRYRCRSMGFPKHCGNGTVAMAEWDAFCEEQVLNLLGDAERLEKVWVAGSDSAVELAEVNKELVDLTSLIGSPAYRAGSPQREALDARIAALAARQEELEGLEARPSGWEWRETGQRFGDWWREQDTAAKNTWLRSMNVRLTFDVRGGLTRTIDFGDLQEYEQHLRLGSVVERLHTGMS

SEQ ID NO: 10877 - protein, 500 aa, synthetic construct
MRALVVIRLSRVTDATTSPERQLESCQQLCAQRGWDVVGVAEDLDVSGAVDPFNRKRRPNLARWLAFEEQPFDVIVAYRVDRLTRSIRHLQQLVHWAEDHKKLVVSATEAHFDTTTPFAAVVIALMGTVAQMELEAIKERSRSAAHFNIRAGKYRGSLPPWGYLPARVDGEWRLAPDPVQRERILEVYHRVVDDHEPLHLVAHDLNRRGVLSPRDYFAQLRGREPQGRKWSATALKRSMTSEAMLGYATLSGKTVRDDDGAPLVRAEPILTREQLEALRAELAKTSRAKPAVSTPSLLLRVLFCAVCGEPAYKFAGGGRKHLRYRCRSMGFPKHCGNGTVAMAEWDAFCEEQVLGLLGDAERLEKVWVAGSDSAVELAGVNAELVDLTSLIGSPAYRAGSPQREALDARIAALAARQEELEGLEARPSGWEWRETGQRFGDWWREQDTAAKNTWLRSMNVRLTFDVRGGLTRTIDFGDLQEYEQHLRSGSVVERLYTGMS

SEQ ID NO: 10878 - protein, 500 aa, synthetic construct
MRALVVIRLSRVTDATTSPERQLESCQQLCAQRGWDVVGVAEDLDVSGTVDPFDRKRRPNLARWLAFEEQPFDVIVAYRVDRLTRSVRHLQQLVHWAEDHKKLVVSATEAHFDTTTPFAAVVIALMGTVAQMELEAIKERSRSAAHFNIRAGKYRGSLPPWGYLPARVDGEWRLVPDPVQRERILEVYHRVVDNHEPLHLVAHDLNRRGVLSPKDYFAQLRGREPQGRKWSATALKRSMISEAMLGHATLNGKTVRDVDGAPLVRAEPILTREQLEALRAELVETSRAKPAVSTPSLLLRVLFCAVCGEPAYKFAGGGRKHPRYRCRSMGFPKHCGNGTVAMAEWDAFCEEQVLDLLGDAERLEKVWVAGSDSAVELAEVNAELVDLTSLISSPAYRAGSPQREALDARIAALAARQEELEGLEARPSGWEWRGTGQRFGDWWREQDAAAKNTWLRSMNVRLTFDVRGGLTRTIDFGDLQEYEQHLRLGSVVERLHTGLS

SEQ ID NO: 10879 - protein, 500 aa, synthetic construct
MRALVVIRLSRVTDATTSPERQLESCQQLCAQRGWDVVGVAEDLDVSGAVDPFDRKRRPNLARWLAFEERPFDVIVAYRVDRLTRSTRHLQQLVRWAEDHKKLVVSATEAHFDTTTPFAAVVIALMGTVAQMELEAIKERNRSAAHYNIRAGKYRGSLPPWGYLPTRVDGEWRLVPDPVQRERILEVYHRVVDNHEPLHLVAHDLNRRGVLSPKDYFAQLQGREPQGRKWSATALKRSMISEAMLGYATLNGKTVRDDDGAPLVRAEPILTREQLEALRAELVKTSRAKPAVSTPSLLLRVLFCAVCGEPAYKFAGGGRRHPRYRCRSMGFPKHCGNGTVAMAEWDAFCEEQVLNLLGDAERLEKVWVAGSDSAVELAEVNAELVDLTSLIGSPAYRAGSPQREALDARIAALAARREELEGLEARPSGWEWRETGQRFGDWWREQDTAAKNTWLRSMNVRLTFDVRGGPTRTIDFGDLQEYEQHLRLGDVVERLHTGMS

SEQ ID NO: 10880 - protein, 500 aa, synthetic construct
MRALVVIRLSRVTDATTSPERQLESCQQLCAQRGWDVVGVAEDLDVSGAVDPFDRKRRPNLARWLAFEEQPFDVIVAYRVDRLARSIRHLQQLVHWAEDHKKLVVSATEAHFDTTTPFAAVVIALMGTVAQMELEAIKERSRSAAHFNIRAGKYRGSLPPWGYLPTRVDGEWRLVPDPVQRERILEVYHRVVDNHEPLHLVAHDLNRRGVLSPRDYFAQLRGREPQDRKWSATALKRSMTSEAMLGYATLNGKTVRDDDGAPLVRAEPILTREQLEALRAELAKTSRAKPAVSTPSLLLRVLFCAVCGEPAYKFAGGGRKHPRYRCRSMGFPKHCGNGTVATAEWDAFCEEQVLGLLGDAERLEKVWVAGSDSAVELAEVNAELVDLTSLIGSPAYRAGSPQREALDARIAALAARQEELEGLEACPSGWEWRETGQRFGDWWREQDTAAKNTWLRSMNVRLTFDVRGGLTRTIDFGDLQEYEQHLRLGSVVERLHSGMS

SEQ ID NO: 10881 - protein, 500 aa, synthetic construct
MRALVVIRLSRVTDATTSPERQLESCQQLCAQRGWDVVGVAEDLDVSGAVDPFDRKRRPNLARWLAFEEQPFDVIVAYRVDRLTRSIRHLQQLVHWAEDHKKLVVSATEAHFDMTTPFAAVVIALMGTVAQMELEAIKERSRSAAHFNIRAGKYRGSLPPWGYLPTRVDGEWRLAPDPVQRERILEVYHRVVDNHEPLHLVAHDLNRRGVLSPRDYFAQLQGREPQGRKWSATALKRSMISEAMLGYATLNGKTVRDDDGAPLVRAEPILTREQREALRAELVKTSRAKPAVSTPSLLLRVLFCAVCGEPAYKFAGGGRKHPRYRCRSMGFPKHCGNGTVAMAEWDAFCEEQVLDLLGDAERLEKVWVAGSDSAVELAEVNAELVDLTSLIGSPAYRAGSPQREALDARIAALAARQEELEGLEARPSGWEWRGTGQRFGDWWREQDTAAKNTWLRSMNVRLTFDVRGGLTRMIDFGDLQEYEQHLRLGSVAERLHTGMS

SEQ ID NO: 10882 - protein, 500 aa, synthetic construct
MRALVVIRLSRFTDATTSPERQLESCQQLCAQRGWDVVGVAEDLDVSGAVDPFDHKRRPNLARWLAFEEQPFDVIVAYRVDRLTRSTRHLQQLVHWAEDHKKLVVSATEAHFDTTTPFAAVVIALMGTVAQMELEAIKERNRSAAHFNIRAGKYRGSLPPWGYLPTRVDGEWRLVPDPVQRERILEVYRRVVDNHEPLHLVAHDLNRRGVLSPKDYFAQLQGREPQGRKWSATALKRSMISEAMLGYATLNGKTVRDDDGAPLVRAEPILTREQQEALRAELVKTSRAKPAVSTPSLLLRVLFCAVCGEPAYKFAGGGRKHPRYRCRSMGFPKHCGNGTVAMAEWDAFCEEQVLDLLGDAERLEKVWVAGSDTAVELAEVNAELVDLTSLIGSPAYRAGSPQREALDARIAALAARQEELEGLEARPSGWEWRETGQRFGDWWREQDTAAKNTWLRSMNVRLTFDVRGGPTRTIDFGDLQEYEQHLRLGSTVERLHTGMS

SEQ ID NO: 10883 - protein, 500 aa, synthetic construct
MRALVVIRLSRVTDATTSPERQLESCQQLCAQRGWDVVGVAEDLDVSGAVDPFDRKRRPNLARWLAFEEQPFDVIVAYRVDRLARSIRHLQQLVHWAEDHKKLVVSATEAHFDTTTPFAAVVIALMGTVAQMELEAIKERNRSAAHFNIRAGKYRGSLPPWGYLPTRVDGEWRLVPDPVQRERILEVYHRVVDNHEPLHLVAHDLNRRGVLSPKDYFAQLRGREPQGRKWSATALKRSMISVAMLGYATLNGKIVRVDDGAPLVRAEPILTREQLEALRAELVKTSRAEPAVSTPSLLLRVLFCAVCGEPAYKFAGGGRKHPRYRCRSMGFPKHCGNGTVAMAEWDAFCEEQVLDLLGDTERLEKVWVAGSDSAVELAEVNAELVDLTSLIGSSAYRAGSAQREALDARIAALAARQEELEGLEARPSGWEWRETGQRFGDWWREQDTAAKNTWLRSMNVRLTYDVRGGLTRTIDFGDLQEYEQHLRLGGVVERLRTGMS

SEQ ID NO: 10884 - protein, 500 aa, synthetic construct
MRALVVIRLSRVTDATTSPERQLESCQQLCAQRGWDVVGVAEDLDVSGAVDPFDRKRRPNLARWLAFEEQPFDAIVAYRVDRLTRSTRHLQRLVRWAEDHKKLVVSATEAHFDTTTPFAAVVIALMGTVAQMELEAIKERNRSAAHFNIRAGKYRGSLPPWGYLPARVDGEWRLVPDPVQRERILEVYHRVVDDHEPLHSVAHDLNRRGVLSPKDYFAQLRGREPQGREWSATALKRSMTSEAMLGYATLNGKIVRDDAGAPLVRAEPILTREQLEALRAVLVKTSRAKPAVSTPSLLLRVLFCAVCGEPAYKFAGGGRKHPRYRCRSMGFPKHCGNGTVAMAEWDAFCEEQVLNLLGDAERLEKVWVAGSDSAVELAEVNAELVDLTSLIGSPAYRAGSPQREALDARIAALAARQEELEGLEARPSGWEWRETGQRFGDWWLEQDTAAKNTWLRSMNVRLTYDVRGGLTRTIDFGDLREYKQYLRSGSVVERLHTGMS

SEQ ID NO: 10885 - protein, 500 aa, synthetic construct
MRALVVVRLSRVTDATTSPERQLESCQQLCAQRGWDVVGVAEDLDVSGAVDPFDRKRRPNLARWLAFEEQPFDVIVAYRVDRLARSIRHLQQLVHWAEGHKKLVVSATEAHFDTTTPFAAVVIALMGTVAQMELEAIKERSRSAAHFNIRAGKYRGSLPPWGYLPTRVDGEWRLAPDPVQRERILEVYHRVVDNHEPLHLVAHDLNRRGVLSPKDYFAQLRGREPQGRKWSATALKRSMISVAMLGYATLCGKTVRDDDGAPLVRAEPILTREQLEALRAELVKTSRAKPAVSTPSLLLRVLFCAVCGEPAYKFSGGGRKHPRYRCRSMGFSKHCGNGTVAMAEWDAFCEEQVLDLLGDAERLEKVWVAGSDSAVELAEVNAELVDLTSLIGSPAYRAGSPQREALDARIAALAARQGELEGLEARPSGWEWRETGQRFGDWWREQDTAAKNTWLRSMNVRLTFDVRGGLTRTIDFGDLQEYEQHLRLGSVVERLHTGMS

SEQ ID NO: 10886 - protein, 500 aa, synthetic construct
MRALVVIRLSRVTDATTSPERQLESCQQLCAQRGWDVVGVAEDLDVSGAVDPFNRKRRPNLARWLAFEEQPFDVIVAYRVDRLARSIRHLQQLVHWAEDHKKLVVSATEAHFDTTTPFAAVVIALMGTVAQMELEAIRERSRSAAHFNIRAGKYRGSLPPWGYLPTRVDGEWRLAPDPVQRERILEVYHRVVDNHEPLHLVAHDLNRRGVLSPKDYFAQLRGREPQGRKWSATALKRSMTSEAMLGYATLNGKTVRDDDGAPLVRAEPILTREQLEALRAELAKTSRAKPAVSTPSLLLRVLFCAVCGEPAYKFAGGGRKHPRYRCRSMGFPKHCGNGTVAMAEWDAFCEEQVLDLLGDAECLEKVWVAGSDSAVELAEVNAELVDLTSLIGSPAYRAGSPQREALGARIAALAARQEELEGLEARPSGWEWRETGQRFGDWWREQDTAAKNTWLRSMNVRLTFDVRGGLTRTIDFGDLQEYEQHLRLGSAVERLHTGMS

SEQ ID NO: 10887 - protein, 500 aa, synthetic construct
MRALVVIRLSRVTDATTSPERQLESCQQLCAQRGWGVVGVAEDLDVSGAVDPFDRKRRPNLARWLAFEEQPFDVIVAYRVDRLTRSTRHLQQLVLWAEDHKKLVVSATEAHFDTTTPFAAVVIALMGTVAQMELEAIKERNRSAAHFNIRAGKYRGSLPPWGYLPTRVDGEWRLVPDPVQRERILEVYHRVVDNHEPLHLVAHDLNRRGVLSPKDYFAQLRGREPQGRKWSATALKRSMISEAMLGYATLNGKTVRDDDGAPLVRAEPILTREQLEALRAELVKTSRAEPAVSTPSLLLRVLFCAVCGEPAYKFAGGGRRHPRYRCRSMGFPKHCGNGTVAMAEWDAFCEEQVLDLLGDAERLEKVWVAGSDSAVELAEVNAELVGLTSLIGSPAYRARSPQREALDARIAALAARQEELEGLEARPSGWEWRGTGQRFGDWWREQDTAAKNTWLRSMNVRLTFDVRGGLTRTIDFGDLQEYEQHLRLGSVVERLHTGMS

SEQ ID NO: 10888 - protein, 500 aa, synthetic construct
MRALVVIRLSRVTDATTSPERQLESCQRLCAQRGWDVVGVAEDLDVSGAVDPFDRKRRPNLARWLAFEEQPFDVIVTYRIDRLTRSTRHLQQLVHWADDHKKLVVSATEAHFDTTTPFAAVVIALIGTVAQMELEAIRERSRSAAHFNIRAGKYRGSLPPWGYLPARVDGVWRLVPDPVQRERILEVYHRVVNNHEPLHLVAHDLNRRGVLSPKDYFAQLQGREPQGRKWSATALKRSMISEAMLGYATLNGKTVRDDDGAPLVRAEPILTREQLEALRAELVKTSRAKPAVSTPSLLLRVLFCAVCGEPAYKFAGGGRKHPRYRCRSMGFPKHCGNGTVAMAEWDAFCEEQVLDLLGDAERLKKVWVAGSDSAVELAEVSAELVDLTSLIGSPAYRAGSPQREALDARIAALAARQEELAGLEARPSGWEWRETGQRFGDWWREQDTATKNTWLRSMNVRLTFDVRGGLTRTIDFGDLQEYEQHLRSGSAVEHLHTGMS

SEQ ID NO: 10889 - protein, 500 aa, synthetic construct
MRALVVIRLSRVTDATTSPERQRESCQQLCAQRGWDVVGVAEDLDVSGAVDPFDRKRRPNLARWLAFEEQPFDVIVAYRVDRLTRSTRHLQQLVRWAEDHKKLVVSATEAHFDTTTPFAAVVIALMGTVAQMELEAIKERSRSAAHFNIRAGKYRGSLPPWGYLPTRVDGEWRLAPDPVQRERILEVYHRVVDNHEPLHLVAHDLNRRGVLSPKDYFAQLRGREPQGRKWSATALKRSMTSEAMLGYATLNGKTVRDDDGAPLVRAEPILTREQLEALRAELVKTSRAKPAVSTPSLLLRVLFCAVCGEPAYKFAGGGRKHPRYRCRSMGFPKHCGNGTVAMAEWDAFCEEQVLDLLGDAERLEKVWVAGSDSAVVLAEVNAELVDLTSLIGSPAYRAGSPQREALDARIAALAARQEELESLEARPSGWEWRETGQRFGDWWREQDTATKNTWLRSMNIRLTFDVRGGLTRTIDFGDLQEYEQHLRLGSVVERLHTGTS

SEQ ID NO: 10890 - protein, 500 aa, synthetic construct
MRALVVIRLSRVTDATTSPERQLESCQQLCAQRGWDVVGVAEDLDVSGAVDPFDHKRRPNLARWLAFEERPFDVIVAYRVDRLTRSTRHLQQLVHWAEDHKKLVVSATEAHFDTTTPFAAVVIALMGTVAQMELEAIKERSRSAAHFNIRAGKYRGSLPPWGYLPARVDGEWRLVPDPVQRERILEVYLRVVDNHEPLHLVAHDLNRRGVLSPKDYFAQLRGREPQGREWSATALKRSMTSEAMLGYATLNGKIVRDDDGAPLVRAEPILTREQLEALRAELVKTSRAKPAVSTPSLLLRVLFCAVCGEPAYKFAGGGRKHPRYRCRSMGFPKHCGNGTVAMAEWDAFCEEQVLNLLGDAERLEKVWVAGSDSAVELAEVNAELVDLTSLIGSPAYRAGSPQREALDARIAALAARQGELEGLEARPSGWEWRGTGQRFGDWWREQDTAAKNTWLRSMNVRLTFDVRGGLTRTIDFGDLQEYEQHLRFGSVVERLHTGMS

SEQ ID NO: 10891 - protein, 500 aa, synthetic construct
MRALVVIRLSRVTDATTSPERQLESCQQLCAQRGWDVAGVAEDLDVSGAVDPFDRKRRPNLARWLAFEEQPFDVIVAYRVDRLTRSTRHLQQLVHWAEDHKKLVVSATEAHFDTTTPFAAVVIALMGTVAQMELEAIKERSRSAARFNIRAGKYRGSLPPWGYLPARVDGEWRLVPDPVQRERILEVYHRVVDNHEPLHLVAHDLNRRGVLSPKDYFAQLRGREPQGREWSATALKRSMISEAMLGYATLNGKIVRDDDGVPLVRAEPILTREQLEALRAELVKTSRAKPAVSTPSLLLRVLFCAVCGEPAYKFAGGGRKHPRYRCRSMGFPKHCGNGTVAMAEWDAFCEEQVLNLLGDAERLEKAWVAGSDSAVELAEVSAELVDLTSLIGSPAYRAGSPQREALDARIAALAARQEELEGLEARPSGWEWRGTGQRFGDWWREQGTAAKNTWLRSMNVRLTFDVRGGLTRTIDFGDLQEYEQHLRLGSVVERLHTGMS

SEQ ID NO: 10892 - protein, 500 aa, synthetic construct
MRALVVIRLSRVTDATTSPERQLESCQQLCAQRGWDVVGVAEDLDVSGAVDPFDRKRRPNLARWLVFEEQPFDVIVAYRVDRLARSIRHLQQLVHWAEDHKKLVVSATEAHFDTTTPFAAVVIALMGTVAQMELEAIKERTRSAAHFNIRAGKYRGSLPPWGYLPTRVDGEWRLVPDPVQRERILEVYHRVVDNHEPLHLVAHDLNRRGVLSPKDYFAQLRGREPQGRKWSATALKRSMTSEAMLGYATLNGKTVRDDDGAPLVRAEPILTREQLEALRAELVKTSRAKPAVSTPSLLLRVLFCAVCGEPAYKFAGGGRRHPRYRCRSMGFPKHCGNGTVAMAEWDAFCEEQVLDLLGDVERLEKVWVAGSDSAVELAEVNAELVDLTSLIGSPAYRAGSPQREALDARIAALAARQEELEGLEARPSGWEWRGTGQRFGDWWREQDTAAKNTWLRSMNVRLTFDVRGGLTRTIDFGDLQEYEQHLRLGSVVERLHTGMS

SEQ ID NO: 10893 - protein, 500 aa, synthetic construct
MRALVVIRLSRVTDATTSPERQLESCQQLCARRGWDVVGVAEDLDVSGAVDPFDRKRRPNLARWLAFEEQPFDVIVAHRVDRLARSIRHLQQLVHWAEDHKKLVVSATEAHFDTTTPFAAVVIALMGTVAQMELEAIKERSRSAAHFNIRAGKYRGSLPPWGYLPTRVDGEWRLVPDPVQRERILEVYHRVVDKHEPLHLVAHDLNRRGVLSPKDYFAQLRGREPQGRKWSATALKRSMISVAMLGYATLNGKTVRDDDGAPLVRAEPILTSEQLEALRAELAKTSRAKPAVSTPSLLLRVLFCAVCGEPAYKFTGGGRKHPRYRCRSMGFPKHCGNGTVAMAEWDAFCEEQVLDLLGDVERLEKVWVAGSDSAVELAEVNAELVDLTSLIGSPAYRAGSPQREALDTRIAALAARQEELEGLEARPSGWEWRETGQRFGDWWREQDTAAKNTWLRSMNVRLTFDVRGGLTRTIDFGDLQEYEQHLRLGSVVGRLRTGMS

SEQ ID NO: 10894 - protein, 500 aa, synthetic construct
MRALVVIRLSRVTDATTSPERQLESCQQLCAQRGWDVVGVAEDLDVSGAVDPFDRERRPNLARWLAFEEQPFDAIVAYRVDRLARSIRHLQQLVHWAEDHKKLVVSATEAHFDTTTPFAAVVIALMGTVAQMELEAIKERNRSAAHFNIRAGKYRGSLPPWGYLPTRVDGEWRLAPDPVQRERILEVYHRVVDNHEPLHLVAHDLNRRGVLSPRDYFAQLQGREPQGRKWSATALKRSMISKAMLGYATLNGKTVRDDDGAPLVRAEPILAREQLEALRAELVKTSRAKPAVSTPSLLLRVLFCAVCGEPAYKFTGGGRKHPRYRCRSMGFPKHCGNGTVAMAEWDAFCEEQVLGLLGDAERLEKVWVAGSDSAVELAEVNAELVDLTSLIGSPAYRAGSPQREALDARIAALAARQGELEGLEARPSGWEWRETGQRFGDWWREQDTAAKNTWLRSMNVRLTFDVRGGLTRTIDFGDLREYEQHLRLGSVVGRLHTGTS

SEQ ID NO: 10895 - protein, 500 aa, synthetic construct
MRALVVIRLSRVTDATTSPERQLESCQQLCAQRGWDVVGVAEDLDVSGAVDPFDRRRRPNLARWLAFEEQPFDVIVAYRVDRLTRSVRHLQQLVHWAEDHKKLVVSATEAHFDTTTPFAAVVIALMGTVAQMELEAIKERSRSAAHFNIRAGKYRGSLPPWGYLPARVDGEWRLVPDPVQRERILEVYRRVVDNHEPLHLVAHDLNRRGILSPKDYFAQLRGREPQGRRWSATALKRSMISEAMLGYATLNGKTVRDDDGAPLVRAEPILTREQLEALRAELVKTSRATPAVSTPSLLLRVLFCAVCGEPAYKFTGGGRKHPRYRCRSMGFPKHCGNGTVAMAEWDAFCEEQVLNLLGDAERLEKVWVAGSDSAAELTEVNAELVDLTSLIGSPAYRAGSPQREALDARIAALAARQEELEGLGARPSGWEWRETGQCFGDWWREQDTAAKNTWLRSMNVRLTFDVRGGLTRTIDFGDLQECEQHLRLGSAVERLRTGMS

SEQ ID NO: 10896 - protein, 500 aa, synthetic construct
MRALVVIRLSRVTDATTSPERQLESCQQLCAQRGWDVVGVAEDLDVSGAVDPFDRKRRPNLARWLAFEERPFDVIVAYRVDRLTRSIRHLQQLVHWAEDHKKLVVSATEAHFDTTTPFAAVVIALMGTVAQMELEAIKERSRSAAHFNIRAGKYRGSLPPWGYLPTRVDGEWRLAPDPVQRERILEVYHRVVDNHEPLHLVAHDLNRRGVLSPKDYFAQLQGREPQGRKWSATALKRSMISVAMLGYATLNGKTVRDDDGAPLVRAEPILTRGQLEALRAELVKTSRAKPAVSTPSLLLRVLFCAVCGEPAYKFAGGGRKHPRYRCRSMGFPEHCGNGTVAMAEWDTFCEEQVLNLLGDAERLEKVWVAGSDSAVELAEVNAGLVDLTSLVGSPAYRAGSPQREALDARIAALAARQEELEGLEARPSGWEWRGTGQRFGDWWREQDTAAKNTWLRSMNVRLTFDVRGGLTRTIDFGDLQEYEQHLRLGSVVERPHTGMS

SEQ ID NO: 10897 - protein, 500 aa, synthetic construct
MRALVVIRLSRVTDATTSPERQLESCQQLCAQRGWDVVGVAEDLDVSGAVDPFDRKRRPNLARWLAFEEQPFDVIVAYRVDRLARSIRHLQQLVHWAEDHKKLVVSATEAHFDTTTPFAAVVIALMGTVAQMELEAIKERSRSAAHFNIRAGKYRGSQPPWGYLPARVDGVWRLVPDPVQRERILEVYHRVVDNHEPLHLVAHDLNRRGVLSPKDYFAQLQGREPQGRKWSATALKRSMISEAMLGYATLNGKTVRDDDGAPLVRAEPILTREQLEALRAELVKTSRAKPAVSTPSLLLRVLFCAVCGEPAYKFSGGGRKHPRYRCRSMGFPKHCGNGTVAMAEWDAFCEEQVLDLLGDAERLEKVWVAGSDSAVELAEVNAELVDLTSLIGSPAYRTGSPQREALDARIAALAARQEELEGLEARPSGWEWRETGQRFGDWWREQDTAAKNTWLRSTNVRLTFDVRGEPTRTIDFGDLQEYEQHLRFASVVERLHTGMS

SEQ ID NO: 10898 - protein, 500 aa, synthetic construct
MRALVVVRLSRVTDATTSPERQLESCQQLCAQRGWDVAGVAEDLDVSGAVDPFDRKRRPNLARWLAFEEQPFDVIVAYRVDRLARSIRHLQQLVHWAEDHKKLVVSATEAHFDTTTPFAAVVIALMGTVAQMELEAIKERSRSAAHFNIRAGKYRGSLPPWGYLPARVDGEWRLVPDPVQRERILEVYHRVVNYHEPLHLVAHDLNRRGVLSPKDYFARLQGREPQGRKWSATALKRSMISEAMLGYATLNGKTVRDDDGAPLVRAEPILTREQLEALRAELVKTSRAKPAVSTPSLLLRVLFCAVCGEPAYKFAGGGRKHPRYRCRSMGFPKHCGNGTVAMAEWDAFCEEQVLDLLGDTERLEKVWVAGSDSAVELAEVNAELVDLTSLIGSPAYRAGSPQREALDARIAALAARQEELEVLEARPSGWEWRETGQRFGDWWREQDTAAKNTWLRSMNVRLTFDVRGGLTRTIDFGDLREYEQHLRLGSVVERLHTGMS

SEQ ID NO: 10899 - protein, 500 aa, synthetic construct
MRALVVIRLSRVTDATTSPERQLESCQQLCAQRGWDVVGVAEDLDVSGAVDPFDRKRRPNLARWLASEEQPFDVIVAYRVDRLTRSVRHLQQLVHWAEDHKKLVVSATEAHFDTTTPFAAVVIALMGTVAQMELEAIKERNRSAAHFNIRAGKYRGSLPPWGYLPTRVDGEWRLAPDPVQRERILEVYHRVVDNHEPLHLVAHDLNRRGVLSPKDYFAQLQGREPQGRKWSATALKRSMISVAMLGYATLNGKIVRDDDGAPLVRAEPILTREQLEALRAELVKTSRAKPAVSTPSLLLRVLFCAVCGEPAYKFAGGGRKHPRYRCRSMGFPKHCGNGTVAMAEWDAFCEEQVLNLLGDAERLEKVWVAGSDSAAELAEVNAELVDLTSLIGSPVYRAGSPQREALDARIAALAARQEELEGLEARPSGWEWRETGQRFGDWWREQDTTAKNTWLRSMNVRLTFDVRGELTRTIDFGDLQEYEQHLRLGNMVERLHTGMS

SEQ ID NO: 10900 - protein, 500 aa, synthetic construct
MRALVVIRLSRVTDATTSPERQLESCQQLCAQRGWDVIGVAEDLDVSGAVDPFDRKRRPNLARWLAFEEQPFDAIVAYRVDRLTRSIRHLQQLVHWAEDHKKLVVSATEAHFDTTTPFAAVVIALMGTVAQMELEAIKERSRSAAHFNIRAGKYRGSLPPWGYLPTRVDGEWRLVPDPVQRERILEVYHRVVDNHEPLHLVAHDLNRRGVLSPRDYFAQLQGREPQGRKWSATALKRSMISVAMLGYATLNGKTVRDDDGAPLVRAEPILTREQLEALRAELVKTSRAKPAVSTPSLLLRVLFCAVCGEPAYKFAGGGRKHPRYRCRSMGFPKHCGNGTVAMAEWDAFCEEQVLGLLGDAERLEKVWVAGSDSAVELAEVNAELVDLTSLIGSPAYRAGSPQREALDARIATLAARQEELEGIEARPSGWKWRETGQRFGDWWREQDTAAKNAWLRSMNVRLTFDVRGGLTRTIDFGDLQEYERHLRLSSVVERLHTGMP

SEQ ID NO: 10901 - protein, 500 aa, synthetic construct
MRALVVIRLSRVTETTTSPERQLESCQQLCAQRGWDVVGVAEDLDVSGAVDLFDRKRRPNLARWLAFEEQPFDVIVAYRVDRLTRSIRHLQQLVHWAEDHKKLVVSATEAHFDTTTPFAAVVIALMGTVAQMELEAIKERNRSAAHFNIRAGKYRGSLPPWGYLPTRVDGEWRLAPDPVQRERILEVYHRVVDNHEPLHLVAHDLNRRGVLSPKDYFAQLQGREPQGRKWSATALKRSMTSEAMLGHATLNGKTVRDDDGAPLVRAEPILTREQLEALRAELVKTSRAKPAVSAPSLLLRVLFCAVCGEPAYKFAGGGRKHPRYRCRSMGFPKHCGNGTVAMAEWDAFCEEQVLDLLGDAERLEKVWVAGSDSAVELAEVNAGLVDLTSLIGSPAYRAGSPQREALDARIAALAARQEELEGLEARPSGWEWRETGQRFGDWWREQDTAAKNTWLRSMNVRLTFDVRGGLTRTIDFGDLQEYEQHLRLGSVVKRLHTGMS

SEQ ID NO: 10902 - protein, 500 aa, synthetic construct
MRALVVIRLSRVTDATTSPERQLESCQQLCARRGWDVVGVAEDLDVSGAVDPFDRKRRPNLARWLAFEEQPFDVIVAYRVDRLTRSVRHLQQLVHWAEDHKKLVVSATEAHFDTTTPFAAVVIALMGTVAQMELEAIKERSRSAAHFNIRAGKYRGSLPPWGYLPARVDGEWRLVPDPVQCERILEVYHRVVDNHEPLHLVAHDLNRRGVLSPKDYFAQLRGREPQGRKWSATALKRSMISEAMLGYATLSGKTVRDDDGAPLVRAEPILTREQLEALRAELVKTSRAKPAVSTPSLLLRVLFCAVCGEPAYKFAGGGRKHSRYRCRSMGFPKHCGNGTVAMAEWDAFCEEQVLNLLGDAGRLEKVWVAGSDSAVELAEVNAELVDLTSLIGSPAYRAGSLQREALDARIAALAARQEELEGLEARPSGWEWREAGQRFGDWWREQDTAAKNTWLRTMNVRLTFDVRDGLTRTIDFGELLECEQHLRSGSVVERLHTGMS

SEQ ID NO: 10903 - protein, 500 aa, synthetic construct
MRALVVIRLSRVTDATTSPERQLESCQQLCAQRGWDVVGVAEDLDVSGAVDPFDRKRRPNLARWLAFEEQPFDVIVAYRVDRLTRSVRHLQQLVHWAEDHKKLVVSATEAHFDTTTPFAAVVIALMGTVAQMELEAIKERSRSAAHFNIRAGKYRGSLPPWGYLPTRVDGEWRLAPDPVQRERILEVYHRVVDNHEPLHSVAHDLNRRGVLSPKDYFAQLQGREPQGRKWSATALKRSMISEAMLGYTTLNGKIVRDDNGAPLVRAEPILTREQLEALRAELVKTSRAKPAVSTPSLLLRVLFCAVCGEPAYKFAGGGRKHPRYRCRSMGFPKHCGNGTVAMAEWDAFCEEQVLNLLGDAERLEKVWVAGSDSAVELAEVNAELVDLTSLVGSPAYRAGSPQREALDARIAALAARQEELEGLEARPSGWEWRETGQRFGDWWREQDTAAKNTWLRSMNVRLTFDVRGGLTRTIDFGDLQEYEQHLRLGSVVERLHTGMS

SEQ ID NO: 10904 - protein, 500 aa, synthetic construct
MRALVVIRLSRVTDATTSPERQLESCQQLCAQRGWDVVGVAEDLDVSGAVDPFDRKRRPNLARWLAFEEQPFDVIVAYRVDRLTRSIRHLQQLVHWAGDHKKLVVSATEAYFDTTTPFAAVVIALMGTVAQLELEAIKERSRSAAHFNIRAGKYRGSLPPWGYLPTRVDGEWRLAPDPVQRERILEVYHRVVDNHEPLHLVAHDLNRRGVLSPKDYFAQLQGREPQGRKWSATALKRSMTSEAMLGYATLNGKTVRDDDGAPLVRAEPILTREQQEALRAELVKTSRAKPAVSTPSLLLRVLFCAVCGEPAYKFAGGGRKHPRYRCRSKGFPKHCGNGTVAMAEWDAFCEGQVLDLLGDAERLEKVWVAGSDSAVELAEVNAKLVDLTSLIGSPAYRAGSPQREALDARIAALAARQEELEGLEARPSGWEWRGTGQRFGDWWREQDTAAKNTWLRSMNVRLTFDVRGGLTRTIDFGDLQEYEQHLRLGSVVERLHTGMS

SEQ ID NO: 10905 - protein, 500 aa, synthetic construct
MRALVVIRLSRVTDATTSPERQLESCQQLCAQRGWDVVGVAEDLDVSGAVDPFDRKRRPNLARWLAFEERPFDVIVAYRVDRLTRSIRHLQQLVHWAEDHKKLVVSATEAHFDTTTPFAAVTIALMGTVAQMELEAIKERSRSAAHFNIRAGKYRGSLPPWGYLPTRVDGEWRLVPDPVQRERILEVYHRVVDNHEPLHLVAHDLNRRGVLSPKDYFAQLRGREPQGRKWSATALKRSLISEAMLGYVTLNGKTVRDDDGAPLMRAEPILTREQQEALRAELVKTSRAKPAVSTPSLLLRVLFCAVCGEPAYKFAGGGRKHPRYRCRSMGFPKHCGNGTVVMAEWDAFCEEQVLNLLGDAERLEKVWVAGSDSAVELAEVNAELVALTSLIGSPAYRAGSPQREALDARIAALAARQEELEGLEARPSGWEWRGTGQRFGDWWREQDTAAKNTWLRSMNVRLTFDVRGGLTRTIDFGDLHEYEQHLRLGSVVERLRTGMS

SEQ ID NO: 10906 - protein, 500 aa, synthetic construct
MRALVVIRLSRVTDATTSPERQLESCQQLCAQRGWDVVGVAEDLDVSGAVDPFDRKRRPNLARWLAFEEQPFDVIVAYRVDRLTRSTRHLQRLVHWAEDHKKLVVSATEAHFDTTTPFAAVVIALMGTVAQMELEAIKERSRSAAHFNIRAGKYRGSLPPWGYLPTRVDGEWRLVPDPVQRERILEVYHRVVDNHEPLHLVAHDLNRRGVLSPKDYFAQLRGREPQGRKWSATALKRSMISEAMLGYATLNGKTVRDDDGAPLVRAEPILTREQLEALRAELVKTSRAKPAVSTPSLLLRVLFCAVCGEPAYKFAGGGRKHPRYRCRSMGFPKHCGNGTVAMAEWDAFCEEQVLDLLGDAERLEKVWVAGSDSAAELAEVNAELVDLTSLIGSPAYRAGSPQREALDARIAALAARQEELEGLEARPSGWEWRGTGQRFGDWWREQDTAAKNTWLRSMNVRLTFDVRGGLTRTIDFGDLREYEQRLRLGSVVERLHTGMS

SEQ ID NO: 10907 - protein, 500 aa, synthetic construct
MRALIVIRLSRVTDATTSPERQLESCQQLCAQRGWDVVGVAEDLDVSGAVDPFDRKRRPNLARWLAFEEQPFDVIVAYRVDRLTRSTRHLQQLVHWAEDHKKLVVSATEAHFDTTTPFAAVVIALMGTVAQMELEAIRERSRSAAHFNVRAGKYRGSLPPWGYLPTRVDGEWRLVPDPVQRERILEVYHRVVDNHEPLHLVAHDLNRRGVLSPKDYFAQLQGREPQGRKWSATALKRSMISGAMLGYATLNGKTVRDDDGAPLVRAEPILAREQQEALRAELVKTSRAKPAVSTPSLLLRVLFCAVCGEPAYKFSGGGRKHPRYRCRSMGFPKHCGNGTVAMAEWDAFCEEQVLDLLGDAERLEKVWVAGSDSAVELAEVNAELVDLTSLIGSPAYRAGSPQREALDARIAALAARQGELEGLEARPSGWEWRETGQRFGDWWREQDTAAKNTWLRSMNVRLTFDVRGGLTRTIDFGDLQEYEQHLRLGSAVERLHTGMS

SEQ ID NO: 10908 - protein, 500 aa, synthetic construct
MRALVVIRLSRVTDATTSPERQLESCQQLCAQRGWDVVGVAEDLDVSGAVDPFDRKRRPNLARWLAFEEQPFDVIVAYRVDRLARSIRHLQQLVHWAEDHKKLVVSATEAHFDTTTPFAAVVIALMGTVAQMELEAIKERSRSAAHFNIRAGKYRGSLPPWGYLPTRVDGEWRLVPDPVQRERILEVYHRVVDNHEPLHLVAHDLNRRGVLSPRDYFAQLRGREPQGRKWSATALKRSMISEAMLGYATLNGRTVRDDDGAPLVRAEPILTREQLEALRAELVKTSRAKPAVSTPSLLLRVLFCAVCGEPAYKFAGGGRKHPRYRCRSMGFPKHCGNGTVAMAEWDAFCEEQVLGLLGDAERLEKVWVAGSDSAAELAEVYAELVDLTSLIGSPAYRAGSPQREALDARIAALAARQEELKGLEARPPGWEWRETGQRFGDWWREQDTAAKNTWLRSMNVRLTFDVRGGLTRTIDFGDLQEYEQHLRLGGVVERLHTGMS

SEQ ID NO: 10909 - protein, 500 aa, synthetic construct
MRALVVIRLSRVTDATTSPERQLESCQQLCAQRGWDVVGVAEDLDVSGAVDPFDHKRRPNLARWLAFEEQPFDVIVAYRVDRLTRSTRHLQQLVHWAEDHKKLVVSATEAHFDTTTPFAAVVIALMGTVAQMELEAIKERSRSAAHFNIRAGKYRGSLPPWGYLPTRVDGEWRLAPDPVQRERILEVYHRVVDNHEPLHLVAHDLNRRGVLSPKDYFAQLQGREPQGRKWSATALKRSMISEAMLGYATLNGKTVRDDSGAPLVRAEPILTREQLEALRAELVKTSRAKPAVSTPSLLLRVLFCAVCGEPAYKFSGGGRKHPRYRCRSMGFPKHCGNGTVAMAEWDAFCEEQVLGLLGDAERLEKVWVAGSDSAVELAEVNAELVDLTSLIGSPAYRADSPQREALDARIAALAARQEELEGLEARPSGWEWRETGQRFGDWWREQDTAAKNTWLRSMNVRLTFDVRGGLARTIDLGDLQEYEQHLRSGSVVERLHTGMS

SEQ ID NO: 10910 - protein, 500 aa, synthetic construct
MRALVVIRLSRVTDATTSPERQLESCQQLCAQRGWDVVGVAEDLDVSGAVDPFDRKRRPNLARWLAFEEQPLDVIVAYRVDRLTRSVRHLQRLVHWAEDHKKLVVSATEAHFDTTTPFAAVVIALMGTVAQMELEAIKERSRSAAHFNIRAGKYRGSLPPWGYLPTRADGEWRLVPDPVQRERILEVYRRVVDNHEPLHLVAHDLNRRGVLSPKDYFAQLRGREPQGRKWSATALKRSMISEAMLGHATLNGKTVRDDDGAPLVRAEPILTREQLEALRAELVKTSRAEPAVSTPSLLLRVLFCAVCGEPAYKFAGGGRKHPRYRCRSMGFPKHCGNGTVAMAEWDAFCEEQVLGLLGDAERLEKVWVAGSDSAVELAEVNAELVDLTSLIGSPAYRAGSPQRKALDARIAALAARQEELEGLEARPSGWEWRGTGQRFGDWWREQDTAAKNTWLRSMNVRLTFDVRGGLTRTIDFGDLQEYEQHLRLGSVVERLHTGMS

SEQ ID NO: 10911 - protein, 500 aa, synthetic construct
MRALVVIRLSRVTDATTSPERQLESCQQLCAQRGWDVVGVAEDLDVSGAVDPFDRKRRPNLARWLAFEEQPFDVIVAYRVDRLTRSTRHLQQLVHWAEDHKKLVVSATEAHFDTTTPFAAVVIALMGTVAQMELEAIRERNRSAAHFNIRAGKYRGSLPPWGYLPARVGGEWRLVPDPVQRERILEVYHRVVDNHEPLHLVAHDLNRRGVLSPKDYFAQLQGREPQGRKWSATALKRSMISGAMLGYATLNGKTVRDDDGAPLVRAEPILTREQLEALRAELVKTSRAKPAVSTPSLLLRVLFCAVCGEPAYKFAGGGRKHPRYRCRSMGFPKHCGNGTVAMAEWDALCEEQVLDLLGDAERLEKVWVAGSDSAVELAEVNAELADLTSLIGSPAYRAGSPQREALDARIASLAARQEELEGLEARPSGWEWRETGQRFGDWWREQDTAAKNTWLRSMNVRLTFDVRGGLTRTIDFGDLQEYKQHLRLGSAVERLHTGMS

SEQ ID NO: 10912 - protein, 500 aa, synthetic construct
MRALVVIRLSRVTDATTSPERQLESCQQLCAQRGWDVVGVAEDLDVSGAVDPFDHKRRPNLARWLAFEEQPFDVIVAYRVDRLARSIRHLQQLVHWAEDHKKLVVSATEAHFDTTTPFAAVVIALMGTVAQMELEAIKERSRSAAHFNIRAGKYRGSLPPWGYLPARVDGEWRLVPDPVQRERILEVYHRVVDNHEPLHLVAHDLNRRGVLSPKDYFAQLRGREPQGRKWSATALKRSMTSEAMLGYATLNGKTVRGDDGAPLVRAEPILTREQLEALRAELVKTSRAKPAVSTPSLLLRVLFCAVCGEPAYKFAGGGRKHSRYRCRSMGFSKHCGNGTVAMAEWDAFCEEQVLDLLGDAERLEKVWVAGSDSAVELAEVNAELVDLTSLIGSPAYRAGSPQREALDARIAALAARQEELEGLGARPSGWEWRESGQRFGDWWREQDTAAKNTWLRSMNVRLTFDVRGGLTRTIDFGDLQEYEQHLRLGSVVERLHTGMS

SEQ ID NO: 10913 - protein, 500 aa, synthetic construct
MRALVVIRLSRVTEATTSPERQLESCQQLCAQRGWDVVGVAEDLDVSGAVDPFDRKRRPNLARWLAFEEQPFDVIVAYRVDRLARSIRHLQQLVRWAEDHKKLVVSATEAHFDTTTPFAAVVIALMGTVAQMELEAIKERNRSAAHFNIRAGKYRGSLPPWGYLPTRVDGEWRLAPDPVQRERILEVYHRVVDNHEPLHLVAHDLNRRGVLSPRDYFAQLRGREPQGRKWSATALKRSMISEAMLGYATLNGKTVRDDDGAPLVRAEPILTREQLEALRAELVKTSRAKPAVSTPSLLLRVLFCAVCGEPAYKFAGGGRKHPRYRCRSMGFPKHCGNGTVAMAEWDAFCEEQVLNLLGDAERLEKVWVAGSDSAVELAEVNAELVDLTSLIGSPAYRAGSQQREALDTRIAALAARQEELEGLEARPPGWEWRGTGQRFGDWWREQDTAAKNTWLRSMNVRLTFDVRGGLTRTIDFGGLQEYEQHLRLGSVVERLHTGMS

SEQ ID NO: 10914 - protein, 500 aa, synthetic construct
MRALVVIRLSRVTDATTSPERQLESCQQLCAQRGWDVVGVAEDLDVSGAVDPFDRKRRPSLARWLAFEEQPFDVIVAYRVDRLTRSVRHLQQLVHWAEDHKKLVVSATEAHFDTTTPFAAVVIALMGTVAQMELEAIKERSRSAAHFNIRAGKYRGSLPPWGYLPARVDGEWRLVPDPVQRERILEVYHRVVDNHEPLHLVAHDLNRRGVLSPKDYFAQLRGREPQGRKWSATALKRSMISEAMLGYATLNGKTVHDDDGAPLVRAEPILTREQQEALRAELVKTSRAKPAVPTPSLLLRVLFCAVCGEPAYKFAGGGRKHPRYRCRSMGFPKHCGNGTVAMAEWDAFCEEQVLGLLGDAERLEKVWVAGSDSAVELAEVNAELVDLTSLIGSPAYRAGSPQREALDARIAALAARQEELEGLEARLSGWEWRETGQRFGDWWREQDTAAKNTWLRSMNVRLTFDVRGGLTRTIDFGDLREYEQHLRLGSVVERLHTGMS

SEQ ID NO: 10915 - protein, 500 aa, synthetic construct
MRALVVIRLSRVTDATTSPERQLESCQQLCAQRGWDVVGVAEDLDVSGAVDPFDRKRRPNLARWLAFEEQPFDVIVAYRVDRLTRSIRHLQQLVHWAEDHKKLVVSATEAHFDTTTPFAAVTIALMGTVAQMELEAIKERSRSAAHFNIRAGKYRGSLPPWGYLPTRVDGEWRLAPDPVQRERILEVYHRVVDDHEPLHSVAHDLNRRGVLSPRDYFAQLQGREPRGRKWSATALKRSMISVAMLGYATLNGKTVRDDDGAPLVRAEPILTREQLEALRAELAKTSRAKPAVSTPSLLLRVLFCAVCGEPAYKFAGGGRKHTRYRCRSMGFPKHCGNGTVAMAEWDAFCEEQVLNLLGDAERLEKVWAAGSDSAVELAEVNAELVDLTSLIGSPAYRAGSPQREALDARIAVLAARQEELEGLEARPSGWEWRETGQRFGDWWREQDTAAKNTWLRSMNVRLTFDVRGGLTRTIDFGDLQEYEQHLRLGSVAERLHTGMS

SEQ ID NO: 10916 - protein, 500 aa, synthetic construct
MRALVVIRLSRVTDATTSPERQLVSCQQLCAQRGWDVVGVAEDLDVSGAVDPFDRKRRPNLARWLAYEEQPFDAIVAYRVDRLTRSIRHLQQLVHWAEDHKKLVVSATEAHFDTTTPFAAVVIALMGTVAQMELEAIKERSRSAAHFNIRAGKYRGSLPPWGYLPTRVDGEWRLAPDPVQRERILEVYHRVVDNHEPLHLVAHDLNRRGVLSPKDYFAQLRGREPQGRKWSATALKRSMISEAMLGYATLNGKTVRDDGGAPLVRAEPILTREQLEALRAELVKTSRAKPAVSTPSLLLRVLFCAVCGEPAYKFAGGGRKHPRYRCRSMGFPKHCGNGTVAMAEWDAFCEEQVLDLLGDAERLEKVWVVSSDSAVELAEVNAELVDLTSLIGSPAYRAGSPQREALDARIAALAARQEELEGLEARPSGWEWRETGQRFGDWWREQDTAAKNTWLRSMNVRLTFDVRGGLARTIDFGDLHEYEQHLRLGSAVERLHTGMS

SEQ ID NO: 10917 - protein, 500 aa, synthetic construct
MRALVVIRLSRVTDATTSPERQLESCQQLCAQRGWDVVGVAEDLDVSGAVDPFDRKRRPNLARWLAFEEQPFDVIVAYRVDRLARSIRHLQQLVHWAEDHKKLVVSATEAHFDTTTPFAAVVIALMGTVAQMELEAIKERSRSAAHFNIRAGKYRGSLPPWGYLPTRVDGEWRLVPDPVQRERILEVYHRVVDNHEPLRLVAHDLNRRGVLSPKDYFAQLQGREPQGRKWSATALKRSMTSEAMLGYATLNGKTVRDDDGAPLVRAEPILTREQLEALRAELVKTSRAKPAVSTPSLLLRVLFCAVCGEPAYKFAGGGRKHPRYRCRSMGFPKHCGNGTVAMAEWDAFCEERVLDLLGDAERLEKVWVAGSDSAVELAEVNAELVDLTSLIGSPAYRAGSPQREALDARIAALAARQEKLEGLEARPSGWEWRETGQRFGDWWREQNTAAKNTWLRSMNVRLTFDVRGGLTRTIDFGDLQEYEQHLRLGSVVERLRTGMS

SEQ ID NO: 10918 - protein, 500 aa, synthetic construct
MRALVVIRLSRVTDATTSPERQLESCQQLCAQRGWDVVGVAEDLDVSGAVDPFDRERRPNLARWLAFEEQPFDVIVAYRVDRLTRSTRHLQQLVHWAEDHKKLVVSATEAHFDTTTPFAAVVIALMGTVAQMELEAIKERSRSAAHFNIRAGKYRGSLPPWGYLPARVDGEWRLAPDPVQRERILEVYHRVVDNHEPLHLVAHDLNRRGVLSPKDYFAQLRGREPQGRKWSATALKRSMTSEAMLGYATLNGKTVRDDDGAPLVRAEPILTREQLEALRAELVKTSRAKPAVSTPSLLLRVLFCAVCGEPAYKFAGGGRKHPRYRCRSMGFLKHCGNGTVAMAEWDAFCEEQVLDLLGDAERLEKVWVAGSDSEVELAEVNAELVDLASLIGSPAYRAGSPQREALDARIAALAARQEELEGLEARPSGWEWRGTGQRFGDWWREQDTAAKNTWLRSMNVRLTFDVRGGLTRTIDFGDLQEYEQHLRLGSVVERLHTGMS

SEQ ID NO: 10919 - protein, 500 aa, synthetic construct
MRALVVIRLSRVTDATTSPERQLESCQQLCAQRGWDVVGVAEDLDVSGAVDPFDRKRRPNLARWLAFEEQPFDVIVAYRVDRLTRSTRHLQQLVHWAEDHKKLVVSATEAHFDTTTPFAAVVIALMGTVAQMELEAIKERTRSAAHFNIRAGKYRGSLPPWGYLPARVDGEWRLAPDPVQRERILEVYHRVVDNHEPLHLVAHDLNRRGVLSPKDYFAQLQGREPQGRKWSATALKRSMISVAMLGYATLNGKTVRDDDGAPLVRAEPILTREQLEALRAELVKTSRAKPAVSTPSLLLRVLFCAVCGEPAYKFAGGGRKHPRYRCRSMGFPKHCGNGTVAMAEWDAFCEEQVLNLLGDAERLEKVWVAGSDSAVELAEVNAELVDLSSLIGSPAYRAGSPQREALDARIAALAARQEELEGLEARPSGWEWRETGQRFGDWWREQDTVAKNTWLRSMNVRLTFDVRGGLTRTIDFGDLREYEQHLRLGSVVERLHTGMS

SEQ ID NO: 10920 - protein, 500 aa, synthetic construct
MRALVVIRLSRVTDATTSPERQLESCQQLCAQRGWDVVGVAEDLDVSGAVDPFDRKRRPNLARWLAFGEQPFDVIVAYRVDRLARSIRHLQQLVHWAEDHKKLVVSATEAHFDTTTPFAAVVIALMGTVAQMELEAIKERSRSAAHFNIRAGKYRGSLPPWGYLPTRVDGEWRLAPDPVQRERILEVYHRVIDNHEPLHLVAHDLNRRGVLSPKDYFAQLQGREPQGRKWSATALKRSMISVAMLGYATLNGKTVRDDDGAPLVRAEPILTRGQLEALRAELVKTSRAKPAVSTPSLLLRVLFCAVCGEPAYKFAGGGRKHPRYRCRSMGFPKHCGNGTVAMAEWDAFCEEQVLDLLGDAERLEKVWVIGSDSAVELAEVNAELVDLTSLIGSPAYRAGSPQREALDARITALAARQEELEGSEAHPSGWEWRETGQRFGDWWREQDTAAKNTWLRSMNVRLTFDVRGGLTRTIDFGDLQEYEQHLRLGSVVERLHTGMS

SEQ ID NO: 10921 - protein, 500 aa, synthetic construct
MRALVVIRLSRVTDATTSPERQLESCQQLCAQRGWDVVGVAEDLDVSGAVDPFDRKRRPNLARWLAFEEQPFDVIVAYRVDRLARSIRHLQQLVHWAEDHKKLVVSATEAHFDTTTPFAAVVIALMGTVAQMELEAIKERNRSAAHFNIRAGKYRGSLPPWGYLPTRVDGEWRLVPDPVQRERILEVYHRVVDNHEPLHLVAHDLNRRGVLSPKDYFAQLRGREPQGRKWSATALKRSMISEVMLGYATLNGRTVRDDDGAPLVRAEPILTREQLEAIRAELVKTSRAKPAVSTPSLLLRVLFCAVCGEPAYKFAGGGRKHPRYRCRSMGFPKHCGNSTVAMAEWDAFCEEQVLDLLGDAERLEKVWVAGSDSAVELAEVSAELVDLTSLIGSPAYRAGSPQREALDARIAALAARQEELEGLEARPSGWEWRVTGQRFGDWWREQDTAAKNTWLRSMNVRLTFDVRGGLTRTIDFGDLREYEQHLRSGGVVERLHTGMS

SEQ ID NO: 10922 - protein, 500 aa, synthetic construct
MRALVVIRLSRVTDATTSPERQLESCQQLCAQRGWDVVGVAEDLDVSGAVDPFDRKRRPNLARWLACEEQPFDVIVAYRVDRLTRSVRHLQQLVHWAEDHKKLVVSATEAHFDTTTPFAAVVIALMGTVAQMELEAIRERNRSAAHFNIRAGKYRGSLPPWGYLPTRVDGEWRLVPDPVQRERILEVYHRVVDNHEPLHLVAHDLNRRGVLSPKDYFAQLRGREPQGRKWSATALKRSMTSEAMLGYATLNGKTVRNDDGAPLVRAEPILTREQLEALRAELAKTSRAKPAVSTPSLLLRVLFCAVCGEPAYKFAGGGRKHPRYRCRSMGFPKHCGNGTVAMAEWDAFCEEQVLDLLGDAERLEKVWVAGSDSAVELAEVNAELVDLTSLIGSPAYRAGSPQREALDARIAALAARQEELESLEARPSGWEWRETGQRIGDWWREQDTAAKNTWLRSMNVRLTFDVRGGLTRTIDFGDLQEYEQHLRLGSVVERLHTGMS

SEQ ID NO: 10923 - protein, 500 aa, synthetic construct
MRALVVIRLSRATDATTSPERQLESCQQLCAQRGWDVVGVAEDLDVSGAVDPFDRKRRPNLARWLAFEEQPFDVIVAYRVDRLARSIRHLQQLVHWAEDHKKLVVSATEAHFDTTTPFAAVVIALMGTVAQMELEAIKERSRSAAHFNIRAGKYRGSLPPWGYLPARVDGEWRLVPDPVQRERILEVYHRVVDDHEPLHLVAHDLNRHGVLSPKDYFAQLRGREPQGRKWSATALKRSMISEAMLGYATLNGKTVRDGDGAPLVRAEPILTREQLEALRAELVKTSRAEPAVSTPSLLLRVLFCAVCGEPAYKFAGGGRKHPRYRCRSMGFPKHCGNGTVAMAEWDAFCEEQVLGLLGDAERLEKVWVAGSDSAVELAEVNAELVDLTSLIGSPAYRAGSPQREALDARIAALVARQEELEGLEARPSGWEWRETGQRFGDWWREQDTAAKNTWLRSMNVRLTFDVRGGLTRTIDFGDLQEYEQHLRLGSVVKRLHTGMS

SEQ ID NO: 10924 - protein, 500 aa, synthetic construct
MRALVVIRLSRVTDATTSPERQLESCQQLCAQRGWDVVGVAEDLDVSGAVDPFDRKRRPNLARWLAFGEQPFDVIVAYRVDRLARSIRHLQQLVHWAEDHKKLVVSATEAHFDTTTPFAAVVIALMGTVAQMELEAIKERNRSAAHFNIRAGKYRGSLPPWGYLPTRVDGEWRLAPDPVQRERILEVYHRVVDNHEPLHLVAHDLNRRGVLSPKDYFAQLRGREPQGRKWSATALKRSMTSEAMLGYATLNGKTVRDDDGAPLVRAEPILTHEQQEALRAELVKTSRAKPAVSTPSLLLRVLFCAVCGEPAYKFAGGGRKHPRYRCRSMGFPKHCGNGTVAMAEWDAFCEEQVLNLLGDAGRLEKVWVAGSDSAVELAEVNAELVDLTSLIGSPAYRAGSPQREALDARIAALAARQEELEGLEARPSGWEWRETGQRFGDWWREQDTAAKNSWLRSMNVRLTFDVRGGLTRTIDFGDLQEYEQHSRLGSVVERLHTGMS

SEQ ID NO: 10925 - protein, 500 aa, synthetic construct
MRALVVIRLSRVTDATTSPERQLESCQQLCAQRGWDVVGVAEDLDVSGAVDPFDRKRRPNLARWLAFEEQPFDVIVAYRVDRLARSIRHLQQLVHWAEDHKKLVVSATEAHFDTTTPFAAVVIALMGTVAQMELEAIKERNRSAAHFNIRAGKYRGSLPPWGYLPTRVDGEWRLVPDPVQRERILEVYHRVVDNREPLHLVAHDLNRRGVLSPKDYFAQLRGREPQGRKWSATALKRSMISEAMLGYATLNGKTVRDDDGAPLVRAEPILTREQQEALRAELVKTSRAKPAVSTPSLLLRVLFCAVCGEPAYKFAGGGRKHPRYRCRSMGFPKHCGNGTVAMAEWDAFCEEQVLGLLGDAERLEKVWVAGSDSAVELAEVSAELVDLTSLIGSPAYRAGSPQREALDARIAALAARQEELEGLEARPSGWEWRETGQRFGDWWREQDTAAKNTWLRSMNVRLTFDVRGGLTRTIDFGDLQEYEQHLRLGSVAERLHTGMS

SEQ ID NO: 10926 - protein, 500 aa, synthetic construct
MRALVVIRLSRVTDATTSPERQLESCQQLCAQRGWDVVGVAEDLDVSGAVDPFDRKRRPNLARWLAFEEQPFDVIVAYRVDRLTRSVRHLQRLVHWAEDHEKLVVSATEAHFDTTTPFAAVVIALMGTVAQMELEAIKERSRSAAHFNIRAGKYRGSLPPWGYLPARVDGEWRLVPDPVQRERILEVYHRVVDDHEPLHLVAHDLNRRGVLSPKDYFAQLRGREPQGRKWSATALKRSMISEAMLGYATLNGKTVRDDDGAPLVRAEPILTREQQEALRAELVKTSRAKPAVSTPSLLLRVLFCAVCGEPAYKFSGGGRKHPRYRCRSMGFPKHCGNGTVAMAEWDAFCEEQVLGLLGDAERLEKAWVAGSDSAVELAEVNAELVDLTSLIGSPAYRADSPQREALDARIAALAARQEELEGLGARPSGWEWRETGQRFGDWWREQDTAAKNTWLRSMNVRLTFDARGGLTRTIDFGDLQEYEQHLRLGSVAERLHTGMS

SEQ ID NO: 10927 - protein, 500 aa, synthetic construct
MRALVVIRLSRVTDATTSPERQLESCQQLCAQRGWDVVGVAEDLDVSGAVDPFDRKRRPNLARWLAFEERPFDVIVAYRVDRLTRSTRHLQQLVHWAEDHKKLVVSATEAHFDTTTPFAAVVIALMGTVAQMELEAIKERSRSAAHFNIRAGKYRGSLPPWGYLPTRVDGEWRLVPDPVQRERILEVYHRVVDNHEPLRLVAHDLNRRGVLSPKDYFAQLQGREPQGRKWSATALKRSMTSGAMLGYATLNGKTVRDDDGAPLVRAEPILTREQLEALRAELVKTSRAKPAVSTPSLLLRVLFCAVCGEPAYKFAGGGRKHSRYRCRSMGFPRHCGNGTVAMAEWDAFCEEQVLDLLGDAERLEKVWVAGSDSAVELAEVNAELVDLTSLIGSPAYRVGSPQREALDARIAALAARQEELEGLEARPSGWEWRETGQRFGDWWREQDTAAKNTWLRSMNVRLTFDVRGGLTRAIDFGDLQEYEQHLRLGSVVERSHTGMS

SEQ ID NO: 10928 - protein, 500 aa, synthetic construct
MRALVVIRLSRVTDATTSPERQLESCQQLCAQRGWDVVGAAEDLDVSGAVDPFDRKRRPNLARWLAFEEQPFDVIVAYRVDRLTRSIRHLQQLVHWAEDHKKLVVSATEAHFDMTTPFAAVVIALMGTVAQMELEAIKERSRSAAHFNIRAGKYRGSLPPWGYLPTRVDGEWRLAPDPVQRERILEVYHRVVDNHEPLHLVAHDLNRRGVLSPKDYFAQLQGREPQGRKWSATALKRSMISEAMLGYATLNGKTVRDDDGAPIVRAEPILTREQQEALRAELVKTSRAKPAMSTPSLLLRVLFCAVCGEPAYKFAGGGRRHPRYRCRSMGFPKHCGNGTVAMAEWDAFCEEQVLDLLGDAERLEKVWVAGSDSAVELAEVNAELEDLTSLIGSPAYRAGSPQREALDARIAALAARQEELEGLEARPSGWECRETGQRFGDWWREQDTAAKNTWLRSMNVRLTFDVRGGLTRTIDFGDLQEYEQHLRLGSEVERLHTGMS

SEQ ID NO: 10929 - protein, 500 aa, synthetic construct
MRALVVIRLSRVTDATTSPERQLESCQQLCAQRGWDVVGVAEDLDVSGAVDPFDRKRRPNLARWLAFEEQPFDVIVAYRVDRLTRSVRHLQQLVHWAEDHKKLVVSATEAHFDTTTPFAAVVIALMGTVAQMELEAIKERSRSAAHFNIRAGKYRGSLPPWGYLPARVDGEWRLVPDPVQRERILEVYHRVVDNHEPLHLVAHDLNRRGVLSPKDYFAQLQGREPQGRKWSASALKRSMISGAMLGYATLSGKTVRDDDGAPLVRAEPILTREQQEALRAELAKTSRAKPAVSTPSLLLRVLFCAVCGEPAYKFAGGGRKHPRYRCRSMGFPKHCGNGTVAMAEWDAFCEEQVLDLLGDAGRLEKVWVAGSDSAAELAEVNAELVDLTSLIGSPAYRAGSPQREALDARIAALAARQKELEGLEARPSGWEWRETGQRFGDWWREQDTAAKNTWLRSMNVRLTFDVRGGLTRTIDFGDLQEYEQHLRLGSVVERLHTGMS

SEQ ID NO: 10930 - protein, 500 aa, synthetic construct; identical to SEQ ID NO: 10430

SEQ ID NO: 10931 - protein, 500 aa, synthetic construct; identical to SEQ ID NO: 10431

SEQ ID NO: 10932 - protein, 500 aa, synthetic construct; identical to SEQ ID NO: 10432

SEQ ID NO: 10933 - protein, 500 aa, synthetic construct; identical to SEQ ID NO: 10433

SEQ ID NO: 10934 - protein, 500 aa, synthetic construct; identical to SEQ ID NO: 10434

SEQ ID NO: 10935 - protein, 500 aa, synthetic construct; identical to SEQ ID NO: 10435

SEQ ID NO: 10936 - protein, 500 aa, synthetic construct; identical to SEQ ID NO: 10436

SEQ ID NO: 10937 - protein, 500 aa, synthetic construct; identical to SEQ ID NO: 10437

SEQ ID NO: 10938 - protein, 500 aa, synthetic construct; identical to SEQ ID NO: 10438

SEQ ID NO: 10939 - protein, 500 aa, synthetic construct; identical to SEQ ID NO: 10439

SEQ ID NO: 10940 - protein, 500 aa, synthetic construct; identical to SEQ ID NO: 10440

SEQ ID NO: 10941 - protein, 500 aa, synthetic construct; identical to SEQ ID NO: 10441

SEQ ID NO: 10942 - protein, 500 aa, synthetic construct; identical to SEQ ID NO: 10442

SEQ ID NO: 10943 - protein, 500 aa, synthetic construct; identical to SEQ ID NO: 10443

SEQ ID NO: 10944 - protein, 500 aa, synthetic construct; identical to SEQ ID NO: 10444

SEQ ID NO: 10945 - protein, 500 aa, synthetic construct; identical to SEQ ID NO: 10445

SEQ ID NO: 10946 - protein, 500 aa, synthetic construct; identical to SEQ ID NO: 10446

SEQ ID NO: 10947 - protein, 500 aa, synthetic construct; identical to SEQ ID NO: 10447

SEQ ID NO: 10948 - protein, 500 aa, synthetic construct; identical to SEQ ID NO: 10448

SEQ ID NO: 10949 - protein, 500 aa, synthetic construct; identical to SEQ ID NO: 10449

SEQ ID NO: 10950 - protein, 500 aa, synthetic construct; identical to SEQ ID NO: 10450

SEQ ID NO: 10951 - protein, 500 aa, synthetic construct; identical to SEQ ID NO: 10451

SEQ ID NO: 10952 - protein, 500 aa, synthetic construct; identical to SEQ ID NO: 10452

SEQ ID NO: 10953 - protein, 500 aa, synthetic construct; identical to SEQ ID NO: 10453

SEQ ID NO: 10954 - protein, 500 aa, synthetic construct; identical to SEQ ID NO: 10454

SEQ ID NO: 10955 - protein, 500 aa, synthetic construct; identical to SEQ ID NO: 10455

SEQ ID NO: 10956 - protein, 500 aa, synthetic construct; identical to SEQ ID NO: 10456

SEQ ID NO: 10957 - protein, 500 aa, synthetic construct; identical to SEQ ID NO: 10457

SEQ ID NO: 10958 - protein, 500 aa, synthetic construct; identical to SEQ ID NO: 10458

SEQ ID NO: 10959 - protein, 500 aa, synthetic construct; identical to SEQ ID NO: 10459

SEQ ID NO: 10960 - protein, 500 aa, synthetic construct; identical to SEQ ID NO: 10460

SEQ ID NO: 10961 - protein, 500 aa, synthetic construct; identical to SEQ ID NO: 10461

SEQ ID NO: 10962 - protein, 500 aa, synthetic construct; identical to SEQ ID NO: 10462

SEQ ID NO: 10963 - protein, 500 aa, synthetic construct; identical to SEQ ID NO: 10463

SEQ ID NO: 10964 - protein, 500 aa, synthetic construct; identical to SEQ ID NO: 10464

SEQ ID NO: 10965 - protein, 500 aa, synthetic construct; identical to SEQ ID NO: 10465

SEQ ID NO: 10966 - protein, 500 aa, synthetic construct; identical to SEQ ID NO: 10466

SEQ ID NO: 10967 - protein, 500 aa, synthetic construct; identical to SEQ ID NO: 10467

SEQ ID NO: 10968 - protein, 500 aa, synthetic construct; identical to SEQ ID NO: 10468

SEQ ID NO: 10969 - protein, 500 aa, synthetic construct; identical to SEQ ID NO: 10469

SEQ ID NO: 10970 - protein, 500 aa, synthetic construct; identical to SEQ ID NO: 10470

SEQ ID NO: 10971 - protein, 500 aa, synthetic construct; identical to SEQ ID NO: 10471

SEQ ID NO: 10972 - protein, 500 aa, synthetic construct; identical to SEQ ID NO: 10472

SEQ ID NO: 10973 - protein, 500 aa, synthetic construct; identical to SEQ ID NO: 10473

SEQ ID NO: 10974 - protein, 500 aa, synthetic construct; identical to SEQ ID NO: 10474

SEQ ID NO: 10975 - protein, 500 aa, synthetic construct; identical to SEQ ID NO: 10475

SEQ ID NO: 10976 - protein, 500 aa, synthetic construct; identical to SEQ ID NO: 10476

SEQ ID NO: 10977 - protein, 500 aa, synthetic construct; identical to SEQ ID NO: 10477

SEQ ID NO: 10978 - protein, 500 aa, synthetic construct; identical to SEQ ID NO: 10478

SEQ ID NO: 10979 - protein, 500 aa, synthetic construct; identical to SEQ ID NO: 10479

SEQ ID NO: 10980 - protein, 500 aa, synthetic construct; identical to SEQ ID NO: 10480

SEQ ID NO: 10981 - protein, 500 aa, synthetic construct; identical to SEQ ID NO: 10481

SEQ ID NO: 10982 - protein, 500 aa, synthetic construct; identical to SEQ ID NO: 10482

SEQ ID NO: 10983 - protein, 500 aa, synthetic construct; identical to SEQ ID NO: 10483

SEQ ID NO: 10984 - protein, 500 aa, synthetic construct; identical to SEQ ID NO: 10484

SEQ ID NO: 10985 - protein, 500 aa, synthetic construct; identical to SEQ ID NO: 10485

SEQ ID NO: 10986 - protein, 500 aa, synthetic construct; identical to SEQ ID NO: 10486

SEQ ID NO: 10987 - protein, 500 aa, synthetic construct; identical to SEQ ID NO: 10487

SEQ ID NO: 10988 - protein, 500 aa, synthetic construct; identical to SEQ ID NO: 10488

SEQ ID NO: 10989 - protein, 500 aa, synthetic construct; identical to SEQ ID NO: 10489

SEQ ID NO: 10990 - protein, 500 aa, synthetic construct; identical to SEQ ID NO: 10490

SEQ ID NO: 10991 - protein, 500 aa, synthetic construct; identical to SEQ ID NO: 10491

SEQ ID NO: 10992 - protein, 500 aa, synthetic construct; identical to SEQ ID NO: 10492

SEQ ID NO: 10993 - protein, 500 aa, synthetic construct; identical to SEQ ID NO: 10493

SEQ ID NO: 10994 - protein, 500 aa, synthetic construct; identical to SEQ ID NO: 10494

SEQ ID NO: 10995 - protein, 500 aa, synthetic construct; identical to SEQ ID NO: 10495

SEQ ID NO: 10996 - protein, 500 aa, synthetic construct; identical to SEQ ID NO: 10496

SEQ ID NO: 10997 - protein, 500 aa, synthetic construct; identical to SEQ ID NO: 10497

SEQ ID NO: 10998 - protein, 500 aa, synthetic construct; identical to SEQ ID NO: 10498

SEQ ID NO: 10999 - protein, 500 aa, synthetic construct; identical to SEQ ID NO: 10499

SEQ ID NO: 11000 - protein, 500 aa, synthetic construct; identical to SEQ ID NO: 10500

SEQ ID NO: 11001 - protein, 500 aa, synthetic construct; identical to SEQ ID NO: 10501

SEQ ID NO: 11002 - protein, 500 aa, synthetic construct; identical to SEQ ID NO: 10502

SEQ ID NO: 11003 - protein, 500 aa, synthetic construct; identical to SEQ ID NO: 10503

SEQ ID NO: 11004 - protein, 500 aa, synthetic construct; identical to SEQ ID NO: 10504

SEQ ID NO: 11005 - protein, 500 aa, synthetic construct; identical to SEQ ID NO: 10505

SEQ ID NO: 11006 - protein, 500 aa, synthetic construct; identical to SEQ ID NO: 10506

SEQ ID NO: 11007 - protein, 500 aa, synthetic construct; identical to SEQ ID NO: 10507

SEQ ID NO: 11008 - protein, 500 aa, synthetic construct; identical to SEQ ID NO: 10508

SEQ ID NO: 11009 - protein, 500 aa, synthetic construct; identical to SEQ ID NO: 10509

SEQ ID NO: 11010 - protein, 500 aa, synthetic construct; identical to SEQ ID NO: 10510

SEQ ID NO: 11011 - protein, 500 aa, synthetic construct; identical to SEQ ID NO: 10511

SEQ ID NO: 11012 - protein, 500 aa, synthetic construct; identical to SEQ ID NO: 10512

SEQ ID NO: 11013 - protein, 500 aa, synthetic construct; identical to SEQ ID NO: 10513

SEQ ID NO: 11014 - protein, 500 aa, synthetic construct; identical to SEQ ID NO: 10514

SEQ ID NO: 11015 - protein, 500 aa, synthetic construct; identical to SEQ ID NO: 10515

SEQ ID NO: 11016 - protein, 500 aa, synthetic construct; identical to SEQ ID NO: 10516

SEQ ID NO: 11017 - protein, 500 aa, synthetic construct; identical to SEQ ID NO: 10517

SEQ ID NO: 11018 - protein, 500 aa, synthetic construct; identical to SEQ ID NO: 10518

SEQ ID NO: 11019 - protein, 500 aa, synthetic construct; identical to SEQ ID NO: 10519

SEQ ID NO: 11020 - protein, 500 aa, synthetic construct; identical to SEQ ID NO: 10520

SEQ ID NO: 11021 - protein, 500 aa, synthetic construct; identical to SEQ ID NO: 10521

SEQ ID NO: 11022 - protein, 500 aa, synthetic construct; identical to SEQ ID NO: 10522

SEQ ID NO: 11023 - protein, 500 aa, synthetic construct; identical to SEQ ID NO: 10523

SEQ ID NO: 11024 - protein, 500 aa, synthetic construct; identical to SEQ ID NO: 10524

SEQ ID NO: 11025 - protein, 500 aa, synthetic construct; identical to SEQ ID NO: 10525

SEQ ID NO: 11026 - protein, 500 aa, synthetic construct; identical to SEQ ID NO: 10526

SEQ ID NO: 11027 - protein, 500 aa, synthetic construct; identical to SEQ ID NO: 10527

SEQ ID NO: 11028 - protein, 500 aa, synthetic construct; identical to SEQ ID NO: 10528

SEQ ID NO: 11029 - protein, 500 aa, synthetic construct; identical to SEQ ID NO: 10529

SEQ ID NO: 11030 - protein, 500 aa, synthetic construct; identical to SEQ ID NO: 10530

SEQ ID NO: 11031 - protein, 500 aa, synthetic construct; identical to SEQ ID NO: 10531

SEQ ID NO: 11032 - protein, 500 aa, synthetic construct; identical to SEQ ID NO: 10532

SEQ ID NO: 11033 - protein, 500 aa, synthetic construct; identical to SEQ ID NO: 10533

SEQ ID NO: 11034 - protein, 500 aa, synthetic construct; identical to SEQ ID NO: 10534

SEQ ID NO: 11035 - protein, 500 aa, synthetic construct; identical to SEQ ID NO: 10535

SEQ ID NO: 11036 - protein, 500 aa, synthetic construct; identical to SEQ ID NO: 10536

SEQ ID NO: 11037 - protein, 500 aa, synthetic construct; identical to SEQ ID NO: 10537

SEQ ID NO: 11038 - protein, 500 aa, synthetic construct; identical to SEQ ID NO: 10538

SEQ ID NO: 11039 - protein, 500 aa, synthetic construct; identical to SEQ ID NO: 10539

SEQ ID NO: 11040 - protein, 500 aa, synthetic construct; identical to SEQ ID NO: 10540

SEQ ID NO: 11041 - protein, 500 aa, synthetic construct; identical to SEQ ID NO: 10541

SEQ ID NO: 11042 - protein, 500 aa, synthetic construct; identical to SEQ ID NO: 10542

SEQ ID NO: 11043 - protein, 500 aa, synthetic construct; identical to SEQ ID NO: 10543

SEQ ID NO: 11044 - protein, 500 aa, synthetic construct; identical to SEQ ID NO: 10544

SEQ ID NO: 11045 - protein, 500 aa, synthetic construct; identical to SEQ ID NO: 10545

SEQ ID NO: 11046 - protein, 500 aa, synthetic construct; identical to SEQ ID NO: 10546

SEQ ID NO: 11047 - protein, 500 aa, synthetic construct; identical to SEQ ID NO: 10547

SEQ ID NO: 11048 - protein, 500 aa, synthetic construct; identical to SEQ ID NO: 10548

SEQ ID NO: 11049 - protein, 500 aa, synthetic construct; identical to SEQ ID NO: 10549

SEQ ID NO: 11050 - protein, 500 aa, synthetic construct; identical to SEQ ID NO: 10550

SEQ ID NO: 11051 - protein, 500 aa, synthetic construct; identical to SEQ ID NO: 10551

SEQ ID NO: 11052 - protein, 500 aa, synthetic construct; identical to SEQ ID NO: 10552

SEQ ID NO: 11053 - protein, 500 aa, synthetic construct; identical to SEQ ID NO: 10553

SEQ ID NO: 11054 - protein, 500 aa, synthetic construct; identical to SEQ ID NO: 10554

SEQ ID NO: 11055 - protein, 500 aa, synthetic construct; identical to SEQ ID NO: 10555

SEQ ID NO: 11056 - protein, 500 aa, synthetic construct; identical to SEQ ID NO: 10556

SEQ ID NO: 11057 - protein, 500 aa, synthetic construct; identical to SEQ ID NO: 10557

SEQ ID NO: 11058 - protein, 500 aa, synthetic construct; identical to SEQ ID NO: 10558

SEQ ID NO: 11059 - protein, 500 aa, synthetic construct; identical to SEQ ID NO: 10559

SEQ ID NO: 11060 - protein, 500 aa, synthetic construct; identical to SEQ ID NO: 10560

SEQ ID NO: 11061 - protein, 500 aa, synthetic construct; identical to SEQ ID NO: 10561

SEQ ID NO: 11062 - protein, 500 aa, synthetic construct; identical to SEQ ID NO: 10562

SEQ ID NO: 11063 - protein, 500 aa, synthetic construct; identical to SEQ ID NO: 10563

SEQ ID NO: 11064 - protein, 500 aa, synthetic construct; identical to SEQ ID NO: 10564

SEQ ID NO: 11065 - protein, 500 aa, synthetic construct; identical to SEQ ID NO: 10565

SEQ ID NO: 11066 - protein, 500 aa, synthetic construct; identical to SEQ ID NO: 10566

SEQ ID NO: 11067 - protein, 500 aa, synthetic construct; identical to SEQ ID NO: 10567

SEQ ID NO: 11068 - protein, 500 aa, synthetic construct; identical to SEQ ID NO: 10568

SEQ ID NO: 11069 - protein, 500 aa, synthetic construct; identical to SEQ ID NO: 10569

SEQ ID NO: 11070 - protein, 500 aa, synthetic construct; identical to SEQ ID NO: 10570

SEQ ID NO: 11071 - protein, 500 aa, synthetic construct; identical to SEQ ID NO: 10571

SEQ ID NO: 11072 - protein, 500 aa, synthetic construct; identical to SEQ ID NO: 10572

SEQ ID NO: 11073 - protein, 500 aa, synthetic construct; identical to SEQ ID NO: 10573

SEQ ID NO: 11074 - protein, 500 aa, synthetic construct; identical to SEQ ID NO: 10574

SEQ ID NO: 11075 - protein, 500 aa, synthetic construct; identical to SEQ ID NO: 10575

SEQ ID NO: 11076 - protein, 500 aa, synthetic construct; identical to SEQ ID NO: 10576

SEQ ID NO: 11077 - protein, 500 aa, synthetic construct; identical to SEQ ID NO: 10577

SEQ ID NO: 11078 - protein, 500 aa, synthetic construct; identical to SEQ ID NO: 10578

SEQ ID NO: 11079 - protein, 500 aa, synthetic construct; identical to SEQ ID NO: 10579

SEQ ID NO: 11080 - protein, 500 aa, synthetic construct; identical to SEQ ID NO: 10580

SEQ ID NO: 11081 - protein, 500 aa, synthetic construct; identical to SEQ ID NO: 10581

SEQ ID NO: 11082 - protein, 500 aa, synthetic construct; identical to SEQ ID NO: 10582

SEQ ID NO: 11083 - protein, 500 aa, synthetic construct; identical to SEQ ID NO: 10583

SEQ ID NO: 11084 - protein, 500 aa, synthetic construct; identical to SEQ ID NO: 10584

SEQ ID NO: 11085 - protein, 500 aa, synthetic construct; identical to SEQ ID NO: 10585

SEQ ID NO: 11086 - protein, 500 aa, synthetic construct; identical to SEQ ID NO: 10586

SEQ ID NO: 11087 - protein, 500 aa, synthetic construct; identical to SEQ ID NO: 10587

SEQ ID NO: 11088 - protein, 500 aa, synthetic construct; identical to SEQ ID NO: 10588

SEQ ID NO: 11089 - protein, 500 aa, synthetic construct; identical to SEQ ID NO: 10589

SEQ ID NO: 11090 - protein, 500 aa, synthetic construct; identical to SEQ ID NO: 10590

SEQ ID NO: 11091 - protein, 500 aa, synthetic construct; identical to SEQ ID NO: 10591

SEQ ID NO: 11092 - protein, 500 aa, synthetic construct; identical to SEQ ID NO: 10592

SEQ ID NO: 11093 - protein, 500 aa, synthetic construct; identical to SEQ ID NO: 10593

SEQ ID NO: 11094 - protein, 500 aa, synthetic construct; identical to SEQ ID NO: 10594

SEQ ID NO: 11095 - protein, 500 aa, synthetic construct; identical to SEQ ID NO: 10595

SEQ ID NO: 11096 - protein, 500 aa, synthetic construct; identical to SEQ ID NO: 10596

SEQ ID NO: 11097 - protein, 500 aa, synthetic construct; identical to SEQ ID NO: 10597

SEQ ID NO: 11098 - protein, 500 aa, synthetic construct; identical to SEQ ID NO: 10598

SEQ ID NO: 11099 - protein, 500 aa, synthetic construct; identical to SEQ ID NO: 10599

SEQ ID NO: 11100 - protein, 500 aa, synthetic construct; identical to SEQ ID NO: 10600

SEQ ID NO: 11101 - protein, 500 aa, synthetic construct; identical to SEQ ID NO: 10601

SEQ ID NO: 11102 - protein, 500 aa, synthetic construct; identical to SEQ ID NO: 10602

SEQ ID NO: 11103 - protein, 500 aa, synthetic construct; identical to SEQ ID NO: 10603

SEQ ID NO: 11104 - protein, 500 aa, synthetic construct; identical to SEQ ID NO: 10604

SEQ ID NO: 11105 - protein, 500 aa, synthetic construct; identical to SEQ ID NO: 10605

SEQ ID NO: 11106 - protein, 500 aa, synthetic construct; identical to SEQ ID NO: 10606

SEQ ID NO: 11107 - protein, 500 aa, synthetic construct; identical to SEQ ID NO: 10607

SEQ ID NO: 11108 - protein, 500 aa, synthetic construct; identical to SEQ ID NO: 10608

SEQ ID NO: 11109 - protein, 500 aa, synthetic construct; identical to SEQ ID NO: 10609

SEQ ID NO: 11110 - protein, 500 aa, synthetic construct; identical to SEQ ID NO: 10610

SEQ ID NO: 11111 - protein, 500 aa, synthetic construct; identical to SEQ ID NO: 10611

SEQ ID NO: 11112 - protein, 500 aa, synthetic construct; identical to SEQ ID NO: 10612

SEQ ID NO: 11113 - protein, 500 aa, synthetic construct; identical to SEQ ID NO: 10613

SEQ ID NO: 11114 - protein, 500 aa, synthetic construct; identical to SEQ ID NO: 10614

SEQ ID NO: 11115 - protein, 500 aa, synthetic construct; identical to SEQ ID NO: 10615

SEQ ID NO: 11116 - protein, 500 aa, synthetic construct; identical to SEQ ID NO: 10616

SEQ ID NO: 11117 - protein, 500 aa, synthetic construct; identical to SEQ ID NO: 10617

SEQ ID NO: 11118 - protein, 500 aa, synthetic construct; identical to SEQ ID NO: 10618

SEQ ID NO: 11119 - protein, 500 aa, synthetic construct; identical to SEQ ID NO: 10619

SEQ ID NO: 11120 - protein, 500 aa, synthetic construct; identical to SEQ ID NO: 10620

SEQ ID NO: 11121 - protein, 500 aa, synthetic construct; identical to SEQ ID NO: 10621

SEQ ID NO: 11122 - protein, 500 aa, synthetic construct; identical to SEQ ID NO: 10622

SEQ ID NO: 11123 - protein, 500 aa, synthetic construct; identical to SEQ ID NO: 10623

SEQ ID NO: 11124 - protein, 500 aa, synthetic construct; identical to SEQ ID NO: 10624

SEQ ID NO: 11125 - protein, 500 aa, synthetic construct; identical to SEQ ID NO: 10625

SEQ ID NO: 11126 - protein, 500 aa, synthetic construct; identical to SEQ ID NO: 10626

SEQ ID NO: 11127 - protein, 500 aa, synthetic construct; identical to SEQ ID NO: 10627

SEQ ID NO: 11128 - protein, 500 aa, synthetic construct; identical to SEQ ID NO: 10628

SEQ ID NO: 11129 - protein, 500 aa, synthetic construct; identical to SEQ ID NO: 10629

SEQ ID NO: 11130 - protein, 500 aa, synthetic construct; identical to SEQ ID NO: 10630

SEQ ID NO: 11131 - protein, 500 aa, synthetic construct; identical to SEQ ID NO: 10631

SEQ ID NO: 11132 - protein, 500 aa, synthetic construct; identical to SEQ ID NO: 10632

SEQ ID NO: 11133 - protein, 500 aa, synthetic construct; identical to SEQ ID NO: 10633

SEQ ID NO: 11134 - protein, 500 aa, synthetic construct; identical to SEQ ID NO: 10634

SEQ ID NO: 11135 - protein, 500 aa, synthetic construct; identical to SEQ ID NO: 10635

SEQ ID NO: 11136 - protein, 500 aa, synthetic construct; identical to SEQ ID NO: 10636

SEQ ID NO: 11137 - protein, 500 aa, synthetic construct; identical to SEQ ID NO: 10637

SEQ ID NO: 11138 - protein, 500 aa, synthetic construct; identical to SEQ ID NO: 10638

SEQ ID NO: 11139 - protein, 500 aa, synthetic construct; identical to SEQ ID NO: 10639

SEQ ID NO: 11140 - protein, 500 aa, synthetic construct; identical to SEQ ID NO: 10640

SEQ ID NO: 11141 - protein, 500 aa, synthetic construct; identical to SEQ ID NO: 10641

SEQ ID NO: 11142 - protein, 500 aa, synthetic construct; identical to SEQ ID NO: 10642

SEQ ID NO: 11143 - protein, 500 aa, synthetic construct; identical to SEQ ID NO: 10643

SEQ ID NO: 11144 - protein, 500 aa, synthetic construct; identical to SEQ ID NO: 10644

SEQ ID NO: 11145 - protein, 500 aa, synthetic construct; identical to SEQ ID NO: 10645

SEQ ID NO: 11146 - protein, 500 aa, synthetic construct; identical to SEQ ID NO: 10646

SEQ ID NO: 11147 - protein, 500 aa, synthetic construct; identical to SEQ ID NO: 10647

SEQ ID NO: 11148 - protein, 500 aa, synthetic construct; identical to SEQ ID NO: 10648

SEQ ID NO: 11149 - protein, 500 aa, synthetic construct; identical to SEQ ID NO: 10649

SEQ ID NO: 11150 - protein, 500 aa, synthetic construct; identical to SEQ ID NO: 10650

SEQ ID NO: 11151 - protein, 500 aa, synthetic construct; identical to SEQ ID NO: 10651

SEQ ID NO: 11152 - protein, 500 aa, synthetic construct; identical to SEQ ID NO: 10652

SEQ ID NO: 11153 - protein, 500 aa, synthetic construct; identical to SEQ ID NO: 10653

SEQ ID NO: 11154 - protein, 500 aa, synthetic construct; identical to SEQ ID NO: 10654

SEQ ID NO: 11155 - protein, 500 aa, synthetic construct; identical to SEQ ID NO: 10655

SEQ ID NO: 11156 - protein, 500 aa, synthetic construct; identical to SEQ ID NO: 10656

SEQ ID NO: 11157 - protein, 500 aa, synthetic construct; identical to SEQ ID NO: 10657

SEQ ID NO: 11158 - protein, 500 aa, synthetic construct; identical to SEQ ID NO: 10658

SEQ ID NO: 11159 - protein, 500 aa, synthetic construct; identical to SEQ ID NO: 10659

SEQ ID NO: 11160 - protein, 500 aa, synthetic construct; identical to SEQ ID NO: 10660

SEQ ID NO: 11161 - protein, 500 aa, synthetic construct; identical to SEQ ID NO: 10661

SEQ ID NO: 11162 - protein, 500 aa, synthetic construct; identical to SEQ ID NO: 10662

SEQ ID NO: 11163 - protein, 500 aa, synthetic construct; identical to SEQ ID NO: 10663

SEQ ID NO: 11164 - protein, 500 aa, synthetic construct; identical to SEQ ID NO: 10664

SEQ ID NO: 11165 - protein, 500 aa, synthetic construct; identical to SEQ ID NO: 10665

SEQ ID NO: 11166 - protein, 500 aa, synthetic construct; identical to SEQ ID NO: 10666

SEQ ID NO: 11167 - protein, 500 aa, synthetic construct; identical to SEQ ID NO: 10667

SEQ ID NO: 11168 - protein, 500 aa, synthetic construct; identical to SEQ ID NO: 10668

SEQ ID NO: 11169 - protein, 500 aa, synthetic construct; identical to SEQ ID NO: 10669

SEQ ID NO: 11170 - protein, 500 aa, synthetic construct; identical to SEQ ID NO: 10670

SEQ ID NO: 11171 - protein, 500 aa, synthetic construct; identical to SEQ ID NO: 10671

SEQ ID NO: 11172 - protein, 500 aa, synthetic construct; identical to SEQ ID NO: 10672

SEQ ID NO: 11173 - protein, 500 aa, synthetic construct; identical to SEQ ID NO: 10673

SEQ ID NO: 11174 - protein, 500 aa, synthetic construct; identical to SEQ ID NO: 10674

SEQ ID NO: 11175 - protein, 500 aa, synthetic construct; identical to SEQ ID NO: 10675

SEQ ID NO: 11176 - protein, 500 aa, synthetic construct; identical to SEQ ID NO: 10676

SEQ ID NO: 11177 - protein, 500 aa, synthetic construct; identical to SEQ ID NO: 10677

SEQ ID NO: 11178 - protein, 500 aa, synthetic construct; identical to SEQ ID NO: 10678

SEQ ID NO: 11179 - protein, 500 aa, synthetic construct; identical to SEQ ID NO: 10679

SEQ ID NO: 11180 - protein, 500 aa, synthetic construct; identical to SEQ ID NO: 10680

SEQ ID NO: 11181 - protein, 500 aa, synthetic construct; identical to SEQ ID NO: 10681

SEQ ID NO: 11182 - protein, 500 aa, synthetic construct; identical to SEQ ID NO: 10682

SEQ ID NO: 11183 - protein, 500 aa, synthetic construct; identical to SEQ ID NO: 10683

SEQ ID NO: 11184 - protein, 500 aa, synthetic construct; identical to SEQ ID NO: 10684

SEQ ID NO: 11185 - protein, 500 aa, synthetic construct; identical to SEQ ID NO: 10685

SEQ ID NO: 11186 - protein, 500 aa, synthetic construct; identical to SEQ ID NO: 10686

SEQ ID NO: 11187 - protein, 500 aa, synthetic construct; identical to SEQ ID NO: 10687

SEQ ID NO: 11188 - protein, 500 aa, synthetic construct; identical to SEQ ID NO: 10688

SEQ ID NO: 11189 - protein, 500 aa, synthetic construct; identical to SEQ ID NO: 10689

SEQ ID NO: 11190 - protein, 500 aa, synthetic construct; identical to SEQ ID NO: 10690

SEQ ID NO: 11191 - protein, 500 aa, synthetic construct; identical to SEQ ID NO: 10691

SEQ ID NO: 11192 - protein, 500 aa, synthetic construct; identical to SEQ ID NO: 10692

SEQ ID NO: 11193 - protein, 500 aa, synthetic construct; identical to SEQ ID NO: 10693

SEQ ID NO: 11194 - protein, 500 aa, synthetic construct; identical to SEQ ID NO: 10694

SEQ ID NO: 11195 - protein, 500 aa, synthetic construct; identical to SEQ ID NO: 10695

SEQ ID NO: 11196 - protein, 500 aa, synthetic construct; identical to SEQ ID NO: 10696

SEQ ID NO: 11197 - protein, 500 aa, synthetic construct; identical to SEQ ID NO: 10697

SEQ ID NO: 11198 - protein, 500 aa, synthetic construct; identical to SEQ ID NO: 10698

SEQ ID NO: 11199 - protein, 500 aa, synthetic construct; identical to SEQ ID NO: 10699

SEQ ID NO: 11200 - protein, 500 aa, synthetic construct; identical to SEQ ID NO: 10700

SEQ ID NO: 11201 - protein, 500 aa, synthetic construct; identical to SEQ ID NO: 10701

SEQ ID NO: 11202 - protein, 500 aa, synthetic construct; identical to SEQ ID NO: 10702

SEQ ID NO: 11203 - protein, 500 aa, synthetic construct; identical to SEQ ID NO: 10703

SEQ ID NO: 11204 - protein, 500 aa, synthetic construct; identical to SEQ ID NO: 10704

SEQ ID NO: 11205 - protein, 500 aa, synthetic construct; identical to SEQ ID NO: 10705

SEQ ID NO: 11206 - protein, 500 aa, synthetic construct; identical to SEQ ID NO: 10706

SEQ ID NO: 11207 - protein, 500 aa, synthetic construct; identical to SEQ ID NO: 10707

SEQ ID NO: 11208 - protein, 500 aa, synthetic construct; identical to SEQ ID NO: 10708

SEQ ID NO: 11209 - protein, 500 aa, synthetic construct; identical to SEQ ID NO: 10709

SEQ ID NO: 11210 - protein, 500 aa, synthetic construct; identical to SEQ ID NO: 10710

SEQ ID NO: 11211 - protein, 500 aa, synthetic construct; identical to SEQ ID NO: 10711

SEQ ID NO: 11212 - protein, 500 aa, synthetic construct; identical to SEQ ID NO: 10712

SEQ ID NO: 11213 - protein, 500 aa, synthetic construct; identical to SEQ ID NO: 10713

SEQ ID NO: 11214 - protein, 500 aa, synthetic construct; identical to SEQ ID NO: 10714

SEQ ID NO: 11215 - protein, 500 aa, synthetic construct; identical to SEQ ID NO: 10715

SEQ ID NO: 11216 - protein, 500 aa, synthetic construct; identical to SEQ ID NO: 10716

SEQ ID NO: 11217 - protein, 500 aa, synthetic construct; identical to SEQ ID NO: 10717

SEQ ID NO: 11218 - protein, 500 aa, synthetic construct; identical to SEQ ID NO: 10718

SEQ ID NO: 11219 - protein, 500 aa, synthetic construct; identical to SEQ ID NO: 10719

SEQ ID NO: 11220 - protein, 500 aa, synthetic construct; identical to SEQ ID NO: 10720

SEQ ID NO: 11221 - protein, 500 aa, synthetic construct; identical to SEQ ID NO: 10721

SEQ ID NO: 11222 - protein, 500 aa, synthetic construct; identical to SEQ ID NO: 10722

SEQ ID NO: 11223 - protein, 500 aa, synthetic construct; identical to SEQ ID NO: 10723

SEQ ID NO: 11224 - protein, 500 aa, synthetic construct; identical to SEQ ID NO: 10724

SEQ ID NO: 11225 - protein, 500 aa, synthetic construct; identical to SEQ ID NO: 10725

SEQ ID NO: 11226 - protein, 500 aa, synthetic construct; identical to SEQ ID NO: 10726

SEQ ID NO: 11227 - protein, 500 aa, synthetic construct; identical to SEQ ID NO: 10727

SEQ ID NO: 11228 - protein, 500 aa, synthetic construct; identical to SEQ ID NO: 10728

SEQ ID NO: 11229 - protein, 500 aa, synthetic construct; identical to SEQ ID NO: 10729

SEQ ID NO: 11230 - protein, 500 aa, synthetic construct; identical to SEQ ID NO: 10730

SEQ ID NO: 11231 - protein, 500 aa, synthetic construct; identical to SEQ ID NO: 10731

SEQ ID NO: 11232 - protein, 500 aa, synthetic construct; identical to SEQ ID NO: 10732

SEQ ID NO: 11233 - protein, 500 aa, synthetic construct; identical to SEQ ID NO: 10733

SEQ ID NO: 11234 - protein, 500 aa, synthetic construct; identical to SEQ ID NO: 10734

SEQ ID NO: 11235 - protein, 500 aa, synthetic construct; identical to SEQ ID NO: 10735

SEQ ID NO: 11236 - protein, 500 aa, synthetic construct; identical to SEQ ID NO: 10736

SEQ ID NO: 11237 - protein, 500 aa, synthetic construct; identical to SEQ ID NO: 10737

SEQ ID NO: 11238 - protein, 500 aa, synthetic construct; identical to SEQ ID NO: 10738

SEQ ID NO: 11239 - protein, 500 aa, synthetic construct; identical to SEQ ID NO: 10739

SEQ ID NO: 11240 - protein, 500 aa, synthetic construct; identical to SEQ ID NO: 10740

SEQ ID NO: 11241 - protein, 500 aa, synthetic construct; identical to SEQ ID NO: 10741

SEQ ID NO: 11242 - protein, 500 aa, synthetic construct; identical to SEQ ID NO: 10742

SEQ ID NO: 11243 - protein, 500 aa, synthetic construct; identical to SEQ ID NO: 10743

SEQ ID NO: 11244 - protein, 500 aa, synthetic construct; identical to SEQ ID NO: 10744

SEQ ID NO: 11245 - protein, 500 aa, synthetic construct; identical to SEQ ID NO: 10745

SEQ ID NO: 11246 - protein, 500 aa, synthetic construct; identical to SEQ ID NO: 10746

SEQ ID NO: 11247 - protein, 500 aa, synthetic construct; identical to SEQ ID NO: 10747

SEQ ID NO: 11248 - protein, 500 aa, synthetic construct; identical to SEQ ID NO: 10748

SEQ ID NO: 11249 - protein, 500 aa, synthetic construct; identical to SEQ ID NO: 10749

SEQ ID NO: 11250 - protein, 500 aa, synthetic construct; identical to SEQ ID NO: 10750

SEQ ID NO: 11251 - protein, 500 aa, synthetic construct; identical to SEQ ID NO: 10751

SEQ ID NO: 11252 - protein, 500 aa, synthetic construct; identical to SEQ ID NO: 10752

SEQ ID NO: 11253 - protein, 500 aa, synthetic construct; identical to SEQ ID NO: 10753

SEQ ID NO: 11254 - protein, 500 aa, synthetic construct; identical to SEQ ID NO: 10754

SEQ ID NO: 11255 - protein, 500 aa, synthetic construct; identical to SEQ ID NO: 10755

SEQ ID NO: 11256 - protein, 500 aa, synthetic construct; identical to SEQ ID NO: 10756

SEQ ID NO: 11257 - protein, 500 aa, synthetic construct; identical to SEQ ID NO: 10757

SEQ ID NO: 11258 - protein, 500 aa, synthetic construct; identical to SEQ ID NO: 10758

SEQ ID NO: 11259 - protein, 500 aa, synthetic construct; identical to SEQ ID NO: 10759

SEQ ID NO: 11260 - protein, 500 aa, synthetic construct; identical to SEQ ID NO: 10760

SEQ ID NO: 11261 - protein, 500 aa, synthetic construct; identical to SEQ ID NO: 10761

SEQ ID NO: 11262 - protein, 500 aa, synthetic construct; identical to SEQ ID NO: 10762

SEQ ID NO: 11263 - protein, 500 aa, synthetic construct; identical to SEQ ID NO: 10763

SEQ ID NO: 11264 - protein, 500 aa, synthetic construct; identical to SEQ ID NO: 10764

SEQ ID NO: 11265 - protein, 500 aa, synthetic construct; identical to SEQ ID NO: 10765

SEQ ID NO: 11266 - protein, 500 aa, synthetic construct; identical to SEQ ID NO: 10766

SEQ ID NO: 11267 - protein, 500 aa, synthetic construct; identical to SEQ ID NO: 10767

SEQ ID NO: 11268 - protein, 500 aa, synthetic construct; identical to SEQ ID NO: 10768

SEQ ID NO: 11269 - protein, 500 aa, synthetic construct; identical to SEQ ID NO: 10769

SEQ ID NO: 11270 - protein, 500 aa, synthetic construct; identical to SEQ ID NO: 10770

SEQ ID NO: 11271 - protein, 500 aa, synthetic construct; identical to SEQ ID NO: 10771

SEQ ID NO: 11272 - protein, 500 aa, synthetic construct; identical to SEQ ID NO: 10772

SEQ ID NO: 11273 - protein, 500 aa, synthetic construct; identical to SEQ ID NO: 10773

SEQ ID NO: 11274 - protein, 500 aa, synthetic construct; identical to SEQ ID NO: 10774

SEQ ID NO: 11275 - protein, 500 aa, synthetic construct; identical to SEQ ID NO: 10775

SEQ ID NO: 11276 - protein, 500 aa, synthetic construct; identical to SEQ ID NO: 10776

SEQ ID NO: 11277 - protein, 500 aa, synthetic construct; identical to SEQ ID NO: 10777

SEQ ID NO: 11278 - protein, 500 aa, synthetic construct; identical to SEQ ID NO: 10778

SEQ ID NO: 11279 - protein, 500 aa, synthetic construct; identical to SEQ ID NO: 10779

SEQ ID NO: 11280 - protein, 500 aa, synthetic construct; identical to SEQ ID NO: 10780

SEQ ID NO: 11281 - protein, 500 aa, synthetic construct; identical to SEQ ID NO: 10781

SEQ ID NO: 11282 - protein, 500 aa, synthetic construct; identical to SEQ ID NO: 10782

SEQ ID NO: 11283 - protein, 500 aa, synthetic construct; identical to SEQ ID NO: 10783

SEQ ID NO: 11284 - protein, 500 aa, synthetic construct; identical to SEQ ID NO: 10784

SEQ ID NO: 11285 - protein, 500 aa, synthetic construct; identical to SEQ ID NO: 10785

SEQ ID NO: 11286 - protein, 500 aa, synthetic construct; identical to SEQ ID NO: 10786

SEQ ID NO: 11287 - protein, 500 aa, synthetic construct; identical to SEQ ID NO: 10787

SEQ ID NO: 11288 - protein, 500 aa, synthetic construct; identical to SEQ ID NO: 10788

SEQ ID NO: 11289 - protein, 500 aa, synthetic construct; identical to SEQ ID NO: 10789

SEQ ID NO: 11290 - protein, 500 aa, synthetic construct; identical to SEQ ID NO: 10790

SEQ ID NO: 11291 - protein, 500 aa, synthetic construct; identical to SEQ ID NO: 10791

SEQ ID NO: 11292 - protein, 500 aa, synthetic construct; identical to SEQ ID NO: 10792

SEQ ID NO: 11293 - protein, 500 aa, synthetic construct; identical to SEQ ID NO: 10793

SEQ ID NO: 11294 - protein, 500 aa, synthetic construct; identical to SEQ ID NO: 10794

SEQ ID NO: 11295 - protein, 500 aa, synthetic construct; identical to SEQ ID NO: 10795

SEQ ID NO: 11296 - protein, 500 aa, synthetic construct; identical to SEQ ID NO: 10796

SEQ ID NO: 11297 - protein, 500 aa, synthetic construct; identical to SEQ ID NO: 10797

SEQ ID NO: 11298 - protein, 500 aa, synthetic construct; identical to SEQ ID NO: 10798

SEQ ID NO: 11299 - protein, 500 aa, synthetic construct; identical to SEQ ID NO: 10799

SEQ ID NO: 11300 - protein, 500 aa, synthetic construct; identical to SEQ ID NO: 10800

SEQ ID NO: 11301 - protein, 500 aa, synthetic construct; identical to SEQ ID NO: 10801

SEQ ID NO: 11302 - protein, 500 aa, synthetic construct; identical to SEQ ID NO: 10802

SEQ ID NO: 11303 - protein, 500 aa, synthetic construct; identical to SEQ ID NO: 10803

SEQ ID NO: 11304 - protein, 500 aa, synthetic construct; identical to SEQ ID NO: 10804

SEQ ID NO: 11305 - protein, 500 aa, synthetic construct; identical to SEQ ID NO: 10805

SEQ ID NO: 11306 - protein, 500 aa, synthetic construct; identical to SEQ ID NO: 10806

SEQ ID NO: 11307 - protein, 500 aa, synthetic construct; identical to SEQ ID NO: 10807

SEQ ID NO: 11308 - protein, 500 aa, synthetic construct; identical to SEQ ID NO: 10808

SEQ ID NO: 11309 - protein, 500 aa, synthetic construct; identical to SEQ ID NO: 10809

SEQ ID NO: 11310 - protein, 500 aa, synthetic construct; identical to SEQ ID NO: 10810

SEQ ID NO: 11311 - protein, 500 aa, synthetic construct; identical to SEQ ID NO: 10811

SEQ ID NO: 11312 - protein, 500 aa, synthetic construct; identical to SEQ ID NO: 10812

SEQ ID NO: 11313 - protein, 500 aa, synthetic construct; identical to SEQ ID NO: 10813

SEQ ID NO: 11314 - protein, 500 aa, synthetic construct; identical to SEQ ID NO: 10814

SEQ ID NO: 11315 - protein, 500 aa, synthetic construct; identical to SEQ ID NO: 10815

SEQ ID NO: 11316 - protein, 500 aa, synthetic construct; identical to SEQ ID NO: 10816

SEQ ID NO: 11317 - protein, 500 aa, synthetic construct; identical to SEQ ID NO: 10817

SEQ ID NO: 11318 - protein, 500 aa, synthetic construct; identical to SEQ ID NO: 10818

SEQ ID NO: 11319 - protein, 500 aa, synthetic construct; identical to SEQ ID NO: 10819

SEQ ID NO: 11320 - protein, 500 aa, synthetic construct; identical to SEQ ID NO: 10820

SEQ ID NO: 11321 - protein, 500 aa, synthetic construct; identical to SEQ ID NO: 10821

SEQ ID NO: 11322 - protein, 500 aa, synthetic construct; identical to SEQ ID NO: 10822

SEQ ID NO: 11323 - protein, 500 aa, synthetic construct; identical to SEQ ID NO: 10823

SEQ ID NO: 11324 - protein, 500 aa, synthetic construct; identical to SEQ ID NO: 10824

SEQ ID NO: 11325 - protein, 500 aa, synthetic construct; identical to SEQ ID NO: 10825

SEQ ID NO: 11326 - protein, 500 aa, synthetic construct; identical to SEQ ID NO: 10826

SEQ ID NO: 11327 - protein, 500 aa, synthetic construct; identical to SEQ ID NO: 10827

SEQ ID NO: 11328 - protein, 500 aa, synthetic construct; identical to SEQ ID NO: 10828

SEQ ID NO: 11329 - protein, 500 aa, synthetic construct; identical to SEQ ID NO: 10829

SEQ ID NO: 11330 - protein, 500 aa, synthetic construct; identical to SEQ ID NO: 10830

SEQ ID NO: 11331 - protein, 500 aa, synthetic construct; identical to SEQ ID NO: 10831

SEQ ID NO: 11332 - protein, 500 aa, synthetic construct; identical to SEQ ID NO: 10832

SEQ ID NO: 11333 - protein, 500 aa, synthetic construct; identical to SEQ ID NO: 10833

SEQ ID NO: 11334 - protein, 500 aa, synthetic construct; identical to SEQ ID NO: 10834

SEQ ID NO: 11335 - protein, 500 aa, synthetic construct; identical to SEQ ID NO: 10835

SEQ ID NO: 11336 - protein, 500 aa, synthetic construct; identical to SEQ ID NO: 10836

SEQ ID NO: 11337 - protein, 500 aa, synthetic construct; identical to SEQ ID NO: 10837

SEQ ID NO: 11338 - protein, 500 aa, synthetic construct; identical to SEQ ID NO: 10838

SEQ ID NO: 11339 - protein, 500 aa, synthetic construct; identical to SEQ ID NO: 10839

SEQ ID NO: 11340 - protein, 500 aa, synthetic construct; identical to SEQ ID NO: 10840

SEQ ID NO: 11341 - protein, 500 aa, synthetic construct; identical to SEQ ID NO: 10841

SEQ ID NO: 11342 - protein, 500 aa, synthetic construct; identical to SEQ ID NO: 10842

SEQ ID NO: 11343 - protein, 500 aa, synthetic construct; identical to SEQ ID NO: 10843

SEQ ID NO: 11344 - protein, 500 aa, synthetic construct; identical to SEQ ID NO: 10844

SEQ ID NO: 11345 - protein, 500 aa, synthetic construct; identical to SEQ ID NO: 10845

SEQ ID NO: 11346 - protein, 500 aa, synthetic construct; identical to SEQ ID NO: 10846

SEQ ID NO: 11347 - protein, 500 aa, synthetic construct; identical to SEQ ID NO: 10847

SEQ ID NO: 11348 - protein, 500 aa, synthetic construct; identical to SEQ ID NO: 10848

SEQ ID NO: 11349 - protein, 500 aa, synthetic construct; identical to SEQ ID NO: 10849

SEQ ID NO: 11350 - protein, 500 aa, synthetic construct; identical to SEQ ID NO: 10850

SEQ ID NO: 11351 - protein, 500 aa, synthetic construct; identical to SEQ ID NO: 10851

SEQ ID NO: 11352 - protein, 500 aa, synthetic construct; identical to SEQ ID NO: 10852

SEQ ID NO: 11353 - protein, 500 aa, synthetic construct; identical to SEQ ID NO: 10853

SEQ ID NO: 11354 - protein, 500 aa, synthetic construct; identical to SEQ ID NO: 10854

SEQ ID NO: 11355 - protein, 500 aa, synthetic construct; identical to SEQ ID NO: 10855

SEQ ID NO: 11356 - protein, 500 aa, synthetic construct; identical to SEQ ID NO: 10856

SEQ ID NO: 11357 - protein, 500 aa, synthetic construct; identical to SEQ ID NO: 10857

SEQ ID NO: 11358 - protein, 500 aa, synthetic construct; identical to SEQ ID NO: 10858

SEQ ID NO: 11359 - protein, 500 aa, synthetic construct; identical to SEQ ID NO: 10859

SEQ ID NO: 11360 - protein, 500 aa, synthetic construct; identical to SEQ ID NO: 10860

SEQ ID NO: 11361 - protein, 500 aa, synthetic construct; identical to SEQ ID NO: 10861

SEQ ID NO: 11362 - protein, 500 aa, synthetic construct; identical to SEQ ID NO: 10862

SEQ ID NO: 11363 - protein, 500 aa, synthetic construct; identical to SEQ ID NO: 10863

SEQ ID NO: 11364 - protein, 500 aa, synthetic construct; identical to SEQ ID NO: 10864

SEQ ID NO: 11365 - protein, 500 aa, synthetic construct; identical to SEQ ID NO: 10865

SEQ ID NO: 11366 - protein, 500 aa, synthetic construct; identical to SEQ ID NO: 10866

SEQ ID NO: 11367 - protein, 500 aa, synthetic construct; identical to SEQ ID NO: 10867

SEQ ID NO: 11368 - protein, 500 aa, synthetic construct; identical to SEQ ID NO: 10868

SEQ ID NO: 11369 - protein, 500 aa, synthetic construct; identical to SEQ ID NO: 10869

SEQ ID NO: 11370 - protein, 500 aa, synthetic construct; identical to SEQ ID NO: 10870

SEQ ID NO: 11371 - protein, 500 aa, synthetic construct; identical to SEQ ID NO: 10871

SEQ ID NO: 11372 - protein, 500 aa, synthetic construct; identical to SEQ ID NO: 10872

SEQ ID NO: 11373 - protein, 500 aa, synthetic construct; identical to SEQ ID NO: 10873

SEQ ID NO: 11374 - protein, 500 aa, synthetic construct; identical to SEQ ID NO: 10874

SEQ ID NO: 11375 - protein, 500 aa, synthetic construct; identical to SEQ ID NO: 10875

SEQ ID NO: 11376 - protein, 500 aa, synthetic construct; identical to SEQ ID NO: 10876

SEQ ID NO: 11377 - protein, 500 aa, synthetic construct; identical to SEQ ID NO: 10877

SEQ ID NO: 11378 - protein, 500 aa, synthetic construct; identical to SEQ ID NO: 10878

SEQ ID NO: 11379 - protein, 500 aa, synthetic construct; identical to SEQ ID NO: 10879

SEQ ID NO: 11380 - protein, 500 aa, synthetic construct; identical to SEQ ID NO: 10880

SEQ ID NO: 11381 - protein, 500 aa, synthetic construct; identical to SEQ ID NO: 10881

SEQ ID NO: 11382 - protein, 500 aa, synthetic construct; identical to SEQ ID NO: 10882

SEQ ID NO: 11383 - protein, 500 aa, synthetic construct; identical to SEQ ID NO: 10883

SEQ ID NO: 11384 - protein, 500 aa, synthetic construct; identical to SEQ ID NO: 10884

SEQ ID NO: 11385 - protein, 500 aa, synthetic construct; identical to SEQ ID NO: 10885

SEQ ID NO: 11386 - protein, 500 aa, synthetic construct; identical to SEQ ID NO: 10886

SEQ ID NO: 11387 - protein, 500 aa, synthetic construct; identical to SEQ ID NO: 10887

SEQ ID NO: 11388 - protein, 500 aa, synthetic construct; identical to SEQ ID NO: 10888

SEQ ID NO: 11389 - protein, 500 aa, synthetic construct; identical to SEQ ID NO: 10889

SEQ ID NO: 11390 - protein, 500 aa, synthetic construct; identical to SEQ ID NO: 10890

SEQ ID NO: 11391 - protein, 500 aa, synthetic construct; identical to SEQ ID NO: 10891

SEQ ID NO: 11392 - protein, 500 aa, synthetic construct; identical to SEQ ID NO: 10892

SEQ ID NO: 11393 - protein, 500 aa, synthetic construct; identical to SEQ ID NO: 10893

SEQ ID NO: 11394 - protein, 500 aa, synthetic construct; identical to SEQ ID NO: 10894

SEQ ID NO: 11395 - protein, 500 aa, synthetic construct; identical to SEQ ID NO: 10895

SEQ ID NO: 11396 - protein, 500 aa, synthetic construct; identical to SEQ ID NO: 10896

SEQ ID NO: 11397 - protein, 500 aa, synthetic construct; identical to SEQ ID NO: 10897

SEQ ID NO: 11398 - protein, 500 aa, synthetic construct; identical to SEQ ID NO: 10898

SEQ ID NO: 11399 - protein, 500 aa, synthetic construct; identical to SEQ ID NO: 10899

SEQ ID NO: 11400 - protein, 500 aa, synthetic construct; identical to SEQ ID NO: 10900

SEQ ID NO: 11401 - protein, 500 aa, synthetic construct; identical to SEQ ID NO: 10901

SEQ ID NO: 11402 - protein, 500 aa, synthetic construct; identical to SEQ ID NO: 10902

SEQ ID NO: 11403 - protein, 500 aa, synthetic construct; identical to SEQ ID NO: 10903

SEQ ID NO: 11404 - protein, 500 aa, synthetic construct; identical to SEQ ID NO: 10904

SEQ ID NO: 11405 - protein, 500 aa, synthetic construct; identical to SEQ ID NO: 10905

SEQ ID NO: 11406 - protein, 500 aa, synthetic construct; identical to SEQ ID NO: 10906

SEQ ID NO: 11407 - protein, 500 aa, synthetic construct; identical to SEQ ID NO: 10907

SEQ ID NO: 11408 - protein, 500 aa, synthetic construct; identical to SEQ ID NO: 10908

SEQ ID NO: 11409 - protein, 500 aa, synthetic construct; identical to SEQ ID NO: 10909

SEQ ID NO: 11410 - protein, 500 aa, synthetic construct; identical to SEQ ID NO: 10910

SEQ ID NO: 11411 - protein, 500 aa, synthetic construct; identical to SEQ ID NO: 10911

SEQ ID NO: 11412 - protein, 500 aa, synthetic construct; identical to SEQ ID NO: 10912

SEQ ID NO: 11413 - protein, 500 aa, synthetic construct; identical to SEQ ID NO: 10913

SEQ ID NO: 11414 - protein, 500 aa, synthetic construct; identical to SEQ ID NO: 10914

SEQ ID NO: 11415 - protein, 500 aa, synthetic construct; identical to SEQ ID NO: 10915

SEQ ID NO: 11416 - protein, 500 aa, synthetic construct; identical to SEQ ID NO: 10916

SEQ ID NO: 11417 - protein, 500 aa, synthetic construct; identical to SEQ ID NO: 10917

SEQ ID NO: 11418 - protein, 500 aa, synthetic construct; identical to SEQ ID NO: 10918

SEQ ID NO: 11419 - protein, 500 aa, synthetic construct; identical to SEQ ID NO: 10919

SEQ ID NO: 11420 - protein, 500 aa, synthetic construct; identical to SEQ ID NO: 10920

SEQ ID NO: 11421 - protein, 500 aa, synthetic construct; identical to SEQ ID NO: 10921

SEQ ID NO: 11422 - protein, 500 aa, synthetic construct; identical to SEQ ID NO: 10922

SEQ ID NO: 11423 - protein, 500 aa, synthetic construct; identical to SEQ ID NO: 10923

SEQ ID NO: 11424 - protein, 500 aa, synthetic construct; identical to SEQ ID NO: 10924

SEQ ID NO: 11425 - protein, 500 aa, synthetic construct; identical to SEQ ID NO: 10925

SEQ ID NO: 11426 - protein, 500 aa, synthetic construct; identical to SEQ ID NO: 10926

SEQ ID NO: 11427 - protein, 500 aa, synthetic construct; identical to SEQ ID NO: 10927

SEQ ID NO: 11428 - protein, 500 aa, synthetic construct; identical to SEQ ID NO: 10928

SEQ ID NO: 11429 - protein, 500 aa, synthetic construct; identical to SEQ ID NO: 10929

SEQ ID NO: 11430 - protein, 500 aa, synthetic construct
MRALVVIRLSRVTDATTSPERQLESCRQLCAQRGWDVVGVAEDLDVSGAVDPFDRKRRPNLARWLAFEEQPFDVIVAYRVDRLTRSTRHLQQLVHWAEDHKKLVVSATEAHFDTTTPFAAVVIALMGTVAQMELEAIKERSRSAAHFNIRAGKYRGSLPPWGYLPTRVDGEWRLAPDPVQRERILEVYHRVVDNHEPLHLVAHDLNRRGVLSPKDYFAQLQGREPQGRKWSATALKRSMISEAMLGYATLNGKIVRDDDGAPLVRAEPILTREQLEALRAEFVKTSRAKPAVSTPSLLLRVLFCAVCGEPAYKFAGGGRKHPRYRCRSMGFPKHCGNGTVAMAEWDAFCEEQVLNLLGDAERLEKVWVAGSDSAVELAEVNAELVDLTSLIGSPAYRAGSPQREALDARIAALAARQEELGGLEARPSGWEWRETGQRFGDWWREQDTAAKNTWLRSMNVRLTFDVRGGLTRTIDFGDLQEYEQHLRLGSVVERLHTGVS

SEQ ID NO: 11431 - protein, 500 aa, synthetic construct
MRALVVIRLSRVTDATTSPERQLESCQQLCAQRGWDVVGVAEDLDVSGAVDPFDRKRRPNLARWLAFEEQPFDAIVAYRVDRLTRSIRHLQQLVHWAEDHKKLVVSATEAHFDTTTPFAAVVIALMGTVAQMELEAIKERNRSAAHFNIRAGKYRGSLPPWGYLPTRVDGEWRLVPDPVQRERILEVYHRVVDNHEPLHLVAHDLNRRGDLSPKDYFAQLQGREPQGRKWSATALKRSMISGAMLGYATLNGKTVRDDDGAPLVRAEPILTREQQEALRAELVKTSRAKPAVSTPSLLLRVLFCAVCGEPAYKFAGGGRKHPRYRCRSMGFPKHCGNGTVAMAEWDAFCEEQVLGLLGDAERLEKVWVAGSDSAVEIAEVNKELVDLTSLIGSPAYRAGSPQREALDARIAALAARQEELEGLEARPSGWEWRGTGQRFGDWWREQDTAAKNTWLRSMNVRLTFDVRGGLTRTIDFGDLQEYGQHLRLGSVVERLHTGMS

SEQ ID NO: 11432 - protein, 500 aa, synthetic construct
MRALVVIRLSRVTDATTSPERQLESCQQLCAQRGWDVVGVAEDLDVSGAVDPFDRKRRPNLARWLAFEEQPFDVIVAYRVDRLARSIRHLQQLVHWAEDHKKLVVSATEAHFDTTTPFAAVVIALMGTVAQMELEAIKERNRSAAHFNIRAGKYRGSLPPWGYLPTRVDGEWRLVPDPVQRERILEVYRRVVDNHEPLHLVAHDLNRRGVLSPKDYFAQLRGREPQGRKWSATALKRSMISEAMLGYATLNGKTVRDEDGAPLVRAEPILTREQLEALRAVLVKTSRAEPAVSTPSLLLRVLFCAVCGEPAYKFAGGGRKHPRYRCRSMGFPKHCGNGTVAMAEWDAFCEEQVLNLLGDAERLEKVWVAGSDSAVELAEVNAELVDLTSLIGSPAYRAGSPQREAVDARTAALAARQEELEGLEARPSGWEWRETGQRFEDWWREQDTAAKNTWLRSMNVRLTFDVRGGLTRTIDFGDLQEYEQHLRLGSVVERLHTGMS

SEQ ID NO: 11433 - protein, 500 aa, synthetic construct
MRALVVIRLSRVTDATTSPERQLESCQQLCAQRGWNVVGVAEDLDVSGAVDPFDRKRRPNLARWLAFEEQPFDVIVAYRVDRLARSVRHLQQLVRWAEDHKKLVVSATEAHFDTTTPFAAVVIALMGTVAQMELEAIKERSRSAAHFNIRAGKYRGSLPPWGYLPMRVDGEWRLVPDPVQRERILEVYHRVVDNHEPLHLVAHDLNRRGVLSPKDYFAQLQGREPQGRKWSATALKRSMISVAMLGYATLNGKTVRDDDGAPLVRAEPILTREQLEALRAELVKTSRAEPAVSTPSLLLRVLFCAVCGEPAYKFAGGGRKHPRYRCRSMGFPKHCGNGTVAMAEWDAFCEEQVLDLLGDAERLEKVWVAGSDSAVELAEVNAELVDLTSLIGSSAYRAGSPQREALDARITALAARQEELEGLEARPSGWEWRGTGQRFGDWWREQDTAAKNTWLRSMNVRLTFDVRGGLTRTIDFGDLQEYEQHLRLGSVVERLHSGMS

SEQ ID NO: 11434 - protein, 500 aa, synthetic construct
MRALVVIRLSRVTDATTSPERQLESCQQLCAQRGWDVVGVAEDLDVSGAVDPFDRKRRPNLARWLAFEEQPFDVIVAYRVDRLTRSTRHLQQLVHWAEDHKKLVVSATEAHFDTTTPFAAVVIALMGTVAQMELEAIKERNRSAAHFNIRAGKYRGSLPPWGYLPTRVGGEWRLAPDPVQRERILEVYHRVVDNHEPLHLVAHDLNRRGVLSPRDYFAQLQGREPRGHKWSATALKRSMISEAMLGYATLNGKTVRDDDGAPLVRAEPILTRGQLEALRAELVKTSRAKPAVSTPSLLLRVLFCAVCGEPAYKFAGGGRKHPRYRCRSMGFPKHCGNGTVAMAEWDAFCEEQVLNLLGDAERLEKVWVAGSDSAVELAEVNAELVDLTSLIGSPAYRAGSPQREELDARIAALVARQEELEGLEARPSGWEWRETGQRFGDWWREQDTAAKNTWLRSMNVRLTFDVRGGLTRTIDFGDLQEYEQHLRLGSVVERLHTGMT

SEQ ID NO: 11435 - protein, 500 aa, synthetic construct
MRALVVIRLSRVTDATTSPERQLESCQQLCAQRGWDVVGVAEDLDVSGAVDPFDRKRRPNLARWLAFEEQPFDVIVAYRVDRLTRSVRHLQRLVHWAEDHKKLVVSATEAHFDTTTPFAAVVIALMGTVAQMELEAIKERSRSAAHFNIRAGKYRGSLPPWGYLPTRVDGEWRLVPDPAQRERILEVYRRVVDNHEPLHLVAHDLNRRGVLSPKDYFAQLRGREPQGRKWSATALKRSMISEAMLGYATLNGKTVRDDDGAPLVRAEPILTREQLEALRAELVKTSRAKPAVSTPSLLLRVLFCAVCGEPAYKFAGGGRKHPRYRCRSMGLPKHCGNGTVAMAEWDAFCEEQVLDLLGDAERLEKVWVAGSDSAVELAEVNAELVDLTSLIGSPAYRAGSPQREALDARIAALAARQEELEGLEARPSGWEWRETGQRFGDWWREQDTAAKNTWLRSMNVRLTFDVRGGLTRTIDFGDLQEYEQHSRLGSVVERLHSGMS

SEQ ID NO: 11436 - protein, 500 aa, synthetic construct
MRALVVIRLSRVTDATTSPERQLESCQQLCAQRGWDVVGVAEDLDVSGAVDPFDRKRRPNLARWLAFEEQPFDVIVAYRVDRLARSIRHIQQLVHWAEDHKKLVVSATEAHFDTTTPFAAVVIALMGTVAQMELEAIRERSRSAAHFNIRAGKYRGSLPPWGYLPTRVDGEWRLVPDPVQRERILEVYHRVVNNHEPLHLVAHDLNRRGVLSPKDYFAQLQGREPQGRKWSATALKRSMISEAMLGYATLNGKTVRDDDGAPLVRAEPILTREQQEALCAELVKTSRAKPAVSTPSLLLRVLFCAVCGEPAYKFAGGGRKHPRYRCRSMGFPKHCGNGTVAMAEWDAFCEEQVLGLLGDAERLEKVWVAGSDSAVELAEVNAELVDLTSLIGSPAYRAGSPQREALDARIAALAARQEELEGLEARPSGWEWRKTGQRFRDWWHEQDTTTKNTWLRSMNVRLTFDVRGGLTRTIDFGDLQEYGQHLRLGSVVERLRTGMS

SEQ ID NO: 11437 - protein, 500 aa, synthetic construct
MRALVVIRLSRVTDATTSPERQLESCQQLCAQRGWDVVGVAEDLDVSGAVDPFDRKRRPNLARWLAFEEQPFDVIVAYRVDRLTRSTRHLQQLVHWAEDHKKLVVSATEAHFDTTTPFAAVVIALMGTVAQMELEAIKERNRSAAHFNIRAGKYRGSLPPWGYLPTRVDGEWRLVPDPVQRERILEVYHRVVVNHEPLHLVAHDLNRRGVLSPKDYFAQLRGREPQGRKWSATALKRSMTSEAMLGYATLNGKTVRDDDGAPLVRAEPILTREQREALRAELVKTSRAEPAVSTPSLLLRVLFCAVCGEPAYKFAGGGRKHPRYRCRSMGFPKHCGNGTVAMAEWDAFCEKQVLDLLGDAERLEKVWVAGSDSAVELAEVNAELVDLTSLISSPAYRAGSPQREALDARIAALAARQEELEGLEARPSGWEWRETGQRFGDWWREQDTAAKNTWLRSMNVRLTFDVRGGLTRTIDFGDLQEYEQHLRLGSVVERLRTGMS

SEQ ID NO: 11438 - protein, 500 aa, synthetic construct
MRALVVIRLSRVTDATTSPERQLESCQQLCAQRGWDVVGVAEDLDVSGAVDPFDRKRRPNLARWLAFGEQPFDVIVAYRVDRLTRSTRHLQQLVRWAEDHKKLVVSATEAHFDTTTPFAAVVIALMGTVAQMELEAIRERNRSAAHFNIRAGKYRGSLPPWGYLPARVDGEWRLVPDPVQRERIFEVYHRVVDNHEPLHLVAHDLNRRGVLSPKDYFAQLRGREPQGRKWSATALKRSMTSEAMLGYATLNGKTVRDDDGAPLVRAEPILTREQLEALRAELVKTSRAKPAVSTPSLLLRVLFCAVCGEPAYKFAGGGRKHPRYRCRSMGFPKHCGNGTVAMAEWDAFCEEQVLGLLGDAERLEKVWVAGSDSAVELAEVNAELVDLMSLIGSPAYRAGSPQREALDARIAALAARQEELEGLEARPSGWEWRETGQRFGDWWREQDTAAKNTWLRSMNVRLTFDVRGGLTRTIDFGDLQEYEQHLRSGSVVERLHSGMS

SEQ ID NO: 11439 - protein, 500 aa, synthetic construct
MRALVVIRLSRVTDATTSPERQLESCQQLCAQRGWDVVGVAEDLDVSGAVDPFDRKRRPNLARWLAFGEQPFDVIVAYRVDRLTRSVRHLQQLVHWAEDHKKLVVSATEAHFDTTTPFAAVVIALMGTVAQMELEAIKERNRSAAHFNIRAGKYRGSLPPWGYLPTRVDGEWRLAPDPVQRERILEVYHRVVDNHEPLHLVAHDLNRRGVLSPKDYFAQLQGREPQGRKWSATALKRSMTSEAMLGYATLNGKTVRDDDGAPLVRAEPILTRGQLEALRAELVKTSRAKPAVSTPSLLLRVLFCAVCGEPAYKFAGGGRKHPRYRCRSMGFPEHCGNGTVAMAEWDAFCEEQVLDLLGDAERLEKVWVAGSDSAVELAEVNAELVDLTSLIGSPAYRAGSLQREALDARIAALAARQEELEGLEARPSGWEWRGTGQRFGDWWREQDTATKNAWLRSMNVRLTFDVRGGLTRTIDFGDLQEYEQHLRLGSVVERLHTGMS

SEQ ID NO: 11440 - protein, 500 aa, synthetic construct
MRALVVIRLSRVTDTTTSPERQLESCQQLCAQRGWDVVGVAEDLDVSGAVDPFDRKRRPNLARWLAFEEQPFDVIVAYRVDRLTRSTRYLQQLVHWAEDHKKLVVSATEAHFDTTTPFAAVVIALMGTVAQMELEAIKERSRSAAHFNIRAGKYRGSLPPWGYLPARVDGEWRLVPDPVQRERILEVYHRVVVNHEPLHSVAHDLNRRGVLSPKDYFAQLRGREPQGRKWSATALKRSLISEAMLGYATLNGKTVRDDDGAPLVRAGPILTREQLEALRAELVKTSRAKPAVSTPSLLLRVLFCAVCGGPAYKFAGGGRKHPRYRCRSMGFPKHCGNGTVAMAQWDTFCEEQVLNLLGDAERLEKVWVAGSDSAVELAEVNAELVDLTSLVGSPAYRAGSPQREALDARIAALAARQEELEGLEARPSGWEWRETGQRFGDWWRVQDTAAKNTWLRSMNVRLTFDVRGGLTRTIDFGDLQEYKQHLRLGSVVERLHTGMS

SEQ ID NO: 11441 - protein, 500 aa, synthetic construct
MRALVVIRLSRVTDATTSPERQLESCQQLCAQRGWDVVGVAEDLDVSGAVDPFDRKRRPNLARWLAFEEQPFDVIVAYRVDRLTRSIRHLQQLVHWAEDHKKLVVSATEAHFDMTTPFAAVVIALMGTVAQMELEAIKERSRSAAHFNIRAGKYRGSLPPWGYLPARVDGEWRLVPDPVQRERILEVYRRVVDNHEPLHLVAHDLNRRGVLSPKDYFAQLRGREPQGRKWSATALKRSMTSEAMLGYATLNGKTVRDDDGAPLVRAEPILTREQLEALRAELVKTSRAKPAVSTPSLLLRVLFCAVCGEPAYKFSGGGRKHPRYRCRSMGLPKHCGNGTVAMAEWDAFCEEQVLDLLGDAERLEKVWVAGSDSAVELAEVNAELVDLTSLIGSPAYRAGSPQREALDARIAALAARQEELEGLEARPSGWEWRETGQRFGDWWREQDTAARNTWLRSMNVRLTFDVRGGLTRTIDFGDLQEYEQHLRLGSVVERLHTGMS

SEQ ID NO: 11442 - protein, 500 aa, synthetic construct
MRALVVIRLSRVTDATTSPERQLESCQQLCAQRGWDVVGVAEDLDVSGAVDPFDRKRRPNLARWLAFEEQPFDVIVAHRVDRLTRSTRHLQQLVHWAEDHKKLVVSATEAHFDTTTPFAAVVIALMGTVAQMELEAIKERNRSAAHFNIRAGKYRGSLPPWGYLPTRVDGEWRLVPDPVQRERILEVYHRVVDNHEPLHLVAHDLNRRGVLSPRDYFAQLQGREPQGRKWSATALKRSMISGAMLGYATLNGKTVRDDDGAPLVRAEPILTREQLEALRAELAKTSRAKPAVSTPSLLLRVLFCAVCGEPAYKFSGGGRKHPRYRCRSMGFPKHCGNGTVAMVEWDAFCEEQVLDLLGDAERLEKVWVAGSDSAVELAEVNAELVDLTSLIGSPAYRAGSPQREALDARIAALAAHQAELEGLEARPSGWEWRETGQGFGDWWREQDTAAKNTWLRSMNVRLTFDVRGGLTRTIDFGDLQEYEQHLRLGGVVERLHTGMS

SEQ ID NO: 11443 - protein, 500 aa, synthetic construct
MRALVVIRLSRVTDATTSPERQLESCQQLCAQRGWDVVGVAEDLDVSGAVDPFDRKRRPNLARWLAFEEQPFDVIVAYRVDRLTRSTRHLQQLVHWAEDHRKLVVSATEAHFDTTTPFAAVVIALMGTVAQMELEAIKERSRSAAHFNIRAGKYRGSLPPWGYLPTRVDGEWRLVPDPVQHERILEVYHRVVDNHEPLHLVAHDLNRRGVLSPKDYFAQLQGREPQGRKWSATALKRSMISEAMLGYATLNGKTVRDDDGAPLVRAEPILTREQQEALRAELAKTSRAKPAVSTPSLLLRVLFCAVCGEPAYKFAGGGRKHPRYRCRSMGFPKHCGNGTVAMAEWDAFCEEQVLNLLGDAERLEKVWVAGADSAVELAEVNAELVDLTSLIGSPAYRAGSTQREALDARIAALAARQEELEGLEARPSGWEWRGTGQRFGDWWREQDTAAKNTWLRTMNVRLTYDVRGGLTRTIDFGDLQEYEQHLRSGSVVERLHTGMS

SEQ ID NO: 11444 - protein, 500 aa, synthetic construct
MRALVVIRLSRVTDTTTSPERQLESCQQLCAQRGWDVVGVAEDLDVSGAVDPFDRKRRPNLARWLAFEERPFDVIVAYRVDRLARSIRHLQQLVHWAEDHKKLVVSATEAHFDTTTPFAAVVIALMGTVAQMELEAIKERSRSAAHFNIRAGKYRGSLPPWGYLPTRVDGEWRLAPDPVQRERILEVYHRVVDDHEPLHLVARDLNRRGVLSPKDYFAQLQGREPQDRKWSATALKRSMISEAMLGYVTLNGKIVRDDDGAPLVRAEPILTREQLEALRAELVKTSRAKPAVSTPSLLLRVLFCAVCGEPAYKFAGGGRKHPRYRCRSMGFPKHCGNGTVAMAEWDAFCEEQVLDLLGDAERLEKVWVAGSDSAVELAEVNAELVDLTSLIGSPAYRAGSPQREALDTRIAALAARQEELGSLEARPTGWEWRETGQRFGDWWREQDTAAKNTWLRSMNVRLTFDVRGGLTRTIDFGDLQEYEQHLRLGSAVERLHTGMS

SEQ ID NO: 11445 - protein, 500 aa, synthetic construct
MRALVVIRLSRVTDATTSPERQLESCQQLCAQRGWDVVGVAEDLDVSGAVDPFDRKRRPNLARWLAFEEQPFDVIVAYRVDRLTRSIRHLQQLVHWAEDHKKLVVSATEAHFDMTTPFAAVVIALMGTVAQMELEAIKERSRSAAHFNIRAGKYRGSLPPWGYLPTRVDGEWRLAPDPVQRERILEVYHRVVDNHEPLHLVAHDLNRRGVLSPKDYFAQLQGREPQGRKWSATALKRSMISVAMLGYATLNGKTVRNDDGVPLVRAEPILTREQLEALRAELVKTSRAKPAVSTPSLLLRVLFCAVCGEPAYKFAGGGRKHPRYRCRSMGFPKHCGNGTVAMAEWDAFCEEQVLGLLGDVERLEKVWVAGSDSAVKLAEVNAELVDLAGLIGSPAYRAGSPQREALDARIAALAARQEELEGLEARPSGWEWRGTGQRFGDWWREQDTAAKNTWLRSMNVRLTFDVRGGLTRTIDFGDLQEYEQHLRLGSVVERLHTGMS

SEQ ID NO: 11446 - protein, 500 aa, synthetic construct
MRALVVIRLSRVTEATTSPERQLESCQQLCAQRGWDVVGVAEDLDVSGAVDPFDRKRRPNLARWLAFEEQPFDVVVAYRVDRLARSIRHLQQLVHWAEDHKKLVVSATEAHFDTTTPFAAVVIALMGTVAQMELEAIKERSRSAAHFNIRAGKYRGSLPPWGYLPSRVDGEWRLVPDPVQRERILEVYHRVVDNHEPLHLVAHDLNRRGVLSPKDYFAQLQGREPQGRKWSATALKRSMISEAMLGHATLNGKTVRDDDGAPLVRAEPILTRGQLEALRAELVKTSRAKPAVSTPSLLLRVLFCAVCGEPAYKFSGGGRKHPRYRCRSMGFPKHCGNGTVAMAEWDAFCEEQVLDLLGDAERLEKVWVAGSDSAVELAEVNAELVDLTSLIGSPAYRAGSPQREALDARIAALAARQEELEGLEARPSGWEWRETGQRFGDWWREQDTAAKNTWLRSMNVRLTFDVRGGLTRTIDFGDLQEYEQHLRLGSVVERLHTGMS

SEQ ID NO: 11447 - protein, 500 aa, synthetic construct
MRALVVIRLSRVTDATTSPERQLESCQQLCAQRGWDVVGVAEDLDVSGAVDPFDRKRRPNLARWLAFEEQPFDVIVAYRVDRLARSIRYLQQLVHWAEDHKKLVVSATEAHFDTTTPFAAVVIALMGTVAQMELEAIKERSRSAAHFNIRAGKYRGSLPPWGYLPARVDGEWRLVPDPVQRERILEVYHRVVDNHEPLHLVAHDLNRRGVLSPKDYFAQLRGREPQGRKWSATALKRSIISEVMLGYATLNGKTVRDDDGAPLVRAEPILTREQLEAVRAELVKASRAKPAVSTPSLLLRVLFCAVCGEPAYKFVGGGRKHSRYRCRSMGFPKHCGNGTVAMAEWDAFCEEQILNLLGDAERLEKVWVAGSDSAVELAEVNAELVDLTSLIGSPAYRAGSPQREALDARIAALAARQEELEGLEARPSGWEWRGTGQRFGDWWREQDTAAKNTWLRSMNVRLTFDVRGGLTRTVDFGDLQEYEQHLRLGSVVERLHTGMS

SEQ ID NO: 11448 - protein, 500 aa, synthetic construct
MRALVVIRLSRVTDATTSPERQLESCQQLCAQRGWDVVGVAEDLDVSGAVDPFDRKRRPNLARWLAFEEQPFDVIVAYRVDRLTRSIRHLQQLVHWAEDHKKLVVSATEAHFDTTTPFAAVVIALMGTVAQMELEAIRERSRSAAHFNIRAGKYRGSLPPWGYLPTRVDGEWRLVPDPVQRERILEVYHRVVVNHEPLHLVAHDLNRRGVLSPKDYFAQLQGREPRGRKWSATALKRSMISGAMLGYATLDGKTVRDNDGAPLVRAEPILTREQQEALRAELVKTSRAKPAVSTPSLLLRVLFCAVCGEPAYKFAGGGRKHPRYRCRSMGFPKHCGNGTVAMAEWDAFCEEQVLGLLGDAERLEKVWVAGSDSAVELAEVNAELVDLTSLIGSPAYRADSPQRETLDARIAALAARQEELEGLEARPSGWEWRETGQRFGDWWREQDIAAKNTWLRSMNVRLTFDVRGGLTRTIDLGGLQEYEQHLRLGSVVERLHTGMS

SEQ ID NO: 11449 - protein, 500 aa, synthetic construct
MRALVVIRLSRVTDATTSPERQLESCQQLCAQRGWDVVGVAEDLDVSGAVDPFDRKRRPNLARWLAFEEQPFDVIVAYRVDRLTRSARHLQQLVHWAEDHRKLVVSATEAHFDTTTPFAAVVIALMGTVAQMELEAIKERSRSAAHFNIRAGKYRGSLPPWGYLPTRVDGEWRLVPDPVQHERILEVYHRVVDNHEPLHLVAHDLNRRGVLSPKDYFAQLQGREPQGRKWSATALKRSMISEAMLGYATLNGKTVRDDDGAPLVRAEPILTREQQEALRAELVKTSRAKPAVSTPSLLLRVLFCAVCGEPAYKFAGGGRKHPRYRCRSMGFPKHCGNGTVAMAEWDAFCEEQVLNLLGDAERLEKVWVAGADSAVELAEVNAELVDLTSLIGSPAYRAGSTQREALDARIAALAARQEELEGLEARPSGWEWRGTGQRFGDWWREQDTAAKNTWLRTMNVRLTYDVRGGLTRTIDFGDLQEYEQHLRSGSVVERLHTGMS

SEQ ID NO: 11450 - protein, 500 aa, synthetic construct
MRALVAIRLSRVTDATTSPERQLESCQQLCAQRGWDVVGVAEDLDVSGAVDPFDRKRRPNLARWLAFEEQPFDVIVAYRVDRLTRSTRHLQQLVHWAEDHKKLVVSATEAHFDTTTPFAAVVIALMGTVAQMELEAIKERSRSAAHFNIRAGKYRGSLPPWGYLPTRVDGVWRLVPDPVQRERILEVYHRVVDNHEPLHLVAHDLNRRGVLSPKDYFAQLRGREPQGRRWSATALKRSMISGAMLGYATLNGKTVRDDDGAPLVRAEPILTREQLEALRAELVKSSRAEPAVSTPSLLLRVLFCAVCGEPAYKFAGGGRKHPRYRCRSMGFPKHCGNGTVAMAEWDTFCEEQVLDLLGDAERLEKVWVAGSDSAVELAEVNAELVDLTSLIGSPAYRAGSPQREALDARIAALAARQEELEGLEARPSGWEWRETGQRFGDWWREQDTVAKNTWLRSMNVRLTFDVRGGLTRTIDFGDLQEYEQHLRLGSVVERLHTGTS

SEQ ID NO: 11451 - protein, 500 aa, synthetic construct
MRALVVIRLSRVTDATTSPERQLESCQQLCAQRGWDVVGVAEDLDVSGAVDPFDRKRRPNLARWLAFEEQPFDVIVAYRVDRLTRSTRRLQQLVHWAEDHKKLVVSATEAHFDTTTPFAAVVIALMGTVAQMELEAIKERSRSAAHFNIRAGKYRGSLPPWGYLPTRVDGEWRLAPDPVQRKRILEVYHRVVDNHEPLHLVAHDLNRCGVLSPKDYFAQLRGREPQGRKWSATALKRSMISEAMLGYATLNGKTVRDGDGAPLVRAEPILTREQLGALRAELVKTSRAKPAVSTPSLLLRVLFCAVCGEPAYKFTGGGRKHPRYRCRSMGFPKHCGNGTVAMAEWDAFCEEQVLNLLGDAERLEKVWVAGSDFAVELAEVNAELVDLTSLIGSPAYRAGSPQREALDARIAALAARQEELESLEARPSGWEWRETGQRFGDWWREQGTAAKNTWLRSMNVRLTFDVRGGLTRTIDFGDLQEYEQHLRLGSVVERSHTGMS

SEQ ID NO: 11452 - protein, 500 aa, synthetic construct
MRALVVIRLSRATDATTSPERQLESCQQLCAQRGWDVVGVAEDLDVSGAVDPFDRKRRPNLARWLAFEERPFDVIVAYRIDRLARSIRHLQQLVHWAEDHKKLVVSATEAHFDTTTPFAAVVIALMGTVAQMELEAIKERNRSAAHFNIRAGKYRGSLPPWGYLPTRVDGEWRLVPDPVQRERILEVYHRVVDNHEPLHLVAHDLNRRGILSPKDYFAQLRGREPQGRKWSATALKRSMISEAMLGYATLNGKTVRDDDGAPLVRAEPILTREQLEALRAELAKTSRAMPAVSTPSLLLRVLFCAVCGEPAYKFAGGGRKHPRYRCRSMGFPEHCGNGTVAMAEWDAFCEEQVLGLLGDAERLEKVWVAGSDSAVELAEVNAELVDLTSLIGSPAYRAGSPQREALDARIAALAARQEELEGLEARPSGWEWRETGQRFGDWWREQDTAAKNTWLRSMNVRLTFDVRGGLTRTIDFGDLQEYEQHLRLGSAAERLLTGMS

SEQ ID NO: 11453 - protein, 500 aa, synthetic construct
MRALVVIRLSRVTDATTSPERQLESCQQLCAQRGWDVVGVAEDLDVSGAVDPFDRKRRPNLARWLAFEEQPFDVIVAYRVDRLARSIRHLQQLVHWAEDHKKLVVSATEAHFDTTTPFAAVVIALMGTVAQMELEAIKERNRSAAHFNIRAGKYRGSLPPWGYLPTRVDGEWRLVPDPVQRERILEVYRRVVDNHEPLHLVAHDLNRRGVLSPKDYFAQLRGREPQGHKWSATALKRSMISEAMLGYATLNGKTVRGDDGAPLVRAEPILTREQLEALRAELVKTSRAKPAVSTPSLLLRVLFCAVCGEPAYKFAGGGRKHPRYRCRSMGFPKHCGNGTVAMAEWDAFCEEQVLNLLGDAERLEKVWVAGSDSAVELAEVNAELVDLTSLIGSPAYRAGSPQREALDARIAALAARQEELEGLEARPSGWEWRETGQRFGDWWREQDAAAKNTWLRSMNVRLTFDVRGGLTRTIDLGDLQEYEQHLRLGSAVERLHAGMS

SEQ ID NO: 11454 - protein, 500 aa, synthetic construct
MRALVVIRLSRVTDATTSPERQLESCQQLCAQRGWDVIGVAEDLDVSGAVDPFDRKRRPNLARWLAFEEQPFDAIVAYRVDRLTRSIRHLQQLVHWAEDHKKLVVSATEAHFDTTTPFAAVVIALMGTVAQMELEAIKERSRSAAHFNIRAGKYRGSLPPWGYLPTRVDGEWRLVPDPVQRERILEVYHRVVDNHEPLHLVAHDLNRRGVLSPRDYFAQLQGREPQGRKWSATALKRSMISVAMLGYATLNGKTVRDDDGAPLVRAEPILTREQLEALRAELVKTSRAKPAVSTPSLLLRVLFCAVCGEPAYKFAGGGRKHPRYRCRSMGFPKHCGNGTVAMAEWDAFCEEQVLGLLGDAERLEKVWVAGSDSAVELAEVNAELVDLTSLIGSPAYRAGSPQREALDARIATLAARQEELEGIEARPSGWKWCETGQRFGDWWREQDTAAKNAWLRSMNVRLTFDVRGGLTRTIDFGDLQEYERHLRLSSVVERLHTGMP

SEQ ID NO: 11455 - protein, 500 aa, synthetic construct
MRALVVIRLSRVTDATTSPERQLESCQQLCAQRGWDVVGVAEDLDVSGAVDPFDRKRRPNLARWLAFEEQPFDVIVAYRVDRLTRSIRHLQQLVHWAEDHKKLVVSATEAHFDMTTPFAAVVIALMGTVAQMELEAIKERNRSAAHFNIRAGKYRGSLPPWGYLPTRVDGEWRLAPDPVQRERILEVYHRVVDNHEPLHLVAHDLNRRGVLSPKDYFAQLQGREPQGRKWSATALKRSMISEAMLGHATLNGKTVRDGDGAPLVRAEPILTREQLKALRAELVKTSRAKPAVSTPSLLLRVLFCAVCGEPAYKFSGGGRKHPRYRCRSMGFPKHCGNGTVAMAEWDAFCEEQVLDLLGDAERLEKVWVAGSDSAAELAEVNAELVDLTSLIGSPAYRAGSPQREALDARIAALAARQEELEGLEARPSGWEWRETGQRFGDWWREQDTAAKNTWLRSMNVRLTFDARGGLTRTIDFGDLQEYEQHLRLGSVVERLHAGMS

SEQ ID NO: 11456 - protein, 500 aa, synthetic construct
MRALVVIRLSRVTDATTSPERQLESCQQLCAQRSWDVVGVAEDLDVSGAVDPFDRKRRPNLARWLAFEEQPFDVIVAYRVDRLARSIRHLQQLVHWAEDHKKLVVSATEAHFDTTTPFAAVVIALMGTVAQMELEAIKERSRSAAHFNIRAGKYRGSLPPWGYLPTRVNGEWRLVPDPVQRERILEVYHRVVDNHEPLHLVAHDLNRRGVLSPRDYFAQLQGREPQGRKWSATALKRSMISGAMLGYATLNGKTVRDDDGAPLVRAEPVLTRGQQEALRAELAKTSRAKPAVSTPSLLLRVLFCAVCGEPAYKFSGGGRKHPRYRCRSMGFPKHCGNGTVAMVEWDAFCEEQVLDLLGDAERLEKVWVAGSDSAVELAEVNAELVDLTSLIGSPAYRAGSPQREALDARVAALTARQEELKGLEARPSGWEWRETGQRFGDWWREQDTAAKNAWLRSMNVRLTFDVRGGLTRTIDFGDLQEYEQHLRLGSVVERLHTGMS

SEQ ID NO: 11457 - protein, 500 aa, synthetic construct
MRALVVIRLSRVTDATTSPERQLESCQRLCAQRGWDVVGVAEDLDVSGAVDPFDRKRRPNLARWLAFEEQPFDVIVAYRVDRLARSIRHLQQLVHWAEDHKKLVVSATEAHFDTTTPFAAVVIALMGTVAQMELEAIKERSRSAAHFNIRAGKYRGSLPPWGYLPTRVDGEWRLAPDPVQRERILEVYHRVVDNHEPLHLVAHDLNRRGVLSPRDYFAQLQGREPQGRKWSATALKRSMTSEAMLGYATLNGKTVRGDDGAPLVRAEPILTREQLEALRAELVKTSRAKPAVSTPSLLLRVLFCAVCGEPAYKFAGGGRKHPRYRCRSMGFPKHCGNGTVAMAEWDTFCEEQVLDLLGDVERLEKVWVAGSDSAVELAEVNAELVDLTSLIGSPAYRAGSPQREALDARIAALAARQEELEGLEARPSGWEWRETGQRFGDWWREQDTAAKNTWLRSMNVRLTFDVRGGLTRTIGFGDLQEYEQHLRLGSVVERLHTGMS

SEQ ID NO: 11458 - protein, 500 aa, synthetic construct
MRALVVIRLSRVTDATTSPERQLESCQQLCTQRGWDVVGVAEDLDVSGAVDPFDRKRRPNLARWLAFEEQPFDVIVAYRVDRLARSIRHLQQLVHWAEDHKKLVVSATEAHFDTTTPFAAVVIALMGTVAQMELEAIKERNRSAAHFNIRAGKYRGSLPPWGYLPTRVDGEWRLVPDPVQRERILEVYHRVVDKHEPLHLVAHDLNRRGVLSPRDYFAQLRGREPQGRKWSATALKRSMISEAMLGYATLNGKTVRDDDGAPLVRAEPILTREQQEALRAELVKTSRAKPAVSTPSLLLRVLFCAVCGEPAYKFAGGGRKHPRYRCRSMGFLKHCGNGTVAMAEWDAFCEEQVLDLLGDAERLEKVWVAGSDSAVKLAEVSAELVDLTSLIGSPAYRAGSPQREALDARIAALAARQVELEGLEARPSGWEWRETGQRFGDWWREQDTAAKNTWLRSMNVRLTFDVRGGLTRTIDFGDLQEYEQHLRLGGVVERLHTGMP

SEQ ID NO: 11459 - protein, 500 aa, synthetic construct
MRTLVVIRLSRVTDATTSPERQLESCQQLCAQRGWDVVGVAEDLDVSGAVDPFDRKRRPNLARWLAFEEQPFDVIVAYRVDRLTRSIRHLQQLVHWAEDHKKLIVSATEAHFDTTTPFAAVVIALMGTVAQMELEAIKERNRSAAHFNIRAGKYRGSLPPWGYLPTRVDGEWRLVPDPVQRERILEVYHRVVDNHEPLHLVAYDLNRRGVLSPKDYFAQLRGREPQGRKWSVTALKRSMISEAMLGHATLNGKTVRSDDGAPLVRAEPILTREQQEALRAELVKTSRAKPAVSTPSLLLRVLFCAVCGEPAYKFAGGGRKHPRYRCRSMGYPKHCGNGTVAMAEWDAFCEEQVLDLLGDAERLEKVWVAGSDSAVELAEVNAELVDLASLIGSPAYRAGSPQREALDARIAALAARQEELEGLEARPSGWEWRGTGQRFGDWWREQDTAAKNTWLRSMNVRLTFDVRGGLTRTIDFGDLREYEQHLRLGSVVERLHTGMS

SEQ ID NO: 11460 - protein, 500 aa, synthetic construct
MRALVVIRLSRVTDATTSPERQLESCQQLCAQRGWDVVGVAEDLDVSGAVDPFDRKRRPNLARWLAFEEQPFDVIVAYRVDRLTRSVRHLQQLVHWAEDHKKLVVSATEAHFDTTTPFAAVVIALMGTVAQMELEAIKERSRSAAHFNIRAGKYRGSLPPWGYLPARVDGEWRLVPDPVQRERILEVYHRVVDNHEPLHLVAHDLNRRGVLSPKDYFAQLRGREPQGRKWSATALKRSMISVAMLGYATLCGKTVRDDDGAPLVRAEPILTREQLEALRAELVKTSRAKPAVSTPSLLLRVLFCAVCGEPAYKFAGGGRKHPRYRCRSMGFPKHCGNGTVAMAEWDAFCEEQVLNLLGDAERLEKVWVAGSDSAVELAEVNKELVDLTSLIGSPAYHAGSPQREALDARIAALAARQEELEGSEAHPSGWEWRGTGQRFGDWWREQDTAAKNTWLRSMNVRLTFDVRGGLTRTIDFGDLQEYEQRLRLGSVVERLHTGMS

SEQ ID NO: 11461 - protein, 500 aa, synthetic construct
MRALVVIRLSRVTDATTSPERQLESCLQLCAQRGWDVVGVAEDLDVSGAVDPFDRKRRPNLARWLAFEEQPFDVIVAYRVDRLTRSTRHLQQLVHWAEDHKKLVVSATEAHFDTTTPFAAVVIALMGTVAQMELEAIKERNRSAAHFNIRAGKYRGSLPPWGYLPARVDGEWRLVPDPVQRERILEVYHRVVDNHEPLHLVAHDLNRRGVLSPKDYFAQLRGRGPQGRRWSATALKRSMTSEAMLGYATLNGKTVRGDDGAPLVRAEPILTREQLEALRAELVKTSRAKPAVSTPSLLLRVLFCAVCGEPAYKFAGGGRKHPRYRCRSMGFPKHCGNGTVAMAEWDAFCEEQVLDLLGDAERLEKVWVAGSDSAVELAEVNAELVDLTSLIGSPTYRAGSPQREALDARIAALAARQEELEGLEARPSGWEWRETGQRFGDWWREQDTAAKNTWLRTMNVRLTFDVRGGLTRTIDFGDLQEYEQHLRLGSVVERLHTGMS

SEQ ID NO: 11462 - protein, 500 aa, synthetic construct
MRALVVIRLSRVTDATTSPERQLESCRQLCAQRGWDVVGVAEDLDVSGAVDPFDRKRRPNLARWLAFEEQPFDVIVAYRVDRLTRSTRHLQQLVHWAEDHKKLVVSATEAHFDTTTPFAAVVIALMGTVAQMELEAIKERNRSAAHFNIRAGKYRGSLPPWGYLPTRVDGEWRLVPDPVQRERILEVYHRVVDNHEPLHLVAHDLNRRGVLSPKDYFAQLQGREPQGRKWSATALKRSMISVAMLGYATLNGKTVRDDDGAPLVRAEPILTREQLEALRAELVKTSRAKPAVSTPSLLLRVLFCAVCGEPAYKFAGGGRKHPRYRCRSMGFPKHCGNGTVAMAEWDAFCEEQVLSLLGDAERLEKVWVAGSDSAVELAEVNAELVDLSSLIGSPAYRAGSPQREALDARIAALAARQEELEGLEARPSGWEWRETGQRFGDWWREQDTVAKNTWLRSMNVRLTFDVRGGLTRTIDFGDLREYEQHLRLGSVVERLHTGMS

SEQ ID NO: 11463 - protein, 500 aa, synthetic construct
MRALVVIRLSRVTDATTSPERQLESCQQLCAQRGWDVVGVAEDLDVSGAVDPFDRKRRPNLARWLASEEQPFDVIVAYRVDRLARSIRHLQQLVHWAEDHKKLVVSATEAHFDTTTPFAAVVIALMGTVAQMELEAIKERSRSAAHFNIRAGKYRGSLPPWGYLPTRVDGEWRLVPDPVQRERILEVYHRVVDNHEPLHLVAHDLNRRGVLSPRDYFAQLRGREPQGRKWSATALKRSMISEAMLGYATLNGRTVRDDDGAPLVRAEPILTREQLEALRAELVKTSRAKPAVSTPSLLLRVLFCAVCGEPAYKFAGGGRKHPRYRCRSMGFPKHCGNGTVAMAEWDAFCEEQVLDLLGDAERLKKVWVAGSDSAAELAEVNAELVDLTSLVGSSAYRAGSPQREALDARIAALAARQEELEGLEARLSGWEWRETGQRFGDWWREQDTAAKNTWLRSMNVRLTFDVRGGLTRTIDFGDLREYEQHLRLGSVVERLHTGMS

SEQ ID NO: 11464 - protein, 500 aa, synthetic construct
MRALVVIRLSRVTDATTSPERQLESCQQLCAQRGWDVVGIAEDLDVSGAVDPFDRKRRPNLARWLAFEELPFDAIVAYRVDRLTRSIRHLQQLVHWAEDHKKLVISATEAHFDTTTPFAAVVIALMGTVAQMELEAIKERNRSAAHFNIRAGKYRGSLPPWGYLPTRVDGEWRLAPDPVQRERILEVYHRVVDNHEPLHLVAHDLNRRGVLSPKDYFAQLRGREPQGRKWSATALKRSMTSEAMLGYATLNGKTVRDDDGAPLVRAEPILTRGQLEALRAELVKTSRAKPAVSTPSLLLRVLFCAVCGEPAYKFAGGGRKHPRYRCRSMGFPKHCGNGTVAMAEWDAFCEEQVLDLLGDAERLEKVWVAGSDSAVELAEVNAELVDLTSLIGSPAYRAGSPQREALDARIAALAARQEELEGLEARPSGWEWRETGQRFRDWWREQDTAAKNTWLRSMNVRLTFDVRGGLTRTVDFGDLQEYEQHLRLGSVVERLHTGMS

SEQ ID NO: 11465 - protein, 500 aa, synthetic construct
MRALVVIRLSRVTDATTSPERQLESCQQLCAQRGWDVVGVAEDLDVSGAVDPFDRKRRPNLARWLAFEEQPFDAIVAYRVDRLTRSIRHLQQLVHWAEDHKKLVVSATEAHFDTTTPFAAVVIALMGTVAQMELEAIKERNRSAAHFNIRAGKYRGSLPPWGYLPARVDGEWRLVPDPVQRERILEVYHRVVDNHEPLHLVAHDLNRRGVLSPKDYFAQLRGREPQGRKWSATALKRSMISEAMLGYATLNGKTVRDDDGVPLVRAEPILTREQLEALRAELVKTSRAKPAVSTPSLLLRVLFCAVCGEPAYKFAGGGRKHPRYRCRSMGFPKHCGNGTVAMAEWDAFCEEQVLDLLGDAERLEKVWVAGSDSAVELAEVSAELVDLTSLIGSPAYRAGSPQREALDARIAALAARQGELEGLEARPSGWEWRETGQRFGDWWREQDTAAKNTWLRSMNVRLTFDVRGGLTRTIDFGDLQEYEQHLRSGSAVERLHTGMS

SEQ ID NO: 11466 - protein, 500 aa, synthetic construct
MRALVVIRLSRVTDATTSPERQLESCQQLCAQRGWDVVGVAEDLDVSGAVDPFDRKRRPNLARWLAFEEQPFDVIVAYRVDRLARSIRHLQQLVHWADDHKKLVVSATEAHFDTTTPFAAVVIALMGTVAQMELEAIKERSRSAAHFNIRAGKYRGSLPPWGYLPARVDGVWRLVPDPVQRERILEVYHRVVNNHEPLHLVAHDLNRRGVLSPKDYFAQLQGREPQGRKWSATALKRSMISEAMLGYATLNGKTVRDDDGAPLVRAEPILTREQQEALRVELVKTSRAKPAVSTPSLLLRVLFCAVCGEPAYKFAGGGRKHPRYRCRSMGFPKHCGNGTVAMAEWDAFCEEQVLGLLGDAERLEKVWVAGSDSAVELAEVNAELVDLTSLIGSPAYRAGSPQREALDARIAALAARQEELEGLEARPSGWEWRETGQRFGDWWREQDTAARNTWLRSMNVRLTFDVRGGLTRTIDFGDLQECEQYLRLGSMVERLHTGMS

SEQ ID NO: 11467 - protein, 500 aa, synthetic construct
MRALVVIRLSRVTDATTSPERQLVSCQQLCAQRGWDIVGVAEDLDVSGAVDPFDRKRRPNLARWLAFEEQPFDVIVAYRVDRLTRSTRHLQQLVHWAEDHKKLVVSATETHFDTTTPFAAVVIALMGTVAQMELEAIKERNRSAAHFNIRAGKYRGSLPPWGYLPTRVDGEWRLAPDPVQRERILEVYHRVVDNHEPLHLVAHDLNRRGVLSPKDYFAQLQGREPQGRKWSATALKRSMTSEAMLGYATLNGKTVRDDDGAPLVRAEPILTREQLEALRAELVKTSRAKPAVSTPSLLLRVLFCAVCGEPAYKFSGGGRKHPRYRCRSMGFPKHCGNGTVAMAEWDTFCEEQVLDLLGDAERLEKVWVAGSDSAVELAEVNAELVDLTSLIGSPAYRAGSPQREALDARIAALATRQAELEGLEARPSGWEWRETGQGFGDWWREQDTAAKNTWLRSMNVRLTFDVRGGLTRAIDFGDLQEYEQHLRLGSVVERLHTGMS

SEQ ID NO: 11468 - protein, 500 aa, synthetic construct
MRALVVIRLSRVTDATTSPERQLESCQQLCAQRGWDVVGVAEDLDVSGAVDPFDRKRRPNLARWLAFEEQPFDVIVAYRVDRLTRSIRHLQQLVHWAEDHKKLVVSATEAHFDTTTPFAAVVIALMGTVAQMELEAIKERSRSAAHFNIRAGRYRGSLPPWGYLPARVDGEWRLVPDPVQRERILEVYHRVVDDHEPLHLVAHDLNRRGVLSPKDYFAQLRGREPQGRKWSATALKRSMISEAMLGYATLNGKTVRDDDGAPLVRAEPILTREQLEALRAELVKTSRAKPAASTPSLLLRVLFCAVCGEPAYKFAGGGRKHPRYRCRSMGFPKHCGNGTVAMAEWDAFCEEQVLGLLGDAERLEKVWVAGSDSAVELAEVNAELVDLTSLIGSPAYRAGSPQREALDARIAALAARQEELEGLEARPSGWEWRETGQRFGDWWREQDTAAKNTWLRSMNVRLTFDVRGGLTRTIDFGDLQEYEQHLRLGSVAERLHTGMS

SEQ ID NO: 11469 - protein, 500 aa, synthetic construct
MRALVVIRLSRVTDATTSPERQLESCQQLCAQRGWDVVGVAEDLDVSGAVDPFDRKRRPNLARWLAFEEQPFDVIVAYRVDRLARSIRHLQQLVHWAEDHKKLVVSATEAHFDTTTPFAAVVIALMGTVAQMELEAIKERSRSAAHFNIRAGKYRGSLPPWGYLPTRVDGEWRLAPDPVQRERILEVYHRVVDNHEPLHLVAHDLNQRGVLSPRDYFAQLQGREPQGRKWSATALKRSMISEAMLGYATLNGKTVRDDDGAPLVRAEPILTREQLEALRAELVKTSRARPAVSTPSLLLRVLFCAVCGEPAYKFAGGGRKHPRYRCRSMGFPKHCGNGTVAMAEWDAFCEEQVLDLLGDAERLEKVWVAGSDSAVELAEVNAELVDLMSLIGSPAYRAGSPQREALDARIAALAARQEELEGLEARPSGWEWRGTGQRFGDWWREQDTAAKNTWLRSMNVRLTFDVRGGLTRTIDFGDLQEYEQHLRLGSVVERLHTGMP

SEQ ID NO: 11470 - protein, 500 aa, synthetic construct
MRALVVIRLSRVTDTTTSPERQLESCQQLCAQRGWDVVGVAEDLDVSGAVDPFDRKRRPNLARWLAFEEQPFDVIVAYRVDRLARSIRHLQQLVHWAEDHKKLVVSATEAHFDTTTPFAAVVIALMGTVAQMELEAIRERNRSAAHFNIRAGKYRGSLPPWGYLPTRVDGEWRLVPDPVQRERILEVYHRVVVNHEPLHLVAHDLNRHGVLSPRDYFAQLRGREPQGRKWSATALKRSMISEAMLGYATLNGKTVRDDGGAPLVRAEPILTREQLEALRAELVKTSRAKPAVSTPSLLLRVLFCAVCGEPAYKFAGGGRKHPRYRCRSMGFPKHCGNGTVAMAEWDAFCEEQVLGLLGDTERLEKVWVAGSDSAVELAEVNAELVDLTRLIGSPAYRAGSPQRKALGARIAALAARQEELEGLEARPSGWEWRETGQRFGDWWREQDTAAKNTWLRSMNVRLTFDVRGGLTRTIDFGDLQEYEQHLRLGSVVERLHTGMS

SEQ ID NO: 11471 - protein, 500 aa, synthetic construct
MRALVVTRLSRVTDATTSPERQLESCQQLCAQRGWVVVGVAEDLDVSGAVNPFDRKRRPNLARWLAFEEQPFDVIVAYRVDRLARSIRHLQQLVHWAEDHKKLVVSATEAHFDTTTPFAAVVIALMGTVAQMELEAIRERSRSAAHFNIRAGKYRGSLPPWGYLPARVDGEWRLVPDPVQRERILEVYHRVVDNHEPLHLVAHDLNRRGVLSPKDYFAQLQGREPQGRKWSATALKRSMISEAMLGYATLNGKTVRDDDGAPLVRAEPILTREQQEALRAELVKTTRAKPAVSTPSLLLRVLFCAVCGEPAYKFTGGGRKHPRYRCRSMGFPKHCGNGTVAMAEWDAFCEEQVLNLLGDAEHLEKVWVAGSDSAVELAEVNAELVDLTSLIGSPAYRAGSPQREALDARIAALAARQEELKGLEARPSGWEWRETGQRFGDWWREQDTAAKNTWLRSMNVRLTFDVRGGLTRTIDFGDLQEYEQHLRLGSAIERLHTGMS

SEQ ID NO: 11472 - protein, 500 aa, synthetic construct
MRALVVIRLSRVTDATTSPERQLESCQQLCAQRGWDVVGVAEDLDVSGAVDPFDRKRRPNLARWLAFEEQPFDVIVAYRVDRLARSIRYLQQLVHWAEDHKKLVVSATEAHFDTTTPFAAVVIALMGTVAQMELEAIKERNRSAAHFNIRAGKYRGSLPPWGYLPTRVDGEWRLAPDPVQRERILEVYHRVVDNHEPLHLVAHDLNRRGVLSPKDYFAQLQGREPRGRKWSATALKRSMISEAMLGYATLNGKTVRDDDGAPLVRAEPILTREQLEALRAELVKTSRAKPAVSTPSLLLRVLFCAVCGEPAYKFAGGGRKHPRYRCRSMGFPKHCGNGTVAMAEWDAFCEKQVLDLLGDAERLEKVWVAGSDSAVELAEVNAELVDLTSLIGSPAYRAGSPQREALDARIAVLAARQEELEDLEARPSGWEWRETGQRFGDWWREQDTAAKNTWLRSMNVRLTFDVRGGLTRTIDFGDLQAYEQHLRLGSVVERLHAGMS

SEQ ID NO: 11473 - protein, 500 aa, synthetic construct
MRALVVIRLSRVTDATTSPERQLESCQQLCAQRDWNVVGVAEDLDVSGAVDPFDRRRRPNLARWLAFEEQPFDVIVAYRIDRLTRSIRHLQQLVHWAEDHKKLVVSATEAHFDTTTPFAAVVIALMGTVAQMELEAIKERNRSAAHFNIRAGKYRGSLPPWGYLPTRVDGEWRLVPDPVQRERILEVYHRVVDNHEPLHLVAHDLNRRGVLSPRDYFAQLRGRGPQGRKWSATALKRSMISEAMLGYATLTGRTVRDDDGAPLVRAEPILTREQQETLRAELVKTSRAKPAVSTPSLLLRVLFCAVCGEPAYKFAGGGRKHLRYRCRSMGFPKHCGNGTVAMAEWDAFCEEQVLNLLGDAERLEKVWVAGSDSAVELAEVNAELVDLTRLIGSPAYRAGSPQREALDARIAALAARQEELEGLEARPSGWEWRGTGQRFGDWWREQDTAARNTWLRSMNVRLTFDVRGGLTRTIDFGDLQEYEQRLRLGGVVERLHTGMS

SEQ ID NO: 11474 - protein, 500 aa, synthetic construct
MRALVVIRLSRVTDATTSPERQLESCQQLCAQRGWDVIGVAEDLDVSGAVDPFDRKRRPNLARWLAFGEQPFDAIVAYRVDRLTRSIRHLQQLVHWAEDHKKLVVSATEAHFDTTTPFAAVVIALMGTVAQMELEAIKERSRSAAHFNIRAGKYRGSLPPWGYLPTRVDGEWRLVPDPVQRERILEVYRRVVDNHEPLHLVAHDLNRRGVLSPKDYFAQLRGREPQGRKWSATALKRSMISEAMLGYATLNGKTVRDDDGVPLVRAEPILTREQLEALRAELVKTSRAKPAVSTPSLLLRVLFCAVCGEPAYKFSGGGRKHPRYRCRSMGFPKHCGNGTVAMAEWDAFCEEQVLGLLGDAERLEKVWVAGSDSAVELAEVNAELVDLTSLIGSPAYRADSPQREALDARIAALAARQEELEGLEARPSGWEWRETGQRFGDWWREQDTAARNTWLRSMNVRLTFDVRGGLTRTIDLGGLQEYEQHLRSGSVDERLHTGMS

SEQ ID NO: 11475 - protein, 500 aa, synthetic construct
MRALVVIRLSRVTDATTSPERQLESCQQLCAQRGWDVVGVAEDLDVSGAVDPFDRKRRPNLARWLAFEEQPFDVIVAYRVDRLTRSVRHLQRLVHWAEGHKKLVVSATEAHFDTTTPFAAVVIALMGTVAQMELEAIKERSRSAAHFNIRAGKYRGSLPPWGYLPTRVDGEWRLVPDPVQRERILEVYRRVVDNHEPLHLVAHDLNRRGVLSPKDYFAQLRGREPQGRKWSATALKRSMISEAMLGYATLNGKTVRDDDGAPLVRAEPILTREQLEALRAELVKTSRAKPAVSTPSLLLRVLFCAVCGEPAYKFAGGGRKHPRYRCRSMGFPKHCGNGTVAMAEWDAFCEEQVLDLLGDAERLEKVWVAGSDSAVELAEVNAELVDLTSLIGSPAYRAGSPQREALDARIATLAARQEELEGLEARPSGWEWRETGQRFGDWWREQGTAAKNTWLRSMNVRLTFDVRGGLTRTIDFGDLQEYEQHLRLGSVVERLHTGMS

SEQ ID NO: 11476 - protein, 500 aa, synthetic construct
MRALVVIRLSRVTDTTTSPERQLESCQQLCAQRGWDVVGVAEDLDVSGAVVPFDRKRRPNLARWLAFEEQPFDVIVAYRVDRLARSIRHLQQLVHWAEDHKKLVVSATEAHFDTTTPFAAVVIALMGTVAQMELEAIKERNRSAAHFNIRAGKYRGSLPPWGYLPARVDGEWRLVPDPVQRERILEVYHRVVDNHEPLHLVAHDLNRRGVLSPKDYFAQLRGREPQGRKWSATALKRSMTSGAMLGYATLNGKTVRGDDGAPLVRAEPILTREQLEALRAELVKTSRAKPAVSTPSLLLRVLFCAVCGEPAYKFAGGGRKHPRYRCRSMGFPKHCGNGTVAMAEWDTFCEEQVLNLLGDAGRLEKVWVAGSDSAVELAEVNAELVDLTSLIGSPAYRAGSPQREALDARIAALAARQEELEGLEARPSGWEWRETGQRFGDWWREQDTAAKNTWLRSMNVRLTFDARGGLTRTVDFGDLQEYEQHLRLGSVVERLHTGMS

SEQ ID NO: 11477 - protein, 500 aa, synthetic construct
MRALVVIRLSRVTDATTSPERQLESCQQLCAQRGWDVVGVAEDLDVSGAVDPFDRKRRPNLARWLAFEEQPFDVIVAYRVDRLTRSVRHLQRLVHWAEDHKKLVVSATEAHFDTTTPFAAVVIALMGTVAQMELEAIKERSRSAAHFNIRAGKYRGSLPPWGYLPTRVDGEWRLVPDPVQRERILEVYRRVVDNHEPLHLVAHDLNRRGVLSPKDYFAQLRGREPQGRKWSATALKRSMISEAMLGYATLNGKTVRDDDGAPLVRAEPILTREQLEALRAELVKTSRAKPAVSTPSLLLRVLFCAVCGEPAYKFAGGGRKHPRYRCRSMGFPKHCGNGTVAMAEWDAFCEEQVLDLLGDAERLEKVWVAGSGSAVELAEVNAELVDLTSLIGSPAYRAGSPQREALDARIAALAARQEELEGLEARPSGWEWRETGQRFGDWWREQDTAAKNTWLRSMNVRLTFDARGGLSRTIDFGDLQEYEQHLRLGSVVERLHTGMS

SEQ ID NO: 11478 - protein, 500 aa, synthetic construct
MRALVVVRLSRVTDATTSPERQLESCQQLCAQRGWDVVGVAEDLDVSGAVDPFDRKRRPNLARWLAFEEQPFDVIVAYRVDRLARSIRHLQQLVHWAEDHKKLVVSATEAHFDTTTPFAAVVIALMGTVAQMELEAIKERSRSAAHFNIRAGKYRGSLPPWGYLPARVDGEWRLVPDPVQRERILEVYHRVVNNHEPLHLVAHDLNRRGVLSPKDYFAQLQGREPQGRKWSATALKRSMISEAMLGYATLNGKTVRDDDGAPLVRAEPILTREQLEALRAELVKTSRAKPAVSTPSLLLRVLFCAVCGEPAYKFSGGGRKHPRYRCRSMGFPKHCGNGTVAMVEWDAFCEEQVLDLLGDAERLEKVWVAGSDSAVELAEVNAELVDLTSLIGSPAYRAGSPQREALDARIAALAARQEELEGLEARPSGWEWRRTGQRFGDWWREQDTAAKNAWLRSMNVRLTFDVRGGLTRTIDFGDLQGYEQHLRLGSVVERLHTGMS

SEQ ID NO: 11479 - protein, 500 aa, synthetic construct
MRALVVIRLSRVTDATTSPERQLESCQQLCAQRGWDVVGVAEDLDVSGAVDPFDRKRRPNLARWLAFEEQPFDVIVAYRVDRLTRSTRHLQQLVHWAVDHRKLVVSATEAHFDTTTPFAAVVIALMGTVAQMELEAIKERNRSAAHFNIRAGKYRGSLPPWGYLPTRVDGEWRLVPDPVQRERILEVYHRVVDNHEPLHLVAHDLNRRGVLSPKDYFAQLRGREPQGRKWSATALKRSMISVAMLGYATLNGKTVRDDDGAPLVRAEPILTREQLEALRAELVKTSRAKPAVSTPSLLLRVLFCAVCGEPAYKFAGGGRKHPRYRCRSMGFPKHCGNGTVAMAEWDAFCEEQVLGLLGDVERLEKVWVAGSDSAVKLTEVNAELVDLTSLIGSPAYRAGSPQREALDARIAALAARQEELEGLEARPSGWEWRGTGQRFGDWWREQDTAAKNTWLRSMNVRLTFDVRGGLTRTIDFGDLQEYEQHLRLGSVVERLHTGMS

SEQ ID NO: 11480 - protein, 500 aa, synthetic construct
MRALVVIRLSRVTDATTSPERQLESCQQLCAQRGWDVVGVAEDLDVSGAVDPFDRKRRPNLARWLAFEEQPFDVIVAYRVDRLARSIRHLQQLVHWAEDHKKLVVSATEAHFDTTTPFAAVVIALMGTVAQMELEAIKERNRSAAHFNIRAGKYRGSLPPWGYLPTRVDGEWRLVPDPVQRERILEVYHRVVDNHEPLHLVAHDLNRRGVLSPKDYFAQLRGREPQGRKWSATALKRSMISEAMLGYATLNGKTVRDDDGAPLVRAEPILTREQLEALRAELVKTSRAKPAVSTPSLLLRVLFCAVCGEPAYKFAGGGRKHPRYRCRSMGFPKHCGNGTVAMAEWDAFCEEQVLDLLGDAERLEKVWVAGSDSAVELAEVNAELVDLTSLIGSPAYRAGSPQREALDARIAALTARQEELEGLETRPSGWEWRETGQRFGDWWREQDTAAKNTWLRSMNVRLTFDVRGGLTRTIDFGDLQEYEQHLRLGSVVERLHAGRS

SEQ ID NO: 11481 - protein, 500 aa, synthetic construct
MRALVVIRLSRVTDATTSPERQLESCQQLCAQRGWDVVGVAEDLDVSGAVDPFDRKRRPNLARWLAFEERPFDVIVAYRVDRLTRSIRHLQQLVHWAEDHKKLVVSATEAHFDTTTPFAAVVIALMGTVAQMELEAIRERSRSAAHYNIRAGKYRGSLPPWGYLPTRVDGEWRLAPDPVQRERILEVYHRVVDNHEPLHLVAHDLNRRGVLSPRDYFAQLQGREPQGRKWSATALKRSMISGAMLGYATLNGKTVRNDDGAPLVRAEPILTREQLGALRAELVKTSRAKPAVSTPSLLLRVLFCAVCGEPAYRFAGGGRKHPRYRCRSMGFPKHCGNGTVATAEWDAFCEEQVLNLLGGAERLEKVWVAGSDSAVELAEVNAELVDLTSLIGSPAYRAGSPQREALDARIAALAARQEELGGLEARPSGWEWRGTGQRFGDWWREQDTAAKNTWLRSMNVRLAFGVRGGLTRTIDFGDLQEYGQHLRLGSVVERLHTGMS

SEQ ID NO: 11482 - protein, 500 aa, synthetic construct
MRALVVIRLSRVTDATTSPERQLESCQQLCAQRGWDVVGVAEDLDVSGAVDPFDRKRRPNLARWLAFEGQPFDVIVAYRVDRLARSIRHLQRLVHWAEDHKKLVVSATEAHFDTTTPFAAVVIALMGTVAQMELEAIKERSRSAAHFNIRAGKYRGSLPPWGYLPTRVDGEWRLVPDPVQRERILEVYHRAVDNHEPLHLVAHDLNRRGVLSPRDYFAQLRGREPQGRKWSATALKRSMISEAMLGYATLNGKTVRGDDGAPLVRAEPILTREQLEALRAELVKTSRAKPAVSTPSLLLRVLFCAVCGEPAYKFAGGGRKHPRYRCRSMGFPKHCGNGTVAMAEWDAFCEEQVLNLLGDAERLEKVWVAGSDSAVELAEVNKELVDLTSLIGSPAYRAGSLQREALDARIAALAARQEELEGLEARPSGWEWRGTGQRFGDWWREQDTAAKNTWLRSMNVRLTFDVRGGLTRTIDFGDLQEYEQHLRLGSVVERLHTGVS

SEQ ID NO: 11483 - protein, 500 aa, synthetic construct
MRALVVIRLSRVTDATTSPERQLESCQQLCAQRDWDVVGVAEDLDVSGAVDPFDRKRRPNLARWLAFEEQPFDVIVAYRVDRLTRSIRHLQQLVHWAEDHKKLVVSATEAHFDTTTPFAAVVIALMGTVAQMELEAIKERSRSAAHFNIRAGKYRGSLPPWGYLPARVDGEWRLVPDPVQRERILEVYHRVVDNHEPLHLVAHDLNRRGVLSPKDYFAQLQGREPQGRKWSATALKRSMISGAMLGYATLSGKTVRDDDGAPLVRAEPILTREQQEALRAELVKTSRAKPAVSTPSLLLRVLFCAVCGEPAYKFAGGGRKHPRYRCRSMGFPKHCGNGTAAMAEWDAFCEEQVLNLLGDAERLERVWVAGSDSAAELAEVNAELVDLTSLIGSPAYRAGSPQREALDARIAALAARQEELEGLEARPSGWEWRGTGQRFGDWWREQDTAAKNAWLRSMNVRLTFDVRGGLTRTIDFGDLQEYEQRLRLGSAVERLHTGMS

SEQ ID NO: 11484 - protein, 500 aa, synthetic construct
MRALVVIRLSRVTDATTSPERQLESCQQLCAQRGWDVVGVAEDLDVSGAVDPFDRKRRPNLARWLAFEEQPFDVIVAYRVDRLTRSTRHLQQLVHWAEDHKKLVVSATEAHFDTTTPFAAVVIALMGTVAQMELEAIKERSRSAAHFNIRAGKYRGSLPPWGYLPTRVDGEWRLVPDPVQRERILEVYHRVVDNHEPLHLVAHDLNRRGVLSPKDYFAQLRGREPQGRKWSATALKRSMISEAMLGYATLGGETVRDDDGAPLVRAEPILTREQLEALRAELAKTSRAKPAVSTPSLLLRVLFCAVCGEPAYKFAGGGRKHPRYRCRSMGFPKHCGNGTVAMAEWDAFCEDQVLDLLGDAERLEKVWVAGSDCAVELAEVNAELVDLTSLIGSPAYRAGSPQREALDARIAALAARQGELEGLEARPSGWEWRGTGQRFGDWWCEQDTAAKNTWLRSMNVRLTFDVRGGLTRTIDFGDLQEYEQHLRLGSVVERLHTGMS

SEQ ID NO: 11485 - protein, 500 aa, synthetic construct
MRALVVIRLSRVTDATTSPERQLESCQQLCAQRGWDVVGVAEDLDVSGAVDPFDRKRRPNLARWLAFEEQPFDAIVAYRVDRLTRSIRHLQQLVHWAEDHKKLVVSATEAHFDTTTPFAAVVIALMGTVAQMELEAIKERNRSAAHFNIRAGKYRGSLPPWGYLPTRVDGEWRLAPDPVQRERILEVYHRVVDNHEPLHLVAHDLNRRGVLSPKDYFAQLRGREPQGRKWSATALKRSMTSEAMLGYATLNGKTVRDDDGAPLVRAEPILTREQLEALRAELVKTSRAKPAVSTPSLLLRVLFCAVCGEPAYKFAGGGRKHSRYRCRSMGFPKHCGNGTVAMAEWDGFCEEQVLDLLGDAERLEKVWVAGSDSAVELAEVNAELVDLTSLIGSPAYRAGSPQREAIDARIAALAARQEELEGLEARPSGWEWRETGQRFGDWWREQDTAAKNAWLRSMNVRLTFDVRGGLTRTIDFGDLQEYEQHLRLGSVVERLHTGMS

SEQ ID NO: 11486 - protein, 500 aa, synthetic construct
MRALVVIRLSRVTDATTSPERQLESCQQLCAQRGWDVVGVAEDLDVSGAVDPFDRKRRPNLARWLAFEEQPFDVIVAYRVDRLTRSTRHLQQLVHWAEDHKKLVVSATEAHFDTTTPFAAVVIALMGTVAQMELEAIKERSRSAAHFNIRAGKYRGSLPPWGYLPARVDGEWRLVPDPVQRERILEVYHRVVDNHEPLHLVAHDLNRRGVLSPKDYFAQLRGREPQGRKWSATALKRSMVSEAMLGYATLNGKTVRDDDGAPLVRAEPILTREQLEALRAVLVKTSRAKPAVSTPSLLLRVLFCAVCGEPAYKFAGGGRKHPRYRCRSMGFPKHCGNGTVAMAEWDAFCEEQVLDLLGDAERLEKVWVAGSDSAVELAEVNAELADLTSSIGSPTYRAGSPQREALDARIAALAARQEELEGLEARPSGWEWRETGQRFGDWWREQDTAAKNTWLRSMNVRLTFDVRGGLTRTIDLGDLQEYEQHLRLGSVVERLHTGMS

SEQ ID NO: 11487 - protein, 500 aa, synthetic construct
MRALVVIRLSRVTDATTSPERQLESCQQLCAQRGWDVVGVAEDLDVSGAVDPFDRKRRPNLARWLAFEEQPFDVIVAYRVDRLTRSTRHLQQLVHWAEDHKKLVVSATEAHFDTTTPFAAVVIALMGTVAQMELEAIKERSRSAAHFNIRAGKYRGSLPPWGYLPARVDGEWRLVPDPVQRERILEVYHRVVDNHEPLYLVAHDLNRRGVLSPKDYFAQLQGREPQGRKWSATALKRSMISEAMLGYATLNGKTVRDDDGAPLVRAEPILTREQLEAIRAELVKTSRAKPAVSTPSLLLRVLFCAVCGEPAYKFSGGGRKHPRYRCRSMGFPKHCGNGTVAMAEWDAFCEEQVLDLLGDAERLEKVWVAGSDSAVELVEVNAELVDLTSLIGSPAYRAGSPQREALDARIAALAARQGELEGLEARPSGWEWRETGQRFGDWWREQDTAAKNTWLRSMNVRLTFDVRGGLARTIDFGDLQEYEQHLRLGSVVERLHTGMS

SEQ ID NO: 11488 - protein, 500 aa, synthetic construct
MRALVVIRLSRVTDATTSPERQLESCQQLCAQRGWNVVGVAEDLDVSGAVDPFDRKRRPNLARWLAFEEQPFDVIVAYRVDRLARSVRHLQQLVRWAEDHKKLVVSATEAHFDTTTPFAAVVIALMGTVAQMELEAIKERSRSAAHFNIRAGKYRGSLPPWGYLATRVGGEWRLVPDPVQRERILEVYHRVVDNHEPLHSVAHDLNRRGVLSPKDYFAQLQGREPQGRRWSATAIKRSMISEAMLGYATLNGKTVRDDDGAPLVRAEPILTREQLEALRAELVKTSRAKPAVSTPSLLLRVLFCAVCGEPAYKFAGGGRKHPRYRCRSMGFPKHCGNGTVAMVEWDAFCEEQVLDLLGDTERLEKVWVAGSDSAVELAEVSAELVDLTSLIGSPAYRAGSPQREALDARIAALAARQEELEGLEARPSGWEWRGTGQRFGDWWREQDTVAKNTWLRSMNVRLTFDVRGGLTRTIDFGDLQKYEQHLRLGSVVERLHTGMS

SEQ ID NO: 11489 - protein, 500 aa, synthetic construct
MRALVVIRLSRVTDATTSPERQLESCQQLCAQRGWDVVGVAEDLDVSGAVDPFDRKRRPNLARWLAFEEQSFDVIVAYRVDRLARSIRHLQQLVHWAEDHKKLVVSATEAHFDTTTPFAAVVIALMGTVAQMELEAIKERSRSAAHYNIRAGKYRGSLPPWGYLPTRVDGEWRLVPDPVQRKRILEVYHRVVDNHEPLHLVAHDLNRRGVLSPKDYFAQLQGREPQGRKWSATALKRSMISEAMLGYATLNGKTVRDDDGAPLVRAEPILTREQQEALRAELVKTSRAKPAVSTPSLLLRVLFCAVCGEPAYKFAGGGRKHSRYRCRSMGFPKHCGNGTVAMAEWDAFCEKQVLDLLGDAERLEKVWVAGSDSAVELAEVNAELVDLTSLIGSPAYRAGSPQREALDARIAVLAARQEELEDLEARPSGWEWRETGQRFGDWWREQDTAAKNTWLRSMNVRLTFDVRGGLTRTIDFGDLQEYEQHLRLGSVVERLHAGMS

SEQ ID NO: 11490 - protein, 500 aa, synthetic construct
MRALVVIRLSRVTDATTSPERQLESCQQLCAQRGWDVVGVAEDLDVSGAVDPFDRKRRPNLARWLAFEEQPFDVIVAYRIDRLTRSIRHLQQLVHWAEDHKKLVVSATEAHFDTTTPFAAVVIALMGTVAQMELEAIKERNRSAAHFNIRAGKYRGSLPPWGYLPTRVDGEWRLVPDPVQRERILEVYHRVVDDHEPLHLVAHDLNRRGVLSPKDYFAQLRGREPQGRKWSATALKRSMISEAMLGHATLNGKTVRDDEGAPLVRAEPILTREQLEALRAELVKTSRAKPAVSTPSLLLRVLFCAVCGEPAYKFAGGGRKHPRYRCRSMGFPKHCGNGTVAMAEWDAFCEEQVLDLLGDAERLEKVWVAGSDSAVELAEVNAELVDLTSLIGSPAYHAGSPQRGALDARIAALAARQEELEGLEARPSGWEWRETGQRFGDWWREQDTAAKNTWLRSMNVRLTFDVRGGLTRTIDFGDLQEYEQHLRLGSVVERSHTGMS

SEQ ID NO: 11491 - protein, 500 aa, synthetic construct
MRALVVIRLSRVTDATTSPERQLESCQQLCAQRGWDVVGVAEDLDVSGAVDPFDRKRRPNLARWLAFEGQPFDVIVAYRVDRLTRSVRHLQQLVHWAEDHKKLVVSATEAHFDTTTPFAAVVIALMGTVAQMELEAIKERSRSAAHFNIRAGKYRGSLPPWGYLPARVDGEWRLVPDPVQRERILEVYHRVVDNHEPLHLVAHDLNRRGVLSPKDYFAQLQGREPQGRKWSATALKRSMISEAMLGYATLNGKTVRDDDGAPLVRAEPILTREQLEALRAELVKTSRAKPAVSTPSLLLRVLFCAVCGEPAYKFAGGGRKHPRYRCRSMGFPKHCGNGTVAMAEWDAFCEEQVLGLLGDVERLEKVWVAGSDSAVKLAEVNAELVDLTGLIGSPAYRAGSPQREALDARIAALAARQEELEGLEARPSGWEWRGTGQRFGDWWREQDTAAKNTWLRSMNVRLTFDVRGGLTRTIDFGDLQEYEQHLRLGSVVERLHTGMS

SEQ ID NO: 11492 - protein, 500 aa, synthetic construct
MRALVVIRLSRVTDATTSPERQLESCQQLCAQRGWDVVGVAEDLDVSGAVDPFDRKRRPNLARWLAFEEQPFDVIVAYRVDRLTRSTRHLQQLVHWAEDHKKLVVSATEAHFDTTTPFAAVVIALMGTVAQMELEAIKERSRSAAHFNIRAGKYRGSLPPWGYLPTRVDGEWRLAPDPVQRERILEVYHRVVGNHEPLHSVAHDLNRRGVLSPKDYFAQLQGREPQGRKWSATALKRSMISGAMLGYATLNGKIVRDDDGAPLARAEPILTREQLEALRAELVKTSRAKPAVSTPSLLLRVLFCAVCGEPAYKFAGGGRKHPRYRCRSMGFPKHCGNGTVAMAEWDAFCEEQVLDLLGDVERLEKVWVAGSDSAVELAEVSAELVDLTSLIGSPAYRAGSPQREALDARIAALVARQEELEGLEARPSGWEWRETGQRFGDWWREQDTAAKNTWLRSMNVRLTFDVRGGLTRTIDFGDLQEYEQHLRLGSVVERLHTGMS

SEQ ID NO: 11493 - protein, 500 aa, synthetic construct
MRALVVIRLSRVTDATTSPERQLESCQQLCAQRGWDVVGVAEDLDVSGAVDPFDRKRRPNLARWLAFEEQPFDVIVAYRVDRLARSIRHLQQLVHWAEDHKKLVVSATEAHFDTTTPFAAVVIALMGTVAQMELEAIKERSRSAAHFNIRAGKYRGSLPPWGYLPTRVDGEWRLVPDPVQRERILEVYHRVVDNHEPLHLVAHDLNRRGVLSPRDYFAQLRGREPQGRKWSATALKRSMISEAMLGYATLNGRTVRDDDGAPLVRAEPILTREQLEALRAELVKTSRAKPAVSTPSLLLRVLFCAVCGEPAYKFAGGGRKHPRYRCRSMGFPKHCGNGTVATAEWDAFCEEQVLDLLGDTERLEKVWVAGSDSAIELAGVNAELVDLTSLIGSPAYRAGSPQREALDARIAALAARQEELEGLEARPPGWEWRETGQRFGDWWREQDTAAKNTWLRSMNVRLTFDVRGGLTRTIDFGDLQEYEQHLRLGNAVERLHTGMS

SEQ ID NO: 11494 - protein, 500 aa, synthetic construct
MRALVVIRLSRVTEATTSPERQLESCQQLCAQRGWDVVGVAEDLDVSGAVDPFDRKRRPNLARWLAFEEQPFDVIVAYRVDRLARSIRHLQQLVHWAEDHKKLVVSATEAHFDTTTPFAAVVIALMGTVAQMELEAIKERNRSAARFNIRAGKYRGSLPPWGYLPTRMDGEWRLVPDPVQRERILEVYHRVVDNHEPLHLVAHDLNRRGVLSPKDYFAQLRGREPQGRKWSATALKRSMISEAMLGYATLNGKTVRDDDGAPLVRAEPILTREQQEALRAELVKTSRAKPAVSTPSLLLRVLFCAVCGEPAYKFAGGGRKHPRYRCRSMGFPKHCGNGTVAMAEWDAFCEEQVLDLLGDAERLEKVWVAGSDSAVELAEVNAELVDLTSLIGSPAYRAGSPQREALDARIAALAARQEELEGLEARPSGWEWRGTGQRFGDWWREQDTAAKNTWLRSMNIRLTFDVRGGLTRTIDFGDLQEYEQHLRLGSVVERLHTGMS

SEQ ID NO: 11495 - protein, 500 aa, synthetic construct
MRALVVIRLSRVTDATTSPERQLESCRQLCAQRGWDVVGVAEDLDVSGAVDPFDRKRRPNLARWLAFEEQPFDVIVAYRVDRLARSIRHLQQLVHWAEDHKKLVVSATEAHFDTTTPFAAVVIALMGTVAQMELEAIKERSRSAAHFNIRAGKYRGSLPPWGYLPTRVDGEWRLAPDPVQRERILEVYHRVVDNHEPLHLVAHDLNRRGVLSPKDYFAQLRGREPQGRKWSATALKRSMISEAMLGHATLNGKTVRDDDGAPLVRAEPILTREQLEALRAELVKTSRAKPAVSTPSLLLRVLFCAVCGEPAYKFAGGGRKHPRYRCRSMGFPKHCGNGTVAMAEWDAFCEEQVLGLLGDAERLEKVWVAGSDSAVKLAEVNAELVDLTGLVGSPAYRAGSPQREALDARIAALAARQEELEGLEARPSGWEWRGTGQRFGDWWREQDTAAKNTWLRSMNVRLTFDVRGGLTRTIDFGDLQEYEQHLRLGSVVERLHTGMS

SEQ ID NO: 11496 - protein, 500 aa, synthetic construct
MRALVVIRLSRVTDATTSPERQLESCQQLCAQRGWDVVGVAEDLDVSGAVDPFDRKRRPNLARWLAFEEQPFDVIVAYRVDRLARSIRHLQQLVHWAEDHKKLVVSATEAHFDTTTPFAAVVIALMGTVAQMELEAIKERSRSAAHFNIRAGKYRGSLPPWGYLPTRVDGEWRLAPDPVQRERILEVYHRVVDDHEPLHLVAHDLNRRGVLSPKDYFAQLRGREPQGRKWSATALKRSMTSEAMLGYATLNGKTVRNDDGAPLVRAEPILTREQLEALRAELAKTSRAKPAVSTPSLLLRVLFCAVCGEPAYKFAGGGRKHPRYRCRSMGFPKHCGNGTVAMAEWDAFCEEQVLDLLGDAERLEKVWVAGSDSAVELAEVNAELVDLTSLICSPAYRAGSPQREALDARIAALAARQEELEGLEARPSGWEWRGTGQRFGDWWREQDTAAKNTWLRTMNVRLTFDVRDGLTRTIDFGDLQEYEQHLRLGSVVERLHTGMS

SEQ ID NO: 11497 - protein, 500 aa, synthetic construct
MRALVVIRLSRVTDATTSPERQLESCQQLCAQRGWDVVGVAEDLDVSGAVDPFDRKRRPNLARWLAFEEQPFDVIVAYRVDRLTRSIRHLQQLVHWAEDHKKLVVSATEAHFDTTTPFAAVAIALMGTVAQMELEAIKERSRSAAHFNIRAGKYRGSLPPWGYLPARVDGEWRLVPDPVQRERILEVYHRVVDDHEPLHLVAHDLNRRGVLSPKDYFAQLRGREPQGRKWSATALKRSMISEAMLGYATLNGKTVRDDDGAPLVRAEPILTREQQEALRAELVKTSRAKPAVSTPSLLLRVLFCAVCGEPAYKFAGGGRKHPRYRCRSMGFPKHCGNGTVAMAEWDAFCEEQVLGLLGDAERLEKVWIAGSDSAVELAEVNAELVDLTSLIGSPAYRAGSPQREALDARIAALAARQEELEGLEARPSGWEWRETGQRFGDWWREQGTAAKNTWLRSMNVRLTFDARGGLTRTIDFGDLQEYEQYLRLGSVVERLHAGMS

SEQ ID NO: 11498 - protein, 500 aa, synthetic construct
MRALVVIRLSRVTDATTSPERQLESCQQLCAQRGWDVVGVAEDLDVSGAVNPFDRKRRPNLARWLAFEEQPFDVIVAYRVDRLTRSTRHLQQLIHWAEDHKKLVVSATEAHFDTTTPFAAVVIALMGTVAQMELEAIKERSRSAAHFNIRAGKYRGSLPPWGYLPARVDGEWRLAPDPVQRERILEVYHRVVDDHEPLHLVAHDLNRRGVLSPRDYFAQLRGREPQGRKWSATALKRSMTSEAMLGYATLNGKTVRDDDGAPLVRAEPILTREQLEALRAELAKTSRAKPAVSTPSLLLRVLFCAVCGEPAYKFAGGGRKHPRYRCRSMGFPKHCGNGTVAMAEWDTFCEEQVLDLLGDAERLEKVWVAGSDSAVELAEVNAELIDLTSLIGSPAYRAGSPQREALDARIAALAARQEELEGLEARPSGWEWRETGQRFGDWWREQDTAAKNAWLRSMNVRLTFDVRGGPTRTIDFGDLQEYEQHLRLGSVVERLHTGMS

SEQ ID NO: 11499 - protein, 500 aa, synthetic construct
MRALVVIRLSRVTDTTTSPVRQLESCQQLCAQRGWDVVGVAEDLDVSGAVDPFDRKRRPNLARWLAFEEQPFDVIVAYRVDRLARSIRHLQQLVHWAEDHKKLVVSATEAHFDTTTPFAAVVIALMGTVAQMELEAIKERNRSAAHFNIRAGKYRGSLPPWGYLPTRVDGEWRLVPDPVQRERILEVYHRVVDNHEPLHLVAHDLNRHGVLSPRDYFAQLQGREPQGRKWSATALKRSMISEAMLGYATLNGKTVRDDDGAPLVRAEPILTREQREALRAELVKTSRAKPAVSTPSLLLRVLFCAVCGEPAYKFAGGGRKHPRYRCRSMGFPKHCGNGTVAMAEWDAFCEEQVLDLLGDAERLEKVWVAGSDSAVELAEVNAELVDLTSLIGSPAYRAGSPQREALDARIAALAARREELEGLEARPSGWEWRETGQRFGDWWREQDTAAKNTWLRSMNVRLTFDVRGGPTRTIDFGDLQEYEQHLRLGSVVKRLHTGMS

SEQ ID NO: 11500 - protein, 500 aa, synthetic construct
MRALVVIRLSRVTDATTSPERQLESCQQLCAQRGWDVVGVAEDLDVSGAVDPFDRKRRPNLARWLAFEEQPFDVIVAYRVDRLARSIRHLQQLVHWAEDHKKLVVSATEAHFDTTTPFAAVVIALMGTVAQMELEAIKERSRSAAHFNIRAGKYRGSLPPWGYLPARVDGEWRLVPDPEQRERILEVYHRVVDNHEPLHLVAHDLNRRGVLSPKDYFAQLQGREPQGRKWSATALKRSMTSEAMLGYATLNGKTVRDDDGAPLVRAEPILTRGQLEALRAELVRTSRAKPAVSTPSLLLRVLFCAVCGEPAYKFVGGGRKHPRYRCRSMGFPKHCGNGTVAMAEWDAFCEEQVLDLLGDAERLEKVWVAGSDSAVELAEVNAELVDLTSLIGSPAYRTGSPQREALDARIAALAARQEELEGLEARPSGWEWRGTGQRFGDWWREQGTAAKNTWLRSMNVRLTFDVRGRLTRTIDFGDLQEYAQHLRLGSVVERLHTGMS

SEQ ID NO: 11501 - protein, 500 aa, synthetic construct
MRALVVIRLSRVTDATTSPERQLESCQQLCAQRGWDVVGVAEDLDVSGAVDPFDRKRRPNLARWLAFEEQPFDAIVAHRVDRLTRSIRHLQQLVHWAEDHKKLVVSATEAHFDTTTPFAAVVIALMGTVAQMELEAIKERSRSAAHFNIRAGKYRGSLPPWGYLPARVDGEWRLVPDPVQRECILEVYHRVVDNHEPLHLVAHDLNRRGVLSPKDYFAQLQGREPQGRKWSATALKRSMTSETMLGYATLNGKIVRDDGGAPLVRAEPILTREQLEALRAELVKTSRAKPAVSTPSLLLRVLFCAVCGEPAYKFAGGGRKHPRYRCRSMGFPKHCGNGTVAMAEWDAFCEEQVLDLLGDAERLEKVWVAGSDSAVELAEVNAELVDLTSLIGSPAYRAGSPQREALDARIAALAARQEELGGLEARLSGWEWRKTGQRFGDWWREQDTAAKNTWLRSMNVRLTFDVRGGLTRTIDFGDLQEYEQHLRLGSVVERLHTGMS

SEQ ID NO: 11502 - protein, 500 aa, synthetic construct
MRALVVIRLSRVTDATTSPERQLESCQQLCAQRGWDVVGVAEDLDVSGTVDPFDRKRRPNLARWLAFEEQPFDVIVAYRVDRLARSIRHLQQLVHWAEDHKKLVVSATEAHFDTTTPFAAVVIALMGTVAQMELEAIKERSRSAAHFNIRAGKYRGSLPPWGYLPTRVDGEWRLVPDPVQRERILEVYHRVVDNHEPLHLVAHDLNRRGVLSPKDYFAQLQGREPQGRKWSATALKRSMTSGAMLGYATLNGKTVRDDDGAPLVRAEPILTREQLEALRAELVKTSRAKPAVSTPSLLLRVLFCAVCGEPAYKFAGGGRKHPRYRCRSMGFPKHCGNGTVAMAEWDAFCEEQVLDLLGDAERLEKVWVAGSDSAVELAEVNAELVDLTSLIGSPAYRAGSPQREALDARIAALAARQEELEGLEARPSGWEWRETGQRFGDWWREQDTAAKNTWLRSMNVRLTFDVRGGLTRTIDFGDLQEYEQHLRSGSVVERLHTGMS

SEQ ID NO: 11503 - protein, 500 aa, synthetic construct
MRALVVIRLSRVTDATTSPERQLESCQQLCAQRGWDIVGVAEDLDVSGAVDPFDRKRRPNLARWLAFEEQPFDVIVAYRVDRLTRSIRHLQQLVHWAEDHKKLVVSATEAHFDMTTPFAAVVIALMGTVAQMELEAIKERSRSAAHFNIRAGKYRGSLPPWGYLPTRVDGEWRLAPDPVQRERILEVYHRVVDNHEPLHLVAHDLNRRGVLSPKDYFAQLQGREPQGRKWSATALKRSMTSEAMLGYATLNGKTVRDDDGAPLVRAEPILTREQLEALRAELVKTSRAKPAVSTPSLLLRVLFCAVCGEPAYKFAGGGRKHPRYRCRSMGFPKHCGNGTVAMAEWDAFCEEQVLNLLGDAERLEKVWVAGSDSAVELAEVNAELVDLTSLIGSPAYRAGSPQREALDARIAALAARQEELEGLEARPSGWEWRGTGQRFGDWWREQDTAAKNTWLRSMNVRLTFDVRGGLTRTIDFGDLQEYEQHLRLSSVVERLHTGMS

SEQ ID NO: 11504 - protein, 500 aa, synthetic construct
MRALVVIRLSRVTDATTSPERQLESCQQLCAQRGWDVVGVAEDLDVSGAVDPFDRKRRPNLARWLAFEERPFDVIVAYRVDRLARSIRHLQQLVHWAEDHKKLVVSATEAHFDTTTPFAAVVIALMGTVAQMELEAIKERSRSAAHFNIRAGKYRGSLPPWGYLPTRVNGEWRLVPDPVQRERILEVYHRVVDNHEPLHLVAHDLNRRGVLSPKDYFAQLRGREPQGREWSATALKRSMTSEAMLGYATLNGRIVRDDDGAPLVRAEPILTREQLEALRAELVKTSRAKPAVSTPSLLLRVLFCAVCGEPAYKFAGGGRKHLRYRCRSMGFPKHCGNGTVAMAEWDAFCEEQVLDLLGDAERLEKVWVAGSDSAVELAEVNAELADLTSLIGSPAYRAGSPQREALDARVAALAARQEELEGLEARPPGWEWRGTGQRFGDWWREQDTAAKNTWLRSMNVRLTFDVRGGLTRTFDFGDLQEYEQHLRLGSVVERLHTGMS

SEQ ID NO: 11505 - protein, 500 aa, synthetic construct
MRALVVIRLSRVTDATTSPERQLESCQQLCAQRGWDVVGVAEDLDVSGAVDPFDRKRRPNLARWLAFEEQPFDAIVAYRVDRLTRSIRHLQQLVHWAEDHKKLVVSATEAHFDTTTPFAAVVIALMGTVAQMELEAIKERNRSAAHFNIRAGKYRGSLPPWGYLPTRVDGEWRLVPDPVQRERILEVYHRVVDNHEPLHLVAHDLNRRGVLSPKDYFAQLRGREPQGRKWSATALKRSMISEAMLGYATLNGRTVRDDDGAPLVRAEPILTREQQEALRAELAKTSRAKPAVSTPSLLLRVLFCAVCGEPAYKFAGGGRKHPRYRCRSMGFPKHCGNGTVAMAEWDAFCEEQVLDLLGDAERLEKVWVAGSDSTVELAEVNAELVDLTSLIGSPAYRAGSPQREALDARIAALVARQEELEGLEARPSGWEWRETGQRFGDWWREQDTAAKNTWLRSMNVRLTFDVRGGLTRTIDFGDLQEYEQHSRLGSVVEHLRTGMS

SEQ ID NO: 11506 - protein, 500 aa, synthetic construct
MRALVVIRLSRVTDATTSPERQLESCQQLCAQRGWDVVGVAEDLDVSGAVDPFDRKRRPNLARWLAFEEQPFDAIVAYRVDRLARSIRHLQQLVHWAEDHKKLVVSATEAHFDTTTPFAAVVIALMGTVAQMELEAIKERSRSAAHFNIRAGKYRGSLPPWGYLPARVDGEWRLVPDPVQRERILEVYHRVVDNHEPLHLVAHDLNRRGVLSPKDYFAQLQGREPQGRKWSATALKRSMISEAMLGYATLNGKIVRDDDGAPLVRAEPILTREQLEALRAEFVKTSRAKPAVSTPSLLLRVLFCAVCGEPAYKFTGGGPKHPRYRCRSMGFPKHCGNGTVAMAEWDSFCEEQVLGLLGDAERLEKVWVAGSDSAVELAEVNAELVDLTSLIGSPAYRPGSPQREALDARIAALAARQEELKGLEARPSGWGWRETGQRFGDWWREQDTAAKNTWLRSMNVRLTFDVRGGLSRTIDFGDLQEYEQHLRLGSVVERLHTGMS

SEQ ID NO: 11507 - protein, 500 aa, synthetic construct
MRALVVIRLSRVTDATTSPERQLESCQQLCAQRGWDVVGVAEDLDVSGAVDPFDRKRRPNLARWLAFEEQPFDAIVAYRVDRLTRSIRHLQQLVHWAEDHEKLVVSATEAHFDTTTPFAAVVIALMGTVAQMELEAIKERNRSAAHFNIRAGKYRGSLPPWGYLPARVDGEWRLAPDPVQRERILEVYHRVVDNHEPLHLVAHDLNRRGVLSPKDYFAQLRGREPQGRKWSATALKRSMISEAMLGYATLNGKIIRDDDGAPLVRAEPILTREQLEALRAELAKTSRAKPAVSTPSLLLRVLFCAVCGEPAYKFAGGGRKHPRYRCRSMGFPKHCGNGTVAMAEWDAFCEEQVLDLLGDAERPEKVWVVGSDSAVELAEVNAELVDLTSLIGSPAYRAGSPQREALDARIAALAARQEELEGLEARSSGWEWRGTGQRFGDWWREQDTAAKNTWLRSMNVRLTFDVRGGLTRTIDFGDLLEYKQHLRLGSVVERLHTGTS

SEQ ID NO: 11508 - protein, 500 aa, synthetic construct
MRALVVIRLSRVTEATTSPERQLESCQQLCAQRGWDVVGVAEDLDVSGAVDPFDRKRRPNLARWLAFEEQPFDVIVAYRVDRLARSIRHLQQLVHWAEDHKKLVVSATEAHFDTTTPFAAVVIALMGTVAQMELEAIKERNRSAAHFNIRAGKYRGSLPPWGYLPTRVDGEWRLVPDPVQRERILEVYHRVVNNHEPLHLVAHDLNRRGVLSPKDYFAQLRGREPQGRKWSATALKRSMTSEAMLGYATLNGKTVRDDDGAPLVRAEPILTREQLEAIRAELVKTSRAKPAVSTPSLLLRVLFCAVCGEPAYKFAGGGRKHPRYRCRSMGFPKHCGNGTVAMAEWDAFCEEQVLDLLGDAKRLEKVWVAGSDSAVELAEVNAELVDLTSLIGSPAYRAGSPQREALDARIAALAARQEELEGLEARPSGWEWRETGQRFGDWWHEQDTAAKNTWLRSMNVRLTFDVRGGLTRTIDFGDLQEYKQHLRLGSVVERLHTGMS

SEQ ID NO: 11509 - protein, 500 aa, synthetic construct
MRALVVIRLSRVTDATTSPERQLESCQQLCAQRGWDVAGVAEDLDVSGAVDPFDRKRRPNLARWLAFEEQPFDVIVAYRVDRLARSIRHLQQLVHWAEDHKKLVVSATEAHFDTTTPFAAVVIALMGTVAQMELEAIKERSRSAAHFNIRAGKYRGSLPPWGYLPTRVDGEWRLVPDPVQRERILEVYHRVVDNHEPLHLVAHDLNRRGVLSPKDYFAQLQGREPQGRKWSATALKRSMISEAMLGYATLNGKTVRDDDGAPLVRAEPILTRGQQEALRAELVKTSRAKPAVSTPSLLLRVLFCAVCGEPAYKFAGGGRKHPRYRCRSMGFPKHCGNGTVAMAEWDAFCEEQVLDLLGDAERLEKVWVAGSDSAVELAEVNAELVDLTSLIGSPAYRAGSPQREALDARIAALAARQEELEGLEARPSGWEWRETGQRFGDWWREQDTAAKNTWLRSMNVRLMFDVRGGLTRTIDFGDLQEYEQHLRLGSVVERLHTGMS

SEQ ID NO: 11510 - protein, 500 aa, synthetic construct
MRALVVIRLSRVTDATTSPERQLESCQQLCAQRGWDVVGVAEDLDVSGAVDPFDRKRRPNLARWLAFEEQPFDVIVAYRVDRLTRSVRHLQQLVHWAEDHKKLVVSATEAHFDTTTPFAPVVIALMGTVAQMELEAIKERSRSAAHFNIRAGKYRGSLPPWGYLPARVDGEWRLVPDPVQRERILEVYHRVVDNHEPLHLVAHDLNRRGVLSPKDYFAQLRGREPQGRKWSATALKRSMISVAMLGYATLCGKTVRDDDGAPLVRAEPILTREQLEALRAELVKTSRAKPAVSTPSLLLRVLFCAVCGEPAYKFAGGGRKHPRYRCRSMGFPKHCGNGTVAMAEWDAFCEEQVLDLLGDAERLEKVWVAGSDSAVELAEVNAELADLTSLIGSPAYRAGSPQREALDARIAALAARQEELEGLEARPSGWEWRGTGQRFGDWWHEQDTAAKNTWLRSMNVRLTFDVRGGLTRTIDFGDLQEYEQHLRLGSVVERLHTGMS

SEQ ID NO: 11511 - protein, 500 aa, synthetic construct
MRALVVIRLSRVTDATTSPERQLESCQQLCAQRGWDVVGVAEDLDVSGAVDPFDRKRRPNLARWLAFEEQPFDVIVAYRVDRLARSVRHLQQLVHWAEDHKKLVVSATEAHFDTTTPFAAVVIALMGTVAQMELEAIKERSRSAAHFNIRAGKYRGSLPPWGYLPTRVDGEWRLVPDPVQRERILEVYHRVVDNHEPLHSVAHDLNRRGVLSPKDYFAQLQGREPQGRKWSATALKRSMTSGAMLGYATLNGKTVRDDDGAPLVRAEPILTREQQEALRAELVKTSRAKPAVSTPSLLLRVLYCAVCGEPAYKFAGGGRKHPRYRCRSMGFPKHCGNGTVAMAEWDAFCEEQVLDLLGDAERLEKVWVAGSDSAVELAEVNAELVDLMSLIGSPAYRAGSPQREALDARIAALAARQEELEGLEARPSGWEWRETGQRFGDWWREQDTAAKNTWLRSMNVRLAFDVRGGLTRTIDFGDLQEYEQHLRLGNVVERLHTGMS

SEQ ID NO: 11512 - protein, 500 aa, synthetic construct
MRALVVIRLSRVTDATTSPERQLESCQQLCAQRGWDVVGVAEDLDVSGAIDPFDRKRRPNLARWLAFEERPFDVIVAYRVDRLTRSIRHLQQLVHWAEDHKKLVVSATEAHFDTTTPFAAVVIALMGTVAQMELEAIKERSRSAAHFNIRAGKYRGSLPPWGYLPTRVDGEWRLAPDPVQRERILEVYHRVVDNHEPLHLVAHDLNRRGVLSPKDYFAQLRGREPQGRKWSATALKRSMISVAMLGYATLNGKTVRDDDGAPLVRAEPILTREQLEVLRAELVKTSRAKPAVSTPSLLLRVLFCAVCGEPAYKFAGGGRKHPRYRCRSMGFPKHCGNGTVAMAEWDAFCEEQVLNLLGDAERLEKVWVAGSDSAVELAEVNAELVDLTSLIGSPAYRAGSPQREALDARIAALAARQEELEGLEARPSGWEWRETGQRFGDWWREQDTAAKNTWLRSMNVRLTFDVRGGLTRTIDFGDLQEYEQHLRLGSVVERLRTGMS

SEQ ID NO: 11513 - protein, 500 aa, synthetic construct
MRALVVIRLSRVTDATTSPERQLESCQQLCAQRGWDVVGVAEDLDVSGAVDPFDRKRRPNLARWLAFEEQPFDVIVAYRVDRLARSTRHLQQLVHWAEDHKKLVVSATEAHFDTTTPFAAVVIALMGTVAQMELEAIKERNRSAAHFNIRAGKYRGSLPPWGYLPTRVDGEWRLVPDPVQRERILEVYHRVVDNHEPLHLVAHDLNRRGVLSPKDYFAQLRGREPQGRKWSATALKRSMISEAMLGYATLNGKTVRDDDGAPLVRAEPILTREQQEALRTELAKTSRAKPAVSTPSLLLRVLFCAVCGEPAYKFAGGGRKHPRYRCRSMGFPKHCGNGTVAMAEWDAFCEEQVLDLLGDAGRLEKVWVAGSDFAVELAEVNAELVDLTSLIGSPDYRAGSPQREALDARIAALAARQEELEGLETRPSGWEWRETGQRFGDWWREQDTAAKNTWLRSMNVRLTFDVRGGLTRTVDFGDLQEYEQRLRLGSVVGRLHTGMS

SEQ ID NO: 11514 - protein, 500 aa, synthetic construct
MRALVVIRLSRVTDATTSPERQLESCQQLCAQRGWDVVGVAEDLDVSGAVDPFDRKRRPNLARWLAFEEQPFDAIVAYRVDRLTRSIRHLQQLVHWAEDHKKLVVSATEAHFDTTTPFAAVVIALMGTVAQMELEAIKERSRSAAHFNIRAGKYRGSLPPWGYLPARVDGEWRLAPDPVQRERILEVYHRVVDDHEPLHLVAHDLNRRGVLSPRDYFAQLRGREPQGRKWSATALKRSMISEAMLGYATLNGKTVRDDDGAPLVRAEPILTREQQEALRAELVKTSRAKPAVSTPSLLLRVLFCAVCGEPAYKFAGGGRRHPRYRCRSMGFPKHCGNGTVAMAEWDAFCEEQVLNLLGDAERLEKVWVAGSDSAVELTEVNAELVDLTSLIGSPAYRAGSQQREALDARIAALAARQEELEGLEARPSGWEWRETGQRFRDWWREQDTAAKNTWLRSMNVRLTFDVRGGLTRTIDFGDLQGYERHSRLGSVVERLHTGMS

SEQ ID NO: 11515 - protein, 500 aa, synthetic construct
MRALVVIRLSRVTDATTSPERQLESCQQLCAQRGWDVVGVAEDLDVSGSVDPFDRKRRPNLARWLAFGEQPFDVIVAYRVDRLARSIRHLQQLVHWAEDHKKLVVSATEAHFDTTTPFAAVVIALMGTVAQMELEAIKERNRSAAHFNIRAGKYRGSLPPWGYLPARVDGEWRLVPDPVQRERILEVYHRVVDNHEPLHLVAHDLNRRGVLSPKDYFAQLRGREPQGRKWSATALKRSMISEAMLGYATLNGKTVRDDDGVPLVRAEPILTREQLEALRAELVKTSRAKPAVSTPSLLLRVLFCAVCGEPAYKFAGGGRKHPRYRCRSMGFPKHCGNGTVAMAEWDAFCEEQVLDLLGDAERLEKVWVAGSDSAVELAEVSAELVDLTSLIGSPAYRAGSPQREALDARIAALAARQEELEGLEARPSGWEWRETGQRFGDWWREQDTAAKNTWLRSMNVRLTFDVRGGLTRTIDFGDLQEYEQHLRLGSVVGRLHTGMP

SEQ ID NO: 11516 - protein, 500 aa, synthetic construct
MRALVVIRLSRVTDATTSPERQLESCQQLCAQRGWDVVGVAEDLDVSGAVDPFDRKRRPNLARWLAFEEQPFDVIVAYRVDRLTRSVRHLQQLVHWAEDHKKLVVSATEAHFDTTTPFAAVVIALMGTVAQMELEAIKERSRSAAHFNIRAGKYRGSLPPWGYLPMRVDEEWRLVPDPVQRERILEVYRRVVDNHEPLHLVAHDLNRRGVLSPKDYFAQLRGREPQGRKWSATALKRSMISEAMLGYATLNGKTVRDDDGAPLVRAEPILTRGQLEALRAELVKTSRAKPAVSTPSLLLRVLFCAVCGEPAYKFAGGGRKHPRYRCRSMGFPKHCGNGTVAMAEWDAFCEEQVLDLLGDAERLEKVWVAGSDSAVELAEVNAELVDLTSLIGSPAYRAGSPQREALDARIAALAARQVGLEGLEARPSGWEWRETGQRFGDWWREQDTAARNTWLRSMNVRLTFDVRGGLTRTIDFGDLQEYEQHLRLGSVVERLHTGTS

SEQ ID NO: 11517 - protein, 500 aa, synthetic construct
MRALVVIRLSRVTDATTSPERQLESCQQLCAQRGWDVVGVAEDLDVSGAVDPFDRKRRPNLARWLAFEEQPFDVIVAYRVDRLARSIRHLQQLVHWAEDHKKLVVSATEAHFDTTTPFAAVVIALMGTVAQMELEAIKERSRSAAHFNIRAGKYRGSLPPWGYLPTRVDGEWRLVPDPVQRERILEVYHRVVDNHEPLHLVAHDLNRRGVLSPKDYFAQLQGREPQGRKWSATALKRSMTSGAMLGYATLNGKTVRDDDGAPLVRAEPILTREQLEALRAELVKTSRAKPAVSTPSLLLRVLFCAVCGEPAYKFAGGGRKHPRYRCRSMGFPKHCGNGTVAMAEWDAFCEEQVLDLLGDAERLEKVWVAGSDSAVELAEVSAELVDLTSLIGSPAYRAGSPQREALDARIAALAARQEELEGLEARPSGWEWRETGQRFGDWWREQDTAAKNTWLRSMNIRLTFDVRGGLTRTIDFGDLQEYEQHLRLGSVVERLHAGMS

SEQ ID NO: 11518 - protein, 500 aa, synthetic construct
MRALVVIRLSRVTDATTSPERQLESCQQLCAQRGWDVVGVAEDLDVSGAVDPFDRKRRPNLARWLAFEERPFDVIVAYRVDRLTRSIRHLQQLVHWAEDHKKLVVSATEAHFDTTTPFAAVVIALMGTVAQMELEAIKERSRSAAHFNIRAGKYRGSLPPWGYLPARVDGEWRLVPDPVQRERILEVYHRVVDDHEPLHLVAHDLNRRGVLSPKDYFAQLRGREPQGRKWSATALKRSMISEAMLGYATLNGKTVRDDDGAPLVRAEPILTREQQEALRAELVKTSRAKPAVSTPSLLLRVLFCAVCGEPAYKFAGGGRKHPRYRCRSMGFPKHCGNGTVAMAEWDAFCEEQVLDLLGDTERLEKVWVAGSDSAAELAEVNAELVDLTSLIGSPAYRAGSPQREALDARITALTARQEELEGLEARPSGWEWRGTGQRFGDWWHEQDTAAKNTWLRSMNVRLTFDVRGGLTRTIDFGDLQEYEQHLRLGSAVERLHTGMS

SEQ ID NO: 11519 - protein, 500 aa, synthetic construct
MRALVVIRLSRVTDATTSPERQLESCQQLCAQRGWDVVGVAEDLDVSGAVDPFDRKRRPNLARWLASEEQPFDVIVAYRVDRLTRSTRHLQQLVHWAEDHKKLVVSATEAHFDTTTPFAAVVIALMGTVAQMELEAIKERNRSAAHFNIRAGKYRGSLPPWGYLPARVGGEWRLVPDPVQRERILEVYHRVVDNHEPLHLVAHDLNRRGVLSPRDYFAQLQGREPQGRKWSATALKRSMISEAMLGYATLNGKIVRDDDGAPLVRAEPILTREQLEALRAELVKTSRAKPAVSAPSLLLRVLFCAVCGEPAYKFAGGGRKHPRYRCRSMGFPKHCGNGTVAMTEWDVFCEEQVLDLLGDAERLEKVWVAGSDSAVELAEVNAELVDLTGLIGSPAYRAGSPQREALDARIAALAARQVELEGSEARPSGWEWRETGQRFGDWWREQDTAAKNTWLRSMNVRLTFDARGGLTRTIDFGDLQEYEQHLRLGSVVERLHTGMS

SEQ ID NO: 11520 - protein, 500 aa, synthetic construct
MRALVVIRLSRVTDATTSPERQLESCQQLCARRGWNVVGVAEDLDVSGAVDPFDRKRRPNLARWLAFEEQPFDAIVAYRVDRLTRSIRHLQQLVHWAEDHKKLVVSATEAHFDTTTPFAAVVIALMGTVAQMELEAIKERNRSAAHFNIRAGKYRGSLPPWGYLPTRVDGEWRLAPDPVQRERILEVYHRVVDNHEPLHSVAHDLNRRGVLSPKDYFAQLQGREPQGRKWSATALKRSMISGAMLGYATLNGKIVRDDDGAPLVRAEPILTREQLEALRAELVKTSRAKPAVSTPSLLLRVLFCAVCGEPAYKFAGGGRKHSRYRCRSMGFPKHCGNGTVAMAEWDAFCEEQVLDLLGDVERLEKVWVAGSDSAVELAEVSAELVDLTSLIGSPAYRAGSPQREALDARIAALAARQEELEGLEARPSGWEWRETGQRFGDWWREQDTAAKNSWLRSMNVRLTFDVRGGLIRTIDFGDLQEYEQHLRLGSVVERLHTGMS

SEQ ID NO: 11521 - protein, 500 aa, synthetic construct
MRALVVIRLSRVTDATTSPERQLESCQQLCAQRGWDVVGVAEDLDVSGAVDPFDRKRRPNLARWLAFEEQPFDVIVAYRVDRLTRSVRHLQQLVHWAEDHKKLVVSATEAHFDTTTPFAAVVIALMGTVAQMELEAIKERSRSAAHFNIRAGKYRGSLPPWGYLPARVDGEWRLVPDPVQRERILEVYHRVVDNHEPLHLVAHDLNRRGVLSPKDYFAQLRGREPQGRKWSATALKRSMISVAMLGYATLCGKTARDDDGAPLVRAEPILTREQLEALRAELVKTSRAKPAVSTPSLLLRVLFCAVCGEPAYKFAGGGRKHPRYRCRSMGFPKHCGNGTVAMAEWDAFCEEQVLNLLGDAERLEKVWVAGSDSAVELAEVNKELVDLTSLIGSPAYRAGSPQHEALGARIAALAARQEELEGLEARPSGWEWRETGQRFGDWWREQDTAAKNTWLRSMNVRLTFDVRGGLTRTIDFGDLQEYEQHLRLGSVVERLHTGMS

SEQ ID NO: 11522 - protein, 500 aa, synthetic construct
MRALVVIRLSRVTDATTSPERQLESCQQLCAQRGWDVVGVAEDLDVSGAVDPFDRKRRPNLARWLAFEEQPFDVIAAYRVDRLTRSIRHLQQLVHWAEDHKKLVVSATEAHFDTTTPFAAVVIALMGTVAQMELEAIKERNRSAAHFNIRAGKYRGSLPPWGYLPTRVDGEWRLVPDPAQRERILEVYHRVVNNHEPLHLVAHDLNRRGVLSPKDYFAQLRGREPQGRKWSATALKRSMISEAMLGYATLNGETVRDDDGAPLVRAEPILTREQQEALRAELAKTSRAKPAVSTPSLLLRVLFCAVCGEPAYKFAGGGRKHPRYRCRSMGFPKHCGNGTVAMAEWDAFCEEQVLGLLGDAERLERVWVAGSDSAVELAEVNAELVDLTSLIGSPAYRAGSPQREALDARIAALAARQEELEGLEARPSGWKWRGTGQRFGDWWREQDTAAKNTWLRSMNVRLTFDVRGGLTRTIDFGDLQEYEQHLRLGSVVERLHTGMP

SEQ ID NO: 11523 - protein, 500 aa, synthetic construct
MRVLVVIRLSRVTDATTSPERQLESCQQLCAQRGWDVVGVAEDLDVSGAVDPFDRKRRPNLARWLAFEEQPFDVIVAYRVDRLTRSVRHLQQLVHWAEDHKKLVVSATEAHFDTTTPFAAVVIALMGTVAQMELEAIRERSRSAAHFNIRAGKYRGSLPPWGYLPARVDGEWRLAPDPVQRERILEVYHRVVDNHEPLHLVAHDLNRRGVLSPKDYFAQLQGREPQGRKWSATALKRSMISEVMLGYATLNGKTVRDDDGAPLVRAEPILTREQLEALRAELVKTSRAKPAVSTPSLLLRVLFCAVCGEPAYKFAGGGRKHPRYRCRSMGFPKHCGNGTVAMAEWDAFCEEQVLDLLGDAERLEKVWVAGSDSAVELAEVNAELVDLTSLIGSPAYRAGSPQREALDARIAALAARQEELEGLEARPSGWEWRGTGQRFGDWWREQDTAAKNTWLRSMNVRLTFDVRGGLTRTIDFGDLQEYEQHLRLGSVVGRLHTGVS

SEQ ID NO: 11524 - protein, 500 aa, synthetic construct
MRALVVIRLSRVTDATTSPERQLESCQQLCAQRGWDVVGVAEDLDVSGAVDPFDRKRRPNLARWLAFEEQPFDVIVAYRVDRLTRSTRHLQQLVHWAEDHKKLVVSATEAHFDTTTPFAAVVIALMGTVAQMELEAIKERNRSAAHFNIRAGKYRGSLPPWGYLPTRVDGEWRLVPDPVQRERILEVYRRVVDNHEPLHLVAHDLNRRGVLSPKDYFAQLRGREPQGRKWSATALKRSMISEAMLGYATLNGKTVRDDDGAPLVRAEPILTREQQEALRAELVKTSRARPAVSTPSLLLRVLFCAVCGEPAYKFSGGGRKHPRYRCRSMGFPKHCGNGTVAMAEWDAFCEEQVLSLLGDAERLEKVWVAGSDSAVELAEVNAELVDLTSLIGSPAYRTGSPQREALDARIAALAARQEELEGLEARPSGWEWRRTGQRFGDWWREQDTAAKNTWLRSMNVRLTFDVRGGLTRTIDFGDLQGYEQHLRLGSEVERLHTGMS

SEQ ID NO: 11525 - protein, 500 aa, synthetic construct
MRVLVVIRLSRVTDATTSPERQLESCQQLCAQRGWDVVGVAEDLDVSGAADPFDRKRRPNLARWLAFEEQPFDVIVAYRVDRLTRSTRHLQQLVHWAEDHKKLVVSATEAHFDTTTPFAAVVIALMGTVAQMELEAIKERSRSAAHFNIRAGKYRGSLPPWGYLPTRVDGEWRLVPDPVQRERILEVYHRVVDNHEPLHLVAHDLNRRGVLSPKDYFAQLRGREPQGRKWSASALKRSMISEAMLGYATLNGKTVRDDDGAPLVRAEPILTREQQEALRAELVKTSRAKPAVSTPSLLLRVLFCAVCGEPAYKFAGGGRKHPRYRCRSMGFPKHCGNGTVATAEWDAFCEEQVLDLLGDAERLEKVWVAGSDSAVELAEVNAELVDLTSLIGSPAYRAGSPQREALDARIAALAARQEELEGLEARPSGWEWRETGQRFGDWWREQDTAAKNTWLRSMNVRLTFDVRGGLTRTIDFGDLQEHEQHLRLGSVVERLRTGMS

SEQ ID NO: 11526 - protein, 500 aa, synthetic construct
MRALVVIRLSRVTDATTSPERQLESCQQLCAQRGWDVVGVAEDLDVSGAVDPFDRKRRPDLARWLAFEEQPFDVIVAYRVDRLTRSTRHLQQLVHWAEDHKKLVVSATEAHFDTTTPFAAVVIALMGTVAQMELEAIKERSRSAAHFNIRAGKYRGSLPPWGYLPTRVDGEWRLAPDPVQRERILEVYHRVVDNHEPLHLVAHDLNRRGVLSPKDYFAQLQGREPRGRKWSATALKRSMISEAMLGYATLNGKTVRDDDGAPLVRAEPILTREQLEAIRAELVKTSRAKPAVSTPSLLLRVLFCAVCGEPAYKFTGGGRKHPRYRCRSMGLPKHCGNGTVAMAEWDAFCEEQVLDLLGDAERLEKVWVAGSDSAVELAEVNAELVDLTSLIGSPAYRAGSPQRQALDARIAALAARQEELEGLEARPSGWEWRGTRQRFGDWWREQDTAAKNTWLRSMNVRLTFDVRGGLTRTIDFGDLQEYEQHLRLGSVVERSHTGMS

SEQ ID NO: 11527 - protein, 500 aa, synthetic construct
MRALVVIRLSRVTDATTSPERQLESCQQLCAQRGWDVVGVAEDLDVSGAVDPFDRKRRPNLARWLAFEEQPFDVIVAYRIDRLTRSTRHLQQLVHWAEDHKKLVVSATEAHFDTTTPFAAVVIALMGTVAQMELEAIKERSRSAAHFNIRAGKYRGSLPPWGYLPTRVDGEWRLVPDPVQRERILEVYHRVVDNHEPLHLVAHDLNRRGVLSPRDYFAQLRGREPQGRKWSATALKRSMISGAMLGYATLNGKTVRDDDGAPLVRAEPILTREQLEALRAELVKTSRAKPAVSTPSLLLRVLFCAVCGEPAYKFAGGGRKHSRYRCRSMGFPKHCGNGSVAMAEWDAFCEERVLDLLGDAERLEKVWVAGSDPAVELAEVSAELVDLTSLIGSPVYRADSPQREALDARIAALAARQEELEGLEARPSGWEWRGTGQRFGDWWREQDTAAKNTWLRSMNVRLTFDVRGGLTRTIDFGDLQEYEQHLRLGSVAERLHSGTS

SEQ ID NO: 11528 - protein, 500 aa, synthetic construct
MRALVVIRLSRVTDATTSPERQLESCQQLCAQRGWDVVGVAEDLDVSGVVDPFDRKRRPNLARWLAFEERPFDVIVAYRVDRLTRSIRHLQQLVHWAEDHKKLVVSATEAHFDMTTPFAAVVIALMGTVAQMELEAIKERNRSAAHFNIRAGKYRGSLPPWGYLPTRVDGEWRLVPDPVQRERILEVYHRVVDNHEPLHLVAHDLNRRGVLSPKDYFAQLQGREPQGRKWSATALKRSMISEAMLGYATLNGKTVRDDDGAPLVRAEPILTREQQEALRAELVKTSRAKPAVSTPSLLLRVLFCAVCGEPAYKFAGGGRKHPRYRCRSMGFPKHCGNGTVAMAEWDAFCEEQVLNLLGDAERLEKVWVAGSDSAVELAEVNAELVDLTSLIGSPAYRAGSMQREALDARIAALAARQEELEGLEARPSGWEWRGTGQRFGDWWREQDTAAKNTWLRTMNVRLTYDVRGGLTRTIDFGDLQEYEQHLRSGSVVERLHTGMS

SEQ ID NO: 11529 - protein, 500 aa, synthetic construct
MRALVVIRLSRVTDATTSPERQLESCRQLCAQRGWDVVGVAEDLDVSGAVDPFDRKRRPNLARWLAFEERPFDVIVAYRVDRLTRSIRHLQQLVHWAEDHKKLVVSATEAHFDTTTPFAAVVIALMGTVAQMELEAIKERSRSAAHFNIRAGKYRGSLPPWGYLPTRVDGEWRLAPDPVQRERILEVYHRVVDNHEPLHLVAHDLNRRGVLSPKDYFAQLQGREPQGRKWSATALKRSMTSEAMLGYATLNGKTVRDDDGAPLVRAEPILTREQLEALRAELVKTSRAKPAVSTPSLLLRVLFCAVCGEPAYKFSGGGRKHPRYRCRSMGFPKHCGNGTVAMAEWDAFCEEQVLDLLGDAERLEKVWVAGSDSAVELAEVNAELVDLTSLIGSPAYRAGSPQREALDARIAALAARQEELEGLEARPSGWEWRRTGQRLGDWWREQDTAAKNFWLRSMNVRLTFDVRGGLTRTIDFGDLLEYGQHLRLGSVVERLHTGMP

SEQ ID NO: 11530 - protein, 500 aa, synthetic construct
MRALVVIRLSRVTDATTSPERQLESCQQLCVQRGWDVVGVAEDLDVSGAVDPFDRKRRPNLARWLAFEEQPFDVIVAYRVDRLARSIRHLQQLVHWAEDHKKLVVSATEAHFDTTTPFAAVVIALMGTVAQMELEAIKERSRSAAHFNIRAGKYRGSLPPWGYLPARVDGEWRLVPDPVQRERILEVYHRVVVNHEPLHSVAHDLNRRGVLSPKDYFAQLRGREPQGRKWSATALKRSLISEAMLGYATLNGKTVRDDDGAPLVRAEPILTREQLEALRAELVKTSRAKPAVSTPSLLLRVLFCAVCGEPAYKFAGGGRKHPRYRCRSMGFPKHCGNGTVAMAQWDTFCEEQVLNLLGDAERLEKVWVAGSDSAVELAEVNAELVDLTSLVGSPAYRAGSPQREALDARIAALAARQEELEGLEARPSGWEWRETGQRFGDWWREQDTAAKNAWLRSMNVRLTFDVRGGLTRTIDFGDLQEYGQHLRLGSVDERLHTGMS

SEQ ID NO: 11531 - protein, 500 aa, synthetic construct
MRALVVIRLSRVTDATTSPERQLESCLQLCARRGWDVVGVAEDLDVSGAVDPFDRKRRPNLASWLAFEEQPFDAIVAYRVDRLTRSIRHLQQLVHWADDHKKLVVSATEAHFDTTTPFAAVVIALMGTVAQMELEAIKERSRSAAHFNIRAGKYRGSLPPWGYLPARVDGVWRLVPDPVQRERILEVYHRVVNDHEPLHLVAHDLNRRGVLSPKDYFAQLQGREPQGRKWSATALKRSMISEAMLGYATLNGKTVRDDDGAPLVRAEPILTREQQEALRAELVKTSRAEPAVSAPSLLLRVLFCAVCGEPAYKFAGGGRKHPRYRCRSMGFPKHCGNGTVAMAEWDAFCEEQVLGLLGDAERLEKVWVAGSDSAVELAEVNAELVDLTSLIGSPAYRAGSPQREALDARIAALAARQEELEGLEARPSGWEWRGTGQRFGDWWREQDTAAKNTWLRSMNVRLTFDVRGGLTRTIDFGDLQEYEQHSRLGSVVERLHSGMS

SEQ ID NO: 11532 - protein, 500 aa, synthetic construct
MRALVVIRLSRVTDATTSPERQLESCQQLCAQRGWDVIGVAEDLDVSGAVDPFDRKRRPNLARWLAFEEQPFDAIVAYRVDRLTRSIRHLQQLVHWAEDHKKLVVSATEAHFDTTTPFAAVVIALMGTVAQMELEAIKERSRSAAHFNIRAGKYRGSLPPWGYLPARVDGEWRLVPDPVQRERILEVYHRVVDDHEPLHLVAHDLNRRGVLSPKDYFAQLQGREPQGRKWSATALKRSMISGAMLGHATLSGKTVRDDDGAPLVRAEPILTREQQEALRAELVKTSRAKPAVSTPSLLLRVLFCAVCGEPAYKFTGGGRKHPRYRCRSMGFPKHCGNGTVAMAEWDAFCEEQVLDLLGDAERLEKVWVAGSDSAVELAEVNAELVDLTSLIGSPAYRAGSPQREALDARIAALAARQEELEGLEARPPGWEWRETGQRFGDWWREQDTVAKNTWLRSMNVRLTFDVRGGLTRSVDFGDLREYEQHLRLGSVVERLHTGMS

SEQ ID NO: 11533 - protein, 500 aa, synthetic construct
MRALVVIRLSRVTDATTSPERQLESCQQLCAQRGWDVVGVAEDLDVSGAVDPFDRKRRPNLARWLAFEELPFDVIVAYRVDRLTRSVRHLQQLVHWAEDHKKLVVSATEAHFDTATPFAAVVIALMGTVAQMELEAIKERSRSAAHFNIRAGKYRGSLPPWGYLPTRVDGEWRLVPDPVQRERILEVYHRVVDNHEPLHLVAHDLNRRGVLSPRDYFAQLQGREPQGRKWSATALKRSMTSEAMLGYATLNGKTVRDDDGAPLVRAEPILTREQLEALRAELVKTSRAKPAVSTPSLLLRVLFCAVCGEPAYKFAGGGRKHPRYRCRSMGFPKHCGNGTVAMAEWDAFCEEQVLDLLGDAERLEKVWVAGSDSAVKLAEVNAELVDLTSLIGSPAYRAGSPQREALDARIAALAARQEELEGLEARPSGWGWRETGQRFGDWWREQDTAAKNTWLRSMNVRLTFDVRGGLTRTIDFGDLQEYEQHLRLGSVVERLHTGVS

SEQ ID NO: 11534 - protein, 500 aa, synthetic construct
MRALVVIRLSRVTDATTSPERQLESCQQLCAQRGWDVVGVAEDLDVSGAVDPFDRKRRPNLARWLAFEEQPFDVIVAYRVDRLTRSVRHLQQLVHWAEDHKKLVVSVTEAYFDTTTPFAAVVIALMGTVAQLELEAIKERSRSAAHFNIRAGKYRGSLPPWGYLPTRVDGEWRLAPDPVQRERILEVYHRVVDNHELLRLVAHDLNRRGVLSPKDYFAQLQGREPQGRKWSATALKRSMTSEAMLGYATLNGETVRGDDGAPLVRAEPILTREQLEALRAELVKTSRAKPAVSTPSLLLRVLFCAVCGEPAYKFSGGGRKHPRYRCRSMGFPKHCGNGTVAMAEWDAFCEEQVLDLLGDAERLEKVWVAGSDSAVELAEVNAELVDLTSLIGSPAYRAGSPQREALDARIAALAARQEELEGLEARPSGWEWRETGQRFGDWWREQDTAAKNTWLRSMNVRLTFDVRGGLTRSIDFGDLQVYEQHLRLGSVVERLHTGMS

SEQ ID NO: 11535 - protein, 500 aa, synthetic construct
MRALVVIRLSRVTDATTSPERQLESCQRLCAQRGWDVVGVAEDLDVSGAVDPFDRKRRPNLARWLAFEEQPFDVIVTYRVDRLTRSTRHLQQLVHWAEDHKKLVVSATEAHFDTTTPFAAVVIALMGTVAQMELEAIKERSRSAAHFNIRAGKYRGSLPPWGYLPTRVDGEWRLVPDPAQRGRILEVYHRVVDNHEPLHLVAHDLNRRGVLSPRDYFAQLQGREPQGRKWSATALKRSMTSEAMLGYATLNGKTVRDDDGAPLVRAEPILTREQQEALRAELVKTSRAKPAVSTPSLLLRVLFCAVCGEPAYKFAGGGRKHPRYRCRSMGFPKHCGNGTVAMAEWDAFCEEQVLELLGDAERLEKVWVAGSDSAVELAEVNAELVDLTSLVGSPAYRAGSPQRGALDARIAALAARQEELEGLEARPSGWEWRGTGQRFGDWWREQDTAAKNTWLRSMNVRLTFDVRGGLTRTIDFGDLQGYEQHLRLGSVIERLHTGMS

SEQ ID NO: 11536 - protein, 500 aa, synthetic construct
MRALVVIRLSRVTDATTSPERQLESCQQLCAQRGWVVVGVAEDLDVSGAVDPFDRKRRPNLARWLAFEEQPFDVIVAYRVDRLARSIRHLQQLVHWAEDHKKLVVSATEAHFDTTTPFAAVVIALMGTVAQMELEAIKERSRSAAHFNIRAGKYRGSLPPWGYLPTRVDGEWRLAPDPVQRERILEVYHRVVDNHEPLHLVAHDLNRRGVLSPRDYFAQLQGREPQGRKWSATALKRSMISEAMLGYATLNGKTVRDDDGAPLVRAEPILAREQLEALRAELVKTSRAKPAVSTPSLLLRVLFCAVCGEPAYKFTGGGRKHPRYRCRSMGFPKHCGNGTVAMAEWDAFCEEQVLGLLGDAERLEKVWVAGSDSAVELAEVNAELVDLTSLIGSPAYRAGSPQREALDARIAALAARQGELEGLEARPSGWEWRETGQRFGDWWREQDTAAKNTWLRSMNVRLTFDVRGGLTRTVDLGDLREYEQHLRLGSVVERLHTGMS

SEQ ID NO: 11537 - protein, 500 aa, synthetic construct
MRALVVIRLSRVTDATTSPERQLESCQQLCAQRGWDVVGVAEDLDVSGAVDPFDRKRRPNLARWLAFEEQPFDVIVAYRVDRLTRSTRHLQQLVHWAEDHKKLIVSATEAHFDTTTPFAAVVIALMGTVAQMELEAIKERSRSAAHFNIRAGKYRGSLPPWGYLPTRVDGEWRLVPDPVQRERILEVYHRVVDNHEPLHLVAHDLNRRGVLSPKDYFAQLRGREPQGRKWSATALKRSMISEAMLGYATLGGKTVRDDDGAPLVRAEPILTREQLEALRAELVKTSRAKPAVSTPSLLLRVLFCAVCGEPAYRFSGGGRKHPRYRCRSMGFPKHCGNGTVAMAEWDAFCEEQVLNLLGDAERLEKVWVAGSDSAVELAEVNTELVDLTSLIGSPAYRAGSPQREALDARITALAARQEELEGLGARPSGWEWRGTGQRFGDWWREQDTAAKNTWLRSMNVRLTFDVRGGLTRTIDFGDLHEYEQHLRLGSVVEHLHAGMS

SEQ ID NO: 11538 - protein, 500 aa, synthetic construct
MRALVVIRLSRVTDATTSPERQLESCQQLCAQRGWDVVGVAEDLDVSGSVDPFDRKRRPDLARWLAFEEQPFDVIVAYRVDRLARSIRHLQQLVHWAEDHKKLVVSATEAHFDTTTPFAAVVIALMGTVAQMELEAIKERNRSAAHFNIRAGKYRGSLPPWGYLPARVDGEWRLVPDPVQRERILEVYHRVVDNHEPLHLVAHDLNRRGVLSPKDYFAQLRGREPQGRKWSATALRRSMISEAMLGYATLNGKTVRDEDGAPLVRAEPILTREQREALRAELVKTSRAKPAVSTPSLLLRVLFCAVCGEPAYKFAGGGRKHPRYRCRSMGFSKHCGNGTVAMAEWDAFCEEQVLDLLGDAERLEKVWVAGSDSAVELAEVNAELVDLTSLIGSPAYRASSPQREALDARIAALAARQEELEGLEARPSGWEWRETGQRFGDWWREQDTAAKNTWLRSMNVRLTFDVRGGLTRTIDFGDLREYEQHLRLGSVVERLHTGMS

SEQ ID NO: 11539 - protein, 500 aa, synthetic construct
MRALVVIRLSRVTDATTSPERQLESCQQLCAQRGWDVVGVAEDLDVSGAVDPFDRKRRPNLARWLAFDEQPFDVIVAYRVDRLARSVRHLQQLVRWAEDHKKLVVSATEAHFDTTTPFAAVVIALMGTVAQMELEAIKERSRSAAHFNIRAGKYRGSLPPWGYLPMRVDGEWRLVPDPVQRERILEVYHRVVDNHEPLHLVAHDLNRRGVLSPKDYFAQLQGREPQGRRWSATALKRSMISVAMLGYATLNGKTVRDDDGAPLVRAEPILTREQLEALRAELVKTPRAKPAVSTPSLLLRVLFCAVCGEPAYKFAGGGRKHPRYRCRSMGFPKHCGNGTVAMAEWDAFCEEQVLDLLGDAERLEKVWVAGSDSAVELAEVNAELVDLTSSIGSPAYRAGSPQREALDARIAALAARQEELEGLEARPSGWEWRETGQRFGDWWREQDTVAKNTWLRSMNVRLTFDVRGGLTRTIDFGDLQEYEQHLRLGSVVERLHTGRS

SEQ ID NO: 11540 - protein, 500 aa, synthetic construct
MRALVVIRLSRVTDATTSPERQLESCQQLCAQRGWDVVGVAEDLDVSGSVDPFDRKRRPNLARWLAFEEQPFDVIVAYRVDRLARSIRHLQQLVHWAEDHKKLVVSATEAHFDTTTPFAAVVIALMGTVAQMELEAIKERSRSAAHFNIRAGKYRGSLPPWGYLPTRVDGEWRLVPDPVQRERILEVYLRVVDNHEPLHLVAHDLNRRGVLSPKDYFAQLRGREPQGRKWSATALKRSMTSEAMLGYATLNGKTVRDDDGAPLVRAEPILTREQLEALRAELVKTSRAKPAVSTPSLLLRVLFCAVCGEPAYKFAGGGRKHPRYRCRSMGFPKHCGNGTVAMAEWDAFCEEQVLGLLGDAERLEKVWVAGSDSAVELAEVNAELVNLTSLIGSPAYRADSPQRGALDARIEALAARQEELEGLEARPSGWEWRGTGQRFGDWWREQDTAAKNTWLRSMNVRLTFDVRGGLTRTIDFGDLQEYEQHLRLGSVVERLHTGMS

SEQ ID NO: 11541 - protein, 500 aa, synthetic construct
MRALVVIRLSRVTDATTSPERQLESCQQLCAQRGWDIVGVAEDLDVSGAVDPFDRKRRPNLARWLAFEEQPFDAIVAYRVDRLTRSIRHLQQLVHWAEDHKKLVVSATEAHFDTTTPFAAVVIALMGTVAQMELEAIKERNRSAAHFNIRAGKYRGSLPPWGYLPARVDGEWRLVPDPVQRERILEVYHRVVDNHEPLHLVAHDLNRRGVLSPKDYFAQLRGREPQGRKWSATALKRSMISVAMLGYATLCGKTVRDDDGAPLVRAEPILTREQLEALRAELVKTSRAKPAVSTPSLLLRVLFCAVCGEPAYKFAGGGRKHPRYRCRSRGFPKHCGNGTVAMAEWDGFCEEQVLDLLGDAERLEKVWVAGSDFAVELAEVNAELVDLTSLIGSPAYRAGSPQREALDARIAALAARQEELEGLEARPSGWEWRETGQRFGDWWREQDTAAKNTWLRSMNIRLTFDVRGGLTRTIDFGDLLEYEQHLRLGSVVERLHTGMS

SEQ ID NO: 11542 - protein, 500 aa, synthetic construct
MRALVVIRLSRVTDATTSPERQLESCQQLCAQRGWDVVGVAEDLDVSGAVDPFDRKRRPNLARWLAFEEQPFDVIVAYRVDRLTRSTRHLQQLVHWAEDHKKLIVSATEAHFDTTTPFAAVVIALMGTVAQMELEAIKERNRSAAHFNIRAGKYRGSLPPWGYLPTRVGGEWRLAPDPVQRERILEVYHRVVDNHEPLHLVAHDLNRRGILSPRDHFAQLQGREPQGRKWSTTALKRSMISVAMLGYATLNGKTVRDDDGAPLVRAEPILTREQLEALRAELVKTSRAKPAVSTPSLLLRVLFCAVCGEPAYKFAGGGRKHPRYRCRSMGFPKHCGNGTVAMAEWDAFCEEQVLDLLGDAERLEKVWVAGSDSTVELAEVNAELADLTSLIGSPAYRAGSPQREALDARIAALAARQEELEGLEARPSGWEWRETGQRFRDWWREQDTAAKNTWLRSMNVRLTFDVRGGLTRTIDFGDLQEYEQHLRLGSVVERLHTGMS

SEQ ID NO: 11543 - protein, 500 aa, synthetic construct
MRTLVVIRLSRVTEATTSPERQLESCQQLCAQRGWDVVGVAEDLDVSGAVDPFDRKRRPNLARWLAFEEQPFDVIVAYRVDRLTRSIRHLQQLVHWAEDHKKLVVSATEAHFDMTTPFAAVVIALMGTVAQMELEAIKERSRSAAHFNIRAGKYRGSLPPWGYLPTRVDGEWRLAPDPVQRECILEVYHRVVDNHEPLHLVAHDLNRRGVLSPKDYFAQLQGREPQGRKWSATALKRSMISEAMLGYATLNGKTVRDDNGAPLVRAEPILTREQLEALRAELVKTSRAKPAVSTPSLLLRVLFCAVCGEPAYKFAGGGRKHPRYRCRSMGFPKHCGNGTVAMAEWDAFCEEQVLDLLGDAERLEKVWVAGSDSAVELAEVNAELVDLTSLIGSPAYRAGSPQREALDARIAALAARQEELEGLEARPSGWEWRETGQRFGDWWHEQDTAAKNTWLRSMNVRLTFDVRGGLTRTIDFGDLQEYEQHLRLGGVVERLHTGMS

SEQ ID NO: 11544 - protein, 500 aa, synthetic construct
MRALVVIRLSRVTDATTSPERQLESCQQLCAQRGWDVVGVAEDLDVSGAVDPFDRKRRPNLARWLAFEEQPFDVIVAYRVDRLTRSTRHLQQLVHWAEDHKKLVVSATEAHFDTTTPFAAVVIALMGTVAQMELEAIKERSRSAAHFNIRAGKYRGSLPPWGYLPARVDGEWRLVPDPVQRERILEVYHRVVDNREPLHLVAHDLNRRGVLSPKDYFAQLQGREPQGRKWSATALKRSMTSEAMLGHATLNGKTVRDEDGAPLVRAEPILTREQLEALRAELVKTSRAKPAVSTPSLLLRVLFCAVCGEPAYKFAGGGRKHPRYRCRSMGFPKHCGNGTVAMAEWDAFCEEQVLDLLGDAERLEKVWVAGSDSAVELAEVNAELVDLTSLIGSPAYRAGSPQREALDARIAALAARQEELEGLEARPSGWEWRGTGQRFGDWWREQDTAAKNTWLRSMNVRLTFDVRGGLTRTIDFGDLQEYEQHLRLGSAAERLHTGMS

SEQ ID NO: 11545 - protein, 500 aa, synthetic construct
MRALVVIRLSRVTDATTSPERQLGSCQQLCAQRGWDVVGVAEDLDVSGAVDPFDRKRRPSLARWLAFEEQPFDAIVAYRVDRLTRSIRHLQQLVHWAEDHKKLVVSATEAHFDTTTPFAPVVIALMGTVAQMELEAIKERNRSAAHFNIRAGKYRGSLPPWGYLPARVDGEWRLVPDPVQRERILEVYHRVVDKHEPLHLVAHDLNRRGVLSPKDYFAQLRGREPQGRKWSATALKRSMISVAMLGYATLNGKTVRDDNGAPLVRAEPILTREQLEALRAELAKTSRAKPAVSTPSLLLRVLFCAVCGEPAYKFSGGGRKHPRYRCRSMGFPKHCGNGTVAMAEWDAFCEEQVLDLLGDAERLEKVWVAGSDSAVELTEVNAELVDLTSLIGSPAYRAGSPQREALDARIAALAARQGELEGLEARPSGWEWRETGQRFGDWWREQDTAAKNTWLRSMNVRLTFDVRGGLTRTIDFGDLQEYEQHLRLGSVVERLHTGTS

SEQ ID NO: 11546 - protein, 500 aa, synthetic construct
MRALVVIRLSRVTDATTSPERQLESCQQLCAQRGWDVVGVAEDLDVSGAVDPFDRKRRPNLARWLAFEEQPFDVIVAYRVDRLARSIRHLQQLVHWAEDHKKLVVSATEAHFDTTTPFAAVVIALMGTVAQMELEAIKERNRSAAHFNIRAGKYRGSLPPWGYLPTRVDGEWRLVPDPVQRERILEVYHRVVDNHEPLHLVAHDLNRRGVLSPKDYFAQLQGREPQGRKWSATALKRSMISEAMLGHATLNGKTVRDDDGAPLVRAEPILTRGQLEALRAELVKTSRAKPAVSTPSLLLRVLFCAVCGEPAYKFAGGGRKHSRYRCRSMGFPKHCGNGTVAMAEWDAFCEEQVLGLFGDVERPEKVWVAGSDSAVGLAEVNAELVDLTSLIGSPAYRAGSPQREALDARIAALAARQEELEGLEARPSGWEWRGTGQRFRDWWREQDTAAKNTWLRSMNVRLTFDVRGGLTRTIDFGDLQEYEQHLRLGGVVERLHTGMS

SEQ ID NO: 11547 - protein, 500 aa, synthetic construct
MRALVVIRLSRVTDATTSPERQLESCQQLCAQRGWDVVGVAEDLDVSGAVDPFDRKRRPNLARWLAFEEQPFDVIVAYRVDRLTRSIRHLQQLVHWAEDHKKLVVSATEAHFDTTTPFAAVVIALMGTVAQMELEAIKERNRSAAHFNIRAGKYRGSLPPWGYLPTRVDGEWRLVPDPVQRERILEVYRRVVDNHEPLHLVAHDLNRRGVLSPKDYFAQLQGREPQGRKWSATALKRSMTSEAMLGHATLNGKTVRDDDGAPLVRAEPILTREQLEALRAELVKTSRTKPAVSTPSLLLRVLFCAVCGEPAYKFSGGGRKHPRYRCRSMGYPKHCGNGTVAMAEWDAFCEEQVLDLLGDSERLEKVWVAGSDSAIELAEVNAELVDLTSLIGSPAYRAGSPQREALDARIAALAARQEELEGLEARPSGWEWRETGQRFGDWWREQDTAAKNTWLRSMNVRLTFDVRGGLTRTIDFGDLQEYEQHLRLGSVVERLHTGMS

SEQ ID NO: 11548 - protein, 500 aa, synthetic construct
MRALVVIRLSRVTDATTSPERQLESCQQLCAQRGWDVVGVAEDLDVSGTVDPFDRKRRPSLARWLAFEEQPFDVIVAYRVDRLTRSIRHLQQLVHWAEDHKKLVVSATEAHFDTTTPFAAVVIALMGTVAQMELEAIKERNRSAAHFNIRAGKYRGSLPPWGYLPARVDGEWRLVPDPVQRERILEVYHRVVDDHEPLHLVAHDLNRRGVLSPRDYFAQLRGREPQGRKWSATALKRSMISEAMLGYATLNGKTVRDDDGAPLVRAEPILTREQLEALRAELVKTSRAKPAVSTPSLLLRVLFCAVCGEPAYKFAGGGRKHPRYRCRSMGFPKHCGNGTVAMAEWDAFCEEQVLDLLGDAERLEKVWVAGSDSAVELAEVNAELVDLTSLIGSSAYRAGSPQREALDARIAALAARQEELEGLEARPSGWEWRETGQRFGDWWREQDTAAKNTWLRSMNVRLTFDVRGGLTRTIDFGDLQEYEQHLRLGSAVERLHTGMS

SEQ ID NO: 11549 - protein, 500 aa, synthetic construct
MRALVVIRLSRVTDATTSPERQLESCQQLCAQRGWDVVGVAEDLDVSGAVDPFDRKRRPNLARWLAFEEQPFDVIVAYRVDRLTRSTRHLQQLVHWAEDHKKLVVSAAEAHFDTTTPFAAVVIALMGTVAQMELEAIKERSRSAAHFNIRAGKYRGSLPPWGYLPTRVDGEWRLAPDPVQRERILEVYHRVVGNHEPLHLVAHDLNRRGVLSPKDYFAQLRGREPQGRKWSATALKRSMTSEAMLGYATLNGKTVRDDDGAPLVRAEPILTCEQLEALRAELVKTSRAKPAVSTPSLLLRVLFCAVCGEPAYKFAGGGRKHPRYRCRSMGFPKHCGNGTVAMAEWDAFCEEQVLDLLGDAERLEKVWVAGSDSAVELAEVNAELVDLTSLIGSPAYRAGSPQREALDARIAALAARQEELEGLGARPSGWEWRETGQRFGDWWREQDTAAKNTWLRSMDVRLTFDVRGGLTRTIDFGDLQGYEQHLRLGSGAERLHTGMS

SEQ ID NO: 11550 - protein, 500 aa, synthetic construct
MRALVVIRLSRVTDATTSPERQLGSCQQLCAQRGWDVVGVAEDLDVSGAVDPFDRKRRPNLARWLAFEEQPFDVIVAYRVDRLARSIRHLQQLVHWAEDHKKLVVSATEAHFDTTTPFAAVVIALMGTVAQMELEVIKERSRSAAHFNIRAGKYRGSLPPWGYLPSRVDGEWRLVPDPVQRERILEVYHRVVDNHEPLHLVAHDLNRRGVLSPKDYFAQLRGREPQGRKWSATALKRSMISEAMLGHATLNGKTVRDDDGAPLVRAEPILTRGELEALRAELVKTSRAKPAVSTPSLLLRVLFCAVCGEPAYKFAGGGRKHPRYRCRSMGFPKHCGNGTVAMAEWDAFCEGQVLDLLGDAERLEKVWVAGSDSAVELAEVNAELVDLTSLIGSPAYRTGSPQREALDARIAALAARQEELEGLEVRPSGWEWRETGQRFGDWWREQDTAAKNTWLRSMNVRLTFDVRGGLTRTIDFGDLQGYEQHLRLGSVVERLHTGMS

SEQ ID NO: 11551 - protein, 500 aa, synthetic construct
MRALVVIRLSRVTDATTSPERQLESCQQLCAQRGWDVVGVAEDLDVSGAVDPFDRKRRPNLARWLAFEEQPFDVIVAYRVDRLTRSIRHLQQLVHWAEDHKKLVVSATEAYFDTTTPFAAVVIALMGTVAQLELEAIKERSRSAAHFNIRAGKYRGSLPPWGYLPTRVDGEWRLVPDPVQRERILEVYHRVVDNREPLHLVAHDLNRRGVLSPKDYFAQLRGREPQGRKWSATALKRSMISEAMLGYATLNGKTVRDDDGAPLVRAEPILTREQQEALRAELVKTSRAKPAVSTPSLLLRVLFCAVCGEPAYKFAGGGRKHPRYRCRSMGFPKHCGNGTVAMAEWDAFCEEQVLDLLGDAERLEKVWVAGSDSAVELAEVNAELVDLTSLISSPAYRAGSPQREALDARIAALAARQEELEGLEARPSGWEWRETGQRFGDWWREQDTAAKNTWLRSMNVRLTFDVRGGLTRTIDFGDLQEYKQHLRLGSVVERLHTGIS

SEQ ID NO: 11552 - protein, 500 aa, synthetic construct
MRALVVIRLSRVTDATTSPERQLGSCQQLCAQRGWDVVGVAEDLDVSGAVDPFDRKRRPNLARWLAFEEQPFDVIVAYRVDRLARSIRHLQQLVHWAEDHKKLVVSATEAHFDTTTPFAAVVIALMGTVAQMELEAIKERSRSAAHFNIRAGKYRGSLPPWGYLPTRVDGEWRLAPDPVQRERILEVYHRVVDNHEPLHLVAHDLNRRGVLSPKDYFAQLQGREPQGRKWSATALKRSMISVAMLGYATLNGKTVRDDDGAPLVRAEPILTREQLEALRAELVKTSRAKPAVSTPSLLLRVLFCAVCGEPAYKFAGGGRKHPRYRCRSMGFPKHCGNGTVAMAEWDAFCEEQVLDLLGDAERLEKVWVVGSDSAVEFAEVNAELVDLTSLIGSPAYRAGSPQREALDARIAALAARQEELEGLEARPSGWEWRGTGQCFGDWWREQDTAAKNTWLRSMNVRLTFDVRGGLTRTIDFGDLQEYEQHLRLGSVVERLRTGTS

SEQ ID NO: 11553 - protein, 500 aa, synthetic construct
MRALVVIRLSRVTDATTSPERQLESCQQLCAQRGWDVVGVAEDLDVSGAVDPFDRKRRPNLARWLAFEGQPFDVIVAYRVDRLARSIRHLQQLVHWAEDHKKLVVSATEAHFDTTTPFAAVVIALMGTVAQMELEAIKERNRSAARFNIRAGKYRGSLPPWGYLPARVDGEWRLVPDPVQRERILEVYHRVVDNHEPLHLVAHDLNRRGVLSPKDYFAQLRGREPQGRKWSATALKRSMISEAMLGYATLNGKTVRDDDGAPLVRAEPILTREQQEALRAELVKTSRAKPAVSTPSLLLRVLFCAVCGEPAYKFAGGGRKHPRYRCRSMGFPKHCGNGTVAMAEWDAFCEEQMLDLLGDAERLEKVWVAGSDSAVELAEVNAELVDLTSLIGSPAYRASSPQREALDARIAALAARQEELEGLEARPSGWEWRETGQRFGDWWREQDTAAKNTWLRSMNVRLTFDVRGGLTRTIDFGDLQEYEQHLRLGSVVERLHTGMS

SEQ ID NO: 11554 - protein, 500 aa, synthetic construct
MRALVVIRLSRVTDATTSPERQLESCQQLCAQRGWDVVGVAEDLDVSGAVDPFDRKRRPNLARWLAFEEQPFDVVVAYRVDRLARSIRHLQQLVHWAEDHKKLVVSATEAHFDTTTPFAAVVIALMGTVAQMELEAIKERSRSAAHFNIRAGKYRGSLPPWGYLPTRVDGEWRLVPDPVQRERILEVYHRVVDNHEPLHLVAHDLNRRGVLSPRDYFAQLRGREPQGRKWSATALKRSMTSEAMLGYATLNGKTVRDDGGAPLVRAEPILTREQLEALRAVLVKTSRAKPAVSTPSLLLRVLFCAVCGEPAYKFAGGGRKHPRYRCRSMGFPKHCGNGTVAMAEWDAFCEEQVLDLLGDAERLEKVWVAGSDSAVELAEVNAELVDLTSLIGSPAYRAGSPQREALDARIAALAARQEELEGLEARPSGWEWRETGQRFGDWWREQDTAAKNTWLRSMNVRLTFDVRGGLTRTIDFGDLQEYEQHLRLGSVVERLHTGMS

SEQ ID NO: 11555 - protein, 500 aa, synthetic construct
MRALVVIRLSRVTDATTSPERQLESCQQLCAQRGWDVVGVAEDLDVSGAVDPFDRKRRPNLARWLAFEEQPFDAIVAYRVDRLARSIRHLQQLVHWAEDHKKLVVSATEAHFDTTTPFAAVAIALMGTVAQMELEAIKERSRSAAHFNIRAGKYRGSLPPWGYLPARVDEEWRLVPDPVQRERILEVYHRVVDNHEPLHLVAHDLNRRGVLSPKDYFAQLRGREPQGRRWSATALKRSMISEAMLGYATLNGKTVRDDDGAPLVRAEPILTREQLEALRAELVKTSRAKPAVSTPSLLLRVLFCAVCGEPAYKFAGGGRKHSRYRCRSMGFPKHCGNGTVAMAEWDAFCEEQVLDLLGDAERLEKVWVAGSDSAVELAEVNAELVDLTSLICSPAYRAGSPQREALDARIAALAARQEELEGLEARPSGWEWRETGQRFGDWWCEQDTAAKNTWLRSMNVRLTFDVRGGLTRTIDFGDLQEYEQRLRLGSVVERLHTGMS

SEQ ID NO: 11556 - protein, 500 aa, synthetic construct
MRALVVIRLSRVTDATTSPERQLESCQQLCAQRGWDVVGVAEDLDVSGAVDPFDCKRRPNLARWLAFEEQPFDVIVAYRVDRLARSIRHLQQLVHWAEDHKKLVVSASEAHFDTTTPFAAVVIALMGTVAQMELEAIKERNRSAAHFNIRAGKYRGSLPPWGYLPARVDGEWRLVPDPVQRERILEVYHRVVDNHEPLHLVAHDLNRRGVLSPKDYFAQLQGREPQGRKWSATALKRSMISGAMLGYATLNGKIVRDDDGAPLVRAEPILTREQLGALRAELVRTSRAKPAVSTPSLLLRVLFCAVCGEPAYKFAGGGRKHPRYRCRSMGFPKHCGNGTVAMAEWDAFCEEQVLGLLGDAERLEKVWVAGSDSAVELAEVNVELVDLTSLIGSPAYRAGTPQREALDARIAALAARQKELEGLEARPSGWEWRETGQRFGDWWREQDTAAKNTWLRSMNVRLTFDVRGGLTRTIDFGDLQEYEQHLRLGSVVERLHTGMS

SEQ ID NO: 11557 - protein, 500 aa, synthetic construct
MRALVVIRLSRVTDATTSPERQLESCQQLCALRGWDVVGVAEDLDVSGAVDPFDRKRRPNLARWLAYEEQSFDVIVAYRVDRLTRSVRHLQQLVHWAEDHKKLVVSATEAHFDTTTPFAAVAIALMGTVAQMELEAIKERSRSAAHFNIRAGKYRGSLPPWGYLPTRVDGEWRLAPDPVQRERILEVYHRVVNNHEPLHLVAHDLNRRGVLSPKDYFAQLQGRVPQGRKWSATALKRSMISEAMLGYATLNGKTVRDDDGAPLVRAEPILTREQLEALRAELVKTSRAKPAVSTPSLLLRVLFCAVCGEPAYKFAGGGRRHPRYRCRSMGFPKHCGNGTVAMAEWDAFCEEQVLGLLGDAERLEKVWVAGSDSAVELAEVNAELVDLTSLIGSPAYRAGSPQREALDARIAALAARQKELEGLGARPSGWEWRETGQRFGDWWREQDTAAKNTWLRSMNVRLTFDVRGGLTRTIDFGDLQEYEQHLRLGGVVERLHTGMS

SEQ ID NO: 11558 - protein, 500 aa, synthetic construct
MRALVVIRLSRVTDATTSPERQLESCQQLCAQRGWDVVGVAEDLDVSGAVDPFDRKRRPNLARWLAFEEQPFDVIVAYRVDRLTRSTRHLQQLVHWAEDHKKLVVSATEAHFDTTTPFAAVVIALMGTVAQMELEAIKERSRSAAHFNIRAGKYRGSLPPWGYLPTRVDGEWRLVPDPVQRERILEVYHRVVDNHEPLHLVAHDLNRRGVLSPRDYFAQLQGREPQGRKWSATALKRSVISEAMLGYATLNGKTVRDDDGAPLVRAEPILTREQLEAVRAELVKTSRAKPAVSTPSLLLRVLFCAVCGEPAYKFAGGGRKYPRYRCRSMGFPKHCGNGTVAMAEWDAFCEEQVLDLLGDAERLEKVWVAGSDSAVELAEVNAGLVDLTSLISSPAYRAGSPQREALDARIAALAARQEELEGLEARPSGWEWRETGQRFGDWWREQDTAAKNAWLRSMNVRLTFDARGGLTRTIDFGDLQEYEQHLRLGSVVERLHTGMS

SEQ ID NO: 11559 - protein, 500 aa, synthetic construct
MRALVVIRLSRVTDATTSPERQLESCQQLCAQRGWDVVGVAEDLDVSGAVDPFDRKRRPNLARWLASEEQPFDVIVAYRVDRLTRSTRHLQQLVHWAEDHKKLVVSATEAHFDTTTPFAAVVIALMGTVAQMELEAIKERSRSAAHFNIRAGKYRGSLPPWGYLPTRVDGEWRLAPDPVQRERILEVYHRIVDNHEPLHLVAHDLNRRGVLSPKDYFAQLQGREPQGRKWSATALKRSMTSEAMLGHATLNGKTVRDDDGAPLVRAEPILTRGQLEALRAELVKTSRAKPAVSTPSLLLRVLFCAVCGEPAYKFAGGGRKHPRYRCRSMGFPKHCGNGTVAMAEWDAFCEEQVLNLLGDAERLEKVWVAGSDPAVELAEVNAELVDLTSLIGSPAYRAGSPQREALDARIAALAARQGELEGLEARPSGWEWRETGQRFGDWWREQDTAAKNTWLRSMNVRLTFDVRGGLTRTIDFGDLQEYEQHLRLGSVVERLHTGMS

SEQ ID NO: 11560 - protein, 500 aa, synthetic construct
MRALVVIRLSRVTDATTSPERQLESCQQLCAQRGWDVVGVAEDLDVSGAVDPFDRKRRPNLARWLAFEEQPFDVIVAYRVDRLARSIRHLQQLVHWAEDHKKLVVSATEAHFDTTTPFAAVVIALMGTVAQMELEAIKERSRSAAHFNIRAGKYRGSLPPWGYLPARVDGVWRLVPDPVQRERILEVYHRVVNNHEPLHLVAHDLNRRGVLSPKDYFAQLQGREPQGRKWSATALKRSMISEAMLGYATLNGKTVRDDDGAPLVRAEPILTREQQEALHAELVKTSRAKPAVSTPSLLLRVLFCAVCGEPAYKFAGGGRKLPRYRCRSMGFPKHCGNGTVAMAEWDAFCEEQVLGLLGDAERLEKVWVAGSDSAVELAEVNAGLVDLTSLIGSPAYRAGSPQREALDARIAALAARQEELEGLEARPSGWEWRETGQRFGDWWREQDIAAKNTWLRSMNVRLTFDVRGGLTRTIDFGDLQEYEQHLRLGSVVERLYTGVS

SEQ ID NO: 11561 - protein, 500 aa, synthetic construct
MRALVVIRLSRVTDATTSPERQLESCQQLCAQRGWDVVGVAEDLDVSGAVDPFDRKRRPNLARWLAFEEQPFDVIVAYRVDRLARSIRHLQQLVHWAEDHKKLVVSATEAHFDTTTPFAAVVIALMGTVAQMELEAIKERNRSAAHFNIRAGKYRGSLPPWGYLPARVDGEWRLVPDPVQRERILEVYHRVVDNHEPLHLVAHDLNRRGVLSPKDYFAQLQGREPQGRKWSATALKRSMISEAMLGYATLNGKTVRDDDGAPLVRAEPILTREQLEALRAELVKTSRAKPAVSTPSLLLRVLFCAVCGEPAYKFAGGGRKHPRYRCRSMGFPKHCGNGTVAMAEWDAFCEEQVLNLLGDAERLEKVWVAGADSAVELAEVNAELVDLTSLIGSPAYRAGSTQREALDARIAALAARQEELEGLEARPSGWEWRGTGQRFGDWWREQDTAAKNTWLRTMNVRLTYDVRGGLTRTIDFGDLQEYEQHLRSGSVVERLHTGMS

SEQ ID NO: 11562 - protein, 500 aa, synthetic construct
MRALVVIRLSRVTDATTSPERQLESCQQLCAQRGWDVVGVAEDLDVSGAVDPFDRKRRPNLARWLAFEEQPFDAIVAYRVDRLTRSTRHLQRLVRWAEDHKKLVVSATEAHFDTTTPFAAVVIALMGTVAQMELEAIKERNRSAAHFNIRAGKYRGSLPPWGYLPARVDGEWRLVPDPVQRERILEVYHRVVDDHEPLHSVAHDLNRRGVLSPKDYFAQLRGREPQGREWSATALKRSMTSEAMLGYATLNGKIVRDDAGAPLVRAEPILTREQLEALRAVLVKTSRAKPAVSTPSLLLRVLFCAVCGEPAYKFAGGGRKHPRYRCRSMGFPKHCGNGTVAMAEWDAFCEEQVLDLLGDAERLEKVWVAGSDSAVELAEVNAELVDLTSLIGSPAYRAGSPQREALDARIAALAARQEELEGLEARPSGWEWRETGQRFGDWWLEQDTAAKNTWLRSMNVRLTYDVRGGLTRTIDFGDLREYKQYLRSGSVVERLHTGMS

SEQ ID NO: 11563 - protein, 500 aa, synthetic construct
MRALVVIRLSRVTDATTSPERQLESCQQLCAQRGWDVVGVAEDLDVSGAVDPFDRKRRPNLARWLAFEEQPFDVIVAYRVDRLTRSTRHLQQLVHWAEDHRKLVVSATEAHFDTTTPFAAVVIALMGTVAQMELEAIKERSRSAAHFNIRAGKYRGSLPPWGYLPTRVDGEWRLVPDPVQRERILEVYHRVVDNHEPLHLVAHDLNRRGVLSPKDYFAQLQGREPQGRKWSATALKRSMTSEVMLGYATLNGKTVRDDDGAPLVRAEPILAREQLEALRAELVKTSRAKPAVSTPSLLLRVLFCAVCGEPAYKFTGGGRKHPRYRCRSMGLPKHCGNGTVAMAEWDAFCEEQVLGLLGDAERLEKVWVAGSDSAVELAEVNAELVDLTSLIGSPAYRAGSPQREALDARIAALAARQGELEGLEARPSGWEWRETGQRFGDWWREQGTAAKNTWLRSMNVRLTFDVRGGLTRTVDLGDLREYEQHLRLGSVVERLHTGMS

SEQ ID NO: 11564 - protein, 500 aa, synthetic construct
MRALVVIRLSRVTDATTSPERQLESCQQLCAQRGWDVVGVAEDLDVSGAVDPFDRKRRPNLARWLAFEERPFDVIVAYRVDRLARSIRHLQQLVHWAEDHKKLVVSATEAHFDTTTPFAAVVTALMGTVAQMELEAIRERSRSAAHFNIRAGKYRGSLPPWGYLPTRVDGEWRLAPDPVQREHILEVYHRVVDDHEPLHLVAHDLNRRGVLSPKDYFAQLQGREPQDRKWSATALKRSMISEAMLGYVTLNGKIVRDDDGAPLVRAEPILTREQLEALRAELVKTSRAKPAVSTPSLLLRVLFCAVCGEPAYKFAGGGRRHPRYRCRSMGFPKHCGNGTVAMAEWDAFCEEQVLDLLGDAERLEKVWVAGSDSAVELAEVNAELVDLTSLIGSPAYRARSPQREALDARIAALAARQEELEGLEARPSGWEWRGTGQRFGDWWREQDTAAKNTWLRSMNVRLTFDVRGGLTRTIDFGDLQEYEQHLRLGSVVERLHTGMS

SEQ ID NO: 11565 - protein, 500 aa, synthetic construct
MRALVVIRLSRVTDATTSPERQLESCQQLCAQRGWDVVGVAEDLDVSGAVDPFDRKRRPNLARWLAFEEQPFDVIVVYRVDRLTRSTRHLQQLVHWADDHKKLVVSATEAHFDTTTPFAAVVIALMGTVAQMELEAIKERSRSAAHFNIRAGKYRGSLPPWGYLPARVDGVWRLVPDPVQRERILEVYHRVVDNHEPLHLVAHDLNRRGVLSPKDYFAQLQGREPQGRKWSATALKRSMTSEAMLGYATLNGKIVRDDDGAPLVRAEPILTREQLEALRAELVKTSRAKPAASTPSLLLRVLFCAVCGEPAYKFAGGGRKHSRYRCRSMGFPKHCGNGTVAMTEWDAFCEEQVLNLLGDAERLEKVWVAGSDSAVELAEVNAELVDLTSLIGSPAYRAGSPQREALDARTAALAARQEELEGLEARPSGWEWRETGQRFGDWWREQDTAAKNTWLRSMNVRLTFDVRGGLTRTIDFGDLQEYGQHLRLGSVVERLHTGMS

SEQ ID NO: 11566 - protein, 500 aa, synthetic construct
MRALVVIRLSRVTDATTSPERQLESCQQLCAQRGWDVVGVAEDLDVSGAVDPFDRKRRPNLARWLAFEEQPFDVIVAYRVDRLARSIRHLQQLVHWAEDHKKLVVSATEAHFDTTTPFAAVVIALMGTVAQMELEAIKERSRSAAHFNIRAGKYRGSLPPWGYLPARVDGEWRLVPDPVQRERILEVYHRVVDNHEPLHLVAHDLNRRGVLSPKDYFAQLQGREPQGRKWSATALKRSMVSEAMLGYATLNGKTVRDGDGAPLVRAEPILTRGQLEALRAELIKTSRAKPAVSTPSLLLRVLFCAVCGEPAYKFAGGGRKHPRYRCRSMGFPKHCGNGTVAMAEWDAFCEEQVLDLLGDAERLEKVWVAGSDSAAELAEVSAELVDLTSLIGSPAYRAGSPQREALDARIAALAARQEELEGLEARPSGWEWRETGQRFGDWWREQDTAAKNTWLRSMNVRLTFDVRGGLTRTIDFGDLQEYEQHLRSGSVVERLHTGMS

SEQ ID NO: 11567 - protein, 500 aa, synthetic construct
MRALVVIRLSRVTDATTSPERQLESCQLLCAQRGWDVVGVAEDLDVSGAVNPFDRKRRPNLARWLAFEEQPFDVIVAHRVDRLTRSTRHLQQLVHWAEDHKKLVVSATEAHFDTTTPFAAVVIALMGTVAQMELEAIKERSRSAAHFNIRAGKYRGSLPPWGYLPTRVDGEWRLVPDPVQRERILEVYHRVVDNHEPLHLVAHDLNRRGVLSPKDYFAQLQGREPQGRKWSATALKRSMISEAMLGYATLNGKTVRDDDGAPLVRAEPILTREQLEALRAELVKTSRAKPAVSTPSLLLRVLFCAVCGEPAYKFAGGGRKHPRYRCRSMGFPKHCGNGTVAMAEWDAFCEEQVLDLLGDAERLEKVWVAGSDSAVELAEVNAELVDLTSLIGSPAYRAGSPQREALDARIAALAARQEELEGLEARPSGWEWRETGQRFGDWWREQDTAAKNTWLRSMNVRLTFDARGGLTRTIDFGDLQEYEQHLRLGSVVERLHTGMS

SEQ ID NO: 11568 - protein, 500 aa, synthetic construct
MRALVVIRLSRVTDATTSPERQLESCQQLCAQRGWDVVGVAEDLDVSGAVDPFDRKRRPNLARWLTFEEQPFDVIVAYRVDRLTRSVRHLQQLVHWAEDHKKLVVSATEAHFDTTTPFAAVVIALMGTVAQMELEAIKERSRSAAHFNIRAGKYRGSLPPWGYLPARVDGEWRLVPDPVQRERILEVYHRVVDNHEPLHLVAHDLNRRGVLSPKDYFAQLRGREPQGREWSATALKRSMTSEAMLGYATLNGKIVRDDDGAPLVRAEPILTREQLEALRAELVKTSRAKPAVSTPSLLLRVLFCAACGEPAYKFAGGGRKHPRYRCRSMGFLKHCGNGTVAMAEWDAFCEEQVLDLLGDAERLEKVWVAGSDSAVELAEVNAELVDLTSLIGSPAYRAGSPQREALDARIAALAARQEELEGLEARPSGWEWRETGQRFGDWWREQDTAAKNTWLRSMNVRLTFDVRGGLTRTIDFGDLHEYEQHLRLGSAVERLHTGMS

SEQ ID NO: 11569 - protein, 500 aa, synthetic construct
MRALVVIRLSRVTDATTSPERQLESCQQLCAQRGWDVVGVAEDLDVSGAVDPFDRKRRPSLARWLAFEEQPFDAIVAYRVDRLTRSIRHLQQLVHWAEDHKKLVVSATEAHFDTTTPFAAVVIALMGTVAQMELEAIKERNRSAAHFNIRAGKYRGSLPPWGYLPARVDGEWRLVPDPVQRERIFEVYHRVVDNHEPLHLVAHDLNRRGVLSPKDYFAQLRGREPQGRKWSATALKRSMTSEAMLGYATLNGKTVRDDDGAPLVRAEPILTRERLEALRAELVKTSRAKPAVSTPSLLLRVLFCAVCGEPAYKFAGGGRKHPRYRCRSMGFPKHCGNGTVAMAEWDAFCEEQVLGLLGDAERLEKVWVAGSDSAVELAEVNAELVDLMSLIGSPAYRAGSPQREALDARIAALAARQEELEGLEARPSGWEWRETGQRFGDWWREQDTAAKNTWLRSMNVRLTFDVRGGLTRTIDFGDLQEYEQHLRSGSVVERLHSGMS

SEQ ID NO: 11570 - protein, 500 aa, synthetic construct
MRALVVIRLSRVTDATTSPERQLESCQQLCAQRGWDVVGVAEDLDVSGAVDPFDRKRRPNLARWLAFEEQPFDVIVAYRVDRLTRSVRHLQQLVHWAEDHKKLVVSATEAHFDTTTPFAAVVIALMGTVAQMELEAIKERTRSAAHFNIRAGRYRGSLPPWGYLPARVDGEWRLVPDPVQRERILEVYRRVVDNHEPLHLVAHDLNRRGVLSPKDYFARLQGREPQGRKWSATALKRSMTSEAMLGYATLNGKTVRNDDGAPLVRAEPILTREQLEALRAGLVKTSRAKPAVSTPSLLLRVLFCAVCGEPAYKFAGGGRKHPRYRCRSMGFPKHCGNGTVAMAEWDAFCEEQVLDLLGDAERLEKVWVAGSDSAVELAEVNAELVDLTSLISSPAYRAGSPQREALDARIAALAARQEELEGLEARPSGWEWRGTGQRLGDWWREQDTAAKNTWLRSMNVRLTFDVRGGLTRTIDFGDLQEFERHLRLGSVAERLHTGMS

SEQ ID NO: 11571 - protein, 500 aa, synthetic construct
MRALVVIRLSRVTDATTSPERQLESCQQLCAQRGWDVVGVAEDLDVSGTVDPFDRKRRPNLARWLAFEEQPFDVIVAYRVDRLTRSVRHLQQLVHWAEDHKKLVVSATEAHFDTTTPFAAVVIALMGTVAQMELEAIKERNRSAAHFNIRAGKYRGSLPPWGYLPTRVDGEWRLVPDPAQRERILEVYHRVVDSHEPLHWVAHDLNRRGVLSPRDYFAQLRGREPQGRKWSATALKRSMISEAMLGHATLNGKTVRDDDGAPLVRAEPILTREQLEALRAELVKTSRAKPAVSAPSLLLRVLFCAVCGEPAYKFAGGGRKHPRYRCRSMGFPKHCGNGTVAMAEWDAFCEEQVLDLLGDAERLEKVWVAGSDSAVELAEVNAELVDLTSLIGSPAYRAGSPQREALDGRIAALTARQEELEGLEAHPSGWEWRGTGQRFGDWWHEQDTAAKNTWLRSMNVRLTFDVRGGLTRTIDFGDLQVYEQHLRLGSVVERLHTGMS

SEQ ID NO: 11572 - protein, 500 aa, synthetic construct
MRALVVIRLSRVTDATTSPERQLESCQQLCAQRGWDVVGVAEDLDVSGAVDPFDRKRRPNLARWLAFEEQPFDVIVAYRVDRLTRSTRHLQQLVHWAEDHKKLVVSATEAHFDTTTPFAAVVIALMGTVAQMELEAIKERSRSAAHFNIRAGKYRGSLPPWGYLPARVDGEWRLVPDPVQRERILEVYHRVVDNHESLHLVAHDLNRRGVLSPKDYFAQLQGREPQGRKWSVTALKRSMISEAMLGYVTLNGKTVRDDDGAPLVRAEPILTREQQEALRAELAKTSRAKPVVSTPSLLLRVLFCAVCGEPAYKFAGGGRRHPRYRCRSMGSPKHCGNGTVAMAEWDAFCEEQVLDLLGDTERLEKVWVAGSDSAAELAEVNAELVDLTSLIGSPAYRAGSPQREALDARIAALAARQEELEGLEARPSGWEWRETGQRFGDWWREQDTAAKNTWLRSMNVRLTFDVRGGLTRTIDFGDLQEYEQHLRLGSVVERLHTGMS

SEQ ID NO: 11573 - protein, 500 aa, synthetic construct
MRALVVIRLSRVTDATTSPERQLESCQQLCAQRGWDVVGVAEDLDVSGAVDPFDRKRRPNLARWLAFEERPFDVIVAYRVDRLTRSIRHLQQLVHWAEDHKKLVVSATEAHFDTTTPFAAVVIALMGTVAQMELEAIKERSRSAAHFNIRAGKYRGSLPPWGYLPTRVDGEWRLAPDPVQRERILEVYHRVVDNHEPLHLVAHDLNRRGVLSPKDYFAQLQGREPQGRKWSATALKRSMISVAMLGYATLNGKTVRDDDGAPLVRAEPILTRGQLEALRAELVKTSRAKPAVSTPSLLLRVLFCAVCGEPAYKFAGGGRKHPRYRCRSMGFPKHCGNGTVAMAEWDTFCEEQVLDLLGDAERLEKVWVVGSDSAVELAEVNAELVDLTSLIGSPAYRAGSPQREALDARIAALAARQEELEGSEAHPSGWEWRGTGQRFGDWWREQDTAAKNTWLRSMNVRLTFDVRGGLTRTIDFGDLQEYEQRLRLGSVVERLHTGMS

SEQ ID NO: 11574 - protein, 500 aa, synthetic construct
MRALVVIRLSRVTDATTSPERQLGSCQQLCAQRGWDVVGVAEDLDVSGAVDPFDRKRRPSLARWLAFEEQPFDAIVAYRVDRLTRSIRHLQQLVHWAEDHKKLVVSATEAHFDTTTPFAPVVIALMGTVAQMELEAIKERNRSAAHFNIRAGKYRGSLPPWGYLPARVDGEWRLVPDPVQRERILEVYHRVVDNHEPLHLVAHDLNRRGVLSPKDYFAQLRGREPQGRKWSATALKRSMISEAMLGYATLNGKTVRDDDGAPLVRAEPILTREQLGALRAELVKTSRAKPAVSTPSLLLRVLFCAVCGEPAYKFAGGGRKHPRYRCRSMGFPKHCGNGTVAMTEWDAFCEEQVLNLLGDAERLEKVWVAGSDSAVELAEVNAELVDLTSLIGSPAYRVGSPQREALDARIAALAARQGELEGLEARPSGWEWRGTGQRFGDWWREQDAAAKNAWLRSMNVRLTFDVHGGLTRTIDFGDLQEYEQHLRLGSVVERLHTGMS

SEQ ID NO: 11575 - protein, 500 aa, synthetic construct
MRALVVIRLSRVTDATTSPERQLESCQQLCAQRGWDVVGVAEDLDVSGAVDPFDRKRRPNLARWLAFEEQPFDVIVAYRVDRLTRSIRHLQQLVHWAEDHKKLVVSATEAHFDTTTPFAAVVIALMGTVAQMELEAIKERNRSAAHFNIRAGKYRGSLPPWGYLPARVDGEWRLVPDPVQRERILEVYHRVVDDHEPLHLVAHDLNRRGVLSPKDYFAQLRGREPQGRKWSATALKRSMTSEAMLGYATLNGKTVRDDDGAPLVRAEPILTREQLGALRAELVKTSRAKPAVSTPSLLLRVLFCAVCGEPAYKFSGGGRKHPRYRCRSMGFPKHCGNGTVAMAEWDAFCEEQVLDLLGDAERLEKVWVAGSDSAVELAEVNAELVDLTSLIGSPAYRAGSPQREALDARIAALAARQGELEGLEARPSGWEWRETGQRFGDWWREQDTAAKNTWLRSMNVRLTFDVRGGLTRTIDFGDLQEYEQHLRLGNVVERLHTGMS

SEQ ID NO: 11576 - protein, 500 aa, synthetic construct
MRALVVIRLSRVTDATTSPERQLESCQQLCAQRGWDVVGVAEDLDVSGAVDPFDRKRRPNLARWLAFEEQPFDVIVAYRVDRLARSIRHLQQLVHWAEDHEKLVVSATEAHFDTTTPFAAVVIALMGTVAQMELEAIKERNRSAAHFNIRAGKYRGSLPPWGYLPTRVDGEWRLVPDPVQRERILEVYHRVVVNHEPLHLVAHDLNRRGVLSPRDYFAQLRGREPRGRKWSATALKRSMISAAMLGYATLNGKTVRDDNGAPLVRAEPILTRGQLEALRAELVKTSRAKPAVSTPSLLLRVLFCAVCGEPAYKFAGGGRKHPRYRCRSVGFPKHCGNGTVAMAEWDAFCEEQVLDLLGDAERLEKVWVAGSDSAVELAEVNAELVDLTSLISSPAYRAGSPQREALDARIAALAARQEELEGLEARPSGWEWRETGQRFGDWWREQDTAAKNTWLRSMNVRLTFDVRGGLTRTIDFGDLQEYEQHLRLGSVVERLHTGMS

SEQ ID NO: 11577 - protein, 500 aa, synthetic construct
MRALVVIRLSRVTDATTSPERQLGSCQQLCAQRGWDVVGVAEDLDVSGAVDPFDRKRRPNLARWLAFEEQPFDVIVAYRVDRLARSIRHLQQLVHWAEDHKKLVVSATEAHFDTTTPFAAVVIALMGTVAQMELEAIKERNRSAAHFNIRAGKYRGSLPPWGYLPTRVDGEWRLAPDPVQRERILEVYHRVVDNHEPLHLVAHDLNRRGVLSPKDYFAQLRGREPQGRKWSATALKRSMTSEAMLGYATLNGKTVRDDDGAPLVRAEPILTREQLEALRAELVKTSRAKPAVSTPSLLLRVLFCAVCGEPAHKFAGGGRKHPRYRCRSMGFPKHCGNGTVAMAEWDGFCEEQVLDLLGDAERLEKVWVAGSDFAVELAEVNAELVDLTSLIGSPAYRAGSPQREALDARIAALAARQEELEGLEARPSGWEWRKTGQRFGDWWREQDTAAKNTWLRSMNVRLTFDVRGGLTRTIDFGDLQEYVQHLRLGSVVERLHTGMS

SEQ ID NO: 11578 - protein, 500 aa, synthetic construct
MRALVVIRLSRVTDATTSPERQLESCQQLCAQRGWDVVGVAEDLDVSGAVNPFDRKRRPNLARWLAFEEQPFDVIVAYRVDRLTRSTRHLQQLVHWADDHKKLVVSATEAHFDTTTPFAAVVIALMGTVAQMELEAIKERSRSAAHFNIRAGKYRGSLPPWGYLPARVDGEWRLVPDPVQRERILEVYHRVVDNHEPLHLVAHDLNRRGVLSPKDYFAQLQGREPQGRKWSATALKRSMTSEAMLGYATLDGETVRDEDGAPLVRAEPILTREQLEALRAELVKTSRAKPAVSTPSLLLRVLFCAVCGEPAYKFAGGGRKHSRYRCRSMGFPKHCGNGTVAMAEWDAFCEEQVLDLLGDAERLEKVWVAGSDSAVELAEVNAELVDLTSLIGSPAYRAGSSQREALDARIAALAARQEELEGLEARPSGWEWRETGQRFVDWWREQDTAAKNTWLRSMNVRLTFDVRGGLTRTIDFGDLQEYEQHLRLGSVVGRLHTGMS

SEQ ID NO: 11579 - protein, 500 aa, synthetic construct
MRALVVIRLSRVTDATTSPERQLESCQQLCAQRGWDVVGVAEDLDVSGAVDPFDRKRRPNLARWLAYEEQPFDVIVAYRVDRLTRSIRHLQQLVHWAEDHKKLVVSATEAHFDMTTPFAAVVIALMGTVAQMELEAIKERSRSAAHFNIRAGKYRGSLPPWGYLPTRVDGEWRLAPDPVQRERILEVYHRVVDNHEPLHLVAHDLNRRGVLSPKDYFAQLQGREPQGRKWSATALKRSMISEAMLGYATLNGKTVRDDDGAPLVRAEPILTREQQEALRAELVKTSRARPAVSTPSLLLRVLFCAVCGEPAYKFAGGGRKHPRYRCRSMGFPKHCGNGTVAMAKWDAFCEEQVLDLLGDAERLEKVWVAGSDSAVELAEVNAELVDLTCLISSPAYRAGSPQREALDARIAALAARQEELEGLEARPSGWEWRETGQRFGDWWREQDTAAKNTWLRSMNVRLTFDVRGGLTRTIDFGDLQEYEQHLRLGSVAERLHAGMS

SEQ ID NO: 11580 - protein, 500 aa, synthetic construct
MRALVVIRLSRVTDATTSPERQRESCQQLCAQRGWDVVGVAEDLDVSGAVDPFDRKRRPNLARWLAFEEQPFDVIVAYRVDRLTRSTRHLQQLVRWAEDHKKLVVSATEAHFDTTTPFAAVVIALMGTVAQMELEAIKERSRSAAHFNIRAGKYRGSLPPWGYLPARVDGEWRLVPDPVQRERILEVYHRVVDNHEPLRLVAHDLNRRGVLSPKDYFAQLQGREPQGRKWSATALKRSMTSEAMLGYATLNGKTVRDDDGAPLVRAEPILTREQLEALRAELVKTSRAKPAVSTPSLLLRVLFCAVCGEPAYKFAGGGRKHPRYRCRSMGFPKHCGNGTVAMAEWDAFCEEQVLGLLGDAERLEKVWVAGSDFAVELAEVNAELVDLSNLIGSPAYRAGSPQREAIDARIVALAARQEELEGLEARLSGWEWCETGQRFGDWWREQDTAAKNTWLRSMNVRLTFDVRGGLTRTIDFGDLQEYEQHLRLGGPVERLHTGMS

SEQ ID NO: 11581 - protein, 500 aa, synthetic construct
MRALVVIRLSRVTDATTSPERQLESCQQLCAQRGWDVVGVAEDLDVSGAVDPFDRKRRPNLARWLAFEEQPFDVIVAYRVDRLTRSIRHLQQLVHWAEDHKKLVVSATEAHFDMTTPFAAVVIALMGTVAQMELEAIKERSRSAAHFNIRAGKYRGSLPPWGYLPTRVDGEWRLAPDPVQRERILEVYHRVVDNHEPLHLVAHDLNQRGVLSPKDYFAQLRGREPQGRKWSATALKRSMISEAMLGYATLNGKTVRDDDGAPLVCAEPILTREQLEALRAELAKTSRAKPAVSTPSLLLRVLFCAVCGEPAYKFAGGGRKHPRYRCRSMGFPKHCGNGTVTMAEWDAFCEEQVLDLLGDAERLEKVWVAGSDSAVELAEVNAELVDLTSLIGSPAYRAGSPQREALDARIAALAARQEELEGLEARPSGWEWRETGQRFGDWWREQDTAAKNTWLRSMNVRLTFDVRGGLTRTIDFGDLQEYEQHLRLGSVAERLHTGMS

SEQ ID NO: 11582 - protein, 500 aa, synthetic construct
MRALVVIRLSRVTDATTSPERQLESCLQLCAQRGWDVVGVAEDLDVSGAVDPFDRKRRPNLARWLALEEQPFDVIVAYRVDRLARSIRHLQQLVHWAEGHKKLVVSATEAHFDTTTPFAAVVIALMGTVAQMELEAIKERSRSAAHFNIRAGKYRGSLPPWGYLPTRVDGEWRLAPDPEQRERILEVYYRVVDNHEPLHLVAHDLNRRGVLSPKDYFAQLQGREPQGRKWSATALKRSMISVAMLGYATLNGKTVRDDDGAPLVRAEPILTRGQLEALRAELVKTSRAKPAVSTPSLLLRVLFCAVCGEPAYKFSGGGRKHPRYRCRSMGFPKHCGNGTVAMAEWDAYCEEQVLDLLGDAERLEKVWVAGSDSAVELAEVNAELVDLTSLIGSPAYRAGSPQREALDARIAALAARQGELEGLEARPSGWVWRETGQRFGDWWREQDTAAKNTWLRSMNVRLTFDVRGGLTRTIDFGDLQEYEQHLRLGSVVERLHTGMS

SEQ ID NO: 11583 - protein, 500 aa, synthetic construct
MRALVVIRLSRVTDATTSPERQLESCQQLCAQRGWDVVGVAEDLDVSGAVDPFDRKRRPNLARWLAFEEQPFDAIVAYRVDRLTRSIRHLQQLVHWAEDHKKLVVSATEAHFDTTTPFAAVVIALMGTVAQMELEAIKERNRSAAHFNIRAGKYRGSLPPWGYLPTRVGGEWRLAPDPVQRERILEVYHRVVDNHEPLHLVAHDLNRRGVLSPKDYFAQLRGREPQGRKWSATALKRSMTSEAMLGYATLNGKTVRDDDGAPLVRAEPILTREQLEALRAELVKTSRAKPAVSTPSLLLRVLFCAVCGEPAYKFAGGGRKHPRYRCRSMGFPKHCGNGTVAMAEWDGFCEEQVLDLLGDAERLEKVWVAGSGFAVELAEVNAELVDLTSLISSPAYRAGSPQRGALDARIAALAARQEELEGLEARPSGWEWRETGQRFGDWWREQDTAAKNTWLRSMNVRLTFDVRGGLTRTIDFGELQEYEQHLRLGSVVERLHTGMS

SEQ ID NO: 11584 - protein, 500 aa, synthetic construct
MRALVVIRLSRVTDATTSPERQLESCQQLCAQRGWDVVGVAEDLDVSGAVDPFDRKRRPNLARWLAFEEQPFDVIVAYRVDRLTRSTRHLQQLVHWAEDHKKLVVSATEAHFDTTTPFAAVVIALMGTVAQMELEAIKERNRSAAHFNIRAGKYRGSLPPWGYLPARVGGVWRLVPDPVQRERILEVYHRVVNNHEPLHLVAHDLNRRGVLSPKDYFAQLQGREPQGRKWSATALKRSMISEAMLGYATLNGKTVRDDDGAPLVRAEPILTREQQEAIRAELVKTSRAKPAVSTPSLLLRVLFCAVCGEPAYKFAGGGRKHPRYRCRSMGFPKHCGNGTVAMAEWDAFCEEQVLDLLGDAERLEKVWVAGSDSAVELAEVNAELVDRTSLIGSPAYRAGSPQREALDARIAALAARQEELEGLEARPSGWEWRGTGQRFGDWWCEQDTAAKNTWLRSMNVRLTFDVRGGLTRTIDFGDLQEYEQHLPLGSVVGRLHTGTS

SEQ ID NO: 11585 - protein, 500 aa, synthetic construct
MRALVVIRLSRVTDTTTSPERQLESCHRLCAQRSWDVVGVAEDLDVSGAVDPFDRKRRPNLARWLAFEERPFDVIVAYRVDRLTRSIRHLQQLVHWAEDHKKLVVSATEAHFDTTTPFAAVVIALMGTVAQMELEAIKERNRSAAHFNIRAGKYRGSLPPWGYLPARVDGVWRLVPDPVQRERILEVYHRVVDNHEPLHLVAHDLNRRGVLSPKDYFAQLRGREPQGRKWSATALKRSMISVAMLGYATLNGKTVRDDDGAPLVRAEPILTREQLEALRAELVKTSRAKPAVSTPSLLLRVLFCAVCGEPAYKFAGGGRKHPRYRCRSMGFPKHCGNGTVAMAEWDAFCEEQVLDLLGDAERLEKVWVAGSDSAVELAEVNAELVDLTSLIGSPAYRAGSPQREALDARIAALAARQGELEGLEARPSGWEWRETGQRFGDWWREQDTAAKNTWLRSMNVRLTFDVRGGLTRTIDFGDLQEYKQHLRLGSVDGRLHTGMS

SEQ ID NO: 11586 - protein, 500 aa, synthetic construct
MRALVVIRLSRVTDATTSPERQLESCQQLCAQRGWDVVGVAEDLDVSGAVDPFDRKRRPNLARWLAFEEQPFDVIVAYRVDRLTRSVRHLQQLVHWAEDHKKLVVSATEAHFDTTTPFAAVVIALMGTVAQMELEAIKERSRSAAHFNIRAGKYRGSLPPWGYLPTRVDGEWRLVPDPVQRERILEVYHRVVDKHEPLHLVAHDLNRRGVLSPKDYFAQLRGREPQGRKWSATALKRSMISEAMLGYATLNGKTVRDDDGAPLVRAEPILTREQLGALRAELVKTSRAKPAVSTPSLLLRVLFCAVCGEPAYKFAGGGRKHSRYRCRSMGFPKHCGNGTVAMAEWDAFCEEQVLELLGDAERLEKVWVAGSDSAVKLAEVNAELVDLTSLIGSPAYRAGSPQREALDARIAALAARQGELEGLEARPSGWEWRETGQRFGDWWREQDTAAKNTWLRSMNVRLTFDVRGGLTRSIDFGDLQVYEQHLRLGSVVERLRTGMS

SEQ ID NO: 11587 - protein, 500 aa, synthetic construct
MRALVVIRLSRVTDATTSPERQLESCQQLCAQRGWDVVGVAEDLDVSGAVDPFDRKRRPNLARWLAFEEQPFDVIVAYRVDRLTRSTRHLQQLVHWAEDHKKLVVSATEAHFDTTTPFAAVVIALMGTVAQMELEAIKERSRSAAHFNIRAGKYRGSLPPWGYLPTRVDGEWRLVPDPVQRERILEVYHRVVVNREPLHLVAHDLNRRGVLSPKDYFAQLRGREPQGREWSATALKRSMLSEAMLGYATLNGKTVRDDDGAPLVRAEPILTREQQEALRAELVKTSRAKPAVSTPSLLLRVLFCAVCGEPAYKFAGGGRKHPRYRCRSMGFPKHCGNGTVAMAEWDAFCEEQVLDLLGDAERLEKVWVAGSDSAAELAEVNAELVDLTNLIGSPAHRAGSPQREALDARIAALAARQAELEGLEARPSGWEWRETGQRFGDWWREQDTAAKNTWLRSMNVRLTFDVRGGLTRMIDFGDLQEYEQHLRLGSVVERSHTGMT

SEQ ID NO: 11588 - protein, 500 aa, synthetic construct
MRALVVIRLSRVTDATTSPERQLESCQQLCAQRGWDVVGVAEDLDVSGAVDPFDRKRRPNLARWLAFEEQPFDVVVAYRVDRLARSIRHLQQLVHWAEDHKKLVVSATEAHFDTTTPFAAVVIALMGTVAQMELEAIKERSRSAAHFNIRAGKYRGSLPPWGYLPARVDGEWRLVPDPVQRERILEVYHRVVDNHEPLHLVAHDLNRRGVLSPKDYFAQLRGREPQGREWSATALKRSMISEAMLGYATLNGKTVRDDDGAPLVRAEPILTREQQEALRAELVKTSRAKPAVSTPSLLLRVLFCAVCGEPAYKFAGGGRKHSRYRCRSMGFPKHCGNGTVAMAEWDAFCEEQVLNLLGDAERLEKVWVAGSDSAVKLAEVNAELVDLTSLIGSPAYRAGSPQREALDARIAALAARQEELEGLEARPSGWEWRETGQRFGDWWREQDTAAKNTWLRSMNVRLAFDVRGGLTRTIDFGDLQEYEQHLRLGSVDGRLHTGMS

SEQ ID NO: 11589 - protein, 500 aa, synthetic construct
MRALVVIRLSRVTDATTSPERQLESCQQLCAQRGWDVVGVAEDLDVSGAVDPFDRKRRPNLARWLAFEEQPFDVIVAYRVDRLTRSIRHLQQLVHWAEDHKKLVVSATEAHFDTTTPFAAVVIALMGTVAQMELEAIKERNRSAAHFNIRAGKYRGSLPPWGYLPTRVDGVWRLVPDPVQCERILEVYRRIVDHHEPLHLVAHDLNRRGVLSPKDYFAQLRGREPRGRKWSATALKRSMISEAMLGYATLNGKTVRGDDGAPLVRAEPILTREQLEALRAKLVKTSRAEPAVSTPSLLLRVLFCAVCGEPAYKFSGGGRKHPRYRCRSMGFPKHCGNGTVAMAEWDAFCEEQVLDLLGDAERLEKVWVAGSDSAVELAEVNAELVDLTSLIGSPAYRAGSPQREALDARIAALVVRQEELEGLEARPSGWEWRGTGQRFGDWWREQDTAAKNTWLRSMNVRLTFDVRGGLTRTIDFGDLQEYEQHLRLGSAVERLHTGMS

SEQ ID NO: 11590 - protein, 500 aa, synthetic construct
MRALVVIRLSRVTDATTSPERQLESCQQLCAQRGWDVVGVAEDLDVSGAVDPFDRKRRPSLARWLAFEEQPFDVIVAYRVDRLARSIRHLQQLVHWAEDHKKLVVSATEAHFDTTTPFAAVVIALMGTVAQMELEAIKERSRSAAHFNIRAGKYRGSLPPWGYLPARVDGEWRLVPDPVQRERILEVYHRVVDNHEPLHLVAHDLNRRGVLSPKDYFAQLQGREPQGRKWSATALKRSMISGAMLGYATLNGKTVRDDDGAPLVRAEPILTREQLEALRAELVKTSRAKPAVSTPSLLLRVLFCAVCGEPAYKFAGGGRKHPRYRCRSMGFPKHCGNGTVAMAEWDAFCEEQVLNLLGDAERLEKVWVAGSDSAVELAEVNKELVDLTSLIGSPAYRAGSPQREALDARIAALAARQEELEGLEACPSGWEWRGTGQRFGDWWRELDTAAKNTWLRSMNVRLTFDVRDGLTRTIDFGDLQEYEQHLRLGSVVERSHTGMS

SEQ ID NO: 11591 - protein, 500 aa, synthetic construct
MRALVVIRLSRVTDATTSPERQLESCQQLCVQRGWNVVGVAEDLDVSGAVDPFDRMRRPNLARWLAFEEQPFDVIVAYRVDRLTRSIRHLQQLVHWAEDHKKLVVSATEAHFDTTTPFAAVVIALMGTVAQMELEAIKERNRSAAHFNIRAGKYRGSLPPWGYLPTRVDGEWRLAPDPVQRERILEVYHRVVDNHEPLHLVAHDLNRRGVLSPKDYFAQLQGREPQGRKWSATALKRSMISGAMLGYATLNGKTVRDNGGAPLVRAEPILTREQQEALRAALVKTSRTKPAVSTPSLLLRVLFCAVCGEPAYKFAGGGRKHPRYRCRSMGFPKHCGNGTVAMAEWDAFCEEQVLDLLGDAERLEKVWVAGSDSAVELAEVNAELVDLTSLIGSPAYRAGSPQREALDARIAALAARQEELEGLEARLSGWEWRGTGQRFGDWWREQDTAAKNTWLRSMNVRLTFDVRGGLTRTIDFGDLQEYEQHLRLGSVVERLHTGMS

SEQ ID NO: 11592 - protein, 500 aa, synthetic construct
MRALVVIRLSRVTDATTSPERQLESCQQLCAQRGWDVVGVAEDLDVSGAVDPFDRKRRPNLARWLAFEEQPFDVIVAYRVDRLTRSTRHLQQLVHWAEDNKKLVVSATEAHFDTTTPFAAVVIALMGTVAQMELEAIKERSRSAAHFSIRAGKYRGSLPPWGYLPTRVDGEWRLVPDPVQRERILEVYRRVVDNHEPLHLVAHDLNRRGVLSPKDYFAQLRGREPQGRKWSATALKRSMISEAMLGYATLNGRTVRDDDGAPLVRAEPILTREQLEALRAELVKTSRAKPAVSTPSLLLRVLFCAVCGEPAYKFAGGGRKHPRYRCRSMGFPKHCGNGTVAMAEWDAFCEEQVLDLLGDAERLEKVWVAGSDSAVELAEVDAELVDLTSLIGSPAYRAGSPQREALDARIAALAARQEELESLEARPSGWEWRGTGQRFGDWWREQDTAAKNTWLRSMNVRLTFDVRGGLTRTIDFGDLQEYEQHLRLGCVVERLHTGMS

SEQ ID NO: 11593 - protein, 500 aa, synthetic construct
MRALVVIRLSRVTDATTSPGRQLESCQQLCAQRGWDVVGVAEDLDVSGAVDPFDRKRRPNLARWLAFEEQPFDVIVAYRVDRLTRSVRHLQRLVHWAEDHKKLVVSATEAHFDTTTPFAAVVIALMGTVAQMELEAIKERSRSAAHFNIRAGKYRGSLPPWGYLPTRVDGEWRLVPDPVQRERILEVYHRVVDNHEPLHLVAHDLNRRGVLSPKDYFAQLRGREPQGRKWSATALKRSMISEAMLGYATLNGKTVRNDDGAPLVRAKPILTREQLEALRAELAKTSRAKPAVSTPSLLLRVLFCAVCGEPAYKFAGGGRKHPRYRCRSMGFPKHCGNGTVAMAEWDAFCEEQVLDLLGDAERLEKVWVAGSDSAVELAEVNAELVDLTSLIGSPAYRAGSPQREALDARIAALAARQEELEGLEARPSGWEWRETGQRFGDWWREQDTAAKNTWLRSMNVRLTFDVRGEPTRTIDFGDLQEYEQHLRLGSVVERLHTGMS

SEQ ID NO: 11594 - protein, 500 aa, synthetic construct
MRALVVIRLSRVTDATTSPERQLESCQQLCAQRGWDVVGVAEDLDVSGAVDPFDRKRRPSLARWLAFEEQPFDVIVAYRVDRLTRSTRHLQQLVHWAEDHKKLVVSATEAHFDTTTPFAAVVIALMGTVAQMELEAIKERNRSAAHFNIRAGKYRGSLPPWGYLPTRVDGEWRLVPDPVQRERILEVYRRVVDNHEPLHLVAHDLNRRGVLSPRDYFAQLQGREPQGRKWSATALKRSMTSEAMLGYATLNGKTVRDDDGAPLVRAEPILTREQQEALRAELVKTSRAKPAVSTPSLLLRVLFCAVCGEPAYKFAGGGRKHPRYRCRSMGFPKHCGNGTVAMAEWDAFCEEQVLDLLGDAERLEKVWVAGSDSAAELAEVNAELVDLTNLIGSPAYRAGSPQREALDARIAALAARQAELEGLEARPSGWEWRETGQRFGDWWREQDTAAKNTWLRSMNVRLTFDVRGGLTRMIDFGDLQEYEQHLRLGSVVERLHTGMP

SEQ ID NO: 11595 - protein, 500 aa, synthetic construct
MRALVVIRLSRVTDATTSPERQLESCQQLCAQRGWDVVGVAEDLDVSGAVDPFDRKRRPNLARWLAFEEQPFDAIVAYRVDRLARSIRHLQQLVHWAEDHKKLVVSATEAHFDTTTPFAAVVIALMGTVAQMELEAIKERSRSAAHFNIRAGKYRGSLPPWGYLPARVDGEWRLVPDPVQRERILEVYHRIVDNHEPLHLVAHDLNRRGVLSPKDYFAQLQGREPQGRKWSATALKRSMISEAMLGYATLNGKIVRDDDGAPLVRAEPILTREQLEALRAEFVKTSRAKPAVSTPSLLLRVLFCAVCGEPAYKFAGGGRKHPRYRCRSMGFPKHCGNGTVAMAEWDAFCEEQVLNLLGDAERLEKVWVAGSDSAVELAEVNAELVDLTSLISSPAYRAGSPQREALDARIAALAARQGELEGLEARPSGWEWRETGQRFGDWWREQDTAAKNTWLRSMNVRLTFDVRGGLTRTIDFGDLQEYEQHLRLGSVVERLHTGMS

SEQ ID NO: 11596 - protein, 500 aa, synthetic construct
MRALVVIRLSRVTDATTSPERQLESCQQLCAQRGWDVVGVAEDLDVSGAVDPFDRKRRPNLARWLAFEEQPFDVIVAYRVDRLARSIRHLQQLVHWAEDHKKLVVSATEAHFDTTTPFAAVVIALMGTVAQMELEAIKERNRSAAHFNIRAGKYRGSLPPWGYLPTRVDGEWRLVPDPVQRERILEVYHRVVDKHEPLHLVAHDLNRRGVLSPKDYFAQLRGREPQGRKWSATALKRSMISVAMLGYATLNGKTVRDDDGAPLVRAEPILTREQLGALRAELVKTSRAKPAVSTPSLLLRVLFCAVCGEPAYKFAGGGRKHPRYRCRSMGFPKHCGNGTVAMAEWDAFCEEQVLDLLGDAERLEKVWVAGSDSAVELAEVNAELADLTSLIGSPTYRAGSPQREALDARIAALAARQEELEGLEARPSGWEWRETGQRFGDWWREQDTAAKNTWLRSMNVRLTFDVRGGLTRTIDFGDLQEYEQHLRLGSVVERLHTGMS

SEQ ID NO: 11597 - protein, 500 aa, synthetic construct
MRALVVIRLSRVTDATTSPERQLESCQQLCAQRGWDVVGVAEDLDVSGAVNPFDRKRRPNLARWLAFEEQPFDVIVAYRVDRLTRSTRHLQQLVHWAEDHKKLVVSATEAHFDTTTPFAAVVIALMGTVAQMELEAIKERSRSAAHFNIRAGKYRGSLPPWGYLPTRVDGEWRLVPDPVQRERILEVYHRVVDDHEPLHLVAHDLNRRGVLSPRDYFAQLRGREPRGRKWSATALKRSMISEAMLGYATLNSKTVRDDDGAPLVRAEPILTREQLEALRVELAKASRAKPAVSTPSLLLRVLFCAVCGEPAYKFAGGGRKHPRYRCRSMGFPKHCGNGTVAMAEWDAFCEEQVLDLLGDAERPEKVWVAGSDSAVELAEVNAELVDLTSSIGSPAYRAGSPQREALDARIAALAARQEELEGLEARPSGWEWRETGQRFRDWWREQDTAAKNTWLRSMNVRLTFDVRGGLTRTVDFGDLQEYEQHLRLGSVVERLHTGMS

SEQ ID NO: 11598 - protein, 500 aa, synthetic construct
MRALVVIRLSRVTDATTSPERQLVSCQQLCAQRGWDVVGVAEDLDVSGAVDPFDRKRRPNLARWLAFEEQPFDVIVAYRVDRLARSIRHLQQLVHWAEDHKKLVVSATEAHFDTTTPFAAVVIALMGTVAQMELEAIKERNRSAAHFNIRAGKYRGSLPPWGYLPTRVDGEWRLVPDPVQRERILEVYHRVVDNHEPLHLVAHDLNRRGVLSPKDYFAQLRGREPQGRKWSATALKRSMISEAMLGYATLNGKTVRDDDGAPLVRAEPILTREQLEALRAELAKTSRAKPAVSTPSLLLRVLFCAVCGEPAYKFAGGGRKHPRYRCRSMGFPKHCGNGTVAMVEWDAFCEEQVLNLLGDAERLEKVWVAGSDSAVELAEVNAELVDLTSLIGSPAYRAGSPQREALDARIAALAARQEELEGLEARPSGWEWRGTGQRFGDWWRGQDTAAKNAWLRSMNVRLTFDVRGGLTRAIDFGDLQVYEQRLRLGSVVERLHTGMS

SEQ ID NO: 11599 - protein, 500 aa, synthetic construct
MRALVVIRLSRVTDATTSPERQLESCQQLCAQRGWDVVGVAEDLDVSGAVDPFDRKRRPNLARWLAFEERPFDAIVAYRVDRLTRSIRHLQQLVHWAEDHKKLVVSATEAHFDTTTPFAAVVIALMGTVAQMELEAIKERSRSAAHFNIRAGKYRGSLPPWGYLPTRVDGEWRLAPDPVQRERILEVYHRVVDNHEPLHSVAHDLNRRGVLSPKDYFAQLRGREPQGRKWSATALKRSMISEAMLGYATLNGKTVRGDDGAPLVRAEPILTREQLEALRAELVKTSRAKPAVSTPSLLLHVLFCAVCGEPAYKFAGGGRKHPRYRCRSMGFPKHCGNGTVAMAEWDTFCEEQVLDLLGDAERLEKVWVAGSDSAVELAEVNAELVDLTSLIGSPAYRAGSPQREALDARIAALAARQEELEGLEARPSGWEWRGTGQRFGDWWREQDTAAKNTWLRSMNIRLTFDVRGGLTRTIDFGDLQEYEQHLRLGGVVERLHTGMS

SEQ ID NO: 11600 - protein, 500 aa, synthetic construct
MRALVVIRLSRVTDATTSPERQLESCQQLCAQRGWDVVGVAEDLDVSGAVDPFDRKRRPNLARWLAFEEQPFDVIVAYRVDRLARSIRHLQQLVHWAEDHKKLVVSATEAHFDTTTPFAAVVIALMGTVAQMELEAIKERNRSAAHFNIRAGKYRGSLPPWGYLPTRVDGEWRLAPDPVQRERILEVYHRVVVNHEPLHLVAHDLNRRGVLSPRDYFAQLRGREPQGREWSATALKRSMISEAMLGYATLNGKIVRDDDGAPLVRAEPILTREQLEALRAELVKTSRAKPAVSTPSLLLRVLFCAVCGEPAYKFAGGGRKHPRYRCRSMGFPKHCGNGTVAMAEWDTLCEEQVLDLLGDAERLEKVWVAGSDSAVELAEVNAELVDLTSLIGSPAYRTSSPQREALDARIAALAARQEELEGLEARPSGWEWRGTGQRFGDWWREQDTAAKNTWLRSMNVRLTFDVRGGLTRTIDFGDLQEYEQHLRLGSVVERLHTGMP

SEQ ID NO: 11601 - protein, 500 aa, synthetic construct
MRALVVIRLSRVTDATTSPERQLESCQLLCAQRGWDVVGVAEDLDVSGAVDPFDRKRRPNLARWLAFEEQPFDVIVAYRVDRLTRSTRHLQQLVHWAEDHKKLVVSATEAHFDTTTPFAAVVIALMGTVAQMELEAIKERSRSAAHFNIRAGKYRGSLPPWGYLPTRVDGEWRLVPDPVQRERILEVYHRVVVNREPLHLVAHDLNRRGVLSPKDYFAQLRGREPQGREWSATALKRSMLSEAMLGYATLNGKTVRDDDGAPLVRAEPILTREQQEALRAELVKTSRAKPAVSTPSLLLRVLFCAVCGEPAYKFAGGGRKHPRYRCRSMGFPKHCGNGTVAMAEWDAFCEEQVLDLLGDAERLEKVWVTGSDSAVELAEVNAELVDLTSLICSPAYRAGSPQREALDARIAALAARQEELEGLEARPSGWEWRETGQRFGDWWREQDTAAKNTWLRSMNVRLTFDVRGGLTRTIDFGDLHEYEQHLRLGSVVERLHTGMS

SEQ ID NO: 11602 - protein, 500 aa, synthetic construct
MRALVVIRLSRVTDATTSPERQLESCQQLCAQRGWDVVGVAEDLDVSGAVDPFDRKRRPNLARWLAFEEQPFDVIVAYRVDRLTRSTRHLQQLVHWAEDHKKLVVSTTEAHFDTTTPFAAVVIALMGTVAQMELEAIKERSRSAAHFNIRAGKYRGSLPPWGYLPARVDGEWRLVPDPVQRERILEVYHRVVDNHEPLHLVAHDLNRRGVLSPKDYFAQLQGREPQGRKWSATALKRSMISGAMLGYATLSGKTVRDDDGAPLVRTEPILTREQQEALRAELVETSRAKPAVSTPSLLLRVLFCAVCGEPAYKFTGGGRKHSRYRCRSMGFPKHCGNGTVAMAEWDAFCEEQVLNLLGDAGRLEKVWVAGSDSAVELAEVNAELVDLTSLIGSPAYRAGSPQREALDARIAALAARQEELEGLEARPSGWEWRETGQRFGDWWREQDTAAKNTWLRSMNVRLTFDVRGGLTRTIDFGDLQEYEQHLRLGSVVERLDTGTS

SEQ ID NO: 11603 - protein, 500 aa, synthetic construct
MRALVVIRLSRVTDATTSPERQLESCQQLCAQRGWDVVGVAEDLDVSGAVDPFDRKRRPNLARWLAFEEQPFDVIVAYRVDRLARSIRHLQQLVHWAEDNKKLVVSATEAHFDTTTPFAAVVIALMGTVAQMELEAIKERNRSAAHFNIRAGKYRGSLPPWGYLPTRVDGEWRLVPDPVQRERILEVYHRVVDNHEPLHFVAHDLNRRGVLSPRDYFAQLQGREPQGRKWSATALKRSMISGAMLGYATLNGKTVRVDDGAPLVRAEPILTREQLEALRAELVKTSRTEPAVSTPSLLLRVLFCAVCGEPAYKFSGGGRKHPRYRCRSMGFPKHCGNGTVAMAEWDAFCEEQVLNLLGDAERLEKVWVAGSDSAVELAEVNAELVDLTSLIGSPAYRAGSPQREALDARIAALAARQEELEGLEARPSGWVWRETGQRFGDWWREQDTTAKNTWLRSMNVRLTFDVRGGLTRTIDFGDLQEYEQHLRLGSVVERLHTGMS

SEQ ID NO: 11604 - protein, 500 aa, synthetic construct
MRALVVIRLSRVTDATTSPERQLESCQQLCAQRGWDVVGVAEDLDVSGAVDPFDRKRRPNLARWLAFEEQPFDVIVAYRVDRLTRSTRHLQQLVHWAEDHKKLVVSATEAHFDTTTPFAAVVIALMGTVAQIELEAIKERNRSAAHFNIRAGKYRGSLPPWGYLPTRVDGEWRLAPDPVQRERILEVYHRVVDNHEPLHLVAHDLNRRGVLSPKDYFAQLQGREPRGRKWSATALKRSMISEAMLGHATLNGRTVRDDNGAPLVRAEPILTREQQEALRAELVKTSRAKPAVSTPSLLLRVLFCAVCGEPAYKFSGGGRKHPRYRCRSMGFPKHCGNGTVAMAEWDAFCEEQVLGLLGDAERLEKVRVAGSDSAVELAEVNAELVDLTSLIGSPAYRADSPQREALDARIAALAARQEELEGLEARPSGWVWRETGQRFGDWWREQDTAAKNTWLRSMNVRLTFDVRGGLTRTINFGDLQEYEQHLRLDSVVERLRTGMS

SEQ ID NO: 11605 - protein, 500 aa, synthetic construct
MHALVVIRLSRVTEATTSPERQLESCQQLCAQRGWDVVGVAEDLDVSGAVDPFDRKRRPNLARWLAFEEQPFDAIVAYRVDRLTRSIRHLQQLVHWAEDHKKLVVSATEAHFDTTTPFAAVVIALMGTVAQMELEAIKERNRSAAHFNIRAGKYRGSLPPWGYLPTRVDGEWRLAPDPVQRERILEVYHRVVDNHEPLHLVAHDLNRRGVLSPKDYFAQLRGREPQGRKWSATALKRSMTSEAMLGYATLNGKTVRDDDGAPLVRAEPILTREQLEALRAELVKTSRAKPAVSTPSLLLRVLFCAVCGEPAYKFAGGGRKHPRYRCRSMGFPKHCGNGTVAMAEWDAFCEEQVLDLLGDAERLEKVWVAGSDSAVELAEVNAELVDLTSLIGSPAYRAGSPQREALDARIAALVARQEELEGLEARPSGWEWRGTGQRFGDWWREQDTATKNTWLRSMNIRLTFDVRGGLTRTINFGDLQEYEQHLRLGSVVERLHTGMS

SEQ ID NO: 11606 - protein, 500 aa, synthetic construct
MRALVVIRLSRVTDATTSPERQLESCQQLCAQRGWDVVGVAEDLDVSGAVDPFDRKRRPSLARWLAFEEQPFDAIVAYRVDRLTRSIRHLQQLVHWAEDHKKLVVSATEAHFDTTTPFAAVVIALMGTVAQMELEAIKERNRSAAHFNIRAGKYRGSLPPWGYLPARVDGEWRLVPDPVQRERILEVYHRVVDKHEPLHLVAHDLNRRGVLSPKDYFAQLRGREPQGRKWSATALKRSMISEAMLGYATLNGKTVRDDDGAPLVRAEPILTREQLEALRAELVKTSRAKPAVPTPSLLLRVLFCAVCGEPAYKFAGGGRKHPRYRCRSMGFPKHCGNGTVAMAEWDAFCEKQVLDLLGDAERLEKVWVAGSDSAVELAEVNAELVDLTSLIGSPAYRAGSPQREALDARIAALAARQEELEGLEARPSGWEWRETGQRFGDWWREQDTAAKNTWLRSMNVRLTFDVRGGLTRTIDFGDLQEYEQHLRSGGVIERLHTGMS

SEQ ID NO: 11607 - protein, 500 aa, synthetic construct
MRALVVIRLSRVTDATTSPERQLESCQQLCAQRGWDVVGAAEDLDVSGAVDPFDRKRRPNLARWLAFEEQPFDVIVAYRVDRLTRSIRHLQQLVHWAEDHKKLVVSATEAHFDMTTPFAAVVIALMGTVAQMELEAIKERSRSAAHFNIRAGKYRGSLPPWGYLPTRVDGEWRLAPDPVQRERILEVYHRVVDNHEPLHLVAHDLNRRGVLSPKDYFAQLQGREPQGRKWSATALKRSMISVAMLGYATLNGKTVRDDDGAPLVRAEPILTREQLEALRAELVKTSRAKPAVSTPSLLLRVLFCAVCGEPAYKFAGGGRKHPRYRCRSMGFPKHCGNGTVAMAEWDAFCEEQVLGLLGDVERLEKVWVAGSDSAVKLAEVNAELVDLTGLIGSPAYRAGSPQREALDARIAALAARQEELEGLGARPSGWGWRETGQRFGDWWREQDTAAKNAWLRSMNVRLTFDVRGGLTRTIDFGDLQEYEQHLRLGSVVERLHTGVS

SEQ ID NO: 11608 - protein, 500 aa, synthetic construct
MRALVVIRLSRVTDATTSPERQLESCQQLCAQRGWDVVGVAEDLDVSGAVDPFDRKRRPSLARWLAFEEQPFDVIVAYRVDRLTRSIRHLQQLVHWAEDHKKLVVSATEAHFDMTTPFAAVVIALMGTVAQMELEAIKERSRSAAHFNIRAGKYRGSLPPWGYLPTRVDGVWRLVPDPVQRERILEVYHRVVDNHEPLHLVAHDLNRRGVLSPKDYFAQLRGREPQGRKWSATALKRSMISVAMLGYATLNGETVHDDDGAPLVRAEPILTREQLEALRAELVKTSRAKPAVSTPSLLLRVLFCAVCGEPAYKFAGGGRKHPRYRCRSMGFPKHCGNGTVAMAEWDAFCEEQVLNLLGDAERLEKVWVAGSDSAVELAEVNAELVDLTSLIGSPAYRAGSPQREALDARIAALAARQEELEGLEARPSGWEWRGTGQRFGDWWREQDTAAKNTWLRSMNVRLTFDVRGGLTRTIDFGDLQEYEQHLRLSSVVERLHTGMS

SEQ ID NO: 11609 - protein, 500 aa, synthetic construct
MRALVVIRLSRVTDATTSPERQLESCQQLCAQRGWDVVGVAEDLDVSGAVDPFDRKRRPNLARWLAFEEQPFDVIVAYRVDRLARSIRHLQRLVHWAEDHKKLVVSATEAHFDTTTPFAAVVIALMGTVAQMELEAIKERNRSAAHFNIRAGKYRGSLPPWGYLPTRVDGEWRLVPDPVQRERILEVYHRVVDNHEPLHLVAHDLNRRGVLSPRDYFAQLQGREPQDRKWSATALKRSMISGAMLGYATLNGKTVRDDDGAPLVRAEPILTREQLEALRAELVKTSRAKPAVSTPSLLLRVLFCAVCGEPAYKFAGGGRKHPRYRCRSMGFPKHCGNGTVAMAKWDAFCEEQVLDLLGDAERLEKVWVAGSDSAVELAEVNAELVDLTSLIGSPAYRAGSPQREALDARIAALAARQEELGGLEARPPGWEWRETGQRFGDWWREQDTAAKNTWLRSMNVRLTFDVRSGLARTIDFGDLQEYVQHLRLGSVVERLHTGMS

SEQ ID NO: 11610 - protein, 500 aa, synthetic construct
MRALVVIRLSRVTDATTSPERQLESCQQLCAQRGWDVVGVAEDLDVSGAVDPFDRMRRPNLARWLAFEEQPFDVIVAYRVDRLTRSIRHLQQLVHWAEDHKKLVASATEAYFDTTTPFAAVVIALMGTVAQMELEAIKERNRSAAHFNIRAGKYRGSLPPWGYLPTRVDGEWRLAPDPVQRERILEVYRRVVDNHEPLHLVAHDLNRRGVLSPRDYFAQLQGREPQGRKWSATALKRSMISEAMLGYATLNGKIVRDDDGAPLVRAEPILTREQLEALRAELVKASRAKPAVSTPSLLLRVLFCAVCGEPAYKFTGGGRKHPRYRCRSMGFPKHCGNGTVAMAEWDAFCEEQVLNLLGDAERLEKVWVAGSDFAVELAEVNAELVDLTSLIGSPAYRARSPQREALDARIAALAARQVELEGLGARPSGWEWRGTGQRFGDWWREQDTAAKNAWLRSMNVRLTFNVRGGLTRTIDFGDLQEYEQHLRLGSVVERLHTGMS

SEQ ID NO: 11611 - protein, 500 aa, synthetic construct
MRALVVIRLSRATDATTSPKRQLESCQQLCAQRGWDVVGVAEDLDVSGAVDPFDRKRRPNLARWLAFEEQPFDVIVAYRVDRLARSIRHLQQLVHWAEDHKKLVVSATEAHFDTTTPFAAVVIALMGTVAQMELEAIKERNRSAAHFNIRAGKYRGSLPPWGYLPTRVDGEWRLVPDPVQRERILEVYHRVVDNHEPLHLVAHDLNRRGVLSPKDYFAQLQGREPQGRKWSATALKRSMISGAMLGYATLNGKTVRDDDGVPLVRAEPILTREQLEALRAELVKTSRAKPAVSTPSLLLRVLFCAVCGEPAYKFVGGGRKHPRYRCRSMGFPRHCGNGTVAMAEWDVFCEEQVLGLLEDAERLEKVWVAGSDSAVDLAEVNAELVDLTSLIGSPAYRAGSPQREALDARIAALAARQEELEGLEARPSGWEWRGTGQRFGDWWREQDTAAKNTWLRSMNVRLTFDVRGGLTRTIDFGDLQEYEQHLRSGSVVERLRTGMS

SEQ ID NO: 11612 - protein, 500 aa, synthetic construct
MRALVVIRLSRVTDATTSPERQLESCQQLCAQRGWDVVGVAEDLDVSGAVDLFDRKRRPNLARWLAFEEQPFDVIVAYRVDRLTRSIRHLQQLVHWAEDHKKLVVSATEAHFDTTTPFAAVVIALMGTVAQMELEAIKERSRSAAHFNIRAGKYRGSLPPWGYLPARVDGEWRLVPDPVQRERILEVYHRVVDNHEPLHLVAHDLNRRGVLSPKDYFAQLRGREPQGRKWSATALKRSMVSEAMLGYATLNGKTVRDDDGAPLVRAEPILTREQQGALRAELVKSSRAKPAVSTPSLLLRVLFCAVCGEPAYKFAGGGRKHPRYRCRSMGFPKHCGNGTVAMAEWDAFCEEQVLDLLGDAERLEKVWVAGSDSAVELAEVNAELVDLTSLIGSPAYRAGSPQREALDARIAALAARQEELEGLEARPSGWEWRGTGQRFGDWWREQDTTAKNTWLRSMNVRLTFDVRGGLTRTIDFGDLQEYEQHLRLGSVVERLHTGMS

SEQ ID NO: 11613 - protein, 500 aa, synthetic construct
MRALVVVRLSRVTDATTSPERQLESCQQLCAQRGWDVAGVAEDLDVSGAVDPFDRKRRPNLARWLAFEEQPFDVIVAYRVDRLARSIRHLQQLVHWAEDHKKLVVSATEAHFDTTTPFAAVVIALMGTVAQMELEAIKERSRSAAHFNIRAGKYRGSLPPWGYLPERVDGEWRLVPDPVQRERILEVYHRVVNYHEPLHLVAHDLNRRGVLSPKDYFARLQGREPQGRKWSATALKRSMISEAMLGYATLNGKTVRDDDGAPLVRAEPILTREQLEALRAELVKTSRAKPAVSTPSLLLRVLFCAVCGEPAYKFAGGGRKHPRYRCRSMGFPKHCGNGTVAMAEWDAFCEEQVLDLLGDTERLEKVWVAGSDSAVELAEVNAELVDLTSLIGSPAYRAGSPQREALDARIAALAARQEELEGLEARPSGWEWRETGQRFGDWWHEQDTAAKNTWLRSMNVRLTFDVRGGLTRTIDFGDLQEYEQHLRSGSVVERLHTGMS

SEQ ID NO: 11614 - protein, 500 aa, synthetic construct
MRALVVIRLSRVTDATTSPERQLESCQQLCAQRGWDVVGVAEDLDVSGAVDPFDRKRRPNLARWLAFEEQPFDVIVAYRVDRLARSIRHLQRLVHWAEDHKKLVVSATEAHFDTTTPFAAVVIALMGTVAQMELEAIKERNRSAAHFNIRAGKYRGSLPPWGYLPARVDGEWRLVPDPVQRERILEVYHRVVDNHEPLHLVAHDLNRRGVLSPKDYFAQLRGREPQGRRWSATALKRSMISEAMLGYATLNGKTVRDDDGAPLVRAEPILTREQLEALRAELDKTSRAKPAVSTPSLLLRVLFCAVCGEPAYKFAGGGRKHPRYRCRSMGFPKHCGNGTVAMTEWDAFCEEQVLGLLGDAERLEKVWVAGSGSAVELAEVNAELVDLMSLIGSPAYRAGSPQREALDARIAALAARQEELEGLEARPSGWEWRETGQRFGDWWREQDTAAKNAWLRSMNVRLTFDVRGGLTRTIDFGDLREYEQHLRLGSVVERLHTGMS

SEQ ID NO: 11615 - protein, 500 aa, synthetic construct
MRALVVIRLSRVTDATTSPERQLESCQQLCALRGWDVVGVAEDLDVSGAVDPFDRKRRPNLARWLAFEEQPFDVIVAYRVDRLARSIRHLQQLVHWAEDHKKLVVSATEAHFDTTTPFAAVVIALMGTVAQMELEAIKERSRSAAHFNIRAGKYRGSLPPWGYLPSRVDGEWRLVSDPVQRERILEVYHRVVDNHEPLHLVAHDLNRRGVLSPKDYFAQLQGREPQGRKWSATALKRSMISEAMLGYATLNGKTVRNDDGAPLVRAEPILTREQLEALRAELVKTSRAKPAVSTPSLLLRVLFCAVCGEPAYKFAGGGRKHPRYRCRSMGFPKHCGNGTVAMAEWDAFCEEQVLDLLGNAERLEKVWVAGSDSAVKLAEVNAELVDLTSLIGSPAYRAGSPQREALDARIAALAARQEELEGLEARPSGWGWRETGQRFGDWWREQDTAAKNTWLRSMNVRLTFDVRGGLTRTIDFGDLQEYVQHLRLGSVIERSHTGMS

SEQ ID NO: 11616 - protein, 500 aa, synthetic construct
MRALVVIRLSRVTDATTSPERQLESCQQLCAQRGWDVVGVAEDLDVSGAVDPFDHKRRPNLARWLAFEEQPFDAIVAYRVDRLTRSIRHLQQLVHWAEDHKKLVVSATEAHFDTTTPFAAVVIALMGTVAQMELEAIKERSRSAAHFNIRAGKYRGSLPPWGYLPTRVDGEWRLVPDPVQRERILEVYHRVVNNHEPLHLVAHDLNRRGVLSPKDYFAQLQGREPQGRKWSATALKRSMISEAMLGYATLNGKTVRDDDGAPLVRAEPILTREQQEALCAELVKTSRAKPAVSTPSLLLRVLFCAVCGEPAYKFAGGGRKHPRYRCRSMGFPKHCGNGTVAMAEWDAFCEEQVLGLLGDAERLEKVWVAGSDSAVELAEVNAELVDLTSLIGSPAYRAGSPQREALDARIAALAARQEELEGLEARLSGWEWRETGQRFGDWWREQDTAAKNTWLRSMNVRLTFDVRGGLTRTIDFGDLREYGQHLRLGSVVERLHTGMS

SEQ ID NO: 11617 - protein, 500 aa, synthetic construct
MRALVVIRLSRVTDATTSPERQLESCQQLCVQRGWDVIGVAEDLDVSGAVDPFDRKRRPNLARWLAFEEQPFDVIVAYRVDRLARSIRHLQQLVHWAEDHKKLVVSATEAHFDTTTPFAAVVIALMGTVAQMELEAIKERSRSAAHFNIRAGKYRGSLPPWGYLPTRVDGEWRLAPDPVQRERILEVYHRVVDNHEPLHSVAHDLNRRGVLSPKDYFAQLRGREPQGRKWSATALKRSMISEAMLGYATLNGKTVRDDDGAPLVRAEPILTREQLEALRAELVKTSRAKPAVSTPSLLLRVLFCAVCGEPTYKFAGGGRKHPRYRCRSMGFPKHCGNGTVAMAEWDAFCEEQVLDLLGDAERLEKVWVAGSDSAVELAEVNAELVDLTSLISSPAYRAGSPQREALDARIAALAARQEELEGLEARPSGWEWRETGQRFGDWWREQGTAAKNTWLRSMNVRLTFDVRGGLTRTIDFGDLQEYEQHLRLGSVVERLHTGMS

SEQ ID NO: 11618 - protein, 500 aa, synthetic construct
MRALVVIRLSRVTDATTSPERQLESCQQLCAQRGWDVVGVAEDLDVSGAVDPFDRKRRPNLARWLAFEEQPFDVIVAYRVDRLTRSTRHLQQLVHWAEDHKKLVVSATEAHFDTTTPFAAVVIALMGTVAQMELEAIRERNRSAAHFNIRAGKYRGSLPPWGYLPTRVDGEWRLAPDPVQRERILEVYHRVVDNHEPLHLVAHDLNRRGVLSPKDYFAQLQGREPQGRKWSATALKRSMTSEAMLGYATLNGKTVRDDDGAPLVRAEPILTREQLEALRAELVKTSRAKPAVSTPSLLLRVLFCAVCGEPAYKFSGGGRKHPRYRCRSMGFPKHCGNGTVAMAEWDAFCEEQVLDLLGDAERLEKVWVAGSDSAVELAEVNAELVDLTSLIGSPAYRAGSPQREALDARIAALAARQAELEGLEARPSGWEWRETGQGFGDWWREQDTAAKNTWLRSMNVRLTFDVRGGLTRTIDFGDLQEYEQHLRLGSVVERLHTGMS

SEQ ID NO: 11619 - protein, 500 aa, synthetic construct
MRALVVIRLSRVTDATTSPERQLESCQQLCAQRGWDVVGVAEDLDVSGAVDPFDRKRRPNLARWLAFEERLFDVIVAYRVDRLARSIRHLQQLVHWAEDRKKLVVSATEAHFDTTTPFAAVVIALMGTVAQMELEAIKERSRSAAHFNIRAGKYRGSLPPWGYLPTRVDGEWRLVPDPVQRERILEVYHRVVDNHEPLHSVAHDLNRRGVLSPKDYFAQLRGREPQGRKWSATALKRSMISGAMLGYATLNGKTVRDDVGAPLVRAEPILTREQLEALRAELVKSSRAKPAVSTPSLLLRVLFCAVCGEPAYKFAGGGRKHPRYRCRSMGFPKHCGNGTVAMAEWDAFCEEQVLGLLGDAVRLEKVWVAGSDSAVELAEVNAELVDLTSLIGSPAYRAGSPQREALDARIAALAARQEELEGLEARPSGWEWRETGQRFGDWWREQDAAAKNTWLRSMNVRLTFDVRGGLTRTIDFGDLQEYEQHLRLGSVVERLHTGMS

SEQ ID NO: 11620 - protein, 500 aa, synthetic construct
MRALVVIRLSRVTDATTSPERQLESCQQLCAQRGWDVVGVAEDLDVSGAVDPFDRKRRPNLARWLVFEEQPFDVIVAYRVDRLARSIRHLQQLVHWAEDHKKLVVSATEAHFDTTTPFAAVVIALMGTVAQMELEAIKERTRSAAHFNIRAGKYRGSLPPWGYLPTRVDGEWRLVPDPVQRERILEVYHRVVDNHEPLHLVAHDLNRRGVLSPKDYFAQLQGREPQGRKWSATALKRSMISEAMLGYATLNGKTVRDDDGAPLVRAEPILTREQQEALRAELVKTSRAKPAVSTPSLLLRVLFCAVCGEPAYKFAGGGRKHPRYRCRSMGFPKHCGNGTVAMVEWDAFCEEQVLGLLGDAERLEKVWVAGSDSAVELAEVNAELVDLTSLIGSPAYRAGSPQREALDARIAALAARQEELEGLEARPSGWEWRGTGQRFGDWWREQDSAAKNTWLRSMNVRLTFDVRGGLTRTIDFGDLQEYEQHLRLGSVVERLHTGMP

SEQ ID NO: 11621 - protein, 500 aa, synthetic construct
MRALVVIRLSRVTDATTSPERQLESCQLLCAQRGWDVVGVAEDLDVSGAVNPFDRKRRPNLARWLAFEEQPFDVIVAYRVDRLTRSTRHLQQLVHWAEDHKKLVVSATEAHFDTTTPFAAVVIALMGTVAQMELEAIKERSRSAAHFNIRAGKYRGSLPPWGYLPARVDGVWRLVPDPVQRERILEVYHRVVNNHEPLHLVAHDLNRRGVLSPKDYFAQLRGREPQGRKWSATALKRSMTSEAMLGYATLNGKTVRDDDGTPLVRAEPILTREQLEALRAVLVKTSRAKPAVPTPSLLLRVLFCAVCGEPAYKFAGGGRKHPRYRCRSMGFPKHCGNGTVAMAEWDAFCEEQVLNLLGDAERLEKVWVAGSDSAVEFAEVNAELVDLTSLIGSPAYRAGSPQREALDARIAALAARQEELEGLETRPSGWEWRETGQRFGDWWREQDSAAKNTWLRSMNVRLTFDVRGGPTRTIDFGDLQEYEQHLRLGSVVERLHTGMS

SEQ ID NO: 11622 - protein, 500 aa, synthetic construct
MRALVVIRLSRVSDATTSPERQLESCQQLCAQRGWDVVGVAEDLDVSGAVDPFDRKRRPNLARWLAFEEQPFDVIVAYRVDRLTRSTRHLQQLVHWAEDHKKLVVSATEAHFDTTTPFAAVVIALMGTVAQMELEAIKERSRSAAHFNIRAGKYRGSLPPWGYLPTRVDGEWRLVPDPVQRERILEVYHRVVDNHEPLHLVAHDLNRRGVLSPKDYFAQLRGREPQGRKWSATALKRSMISEAMLGHATLNGKTVRDDDGAPLVRAEPILTREQLEALRAELVKTSRAKPAVSTPSLLLRVLFCAVCGEPAYKFAGGGRRHPRYRCRSMGFPKHCGNGTVAMAEWDAFCEEQVLDLLGDAERLEKVWVAGSDSAVELAEVSAELVDLTSLIGSPAYRAGSPQREALDARIAALAARQEELEGLEARPSGWEWRETGQRFGDWWREQDTAAKNTWLRSMNVRLTFDVRGGLTRTVDFGDLQEYEQHLRRGSVVGRLHTGMS

SEQ ID NO: 11623 - protein, 500 aa, synthetic construct
MRALVVIRLSRVTDATTSPERQLESCQQLCAQRGWDVVGVAEDLDVSGAVEPFDRKRRPNLARWLAFEEQPFDVIVAYRVDRLTRSIRHLQQLVHWAEDHKKLVVSATEAHFDTTTPFAAVVIALMGTVAQMELEAIKERSRSAAHFNIRAGKYRGSLPPWGYLPARVDGEWRLVPDPVQRERILEVYHRVVDNHEPLYLVAHDLNRRGVLSPKDYFAQLRGREPQGREWSATALKRSMISKAMLGYATLNGKTVRGDDGAPLVRAEPILTREQQEALRAELVKTSRAKPAVSTPSLLLRVLFCAVCGEPAYKFAGGGRKHPRYRCRSMGFPKHCGNGTVVMAEWDAFCEEQVLGLLGDVERLEKVWVAGSDSAVELAEVNAELVDLTSLIGSPAYRAGSPQREALDARIAALAARQEELEGLEARPSGWEWRETGQRFGDWWREQDTAARNTWLRSMNVRLTFDVRGGLTRTIDFGDLQEYEQHLRLGSVVERLHTGTS

SEQ ID NO: 11624 - protein, 500 aa, synthetic construct
MRALVVIRLSRVTEATTSPERQLESCQQLCAQRGWDVVGVAEDLDVSGAVDPFDRKRRPNLARWLAFEEQPFDVIVAYRVDRLTRSTRHLQQLVHWAEDHKKLVVSATEAHFDTTTPFAAVVIALMGTVAQMELEAIKERNRSAAHFNIRAGKYRGSLPPWGYLPARVDGEWRLVPDPVQRERILEVYHRVVDNHEPLHLVAHDLNRRGVLSPKDYFAQLRGREPQGRKWSATALKRSMISEAMLGYATLNGKTVRGDDGAPLVRAEPILTRGQLETLRAELVKTSRAEPAVSTPSLLLRVLFCAVCGEPAYKFAGGGRKHPRYRCRSMGFPKHCGNGTVAMAEWDAFCEEQVLNLLGDAERLEKVWVAGSDSAVELAEVNAELVDLTSLIGSPAYRAGSPQREALDARIAALAARQEELEGLEARLSGWEWRETGQRFGDWWREQDTAAKNTWLRSMNVRLTFDVRGGLTRTIDFGDLQEYEQHLRLGSVVERLHTGMS

SEQ ID NO: 11625 - protein, 500 aa, synthetic construct
MRALVVIRLSRVTDATTSPERQLESCQQLCAQRGWDVVGVAEDLDVSGAVDPFDRKRRPNLARWLAFEGQPFDVIVAYRVDRLARSIRHLQQLVHWAEDHKKLVVSATEAHFDTTTPFAAVVVALMGTVAQMELEAIKERSRSAAHFNIRAGKYRGSLPPWGYLPTRVDREWRLAPDPVQRERILEVYHRVVDNHEPLHLVAHDLNRRGVLSPKDYFAQLQGREPQGRKWSATALKRSMTSEAMLGYATLNGKTVRDDGGAPLVRAEPILTREQLEALRAVLVKTSRAKPAVSTPSLLLRVLFCAVCGEPAYKFAGGGRKHPRYRCRSMGFPKHCGNGTVAMAEWDAFCEEQVLDLLGDAERLEKVWVACSDSAVELAEVNAELVDLTSLIGSPAYRAGSPQREALDARIAALAARQEELEGLEARPSGWEWRETGQRFGDWWREQDTAAKNTWLRSMNVRLTFDVRGGLTRTIDFGDLQEYEQHLRLGSVVERLHTGMS

SEQ ID NO: 11626 - protein, 500 aa, synthetic construct
MRALVVIRLSRVTDATTSPERQLESCQQLCAQRGWDIVGVAEDLDVSGAVDPFDRKRRPNLARWLAFEEQPFDVIVAYRVDRLARSIRHLQQLVHWAEDHKKLIISATEAHFDTTTPFAAVVIALMGTVAQMELEAIKERSRSAAHFNIRAGKYRGSLPPWGYLPTRVNGEWRLVPDPVQRERILEVYHRVVDDHEPLHLVAHDLNRRGVLSPRDYFAQLQGREPQGRKWSATALKRSMISEAMLGYATLNGKIVRDDDGAPLVRAEPILTREQLEALRAELAKTSRAKPAVSTPSLLLRVLFCAVCGEPAYKFAGGGRKHPRYRCRSMGFPKHCGNGTVAMTEWDVFCEEQVLDLLGDAERLEKVWVAGSDSAVKLAEVNAELVDLTSLIGSPAYRAGSPQREALDARIAALVARQEELEGLEARPSGWEWRETGQRFGDWWREQDTAAKNTWLRSMNVRLTFDVRGGLTRTIDFGDLQEYEQHLRLGSVVERLHTGMS

SEQ ID NO: 11627 - protein, 500 aa, synthetic construct
MRALVVIRLSRVTDATTSPERQLESCQQLCAQRGWDVVGVAEDLDVSGAVDPFDRKRRPNLARWLAFEEQPFDVIVAYRVDRLTRSVRHLQQLVHWAEDHKKLVVSATEAHFDTTTPFAAVVIALMGTVAQMELEAIKERSRSAAHFNIRAGKYRGSLPPWGYLPARVDGEWRLVPDPVQRERILEVYHRVVDNHEPLHLVAHDLNRRGVLSPKDYFAQLRGREPQGRKWSATALKRSMISVAMLGYATLCGKTVRDDDGAPLVRAEPILTREQQEALRAELVKTSRAKPAVSTPSLLLRVLFCAVCGEPAYKFAGGGRKHPRYRCRSMGFPKHCGNGTVAMAEWDAFCEEQVLDLLGDAERLEKVWVAGSDSAVELAEVNAELVDLTSLIGSPAYRAGSPQREALDARIAALAARQAELEGLEARPSGWEWRETGQGFGDWWREQDTAAKNTWLRSMNVRLTFDVRGGLTRTIDFGDLQEYEQHLRLGSVVERLHTGMS

SEQ ID NO: 11628 - protein, 500 aa, synthetic construct
MRALVVIRLSRVTDATTSPERQLESCQQLCAQRGWDVVGVAEDLDVSGAVDPFDRKRRPNLARWLAFEEQPFDVIVAYRVDRLTRSTRRLQQLVHWAEDHKKLVVSATEAHFDTTSPFAAVVIALMGTVAQMELEAIRERSRSAAHFNIRAGKYRGSLPPWGYLPARVDGEWRLVPDPVQRERILEVYHRVVDNHEPLHLVAHDLNRRGVLSPKDYFAQLRGREPQGRKWTATALKRSMISGAILGYATLNGKTVRDDSGAPLVRAEPILTREQLEALRAELVKTSRAKPAVSTPSLLLRVLFCAVCGEPAYKFAGGGRKHPRYRCRSMGFPKHCGNGTVAMAEWNAFCEEQVLDSLGDAERLEKVWVAGSDYAVELAEVNAELVDLTSLIGSPAYRAGSPQREALDARIAALAARQEELEGLEARPSGWVWRETGQRFGDWWREQDTAAKNTWLRSMNVRLTFDVRGGLTRTIDFGDLHEYEQHLRLGSVAERLHTGMS

SEQ ID NO: 11629 - protein, 500 aa, synthetic construct
MRVLVVIRLSRVTDATTSPERQLESCQQLCAQRGWDVVGVAEDLDVSGAVDPFDRKRRPNLARWLAFEEQPFDVIVAYRVDRLARSIRHLQQLVRWAEDHKKLVVSATEAHFDTTTPFAAVVIALMGTVAQMELEAIKERNRSAAHFNIRAGKYRGSLPPWGYLPARVDGEWRLVPDPVQRECILEVYHRVVDNHEPLHLVAHDLNRRGVLSPKDYFAQLRGREPQGRKWSATALKRSLISEAMLGYATLNGKTVRDDDGAPLVRAEPILTREQQEALRAELVKTSRAKPAVSTPSLLLRVLFCAVCGEPAYKFSGGGRKHPRYRCRSMGFPKHCGNGTVAMAEWDAFCEEQVLNLLGDAERLEKVWVAGSDSAIELAEVNAELVDLTSLIGSPAYRAGSPQREALDARIAALAARQEELEGLEARPSGWKWRETGQRFGDWWREQDTAAKNTWLRSMNVRLTFDVRGGLTRTIDFGDLQEYEQHLRSGSVVERLHTGMS

SEQ ID NO: 11630 - protein, 500 aa, synthetic construct
MRALVVIRLSRVTDATTSPERQLESCQQLCAQRGWDVVGVAEDLDVSGAVDPFDRKRRPNLASWLAFEEQPFDVIVAYRVDRLTRSTRHLQQLVHWAEDHKKLVVSATEAHFDTTTPFAAVVIALMGTVAQMELEAIKERSRSAAHFNIRAGKYRGSLPPWGYLPARVDGEWRLVPDPVQRERILEVYHRVVDNREPLHLVAHDLNRRGVLSPKDYFAQLRGREPQGRKWSATALKRSMISEAMLGYATLNGKIVRDDDGAPLVRAEPILTREQLEALRAELVKTSRAKPAVSTPSLLLRVLFCAVCGEPAYKFAGGGRKHPRYRCRSMGYPKHCGNGTVAMAEWDAFCEEQVLDLLGDAERLEKVWVTDSDSAVELAEVNAELVDLTSLIGSPAYRAGSPQREALDARIAALAARQEELEGLEARPSGWEWRKTGQRFRDWWREQDTAAKNTWLRSMNVRLTFDARGGQTRTIDFGDLQEYEQHLRLGSVVERLHIGTS

SEQ ID NO: 11631 - protein, 500 aa, synthetic construct
MRALVVIRLSRVTDATTSPERQLESCQQLCAQRGWDVVGVAEDLDVSGAVDPFDRKRRPNLARWLAFEEQPFDVIVAYRVDRLTRSVRHLQQLVHWAEDHKKLVVSATEAHFDTTTPFAAVVIALMGTVAQMELEAIRERNRSAAHFNIRAGKYRGSLPPWGYLPARVDGVWRLVPDPVQRERILEVYHRVVDNHEPLHLVAHDLNRRGVLSPRDYFAQLRGREPQGRKWSATALKRSMVSEAMLGYATLNGKTVRGDDGAPLVRTEPILTREQLEALRAELVKTSRAKPAVSTPSLLLRVLFCAVCGEPAYKFAGGGRKHPRYRCRSMGFPKHCGNGTVAMAEWDAFCEEQVLDLLGDAERLEKVWVAGSDSAVELAEVNAELVDLTSLIGSPAYRACSPQREALDARIAALAARQEELEGLEARPSGWEWRETGQRFGDWWREQDTAAKNTWLRSMNVRLTFDVRGGLTRTIDFGDLQEYEQHLRLGSVVERLHTGMS

SEQ ID NO: 11632 - protein, 500 aa, synthetic construct
MRALVVIRLSRVTDATTSPERQLESCQQLCAQRGWDVVGVAEDLDVSGAVDPFDRKRRPNLARWLAFEEQPFDVIVAYRVDRLTRSVRHLQQLVHWAEDHKKLVVSATEAHFDTTTPFAAVVIALMGTVAQMELEAIKERNRSAAHFNIRAGKYRGSLPPWGYPPTRVDGEWRLVPGPVQRERILEAYHRVVDNHEPLHLVAHDLNRRGVLSPKDYFAQLRGREPQGRKWSATALKRSMISVAMLGYATLNGKTVRGDDGAPLVRAEPILTREQLEALRAELVKTSRAKPAVSTPSLLLRVLFCAVCGEPAYKFSGGGRKHPRYRCRSMGFPKHCGNGTVAMAEWDAFCEEQVLDLLGDAERLEKVWVAGSDSAVELAEVNAELVDLTSLIGSPTYRAGSPQREALDARIAALAARQEELEGLEARPSGWEWRETGQRFGDWWREQDTAAKNTWLRSMNVRLTFDVRGGLTRTIDLGGLQEYERHLRSGSVVERLHTGMS

SEQ ID NO: 11633 - protein, 500 aa, synthetic construct
MRALVVIRLSRVTDATTSPERQLESCQQLCAQRGWDVVGVAEDLDVSGAVDPFDRKRRPNLARWLAFEEQPFDVIVAYRVDRLARSIRHLQQLVHWAEDHKKLVVSATEAHFDTTTPFAAVVIALMGTVAQMELEAIKERSRSAAHFNIRAGKYRGSLPPWGYLPTRMDGEWRLVPDPVQRERILEVYRRVVDNHEPLHLVAHDLNRRGVLSPKDYFAQLRGREPQGRKWSATALKRSMISEAMLGYATLNGKTVRDEDGAPLVRAEPILTREQLEALRAELVKTSRAKPAVSTPSLLLRVLFCAVCGEPAYKFAGGGRKHPRYRCRSMGFPKHCGNGTVAMAEWDAFCEEQVLNLLGDAERLEKVWVAGSDSAVELAEVNAELVDLTSLIGSPAYRAGSPQREALDARIAALAARQEELEGLEARPSGWEWRETGQRFGDWWREQDTAAKNTWLRSMNVRLTFDVRGGLTRTIDFGDLQEYEQHLRLGSVVERLHTGMS

SEQ ID NO: 11634 - protein, 500 aa, synthetic construct
MRALVVIRLSRVTDATTSPERQLESCQQLCAQRGWDVVGVAEDLDVSGAVDPFDRKRRPNLARWLAFEEQPFDVIVAYRVDRLTRSTRHLQQLVHWAEDHKKLVVSATEAHFDTTTPFAAVVIALMGTVAQMELEAIKERTRSAAHFNIRAGKYRGSMPPWGYLPTRVDGEWRLVPDPVQRERILEVYHRVVDNHEPLHLVAHDLNRRGVLSPKDYFAQLQGREPQGRKWSATALKRSMISVAMLGYATLNGKTVRNDDGAPLVRAEPILTREQLEALRAELVKTSRAKPAVSTPSLLLRVLFCAVCGEPAYKFAGGGRKHPRYRCRSMGYPRHCGNGTVAMAEWDAFCEEQVLDLLGDAERLEKVRVAGSDSAVELAEVNAELVDLTSLIGSPAYRARSPQREALDARIAALAARQEELEGLEARPSGWEWRKTGQRFGDWWREQGTAAKNTWLRSMNVRLTFDVRGGLSRTIDFGDLREYEQHLRSGSVVERLHTGMS

SEQ ID NO: 11635 - protein, 500 aa, synthetic construct
MRALVVIRLSRVTDATTSPERQLESCQRLCAQRGWDVVGVAEDLDVSGAVDPFDRKRRPNLARWLAFEEQPFDVIVAYRVDRLTRSTRYLQQLVHWADDHKKLVVSATEAHFDTTTPFAAVVIALMGTVAQMELEAIKERSRSAAHFNIRAGKYRGSLPPWGYLPTRVDGEWRLAPDPVQRERILEVYHRVVDNHEPLHLVAHDLNRRGVLSPKDYFAQLQGREPQGRKWSATALKRSMTSEAMLGYATLNGKTVRDEDGAPLVRAEPILTREQLEALRAELVKTSRAKPAVSTPSLLLRVLFCAVCGEPAYKFAGGGRKHPRYRCRSMGFPKHCGNGTVAMAEWDAFCEEQVLDLLGDAERLEKVWVAGSDSAVELAEVNAELADLTSLIGSPAYRAGSPQREALDARIAALAARQEELEGLEARPSGWEWRGTGQRFGDWWHEQDTAAKNTWLRSMNVRLTFDVRGGLTRTIDFGDLQEYEQHLRLGSVVERLHTGMS

SEQ ID NO: 11636 - protein, 500 aa, synthetic construct
MRALVVIRLSRVTDATTSPERQLESCQQLCAQRGWDVVGVAEDLDVSGAVDPFDRKRRPNLARWLASEEQPFDVIVAYRVDRLTRSTRHLQQLVHWAEDHKKLVVSATEAHFDTTTPFAAVVIALMGTVAQMELEAIKERSRSAAHFNIRAGKYRGSLPPWGYLPTRVDGEWRLAPDPVQRERILEVYHRIVDNHEPLHLVAHDLNRRGVLSPKDYFAQLQGREPQGRKWSATALKRSMTSEAMLGHATLNGKTVRDDDGAPLVRAEPILTRGQLEALRAELVKTSRAKPAVSTPSLLLRVLFCAVCGEPAYKFAGGGRKHPRYRCRSMGFPKHCGNGTVAMAEWDAFCEEQVLNLLGDAERLEKVWVAGSDSAAELAEVNAELVDLTSLIGSPAYRAGSPQREALDARIAALAARQGELEGLEARPSGWEWRETGQRFGDWWREQDTAAKNTWLHSMNVRLTFDVRGGLTRTIDFGDLQEYEQHLRLGSVVERLHTGMS

SEQ ID NO: 11637 - protein, 500 aa, synthetic construct
MRALVVIRLSRVTDATTSPERQLESCQQLCAQRGWDVVGVAEDLDVSGAVDPFDRKRRPNLARWLAFEEQPFDVIVAYRVDRLARSIRHLQQMVHWAEDHKKLIVSATEAHFDTTTPFAAVVIALMGTVAQMELEAIKERNRSAAHFNIRAGKYRGSLPPWGYLPARVDGEWRLVPDPVQRERILEVYRRVVDDHEPLHLVAHDLNRRGVLSPRDYFAQLRGREPQGRKWSATALKRSMISEAMLGYATLNGKTVRDDDGAPLVRAEPILTREQLEALRAELAKTSRAKPAASTPSLLLRVLFCAVCGEPAYKFAGGGRKHPRYRCRSMGFPKHCGNGTVAMAEWDAFCEEQVLNLLGDAERLEKVWVAGSDSAVELAEVNTELVDLTSSIGSPAYRAGSPQREALDARIAALAARQEELEGLEAHPSGWEWRETGQRFGDWWRGQDTAAKNTWLRSMNVRLTFDVRGGLTRTIDFGDLQEYEQHLRLGSVVERLHTGMS

SEQ ID NO: 11638 - protein, 500 aa, synthetic construct
MRALVVIRLSRVTDATTSPERQLESCQQLCAQRGWDVVGVAEDLDVSGAVDPFDRKRRPNLARWLAFEEQPFDVIVAYRVDRLTRSTRHLQQLVHWAEDHKKLVVSATEAHFDTTTPFAAVVIALMGTVAQMELEAIKERSRSAAHFNIRAGKYRGSLPPWGYLPARVDGEWRLVPDPVQRERILEVYHRVVDNHEPLHLVAHDLNRRGVLSPKDYFAQLQGREPQGRKWSATALKRSMISKAMLGYATLNGKTVRDDDGAPLVRAEPILTREQQEALRAELVKTSRAKPAVSTPSLLVRVLFCAVCGEPAYKFTGGGRKHPRYRCRSMGFPKHCGNGTVAMAEWDAFCEEQVLDLLGDAGRLEKVWVAGSGSAVELAEVNAELMDLTSLIGSPAYRAGSPQREALDARIAALAARQEELEGLEARPSGWEWRETGQRFGDWWRKQDTAAKNTWLRSMNVRLTFDVRGGLTRTIDFGDLQEYEQHLRSGSVDERLYTGMS

SEQ ID NO: 11639 - protein, 500 aa, synthetic construct
MRALVVIRLSRVTDATTSPERQLESCQQLCAQRGWDVVGVAEDLDVSGAVDPFDRKRRPNLARWLAFEEQPFDVIVAYRVDRLTRSTRHLQQLVHWADDHKKLVVSATEAHFDTTTPFAAVVVALMGTVAQMELEAIKERSRSAAHFNIRAGKYRGSLPPWGYLPARVDGVWRLVLDPVQRERILEVYHRVVNNHEPLHLVAHDLNRRGVLSPKDYFAQLQGREPQGRKWSATALKRSMISEAMLGYATLNGKTVRDDDGAPLVRAEPILTREQQEALRAELVKTSRAKPAVSTPSLLLRVLFCAVCGEPAYKFAGGGRKHPRYRCRSMGFPKHCGNGTVAMAEWDAFCEEQVLGLLGDAERLEKVWVAGSDSAVELAEVNAELVDLTSLIGSPAYRAGSPQREALDARIAALAARQKELEGLEARPSGWEWRETGQRFGDWWREQDSAAKNTWLRSMNVRLTFDVRGGLTRTIDFGDLQEYEQHLRLGSVAERLHTGMS

SEQ ID NO: 11640 - protein, 500 aa, synthetic construct
MRALIVIRLSRVTDATTSPERQLESCQQLCAQRGWDVVGVAEDLDVSGAVDPFDRKRRPNLARWLASEEQPFDVIVAYRVDRLTRSTRHLQRLVHWAEDHKKLVVSATEAHFDTTMPFAAVVIALMGTVAQMELEAIKERSRSAAHFNIRAGKYRGSLPPWGYLPTRVDGEWRLAPDPVQRERILEVYHRIVDNHEPLHLVAHDLNRRGVLSPKDYFAQLQGREPQGRKWSATALKRSMTSEAMLGHATLNGKTVRDDDGAPLVRAEPILTREQLEALRAELVKTSRAKPAVSTPSLLLRVLFCAVCGEPAYKFAGGGRKHPRYRCRSMGFPKHCGNGTVAMAEWDAFCEEQVLNLLGDAERLEKVWVAGSDSAVELAEVNAELVDLTSLIGSPAYRAGSPQREALDARIAALAARQGELEGLEARPSGWEWREAGQRFGDWWREQDTAAKNTWLRSMNVRLTFDVRGGLTRTIDFGDLQEYEQHLRLGSVVERLHTGTS

SEQ ID NO: 11641 - protein, 500 aa, synthetic construct
MRALVVIRLSRVTDATTSPERQLESCQQLCAQRGWDVVGVAEDLDVSGAVDPFDRKRRPNLARWLAFKEQPFDVIVAYRVDRLARSVRHLQQLVQWAEDHEKLVVSATEAHFDTTTPFAAVVIALMGTVAQMELEAIKERNRSAAHFNIRAGRYRGSLPPWGYLPTRVDGEWRLVPDPVQRERILEVYRRVVDNHEPLHLVAHDLNRRGVLSPRDYFAQLRGREPQGRKWSATALKRSMTSEAMLGYATLNGKTVRDDDGAPLVRAEPTLTREQLEALRAELVKTSRAKPAVSTPSLLLRVLFCAVCGEPAYKFAGGGRKHPRYRCRSMGFPKHCGNGTVAMAEWDAFCEEQVLDLLGDAKRLEKVWVAGSDSAVELAEVNAELVDLMSLIGSPAYRAGSPQREALDARIAALAARQEELEGLEARPSGWEWRETGQRFGDWWREQDTAAKNTWLRSMNVRLTFDVRGGLTRTIDFGDLQEYEPHLRLGGVVERLHTGMS

SEQ ID NO: 11642 - protein, 500 aa, synthetic construct
MRALVVIRLSRVTDATTSPERQLESCQQLCAQRGWDVVGVAEDLDVSGAVDPFDRKRRPNLARWLAFEEQPFDVIVAYRVDRLARSIRHLQQLVHWAGDHKKLVVSATEAHFDTTTPFAAVVIALMGTVAQMELEAIKERSRSAAHFNIRAGKYRGSLPPWGYLPTRVDGEWRLVPDPVQRERILEVYHRVVDNHEPLHLVAHDLNRRGVLSPRDYFAQLRGREPQGRKWSATALKRSMISEAMLGYATLNGRTVRDDDGAPLVRAEPILTREQLEALRAELVKTSRAKPAVSTPSLLLRVLFCAVCGEPAYKFAGGGRKHPRYRCRSMGFPKHCGNGTVATAEWDAFCEEQVLDLLGDTERLEKVWVAGSDSAIELAEVNAELVDLTSLIGSPAYRAGSPQREALDARIAALAARQEELVGLEARPSGWEWRETGQRFGDWWREQDTAAKNTWLRSMNVRLTFDVRGGLTHAIDFGDLQEYVQHLRLGSVVERLHAGMS

SEQ ID NO: 11643 - protein, 500 aa, synthetic construct
MRALVIIRLSRVTDATTSPERQLESCQQLCAQRGWDVVGVAEDLDVSGAVDPFDRKRRPNLARWLAFEERPFDVIVAYRVDRLTRSIRHLQQLVHWAEDHKKLVVSATEAHFDTTTPFAAVVIALMGTVAQMELEAIKERNRSAAHFNIRAGKYRGSLPPWGYLPTRVDGVWRLVPDPVQRERILEVYHRVVDNHEPLHLVAHDLNRRGVLSPKDYFAQLRGREPQGRKWSATALKRSMISVAMLGYATLNGKTVRDDDGAPLVRAEPILTREQLEALRAELVKTSRAKPAVSTPSLLLRVLFCAVCGEPAYKFAGGGRKHPRYRCRSMGFPRHCGNGTVAMAEWDAFCEEQVLDLLGDAERLEKVWVAGSDSAVELAEVNAELVDLASLIGSPAYRAGSPQREALDARIAALAARQGELEGLEARPSGWEWRETGQRFGDWWREQDAAAKNTWLRSMNVRLTFDVRGGLTRTIDFGDLQEYKQHLRLGSVVERLHTGTS

SEQ ID NO: 11644 - protein, 500 aa, synthetic construct
MRALVVIRLSRVTDATTSPERQLESCQQLCAQRGWDVVGVAEDLDVSGAVDPFDRRRRPNLARWLAFEEQPFDVIVAYRIDRLTRSIRHLQQLVHWAEDHKKLVVSATEAHFDTTTPFAAVVIALMGTVAQMELEAIKERNRSAAHFNIRAGKYRGSLPPWGYLPARVDGEWRLVPDPVQRERILEVYHRVVDNHEPLHLVAHDLNRRGVLSPKDYFAQLRGREPQGRKWSATALKRSMISEAMLGYATLNGKIVRDDDGAPLVRAEPILTREQLEALRAELVKTSRAKPAVSTPSLLLRVLFCAVCGEPAYKFAGGGRRHPRYRCRSMGFPKHCGNGTVAMAEWDAFCEEQVLGLLGDAEHMEKVWVAGSDSAVELAEVSAELVDLTSLIGSPAYRAGSPQREALDARIAALAARQEKLEGLEARPSGWEWRETGQRFGDWWREQDTAAKNTWLRSMNVRLTFDVRGGLTRTIDFGDLQEYEQHLRLGSVVERLHTGMS

SEQ ID NO: 11645 - protein, 500 aa, synthetic construct
MRALVVIRLSRVTEATTSPERQLESCQQLCAQRGWDVVGVAEDLGVSGAVDPFDRKRRPNLARWLAFEEQPFDVIVAYRVDRLARSIRHLQRLVHWAEDHKKLVVSATEAHFDTTTPFAAVVIALMGTVAQMELEAIKERNRSAAHFNIRAGKYRGSLPPWGYLPTRVDGEWRLVPDPVQRERILEVYHRVVDNHEPLHSVAHDLNRRGVLSPKDYFAQLQGREPQGRKWSATALKRSMISGAMLGYATLNGKTVRDDDGAPLVRAEPILTREQLEALRAELVKTSRARPAVSTPSLLLRVLFCAVCGEPAYKFAGGGRKHPRYRCRSMGFPKHCGNGTVAMAEWDAFCEEQVLDLLGDAERLEKVWVAGSDSAVELAEVNAELVDLTSLIGSPAYHAGSPQREALDARIAALAARQEELEGLEARPSGWEWRGTGQRFGDWWREQDTAAKNTWLRSMNVRLTFDVRGGLTRSIDFGDLQEYEQHLRLGSVVERLHTGMS

SEQ ID NO: 11646 - protein, 500 aa, synthetic construct
MRALVVIRLSRVTDATTSPERQLESCQQLCTQRGWDVVGVAEDLDVSGAVDPFDRKRRQNLARWLAFEEQPFDVIVAYRVDRLTRSTRHLQQLVHWAEDHKKLVVSATEAHFDTTTPFAAVVIALMGTVAQMELEAIKERNRSAAHFNIRAGKYRGSLPPWGYLPTRVDGEWRLAPDPVQRERILEVYHRVVDNHEPLHLVAHDLNRRGVLPPKDYFAQLRGREPQGRKWSATALKRSMISEAMLGYATLNGKTVRDDNGAPLVRAEPILTREQQEALRAELVKTSRTKPAVSAPSLLLRVLFCAVCGEPAYKFSGGGRKHPRYRCRSMGYPKHCGNGTVAMAEWDAFCEEQVLDLLGDAERLEKVWVAGSDSAVELAEVNAELVDLTSLIGSPAYRAGSPQREALDARIAALAARQEELGGLEARPSGWEWRKTGQRFGDWWREQDTAAKNTWLRSMNVRLTFDVRGGLTRTIDFGDLQEYEQHLRLGSVVERSHTGMS

SEQ ID NO: 11647 - protein, 500 aa, synthetic construct
MRALIVIRLSRVTDATTSPERQLESCRQLCAQRDWDVVGVAEDLDVSGAVDPFDRKRRPNLARWLAFEEQPFDVIVAYRVDRLTRSTRRLQQLVHWAEDHKKLVVSATEAHFDTTTPFAAVVIALMGTVAQMELEAIKERSRSAAHFNIRAGKYRGSLPPWGYLPARVDGEWRLVPDPVQRERILEVYHRVVDNHEPLHLVAHDLNRRGVLSPKDYFAQLRGREPQGRKWSATALKRSMISEAMLGYATLNGKTVRDDDGAPLVRAEPILTREQLEALRAELVKTSRAKPAVPTPSLLLRVLFCAVCGEPAYKFAGGGRKHPRYRCRSMGFPKHCGNGTVAMAEWDAFCEEQVLDLLGDAERLEKVWVAGSDSAVELAEVNAELVDLTSLIGSPAYRTDSPQREALDARIAALAARQEELEGLEARPSGWEWRETGQRFGDWWREQDTAAKNAWLRSMNVRLTFDVRGGLTRTIDFGDLQEYEQHLRLGSVVERLHTGMS

SEQ ID NO: 11648 - protein, 500 aa, synthetic construct
MRALVVIRLSRVTDATTSPERQLESCQQLCAQRGWDVVGVAEDLDVSGAVDLFDRKRRPNLARWLAFEEQPFDVIVAYRVDRLARSIRHLQQLVHWAEDHKKLVVSATEAHFDTTTPFAAVVIALMGTVAQMELEAIKERNRSAAHFNIRAGKYRGSLPPWGYLPTRVDGEWRLAPDPVQRERILEVYHRVVDNHEPLHLVAHDLNRRGVLSPRDYFAQLRGREPQGRKWSATALKRSMISEAMLGYATLNGKTVRDDDGAPLVRAEPILTREQLEALRAELAKTSRAKPAVSTPSLLLRVLFCAVCGEPAYKFAGGGRKHPRYRCRSMGFPKHCGNGTVAMAEWDAFCEEQVLDLLGDAERLEKVWVAGSDSAVELAEVNAELVDLTSLIGSPAYRAGSPQREALDARIAALAARQEELEGLEARPSGWEWRETGQRFGDWWREQDTAAKNTWLRSMNVRLTFDARGGLTRTIDFGDLREYEQYLRLGSVVERLHTGMS

SEQ ID NO: 11649 - protein, 500 aa, synthetic construct
MRALVVIRLSRVTDTTTSPERQLESCQQLCAQRGWDVVGVAEDLDVSGAVDPFDRKRRPNLARWLAFEEQSFDVIVAYRVDRLARSIRHLQQLVHWAEDHKKLVVSATEAHFDTTTPFAAVVIALMGTVAQMELEAIKERSRSAAHYNIRAGKYRGSLPPWGYLPTRVDGEWRLVPDPVQRERILEVYHRVVDNHEPLHLVAHDLNRRGVLSPKDYFAQLQGREPQGRKWSATALKRSMISEAMLGYATLNGKAVRDDDGAPLVRAEPILTREQQEALRAELVKTSRAKPAVSTPSLLLRVLFCAVCGEPAYKFAGGGRKHSRYRCRSMGFPKHCGNGTVAMAEWDAFCEKQVLDLLGDAERLEKVWVAGSDSAVELAEVNAELVDLTSLIGSPAYRAGSPQREALDARIAVLAARQEELEDLEARPSGWEWRETGQRFGDWWREQDTAAKNTWLRSMNVRLTFDVRGGLTRTIDFGDLLEYEQHLRLGSVVERLHTGMS

SEQ ID NO: 11650 - protein, 500 aa, synthetic construct
MRALVVIRLSRVTDATTSPERQLESCQQLCAQRGWDVVGVAEDLDVSGAVDPFDRKRRPNLARWLAFEEQPFDVIVAYRVDRLTRSTRHLQQLVHWADDHKKLVVSATEAHFDTTTPFAAVVIALMGTVAQMELEAIKERSRSAAHFNIRAGKYRGSLPPWGYLPARVDGVWRLVPDPVQRERILEVYHRVVNNHEPLHLVAHDLNRRGVLSPKDYFAQLQGREPQGRKWSATALKRSMISEAMLGYATLNGKTVRDDDGAPLVRAEPILTREQLEALRAELVKTSRAKPAVPTPSLLLRVLFCAVCGEPAYKFVGGGRKHPRYRCRSMGFPKHCGNGTVAMAEWDAFCEEQVLNLLGDAERLEKVWVAGSDSAVELAEVNAELVDLTSLIGSPAYRAGSPQREALDARIAALAARQEELGGLEARPSGWEWRGTGQRFGDWWREQDTAAKNTWLRSMNVRLAFGVRGGLTRTIDFGDLQEYGQHLRLGSVVERLHTGMS

SEQ ID NO: 11651 - protein, 500 aa, synthetic construct
MRALVVIRLSRVTDATTSPERQLESCQQLCAQRGWDVVGVAEDLDVSGAVDPFDRKRRPNLARWLAFEEQPFDVIVAYRVDRLARSIRYLQQLVHWAEDHKKLVVSATEAHFDTTTPFAAVVIALMGTVAQMELEAIKERNRSAAHFNIRAGKYRGSLPPWGYLPTRVDGEWRLVPDPVQRERILEVYRRVVDNHEPLHLVAHDLNRRGVLSPRDYFAQLRGREPQGRKWSATALKRSMISEAMLGYATLNGKTVRDEDGAPLVRAEPILTREQLEALRAELVKTSRAKPAVSTPSLLLRVLFCAVCGEPAYKFAGGGRKHPRYRCRSMGFPKHCGNGTVAMAEWDAFCEEQVLNLLGDAERLEKVWVAGSDSAVELAEVNAELVDLTSLIGSPAYRAGSPQREALDARIAALAARQEELEGLEARPSGWEWRETGRRFGDWWREQDAAAKNTWLRSMNVRLTFDVRGGLTRTIDLGDLQEYEQHLRLGSVVERSHTGMS

SEQ ID NO: 11652 - protein, 500 aa, synthetic construct
MRALVVIRLSRVTDATTSPERQLESCQQLCAQRGWDVVGVAEDLDVSGAVEPFDRKRRPNLARWLAFEEQPFDVIVAYRVDRLTRSTRHLQQLVHWAEDHKKVVVSATEAHFDTTTPFAAVVIALMGTVAQMELEAIKERSRSAAHFNIRAGKYRGSLPPWGYLPARVDGEWRLVPDPVQRERILEVYHRVVDNHEPLHLVAHDLNRRGVLSPKDYFAQLRGREPQGRKWSATALKRSMISEAMLGYATLNGKTVRDDDGAPLVRAEPILTREQQEALRAELVKTSRAKPAVSTPSLLLRVLFCAVCGEPAYKFAGGRHKHPRYRCRSMGFPKHCGNGTVTMAEWDAFCEERVLDLLGDAERLEKVWVAGSDSAVELAEVNAELVDLTSLIGSPAYRAGSPQREALDARIAALAARQEELEGSEARPSGWEWRGTGQRFGDWWREQDTAAKNTWLRSMNVRLTFDVRGGLTRTIDFGDLQEHEQHLRLGSVVERLHTGMS

SEQ ID NO: 11653 - protein, 500 aa, synthetic construct
MRALVVIRLSRVTDATTSPERQLESCQQLCAQRGWDVVGVAEDLDVSGAVDPFDRKRRPNLARWLASEEQPFDVIVAYRVDRLARSTRHLQQLVHWAEDHKKLVVSATEAHFDTTTPFAAVVIALMGTVAQMELEAIKERNRSAAHFNIRAGKYRGSLPPWGYLPTRVDGEWRLAPDPVQRERILEVYRRVVDNHEPLHLVAHDLNRRGVLSPKDYFAQLQGREPQGRKWSATALKRSMISEAMLGYATLNGKTVRDDDGAPLVRAEPILTREQQEALRAELVKTSRAKPAVSTPSLLLRVLFCAVCGEPAYKFSGGGRKHPRYRCRSMGFPKHCGNGTVAMAEWDAFCEEQVLDLLGDAERLEKVWVAGSDSAVELAEVNAELVDLTSLVGSPAYRAGSPQRKALDARIAALATRQEELEGLESRPSGWEWRETGQRFGDWWREQDTAAKNTWLRSMNVRLTFDVRGGLTRTIDFGDLQEYEQHLRLGSVVERLHTGMS

SEQ ID NO: 11654 - protein, 500 aa, synthetic construct
MRALVVIRLSRVTDATTSPERQLESCQQLCAQRSWDVVGVAEDLDVSGAVDPFDRKRRPNLARWLAFEERPFDVIVAYRVDRLTRSTRHLQQLVLWAEDHKKLVVSATEAHFDTTTPFAAVVIALMGTVAQMELEAIRERNRSAAHFNIRAGKYRGSLPPWGYLPTRVDGEWRLVPDPVQRERILEVYHRVVVNHEPLHLVAHDLNRRGVLSPKDYFAQLQGREPQGRKWSATALKRSMISEAMLGYATLNGKTVRGDDGAPLVRAEPILTREQQEALRAELVKTSRAKPAVSTPSLLLRVLFCAVCGEPAYKFAGGGRKHPRYRCRSMGFPKHCGNGTVAMAEWDAFCEEQVLDLLGDAERLERVWVAGSDSAAELAEVNAELVDLTSLIGSPAYRAGSPQREALDARIAALAARQEELKGLEARPSGWEWRETGQRFGDWWREQDTAAKNTWLRSMNVRLTFDVRGGLTRTIDFGDLQEYEQHLRLGSVVERLHTEMS

SEQ ID NO: 11655 - protein, 500 aa, synthetic construct
MRALVVIRLSRVTDATTSPERQLESCQQLCAQRGWDVVGVAEDLDVSGAVDPFDRKRRPNLARWLAFEEQPFDVIVAYRVDRLTRSTRHLQQLVHWAEDHKKLVVSATEAHFDTTTPFAAVVIALMGTVAQMELEAIKERSRSAAHFNIRAGKYRGSLPPWGYLPTRVDGEWRLVPDPVQRERILEVYHRVVDSHEPLHLVAHDLNRRGVLSPRDYFAQLQGREPQGRKWSATALKRSMISGAMLGYATLNGKTVCDDDGAPLVRAEPILTREQLEALRAELVKTSRAKPAVSAPSLLLRVLFCAVCGEPAYKFAGGGRKHPRYRCRSMGFPKHCGNGTVAMAEWDAFCEEQVLDLLGDAERLEKVWVAGSDSAVELAEVSAELVDLTSLIGSPAYRAGSPQREALDARIAALAARQEELEGLGARPSGWEWRETGQRFGDWWREQDTAAKNTWLRSMNVRLTFDVRGGLTRTIDFGDLQEYEQHLRLGSVAERLHTGMS

SEQ ID NO: 11656 - protein, 500 aa, synthetic construct
MRALVVIRLSRVTDATTSPERQLESCQQLCAQRSWDVVGVAEDLDVSGAVDPFDRKRRPNLARWLAFEEQPFDVIVAYRVDRLARSIRHLQQLVHWAEDHKKLVVSATEAHFDTTTPFAAVVIALMGTVAQMELEAIKERNRSAAHFNIRAGKYRGSLPPWGYLPTRVDGEWRLVPDPVQRERILEVYHRVVVNHEPLRLVAHDLNRRGVLSPRDYFAQLQGREPQGRKWSATALKRSMISEAMLGYATLNGKTVRDDDGAPLVRAEPILTRGQLEALRAELVKTSRAKPAVSTPSLLLRVLFCAVCGEPAYKFAGGGRKHPRYRCRSMGFPKHCGNGTVAMAEWDAFCEEQVLGLLGDAERLEKVWVAGSDSAVELAEVNAELVDLTSLIGSPAYRAGSPQREALNARIAALAARQEELEGLEARPSGWEWRETGQRFGDWWREQDTAAKNTWLRSMNVRLTFDVRGGLTRTIDFGDLQEYGQHLRLGSVVERLHTGVS

SEQ ID NO: 11657 - protein, 500 aa, synthetic construct
MRALVVIRLSRVTDATTSPERQLESCQQLCAQRGWDVVGVAEDLDVSGAVDPFDRKRRPNLARWLAFEEQPFDVIVAYRVDRLARSIRHLQQLVHWAEDHKKLVVSATEAHFDTTTPFAAVVIALMGTVAQMELEAIKERSRSAAHFNIRAGKYRGSLPPWGYLPTRVDGEWRLAPDPVQRERILEVYHRVVDNHEPLHLVAHDLNRRGVLSPKDYFAQLQGREPQGRKWSATALKRSMISEAMLGYATLNGKTVRDDDGVPLVRAEPILTREQLEALRAELVKTSRAKPAVSTPSLLLRVLFCAVCGEPAYKFAGGGRKHPRYRCRSMGFPKHCGNGTVAMAEWDAFCEEQVLDLLGDAERLEKVWVAGSDSAAELAEVNAELVDLTSLIGSPAYRADSPQREALDARIAALAARQEELEGLEARPSGWEWRGTGQRIGDWWREQGTAAKNTWLRSMNVRLTFDVRGGLTRTIDFGDLQEYEQHLRLGSVVERLHTGMS

SEQ ID NO: 11658 - protein, 500 aa, synthetic construct
MRALVVIRLSRVTDATTSPERQLESCQQLCAQRGWDVVGVAEDLDVSGAVDPFDRKRRPNLARWLAFEEQPFDVIVAYRVDRLARSIRHLQQLVHWAEDHKKLVVSATEAHFDTTTPFAAVVIALMGTVAQMELEAIKERSRSAAHFNIRAGKYRGSLPPWGYLPTRVDGEWRLVPDPVQRERILEVYRRVVDNHEPLHLVAHDLNRRGVLSPRDYFAQLQGREPQGRKWSATALKRSMTSEAMLGYATLSGKTVRDDDGAPLVRAEPILTREQLEALRAELVKTSRAKPAVSTPSLLLRVLFCAVCGEPAYKFAGGGRKHPRYRCRSMGFPKHCGNGTVAMAEWDAFCEEQVLDLLGDAERLEKVWVAGTDSAVELAEVNAELVDLTSLIGSPAYRAGSPQREALDARIAALAARQEELEGLEARPSGWEWRETGQRFGDWWREQDTAAKNTWLRSMNVRLTFDVRGGLTRTIDFGDLQEYEQHLRLGSVAERLHTGMS

SEQ ID NO: 11659 - protein, 500 aa, synthetic construct
MRALVVIRLSRVTDATTSPERQLESCQQLCTQRGWDVVGVAEDLDVSGAVDPFDRKRRPNLARWLAFEEQPFDVIVAYRVDRLARSIRHLQQLVHWAEDHKKLVVSATEAHFDTTTPFAAVVIALMGTVAQMELEAIKERSRSAAHFNIRAGKYRGSLPPWGYLPARVDGVWRLVPDPVQRERILEVYHRVVNNHEPLHLVAHDLNQRGVLSPKDYFAQLQGREPQGRKWSATALKRSMISEAMLGYATLNGKTVRDDDGAPLVRAEPILTREQQEALRAELVKTSRAKPAVSTPSLLLRVLFCAVCGEPAYKFAGGGRKHPRYRCRSMGFPKHCGNGTVAMAEWDAFCEEQVLGLLGDAERLEKVWVAGSDSAVELAEVNAELVDLTSLIGSPAYRAGSPQREALDARIAALAARQEELEGLESRPSGWEWRETGQRFGDWWREQDTAAKNTWLRSMNVRLTFDVRGGLTRTIDFGDLQEYGQHLRLGSVVERLRTGMS

SEQ ID NO: 11660 - protein, 500 aa, synthetic construct
MRALVVIRLSRVTEATTSPERQLESCQQLCAQRGWGVVGVAEDLDVSGAVDPFDRKRRPNLARWLAFEEQPFDVIVAYRVDRLARSIRHLQQLVHWAEDHKKLVVSATEAHFDTTTPFAAVVIALMGTVAQMELEAIKERNRSAAHFNIRAGKYRGSLPPWGYLPTRVDGEWRLVPDPVQRERILEVYHRVVDDHEPLHLVAHDLNRRGVLSPRDYFAQLQGREPQGRKWSATALKRSMISEAMLGYATLNGKTVRGDDGAPLVRAEPILTREQREALRAELVKTSRAKPAVSTPSLLLRVLFCAVCGEPAYKFAGGGRKHPRYRCRSMGFPKHCGNGTVAMAEWDAFCEEQVLDLLGDAERLEKVWVAGSDSATELAEVSAELVDLTSLIGSPAYRAGSPQRETLDARIAALAARQEELESLEARPSGWEWRGTGQCFGDWWREQDTAAKNTWLRSMNVRLTFDVRGGLTRTIDFGDLQEYEQHLRLGSVVERLHTGMS

SEQ ID NO: 11661 - protein, 500 aa, synthetic construct
MRALVVIRLSRVTDATTSPERQLESCQQLCAQRGWDVVGVAEDLDVSGAVDPFDRKRRPNLARWLAFEEQPFDVIVTYRVDRLARSIRHLQQLVHWAEDHKKLVVSATEAHFDTTTPFAAVVIALMGTVAQMELEAIKERSRSAAHFNIRAGKYRGSLPPWGYLPTRVDGEWRLVPDPVQRERILEVYHRVVNNHEPLHLVARDLNRRGVLSPRDYFAQLRGREPQGRKWSATALKRSMISEAMLGYATLNGRTVRDDDGAPLVRAEPILTREQLEALRAELVKTSRAKPAVSTPSLLLRVLFCAVCGEPAYKFAGGGRKHPRYRCRSMGFPKHCGNGTVATAEWDAFCEEQVLDLLGDTERLEKVWVAGSDSAIELAEVNAELVDLTSLIGSPAYRAGSPQREALDARIAALAARQEELEGLEARPSGWEWRETGQRFGDWWREQDTAAKNTWLRSMNVRLAFDVRGGLTRTIDFGDLQEYEQHLRLGNAVERLHTGMS

SEQ ID NO: 11662 - protein, 500 aa, synthetic construct
MRALVVIRLSRVTDATTSPERQLESCQQLCARRGWDVVGVAEDLDVSGAVDPFDRKRRPSLARWLAFEEQPFDVIVAYRVDRLTRSIRHLQQLVHWAEDHKKLVVSATEAHFDTTTPFAAVVIALMGTVAQMELEAIKERSRSAAHFNIRAGKYRGSLPPWGYLPARVDGEWRLVPDPVQRERILEVYHRVVDDHEPLHLVAHDLNRRGVLSPKDYFAQLRGREPQGRKWSATALKRSMISEAMLGYATLNGKTVRDDDGAPLVRAEPILTREQQEALRAELVKTSRAKPAVSTPSLLLRVLFCAVCGEPAYKFAGGGRKHPRYRCRSMGFPKHCGNGTVAMAEWDAFCEEQVLGLLGDAECLEKVWVAGSDSAVELAEVNAELVDLTSLIGSPAYRAGSPQREALDARIAALAARQEELEGLEARPSGWEWRETGQRFGDWWREQDTAARNTWLRSMNVRLTFDVRGGLTRTIDFGDLQEYEQHLRLGSVVERLHTGMS

SEQ ID NO: 11663 - protein, 500 aa, synthetic construct
MRALVVIRLSRVTDATTSPERQLESCQQLCAQRGWDVVGVAEDLDVSGAVDPFDRKRRPNLARWLAFEEQPFDVIVAYRVDRLARSIRHLQQLVHWAEDHKKLVVSATEAHFDTTTPFAAVVIALMGTVAQMELEAIKERNRSAAHFNIRAGKYRGSLPPWGYLPTRVDGEWRLVPDPVQRERILEVYHRVVDNHEPLHLVAHDLNRRGVLSPKDYFAQLRGREPQGRKWSATALKRSMISVAMLGYATLNGKIVRDDDGAPLVRAEPILTREQLEALRAELVKTSRAEPAVSTPSLLLRVLFCAVCGEPAYKFAGGGRKHPRYRCRSMGFPKHCGNGTVAMAEWDAFCEEQVLDLLGDTERLEKVWVAGSDSAVELAEVNAELVDLTSLIGSPAYRAGSAQREALDARIAALAARQEELEGLEARPSGWEWRETGQRFGDWWREQDTAAKNTWLRSMNVRLTFDVRGGLTRTIDFGDLQEYEQHLRLGGVVERLRTGMS

SEQ ID NO: 11664 - protein, 500 aa, synthetic construct
MRALVVIRLSRVTDATTSPERQLESCQQLCAQRGWDVVGVAEDLDVSGAVDPFDRKRRPNLARWLAFEEQPFDVIVAYRVDRLTRSTRHLQQLVHWAEDHKKLVVSATEAHFDTTTPFAAVVIALMGTVAQMELEAIKERSRSAAHFNIRAGKYRGSLPPWGYLPTRVDGEWRLVPDPVQRERILEVYHRVVDNHEPLHIVAHDLNRRGVLSPKDYFAQLQGREPQGRKWSATALRRSMTSEAMLGYATLNGKTVRDDDGAPLVRAEPILTREQLEALRAELVKTSRATPAVSTPSLLLRVLFCAVCGEPAYKFAGGGRRHPRYRCRSMGFLKHCGNGTVAMAEWDAFCEKQVLDLLGDAERLEKVWVAGSDSAVELAEVNAELVDLTSLIGSPAYRTGSPQREALDARIAALAARQEELEGLEARPSGWEWRGTGQRFGDWWREQGTAAKNNWLRSMNVRLTFDVRGGLTRTIDFGDLQEYEQHLRLGSVVERLHTGMS

SEQ ID NO: 11665 - protein, 500 aa, synthetic construct
MRALVVIRLSRVTDATTSPERQLESCQQLCAQRGWDVVGVAEDLDVSGAVDPFDRKRRPNLARWLAFEEQPFDVIVAYRVDRLARSIRHLQQLVHWAEDHKKLVVSATEAHFDTTTPFAAVVIALMGTVAQMELEAIKERSRSAAHFNIRAGKYRGSLPPWGYLPARVDGEWRLVPDPVQRERILEVYHRVVDNHEPLHLVAHDLNRRGVLSPKDYFAQLQGREPQGRKWSATALKRSMISEAMLGYATLNGKTVRDDDGAPLVRAEPILTREQLEALRAELVKTSRAKPAVSTPSLLLRVLFCAVCGEPAYKFAGGGRKHPRYRCRSMGFPKHCGNGTVAMAEWDAFCEEQVLGLLGDVERLEKVWVAGSDSAVKLAEVNAELVDLTGLIGSPAYRAGSPQREALDARIAALAARQEELEGLEARPSGWEWRGTEQRFGDWWREQDTAAKNTWLRSMNVRLTFDVRGGLTRTIDFGDLQEYEQHLRLGSVVERLHTGMS

SEQ ID NO: 11666 - protein, 500 aa, synthetic construct
MRALVVIRLSRVTDATTSPERQLESCQQLCAQRGWDVVGVAEDLDVSGAVDPFDRKRRPYLARWLAFEEQPFDVIVAYRVDRLARSIRHLQQLVHWAEDHKKLVVSATEAHFDTTTPFAAVVIALMGTVAQMELEAIKERSRSAAHFNIRAGKYRGSLPPWGYLPTRVDGEWRLMPDPVQRERILEVYRRVVDNHEPLHLVAHDLNRRGVLSPKDYFAQLRGREPQGRKWSATALKRSMISEAMLGYATLNGKTVRDDDGAPLVRAEPILTREQLEALRAELVKTSRAKPAVPTPSLLLRVLFCAVCGEPAYKFAGGGRKHPRYRCRSMGFPRHCGNGTVAMAEWDAFCEEQVLDLLGDAECLEKVWVAGSDSAVELAEVNAELVDLTSLIGSPAYRAGSPQRKALDARIAALAARQEELEGLETRPSGWEWRETGQRFGDWWREQDTAAKNTWLRSMNVRLTFDVRGGLTRTIDFGDLREYVQHLRLGSVVERLHTGMS

SEQ ID NO: 11667 - protein, 500 aa, synthetic construct
MRALVVIRLSRVTDATTSPERQLESCQQLCAQRGWDVVGVAEDLDVSGAVDPFDRKRRPNLARWLASEEQPFDVIVAYRVDRLTRSVRHLQQLVHWAEDHKKLVVSATEAHFDTTTPFAAVVIALMGTVAQMELEAIKERSRSAAHFNIRAGKYRGSLPPWGYLPARVGGVWRLVPDPVQRERILEVYHRVVDNHEPLHLVAHDLNRRGVLSPKDYFAQLRGREPQGREWSATALKRSMTSEAMLGYATLNGKIVRDDDGAPLVRAEPILTREQLEALRAELVKTSRAKPAVSTPSLLLRVLFCAVCGEPAYKFAGGGRKHPRYRCRSMGFPRHCGNGTVAMAEWDAFCEEQVLGLLGNAERLEKVWVAGSDSAVELAEVSAELVDLTSLIGSPAYRVGSPQREALDARIAALAARQEKLEGLEARPSGWEWRGTGQRFGDWWREQNTAAKNTWLRTMNVRLTFDVRGGLTRTIDFGDLQEYKQRLRLGSVVERLHTGMS

SEQ ID NO: 11668 - protein, 500 aa, synthetic construct
MRALVVIRLSRVTDATTSPERQLESCQQLCAQRGWDVVGVAEDLDVSGAVDPFDRKRRPNLARWLAFEEQPFDAIVAYRVDRLTRSIRHLQQLVHWAEDHKKLVVSATEAHFDTTTPFAAVVIALMGTVAQMELEAIKERNRSAAHFNIRAGKYRGSLPPWGYLPARVDGEWRLAPDPVQRERILEVYHRVVDNHEPLHLVAHDLNRRGILSPKDYFAQLQGREPRGRKWSATALKRSMVSVAMLGYATLNGKTVRDDDGAPLVRAEPILTREQLEALHAELVKTSRAKPAVSTPSLLLRVLFCAVCGEPAYKFTGGGRKHPRYRCRSMGFPKHCGNGTVAMAEWDAFCEEQVLDLLGDAERLEKVWVAGSDSAVELAEVNAELVDLTSLIGSPAYRAGSPQREALDARIAALAARQEELEGLEARPSGWEWRETGQRFGDWWREQDTAAKNTWLRSMNVRLTFDVRGGLTRTIDFGDLQEYEQHLRLGSVVERLHTGMS

SEQ ID NO: 11669 - protein, 500 aa, synthetic construct
MRALVVIRLSRVTEATTSPERQLESCQQLCAQRGWDVVGVAEDLDVSGAVDPFDRKRRPNLARWLAFGEQPFDVIVAYRVDRLTRSIRHLQQLVHWAEDHKKLVVSATEAHFDMTTPFAAVVIALMGTVAQMELEAIKERSRSAAHFNIRAGKYRGSLPPWGYLPTRVDGEWRLAPDPVQRERILEVYHRVVDNHEPLHLVAHDLNRRGVLSPKDYFAQLQGREPQGRKWSATALKRSMISEAMLGYATLNGKTVRDDDGAPLVRAEPILTREQQEALRAELVKTSRAKPAVSTPSLLLRVLFCAVCGEPAYKFAGGGRKHPRYRCRSMGFPKHCGNGTVAMAEWDAFCEEQVLDLLGDAERLEKVWVAGSDSAVELAEVNAELADLTSLIGSPAYRAGSLQREALDARIAALAARQEELEGLEARPSGWEWRGTGQRFGDWWREQDTAAKNTWLRSMNVRLTFGVRGGLTRTIDFGDLQEYEQHLRLGSVVERLHTGMS

SEQ ID NO: 11670 - protein, 500 aa, synthetic construct
MRALVVIRLSRVTDATTSPERQLESCQQLCAQRGWDVVGVAEDLDVSGAVDPFDRKRRPNLARWLAFEEQPFDVIVAYRVDRLARSVRHLQQLVRWAEDHKKLVVSATEAHFDTTTPFAAVVIALMGTVAQMELEAIKERSRSAAHFNIRAGKYRGSLPPWGYLPARVDGEWRLVPDPVQRERIFEVYHRVVDNHEPLHLVAHDLNRRGVLSPKDYFAQLQGREPQGRKWSATALRRSMISEAMLGYATLNGKTVRDDDGAPLVRAEPILTREQLEALRAELVKTSRAKPAVSTPSLLLRVLFCAVCGEPAYKFAGGGRKHPRYRCRSMGFLKHCGNGTVAMAEWDAFCEEQVLNLLGGAERMEKVWVAGSDSAVELAEVNAELVDLMSLIGSPAYRTGSPQREALDARIAALAARQEELEGLEARPSGWEWRETGQRFGDWWREQDTAARNTWLRSMNVRLTFDVRGGLTRTIDFGDLQEYEQHLRLGSVVERLHTGMS

SEQ ID NO: 11671 - protein, 500 aa, synthetic construct
MRALVVIRLSRVTDATTSPERQLESCQQLCAQRGWGVVGVAEDLDVSGAVDPFDRKRRPNLARWLAFEEQPFDVIVAYRVDRLTRSIRHLQQLVHWAEDHKKLVVSATEAYFDTTTPFAAVVIALMGTVAQLELEAIKERSRSAAHFNIRAGKYRGSLPPWGYLPTRVDGEWRLAPDPVQRERILEVYHRVVDNHEPLHLVAHDLNRRGVLSPKDYFAQLQGREPQGRKWSATALKRSMISEAMLGHATLNGKTVRDDDGAPLVRAEPILTREQQEALRAELVKTSRAKPAVSTPSLLLRVLFCAVCGEPAYKFSGGGRKHPRYRCRSMGFPKHCGNGTVAVAEWDAFCEEQVLGLLGDAERLEKVWVAGSDSAVELAEVNAELVDLTSLIGSPAYRADSPQRETLDARIAALAARREELEGLEARPSGWEWRETGQRFGDWWREQDTAAKNTWLRSMNVRLTFDVRGGLTRTIDLGGLQEYEQHLRLGGVVERLHTGMS

SEQ ID NO: 11672 - protein, 500 aa, synthetic construct
MRALVVIRLSRVTDATTSPERQLESCQQLCAQRGWDVVGVAEDLDVSGAVDPFDRKRRPNLARWLAFEEQPFDVIVAYRVDRLTRSTRHLQQLVRWAEDHRKLVVSATEAHFDTTTPFAAVVIALMGTVAQMELEAIKERNRSAAHFNIRAGKYRGSLPPWGYLPTRVDGEWRLVPDPVQRERILEVYHRVVDNHEPLHLVAHDLNRRGVSSPKDYFAQLRGREPQGRKWSATALKRSMTSEAMLGYATLNGKTVRDDDGAPLVRAEPILTREQLEALRAELVKTSRAKPAVSTPSLLLRVLFCAVCGEPAYKFAGGGRKHPRYRCRSMGFPKHCGNGTVAMAEWDAFCEEQVLNLLGDAERLEKVWVAGSDSAVELAEVNAELVDLTSLIGSPAYRAGSPQREALDARIAALAARQEELEGLEARPSGWEWRETGQRFGDWWREQDTAAKNTWLRSMNVRLTFDVRGGLTRTIDFGDLQEYEQHLRLGSVVERLHTGMS

SEQ ID NO: 11673 - protein, 500 aa, synthetic construct
MRALVVIRLSRVTDATTSPERQLESCQQLCAQHGWDVVGVAEDLDVSGAVDPFDRKRRPNLARWLAFEEQPFDVIVAYRVDRLTRSVRHLQQLVHWAEDHKKLVVSATEAHFDTTTPFAAVVIALMGTVAQMELEAIKERSRSAAHFNIRAGKYRGSLPPWGYLPARVDGVWRLVPDPVQRERILEVYHRVVNNHEPLHLVAHDLNRRGVLSPKDYFAQLQGREPQGRKWSATALKRSMISEAMLGYATLNGKTVRDDDGAPLVRAEPILTREQQEALRAELVKTSRAKPAVSIPSLLLRVLFCAVCGEPAYKFAGGGRKHPRYRCRSMGFPKHCGNGTVAMAEWDAFCEERVLDLLGDAERLEKVWVAGSDSAVELAEVNAELVDLTSLIGSPAYRAGSPQREALDARIAALAARQGELEGLEARPSGWEWRETGQRFGDWWREQDTAAKNTWLRSMNVRLTFDVRGGLTRTFDFGDLQEYEQHLRLGSVVERLHTGMS

SEQ ID NO: 11674 - protein, 500 aa, synthetic construct
MRALIVIRLSRVTDATTSPERQLESCQQLCAQRGWDIVGVAEDLDVSGAVDPFDRKRRPDLARWLALEEQPFDVIVAYRVDRLTRSTRHLQQLVHWAEDHKKLVVSATEAHFDTTTPFAAVVIALMGTVAQMELEAIKERSRSAAHFNIRAGKYRGSLPPWGYLPTRVDGEWRLVPDPVQRERILEVYHRVVDNHEPLHLVAHDLNRRGVLSPKDYFAQLQGREPQGRKWSATALKRSMISEAMLGYATLNGKIVRNDDGAPLVRAEPILTRGQLEALRAELVKTSRAEPAVSTPSLLLRVLFCAVCGEPAYKFAGGGRKHPRYRCRSMGFPKHCGNGTVAMAEWDAFCEEQVLDLLGNAERLEKVWVAGSDSAVELAEVNAELVDLTSLIGSPAYRAGSPQREALDARIAALAARQEELEGLEARPSGWEWRETGQRFGDWWREQDTAAKNTWLRSMNVRLTFDVRGGLARTIDFGDLQEYEQHLRLGGVVERLHTGMS

SEQ ID NO: 11675 - protein, 500 aa, synthetic construct
MRALVVIRLSRVTDATTSPERQLESCQQLCAQRGWDIVGVAEDLDVSGAVDPFDRKRRPNLARWLAFEEQPFDVIVAYRVDRLTRSIRHLQQLVRWAEDHKELVVSATEAHFDMTTPFAAVVIALMGTVAQMELEAIKERSRSAAHFNIRAGKYRGSLPPWGYLPTRVDGEWRLAPDPVQRERILEVYHRVVDNHEPLHLVAHDLNRRGVLSPKDYFAQLRGREPQGRKWSATALKRSMTSEAMLGYATLNGKTVRDDDGAPLVRAEPILTREQLEALRAELVKTSRAKPAVSTPSLLLRVLFCAVCGEPAYKFAGGGRKHPRYRCRSMGFPKHCGNGTVAMAEWDAFCEEQVLNLLGDAERLEKVWVAGSDSAVELAEVNAELVDLTSLIGSPAYRAGSPQREALDARIAALAARQEELEGLEARPSGWEWRGTGQRFGDWWREQDTAAKNTWLRSMNVRLTFDVRGGLTRTIDFGDLQEYEQHLRLSSVVERLHTGMS

SEQ ID NO: 11676 - protein, 500 aa, synthetic construct
MRALVVIRLSRVTDATTSPERQLESCQQLCAQRGWDVVGVAEDLDVSGAVDPFDRKRRPNLARWLAFEEQPFDVIVAYRVDRLTRSTRHLQQLVHWADDHKKLVVSATEAHFDTTTPFAAVVIALMGTVAQMELEAIKERSRSAAHFNIRAGKYRGSLPPWGYLPARVDGVWRLVPDPVQRERILEVYHRVVNNHEPLRLVAHDLNRRGVLSPKDYFAQLQGREPQGRKWSATALKRSMTSGAMLGYATLNGKTVRDDDGAPLVRAEPVLTREQQEALRAELVKTSRAKPAVSTPSLLLRVLYCAVCGEPAYKFAGGGRKHPRYRCRSMGFPKHCGNGTVAMAEWDAFCEEQVLDLLGDAERLEKVWVAGSDSAVELAEVNAELVDLMSLIGSPAYRAGSPQREALDARIAALAARQEELEGLEARPSGWEWRETGQRFGDWWREQDTAAKNTWLRSMNVRLAFDVRGGLTRTIDFGDLREYEQHLRLGNVVERLHTGMS

SEQ ID NO: 11677 - protein, 500 aa, synthetic construct
MRALVVIRLSRVTDATTSPERQLESCQQLCAQRDWDVVGVAEDLDVSGAVDPFDRKRRPNLARWLAFEEQPFDVIVAYRVDRLTRSIRHLQQLVHWAEDHKKLVVSATEAHFDTTTPFAAVVIALMGTVAQMELEAIKERSRSAAHFNIRAGKYRGSLPPWGYLPARVDGEWRLVPDPVQRERILEVYHRVVDNHEPLHLVAHDLNRRGVLSPKDYFAQLQGREPQGRKWSATALKRSMISGAMLGYATLSGKTVRDDDGAPLVRAEPILTREQQEALRAELVKTSRAKPAVSTPSLLLRVLFCAVCGEPAYKFAGGGRKHPRYRCRSMGFPKHCGNGTVAMAEWDAFCEEQVLNLLGDAERLERVWVAGSDSAAELAEVNAELVDLTSLIGSPAYRAGSPQREALDARIAALAARQEELEGLEARPSGWEWRGTEQRFGDWWREQDTAAKNAWLRSMNVRLTFDVRGGLTRTIDFGDLQEYEQRLRLGSAVERLHTGMP

SEQ ID NO: 11678 - protein, 500 aa, synthetic construct
MRALVVIRLSRVTDATTSPERQLESCQQLCAQRGWDVVGVAEDLDVSGAVDPFDRKRRPNLARWLAFEEQPFDVIVAYRVDRLTRSVRHLQQLVHWAEDHKKLVVSATEAHFDTTTPFAAVVIALMGTVAQMELEAIKERNRSAAHFNIRAGKYRGSLPPWGYLPTRVDGEWRLVPDPVQRERILEVYHRVVDDHEPLHLVAHDLNRRGVLSPKDYFAQLQGREPQGRKWSATALKRSMISEAMLGHATLNGKTVRDEDGAPLVRAEPILTREQREALRAELVKTSRAKPAVSTPSLLLRVLFCAVCGEPAYKFTGGGRKHPRYRCRSMGFLKHCGNGTVAMVEWDAFCEEQVLGLLGDAERLEKVWVAGSGSAVELAEVNAELVDLTSLIGSPAYRAGSPQREALDARIAALAARREKLEGLEARPSGWEWRETGQRFGDWWREQDTAAKNTWLRSMNVRLTFDVRGGLTRTIDLGDLQEYEQHLRLGSVVERLHTGMS

SEQ ID NO: 11679 - protein, 500 aa, synthetic construct
MRALVVIRLSRVTDATTSPERQLESCQQLCAQRGWDVVGVAEDLDVSGAVDPFDRKRRPNLARWLAFEEQPFDVIVAYRVDRLARSIRHLQQLVHWAEDHKKLVVSATEAHFDTTTPFAAVVIALMGTVAQMELEAIKERSRSAAHFNIRAGKYRGSLPPWGYLPARVDGVWRLVPDPVQRERILEVYHRVVDDHEPLHLVAHDLNRRGVLSPKDYFAQLQGREPQGRKWSATALKRSMISEAMLGYATLNGKTVRDGDGAPLVRAEPILTREQLEALRAELVKTSRAEPAVSTPSLLLRVLFCAVCGEPAYKFAGGGRKHPRYRCRSMGFPKHCGNGTVAMAEWDAFCDEQVLSLLGDAERLEKVWVAGSDSAVELAEVNAELVDLTSLIGSPAYRAGSPQREALDARIAALAARQEELEGLEARPSGWGWRETGQRFGDWWREQDTAAKNTWLRSMNVRLTFDVRGGLTRTIDFGDLLEYEQHLRLGSVVERLHTGMS

SEQ ID NO: 11680 - protein, 500 aa, synthetic construct
MRALVVIRLSRVTDATTSPERQLESCQQLCAQRGWDVVGVAEDLDVSGAVDPFDRKRRPNLARWLASEEQPFDVIVAYRVDRLTRSIRHLQQLVHWAEDHKKLVVSATEAHFDTTTPFAAVVIALMGTVAQMELEAIKERNRSAAHFNIRAGKYRGSLPPWGYLPTRVDGEWRLVPDPVQRERILEVYHRVVDDHEPLHLVAHDLNRRGVLSPKDYFAQLRGREPQGRKWSATALKRSMISEAMLGYATLNGKTVRDNDGAPLVRAEPILTREQQEALRAELVKTSRAKPAVSTPSLLLRVLFCAVCGEPAYKFAGGGRKHSRYRCRSMGFPKHCGNGTVSMAEWDAFCEEQVLDLLGDAERLEKVWVAGSDSAVELAEVNAELVDLTSLIGSPAYRAGSPQREALDARIAALAARQEELEGLEARPSGWEWRETGQRFGDWWREQDTAAKNTWLRSMNVRLTFDVRGGLTRTIDFGDLQECKQHLRVGSVVERLRTGMS

SEQ ID NO: 11681 - protein, 500 aa, synthetic construct
MRALVVIRLSRVTDATTSPERQRESCQQLCAQRGWDVVGVAEDLDVSGAVDPFDRKRRPNLARWLAFEEQPFDVIVAYRVDRLTRSTRHLQQLVRWAEDHKKLVVSATEAHFDTTTPFAAVVIALMGTVAQMELEAIKERNRSAAHFNIRAGKYRGSLPPWGYLPTRVDGEWRLVPDPVQRERILEVYHRVVDNHEPLHLVAHDLNRRGVLSPKDYFAQLRGREPQGRKWSATALRRSMISEAMLGHATLNGKTVRDDDGAPLVRAEPILTREQLEALRAELVKTSRAKPAVSTPSLLLRVLFCAVCGEPAYKFAGGGRKHPRYRCRSMGFPKHCGNGTVAMAEWDTFCEEQVLDLLGDAERLEKVWVAGSDSAVELAEVNAELVDLTSLISSPAYRAGSPQREALDARIAALAARQEELEGLEARPSGWEWRGTGQRFGDWWREQDTAAKNTWLRSMNVRLTFDVRGGLTRTIDFGDLQEYEQHLRLGSVVERLHTGLS

SEQ ID NO: 11682 - protein, 500 aa, synthetic construct
MRALVVTRLSRVTDATTSPERQLESCQQLCAQRGWDVVGVAEDLDVSGAVDPFDRKRRPNLARWLAFEEQPFDVIVAYRVDRLTRSVRHLQQLVHWAEDHKKLVVSATEAHFDTTTPFAAVVIALMGTVAQMELEAIKERSRSAAHFNIRAGKYRGSLPPWGYLPARVDGEWRLVPDPVQRERILEVYHRVVDNHEPLHLVAHDLNRRGVLSPKDYFAQLRGREPQGRKWSATALKRSMISVAMLGYATLCGKTVRDDDGAPLVRAEPILTREQLEALRAELVKTSRAKPAVSTPSLLLRVLFCAVCGEPAYKFAGGGRKRPRYRCRSMGFPKHCGNGTVAMAEWDAFCEEQVLNLLGDAERLEKVWVAGSDSAVELAEVNKELVDLTSLIGSPAYRAGSPQREALDARIAALAARQEELEGLEARPSGWEWRGTGQRFGDWWREQDTAAKNTWLRSMNVRLTFGVRGGLTRTIDFGDLQRYEQHLRLGSVVERLHTGMS

SEQ ID NO: 11683 - protein, 500 aa, synthetic construct
MRALVVIRLSRVTDATTSPERQLESCQQLCAQRDWVVVGVAEDLDVSGAVDPFDRKRRPNLARWLAFEEQPFDVIVAYRVDRLTRSTRHLQQLVHWAEDHKKLVVSATEAHFDTTTPFAAVVIALMGTVAQMELEAIKERSRSAAHFNIRAGKYRGSLPPWGYLPTRVDGEWRLVPDPVQRERILEVYHRVVDNHEPLHLVAHDLNRRGILSPKDYFAQLRGREPQGRKWSATALKRSMISEAMLGYATLNGKTVRDDDGAPLVRAEPILTREQQEALRAELVKTSRAEPAVSTPSLLLRVLFCAVCGEPAYKFAGGGRKHPRYRCRSMGFPKHCGNGTVAMVEWDAFCEEQVLDLLGDAERLEKVWVAGSDSAVELAEVNAELVDLTSLIGSPAYRAGSPQREALDARIAALAARQEELEGLEARPSGWEWRETGQRFGDWWREQDTAAKNTWLRSMNVRLTFDVRGGLTRTIDFGDLQEYEQHLRLGSVVERLHTGTP

SEQ ID NO: 11684 - protein, 500 aa, synthetic construct
MRALVVIRLSRVTDATTSPERQLESCQQLCAQRGWDVVGVAEDLDVSGAVDPFDRKRRPNLARWLAFEEQPFDVIVAYRVDRLARSIRHLQRLVHWAEDHKKLVVSATEAHFDTTTPFAAVVIALMGTVAQMELEAIKERSRSAAHFNIRAGKYRGSLPPWGYLPTRVDGEWRLAPDPVQRERILEVYHRVVDNHEPLHLVAHDLNRRGVLSPKDYFAQLQGREPQGRKWSATALKRSMISEAMLGYATLNGKTVRDDGGAPLVRAEPILTRGQLEALRAELVKTSRAEPAVSTPSLLLRVLFCAVCGEPAYKFAGGGRKHPRYRCRSMGFPKHCGNGTVAMAEWDAFCEEQVLGLLGDAERLEKVWVAGSDSAVELAEVNAELVDLTSLIGSPAYRAGSPQREALDARIAALAARQEELEGLEARPPGWEWRETGQRFGDWWREQDTAAKNTWLRSMNVRLTFDVRGGLTRTIDFGDLQEYEQHLRLGSVVKRLHTGMS

SEQ ID NO: 11685 - protein, 500 aa, synthetic construct
MRALVVIRLSRVTDATTSPERQLESCQQLCAQRGWDVVGVAEDLDVSGAVDPFDRKRRPNLARWLAFEEQPFDVIVAYRVDRLARSIRHLQQLVHWAEDHKKLVVSATEAHFDTTTPFAAVVIALMGTVAQMELEAIRERSRSAAHFNIRAGKYRGSLPPWGYLPTRVDGEWRLAPDPVQRERILEVYHRVVDNHEPLHLVAHDLNRRGVLSPRDYFAQLRGREPQGRKWSATALKRSMISEAMLGYATLNGRTVRDDDGAPLVRAEPILTREQLEALRAELVKTSRAKPAVSTPSLLLRVLFCAVCGEPAYKFAGGGRKHPRYRCRSMGFPKHCGNGTVATAEWDAFCEEQVLDLLGDTERLEKVWVAGSDSAIELAEVNAELVDLTSLIGSPAYRAGSPQREALDARIAALAARQEELEGLEARPSGWEWRETGQRFGDWWREQDTAAKNTWLRSMNVRLTFDVRGGLTRTIDFGDLQEYEQHLRLGNAVERLHTGMS

SEQ ID NO: 11686 - protein, 500 aa, synthetic construct
MRALVVVRLSRVTDATTSPERQLESCQQLCAQRGWDVVGVAEDLDVSGAVDPFDRKRRPNLARWLAFEEQPFDVIVAYRVDRLARSIRHLQQLVHWAEDHKKLVVSATEAHFDTTTPFAAVVIALMGTVAQMELEAIKERSRSAAHFNIRAGKYRGSLPPWGYLPARVDGEWRLVPDPVQRERILEVYHRVVDNREPLHLVAHDLNRRGVLSPRDYFAQLQGREPRGRKWSATALKRSMISEAMLGYVTLNGKTVRDDDGAPLVRAEPILTREQLEALRAELVKTSRAKPAVSTPSLLLRVLFCAVCGEPAYKFAGGGRKHPRYRCRSMGFPKHCGNGTVAMAEWDAFCEEQVLGLLGDVERLEKVWVAGSDSAVKLAEVNAELVDLTGLIGSPAYRAGSPQREALDARIAALAARQEELEGLEARPSGWEWRGTGRRFGDWWRELDTAAKNTWLRSMNVRLTFDVRGGLTRTIDFGDLQEYEQHLRLGSAVERLHTGMS

SEQ ID NO: 11687 - protein, 500 aa, synthetic construct
MRALVVIRLSRVTDATTSPERQLESCRQLCGQRGWDVVGVAEDLDVSGAVDPFDRKRRPDLARWLAFKEQPFDVIVAYRVDRLTRSVRHLQQLVHWAEDHKKLVVSATEAHFDTTTPFAAVVIALMGTVAQMELEAIRERSRSAAHFNIRAGKYRGSLPPWGYLPTRVDGEWRLAPDPVQRERILEVYHRVVDNHEPLHLVAHDLNRRGVLSPKDYFAQLQGREPQGRKWSATALKRSMISVAMLGYATLNGKTVRDDDGAPIVRAEPILTREQQEALRAELVRTSRAKPAVSTPSLLLRVLFCAVCGESAYKFAGGGRKHPRYRCRSMGFPKHCGNGTVAMAEWDAFCEEQVLGLLGDAERLEKVWVAGSDSAVELAEVNAELVDLTSLIGSPAYRAGSPQREALDARIAALAARQEELEGLEARPSGWEWRGTGQRFGDWWREQDTAAKNAWLRSMNVRLTFDVRGGLTRTIDFGDLHEYEQHLRLGSVAEHLHTGMS

SEQ ID NO: 11688 - protein, 500 aa, synthetic construct
MRALVVIRLSRVTDATTSPERQLESCQQLCAQRGWDVVGVAEDLDVSGAVDPFDRKRRPNLARWLAFEEQPFDVIVAYRVDRLTRSTRHLQQLVHWAEDHKKLVVSATEAHFDTTTPFAAVVIALMGTVAQMELEAIKERSRSAAHFNIRAGKYRGSLPPWGYLPTRVDGEWRLVPDPVQRERILEVYHRVVDNHEPLHLVAHDLNRRGVLSPKDYFAQLQGREPQGRKWSATALKRSMISVAMLGYATLNGKTVRDDDGAPLVRAEPILTHEQLEALRAELVKTSRAKPAVSAPSLLLRVLFCAVCGEPAYKFAGGGRKHPRYRCRSMGFPKHCGNGTVAMAEWDAFCEEQVLDLLGDAERLEKVWVAGSDSAVELAEVNAELVDLSSLIGSPAYRAGSPQREALDARIAALAARQEELEGLEARPSGWEWRETGQRFGNWWREQDTAAKNTWLRSMNVRLTFDVRGGLTRTIDFGDLQEYEQHLRLGSVVERLHTGMS

SEQ ID NO: 11689 - protein, 500 aa, synthetic construct
MRALVVIRLSRVTDATTSPERQLESCQRLCAQRGWDVAGVAEDLDVSGAVDPFDRKRRPNLARWLAFEEQPFDVIVAYRVDRLARSIRHLQQLVHWAEDHKKLVVSATEAHFDTTTPFAAVVIALMGTVAQMELEAIKERNRSAAHFNIRAGKYRGSLPPWGYLPARVDGVWRLVPDPVQRERILEVYHRVVDNHEPLHLVAHDLNRRGVLSPRDYFAQLRGREPQGRKWSATALKRSMVSEAMLGYATLNGKTVRGDDGAPLVRAEPILTRGQLEALRAELAKTSRAKPAVSTPSLLLRVLFCAVCGEPAYKFAGGGRKHPRYRCRSMGFPKHCGNGTVAMAEWDAFCEEQVLDLLGDAERLEKVWVAGSDSAVELAEVNAELVDLTSLIGSPAYRAGSPQREALDARIAALAARQEELEGLEARPSGWEWRETGQRFGDWWREQDTAAKNTWLRSMNVRLTFDVRGGLTRTIDFGDLQEYEQHLRLGSVVERLHTGMS

SEQ ID NO: 11690 - protein, 500 aa, synthetic construct
MRALVVIRLSRVTDATTSPERQLESCRQLCAQRGWDVVGVAEDLDVSGAVDPFDRKRRPNLARWLAFEERPFDVIVAYRVDRLTRSIRHLQQLVHWAEDHKKLVVSATEAHFDMTTPFAAVVIALMGTVAQMELEAIKERSRSAAHFNIRAGKYRGSLPPWGYLPTRVDGEWRLAPDPVQRERILEVYHRVVDNHEPLHLVAHDLNRRGVLSPKDYFAQLQGREPQGRKWSATALKRSMTSEAMLGYATLNGKTVRDDDGAPLVRVEPILTREQLEALRAELVMTSRAKPAVSTPSLLLRVLFCAVCGEPAYKFAGGGRKHPRYRCRSMGFPKHCGNGTVAMAEWDAFCEEQVLGLLGDVERLEKVWVAGSDSAVKLAEVNAELVDLTGLIGSPAYRAGSPQREALDARIAALAARQEELEGLEARPSGWEWRETGQRFGDWWREQDTAAKNTWLRSMNVRLTFDVRGGLTRTIDFGDLQEYEQHLRLGSVVERLHTGMS

SEQ ID NO: 11691 - protein, 500 aa, synthetic construct
MRALVVIRLSRVTEATTSPERQLESCQQLCAQRGWDVVGVAEDLDVSGAVDPFDRKRRPNLARWLAFGEQPFDVIVAYRVDRLTRSIRHLQQLVHWAEDHKKLVVSATEAHFDMTTPFAAVVIALMGTVAQMELEAIKERSRSAAHFNIRAGKYRGSLPPWGYLPTRVDGEWRLAPDPVQRERILEVYHRVVDNHEPLHLVAHDLNRRGVLSPKDYFAQLQGREPQGRKWSATALKRSMISEAMLGYATLNGKIVRDDDGAPLVRAEPILTREQLEALRAELVKTSRAKPAVSTPSLLLRVLFCAVCGEPAYKFAGGGRKHPRYRCRSMGFPKHCGNGTVAMAEWDAFCEEQVLGLLGDAERLEKVWVAGSDSAVELAEVNAELVDLTSLIGSPAYRAGSPQREALDARIAALAARQKELEGLEARPSGWEWRETGQRFGDWWREQDTAAKNTWLRSMNVRLTFDVRGGLTRTIDFGDLQEYVQHLRLGSVVGRLHTGMS

SEQ ID NO: 11692 - protein, 500 aa, synthetic construct
MRALVVIRLSRVTDATTSPERQLESCRQLCAQRGWDVVGVAEDLDVSGAVDPFDRKRRPNLARWLAFEERPFDVIVAYRVDRLTRSIRHLQQLVHWAEDHKKLVVSATEAHFDTTTPFAAVVIALMGTVAQMELEAIKERSRSAAHFNVRAGKYRGSLPPWGYLPARVDGEWRLVPDPVQRERILEVYHRVVDNHEPLHLVAHDLNRRGVLSPRDYFAQLQGREPQGRKWSATALKRSMISGAMLGYATLGGKTVRDDDGAPLVRAEPILTREQQEALRAVLVKTSRAKPAVSTPSLLLRVLFCAVCGEPAYKFAGGGRKHPRYRCRSMGFPKHCGNGTVAMAEWDAFCEEQVLDLLGDAERLEKVWVAGSDSAVELAEVNAELVDLTSLIGSPTYRAGSPQREALDARIAALAARQEELEGLEARPSGWEWRETGQRFGDWWRGQDTAAKNTWLRSMNVRLTFDVRGGLTRTIDFGDLQEYEQHLRLGSVVERLRTGMS

SEQ ID NO: 11693 - protein, 500 aa, synthetic construct
MRALVVIRLSRVTDTTTSPERQLESCQQLCAQRGWDVVGVAEDLDVSGAVDPFDRKRRPNLARWLAFEEQPFDVIVAYRVDRLTRSTRHLQRLVHWAEDHKKLVVSATEAHFDTTTPFAAVVIALMGTVAQMELEAIKERSRSAAHFNIRAGKYRGSLPPWGYLPTRVDGEWRLVPDPVQRERILEVYHRVVDNHEPLHLVAHDLNRRGVLSPKDYFAQLRGREPQGREWSATALKRSMTSVAMLGYATLNGKTVRDDDGAPLVRAEPILTREQLEALRAELVKTSRAKPAVSTPSLLLRVLFCAVCGEPAYKFAGGGRKHPRYRCRSMGFPKHCGNGTVAMAEWDAFCEEQVLDLLGDAERLEKVWVAGSDSAVELAEVNAELVDLASLIGSPAYRAGSPQREALDARIAALAARQEELEGLEARPSGWEWRETGRRFGDWWREQDTAAKNTWLRSMNVRLTFDVRGGLTRTIDFGDLQEYEQHLRLGSVVERLHTGMS

SEQ ID NO: 11694 - protein, 500 aa, synthetic construct
MRALVVIRLSRVTDATTSPERQLESCQQLCAQRGWDAVGVAEDLDVSGAVDPFDRKRRPNLARWLAFEEQPFDAIVAYRVDRLTRSIRHLQQLVHWAEDHKKLVVSATEAHFDTTTPFAAVVIALMGTVAQMELEAIKERNRSAAHFNIRAGKYRGSLPPWGYLPTRVDGEWRLVPDPVQRERILEVYRRVVVNHEPLHLVAHDLNRRGVLSPRDYFAQLRGREPQGRKWSATALKRSMISEAMLGYATLNGKIVRDDDGAPLVRAEPILTREQLEALRAELAKTSRAKPAVSTPSLLLRVLFCAVCGEPAYKFAGGGRKHPRYRCRSMGFPKHCGNGTVAMAEWDTFCEEQVLDLLGDAERLEKVWVAGSDSAVELAEVNAELVDLTSLIGSPAYRAGSPQREALDARIAALAARQEELEGLEARPSGWEWRETGQRFGDWWREQDTAAKNAWLRSMNVRLTFDVRGGLTRTIDFGDLQEYEQHLRLGSVVERLHTGMS

SEQ ID NO: 11695 - protein, 500 aa, synthetic construct
MRALVVIRLSRVTDATTSPERQLESCQQLCAQRGWDVAGVAEDLDVSGAVDPFDRKRRPNLARWLAFEEQPFDVIVAYRVDRLARSIRHLQQLVHWAEDHKKLVVSATEAHFDTTTPFAAVVIALMGTVAQMELEAIKERSRSAAHFNIRAGKYRGSLPPWGYLPTRVDGEWRLVPDPVQRERILEVYHRVVVNHEPLHLVAHDLNRHGVLSPRDYFAQLRGREPQGRKWSATALKRSMISEAMLGYATLNGKTVRDDDGAPLVRAEPILTREQLEALRAELVKTSRAKPAVSTPSLLLRVLFCAVCGEPAYKFAGGGRKHPRYRCRSMGFPKHCGNGTVAMAEWDTFCEEQVLNLLGDVERLEKVWVAGSDAAVELAEVNAELVDLTSLIGSPAYRAGSPQREALDARIAALAARQGELEGLEARPSGWEWRGTGQRFGDWWREQDTAAKNTWLRSMNVRLTFDVRGGLTRTIDFGDLQEYERHLCLGSVVKRLHTGTS

SEQ ID NO: 11696 - protein, 500 aa, synthetic construct
MRALVVIRLSRVTDATTSPERQLESCQQLCAQRGWDVVGVAEDLDVSGAVDPFDRKRRPNLARWLAFEEQPFDVIVAYRVDRLARSIRHLQQLVHWAEDHKKLVVSATEAHFDTTTPFAAVVIALMGTVAQMELEAIKERSRSAAHFNIRAGKYRGSLPPWGYLPTRVDGEWRLVPDPVQRERILEVYHRVVDNHEPLHLVAHDLNRRGVLSPRDYFAQLRGREPQGRKWSATALKRSMISEAMLGYATLNGKTVRDDSGAPLVRAEPILTREQLEALRAELVKTSRAKPAVSTPSLLLRVLFCAVCGEPAYKFAGGGRKHPRYRCRSMGFPKHCGNGTVAMAEWNAFCEEQVLDLLGDAERLEKVWVAGSDSAVELAEVNAELVDLTSLIGSPAYRAGSPQREALDARIAALAARQEELEGSEARPSGWKWRETGQRFGDWWREQDTAAKNTWLRSMNVRLTFDVRGGLTRTIDFGDLQEYEQHLCLGSVVERLHTGTS

SEQ ID NO: 11697 - protein, 500 aa, synthetic construct
MRALVVIRLSRVTDATTSPERQLESCQQLCAQRGWDVVGVAEDLDVSGAVDPFDRKRRPNLARWLAFKEQPFDVIVAYRVDRLTRSTRHLQQLVHWAEDHKKLVVSATEAHFDTTTPFAAVVIALMGTVAQMELEAIKERTRSAAHFNIRAGKYRGSLPPWGYLPARVDGEWRLAPDPVQRERILEVYHRVVDNHEPLHLVAHDLNRRGVLSPKDYFAQLQGREPQGRKWSATALKRSMISVAMLGYATLNGKTVRDDDGAPLVRAEPILTREQLEALRAELVKTSRAKPAVSTPSLLLRVLFCAVCGEPAYKFAGGGRKHPRYRCRSMGFPKHCGNGTVAMAEWDAFCEEQVLDLLGDAERLEKVWVAGSDSAVELAEVNAELVDLTSLIGSPAYRAGSPQREALDARIAALAARQVELEGLEARPSGWEWRETGQRFGDWWREQDTAAKNTWLRSMNVRLTFDVRGGLTRTIDFGDLQEYEQHLRLGSVVERLHAGMS

SEQ ID NO: 11698 - protein, 500 aa, synthetic construct
MHALVVIRLSRVTDATTSPERQLESCQQLCAQRGWVVVGVAEDLDVSGAVDPFDRKRRPNLARWLAFEEQPFDVIVAYRVDRLTRSTRHLQQLVHWAEDHKKLVVSATEAHFDTTTPFAAIVIALMGTVAQMELEAIKERNRSAAHFNIRAGKYRGSLPPWGYLPTRVDGEWRLVPDPVQRERILEVYHRVVDNHEPLHLVAHDLNRRGVLSPKDYFAQLRGRGPQGRKWSATALKRSMISEAMLGYATLNGKTVRDGNGAPLVRAEPILTLEQQEALRAELVKTSRAKPAVSTPSLLLRVLFCAVCGEPAYKFAGGGRKHPRYRCRSMGFPKHCGNGTVAMAEWDAFCEEQVLGLLGDAERLEKVWVAGSDSAVELAEVSAELVDLTSLIGSPAYRAGSPQREALDARIAALAARQEELEGLEVRPSGWEWRETGQRFGDWWREQDTAAKNTWLRSMNVRLTFDVRGGLTRTVDLGDLQEYEQHLRSGSVVERLHTGMS

SEQ ID NO: 11699 - protein, 500 aa, synthetic construct
MHALVVIRLSRVTDATTSPERQLESCQQLCAQRGWDVVGVAEDLDVSGAVDPFDRKRRPNLARWLAFEEQPFDVIVAYRVDRLTRSTRHLQQLVHWAEDHKKLVVSATEAHFDTTTPFAAVVVALMGTVAQMELEAIKERSRSAAHFNIRAGKYRGSLPPWGYLPTRVDGEWRLAPDPVQRERILEVYHRVVDNHEPLHLVAHDLNRRGVLSPKDYFAQLRGREPQGREWSATALKRSLTSEAMLGYATLNGKIVRDDGGAPLVRAEPILTREQLETLRAELAKASRAKPAVSTPSLLLRVLFCAVCGEPAYKFAGGGRKHPRYRCRSMGFPKHCGNGTVAMAEWDAFCEEQVLDLLGDAERLEKVWVAGSDSAVELAEVSAELVDLTSLVGSPAYRAGSPQREALDARIAALAARQEELEGLEARPSGWEWRETGQRFGDWWREQDTAAKNTWLRSMNVRLTFDVRGGLTRTIDFGDLQEYEQHLRLGSVVERLHTGMS

SEQ ID NO: 11700 - protein, 500 aa, synthetic construct
MRALVVIRLSRVTDATTSPERQLESCQQLCAQRGWDVVGVAEDLDVSGAVDPFDRKRRPNLARWLAFEEQPFDVIVAYRVDRLARSIRHLQQLVHWAEDHKKLVVSATETHFDTTTPFAAVVIALMGTVAQMELEAIKERSRSAAHFNIRAGKYRGSLPPWGYLPTRVDGEWRLAPDPVQRERILEVYHRVVDNHEPLHLVAHDLNRRGILSPKDYFAQLRGREPQDREWSATALKRSLTSEAMLGYATLNGKIVRDDDGAPLVRAEPILTREQLEALRAELVKTSRAKPAVSTPSLLLRVLFCAVCGEPAYKFAGGGRKHPRYRCRSMGFLKHCGNGTVAMAEWDAFCEEQVLDLLGDAERLEKVWVAGSDSAVELAEVNAELVDLTSLIGSPAYRAGSPQREALGARIAALAARQEELEGLEAHPSGWEWRETGQRFGDWWRKQDTAAKNTWLRSMNVRLTFDVRGGLTRTIDFGDLQEYEQHLRLGSVVKRLHTGMS

SEQ ID NO: 11701 - protein, 500 aa, synthetic construct
MRALVVIRLSRVTDATTSPERQLESCQQLCARRGWDVAGVAEDLDVSGAVDPFDRKRRPNLARWLAFEEQPFDVIVAYRVDRLARSIRHLQQLVHWAEDHKKLVVSATEAHFDMTTPFAAVIIALMGTVAQMELEAIKERSRSAAHFNIRAGKYRGSLPPWGYLPTRVDGEWRLVPNPVQRERILEVYHRVVDNHEPLHLVAHDLNRRGVLSPKDYFAQLRGREPQGRKWSATALKRSMISEAMLGYATLNGKTVRDDDGAPLVRAEPILTREQLEALRVELVKTSRAKPAVSTPSLLLRVLFCAVCGEPAYKFAGGGRKHSRYRCRSMGFPKHCGNGTVAMAEWDAFCEEQVLDLLGDAERLEKVWVAGSDSAVELAEVNAELVDLTSLIGSPAYRVGSPQREALDARIAALAARQEELEGLEARPSGWEWRETGQRFGDWWREQDAAAKNTWLRSMNVRLTFDVRGGLTRTIDFGDLQEYEQHLRSGSVAERLHTGMS

SEQ ID NO: 11702 - protein, 500 aa, synthetic construct
MRALVVIRLSRVTDATTSPERQLGSCQQLCAQRGWDVVGVAEDLNVSGAVDPFNRERRPNLARWLAFEEQPFDVIVAYRVDRLARSIRHLQQLVHWAEDHKKLVVSATEAHFDTTTPFAAVVIALMGTVAQMELEAIKERSRSAAHFNIRAGKYRGSLPPWGYLPARVDGVWRLVPDPVQRGRILEVYHRVVNNHEPLHLVAHDLNRRGVLSPKDYFAQLQGREPQGRKWSATALKRSMISEAMLGYATLNGKTVRDDDGAPLVRAEPILTREQQEALRAELVKTSRAKPAVSTPSLLLRVLFCAVCGEPAYKFAGGGRKHPRYRCRSMGFPKHCGNGTVATAEWDAFCEEQVLDLLGDTERLEKVWVAGSDSAIELAEVNAELVDLTSLIGSPAYRAGSPQREALDARIAALAARQEELVGLEARPSGWEWRETGQRFGDWWREQDTAAKNTWLRSMNVRLTFDVRGGLTRTIDFGDLLEYEQHLRLGSVVERLHTGMS

SEQ ID NO: 11703 - protein, 500 aa, synthetic construct
MRALVVIRLSRVTDATTSPERQLESCQQLCAQRGWDVVGVAEDLDVSGAVDPFDRKRRPNLARWLAFEEQPFDVIVAYRVDRLTRSIRHLQQLVHWAEDHKKLVASATEAHFDTTTPFAAVTIALMGTVAQMELEAIKERSRSAAHFNIRAGKYRGSLPPWGYLPTRVDGEWRLAPDPVQRERILEVYHRVVDNHEPLHLVAHDLNRRGVLSPKDYFAQLRGREPQGRKWSATALKRSMTSEAMLGYATLNGKTVRDDDGAPLVRAEPILTREQLEALRAELVKTSRAKPAVSTPSLLLRVLFCAVCGEPAYKFAGGGRKHSRYRCRSMGFPKHCGNGTVAMAEWDAFCEEQVLDLLGDAERLEKVWVAGSDSAVELAEVNAELVDLTSLIGSPAYRAGSPQREALDARIAALAARQEELEGLEARPSGWEWRETGQRFGDWWREQDTAAKNTWLRSMNVRLTFDVRGGLTRSIDFGDLQVYEQHLRLGSVVERSHTGMS

SEQ ID NO: 11704 - protein, 500 aa, synthetic construct
MRALVVIRLSRVTDATTSPERQLESCQQLCAQRGWDVVGVAEDLDVSGAVDPFDRKRRPNLARWLAFEEQPFDVIVAYRVDRLTRSTRHLQQLVHWAEDHKKLVVSATEAHFDTTTPFAAVVIALMGTVAQMELEAIKERSRSAAHFNIRAGKYRGSLPPWGYLPTRVDGEWRLVPDPVQRERILEVYHRVVDNHEPLHLVAHDLNRRGVLSPKDYFAQLQGREPQGRKWSATALKRSMISEAMLGYATLNGKTVRDDDGAPLVRAEPILTREQLEAVRAELVKTSRAKPAVSTPSLLLRVLFCAVCGEPAYKFTGGGRKHPRYRCRSMGFPKHCGNGTVAMAEWDAFCVEQVLDLLGDAERLEKVWVAGPDSAVELAEVNAELVDLTSLIGSPAYRAGSPQREALDARIAALAARQEELEGLGARPSGWEWRETGQRFGDWWREQDTAAKNTWLRSMNVRLTFDVRGGLTRTIDFGDLQEYEQHLRLGSVVERIHTGMS

SEQ ID NO: 11705 - protein, 500 aa, synthetic construct
MRALVVIRLSRVTDATTSPERQLESCQQLCAQRGWNVVGVAEDLDVSGAVDPFDRKRRPNLARWLAFEEQPFDVIVAYRVDRLARSVRHLQQLVRWAEDHKKLVVSATEAHFDTTTPFAAVVIALMGTVAQMELEAIKERSRSAAHFNIRAGKYRGSLPPWGYLATRVGGEWRLVPDPVQRERILEVYHRVVDNHEPLHSVAHDLNRRGVLSPKDYFAQLQGREPQGRRWSATAIKRSMISEAMLGYATLNGKIVRDDDGAPLVRAEPILTREQQEALRAELVKTSRARPAVSTPSLLLRVLFCAVCGEPAYKFAGGGRKHPRYRCRSMGFPKHCGNGTVAMAEWDAFCEEQVLDLLGDAERLEKVWVAGSDSAVELAEVNAELVDLTSLIGSPAYRAGSPQREALDARIAALAARQEELEGLEARPSGWEWRGTGQRFGDWWREQDTAAKNTWLRSMNVRLTFDVRGGLTRTIDFGDLQEYEQHLRLGSVAERLHTGMS

SEQ ID NO: 11706 - protein, 500 aa, synthetic construct
MRALVVIRLSRVTDATTSPERQLESCQQLCAQRGWDVVGVAEDLDVSGAVDPFDRKRRPNLARWLAFEEQPFDVIVAYRVDRLTRSTRHLQQLVHWAEDHKKLVVSATEAHFDTTTPFAAVVIALMGTVAQMELEAIKERTRSAAHFNIRAGKYRGSLPPWGYLPARVDGEWRLAPDPVQRERILEVYHRVVDNHEPLHLVAHDLNRRGVLSPKDYFAQLQGREPQGRKWSATALKRSMISVAMLGYATLNGKTVRDDDGAPLVRAEPILTREQLEALRAELVKTSRAKPAVSTPSLLLRVLFCAVCGEPAYKFTGGGRKHPRYRCRSMGFPKHCGNGTVAMAEWDAFCEEQVLNLLGDAERLEKVWVAGSDSAVELAEVNAELVDLSSLIGSPAYRAGSPQREALDARIAALAARQEELEGLEARPSGWEWRETGQRFGDWWREQDTVAKNTWLRSMNVRLTFDVRGGLTRTIDFGDLREYEQQLRLGSVVERLHTGMS

SEQ ID NO: 11707 - protein, 500 aa, synthetic construct
MRALVVIRLSRVTDTTTSPERQLESCRQLCAQRGWDVVGVAEDLDVSGAVDPFDRKRRPDLARWLAFEEQPFDVIVAYRVDRLTRSVRHLQQLVHWAEDHKKLVVSATEAHFDTTTPFAAVVIALMGTVAQMELEAIKERSRSAAHFNIRAGKYRGSLPPWGYLPARVDGEWRLVPDPVQRERILEVYHRVVDNHEPLHLVAHDLNRRGVLSPRDYFAQLQGREPQGRKWSATALKRSMISEAMLGYATLNGKTVRDEDGAPLVRAEPILTREQLEALRAELVKTSRAKPAVSTPSLLLRVLFCAVCGEPAYKFSGGGRKHPRYRCRSMGFPKHCGNGTVAMAEWDAFCEEQVSDLLGDAERLEKVWVAGSDSAVELAEVNAELVDLTSLIGSPAYRAGSPQREALDARIAALAARQEELEGLEARPSGWEWRETGQRFGDWWREQDTAAKNTWLRSMNVRLTFDVRGGLTRTIDFGDLQEYEQHLRLGSVVERLHTGMS

SEQ ID NO: 11708 - protein, 500 aa, synthetic construct
MRALVVIRLSRVTDATTSPERQLESCQQLCAQRGWDVVGVAEDLDVSGAVEPFDRKRRPNLARWLAFEEQPFDVIVAYRVDRLTRSIRHLQQLVHWAEDHKKLVVSATEAHFDTTTPFAAVVIALMGTVAQMELEAIKERSRSAAHFNIRAGRYRGSLPPWGYLPTRVDGEWRLAPDPVQRERILEVYHRVVDNHEPLHLVAHDLNRRGVLSPKDYFAQLQGREPQGRKWSATALKRSMTSEAMLGYVTLNGKTVRDDDGAPLVRAEPILTREQLGALRAELVRTSRAKPAVSTPSLLLRVLFCAVCGEPAYKFAGGGRKHPRYRCRSMGFPKHCGNGTVAMAEWDAFCEEQVLDLLGDAERLEKVWVAGSDSAVELAEVNAELVDLTSLIGSPAYRAGSPQREALDARIAALAARQEELEGLEARPSGWEWRETGQRFGDWWREQDTAAKNTWLRSMNVRLTFDVRGGLTRTVDFGDLQEYEQHLRLGSVVERLHAGMS

SEQ ID NO: 11709 - protein, 500 aa, synthetic construct
MRALVVIRLSRVTDATTSPERQLESCQQLCAQRGWDVVGVAEDLDVSGAVDPFDRKRRPNLARWLAFEEQPFDVIVAYRVDRLARSIRYLQQLVHWAEDHKKLVVSATEAHFDTTTPFAAVVIALMGTVAQMELEAIKERNRSAAHFNIRAGKYRGSLPPWGYLPTRVDGGWRLVPDPVQRERILEVYRRVVDNHEPLHLVAHDLNRRGVLSPRDYFAQLRGREPQGRKWSATALKRSMISEAMLGYATLNGKTVRDEDGAPLVRAEPILTREQLEALRAELVKTSRAKPAVSTPSLLLRVLFCAVCGEPAYKFAGGGRKHPRYRCRSMGFPKHCGNGTVAMAEWDAFCEEQVLNLLGDAERLEKVWVAGSDSAVELAEVNAELVDLTSLIGSPAYRAGSPQREALDARIAALAARQEELEGLEARPSGWEWRETGQRFGDWWREQDAAAKNTWLRSMNVRLTFDVRGGLTRTIDLGDLQEYEQHLRLGSVVERSHTGMS

SEQ ID NO: 11710 - protein, 500 aa, synthetic construct
MHALVVIRLSRVTDATTSPERQLESCQRLCAQRGWDVVGVAEDLDVSGAVDPFDRKRRPNLARWLAFEEQPFDVIVAYRVDRLARSIRHLQQLVHWAEDHKKLVVSATEAHFDTTTPFAAVVIALMGTVAQMELEAIKERSRSAAHFNIRAGKYRGSLPPWGYLPARVDGVWRLVPDPVQRERILEVYHRVVNNHEPLHLVAHDLNRRGILSPKDYFAQLQGREPQGRKWSATALKRSMISEAMLGYATLNGKTVRDDDGAPLVRAEPILTREQQEALRAELVKTSRAKPAVSTPSLLLRVLFCAVCGEPAYKFAGGGRKHPRYRCRSMGFPKHCGNGTVAMAEWDAFCEEQVLDLLGDAERLEKVWVAGSVSAVELAEVNAELVDLTSLIGSPAYRTGSPQREALDARIAALAARQEELEGSEARPSGWEWRETGQRFGDWWREQDTAAKNTWLRSMNVRLTFDVRGGLTRTIDFGDLQEYEQHLRLGSVVERLHTGMP

SEQ ID NO: 11711 - protein, 500 aa, synthetic construct
MRALVVIRLSRVTDATTSPERQLESCQQLCAQRGWDVVGVAEDLDVSGAVDPFDRKRRPNLARWLAFEEQPFDVIVAYRVDRLARSIRHLQQLVHWAEDHKKLVVSATEAHFDTTTPFAAVVIALMGTVAQMELEAIKERSRSAAHFNIRAGKYRGSLPPWGYLPARVDGEWRLVPDPVQRERILEVYHRVVDNHEPLHLVAHDLNRRGVLSPKDYFAQLRGREPQGRKWSATALKRSMISVAMLGYATLCGKTVRDDDGAPLVRAEPILTREQLEALRAELVKTSRAKPAVSTPSLLLRVLFCAVCREPAYKFAGGGRKHPRYRCRSMGFPKHCGNGTVAMAEWDAFCEEQVLNLLGDAERLEKVWVAGSDSAVELAEVNKELVDLTSLIGSPAYRAGSPQREALDARIAALAARQEELEGLEARPSGWEWRGTGQRFGDWWRELDTAAKNTWLRSMNVRLTFDVRDGLTRTIDFGDLQEYEQHLRLGSVAERSHTGMS

SEQ ID NO: 11712 - protein, 500 aa, synthetic construct
MRALVVIRLSRVTDATTSPERQLESCQQFCAQRGWDVVGVAEDLDVSGAVDPFDRKRRPNLARWLAFEEQPFDVIVAYRVDRLTRSIRHLQQLVHWAEDHKKLVVSATEAHFDTTTPFAAVVIALMGTVAQMELEAIKERNRSAAHFNIRAGKYRGSLPPWGYLPTRVNGEWRLVPDPVQRERILEVYHRVVDKHEPLHLVAHDLNRRGVLSPKDYFAQLRGREPQGRKWSATALKRSMTSEAMLGYATLNGETVRDDDGAPLVRAEPILTREQLEALRAELVKTSRAKPAVSTPSLLLRVLFCAVCGGPAYKFAGGGRKHPRYRCRSMGFPKHCGNGTVAMAEWDAFCEEQVLDLLGDAERLEKVWVAGSDSAVELAEVNAELVDLTSLISSPAYRAGSPQREALDARIAALAARQEELEGLEARPSGWEWRETGQRFGDWWREQDTAAKNTWLRSMNVRLTFDVRGGLTRTIDFGDLQEYEQHLRLGSVVERLHTGMS

SEQ ID NO: 11713 - protein, 500 aa, synthetic construct
MRALVVIRLSRVTDATTSPERQLESCQQLCAQRGWDVVGVAEDLDVSGAVDPFDRKRRPNLARWLAFEEQPFDVIVAYRVDRLTRSTRHLQQLVHWAEDHKKLVVSATEAHFDTTTPFAAVVIALMGTVAQMELEAIRERSRSAAHFNIRAGKYRGSLPPWGYLPARVDGEWRLVPDPVQRERILEVYHRVVDNHEPLHLVAHDLNRRGVLSPKDYFAQLQGREPQGRKWSATALKRSMISEAMLGYATLNGRTVRDDDGAPLVRAEPILTRGQLEALRAELVRTSRAKPAVSTPSLLLRVLFCAVCGEPAYKFAGGGRKHPRYRCRSMGFPKHCGNGTVAMAEWDAFCEEQVLNLLGDAERLEKVWVAGSDSAVELAEVNAKLVDLTSLIGSPAYRVGSPQREALDARIAALAARQEELEGLEARPSGWEWRETGQRFRDWWREQDTAAKNTWLRSMNVRLTYDVRGGLTRTIDFGDLQEYEQHLRLGSVVERLHTGMS

SEQ ID NO: 11714 - protein, 500 aa, synthetic construct
MRALVVIRLSRVTDATTSPERQLESCQQLCAQRGWDVVGVAEDLDVSGAVDPFDRKRRPNLARWLAFEEQPFDVIVAYRADRLARSIRYLQQLVHWAEDHKKLVVSATEAHLDTTTPFAAVVIALMGTVAQMELEAIKERSRSAAHFNIRAGKYRGSLPPWGYLPTRVDGEWRLAPDPVQRERILEVYRRVVDNHEPLHLVAHDLNRRGVLSPKDYFAQLQGREPQGRKWSATALKRSMISEAMLGYATLNGKTVRDDDGAPLVRAEPILTREQQEALRAELVKTSRAKPAVSTPSLLLRVLFCAVCGEPAYKFSGGGRKHPRYRCRSMGFPKHCGNGTVAMAEWDVFCEEQVLDLLGDVERLEKVWVAGSDSAVELAEVNAELVDLTSLIGSPAYRAGSPQREALDARIAALAARQEELEGLEARPSGWEWRETGQRFGDWWREQDTAAKNTWLRSMNVRLTFDARGGLTRTIDFGDLQEYEQHLRLGSVVERLHTGMS

SEQ ID NO: 11715 - protein, 500 aa, synthetic construct
MRALVVIRLSRVTDATTSPERQLESCQQLCAQRGWDVVGVAEDLDVSGAVDPFDRKRRPNLARWLAFEEQPFDAIVAYRVDRLARSIRHLQQLVHWAEDHKKLVVSATEAHFDTTTPFAAVVIALMGTVAQMELEAIKERSRSAAHFNIRAGKYRGSLPPWGYLPARVDGEWRLVPDPVQRERILEVYHRVVDNHEPLHLVAHDLNRRGVLSPKDYFAQLQGREPQGRKWSATALKRSMISEAMLGYATLNGMTVRDDDGAPLVRAEPILTREQLEALRAELVKTSRAKPAVSTPSLLLRVLFCAVCGEPAYKFSGGGRKHPRYRCRSMGFPKHCGNGTVAMAEWDAFCEEQVLDLLGDAERLEKVWVAGSDSAVELAEVSAELVGLTSLIGSPSYRAGSPQREALDARIAALAARQEELEGLEARPSGWEWRETGQRFGDWWREQDTAAKNTWLRSMNVRLTFDVRGGLTRTIDFGDLQVYEQHLRLGSVVERLRTGMS

SEQ ID NO: 11716 - protein, 500 aa, synthetic construct
MRALVVIRLSRVTDATTSPERQLESCLQLSVQRGWDVVGVAEDLDVSGAVDPFDRKRRPNLARWLAFEEQPFDVIVAYRVDRLTRSTRHLQQLVHWAEDHKKLVVSATEAHFDTTTPFAAVVIALMGTVAQMELEAIKERSRSAAHFNIRAGKYRGSLPPWGYLPTRVDGEWRLVPDPVQRERILEVYHRVVDNHEPLHLVAHDLNRRGVLSPKDYFAQLRGREPQGRKWSATALKRSMTSEAMLGYATLGGKTVRDDDGAPLVRAEPILTREQLEALRAELVKTSRAEPAVSTPSLLLRVLFCAVCGEPAYKFAGGGRKHPRYRCRSMGFPKHCGNGTVAMAEWDAFCEEQVLNLLGDAERLEKVWVAGSDSAVELARVNAELVDLTSLIGSPAYRAGSPQREALDARIAALAARQEELEGLEARPPGWEWRETGQRFGDWWREQDTAAKNTWLRSMNVRLTFDVRGGLTRTIDFGDLQEYAQHLRLGSVAERLHTGMS

SEQ ID NO: 11717 - protein, 500 aa, synthetic construct
MRALVVIRLSRVTDATTSPERQLESCQQLCAQRGWDTVGVAEDLDVSGAVDPFDRKRRPNLARWLAFEEQPFDVIVAYRVDRLTRSVRHLQRLVHWAEDHKKLVVSATEAHFDTTTPFAAVVIALMGTVAQMELEAIKERSRSAAHFNIRAGKYRGSLPPWGYLPTRVDGEWRLVPDPVQRERILEVYHRVVDNHEPLHLVAHDLNRRGVLSPKDYFAQLQGREPQGRKWSATALKRSMISGAMLGYATLNGKTVRDGDGAPLVRAEPILTREQLEALRAELVKTSRAKPAVSTPSLLLRVLFCAVCGEPAYKFAGGGRKHPRYRCRSMGFPKHCGNGTVAMAEWDAFCEEQVLNLLGDAERLEKVWVAGSDSAVELAEVNAELVDLTSLIGSPAYRAGSPQREALDARIAALAARQEELEGLEARPSGWEWRETGQRFGDWWREQDTAAKNTWLRSMNVRLTFDVRGGLTRTMDLGDLQEYEQHLRLGSVVERLHTGMS

SEQ ID NO: 11718 - protein, 500 aa, synthetic construct
MRALVVIRLSRVTDATTSPERQLESCQQLCAQRGWDVVGVAEDLDVSGAVDPFDRKRRPNLARWLAFEEQPFDAIVAYRVDRLARSIRHLQQLVHWAEDHKKLVVSATEAHFDTTTPFAAVVIALMGTVAQMELEAIKERSRSAAHFNIRAGKYRGSLPPWGYLPARVDGEWRLVPDPVQRERILEVYHRVVDNHEPLHLVAHDLNRRGVLSPKDYFAQLQGREPQGRKWSATALKRSMISKAMLGYATLNGKTVRDDDGAPLVRAEPILTREQLEALRAELVKTSRAKPAVSTPSLLLRVLFCAVCGEPAYKFAGGGRKHPRYRCRSMGFPKHCGNGTVAMAEWDAFCEEQVLDLLGDAERLEKVWVAGSDSAAGLAEVNAELVDLTSLIGSPAYRAGSPQREALGARIAALAARQEELEGLEARPSGWEWRETGQRFGDWWREQDTAAKNTWLRSMNVRLTFDVRGGLTRTIDFGDLQEYEQHLRLGSVVERLHTGMS

SEQ ID NO: 11719 - protein, 500 aa, synthetic construct
MRALVVIRLSRVTDATTSPERQLESCRQLCAQRGWDVVGVAEDLDVSGAVDPFDRKRRPNLARWLAFEEQPFDVIVAYRVDRLTRSIRHLQQLVHWAEDHKKLVVSATEAHFDMTTPFAAVVIALMGTVAQMELEAIKERNRSAAHFNIRAGKYRGSLPPWGYLPARVDGEWRLVPDPVQRERILEVYHRVVDNHEPLHLVAHDLNRRGVLSPRDYFAQLRGREPQGRKWSATALKRSMISEAMLGYATLNGKTVRDDDGAPLVRAEPILTREQLEAIRAELVKTSRAKPAVSTPSLLLRVLFCAVCGEPAYKFAGGGRKHPRYRCRSMGFPKHCGNGTVAMAEWDAFCEEQVLNLLGGAERLEKVWVAGSDSAVELAEVNAELVDLTSLIGSPAYRAGSPQREALDARIAALAARQEELEGLEARPSGWEWRETGQRFGDWWREQDTAAKNTWLRSMNVRLTFDVRGGLTRTIDFGDLQEYEQHLRLGSVVERLHTGMS

SEQ ID NO: 11720 - protein, 500 aa, synthetic construct
MRALVVIRLSRVTDATTSPERQLESCQQLCAQRGWDVAGVAEDLDVSGAVNPFDRKRRPNLARWLAFEEQPFDVIVAYRVDRLTRSIRHLQQLVHWAEDHKKLVVSATEAHFDTTTPFAAVVIALMGTVAQMELEAIKERSRSAAHFNIRAGKYRGSLPPWGYLPARVDGEWRLVPDPVQRERILEVYHRVVDNHEPLHLVAHDLNRRGVLSPKDYFAQLQGREPQGRKWSATALKRSMISGAMLGYATLSGETVRDDDGAPLVRAEPILTREQLEALRAELVKTSRAKPAVSTPSLLLRVLFCAVCGEPAYKFAGGGRKHPRYRCRSMGFPKHCGNGTVAMAEWDAFCEEQVLNLLGDAERLEKVWVAGSDSAVELAEVNAELVDLTSLIGSPAYRAGSPQREVLDARIAALAARQVELEGLEARPSGWGWRGTGQRFGDWWREQDTAAKNTWLRSMNVRLTFDVRGGLTRTIDFGELQEYEQHLRLGSVVERLHTGMS

SEQ ID NO: 11721 - protein, 500 aa, synthetic construct
MRALVVIRLSRVTDATTSPERQLESCQRLCAQRGWDVVGVAEDLDVSGAVDPFDRKRRPNLARWLAFEEQPFDVIVAYRVDRLTRSTRHLQQLVHWAEDHKKLVVSATEAHFDTTTPFAAVVIALMGTVAQMELEAIKERNRSAAHFNIRAGKYRGSLPPWGYLPARVDGEWRLVPDPVQRERILEVYHRVVDNHEPLHLVAHDLNWRGVLSPRDYFAQLQGREPQGRKWSATALKRSMISEAMLGYATLNGKIVRDDGGAPLVRAEPILTREQLEALRAELVKTSRAKPAVSTPSLLLRVLFCAVCGEPAYKFAGGGRKHPRYRCRSMGFLKHCGNGTVAMAEWDAFCEEQVLGLLGDAERLEKVWVAGSDSAVELAEVNAELVDLTSLIGSPAYRACSPQREALDARIAALAARQEELEGLEARPSGWEWRETGQLFGDWWREQDTAAKNTWLRSMNVRLTFDVRGGLTRTIDFGDLQEYEQHSRLGSVVGRLHTGMS

SEQ ID NO: 11722 - protein, 500 aa, synthetic construct
MRALVVIRLSRVTDATTSPERQLESCQQLCAQRGWDVAGVAEDLDVSGAVDPFDRKRRPNLARWLAFEEQPFDVIVAYRVDRLARSIRHLQQLVHWAEDHKKLVVSATEAHFDTTTPFAAVVIALMGTVAQMELEAIKERSRSAAHFNIRAGKYRGSLPPWGYLPTRVDGEWRLVPDPVQRERILEVYRRVVDNHEPLHLVAHDLNRRGVLSPRDYFAQLQGREPQGRKWSATALKRSMISGAMLGYATLNGKTVRDDDGAPLVRAEPILTREQLEALRAELAKTSRAKPAVSTPSLLLRVLFCAVCGEPAYKFAGGGRKHPRYRCRSMGFPKHCGNGTVAMAEWDAFCEEQVLDLLGDAERLEKVWVAGSDSAVELAEVNAELVDLTSLIGSPAYRAGSPQREALDARIAALAARQEELEGLEARPSGWEWRETGQRFGDWWREQDTAVKNTWLRSMNVRLTFDVRGGLTRTIDFGDLQEYEQHLRLGSVVERLRTGMS

SEQ ID NO: 11723 - protein, 500 aa, synthetic construct
MRALVVIRLSRVTDATTSPERQLESCQQLCAQRGWDVVGVAEDLDVSGAVDPFDRKRRPNLARWLAFEEQPFDVIVAYRVDRLARSIRHIQQLVHWAEDHKKLVVSATEAHFDTTTPFAAVVIALMGTVAQMELEAIKERTRSAAHFNIRAGKYRGSLPPWGYLPARVDGEWRLAPDPVQRERILEVYHRVVDNHEPLHLVAHDLNRRGVLSPKDYFAQLQGREPQGRKWSATALKRSMTSETMLGYATLNGKIVRDDGGAPLVRAEPILTREQLEALRAELVKTSRAKPAVSTPSLLLRVLFCAVCGEPAYKFAGGGRKHPRYRCRSMGFPKHCGNGTVAMAEWDAFCEEQVLDLLGDAERLEKVWVAGSDSAVELAEVNAELVDLTSLIGSPAYRAGSPQREALYARIAALAARQEELEGLEARPSGWEWRETGQRFGDWWREQDTAAKNTWLRSMNVRLTFDVRGGLTRTIDFGDLQEYAQHLRLGSVVERLHTGMS

SEQ ID NO: 11724 - protein, 500 aa, synthetic construct
MRALVVIRLSRVTDATTSPERQLESCQQLCAQRGWDVVGVAEDLDVSGAVDPFDRKRRPNLARWLAFEEQPFDVIVAYRVDRLTRSTRHLQQLVHWAEDHKKLVVSATEAHFDTTMPFAAVVIALMGTVAQMELEAIKERNRSAARFNIRAGKYRGSLPPWGYLPTRVDGEWRLAPDPVQRERILEVYHRVVDDHEPLHLVAHDLNRRGVLSPKDYFAQLRGREPQGRKWSATALRRSMTSEAMLGYATLNGKTVRDDDGAPLVRAEPILTREQLGALRAELVKTSRAKPAVSTPSLLLRVLFCAVCGEPAYKFTGGGRKHPRYRCRSMGFPKHCGNGTVAMAEWDAFCEEQVLGLLGDAERLEKVWVAGSDSAVELAEVNAELVDLTSLIGSPAYRAGSPQREALDARIAALAARQEELEGLEARPPGWEWRETGQRFGDWWREQDTAAKNTWLRSMNVRLTFDVRDGLTRTIDLGDLQEYEQHLRLGSVVERSHTGMS

SEQ ID NO: 11725 - protein, 500 aa, synthetic construct
MRALVVIRLSRVTDATTSPERQLESCQQLCAQRGWDVVGVAEDLDVSGAVDPFDRKRRPNLARWLAFEEQPFDVIVAYRVDRLTRSVRHLQQLVHWAEDHKKLVVSATEAHFDTTTPFAAVVIALMGTVAQMELEAIKERSRSAAHFNIRAGKYRGSLPPWGYLPARVDGEWRLVPDPVQRERILEVYHRVVDNHEPLHLVAHDLNRRGVLSPKDYFAQLRGREPQGREWSATALKRSMTSEAMLGYATLNGKIVRDDDGAPLVRAEPILTREQLEALRAELVKTSRAKPAVSTPSLLLRVLFCAVCGEPAYKFAGGGRKHPRYRCRSMGFPKHCGNGTVAMAEWDAFCEEQVLNLLGDAERLEKVWVAGSDSAVELAEVNAELVDLTSLIGSPAYRAGSTQREALDARIAALAARQEELEGLEARPAGWEWRETGQRFGDWWREQDTAAKNTWLRSMNVRLTFDVRGGLTRTIDFGGLQEYEQHLRLGGVVERLHTGVS

SEQ ID NO: 11726 - protein, 500 aa, synthetic construct
MRALVVIRLSRVTDATTSPERQLESCQQLCAQRGWDVVGVAEDLDVSGAVDPFDRKRRPNLARWLAFEEQPFDAVVAYRVDRLTRSIRHLQQLVHWAEDHKKLVVSATEAHFDTTTPFAAVVIALMGTVAQMELEAIKERNRSAAHFNIRAGKYRGSLPPWGYLPTRVDGEWRLAPDPVQRERILEVYHRVVDNHEPLHSVAHDLNRRGVLSPKDYFAQLRGREPQGRKWSATALKRSMISEAMLGYATLNGKTVRDDDGAPLVRAEPILTREQLEALRAELVKTSRAKPAVSTPSLLLRVLFCAVCGEPAYKFSGGGRKHPRYRCRSMGFPKHCGNGTVAMAEWDAFCEEQVLDLLGDAERLEKVWVAGSDSAVELAEVNAELVDLTSLIGSPAYRAGSPQREALDARIAALAARQEELEGLEARPSGWEWRETGQRFGDWWREQDTAAKNTWLRSMNVRLTFDVRGGLTRTIDFGDLQEYEQHLRLGSMVERLHTGMS

SEQ ID NO: 11727 - protein, 500 aa, synthetic construct
MRALVVIRLSRVTDSTTSPERQLESCQQLCAQRGWDVVGAAEDLDVSGAVDPFDRKRRPNLARWLAFEEQPFDVIVAYRVDRLTRSIRHLQQLVHWAEDHKKLVVSATEAHFDMTTPFAAVVIALMGTVAQMELEAIKERSRSAAHFNIRAGKYRGSLPPWGYLPTRVDGEWRLAPDPVQRERILEVYHRVVDNHEPLHLVAHDLNRRGVLSPKDYFAQLQGREPQGRKWSATALKRSMISVAMLGYATLNGKTVRDDDGAPLVRAEPILTREQLEALRAELVKTSRAKPAVSTPSLLLRVLFCAVCGEPAYKFAGGGRKHPRYRCRSMGFPKHCGNGTVAMAEWDAFCEEQVLGLLGDVERLEKVWVAGSDSAVKLAEVNAELVDLTSLIGSPAYRAGSPQREALDARIAALAARQEELEGLEARPSGWEWRGTGQRFGDWWREQDTAAKNTWLRSMNVRLTFDVRGGLTRTIDFGDLQGYEQHLRLGSVVERLHTGMS

SEQ ID NO: 11728 - protein, 500 aa, synthetic construct
MRALVVIRLSRVTDATTSPERQLESCQQLCAQRGWDVVGVAEDLDVSGAVDPFDRKRRPNLARWLAFEEQPFDVIVAYRVDRLARSIRHLQQLVHWAGDHKKLVVSATEAHFDTTTPFAAVVIALMGTVAQMELEAIKERSRSAAHFNIRAGKYRGSLPPWGYLPTRVDGEWRLAPDPVQRERILEVYHRVVDDHEPLHLVAHDLNRRGVLSPKDYFAQLQGREPQDRKWSATALKRSMISEAMLGYVTLNGKIVRDDDGAPLVRAEPILTREQLEALRAELVKTSRAKPAVSTPSLLLRVLFCAVCGEPAYKFAGGGRKHPRYRCRSMGFPKHCGNGTVAMAEWDAFCEEQVLDQLGDAERLEKVWVAGSGSAVELAEVNAELVDLTSLIGSPAYRAGSPQREALDARIAALAARQEELEGLEARPSGWEWRGTGQRFGDWWREQDTAAKNTWLRSMNIRLTFDVRGGLTRTIDFGDLQEYERHLRLGGVVERLHTGMS

SEQ ID NO: 11729 - protein, 500 aa, synthetic construct
MRALVVIRLSRVTDATTSPERQLESCQQLCAQRGWDVVGVAEDLDVSGAVDPFDRKRRPNLARWLAFEEQPFDVIVAYRVDRLTRSIRHLQQLVHWAEDHKKLVVSATEAHFDTTTPFAAVVIALMGTVAQMELEAIRERSRSAAHFNIRAGKYRGSLPPWGYLPARVDGEWRLVPDPVQRERILEVYHRVVDDHEPLHLVAHDLNRRGVLSPKDYFAQLRGREPQGRKWSATALKRSMISKAMLGYATLNGKTVRDDDGAPLVRAEPILTREQQEALRAELVKTSRAKPAVSTPSLLLRVLFCAVCGEPAYKFAGGGRKHPRYRCRSMGFPKHCGNGTVAMAEWDAFCEEQVLGLLGDAERLEKVWVAGSDSAVELAEVNAELVDLTSLIGSPAYRAGSPQREALDARIAALAARQEELEGLEARPSGWEWRETGQRFGDWWREQDTAAKNTWLRSMNVRLTFDVRGGLTRTIDFGDLQEYEQHLRLGSVVERLHTGMS

SEQ ID NO: 11730 - protein, 500 aa, synthetic construct
MRALVVIRLSRVTEATTSPERQLESCQQLCAQRGWDVVGVAEDLDVSGAVDPFDHKRRPDLARWLAFEEQPFDVIVAYRVDRLTRSVRHLQQLVHWAEDHKKLVVSATEAHFDTTTPFAAVVIALMGTMAQMELEAIKERNRSAAHFNIRAGKYRGSLPPWGYLPTRVDGEWRLVPDPVQRERILEVYRRVVDHHEPLHSVAHDLNRRGVLSPKDYFAQLRGREPQGRKWSATALKRSMISEAMLGYATLNGKTVRDDDGAPLVRAEPILTRAQLEALRAELVKTSRAKPAVSTPSLLLRVLFCAVCGEPAYKFAGGGRKHSRYRCRSMGFPKHCGNGTVAMAEWDAFCEEQVLGLLGDAERLEKVWVAGSDSAVELAEVNAELVDLTSLIGSPAYRAGSPQREALDARIAALAARQEELEGLEVRPSGWEWRETGQRFGDWWREQDTAAKNTWLRSMNVRLTFDVRGGLTRTIDLGDLQEYEQHLRLGSVVEHLHTGVS

SEQ ID NO: 11731 - protein, 500 aa, synthetic construct
MRALVVIRLSRVTDATTSPERQLESCQQLCAQRGWDVVGVTEDLDVSGAVDPFDRKRRPNLARWLAFEEQPFDVIVAYRVDRLTRSTRHLQQLVHWAEDHKKLVVSATEAHFDTTTPFAAVVIALMGTVAQMELEAIKERNRSAAHFNIRAGKYRGSLPPWGYLPTRVDGEWRLAPDPVQRERIIEVYRRVVDNHEPLHLVAHDLNRRGVLSPKDYFAQLQGREPRGRKWSATALKRSMTSEAMLGYATLNGKTVRDDDGAPLVRAEPILTREQLEALRAELVKTSRAKPAVSTPSLLLRVLFCAVCGEPAYKFAGGGRRHPRYRCRSMGFPKHCGNGTVAMAEWDAFCEEQVLNLLGDAERLEKVWVAGSDSAVELAEVNAELVDLTSLIGSPAYRAGSPQREALDARIAALAARQEELEGLEARPSGWEWRETGQRFGDWWREQDTAAKNTWLRSMNVRLTFDVRGGLTRTIDFGDLREYEQHLRLGSVVERLHTGMS

SEQ ID NO: 11732 - protein, 500 aa, synthetic construct
MRALVVIRLSRVTDATTSPERQLESCQQLCAQRGWDVVGVAEDLDVSGAVDPFDRKRRPNLARWLAFEEQPFDVIVAYRIDRLTRSARHLQQLVHWAEDHKKLVVSATEAHFDTTTPFAAVVIALMGTVAQMELEAIKERSRSAAHFNIRAGKYRGSLPPWGYLPTRVNGEWRLVPDPVQRERILEVYHRVVDNHEPLHLVAHDLNRRGVLSPKDYFAQLQGREPQGRKWSATALKRSMTSEAMLGYATLNGKTVRDDDGAPLVRAEPILTREQLEALRAELVKTSRAKPAVSTPSLLLRVLFCAVCGEPAYKFAGGGRKHPRYRCRSMGFPKHCGNGTVAMAEWDAFCEEQVLDLLGDAERLERVWVAGPDSAVELAEVNAELVDLTSLIGSPAYRAGSPQREALDARIAALAARQEELEGLEARPSGWEWRETGQRFGDWWREQDTAAKNTWLRSMNVRLTFDVRGGLARTIDFGDLREYEQHLRLGSVVERLHTGMS

SEQ ID NO: 11733 - protein, 500 aa, synthetic construct
MRALVVIRLSRVTETTTSPERQLESCQQLCAQRGWDVVGVAEDLDVSGAVDLFDRKRRPNLARWLAFEEQPFDVIVAYRVDRLTRSIRHLQQLVHWAEDHKKLVVSATEAHFDTTTPFAAVVIALMGTVAQMELEAIKERNRSAAHFNIRAGKYRGSLPPWGYLPTRVDGEWRLAPDPVQRERILEVYHRVVDNHEPLHLVAHDLNRRGVLSPKDYFAQLQGREPQGRKWSATALKRSMISEAMLGHATLNGKTVRDDDGAPLVRAEPILTREQQEALRAELVKTSRAKPAVSTPSLLLRVLFCAVCGEPAYKFSGGGRKHPRYRCRSMGFPKHCGNGTVAMAEWDAFCEEQVLGLLGDAERLEKVWVAGSDSAVELAEVNAELVDLTSLIGSPAYRADSPQREALDARIATLAARQEELEGLEARPSGWEWRETGQRFGDWWREQDTAAKNTWLRSMNVRLTFDVRGGLTRTIDLGGLQEYEQHLRSGSVVERLHTGMS

SEQ ID NO: 11734 - protein, 500 aa, synthetic construct
MRALVVIRLSRVTDATTSPERQLESCQQLCAQRGWDVVGVAEDLDVSGAVDPFDRKRRPNLARWLAFEEQPFDVIVAYRVDRLTRSTRHLQQLVHWAEDHKKLVVSATEAHFDTTTPFAAVVIALMGTVAQMELEAIKERNRSAAHFNIRAGKYRGSLPPWGYLPTRVDGEWRLAPDPVQRERILEVYHRVVDNHEPLHLVAHDLNRRGVLSPKDYFAQLQGREPQGRKWSATALKRSMISEAMLGYATLNGKTVRDDDGAPLVRAEPILTREQQEALRVELVKTSRAKPAVSTPSLLLRVLFCAVCGEPAYKFAGGGRKHPRYRCRSMGFPKHCGNGTVAMAEWDAFCEEQVLDLLGGAKRLEKVWVAGSDSAVELAEVNAELVDLMSLIGSPAYRAGSPQREALDARIAALAARQEELEGLEARPSGWEWRGTGQRFGDWWREQDTAAKNTWLRSMNVRLTFDVRGGLTRTIDFGDLQEYEQHLRLGSVVERLHTGLS

SEQ ID NO: 11735 - protein, 500 aa, synthetic construct
MRALVVIRLSRVTDATTSPERQLESCQQLCAQRGWDVVGVAEDLDVSGAVDPFDRKRRPNLARWLAFEEQPFDVIVAYRVDRLTRSVRHLQQLVHWAEDHKKLVVSATEAHFDTTTPFAAVVIALMGTVAQMELEAIKERSRSAAHFNIRAGKYRGSLPPWGYLPARVDGEWRLVPDPVQRERILEVYHRVVDNHEPLHLVAHDLNRRGVLSPKDYFAQLRGREPQGRKWSATALKRSMISEAMLGYATLNGRTVRDEDGAPLVRAEPILTREQLEVLRAELVKTSRAKPAVSTPSLLLRVLFCAVCGEPAYKFTGGGRKHPRYRCRSMGFPKHCGNGTVAMAEWDAFCEEQVLDLLGDAERLEKVWVAGSNSAVELAEVNAELVDLTSLIGSPAYRAGSPQREALDARIAALAARQEELEGLEARPSGWEWRETGQRFGDWWREQDTAAKNTWLRSMNVRLTFDVRGGLTRTIDFGDLQEYEQHLRLGSVVERLHTGMS

SEQ ID NO: 11736 - protein, 500 aa, synthetic construct
MRALVVIRLSRVTDATTSPERQLESCQQLCAQRGWDVVGVAEDLDVSGAVDPFDRKRRPNLARWLAFEEQPFDVIVAYRVDRLARSIRYLQQLVHWAEDHKKLVVSATEAHFDTTTPFAAVVIALMGTVAQMELVAIRERSRSAAHFNIRAGKYRGSLPPWGYLPTRVDGEWRLAPDPVQRERILEVYHRVVDNHEPLHLVAHDLNRRGVLSPRDYFAQLQGREPQGRKWSATALKRSMISGAMLGYATLNGKTVRDDDGAPLVRAEPILTREQLEALRAELVKTSRAKPAVSTPSLLLRVLFCAVCGEPAYKFAGGGRKHPRYRCRSMGFPKHCGNGTVAMAEWDAFCEEQVLDLLGDAERLEKVWVAGSDSAVELAEVNAELVDLTSLIGSPAYRAGSPQREALDARIATLAARQEELGGLEARPSGWEWRGTGQRFGDWWREQDTAAKNTWLRSMNVRLTFDVRSGLTRTIDFGDLQEYEQHLRLGSVVERLHTGMS

SEQ ID NO: 11737 - protein, 500 aa, synthetic construct
MRALVVIRLSRVTDTTTSPERQLESCQQLCAQRGWDVVGVAEDLDVSGAVDPFDRKRRPNLARWLASEEQPFDVIVAYRVDRLARSIRHLQQLVHWAEDHKKLVVSATEAHFDTTTPFAAVVIALMGTVAQMELEAIRERNRSAAHFNIRAGKYRGSLPPWGYLPTRVDGEWRLAPDPVQRERILEVYHRVVDNHEPLHLVAHDLNRRGVLSPKDYFAQLQGREPQGRKWSATALKRSMTSKAMLGYATLNGKTVRDDDGAPLVRAEPILTREQLEALRAELVKTSRAKPAVSTPSLLLRVLFCAVCGEPAYKFAGGGRRHSRYRCRSMGFSKHCGNGTVAMAEWDAFCEEQVLDLLGDAERLEKVWVAGSDSAVELAEVNAELVDLTSLIGSPAYRAGSPQREALDARIAALAARQEELEGLEARPSGWEWRETGQRFGDWWREQDTAAKNTWLRSMNVRLTFDVRGGLTRTIDFGDLQEYEQHLRLGSVVGRLHTGMS

SEQ ID NO: 11738 - protein, 500 aa, synthetic construct
MRALVVIRLSRVTDATTSPERQLESCQQLCAQRGWDVVGVAEDLDASGAVDPFDRKRRPNLARWLAFEEQPFDVIVAYRVDRLTRSTRHLQQLVHWAEDHKKLVVSATEAHFDTTTPFAAVVIALMGTVAQMELEAIKERNRSAAHFNIRAGKYRGSLPPWGYLPTRVDGEWRLVPDPVQRERILEVYHRVVDNHEPLHLVAHDLNRRGVLSPKDYFAQLQGREPQGRKWSATALKRSMTSVTMLGYATLNGKTVRDDNGAPLVRAEPILTREQLEALRAELVKTSRAKPAVSTPSLLLRVLFCAVCGEPAYKFAGGGRKHPRYRCRSMGFPKHCGNGTVAMAEWDAFCEEQVLNLLGDAERLEKVWVAGTDSAVELAEVNAELVDLTSLIGSPAYRAGSPQREALDARIAALVARQEELEGLEARPSGWEWRETGQRFGDWWREQDTAAKNTWLRLMNVRLTFDVRGGLTRTIDFGDLQGYEQHLRSGSVVERLHTGMS

SEQ ID NO: 11739 - protein, 500 aa, synthetic construct
MRALVVIRLSRVTDATTSPERQLESCQQLCAQRGWDVVGVAEDLDVSGAVDPFDRKRRPNLARWLAFEEQPFDVIVAYRVDRLARSIRYLQQLVHWAEDHKKLVVSATEAHFDTTTPFAAVVIALMGTVAQMELEAIKERSRSAAHFNIRAGKYRGSLPPWGYLPARVDGEWRLVPDPVQRERILEVYHRVVDNHEPLHLVAHDLNRRGVLSPKDYFARLQGREPQGRKWSATALKRSIISEVMLGYATLNGKTVRDDDGAPLVRAEPILTREQLEAVRAELVKTSRAKPAVSTPSLLLRVLFCAVCGEPAYKFAGGGRKHPRYRCRSMGFPKHCGNGTVAMAEWDAFCEEQVLDLLGDAERLEKVWVAGSDSAVELAEVNGELVDLTSLIGSPAYRAGSPQREALDARIAALAARQEELEGLEARPSGWEWRETGQRFGDWWREQDTAAKNTWLRSMNVRLTFDVRGGLTRTIDFGDLQEYEQHLRLGSMVERLHTGMS

SEQ ID NO: 11740 - protein, 500 aa, synthetic construct
MRALVVIRLSRVTDATTSPERQLESCQQLCAQRGWDVVGVAEDLDVSGAVDPFDRKRRPNLARWLAFEEQPFDVIVAYRVDRLTRSTRHLQQLVHWAEDHKKLVVSATEAHFDTTTPFAAVVIALMGTVAQMELEAIKERSRSAAHFNIRAGKYRGSLPPWGYLPTRVDGEWRLVPDPVQRERILEVYHRVVDDHEPLHLVAHDLNRRGVLSPKDYFAQLRGREPQGRKWSATALKRSMISEAMLGYATLNGKTVRDDDGAPLVRAEPILTREQQEALRAELVKTSRAKPAVSTPSLLLRVLFCAVCGEPAYKFAGGGRKHPRYRCRSMGFPKHCGNGTVAMAEWDAFCEEQVLELLGDAERLEKVWVAGSDSAVELAEVNAELVDLTSLIGSPAYRAGSTQREALDARIAALAARQEELEGLEARPSGWVWRETGQRFGDWWREQDTAAKNTWLRSMNVRLTFDVRGGLTHTIDFGDLQEYEQHLRLGSVVERLHTGMP

SEQ ID NO: 11741 - protein, 500 aa, synthetic construct
MRALVVIRLSRVTDATTSPERQLESCQQLCAQRGWDVVGVAEDLDVSGAVGLFDRKRRPNLARWLAFEEQPFDVIVAYRVDRLTRSIRHLQQLVHWAEDHKKLVVSATEAHFDTTTPFAAVVIALMGTVAQMELEAIKERSRSAAHFNIRAGKYRGSLPPWGYLPARVDGEWRLVPDPVQRERILEVYHRVVDDHEPLHLVAHDLNRRGVLSPKDYFAQLRGREPQGRKWSATALKRSMISEAMLGYATLNGKTVRDDDGAPLVRAEPILTREQQEALRAELVKTSRAKPAVSTPSLLLRVLFCAVCGEPAYKFAGGGRKHPRYRCRSMGFPKHCGNGTVAVAEWDAFCEEQVLGLLGDAERLEKVWVAGSDSAVELAEVNAGLVDLTSLIGSPAYRAGSPQREALDARIAALAARQEELEGLEARPSGWEWRGTGQRFGDWWREQDTAAKNTWLRSMNVRLTFDVRGGLTRTIDFGDLQEYERHLRLGSVVERLHTGMS

SEQ ID NO: 11742 - protein, 500 aa, synthetic construct
MRALVVIRLSRVTEATTSPERQLESCQQLCAQRGWNVVGVAEDLDVSGAVDPFDRKRRPNLARWLAFEEQPFDVVVAYRVDRLARSIRHLQQLVHWAEDHKKLVVSATEAHFDTTTPFAAVVIALMGTVAQMELEAIKERNRSAAHFNIRAGKYRGSLPPWGYLPTRVDGEWRLVPDPVQRERILEVYHRVVDNHEPLHLVAHDLNRRGVLSPKDYFAQLQGREPQGRKWSATALKRSMISEAMLGYATLNGKTVRDDDGAPLVRAEPILTREQQGALRAELVKASRAKPAVSTPSLLLRVLFCAVCGEPAYKFTGGGRKHPRYRCRSMGFPKHCGNGTVAVAEWDTFCEEQVLNLLGDAERLEKVWVAGSDSAVELAEVNAELVDLTSLIGSLAYRAGSPQREALDARIAALAARQEELEGLEARPSGWEWRETGQRFGDWWREQDTAAKNTWLRSMNVRLTFDVRGGLTRTVDFGDLQEYEQHLRLGSVVECLHTRMS

SEQ ID NO: 11743 - protein, 500 aa, synthetic construct
MRALVVIRLSRVTDATTSPERQLESCQQLCAQRGWDVVGVAEDLDVSGAVDPFDRKRRPNLARWLAFEEQPFDVIVAYRVDRLARSVRHLQQLVRWAEDHKKLVVSATEAHFDTTTPFAAVVIALMGTVAQMELEAIKERNRSAAHFNIRAGKYRGSLPPWGYLPTRVDGEWRLVPDPVQRERILEVYHRVVDNHEPLHLVAHDLNRRGVLSPKDYFAQLQGREPQGRKWSATALKRSMISEAMLGYATLNGKTVRDDDGAPLVRAEPILTREQQEALRAELVKTSRTKPAVSTPSLLLRVLFCAVCGEPAYKFSGGGRKHPRYRCRSMGYPKHCGNGTVAMAEWDAFCEEQVLDLLGDAERLEKVWVAGSDSAVELAEVNAELVDLTSLIGSPAYRTGSPQREALDARIAALAARQEELEGLEARPSGWEWRETGQRFGDWWREQDTATKNTWLRSMNVRLTFDVRGGLTRTIDFGDLQEYEQHLRLGSVVERLHTGAS

SEQ ID NO: 11744 - protein, 500 aa, synthetic construct
MRALVVIRLSRVTDATTSPERQLESCQQLCAQRGWDVVGVAEDLDVSGAVDPFDRKRRPNLARWLAFEEQPFDVIVAYRVDRLTRSTRHLQQLVHWAEDHKKLVVSATEAHFDTTTPFAAVVIALMGTVAQMELEAIKERSRSAAHFNIRAGKYRGSLPPWGYLPTRVDGEWRLVPDPVQRERILEVYHRVVDDHEPLHLVAHDLNRLGVLSPKDYFAQLQGREPQGRKWSATALKRSMISEAMLGYATLNGKTVRDDDGAPLVRAEPILTREQQEALRAELVKTSRAKPAVSTPSLLLRVLFCAVCGEPAYKFAGGGRKHPRYRCRSMGFPKHCGNGTVAMAEWDAFCEEQVLGLLGDAERLEKVWVAGSDSAVELAEVNTELVDLTSLIGSPAYRAGSPQREALDARIAALAARQEELEGLEARPSGWEWRETGQRFGDWWREQDTAAKNTWLRSMNFRLTFDVRGGLTRTIDFGDLQEYEQHLRLGSVVERLHTGMS

SEQ ID NO: 11745 - protein, 500 aa, synthetic construct
MRALVVIRLSRVTDATTSPERQLESCQQLCAQRGWDVVGVAEDLDVSGAVDPFDRKRRPNLARWLAFEEQPFDVIVAYRVDRLTRSTRHLQQLVHWAEDHKKLVVSATEAHFDTTTPFAAVVIALMGTVAQMELEAIKERSRSAAHFNIRAGKYRGSLPPWGYLPTRVDGEWRLVPDPVQRERILEVYHRVVDNHEPLHLVAHDLNRRGVLSPKDYFAQLQGREPQGRKWSATALKRSMISGAMLGYATLNGRTVRDDDGAPLVRAEPILTREQLEALRAELVKTSRAKPAVSTPSLLLRVLFCAVCGEPAYKFAGGGRKHPRYRCRSMGFPKHCGNGTVAMAEWDAFCEEQVLELLGDAERLEKVWVAGSDSAVELAEVNAELVDLTSLIGSPAYRAGSSQREALDARIAALAARQEELEGLEARPSGWEWRETGQRFGDWWREQDTAAKNTWLRSMNVRLTFDVRGGLTRTIDFGDLQEYEQHLRLGSVVERLHTGMS

SEQ ID NO: 11746 - protein, 500 aa, synthetic construct
MRALVVIRLSRVTDATTSPERQLESCQQLCAQRGWDVVGVAEDLDVSGAVDPFDRKRRPNLARWLAFEEQPFDVIVAYRVDRLTRSVRHLQQLVHWAEDHKKLVVSATEAHFDTTTPFAAVIIALMGTVAQMELEAIKERSRSAAHFNIRAGKYRGSLPPWGYLPARVDGEWRLVPDPVQRERILEVYHRVVDNHEPLHLVAHDLNRRGVLSPKDYFAQLRGREPQGRKWSATALKRSMISVAMLGYATLCGKTVRDDDGAPLVRAEPVLTREQLEALRAELAKTSRAKPAVSTPSLLLRVLFCAVCGEPAYKFAGGGRKHPRYRCRSMGFPKHCGNGTVAMAEWDAFCEEQVLNLLGDAERLEKVWVAGSDSAVELAEVNKELVDLTSLIGSPAYRAGSPQREALDARIAALAARQEELEGLEARPSGWEWRGTGQRFGDWWREQDTAAKNTWLRSMNVRLTFGVRGGLTRTIDFGDLQEYEQHLRLGSVVERLHTGMS

SEQ ID NO: 11747 - protein, 500 aa, synthetic construct
MRALVVIRLSRVTDATTSPERQLESCQQLCAQRGWDVVGVAEDLDVSGAVDPFDRKRRPNLARWLAFEGQPFDVIVAYRVDRLARSIRHLQQLVHWAEDHKKLVVSATEAHFDTTTPFAAVVIALMGTVAQMELEAIKERTRSAAHFNIRAGKYRGSLPPWGYLPTRVDGEWRLAPDPVQRERILEVYHRVVDNHEPLHLVAHDLNRRGVLSPKDYFAQLRGRKPQGRKWSATALKRSMISEAMLGYATLNGKTVRNDDGAPLVRAEPILTREQLEALRAELVKTSRAKPAVSTPSLLLRVLFCAVCGEPAYKFAGGGRKHPRYRCRSMGFPKHCGNGTVATAEWDAFCEEQVLDLLGDTERLEKVWVAGSDSAIELAEVNAELVDLTGLIGSPAYRAGSPQREALDARIAALAARQEELEGLEARPSGWEWRETGQRFGDWWREQDTAAKNTWLRSMNVRLTFDVRGGLTRTIDFGDLQEYEPHLRSGSVVERLHTGMS

SEQ ID NO: 11748 - protein, 500 aa, synthetic construct
MRALVVIRLSRVTDATTSPERQLESCQQLCAQRGWDVVGVAEDLDVSGAVDPFDRKRRPNLARWLAFEEQPFDVIVAYRVDRLTRSTRHLQQLVHWAEDHKKLVVSATEAHFDTTTPFAAVVIALMGTVAQMELEAIKERSRSAAHFNIRAGKYRGSLPPWGYLPTRVDGEWRLAPDPVQRERILEVYHRVVDNHEPLHLVAHDLNRRGVLSPKDYFAQLQGREPQGRKWSATALKRSMISEAMLGYATLNGRTVRDDDGAPLVRAEPILTREQREALRAELVKTSRAKPAVSTPSLLLRVLFCAVCGEPAYKFAGGGRKHSRYRCRSMGFPKHCGNGTVAMAEWDAFCEEQVLDLLGDAERLEKVWVAGSDSAVELAEVNAELVDLTSLIGSPAYRASSPQREVLDARIAALAARQEELEGLEARPSGWEWRETGQRFGDWWREQDTAAKNAWLRSMNVRLTFDVRGGLTRTIDFGDLQEYEQHLRLGGVVERLHTGMS

SEQ ID NO: 11749 - protein, 500 aa, synthetic construct
MRALVVIRLSRVTDATTSPERQLESCQQLCAQRGWDVVGVAEDLDVSGAVDPFDPKRRPNLARWLAFEEQPFDVIVTYRVDRLTRSTRHLQQLVHWADDHKKLVVSATEAHFDTTTPFAAVVIALMGTVAQMELEAIKERSRSAAHFNIRAGKYRGSLPPWGYLPARVDGVWRLVPDPVQRERILEVYHRVVDHHEPLHLVAHDLNRRGVLSPKDYFAQLRGREPQGRKWSATALKRSMTSEAMLGYATLNGKTVRDDDGAPLVRAEPILTRGQLEALRAELVRTSRAKPAVSTPSLLLRVLFCAVCGEPAYKFAGGGRKHPRYRCRSMGFPKHCGNGTVAMAEWDAFCEEQVLDLLGDAERLEKVWVAGSDSAVELAEVNAELVDLTSLIGSPAYRAGSPQREALDARIAALAARQEELGGLEARPSGWEWRETGQRFGDWWREQDTAAKNTWLRSMNVRLTFDVRGGQTRTIDFGDLQEYEQHLRLGSVVERLHTGMS

SEQ ID NO: 11750 - protein, 500 aa, synthetic construct
MRALVVIRLSRVTDATTSPERQLESCQQLCAQRGWDVVGVAEDLDVSGAVDPFDRKRRPNLARWLAFEERPFDVIVVYRVDRLTRSIRHLQQLVHWAEDHKKLVVSATEAHFDTTTPFAAVVIALMGTVAQMELEAIKERSRSAAHFNIRAGKYRGSLPPWGYLPARVDGEWRLVPDPVQRERILEVYHRVVDDHEPLHLVAHDLNRRGVLSPKDYFAQLRGREPQGRKWSATALKRSMISEAMLGYATLNGKTVRDDDGAPLVRAEPILTREQQEALRAELVKTSRAKPAVSTPSLLLRVLFCAVCGEPAYKFAGGGRKHPRYRCRSMGFPKHCGNGTVAMAEWDAFCEEQVLDLLGDTERLEKVWVAGSDSAAELAEVNAELVDLTSLIGSPAYRAGSPQREALDARIAALTARQEELEGLEARPSGWEWRGTGQRFGDWWHEQDTAAKNTWLRSMNVRLTFDVRGGLTRTVDFGDLQEYEQHLRLGSAVERLHTGMS

SEQ ID NO: 11751 - protein, 500 aa, synthetic construct
MRALVVIRLSRVTDATTSPERQLESCQQLCAQRGWDVVGVAEDLDVSGAVDPFDRKRRPNLARWLAFEEQPFDAIVAYRVDRLTRSIRHLQQLVHWAEDHKKLVVSATEAHFDTTTPFAAVVIALMGTVAQMELEAIKERNRSAAHFNIRAGKYRGSLPPWGYLPTRVDGEWRLVPDPVQRERILEVYRRVVVNHEPLHLVAHDLNRRGVLSPRDYFAQLQGREPQGRKWSTTALKRSMISEAMLGYATLNGKIVRNDDGAPLVRAEPILTRGQLEALRAELVKTSRAKPAVSTPSLLLRVLFCAVCGEPAYKFAGGGRKHPRYRCRSMGFPKHCGNGTVAMAEWDAFCEEQVLDLLGDAERLEKVWVAGSDSAVELAEVSAELVDLTSLIGSPAYRAGSPQREALDARIAALAARQEELEGSEARPSGWEWRETGQRFEDWWHEQDTAAKNTWLRSMNVRLTFDVRGGLTHTIDFGELQEYEQHLRSGSVVERSHTGMS

SEQ ID NO: 11752 - protein, 500 aa, synthetic construct
MSALVVIRLSRVTDATTSPERQLESCQQLCAQRGWDVVGVAEDLDVSGAVDPFDRKRRPNLARWLAFEEQPFDVIVAYRVDRLTRSVRHLQQLVHWAEDHKKLVVSATEAHFDTTMPFAAVVIALMGTVAQMELEAIKERSRSAAHFNIRAGKYRGSLPPWGYLPARVDGEWRLVPDPVQRERILEVYHRVVDNHEPLHLVAHDLNRRGVLSPKDYFAQLRGREPQGRKWSATALKRSMTSEAMLGYATLNGKTVRGDDGAPLVRAEPILTREQLEALRTELVKTSRAKPAVSTPSLLLRVLFCAVCGEPAYKFAGGGRKHSRYRCRSMGFPKHCGNGTVAMAEWDAFCEEQVLDLLGDAERLEKVWVAGSDSAVELAEVNAELVDLTSLIGSPAYRAGSPQREALDARIAALAARQEELEGLEARPSGWEWRETGQRFGDWWREQDTAAKNTWLRSMNVRLTFDVRGGLTRSIDFGDLQVYEQHLRLGSVVERLHTGMS

SEQ ID NO: 11753 - protein, 500 aa, synthetic construct
MRALVVIRLSRDTDATTSPERQLESCQQLCAQRGWDVVGVAEDLDVSGAVDPFDRKRRPNLARWLAFEERPFDVIVAYRVDRLTRSTRHLQQLVHWADDHKKLVVSATEAHFDTTTPFAAVVIALMGTVAQMELEAIKERSRSAAHFNIRAGKYRGSLPPWGYLPARVDGEWRLAPDPVQRERILEVYHRVVDNHEPLHLVAHDLNRRGVLSPKDYFAQLRGREPQGRKWSATALKRSMTSEAMLGYATLNGRTVRDDDGAPLVRAEPILTREQLEALRAELVKTSRAKPAVSTPSLLLRVLFCAVCGEPAYKFAGGGRKHPRYRCRSMGFPKHCGNGTVAMAEWDAFCEEQVLDLLGDAERLEKVWVAGSDSAVELAEVNAELVDLTSLIGSPAYRAGSPQREALDARIAALTARQEELEGLEARPSGWEWRGTGQRFGDWWHEQDTAAKNTWLRSMNVRLTFDVRGGLTRTIDFGDLQEYEQRLRLGSLVERLHTGMS

SEQ ID NO: 11754 - protein, 500 aa, synthetic construct
MRALVVIRLSRVTDTTTSPERQLESCQQLCAQRGWDVVGVAEDLDVSGAVDPFDRKRRPNLARWLAFEEQPFDVIVAYRVDRLTRSIRHLQQLVHWAEDHKKLVVSATEAHFDMTTPFAAVVIALMGTVAQMELEAIKERNRSAAHFNIRAGKYRGSLPPWGYLPTRVDGEWRLAPDPVQRERILEVYRRVVVNHEPLHLVAHDLNRRGVLSPKDYFAQLQGREPQGRKWSATALKRSMISEAMLGYATLNGKTVRDGDGAPLVRAEPILTREQLEALRAELVKTSRAKPAVSTPSLLLRVLFCAVCGEPAYKFAGGGRKHPRYRCRSMGFPKHCGNGTVAMAEWDAFCEEQVLGLLGDAERLEKVWVAGSDSAVELAEVNAELVDLTSLIGSPAYRADSPQRDALDARIAALAARQEELEGLEARPSGWEWRETGQRFRDWWREQDIAAKNTWLRSMNVRLTFDVRGGLTRTIDFGDLQEYEQHLRLGSVVERLHTGMS

SEQ ID NO: 11755 - protein, 500 aa, synthetic construct
MRALVVIRLSRVTDATTSPERQLESCQQLCAQRGWDVVGAAEDLDVSGAVDPFDRKRRPNLARWLAFEERPFDVIVAYRVDRLTRSIRHLQQLVHWAEDHKKLVVSATEAHFDTTTPFAAVVIALMGTVAQMELEAIKERNRSAAHFNIRAGKYRGSLPPWGYLPARVDGVWRLVPDPVQRERILEVYHRVVDNHEPLHLVAHDLNRRGVLSPRDYFAQLRGREPQGRKWSATALKRSMVSEAMLGYATLNGKTVRGDDGAPLVRAEPILTREQLEALRAELVKTSRAKPAVSTPSLLLRVLFCAVCGEPAYKFAGGGRKHPRYRCRSMGFPKHCGNGTVAMAEWDAFCEEQVLDLLGDAERLEKVWVAGSDSAVELAEVNAELVDLTSLIGSPAYRAGSPQREALDARIAALAARQEELEGLEARPSGWEWRETGQRFGDWWREQDTAAKNAWLRSMNVRLTFDVRGGLTRTIDFGDLQEYEQHLRLGSVAERLHTGMS

SEQ ID NO: 11756 - protein, 500 aa, synthetic construct
MRALVVIRLSRVTDATTSPERQLESCQQLCAQRGWDVVGVAEDLDVSGAVDPFDRKRRPNLARWLAFEEQPFDVIVAYRVDRLTRSIRHLQQLVHWAEDHKKLVVSATEAHFDTTTPFAAVVIALMGTVAQMELEAIKERNRSAAHFNIRAGKYRGSLPPWGYLPTRVDGEWRLVPDPVQRERILEVYHRVVDNHEPLHLVAHDLNRRGVLSPRDYFAQLRGREPQGRKWSATALKRSMISEAMLGYATLNGKTVRDDGGAPLVRAEPILTCEQLGALRAELVKTSRAKPAVSTPSLLLRVLFCAVCGEPAYKFAGGGRKHPRYRCRSMGFPKHCGNGTVAMAQWDAFCEEQVLNLLGDAERLEKVWVAGSDFAVELAEVNAELVDLTSLIGSPAYRAGSPQREALDARIAALAARQEELEGLEARPSGWEWRETGQRFGDWWREQDTAAKNTWLRSMNVRLTFDVRGELARTIDFGDLQEYEQHLRLGSVVERLHTGMS

SEQ ID NO: 11757 - protein, 500 aa, synthetic construct
MRALVVIRLSRVTDATTSPERQLESCQQLCAQRGWDVVGVAEDLDVSGAVDLFDRKRRPNLARWLAFEEQPFDVIVAYRVDRLARSIRHLQQLVHWAEDHKKLVVSATEAHFDTTTPFAAVVIALMGTVAQMELEAIKERNRSAAHFNIRAGKYRGSLPPWGYLPTRVDGEWRLAPDPVQRERILEVYHRVVDNHEPLHLVAHDLNRRGVLSPRDYFAQLRGREPQGRKWSATALKRSMISEAMLGYATLNGKTVRDDDGAPLVRAEPILTREQLEALRAELAKTSRAKPAVSTPSLLLRVLFCAVCGEPAYKFAGGGRKHPRYRCRSMGFPKHCGNGTVAMAEWDAFCEEQVLNLLGDAERLEKVWVAGSDSAVELAEVNAGLVDLTSLISSPAYRAGSPQREALDARIAALAARQEELEGLEARPSGWEWRGTGQRFGDWWREQNTAARNTWLRSMNVRLTFDVRGGLTRTIDFGDLQEYEQHLRLGSVAKRLHTGMS

SEQ ID NO: 11758 - protein, 500 aa, synthetic construct
MRALVVIRLSRVTDATTSPERQLESCQQLCTQRGWDVVGVAEDLDVSGAVDPFDRKRRPNLARWLAFEEQPFDVIVAYRVDRLTRSVRHLQQLVHWAADHKKLVVSATEAHFDTTTPFAAVVIALMGTVAQMELEAIKERSRSAAHFNIRAGKYRGSLPPWGYLPARVDGEWRLVPDPVQRERILEVYHRVVDNHEPLHLVAHDLNRRGVLSPKDYFAQLRGREPQGRKWSATALKRSMISVAMLGYATLCGKTVRDDDGAPLVRAEPILTREQLEALRAELVKTSRAKPAVSTPSLLLRVLFCAVCGEPAYKFAGGGRKHPRYRCRSMGFPKHCGNGTVAMAEWDAFCEEQVLNLLGDAERLEKVWVAGSDSAVELAEVNAELVDLTSLIGSPAYRAGSPQREALDARIAALAARQEELEGLETRPSGWEWRETGQRFGDWWREQDTAAKNTWLRSMNVRLTFDVRGGLTRTIDFGDLQEYGQHLRLGSVVERLRTGMT

SEQ ID NO: 11759 - protein, 500 aa, synthetic construct
MRALVVIRLSRVTDATTSPERQLESCQQLCAQRGWVVVGVAEDLDVSGAVDPFDRKRRPNLARWLAFEEQPFDVIVAYRVDRLTRSTRHLQQLVHWAEDHKKLVVSATEAHFDTTTPFAAVVIALMGTVAQMELEAIKERSRSAAHFNIRAGKYRGSLPPWGYLPTRVDGEWRLAPDPVQRERILEVYHRVVDNHEPLHLVAHDLNRRGVLSPKDYFAQLRGREPQGRKWSATALKRSMISEAMLGYATLNGKTVRDDDGAPLVRAEPILTREQLEALRAELVKTSRAKPAVSTPSLLLRVLFCAVCGEPAYKFAGGERKHPRYRCRSMGFPKHCGNGTVAMAEWDAFCEEQVLGLLGDAERLEKVWVAGSDSAVELAEVNAELVGLTSLIGSPAYRAGSPQREALDARIAALAARQEELEGLEARPSGWEWRETGQRFGDWWREQDTAAKNTWLRSMNVRLTFDVRGGLTRTIDFGDLQEYEQRLRLGSVVERLHTGMS

SEQ ID NO: 11760 - protein, 500 aa, synthetic construct
MRALVVIRLSRVTDATTSPERQLESCQQLCAQRGWDVVGVAEDLDVSGAVDPFDRKRRPNLARWLAFEEQPFDVIVVYRVDRLTRSTRHLQQLVHWAEDHKKLVVSATEAHFDTTTPFAAVVIALMGTVAQMELEAIKERNRSAAHFNIRAGKYRGSLPPWGYLPTRVDGEWRLVPDPVQRERILEVYHRVVDNHEPLHLVAHDLNRRGVLSPRDYFAQLQGREPQGRKWSATALKRSMISVAMLGYATLNGKTVRDDDGAPLVRAEPILTREQLEALRAELVKTSRAKPAVSTPSLLLRVLFCAVCGEPAYKFAGGGRKHPRYRCRSMGFPKHCGNGTVAMAEWDAFCEEQVLDLLGDAERLEKVWVAGSDSAVELAEVNAELVDLTSSIGSPAYRAGSPQREALDARIAALAARQGELEGLEARPSGWEWRETGQRFGDWWREQDTAAKNTWLRSMNVRLTFDVRGGLTRTIDFGDLREYEQHLRLGSVVERLHTGMS

SEQ ID NO: 11761 - protein, 500 aa, synthetic construct
MRALVVIRLSRVTETTTSPERQLESCQQLCAQRGWDVVGVAEDLDVSGAVDLFDRKRRPNLARWLAFEEQPFDVIVAYRVDRLARSIRHLQQLVHWAEDHKKLVVSATEAHFDTTTPFAAVVIALMGTVAQMELEAIKERCRSAAHFNIRAGKYRGSLPPWGYLPTRVDGEWRLVPDPVQRERILEVYHRVVDDHEPLHLVAHDLNRRGVLSPKDYFAQLQGREPQGRKWSATALKRSMISVAMLGYATLNGKTVRDDDGAPLVRAEPILTREQLEALRAELVKTSRAKPAVSTPSLLLRVLFCAVCGEPAYKFAGGGRKHPRYRCRSMGFPKHCGNGTVAMAEWDAFCEKQVLDLLGDAERLERVWVAGSDSAVELAEVNAELVDLTSLIGSPAYRAGSPQREALDARIAALAARQEELEGLEARPSGWEWRETGQRFGDWWREQDTAAKNAWLRSMNVRLTFDVRGGLTRTIDFGDLQEYEQHLHLGSVVERLHTGMS

SEQ ID NO: 11762 - protein, 500 aa, synthetic construct
MRAVVAIRLSRVTDATTSPERQLESCQQLCAQRGWDIVGVAEDLDVSGAVDPFDRKRRPNLARWLAFEEQPFDVIVAYRVDRLTRSIRHLQQLVHWAEDHKKLVVSATEAHFDTTTPFAAVVIALMGTVAQMELEAIKERNRSAAHFNIRAGKYRGSLPPWGYLPTRVDGEWRLVPDPVQRERILEVYHRVVDNHEPLHLVAHDLNRRGVLSPKDYFAQLRGREPQGRKWSATALKRSMTSEAMLGYATLNGKTVRDDDGAPLVRAEPILTREQLEALRAELVKTSRAKPAVSTPSLLLRVLFCAVCGEPAYKFAGGGRKHPRYRCRSMGFPKHCGNGTVATAEWDAFCEEQVLDLLGDAERLEKVWAAGSDSAVELAEVSAELVDLTSLIGSPAYRAGSPQREALDARIAALAARQEELEGLEARPSGWEWRETGQRFGDWWREQDTAAKNTWLRSMNVRLTFDVRGGLTRTIDFGDLQEYEQHLRLGSVVERLHTGMS

SEQ ID NO: 11763 - protein, 500 aa, synthetic construct
MRALVVIRLSRVTDATTSPERQLESCQQLCAQRGWDIVGVAEDLDVSGAVDPFDRKRRPNLARWLAFEEQPFDVIVAYRVDRLARSIRHLQQLVHWAEDHKKLIVSATEAHFDTTTPFAAVVIALMGTVAQMELEAIKERSRSAAHFNIRAGKYRGSLPPWGYLPARVDGEWRLVPDPVQRERILEVYHRVVDDHEPLHLVAHDLNRRGVLSPKDYFAQLRGREPQGRKWSATALKRSMISEAMLGYATLNGKTVRDDDGAPLVRAEPILTREQQEALRAELVKTSRAKPAVSTPSLLLRVLFCAVCGEPAYKFAGGGRRHPRYRCRSMGFPEHCGNGTVAMAEWDAFCEEQVLDLLGDVERPEKVWVAGSDSAVELAEVNAELVDLTSLIGSPAYRAGSPQREALNARIAALAARQEELEGLEARPSGWEWRETGQRFGDWWREQDTAAKNTWLRSMNVRLTFDVRGGLTRTIDFGDLQEYEQHLRLGSVVERLHTGMS

SEQ ID NO: 11764 - protein, 500 aa, synthetic construct
MRALVVIRLSRVTDATTSPERQLESCQQLCAQRGWDVAGVAEDLDVSGAVDPFDRKRRPNLARWLAFEEQPFDVIVAYRVDRLARSIRHLQQLVHWAEDHKKLVVSATEAHFDTTTPFAAVVIALMGTVAQMELEAIRERNRSAAHFNIRAGKYRGSLPPWGYLPARVDGEWRLAPDPVQRERILEVYHRVVDNHEPLHLVAHDLNRRGVLSPKDYFAQLQGREPQGRKWSATALKRSMISEAMLGYATLNGKTVRDDDGAPLVRAEPILTREQLEALRAELVKTSRAKPAVSTPSLLLRVLFCAVCGEPAYKFAGGGRKHPRYRCRSMGFPKHCGNGTVAMAEWDAFCEEQVLDLLGDAERLEKVWVAGPDSAVELAEVNAELVDLTRLIGSPAYRAGSPQREALDARIAALAARQEELEGLEARPSGWEWRETGQRFGDWWREQDTAAKNTWLRSMNVRLTFDVRGGLTRTIDFGDLQEYEQHLRLGSVVERLHAGMS

SEQ ID NO: 11765 - protein, 500 aa, synthetic construct
MRALVVIRLSRVTDATTSPERQLESCQQLCAQRGWDVVGVAEDLDVSGAVDPFDRKRRPNLARWLTFEEQPFDVIVAYRVDRLTRSVRHLQQLVHWAEDHKKLVVSATEAHFDTTTPFAAVVIALMGTVAQMELEAIKERSRSAAHFNIRAGKYRGSLPPWGYLPARVDGEWRLVPDPVQRERILEVYHRVVDNHEPLHLVAHDLNRRGVLSPKDYFAQLRGREPRGREWSATALKRSMTSEAMLGYATLNGKIVRGDDGAPLVRAEPILTREQLEALRAELIKTSRAKPAVSTPSLLLRVLFCAVCGEPAYKFAGGGRKHPRYRCRSMGFPKHCGNGTVAMAEWDAFCEEQVLGLLGDAERLEKVWVAGSDSAVELAEVNAELVDLTSLIGSPAYRAGSPQREALDARIAALAARQEELEGLEARPSGWEWRETGQRFGDWWREQDTAAKNTWLRSMNVRLTFDVRGGLTRTIDFGDLQEYVQHLRLGSVVGRLHTGMS

SEQ ID NO: 11766 - protein, 500 aa, synthetic construct
MRALVVIRLSRVTDATTSPERQLESCQQLCAQRGWDVVGVAEDLDVSGAVDPFDRKRRPNLARWLAFEEQPFDVIVAYRVDRLTRSTRHLQQLVRWAEDHKKLVVSATEAHFDTTTPFAAVVIALMGTVAQMELEAMKERNRSAAHFNIRAGKYRGSLPPWGYLPARVDGEWRLVPDPVQRERILEVYHRVVDNHEPLHWVAHDLNRRGVLSPKDYFAQLQGREPQGRKWSATALKRSMISEAMLGYATLNGEIVRDDDGAPLVRAEPILTREQLEALRAELVKTSRAKPAVSTPSLLLRVLFCAVCGEPAYKFAGGGRKHPRYRCRSMGFPKHCGNGTVAMAEWDAFCEEQVLDLLGDVERLEKVWVAGSDSAVELAGVNAELVDLTSLIGSPAYRAGSPQREALDARIAALAARQEELEGLEARPSGWEWRETGQRFGDWWREQDTAAKNSWLRSMNVRLTFDVRGGLTRTIDFGDLREYEQHLRLGSVAERLHTGMS

SEQ ID NO: 11767 - protein, 500 aa, synthetic construct
MRALVVIRLSRVTDATTSPERQLESCQQLCAQRGWDVVGVAEDLDVSGAVDPFDRERRPNLARWLAFEEQPFDVIVAYRVDRLTRSTRHLQQLVHWAEDHKKLVVSATEAHFDTTTPFAAVVIALMGTVAQMELEAIKERNRSAAHFNIRAGKYRGSLPPWGYLPTRVDGEWRLAPDPVQRARILEVYHRVVDNHEPLHLVAHDLNRRGVLSPKDYFAQLQGREPQGRKWSATALKRSMISVAMLGYATLNGKTVRDDDGAPLVRAEPILTREQLEALRAELVKTSRAKPAVSTPSLLLRVLFCAVCGEPAYKFAGGGRKHPRYRCRSMGFPKHCGNGTVAMAEWDTFCEEQVLGLLGDVERLEKVWVAGSDSAVKLAEVNAELVDLTSLIGSPAYRAGSPQREALDARIAALAARQEELEGLEARPSGWEWRGTGQRFGDWWRKQDTAAKNTWLRSMNVRLTFDVRGGLSRTIDFGDLQEYEQHLRLGSVVERLHTGMS

SEQ ID NO: 11768 - protein, 500 aa, synthetic construct
MRALVVIRLSRVTDATTSPERQLESCQQLCAQRGWDVVGVAEDLDVSGAVDPFDRKRRPNLARWLAFEEQPFDVIVAYRVDRLTRSTRHLQQLVHWAEDHRKLVVSATEAHFDTTTPFAAVVIALMGTVAQMELEAIKERSRSAAHFNIRAGKYRGSLPPWGYLPTRVDGEWRLAPDPVQRERILEVYHRVVDNHEPLYLVAHDLNRRGVLSPKDYFAQLRGREPQGREWSATALKRSMISKAMLGYATLNGKTVRGDDGAPLVRAEPILTREQQEALRAELVKTSRAKPAASTPSLLLRVLFCAVCGEPAYKFAGGGRKHPRYRCRSMGFPKHCGNGTVAMAEWDAFCEEQVLDLLGDVERLEKVWVAGSDSAVELAEVNAELVDLTSLIGSPAYRAGSPQREALDARIAALTARQEELEGLEARPSGWEWRETGQRFGDWWREQDTAAKNTWLRSMNVRLTFDVRGGLTRTIDFGDLQEYEQHLRLGSVVERLHAGMS

SEQ ID NO: 11769 - protein, 500 aa, synthetic construct
MRALVVIRLSRVTDATTSPERQLESCQQLCAQRGWDVVGVAEDLDVSGAVDPFNRKRRPNLARWLAFEEQPFDVIVAYRVDRLARSIRYLQQLVHWAEDHKKLVVSATEAHFDTTTPFAAVVIALMGTVAQMELEAIKERSRSAAHFNIRAGKYRGSLPPWGYLPTRVDGEWRLAPDPVQRERILEVYRRVVDNHEPLHLVAHDLNRRGVLSPKDYFAQLQGREPQGRKWSATALKRSMISEAMLGYATLNGKIVRDDDGAPLVRAEPILTRGQLEALRAELVKTSRAKPAVSTPSLLLRVLFCAVCGEPAYKFAGGGRKHPRYRCRSMGFPKHCGNGTVAMAEWDTFCEEQVLDLLGDAERLEKVWVAGSDSAVELAEVNAELVDLTSLIGSPAYRAGSPQREALDARIAALVARQEELEGLEARPSGWEWRETGQRFGDWWREQDTAAKNTWLRSMNVRLTFDVRGGLTRTIDFGDLQEYEQHLRLGSVVERLHTGMS

SEQ ID NO: 11770 - protein, 500 aa, synthetic construct
MRAIVVIRLSRVTDATTSPERQLESCQQLCARRGWDVVGVAEDLDVSGAVDPFDRKRRPNLARWLAFEEQPFDAIVAYRVDRLTRSIRHLQQLVHWAEDHKKLVVSATEAHFDTTTPFAAVAIALMGTVAQMELEAIRERNRSAAHFNIRAGKYRGSLPPWGYLPTRVDGEWRLVPDPVQRERILEVYHRVVDDHEPLHLVAHDLNRRGVLSPRDYFAQLRGREPLGRKWSATALKRSMISEAMLGHATLNGKTVRDDDGAPLVRAEPILTRGQLEALRAELVKTSRAKPAVSTPSLLLRVLFCAVCGEPAYKFAGGGRKHPRYRCRSMGFPKHCGNGTVAMAVWDAFCEEQVLDLLGDAERLEKVWVAGSDSAVELAEVNAELVDLTSLIGSPAYRAGSPQREALDARIAALAARQEELEGLEARPSGWEWRETGQRFGDWWREQDTAAKNTWLRSMNVRLTFDVRGGLTRTIDFGDLQEYEQHLRSGSVVERLHTGMS

SEQ ID NO: 11771 - protein, 500 aa, synthetic construct
MRALAVIRLSRVTDATTSPERQLESCQQLCAQRGWDVVGVAEDLDVSGAVDPFDRKRRPNLARWLAFEEQPFDAIVAYRVDRLTRSIRHLQQLVHWAEDHKKLVVSATEAHFDTTTPFAAVVIALMGTVAQMELEAIKERNRSAAHFNIRAGKYRGSLPPWGYLPTRVDGEWRLAPDPVQRERILEVYHRVVDNHEPLHLVAHDLNRRGVLSPKDYFAQLRGREPQGRKWSATALKRSMTSEAMLGYATLNGKTVRDDDGAPLVRAEPILTREQLEALRAELVKTSRAKPAVSTPSLLLRVLFCAVCGEPAYKFAGGGRKHPRYRCRSMGFPKRCGNGTVAMAEWDGFCEEQVLDLLGDAERLEKVWVAGSDFAVELAEVNAELVDLTSLISSPAYRAGSPQRGALDARIAALAARQEELEGLEARPSGWEWRETGQRFGDWWREQDTAAKNTWLRSMNVRLTFDVRGGLTRTIDFGDLQEYEQQLRLGSVVERLHTGMS

SEQ ID NO: 11772 - protein, 500 aa, synthetic construct
MRALVVIRLSRVTDATTSPERQLESCQQLCAQRGWDVVGVAEDLDVSGAVDPFDRKRRPSLARWLAFEEQPFDAIVAYRVDRLTRSIRHLQQLVHWAEDHKKLVVSATEAHFDTTTPFAAVVIALMGTVAQMELEAIKERNRSAAHFNIRAGKYRGSLPPWGYLPARVDGEWRLVPDPVQRERILEVYHRVVDKHEPLHLVAHDLNRRGVLSPRDYFAQLQGREPQGRKWSATALKRSMISEAMLGYATLNGKTVRGDDGAPLVRAEPILTREQLGALRAELVKTSRAKPAVSTPSLLLRVLFCAVCGEPAYKFAGGGRKHPRYRCRSMGFLKHCGNGTVTMAEWDAFCEEQVLDLLGDAERLEKVWVAGSDSAVELAEVSAELVDLTSLIGSPAYRAGSPQREALDARIAALAARQEKLEGLGARPSGWEWRETGQRFGDWWREQDTAAKNTWLRSMNVRLTFDVRGGLTRTIDFGDLQEYEQHLRLGSVVERLHAGMS

SEQ ID NO: 11773 - protein, 500 aa, synthetic construct
MRALVVIRLSRVTDATTSPERQLESCQQLCAQRGWDVVGVAEDLDVSGAVDPFDRKRRPNLACWLAFEEQPFDVIVAYRVDRLTRSIRHLQQLVHWAEDHKKLVVSATEAHFDTTTPFAAVVIALMGTVAQMELEAIKERSRSAAHFNIRAGKYRGSLPPWGYLPTRVDGEWRLAPDPVQRERILEVYHRVVDNHEPLHLVAHDLNRRGVLSPKDYFAQLRGREPQGRKWSATALKRSMISEAMLGYATLNGKTVRDDDGAPLVRAEPILTREQLEALRAELVKTSRAMPAVSTPSLLLRVLFCAVCGEPAYKFAGGGRKHSRYRCRSMGFPKHCGNGTVAMAEWDAFCEEQVLDLLGDAERLEKVWVAGSDSAVELAEVNAELVDLTSLIGSPAYRAGSPQREALDARIAALAARQEELEGLEARPSGWEWRETGQRFGDWWREQDTAAKNTWLRSMNVRLTFDVRGGLTRSIDFGDLQVYEQHLRLGSVVERLHTGMS

SEQ ID NO: 11774 - protein, 500 aa, synthetic construct
MRALVVIRLSRVTDATTSPERQLESCQQLCAQRGWDVVGVAEDLDVSGAVDPFDRKRRPNLARWLAFEEQPFDVIVAYRVDRLTRSTRHLQQLVHWAEDHKKLVVSATEAHFDTTTPFAAVVIALMGTVAQMELEAIKERSRSAAHFNIRAGKYRGSLPPWGYLPTRVDGEWRLVPDPVQRERILEVYRRVVDNHEPLHLVAHDLNRRGVLSPKDNFAQLRGREPQGRKWSATALKRSMTSEAMLGYATLNGKTVRGDDGAPLVRAEPILTRGQLEALRAELVKTSRAKPAVSTPSLLLRVLFCAVCGEPAYKFAGGGRKHPRYRCRSMGFPKHCGNGTVAMAGWDAFCEEQVLNLLGDAERLEKVWVAGSDSAVELAEVNAELVDLTSLIGSPAYRAGSPQREALDARIATLVARQEELEGLEARPSGWEWRETGQRFGDWWREQDTAAKNTWLRSMNVRLTFDVRGGLTRTIDFGDLQEYKQHLCLGSVVERLHTGMS

SEQ ID NO: 11775 - protein, 500 aa, synthetic construct
MRALVVIRLSRVTDATTSPERQLESCQQLCAQRGWDVVGVAEDLDVSGAVDPFDRKRRPNLARWLAFEEQPFDAIVAYRVDRLTRSIRHLQQLVHWAEDHKKLVVSATEAHFDMTTPFAAVVIALMGTVAQMELEAIKERSRSAAHFNIRAGKYRGSLPPWGYLPTRVDGEWRLAPDPVQRERILEVYHRVVDNHEPLHLVAHDLNRRGVLSPKDYFAQLQGREPQGRKWSATALKRSMISVTMLGYATLNGKTVRDDDGAPLVRAEPILTREQQEALRAELVKTSRAKPAVSTPSLLLRVLFCAVCGEPAYKFAGGGRKHPRYRCRSMEFPKHCGNGTVAMAEWDAFCEEQVLGLLGDVERLEKIWVAGSDSAVKLAEVNAELVDLTSLIGSPAYRAGSPQREALDARIAALAARQEELEGLEARPSGWEWRGTGQRFGDWWREQDTAAKNTWLRSMNVRLTFDVRGGLTRTIDFGDLQEYEQHLRLGSVVERLHTGMS

SEQ ID NO: 11776 - protein, 500 aa, synthetic construct
MRALVVIRLSRVTEATTSPERQLESCQQLCAQRGWDVVGVAEDLDVSGAADPFDRKRRPNLARWLAFEEQPFDVIVAYRVDRLARSIRHLQQLVHWAEDHKKLVVSATEAHFDTTTPFAAVVIALMGTVAQMELEAIKERSRSAAHFNIRAGKYRGSLPPWGYLPTRVDGEWRLVPDPVQRERILEVYHRVVDNHEPLHLVAHDLNRRGVLSPRDYFAQLRGREPQGRKWSATALKRSMISKAMLGYATLNGKTVRDDDGAPLVRAEPILTREQLEALRAELVRTSRAKPAVSTPSLLLRVLFCAVCGEPAYKFAGGGRKHPRYRCRSMGFPKHCGNGTVAMAEWDAFCEKQVLDLLGDAERLEKVWVAGSDSAVELAEVNAELVDLTSLIGSPAYRAGSPQREALDARIAALAARQEELEGLEACPSGWEWRETGQRFGDWWREQDTAAKNTWLRSMNVRLTFDVRGGLTRTIDFGDLQEYEQHLRLGSVVERLHTGMP

SEQ ID NO: 11777 - protein, 500 aa, synthetic construct
MRALVVIRLSRVTDATTSPERQLESCQQLCAQRGWDVVGVAEDLDVSGAVDPFDRKRRPNLARWLAFKEQPFDVIVAYRVDRLTRSIRHLQQLVHWAEDHKKLVVSATEAHFDMTTPFAAVVIALMGTVAQMELEAIKERSRSAAHFNIRAGKYRGSLPPWGYLPARVDGEWRLAPDPVQRERILEVYHRVVDNHEPLHLVAHDLNRRGVLSPRDYFAQLRGREPQGRKWSATALKRSMISEAMLGYATLNGKTVRDDDGAPLVRAEPILTREQLEAIRAELAKTSRAKPAVSTPSLLLRVLFCAVCGEPAYKFAGGGRKHPRYRCRSMGFPKHCGNGTVAMAEWDAFCEEQVLNLLGGAERLEKVWVAGSDSAVELAEVNAELVDLMSLIGSPAYRAGSPQREALDARIAALAARQEELEGLEARPSGWEWRETGQRFGDWWREQDTAAKNTWLRSMNVRLTFDVRGGLTRTIDFGDLQEYEQHLRLGSVVERLHTGMS

SEQ ID NO: 11778 - protein, 500 aa, synthetic construct
MRALVVIRLSRVTDATTSPERQLESCQQLCAQRGWDVVGVAEDLDVSGAVDPFDRKRRPNLARWLAFEGQPFDVIVAYRVDRLTRSTRHLQRLVHWAEDHKKLVVSATEAHFDTTTPFAAVVIALMGTVAQMELEAIKERSRSAAHFNIRAGKYRGSLPPWGYLPTRVDGEWRLAPDPVQRERILEVYHRVVDNHEPLYLVAHDLNQRGVLSPRDYFAQLQGREPQGRKWSATALKRSMVSEAMLGYATLNGKTVRDDDGAPLVRAEPILTREQLEALRAELVKTSRAKPAVSTPSLLLRVLFCAVCGEPAYKFAGGGRKHPRYRCRSMGFPKHCGNGTVAMAEWDAFCEEQVLDLLGDAERLEKVWVAGSDSAVELAEVNAELVDLTSLIGSSAYRAGSPQREALDARIAALAARQEELEGLEARPSGWEWRETGQRFGDWWREQDTAAKNTWLRSMNVRLTFDVRGGLTRTIDFGDLQEYEQHLRLGSAVERLHTGMS

SEQ ID NO: 11779 - protein, 500 aa, synthetic construct
MRALVVIRLSRVTDATTSPERQLESCQQLCAQRGWDVVGVAEDLDVSGAVDPFDRKRRPNLARWLAFEEQPFDVIVAYRVDRLTRSVRHLQQLVHWAEDHKKLVVSATEAHFDTTTPFAAVVIALMGTVAQMELEAIKERSRSAAHFNIRAGKYRGSLPPWGYLPARVDGEWRLVPDPVQRERILEVYHRVVDNHEPLHLVAHDLNRRGVLSPKDYFAQLRGRGPQGRKWSATALKRSMISVAMLGYATLCGKTVRDDDGAPLVRAEPILTREQLEALRAELVKTSRAKPAVSTPSLLLRVLFCAVCGEPAYKFAGGGRKHPRYRCRSMGFPKHCGNGTVAMAEWDAFCEERVLNLLGDAERLEKVWVAGSDSAVELAEVNKELVDLTSLISSPAYRAGSPQREALDARIAALAARQEELEGLEARPSGWEWRGTGQRFGDWWRELDTAAKNTWLRSMNVRLTFDVRDGLTRTIDFGDLQEYEQHLRLGSVVERSHTGMS

SEQ ID NO: 11780 - protein, 500 aa, synthetic construct
MRALVVIRLSRVTDATTSPERQLESCQQLCAQRGWDVVGVAEDLDVSGAVDPFDRKRRPNLARWLAFEEQPFDVIVAYRVDRLARSIRHLQQLVHWAEDHKKLVVSATEAHFDTTTPFAAVVIALMGTVAQMELEAIKERSRSAAHFNIRAGKYRGSLPPWGYLPTRVDGEWRLAPDPVQRERILEVYHRVVDNHEPLHLVAHDLNQRGVLSPRDYFAQLQGREPQGRKWSATALKRSMISEAMLGYATLNGKTVRDDDGAPLVRAEPILTREQLEALRAELVKTSRAKPAVSTPSLLLRVLFCAVCGEPAYKFAGGGRKHPRYRCRSMGFPKHCGNGTVAMAEWDAFCEEQVLDLLGDAERLEKVWVAGSDSAVELAEVNAELVDLMSLIGSPAYRAGSPQREALDARIAALAARQEELEGLEARPSGWEWRETGQRFGDWWHEQDTAAKNTWLRSMNVRLTFDVRGGLTRTIDFGDLQEYEQHLRLGSVVERLHTGMP

SEQ ID NO: 11781 - protein, 500 aa, synthetic construct
MRALVVIRLSRVTDATTSPERQLESCQQLCAQRGWDVVGVAEDLDVSGAVDPFDRKRRPNLACWLAFEEQPFDVIVAYRVDRLTRSTRHLQQLIHWAEDHKKLVVSATEAHFDTTTPFAAVVIALMGTVAQMELEAIKERNRSAAHYNIRAGKYRGSLPPWGYLPARVDGEWRLVPDPVQRERILEVYHRVVDNHEPLHLVAHDLNRRGVLSPRDYFAQLQGREPQGRKWSATALKRSMISGAMLGYATLDGKTVRDDDGAPLVRAEPILTREQLEALRAELVKTSRAKPAVSTPSLLLRVLFCAVCGEPAYKFAGGGRKHPRYRCRSMGFPKHCGNGTVAMAEWDAFCEEQVLGLLGDSERLEKVWVAGSDSAVELAEVNAELVDLTSLIGSPAYRAGSPQREALDARIAALAARQEELEGLEARPSGWEWRETGQRFGDWWREQNTAAKNTWLRSMNVRLTFDVRGGLTRTIDFGDLQEYEQHLRLGGVVERLHTGMS

SEQ ID NO: 11782 - protein, 500 aa, synthetic construct
MRALVVIRLSRVTDATTSPERQLESCQQLCAQRGWDVVGVAEDLDVSGAVDPFDRKRRPNLARWLAFEGQPFDVLVAYRVDRLARSIRHLQQLVHWAEDHKKLVVSATEAHFDTTTPFAAVVIALMGTVAQMELEAIKERSRSAAHFNIRAGKYRGSLPPWGYLPTRVDGEWRLAPDPVQRERILEVYHRVVDNHEPLHLVAHDLNRRGVLSPKDYFAQLQGREPQGRKWSATALKRSMISVAMLGYATLNGKTVRDDDGAPLVRAEPILTREQLEALRVELVKTSRAKPAVSTPSLLLRVLFCAVCGEPAYKFAGGGRKHPRYRCRSMGFPKHCGNGTVAMAEWDAFCEEQVLGLLGDVERLEKVWVAGSDSAVKLAEVNAELVDLTGLIGSPAYRAGSPQREALDARIAALAARQEELEGLEARPSGWEWRGTGQRFGDWWREQDTAAKNTWLRSMNVRLTFDVRGGLTRTIDFGDLQEYEQHLRLGSVVERLRTGMS

SEQ ID NO: 11783 - protein, 500 aa, synthetic construct
MRALVVIRLSRVTDATTSPERQLESCQQLSAQRGWDVVGVAEDLDVSGAVDPFDRKRRPNLARWLAFEEQPFDVIVAYRVDRLARSIRHLQQLVHWAEDHKKLVVSATEAHFDTTTPFAAVVIALMGTVAQMELEAIKERSRSAAHFNIRAGKYRGSLPPWGYLPTRVDGEWRLVPDPVQRERILEVYHRVVDNHEPLHLVAHDLNRRGILSPKDYFAQLRGREPQGRKWSATALKRSMISEAMLGYATLNGKTVRDDDGAPLVRAEPILTREQQEALRAELVKTSRAEPAVSTPSLLLRVLFCAVCGEPAYKFAGGGRKHPRYRCRSMGFPKHCGNGTVAMAEWDAFCEEQVLDLLGDAERLEKVWVAGSDSAVELAEVNAELVDLTSLIGSPAYRAGSPQREALDARIAALAARQEELEGVEARPSGWEWRETGQRFGDWWREQDTAAKNTWLRSMNVRLTFDVRGGLTRTIDFGDLQEYEQHLRLGSVVERLHTGTP

SEQ ID NO: 11784 - protein, 500 aa, synthetic construct
MRALVVVRLSRVTDATTSPERQLESCQQLCAQRGWDVVGVAEDLDVSGAVDPFDRKRRPNLARWLAFEEQQFDVIVAYRVDRLTRSTRHLQQLVHWAEDHKKLVVSATEAHFDTTTPFAAVVIALMGTVAQMELEAIKERNRSAAHFNIRAGKYRGSLPPWGYLPARVDGEWRLVPDPVQRERILEVYHRVVDNHEPLHLVAHDLNRRGVLSPKDYFAQLRGREPQGRKWSATALKRSMTSEAMLGYATLNGKTVRDDDGAPLVRAEPILTRGQLEALRAELVKTSRAKPAVSTPSLLLHVLFCAVCGEPAYKFTGGGRKHPRYRCRSMGFPKHCGNGTVAMAEWDAFCEEQVLDLLGDAERLEKVWVAGSDSAVELAEVNAELVDLTSLIGSPAYRAGSPQREALDARIAALAARQEELEGLEARPSGWEWRETGQRFGDWWREQDTAAKNTWLRSMNVRLTFDVRGGLTRTVDFGDLQEYEQHLRLGGVVERLHTGMS

SEQ ID NO: 11785 - protein, 500 aa, synthetic construct
MRALVVIRLSRVTDATTSPERQLESCQQLCAQRGWDVVGVAEDLDVSGAVDPFDRKRRPNLARWLAFEEQPFDVIVAYRVDRLTRSTRHLQQLVRWAEDHMKLVVSATEAHFDTTTPFAAVVIALMGTVAQMELEAIKERNRSAAHFNIRAGKYRGSLPPWGYLPTRVDGEWRLVPDPVQRERILEVYHRVVDNHEPLHLVAHDLNRRGVLSPKDYFAQLRGREPQGRKWSATALKRSMTSEAMLGYATLNGKTVRDDDGAPLVRAEPILTREQLEALRAELVKTSRAKPAVSTPSLLLRVLFCAVCGEPAYKFAGGGRKHPRYRCRSMGFPKHCGNGTVAMAEWDAFCEEQVLDLLGDAECLEKVWVAGSDSAVELAEVNAELVDLTSLIGSPAYRAGSPQREALDARIAALAARQEELEGLEARPSGWEWRETGQRFGDWWREQDTAAKNTWLRSMNVRLTFDVRGGLTRTIDFGDLQEYEQRLRLGGVVERLHTGMS

SEQ ID NO: 11786 - protein, 500 aa, synthetic construct
MRALVVVRLSRVTDATTSPERQLESCQQLCAQRGWDVVGVAEDLDVSGAVDPFDRKRRPNLARWLAFEEQPFDVIVAYRVDRLARSIRHLQQLVHWAEDHKKLVVSATEAHFDTTTPFAAVVIALMGTVAQMELEAIKERSRSAAHFNIRAGKYRGSLPPWGYLPTRVDGEWRLAPDPVQRERILEVYHRVVDNHEPLHLVAHDLNRRGVLSPKDYFAQLRGREPQGRKWSATALKRSMISVAMLGYATLNGKTVRDDDGAPLVRAEPILTREQLEALRAELVKTSRAKPAVSTPSLLLRVLFCAVCGEPAYKFAGGGRKHPRYRCRSMGFPKHCGNGTVAMAEWDAFCEEQVLNLLGDAERLEKVWVAGSDSAVELAEVSTELVDLTSLIGSPAYRAGSPQREALDARIAALAARQEELEGLESRPSGWEWRETGQRFGDWWREQDTAAKNTWLRSMNVRLTFDVRGGLTRTIDFGDLQEYEQHLRLGSVAERLHTGMS

SEQ ID NO: 11787 - protein, 500 aa, synthetic construct
MRALVVIRLSRVTDATTSPERQLESCQQLCAQRGWDVVGVAEDLDVSGAVDPFDRKRRPNLARWLAFGEQPFDVIVAYRVDRLTRSVRHLQQLVRWAEDHKKLVVSATEAHFDTTTPFAAVVIALMGTVAQMELEAIKERNRSAAHFNIRAGKYRGSLPPWGYLPTRVDGEWRLAPDPVQRERILEVYRRVVDNHEPLHLVAHDLNRRGVLSPKDYFAQLQGREPQGRKWSATALKRSMTSEAMLGYATLNGKTVRDDDGAPLVRAEPILTREQLEALRAELVKTSRTKPAVSTPSLLLRVLFCAVCGEPAYKFAGGGRKHPRYRCRSMGFPKHCGNGTVAMAEWDAFCEEQVLDLLGDAERLEKVWVAGSDSAVELAEVNAELVDLTSLIGSPAYRAGSPQREALGARIAALAARQEELEGLEARPPGWEWRETGQRFGDWWREQDTAAKNTWLRSMNVRLTFDVRGGLTRTIDFGDLQEYERHLRLGSVVERLHTGMS

SEQ ID NO: 11788 - protein, 500 aa, synthetic construct
MRALVVIRLSRVTDATTSPERQLESCQQLCAQRGWDVVGVAEDLDVSGAVDPFDRKRRPNLARWLAFEERPFDVIVAYRVDRLTRSIRHLQQLVRWAEDHKKLVVSATEAHFDTTTPFAAVVIALMGTVAQMELEAIKERNRSAAHFNIRAGKYRGSLPPWGYLPTRVDGVWRLVPDPVQRERILEVYHRVVDNHEPLHLVAHDLNRRGVLSPKDYFAQLRGREPQGRKWSATALKRSMISVAMLGYATLNGKTVRDDDGAPLVRAEPILTREQLEALRAELVKTSRAKPAVSTPSLLLRVLFCAVCGEPAYKFSGGGRKHPRYRCRSMGFPKHCGNGTVAMAEWDAFCEKQVLDLLGDAERLEKVWVAGSDSAVELAEVNAELVDLTSLIGSPAYRAGSPQREALDARIAALAARQEELEGLEARPSGWEWRETGQRFGDWWREQDTAAKNTWLRSMNVRLTFDVRGGLTRTIDFGDLREYEQHLRLGSVVERLHAGMS

SEQ ID NO: 11789 - protein, 500 aa, synthetic construct
MRALVVIRLSRVTDATTSPERQLESCQQLCAQRGWDVVGVAEDLDVSGAVDPFDRKRRPNLARWLAFEEQPFDVIVAYRVDRLARSIRHLQQLVHWAEDHKKLVVSATEAHFDTTTPFAAVVIALMGTVAQMELEAIKERSRSAAHFNIRAGKYRGSLPPWGYLPTRVDGEWRLAPDPVQRERILEVYHRVVDNHEPLHLVAHDLNRRGVLSPKDYFAQLQGREPQGRKWSATALKRSMTSEAMLGYATLNGKTVRDDDGAPLVRAEPILTREQLGALRAELVKTSRAKPAVSTPSLLLRVLFCAVCGEPAYKFAGGGRKHPRYRCRSMGFPKHCGNGTVAMAEWDAFCEEQVLGLLGDAERLEKVWVAGSDSAVELAEANAELVDLTSLIGSPAYRAGSPQREALDARIAALAARQEELEGLEACPSGWEWRETGQRFGDWWREQDTAAKNTWLRSMNVRLTFDVRGGLTRTIDFGDLQEYEQHLRLGSVVERLRTGMS

SEQ ID NO: 11790 - protein, 500 aa, synthetic construct
MRALVVIRLSRVTDATTSPERQLESCQQLCAQRGWNVVGVAEDLDVSGAVDPFDRKRRPNLARWLAFEEQPFDVIVAYRVDRLTRSIRHLQQLVHWAEDHKKLVVSATEAHFDTTTPFAAVVIALMGTVAQMELEAIKERNRSAAHFNIRAGKYRGSLPPWGYLPTRVDGEWRLAPDPVQRERILEVYHRVVDNHEPLHLVAHDLNRRGVLSPRDYFAQLRGRKPQGRKWSATALKRSMTSEAMLGYATLNGKTVRGDDGAPLVRAEPVLTREQLEALRAELVKTSRAKPAVSTPSLLLRVLFCAVCGEPAYKFAGGGRKHPRYRCRSMGFPKHCGNGTVAMAEWDAFCEEQVLDLLGDTERLEKVWAAGSDSAVELAEVNAELVDLTSLIGSPAYRAGSPQREALDARIAALAARQEELEGLEARPSGWEWRETGQRFGDWWREQDTAAKNTWLRSMNVRLTFDVRGGLTRTIDFGDLQEYEQHLRLGSVVERLHTGMS

SEQ ID NO: 11791 - protein, 500 aa, synthetic construct
MRALVVIRLSRVTDATTSPERQLESCQQLCAQRGWDVVGVAEDLDVSGAVDPFDRKRRPSLARWLAFEEQPFDAIVAYRVDRLTRSIRHLQQLVHWAEDHKKLVVSATEAHFDTTTPFAAVVIALMGTVAQMELEAIKERNRSAAHFNIRAGKYRGSLPPWGYLPARVNGVWRLVPDPVQRERILEVYHRVVDNHEPLHLVAHDLNRRGVLSPKDYFAQLRGREPQGRKWSATALKRSMVSEAMLGYAVLNGKTVRDDDGAPLVRAEPILTREQLEALRAELVKTSRAKPAVSTPSLLLRVLFCAVCGEPAYKFAGGGRKHPRYRCRSMGFPKHCGNGTVAMAEWDAFCEEQVLNLLGDAERLEKVWVAGSDSAVELAEVNKELVDLTSLIGSPAYRAGSPQREALDARTAALAARQAELEGLEARPSGWEWRGTGQRFGDWWRELDTAAKNTWLRSMNVRLTFDVRDGLTRTIDFGDLQEYEQHLRLGSVVERSHTGMS

SEQ ID NO: 11792 - protein, 500 aa, synthetic construct
MRALVVIRLSRVTDATTSPERQLESCQQLCAQRGWDVVGVVEDLDVSGAVNPFDRKRRPNLARWLAFEEQPFDVIVAYRVDRLTRSTRHLQQLVHWAEDHKKLVVSATEAHFDTTTPFAAVVIALMGTVAQMELEAIKERSRSAAHFNIRAGKYRGSLPPWGYLPTRVDGEWRLVPDPVQRARILEVYHRVADNHEPLHLVARDLNRRGVLSPKDYFAQLRGREPQGRRWSATALKRSMISEAMLGYATLNGKTVRDDDGAPLVRAEPILTRKQLEALRAELVKTSRAKPAVSTPSLLLRVLFCAVCGEPAYKFAGGGRKHPRYRCRSMGFPKHCGNGTVAMAEWDAFCEEQVLGLLGDAERLEKVWVTGSDSAVELAEVNAELVDLTSLIGSPAYRAGSPQRVALDARIAALAARQEELEGLEARPSGWEWRGTGQRFGDWWREQDTAAKNTWLRSMNVRLTFDVRGGLTRTIDFGDLQEYEQHLRLGSVAERLHTGMS

SEQ ID NO: 11793 - protein, 500 aa, synthetic construct
MRALVVIRLSRVTDATTSPERQLESCQQLCAQRGWDVVGVAEDLDVSGAVDPFDRKRRPNLARWLAFEEQPFDVIVAYRVDRLARSIRYLQQLVHWAEDHKKLVVSATEAHFDTTTPFAAVVIALMGTVAQMELEAIKERSRSAAHFNIRAGKYRGSLPPWGYLPTRVDGEWRLAPDPVQRERILEVYHRVVDNHEPLHLVAHDLNRRGVLSPKDYFAQLQGREPQGRKWSATALKRSMISVAMLGYATLSGKTVRDDDGAPLVRAEPILTREQQEALRAELVETSRAKPAVSTPSLLLRVLFCAVCGEPAYKFTGGGRKHSRYRCRSMGFPKHCGNGTVAMAEWDAFCEEQVLNLLGDAGRLEKVWVAGSDSAVELAEVNAELVDLTSLIGSPAYRAGSPQRGALDARIAALAARQEELEGLEARPSGWEWRETGQRFGDWWREQDTAAKNIWLRSMNVRLTFDVRGGLTRTIDFGDLQEYEQHLRLGGVVERLHTGMS

SEQ ID NO: 11794 - protein, 500 aa, synthetic construct
MRALVVIRLSRVTDATTSPERQLESCQQLCAQRGWDAVGVAEDLDVSGAVDPFDRKRRPNLARWLAFEEQPFDVIVAHRVDRLTRSVRHLQQLVHWAEDHKKLVVSATEAHFDTTTPFAAVVIALMGTVAQMELEAIKERSRSAAHFNIRAGKYRGSLPPWGYLPTRVDGEWRLAPDPVQRERILEVYHRVVDNHVPLHLVAHDLNRRGVLSPKDYFAQLQGREPQGRKWSATALKRSMTSEAMLGYATLNGKTVRDDDGAPLVRAEPILTRVQQEALRAELVKTSRAKPAVSTPSLLLRVLFCAVCGEPAYKFTGGGRKHPRYRCRSMGFPKHCGNGTVAMAEWDAFCEEQVLNLLGDSERLEKVWVAGSDSAVELAEVNAELVDLTSLIGSPAYRAGSPQREALDARIAALAARQEELEGLEARPSGWEWRETGQRFGDWWREQDTAAKNTWLRSMNVRLTFDVRGGLTRTIDFGDLQEYEQHLRLGSVVERLHTGMS

SEQ ID NO: 11795 - protein, 500 aa, synthetic construct
MRALVVIRLSRVTDATTSPERQLESCQQLCAQRGWDVVGVAEDLDVSGAVDPFDRKRRPNLASWLAFEEQPFDAIVAYRVDRLTRSIRHLQQLVHWADDHKKLVVSATEAHFDTTTPFAAVVIALMGTVAQMELEAIKERSRSAAHFNIRAGKYRGSLPPWGYLPARVDGVWRLVPDPVQRERILEVYHRVVDNHEPLHLVAHDLNRRGVLSPKDYFAQLQGREPQGRKWSATALKRSMTSEAMLGYATLNGKTVRDDDGAPLVRAEPILTREQLEAIRAELVKTSRAKPAVSTPSLLLRVLFCAVCGEPAYKFAGGGRKHPRYRCRSMGFPKHCGNGTVAMAEWDAFCEEQVLDLLGDAERLEKVWVAGSDSAVELAEVNAELVDLTSLIGSPAYRAGSPQREALDARIAALAARQEELEGLEARPSGWEWRETGQRFGDWWREQDTAAKNAWLRSMNVRLTFDVRGGLTRTIDLGDLQEYEQHLRLGSVVERLHTGTS

SEQ ID NO: 11796 - protein, 500 aa, synthetic construct
MRALVVIRLSRVTDATTSPERQLESCQQLCAQRGWDVVGVAEDLDVSGAVDPFDHKRRPNLARWLAFEEQPFDVIVAYRVDRLTRSTRHLQQLVHWAEDHKKLVVSATEAHFDTTTPFAAVVIALMGTVAQMELEAIKERSRSAAHFNIRAGKYRGSLPPWGYLPTRVDGEWRLAPDPVQRERILEVYHRVVDNHEPLHLVAHDLNRRGVLSPKDYFAQLRGREPQGRKWSATALKRSMISEAMLGYATLNGKTVRDDDGAPLVRAEPILTREQLEALRAELVKTSRAKPAVSTPSLLLRVLFCAVCGEPAYKFAGGGRKHPRYRCRSMGFPKHCGNGTVAMAEWDAFCEEQVLDLLGDAERLEKVWVAGSDSAVELAEVNAELVDLTSLIGSPAYRAGSPQREALDARIAALAARQEELEGLEARPSGWEWRGTGQRFGDWWREQDTAAKNTWLRSMNVRLTFDVRGGLTRTIDFGELQEYEQHLRLGSVVERLHTGMS

SEQ ID NO: 11797 - protein, 500 aa, synthetic construct
MRALVVIRLSRVTDATTSPERQLESCQQLCAQRGWDVVGVAEDLDVSGAADPFDRKRRPNLARWLAFEEQPFDVVVAYRVDRLARSIRHLQQLVHWAEDHKKLVVSATEAHFDTTTPFAAVVIALMGTVAQMELEAIKERSRSAAHFNIRAGKYRGSLPPWGYLPTRVDGEWRLVPDPVQRERILEVYHRVVDNHEPLHLVAHDLNRRGVLSPKDYFAQLQGREPQGRKWSATALKRSMTSEAMLGYATLNGKTVRDDDGAPLVRAEPILTREQLEALRAELVKTSRAKPAVSTPSLLLRVLFCAVCGEPAYKFAGGGRKHPRYRCRSMGFPKHCGNGTVAMAEWDAFCEEQVLNLLGDAERLEKVWVAGSDSAVELAEVNAELVDLTSLIGSPAYRAGSPQREALDARIAALAARQEELEGLEARPSGWEWRETGQRFGDWWREQDIAAKNTWLRSMNVRLTFDVRGGLTRTIDFGDLQEYEQHLRLGSVVERLHTGMS

SEQ ID NO: 11798 - protein, 500 aa, synthetic construct
MRALVVIRLSRVTDATTSPERQLESCQQVCAQRGWDVVGVAEDLDVSGAVDPFDRKRRPNLARWLAFEEQPFDVIVAYRVDRLARSIRHLQQLVRWAEDHKKLVVSATEAHFDTTTPFAAVVIALMGTVAQMELEAIKERSRSAAHFNIRAGKYRGSLPPWGYLPTRVDGEWRLAPDPVQRERILEVYHRVVDNHEPLHLVAHDLNRRGVLSPKDYFAQLQGREPQGRKWSATALKRSMVSEAMLGYATLNGKTVRDDDGAPLVRAEPILTREQQEALRAELVKTSRAKPAVSTPSLLLRVLFCAVCGEPAYKFAGGGRKHPRYRCRSMGSPKHCGNGTVAMAEWDAFCEEQVLGLLGDAERLERVWVAGSDSAVELAEVNAELVDLTSLIGSPAYRAGSPQREALDARIAALAARQEKLEGLEARPSGWGWRETGQRFGDWWREQDTAAKNTWLRSMNVRLTFDVRGGLTRTIDFGDLQEYEQHLRSGSVVERLHTGVS

SEQ ID NO: 11799 - protein, 500 aa, synthetic construct
MRALVVIRLSRVTDATTSPERQLESCQQLCAQRGWDVVGVAEDLDVSGAVDPFDRKRRPNLARWLAFEEQPFDVIVAYRVDRLARSIRHLQQLVHWAEDHKKLVVSATEAHFDTTTPFAAVVIALMGTVAQMELEAIKERNRSAAHFNIRAGKYRGSLPPWGYLPARVDGEWRLVPDPVQRERILEVYHRVVDKHEPLHLVAHDLNQRGVLSPKDYFAQLRGREPQGRKWSATALKRSMISGAMLGYATLNGKTVRDDDGAPLVRAEPILTREQLEALRAELVKTTRAKPAVSTPSLLLRVLFCAVCGEPAYKFAGGGRKHPRYRCRSMGFPKHCGNGTVAMAEWDAFCEEQVLNLLGDAERLEKVWVASSDSAVELAEVNAELVDLTSLIGSPAYRAGSPQREALDARIAALAARQEELEGLEARPSGWEWRETGQRFGDWWREQDTAAKNTWLRSMNVRLTFDVRGGLTRTIDFGDLQEYEQHLRLGSVAGRLHTGMS

SEQ ID NO: 11800 - protein, 500 aa, synthetic construct
MRALVVIRLSRVTDATTSPERQLESCQQLCAQRGWDVVGVAEDLDVSGAVDPFDRKRRPNLARWLAFEEQPFDVIVAYRVDRLTRSVRHLQQLVHWAEDHKKLVVSATEAHFDTTTPFAAVVIALMGTVAQMELEAIKERSRSAAHFNIRAGKYRGSLPPWGYLPARVDGEWRLVPDPVQRERILEVYHRVVDNHEPLLLVAHDLNRRGVLSPKDYFAQLRGREPQGRKWSATALKRSMISGAMLGYATLNGKTVRDDDGAPLVRAEPILTREQLEALRAELVKTSRAKPAVSTPSLLLRVLFCAVCGEPAYKFSGGGRKHPRYRCRSMGFPKHCGNGTVAMAEWDAFCEEQVLDLLGDAERLEKVWVAGSDSAVELAEVNAELVDLTSLIGSPAYRAGSPQREALDARIAALAARQEELEGLEARPSGWEWRRTGQRFGDWWRGQNTAAKNTWLRSMNVRLTFDVRGGLTRTVDFGDLQEYEQHLRLGSAVERLHTGMS

SEQ ID NO: 11801 - protein, 500 aa, synthetic construct
MRALVVIRLSRVTDATTSPERQLESCQQLCAQRGWDVVGVAEDLDVSGAVDPFDRKRRPNLARWLAFEGQPFDVIVAYRVDRLARSIRHLQQLVHWAEDHKKLVVSATEAHFDTTTPFAAVVIALMGTVAQMELEAIKERSRSAAHFNIRAGKYRGSLPPWGYLPTRVDGEWRLVPDPVQRERILEVYRRVVDNHEPLHLVAHDLNRRGVLSPKDYFAQLRGREPQGRKWSATALKRSMFSEAMLGYATLNGKTVRDDDGAPLVRAEPILTREQLEALRAELVKTSRARPAVSTPSLLLRVLFCAVCGEPAYKFAGGGRKHPRYRCRSMGFPKHCGNGTVAMAEWDAFCEEQVLNLLGDAERLEKVWVAGSDSAVELAEVNAELVDLTSLIGSPAYRAGSPQREALDARIAALAARQEELEGLEARPSGWEWRETGQRFGDWWHEQDTAAKNTWLRSMNVRLTFDVRGGLTRTIDFGDLQEYERHLRLGSMVERLRTGMS

SEQ ID NO: 11802 - protein, 500 aa, synthetic construct
MRALVVIRLSRVTDATTSPERQLESCQQLCAQRGWDVVGVAEDLDVSGAVDPFDRRRRPNLARWLAFEERPFDVIVAYRVDRLTRSIRHLQQLVHWAEDHKKLVVSATEAHLDTTTPFAAVVIALMGTVAQMELEAIKERSRSAAHFNIRAGKYRGSLPPWGYLPTRVDGVWRLVPDPAQRERILEVYHRVVDNHEPLHLVAHDLNRRGVLSPKDYFAQLRGREPQGRKWSATALKRSMISVAMLGYATLNGKTVRDDDGAPLVRAEPILTREQLEALRAELVKTSRAKPAVSTPSLLLRVLFCAVCGEPAYKFAGGGRKHPRYRCRSMGFPKHCGNGTVAMVEWDAFCEEQVLDLLGDAERLEKVWVAGSDSAVELAEVNAELVDLTSLIGSPAYRAGSPQREALDARIAALAARQEELEGLEARPSGWEWRETGQRFGDWWREQDTAAKNTWLRSMNVRLTFDVRGGLIRTIDFGDLQEYEQHLRPGSVVERLHTGMS

SEQ ID NO: 11803 - protein, 500 aa, synthetic construct
MRALVVIRLSRVTDATTSPERQLESCQQLCAQRGWDVVGVAEDLDVSGAVDPFDRKRRPNLARWLAFEEQPFDAIVAYRADRLARSIRHLQQLVHWAEDHKKLVVSATEAHFDTTTPFAAVVIALMGTVAQMELEAIKERSRSAVHFNIRAGKYRGSLPPWGYLPARVDGEWRLVPDPVQRERILEVYHRVVDNHEPLHLVAHDLNRRGVLSPKDYFAQLRGREPQGRKWSATALKRSMISEAMLGYATLNGKTVRDDDGAPLVRAEPILTREQQEALRAELVKTSRAEPAVSTPSLLLHVLFCAVCGEPAYKFAGGGRKHPRYRCRSMGFPKHCGNGTVAMAEWDAFCEEQVLDLLGDAERLEKVWVAGSDSAVELAEVNAELVDLTSLIGSPAYRAGSPQREALDARIAALAARQEELEGLEARPSGWEWRGTGQRFGDWWREQDTAAKNTWLRSMNVRLTFDVRGGLTRTIDFGDLQEYEQHLRLGSAVERLHTGMS

SEQ ID NO: 11804 - protein, 500 aa, synthetic construct
MRALVVIRLSRVTDATTSPERQLESCQQLCAQRGWDVVGVAEDLDVSGAADPFDSKRRPNLARWLAFEEQPFDVIVAHRIDRLTRSIRHLQQLVHWAEDHKKLVVSATEAHFDTTTPFAAVVIALMGTVAQMELEAIKERNRSAAHFNIRAGKYRGSLPPWGYLPARVDGEWRLVPDPVQRERILEVYHRVVDDHEPLHLVAHDLNRRGVLSPKDYFAQLRGREPQGRKWSATALKRSMTSEAMLGYATLNGKTVRDDDGAPLVRAEPILTREQLEALRAELVKTSRAKPAVSTPSLLLRVLFCAVCGEPAYKFAGGGRKHPRYRCRSMGFPKHCGNGTVAMAEWDAFCEEQVLDLLGDAERLEKVWVAGSDSAVELAEVNAELVDLTSLISSPAYRAGSPQREALDARIAALAARQEELEGLEARPSGWEWRETGQRFGDWWREQDTAAKNTWLRSMNVRLTFDVRGGLTRTIDFGDLQEYEQHLRLGSVVERLHAGMS

SEQ ID NO: 11805 - protein, 500 aa, synthetic construct
MRALVVIRLSRVTDATTSPERQLESCQQLCAQRGWDVVGVAEDLDVSGAVDPFDRKRRPNLARWLAFEEQPFDVIMAYRVDRLARSIRHLQQLVHWAEDHKKLVVSATEAHFDTTTPFAAVVIALMGTVAQMELEAIKERSRSAAHFNIRAGKYRGSLPPWGYLPTRVDGEWRLAPDPVQRERILEVYRRVVDNHEPLHLVAHDLNRRGVLSPKDYFAQLRGREPQGREWSATALKRSLTSEAMLGYATLNGKIVRDDDGAPLVRAEPILTREQLEALRAELVKTSRAKPAVSTPSLLLRVLFCAVCGEPAYKFTGGGRKHPRYRCRSVGFPKHCGNGTVAMAEWDAFCEEQVLDLLGDAERLEKVWVVGSDSAVELAEVNAELVDLTSLIGSPAYRAGSPQREALDARIAALAARQEELEGLEARPSGWEWRETGQRFGDWWREQDTAAKNTWLRSMNVRLTFDVRGGLTRTIDFGDLREYEQHLRLGSVVERLHTGMS

SEQ ID NO: 11806 - protein, 500 aa, synthetic construct
MRALVVIRLSRVTDATTSPERQLESCQQLCAQRGWDVVGVAEDLDVSGAVDPFDRKRRPNLARWLAFEEQPFDVIVAYRVDRLTRSTRHLQQLVHWAEDHKKLVVSATEAHFDTTTPFAAVVIALMGTVAQMELEAIKERNRSAAHFNIRAGKYRGSLPPWGYLPTRVDGEWRLVPDPVQRERILEAYHRVVDNHEPLHLVAHDLNRCGVLSPKDYFAQLRGREPQGRKWSATALKRSMISEAMLGYATLNGKTVRDDDGAPLVRAEPILTREQLEALRAELVKTSRAKPAVSTPSLLLRVLFCAVCGEPAYKFAGGGRKHPRYRCRSMGFPKHCGNGTVAMAEWDAFCEEQVLGLLGDAERLEKVWVAGSGSAVKLAEVNAELVDLTSLIGSPAYRAGSPQREALDARIAALAARQEELEGLEARPSGWEWRETGQRFGDWWREQDTAAKNTWLRSMNVRLTFDVRGGLTRTIDFGDLQEYEQHLRLGSVVERLHTGRS

SEQ ID NO: 11807 - protein, 500 aa, synthetic construct
MRALVVIRLSRVTDATTSPERQLESCQQLCAQRGWDVVGVAEDLDVSGAVDPFDRKRRPNLARWLAFEEQPFDAIVAYRVDRLTRSIRHLQQLVHWAEDHKKLVVSATEAHFDTTTPFAAVVIALMGTVAQMELEAIKERSRSAAHFNIRAGKYRGSLPPWGYLPTRVDGEWRLAPDPVQRERILEVYHRVVDNHEPLHLVAHDLNRRGVLSPKDYFAQLQGREPQGRKWSATALKRSMTSETMLGYATLNGKIVRDDGGAPLVRAKPILTREQLEALRAELVKTSRAKPSVSTPSLLLRVLFCAVCGEPAYKFAGGGRKHPRYRCRSMGFPKHCGNGTVAMAEWDAFCEEQVLDLLGDAERLEKVWVAGSDSAVELAEVNAELVDLTSLIGSPAYRAGSPQREALDARIAALAARQEELGGLEARLSGWEWRKTGQRFGDWWREQDTAAKNTWLRSMNVRLTFDVRGGLTRTIDFGDLQEYEQHLRLGSVVERLHTGMS

SEQ ID NO: 11808 - protein, 500 aa, synthetic construct
MRALVVIRLSRVTDATTSPERQLESCQQLCAQRGWDVVGAAEDLDVSGAVDPFDRKRRPNLARWLAFEEQPFDVIVAYRVDRLTRSIRHLQQLVHWAEDHKKLVVSATEAHFDMTTPFAAVVIALMGTVAQMELEAIKERSRSAAHFNIRAGKYRGSLPPWGYLPTRVDGEWRLAPDPVQRERILEVYHRVVDNHEPLHLVAHDLNRRGVLSPKDYFAQLQGREPQGRKWSATALKRSMISVTMLGYATLNGKTVRDDDGAPLVRAEPILTREQLEALRAELVKTSRAKPAVSTPSLLLRVLFCAVCGEPAYKFAGGGRKHPRYRCRSMGFPKHCGNGTVAMAEWDAFCEEQVLSLLGDAERLEKVWVAGSDSAVELAEVNAELVDLTSLIGSPAYRAGSPQREALDARIAALAARQEELEGLEARLSGWEWRETGQRFRDWWREQDTAAKNTWLRSMNVRLTFDVRGGLTRTIDLGDLQEYEQHLRLGSVVERLHTGMS

SEQ ID NO: 11809 - protein, 500 aa, synthetic construct
MRALVVIRLSRVTDATTSPERQLESCQQLCAQRGWDVVGVAEDLDVSGAVDPFDRKRRPNLARWLAFEEQPFDVIVAYRVDRLTRSTRHLQQLVHWAEDHKKLVVSATEAHFDTTTPFAAVVIALMGTVAQMELEAIKERSRSAAHFNIRAGKYRGSLPPWGYLPARVDGEWRLVPDPVQRERILEVYHRVVDNHEPLHLVAHDLNRRGVLSPKDYFAQLQGREPQGRKWSATALKRSMTSEAMLGHATLNGKTVRDEDGAPLVRAEPILTREQLEALRAELVKTSRAKPAVSTPSLLLRVLFCAVCGEPAYKFAGGGRKHPRYRCRSMGFPKHCGNGTVAMAEWDAFCEEQVLDLLGDAERLEKVRVAGSDSAVELAEVNAELVDLTSLIGSPAYRAGSPQREALDARIAALAARQEELEGLEARPSGWEWRGTGQRFGDWWREQDTAAKNTWLRSMNVRLTFDVRGGPTRTIDFGDLQEYEQHLRLGSAAERLHTGMS

SEQ ID NO: 11810 - protein, 500 aa, synthetic construct
MRALVVIRLSRVTDTTTSPERQLESCQQLCAQRGWDVVGVAEDLDVSGAVDPFDRKRRPNLARWLAFEERPFDVIVAYRVDRLARSIRHLQQLVHWAEDHKKLVVSATEAHFDTTTPFAAVVIALMGTVAQMELEAIKERNRSAAHFNIRAGKYRGSLPPWGYLPTRVDGEWRLVPDPVQRERILEVYHRVVDNHEPLHLVAHDLNRRGVLSPKDYFAQLQGREPQGHKWSATALKRSMISVAMLGCATLNGKTVRDGDGAPLVRAEPILTREQQEALRAELVKTSRAKPAVSTPSLLLRVLFCAVCGEPAYKFAGGGRKHPRYRCRSMGFPKHCGNGTVAMAEWDAFCEEQVLGLLGDAERLEKVWVAGSDSAVELAEVNAELVDLTSLIGSPAYRAGSPQREALDARIAALAARQEELEGLEASPSGWEWRETGQRFGDWWREQNTAAKNTWLRSMNVRLTFDVRGGLTRTIDFGDLQEYEQHLRWGSVVERLHTGMS

SEQ ID NO: 11811 - protein, 500 aa, synthetic construct
MRALVVIRLSRVTDATTSPERQLESCQQLCAQRGWDVVGVAEDLDVSGAVDPFDRKRRPNLARWLAFEEQPFDVIVAYRVDRLARSIRHLQQLVHWAEDHKKLVVSATEAHFDTTTPFAAVVIALMGTVAQMELEAIKERSRSAAHFNIRAGKYRGSLPPWGYLPTRVDGEWRLVPDPVQRERILEVYHRVVDNHEPLHLVAHDLNRRGVLSPRDYFAQLRGRGPQGRKWSATALKRSMISEVMLGYATLNGRTVRDDDGAPLVRAEPILTREQLEALRAVLVKTSRAKPAASTPSLLLRVLFCAVCGEPAYKFAGGGRKHPRYRCRSMGFLKHCGNGTVAMAEWDAFCEEQVLDLLGDAERLEKVWVAGSDSAVELAEVNAELVDLTSLIGSPAYRAGSPQREALDARIAALAARQEELEGLEARPSGWEWRGTGQRFGDWWRGQDTAAKNTWLRSMNVRLTFNVRGGLTRTIDFGDLQEYEQHLRLGSVVERLHTGMS

SEQ ID NO: 11812 - protein, 500 aa, synthetic construct
MRALVVIRLSRVTDATTSPERQLESCQQLCAQRGWDVVGVAEDLDVSGAVDPFDRKRRPNLARWLAFEEQPFDVIVAYRVDRLTRSTRHLQQLVHWAEDHKKLVVSATEAHFDTTTPFAAVVIALMGTVAQMELEAIKERSRSAAHFNIRAGKYRGSLPPWGYLPARVDGEWRLVPDPVQRERILEVYHRVVDNHEPLHLVAHDLNRRGVLSPKDYFAQLQGREPQGRKWSATALKRSMISGAMLGYATLNGKTVRGDDGAPLVRAEPILTREQLEALRAELVKTSRAKPAVSAPSLLLRVLFCAVCGEPAYKFAGGGRKHPRYRCRSMGFPKHCGNGTVAMAEWNAFCEEQVLDLLGDAERLEKVWVAGSDSAVELAEVNAELVDLTSLIGSPAYRAGSPQREALDARIAVLAARQEELEGLGARPSGWEWRETGQRFGDWWREQDTAAKNTWLRSMNVRLTFDVRGGLTRTIDLGDLQEYEQHLRLGSEVERLHTGMS

SEQ ID NO: 11813 - protein, 500 aa, synthetic construct
MRALVVIRLSRVTDATTSPERQLESCQQLCAQRGWDVVGVAEDLDVSGAVDPFDRKRRPSLARWLAFEEQPFDAIVAYRVDRLTRSIRHLQQLVHWAEDHKKLVVSATEAHFDTTTPFAAVVIALMGTVAQMELEAIKERNRSAAHFNIRAGRYRGSLPPWGYLPARVDGVWRLVPDPVQRERILEVYHRVVDNHEPLHLVAHDLNRRGVLSPKDYFAQLRGREPQGRKWSATALKRSMISVAMLGYATLNGKTVRDNDGAPLVRAEPILTREQLEALRAELVKTSRAKPAVSTPSLLLRVLFCAVCGEPAYKFSGGGRKHPRYRCRSMGFPKHCGNGTVAMAEWDAFCEEQVLDRLGDAERLEKVWVAGSDSAVELAEVNAELVDLTSLIGSPAYRAGSPQREALGARIAALAARQGELEGLEAHPSGWEWRETGQRLGDWWREQDTAAKNTWLRSMNVRLTFGVRGGLTRTIDFGDLQEYEQHLRLGSVVERLHTGMS

SEQ ID NO: 11814 - protein, 500 aa, synthetic construct
MRALIVIRLSRVTDATTSPERQLESCQQLCAQRGWDVVGVAEDLDVSGAVDPFDRKRRPNLARWLAFEGQPFDVIVAYRVDRLTRSTRHLQQLVHWAEDHKKLVVSATEAHFDTTTPFAAVVIALMGTVAQMELEAIKERNRSAAHFNIRAGKYRGSLPPWGYLPTRVDGGWRLVPDPVQRERILEVYHRVVDNHEPLHLVAHDLNRRGVLSPKDYFAQLQGREPQGRKWSATALKRSMTSEAMLGYATLNGKTVRDDDGAPLVRAEPILTREQLEAIRAELVKTSRAKPAVSTPSLLLRVLFCAVCGEPAYKFAGGGRKHSRYRCRSMGFPKHCGNGTVAMAEWDAFCEERVLDLLGDAERLEKVWVAGSDSAVELAEVNAELVDLTSLIGSPAYRAGSPQREALDARIAALAARQEELEGLEARPSGWEWRGTGQRFGDWWREQDTAAKNTWLRSMNVRLTFDVRGGLTRTIDFGDLQEYGQHLRLGSVVERLHTGMP

SEQ ID NO: 11815 - protein, 500 aa, synthetic construct
MRALVVIRLSRVTDATTSPERQLESCQQLCAQRGWDVVGVAEDLDVSGAVDPFDRKRRPNLARWLAFEEQPFDVVVAYRVDRLARSIRHLQQLVHWAEDHKKLVVSATEAHFDTTTPFAAVVIALMGTVAQMELEAIKERSRSAAHFNIRAGKYRGSLPPWGYLPTRVDGEWRLVPDPVQHERILEVYHRVVDNHEPLHLVAHDLNRRGVLSPKDYFAQLQGREPQGRKWSATALKRSMISEAMLGYATLNGKTVRDDDGAPLVRAEPILTREQLEALRAELVKTSRAKPAVSTPSLLLRVLFCAVCGEPAYKFAGGGRKHPRYRCRSMGFPKHCGNGTVAMAEWDAFCEEQVLDLLGDAERLEKVWVAGSDSAVELAEVSAELVDLTSLIGSPAYRAGSPQREALDARIAALAARQEELEGLEARPSGWEWRGTGQRFGDWWREQDTAAKNTWLRSMNVRLTFDVRGGLTRTIDFGDPQEYEQHLRLGSVVERLHTGMS

SEQ ID NO: 11816 - protein, 500 aa, synthetic construct
MRALVVIRLSRATDATTSPERQLESCQQLCAQRGWDVVGVAEDLDVSGAVDPFDRKRRPNLARWLASEEQPFDVIVAYRVDRLTRSTRHLQQLVHWAEDHKKLVVSATEAHFDTTTPFAAVVIALMGTVAQMELEAIKERNRSAAHFNIRAGKYRGSLPPWGYLPARVGGEWRLVPDPVQRERILEVYHRVVDNHEPLHLVAHDLNRRGVLSPRDYFAQLQGREPQGRKWSATALKRSMISEAMLGYATLNGKIVRDDDGAPLVRAEPILTREQLEALRAELVKTSRAKPAVSAPSLLLRVLFCAVCGEPAYKFAGGGRKHPRYRCRSMGFPKHCGNGTVAMTEWDVFCEEQVLDLLGDAERLEKVWVAGSDSAVELAEVNAELVDLTSLIGSPAYRAGSPQREALDARIAALAARQAELEGSEARPSGWEWRETGQRFGDWWREQDTAAKNTWLRSMNVRLTFDVRGGLTRTIDFGDLQEYEQHLRLGSVVERLHTGMS

SEQ ID NO: 11817 - protein, 500 aa, synthetic construct
MRALVVIRLSRVTDATTSPERQLESCQQLCAQRGWDVVGVAEDLDVSGAVDPFDRKRRPNLARWLAFEEQPFDVIVAYRVDRLTRSVRHLQQLVHWAEDHKKLVVSATEAHFDTTTPFAAVVIALMGTVAQMELEAIKERSRSAAHFNIRAGKYRGSLPPWGYLPARVDGEWRLVPDPVQRERILEVYHRVVDDHEPLHLVAHDLNRRGVLSPKDYFAQLRGREPQGRKWSATALKRSMISEAMLGYATLNGKTVRDDDGAPLVRAEPILTREQQEALRAELVKTSRAKPAVSTPSLLLRVLFCAVCGEPAYKFAGGGRKHPRYRCRSMGFPKHCGNGTVAVAEWDAFCEEQVLGLLGDAERLEKVWVAGSDSAVELAEVNAELVDLTSLIGSPAYRAGSPQREALDARIAALAARQEELEGLEARPSGWEWRETGQRFGDWWREQDTAAKNTWLRSMNVRLTFDVRGGLTRTIDFGDLQEYEQHLRLGSVVERLHTGMS

SEQ ID NO: 11818 - protein, 500 aa, synthetic construct
MRALVVIRLSRVTDATTSPERQLESCQQLCAQRGWDVVGVAEDLDVSGAVDPFDRKRRPNLARWLAFEGQPFDVIVAYRVDRLARSIRHLQQLVHWAEDHKKLVVSATEAHFDTTTPFAAVVIALMGTVAQMELEAIKERNRSAAHFNIRAGKYRGSLPPWGYLPTRVDGEWRLVPDPVQRERILEVYHRVVDNHEPLHLVAHDLNRRGVLSPRDYFAQLQGREPQGRKWSATALKRSMISEAMLGYATLNGKIVRDDDGAPLVRAEPILTREQQEALRAELVKTSRAKPAVSTPSLLLRVLFCAVCGAPAYKFAGGGRKHPRYRCRSMGFPKHCGNGTVAMAEWDAFCEEQVLNLLGDAERLEKVWVAGPDSAVELAEVNAELVDLTSLIGSPAYRAGSPQREALDARIAALAARQEELEGLETRSSGWEWRGTGQRFGDWWHEQDTAAKNTWLRSMNVRLTFDVRGGLTRTIDFGELQEYEQHLRLGSVVERLHTGMS

SEQ ID NO: 11819 - protein, 500 aa, synthetic construct
MRALVVIRLSRVTDATTSPERQLESCQQLCAQRGWDVVGVAEDLDVSGAVDPFDRKRRPNLARWLAFEEQPFDVIVAYRVDRLTRSVRHLQQLVHWAEDHKKLVVSATEAHLDTTTPFAAVVIALMGTVAQMELEAIRERSRSATHFNIRAGKYRGSLPPWGYLPTRVDGEWRLVPDPVQRERILEVYHRVVDNHEPLHLVAHDLNRRGVLSPKDYFAQLRGRKPQGRKWSATALKRSMISEAMLGYATLNGKTVRDDDGAPLVRAEPILTREQQEALRAELVKTSRAKPAVSTPSLLLRVLFCAVCGEPAYKFSGGGRKHPRYRCRSMGFPKHCGNGTVAIAEWDAFCEEQVLDLLGDAERLEKVWVAGSDSAVEFAEVNAELVDLTGLIGSPAYRAGSPQREALDARIAALATRQEELEGLEARPSGWEWRETGQRFGDWWREQDIAAKNTWLRSMNVRLTFDVRGGLTRTIDFGDLQEYEQHLRLGSVVERLYTGVS

SEQ ID NO: 11820 - protein, 500 aa, synthetic construct
MRALVVIRLSRVTDATTSPERQLESCQQLCAQRGWDVVGVAEDLDVSGAVDPFDRKRRPNLARWLAFEEQPFDAIVAYRVDRLTRSIRHLQQLVHWAEDHKKLVVSATEAHFDTTTPFAAVVIALMGTVAQMELEAIRERSRSAAHFNIRAGKYRGSLPPWGYLPARVDGEWRLVPDPVQRERILEVYHRVVDNHEPLHLVAHDLNRRGVLSPKDYFAQLRGREPQGRKWSATALKRSMISEAMLGYVTLNGKTVRDDDGAPLVRAEPILTREQLGALRAELVKTSRAKPAVSTPSLLLRVLFCAVCGEPAYKFAGGGRKHPRYRCRSMGFPKHCGNGTVAMAGWDAFCEEQVLDLLGNVERPEKVWVAGSDSAVELAEVNAELVDLTSLIGSPAYRAGSPQREALDARIAALAARQEELEGLEARPSGWEWRGTGQRFGDWWREQDTAAKNTWLRSMNVRLTFDVRGGLTRTINFGDLQEYERHLRLGSVVERLHTGMS

SEQ ID NO: 11821 - protein, 500 aa, synthetic construct
MRALVVIRLSRVTDATTSPERQLGSCQQLCAQRGWDVVGVAEDLDVSGAVDPFDRKRRPNLARWLAFEEQPFDVIVAYRVDRLTRSTRHLQQLVHWAEDHKKLIVSATEAHFDTTTPFAAVVIALMGTVAQMELEAIKERNRSAAHFNIRAGKYRGSLPPWGYLPTRVDGEWRLVPDPVQRERILEVYHRVVDNHEPLHLVAHDLNRRGVLSPRDYFAQLQGREPQGRKWSATALKRSMISEAMLGYATLNGKTVRDDDGAPLVRAEPILTREQLEALRAELVETSRAKPAVSTPSLLLRVLFCAVCGEPAYKFAGGGRKHPRYRCRSMGFPKHCGNGTVAMAEWDAFCEEQVLDLLGDAERLEKVWVAGSDSAVELAEVNAELVDLTSLIGSPAYRAGSPQREALDARIAALAARQEELEGLEARPSGWEWRETGQRFGDWWREQDTAAKNTWLRSMNVRLTFDVRGGLTRTIDFGDLQEYEQHSRLGSVVERLHTGMS

SEQ ID NO: 11822 - protein, 500 aa, synthetic construct
MRALVVIRLSRVTDATTSPERQLESCQQLCAQRGWDVVGVAEDLDVSGAVDPFDRKRRPNLARWLAFEEQPFDVIVAHRVDRLARSVRHLQQLVHWAEDHKKLVVSATEAHFDTTTPFAAVVIALMGTVAQMELEAIKERNRSAAHFNIRAGKYRGSLPPWGYLPARVDGEWRLVPDPVQRERILEVYHRVVDNHEPLHLVAHDLNRRGVLSPKDYFAQLQGREPQGRKWSATALKRSMISVAMLGYATLDGKTVRDDDGAPLVRAEPILTREQQEALRAELVKTSRAKPAVSTPSLLLRVLFCAVCGEPAYKFAGGGRKHPRYRCRSMGFPKHCGNGTVAMAEWDAFCEEQVLDLLGGVERLEKVWVAGSDSAVELAEVNAELVDLTSLIGSPAYRAGSPQREALDARIAALAARQEELEGLEARPSGWEWRETGQRFGDWWREQDTAAKNTWLRSMNVRLTFDVRGGLTRTIDFGDLQEYEQHLRLGSVVERLHIGMS

SEQ ID NO: 11823 - protein, 500 aa, synthetic construct
MRALVVIRLSRVTDATTSPERQLESCQQLCARRGWDVVGVAEDLDVSGAVDPFDRKRRPNLARWLAFEEHPFDVIVAYRVDRLTRSTRHLQQLVHWAEDHKKLVVSATEAHFDTTTPFAAVVIALMGTVAQMELEAIKERSRSAAHFNIRAGKYRGSLPPWGYLPARVDGEWRLVPDPVQRERILEVYHRVVDSHEPLHLVAHDLNRRGVLSPKDYFAQLRGREPQGRKWSATALKRSMISEAMLGYATLNGKTVRDDDGAPLVRAEPILTREQLEALRAELVKTSRAKPAVSTPSLLLRVLFCAACGEPAYKFAGGGRKHPRYRCRSMGFPKHCGNGTVAMAEWDAFCEEQVLDLLGDAERLEKVWVVGSDSAVELAEVNAELVDLTSLIGSPAYRAGSPQREALDARIAALAARQEELEGSEAHPSGWEWRETGQRFGDWWREQDTAAKNTWLRSMNVRLTFDVRGGLTRTIDFGDLQEYEQHLRLGSVVERTHTGMS

SEQ ID NO: 11824 - protein, 500 aa, synthetic construct
MRALVVIRLSRVTDATTSPERQLESCQQLCAQRGWDVVGVAEDLDVSGAVDPFDRKRRPNLARWLAFEEQPFDVIVAYRVDRLTRSTRHLQQLVHWAEDHKKLVVSATEAHFDTTTPFAAVVIALMGTVAQMELEAIRERSRSAAHFNIRAGKYRGSLPPWGYLPTRVDGEWRLVPDPVQRERIIEVYHRVVDNHEPLHLVAHDLNRRGVLSPKDYFAQLQGREPQGRKWSATALKRSMISGAMLGYATLNGKTVRDDDGAPLVRAEPILTREQQEALRAELVKTSRAKPAVSTPSLLLRVLFCAVCGEPAYKFSGGGRKHPRYRCRSMGFPKHCGNGTVAMAEWDAFCEEQVLDLLGDAERLEKVWVAGSDSAVELAEVNAELVDLTSLIGSPACRAGSPQREALDARIAALAARQGELEGLEARPSGWEWRETGQRFGDWWREQDTAAKNTWLRSMNVRLTFDVRGGLTRTIDFGDLQEYEQHLRLGSVVERLHTGMS

SEQ ID NO: 11825 - protein, 500 aa, synthetic construct
MRALVVIRLSRVTDATTSPERQLESCQQLCAQRGWDVVGVAEDLDVSGAVDPFDRKRRPNLARWLAFEEQPFDVIVAYRVDRLARSIRHLQQLVHWAEDHKKLVVSATEAHFDTTTPFAAVVIALMGTVAQMELEAIKERSRSAAHFNIRAGKYRGSLPPWGYLPTRVDGEWRLVPDPVQRERILEVYHRVVDNHEPLHLVAHDLNRRGVLSPRDYFAQLRGREPQGRKWSATALKRSMISKAMLGYATLNGKTVRDDDGAPLVRAEPILTREQLEALRAELVKTSRARPAVSTPSLLLRVLFCAVCGEPAYKFAGGGRKHPRYRCRSMGFPKHCGNGTVAMAEWDAFCEEQVLNLLGDAERLEKVWVAGSDSAVELAEVNAELVDLVSLIGSPAYRAGSPQREALDARIAALAARQEELEGLEARPSGWEWRETGQRFGDWWREQDTAAKNTWLRSMNVRLTFDVRGGLTRTIDFGDLQEYEQHLRLGSVVERLHTGMS

SEQ ID NO: 11826 - protein, 500 aa, synthetic construct
MRALVVIRLSRVTDATTSPERQLESCQQLCAQRGWDVVGVAEDLDVSGAVDPFDRKRRPNLARWLAFEEQPFDVIVAYRVDRLTRSTRHLQQLVHWAEDHKKLVVSATEAHFDTTTPFAAVVIALMGTVAQMELEAIKERSRSAAHFNIRAGKYRGSLPPWGYLPARVDGEWRLVPDPVQRERILEVYHRVVDNHEPLHLVAHDLNRRGVLSPKDYFAQLQGREPQGRKWSATALKRSMISGAMLGYATLNGKTVRDDDGAPLVRAEPILTREQQEALRAELVKTSRAKPAVSTPSLLLRVLFCAVCGEPAYKFAGGGRKHPRYRCRSMGFPKHCGNGTVAMAEWDAFCEEQVLDLLGDAERLEKVWVAGSDSAVELAEVNAELVDLTSLIGSPAYRVGSPQREALDARIAALAARQEELEGLEARPSGWEWRETGQRFGDWWREQDTAAKNTWLRSMNVRLTFDVRGGLTRTIDFGDLQEYGQHLRLGSVVERLRTGMS

SEQ ID NO: 11827 - protein, 500 aa, synthetic construct
MRALVVIRLSRVTDATTSPERQLESCQQLCAQRGWDVVGVAEDLDVSGAVDPFDRKRRPNLARWLAFEEQPFDAIVAYRVDRLARSIRHLQQLVHWAEDHKKLVVSATEAHFDTTTPFAAVVIALMGTVAQMELEAIKERNRSAAHFNIRAGKYRGSLPPWGYLPTRVDGEWRLAPDPVQRERILEVYHRVVDNHEPLHLVAHDLNRRGVLSPKDYFAQLRGREPQGRKWSATALKRSMASEAMLGYATLNGKTVRDDDGAPLVRAEPILTREQLEALRAELVKTSRAKPAVSTPSLLLRVLFCAVCGEPAYKFAGGGRKHPRYRCRSMGFPKHCGNGTVAMAEWDEFCEEQVLDLLGDAERLEKVWVAGSDFAVELAEVNAELVDLTSLISSPAYRAGSSQRGALDARIAALAARQEELEGLEARPSGWEWRETGQRFGDWWREQDTAAKNTWLRSMNVRLTFDVRGGLTRTIDFGDLQEYEQQLRLGSVVERLHTGTS

SEQ ID NO: 11828 - protein, 500 aa, synthetic construct
MRALVVIRLSRVTDTTTSPERQLESCQQLCAQRGWDVVGVAEDLDVSGAVDPFDRKRRPNLARWLAFEEQPFDVIVAYRVDRLTRSTRHLQQLVHWAEDHKKLVVSATEAHFDTTTPFAAVVIALMGTVAQMELEAIKERNRSAAHFNICAGKYRGSLPPWGYLPTRVDGEWRLVPDPVQRERILEVYHRVVDNHEPLHLVAHDLNRRGVLSPKDYFAQLRGREPQGRKWSATALKRSMTSEAMLGYATLNGKTVRDDDGAPLVRAEPILTREQLEAIRAELVKTSRAKPAVSTPSLLLRVLFCAVCGEPAYKFAGGGRKHPRYRCRSMGFPKHCGNGTVAMVEWDAFCEEQVLGLLGDAERLEKVWVAGSDSAVELAEVNAELADLTSLIGSPAYRAGSPQREALDARIAALAARQEELEGLEARPSGWEWRETGQRFGDWWREQGTAAKNTWLRSMNVRLTFDVRGGLARTIDLGDLQEYEQHLRLGSVVERLHTGMS

SEQ ID NO: 11829 - protein, 500 aa, synthetic construct
MRALVVIRLSRVTDATTSPERQLESCQQLCAQRGWDVVGVAEDLDVSGAVDPFDRKRRPNLARWLAFEEQPFDVIVAYRVDRLARSIRHLQQLVRWAEDHKKLVVSATEAHFDTTTPFAAVVIALMGTVAQMELEAIKERNRSAAHFNIRAGKYRGSLPPWGYLPTRVDGEWRLVPDPVQRERILEVYHRVVDNHEPLHLVAHDLNWRGVLSPRDYFAQLRGREPQGRKWSATALKRSMISEAMLGYATLNGKTVRDDDGAPLVRAEPILTREQQEALRAELVKTSRAKPAVSTPSLLLRVLFCAVCGEPAYKFAGGGRKHPRYRCRSMGFPKHCGNGTVAMAEWDAFCEEQVLDLLGDAERLEKVWVAGSDSAVELAEVNAELVDLASLIGSPAYRASSPQREALDARIAALAARQEELEGLEARPSGWEWRETGQRFGDWWREQDTAAKNTWLRSMNVRLTFDVRGGLTRTIDFGDLQEYEQHLRLGSVVERLHTGMS

SEQ ID NO: 11830 - protein, 500 aa, synthetic construct
MRALVVIRLSRVTDATTSPERQLESCQQLCAQRGWDVVGVAEDLDVSGAVDPFDRKRRPNLARWLAFEEHPFDVIVAYRVDRLARSIRHLQQLVHWAEDHKKLVVSATEAHFDTTTPFAAVVIALMGTVAQMELEAIKERSRSAAHFNIRAGKYRGSLPPWGYLPTRVDGEWRLVPDPVQRERILEVYHRVVDNHEPLHLVAHDLNRRGVLSPRDYFAQLRGREPQGRKWSATALKRSMISEVMLGYATLNGRTVRDDDGAPLVRAEPILTREQLEALRAVLVKTSRAKPAVSTPSLLLRVLFCAVCGEPAYKFAGGGRKHPRYRCRSMGFLKHCGNGTVAMAEWDAFCEEQVLDLLGDAERLEKVWVAGSDSAVELAEVNAELVDLTSLIGSPAYRAGSPQRVALDARIAALAARQEELEGLEARPSGWEWRGTGQRFGDWWREQDTAAKNTWLRTMNVRLTFDVRGGLTRTIDFGDLQGYEQHLRLGSVVERLHTGMS

SEQ ID NO: 11831 - protein, 500 aa, synthetic construct
MRALVVIRLSRVTDATTSPERQLESCQQLCAQRGWDVVGVAEDLDVSGAVDPFDRKRRPNLARWLAFEEQPFDVIVAYRVDRLTRSIRHLQQLVHWAEDHKKLVVSATEAHFDMTTPFAAVVIALMGTVAQMELEAIKERSRSAAHFNIRAGKYRGSLPPWGYLPARVDGEWRLVPDPVQRERILEVYRRVVDNHEPLHLVAHDLNRRGVLSPKDYFAQLRGREPQGRKWSATALKRSMTSEAMLGYATLNGKTVRDDDGAPLVRAEPILTREQLEALHAELVKTSRAKPAVSTPSLLLRVLFCAVCGEPAYKFSGGGRKHPRYRCRSMGFPKHCGNGTVAMAEWDAFCEEQVLDLLGDAERLEKVWVAGSDSAVELAEVNAELVDLTSLIGSPACRAGSPQREALDARIAALAARQEELEGLEARPSGWEWRETGQRFGDWWREQDTAARNTWLRSMNVRLTFDVRGGLTRTIDFGDLQEYEQHLRLGSVVERLHTGMS

SEQ ID NO: 11832 - protein, 500 aa, synthetic construct
MRALVVIRLSRVTDATTSPERQLESCQQLCAQRGWDVVGVAEDLDVSGAVDPFDRKRRPNLARWLAFEEQPFDVIVAYRVDRLTRSVQHLQQLVHWAEDHKKLVVSATEAHFDTTTPFAAVVIALMGTVAQMELEAIRERNRSAAHFNIRAGKYRGSLPPWGYLPTRVDGEWRLAPDPVQRERILEVYHRVVDNHEPLHLVAHDLNQRGVLSPRDYFAQLQGREPQGRKWSATALKRSMTSEAMLGYATLNGKTVRDDDGAPLVRAEPILTRGQLEALRAELVKTSRAKPAVSTPSLLLRVLFCAVCGEPAYKFAGGGRKHPRYRCRSMGFPKHCGNGTIAMAEWDAFCEEQVLDLLGDAERLEKVWVAGSDSAVELAEVNAELVDLTSLIGSPAYRAGSPQREALDARIAALAARQEELEGFEARPSGWEWCETGQRFGDWWREQDTAAKNTWLRSMNVRLTFDVRGGLTRTIDFGDLQGYEQHLRLGSVVERSHTGMS

SEQ ID NO: 11833 - protein, 500 aa, synthetic construct
MRALVVIRLSRVTEATTSPERQLESCQQLCARRGWDVVGVAEDLDVSGAVNPFDRKRRPSLARWLAFEEQPFDAIVAYRVDRLTRSIRHLQQLVHWAEDHKKLVVSATEAHFDTTTPFAAVVIALMGTVAQMELEAIKERNRSAAHFNIRAGKYRGSLPPWGYLPTRVDGEWRLVPDPVQRERILEVYHRVVDDHEPLHLVAHDLNRRGVLSPKDYFAQLRGREPQGRKWSATALKRSMISEAMLGHATLNGKTVRDDDGAPLVRAESILTREQQEALRAELVRTSRAKPAVSTPSLLLRVLFCAVCGEPAYKFSGGGRKHPRYRCRSMGFPKHCGNGTVATAEWDAFCEEQVLDLLGDAERLEKVWVAGSDSAVEFAEVNAELVDLTSLIGSPAYRAGSPQREALDARIAALAARQEELEGLEARPSGWEWRGTGQRFGDWWREQDTAAKNAWLRSMNVRLTFDVRGGLTRTIDFGDLQEYEQHLRLGSVVERLHTGMS

SEQ ID NO: 11834 - protein, 500 aa, synthetic construct
MRALVVIRLSRVTDATTSPERQLESCQQLCAQRGWDVVGVAEDLDVSGAVDPFDRKRRPNLARWLAFEEQPFDVIVAYRVDRLTRSTRHLQQLVHWAEDHKKLVVSATEAHFDTTTPFAAVVVALMGTVAQMELEAIKERTRSAAHFNIRAGKYRGSLPPWGYLPARVDGEWRLAPDPVQRERILEVYHRVVDNHEPLHLVAHDLNRRGVLSPKDYFAQLQGREPQGRKWSATALKRSMISVAMLGYATLNGKTVRDDDGAPLVRAEPILTREQLEALRAELVKTSRAKPAVSTPSLLLRVLFCAVCGEPAYKFAGGGRKHPRYRCRSMGFPKHCGNGTVAMAEWDAFCEEQVLNLLGDAERLEKVWVAGSDSAVELAEVNAELVDLSSLIGSPAYRAGSPQREALDARIAALAARQEELEGLEARPSGWEWRETGQRFGDWWREQDTVAKNTWLRSMNVRLTFDVRGGLTRSIDFGDLREYEQHLRLGSVVERLHTGMS

SEQ ID NO: 11835 - protein, 500 aa, synthetic construct
MRALVVIRLSRVTDATTSPERQLESCQQLCAQRGWDVVGVAEDLDVSGAVDPFDRKRRPNLARWLAFEEQPFDAIVAYRVDRLTRSIRHLQQLVHWAEDHKKLVVSATEAHFDTATPFAAVVIALVGTVAQMELEAIKERNRSAAHFNIRAGKYRGSLPPWGYLPARVDGVWRLVPDPVQRERILEVYHRVVDNHEPLHLVAHDLNRRGVLSPKDYFAQLQGREPQGRKWSATALKRSMISEAMLGYATLNGKTVRDDDGAPLVRAEPILTREQQEALRAELVKTSRAKPAVSTPSLLLRVLFCAVCGEPAYKFAGGGRKHPRYRCRSMGFPKHCGNGTVAMAEWDAFCEEQVLGLLGDAERLEKVWVAGSDSAVELAEVNAELVDLTSLIGSPAYRAGSPQREALDARIAALAARQEELEGSESRPSGWEWRETGQRFGDWWREQDTAAKNTWLRSMNVRLTFDVRGGLTRTIDFGDLREHEQHLRSGSVVERLHTGMS

SEQ ID NO: 11836 - protein, 500 aa, synthetic construct
MRALVVIRLSRVTDATTSPERQLESCQQLCAQRGWDVVGVAEDLDVSGAVDPFDRKRRPNLARWLAFEERPFDVIVAYRVDRLARSIRHLQQLVHWAEDHKKLVVSATEAHFDTTTPFAAVVIALMGTVAQMELEAIKERSRSAAHFNIRAGKYRGSLPPWGYLPARVDGEWRLVPDPVQRERILEVYHRVVDNHEPLHLVAHDLNRRGVLSPKDYFAQLRGREPQGRKWSATALKRSMISEAMLGYATLNGKTVRDDDGAPLVRAEPTLTREQLEALRAELVKTSLAKPAVSTPSLLLRVLFCAVCGEPAYKFAGGGRKHPRYRCRSMGFPKHCGNGTVAMAEWDAFCEEQVLDLLGDAERLEKVWVAGSDSAVELAEVNAELVDLTSLIGSPAYRAGSPQREALDARIAALAARQEELEGLEARPSGWEWRETGQRFGDWWREQDTAAKNTWLRSMNVRLTFDVRGGLTRTIDFGDLQEYEQHLRLGSVVERLHTGMS

SEQ ID NO: 11837 - protein, 500 aa, synthetic construct
MRALVVIRLSRVTDATTSPERQLESCQQLCAQRGWDVVGVAEDLDVSGAVDPFDRKRRPNLARWLAFEEQPFDVIVAYRVDRLARSIRHLQQLVHWAEDHKKLVVSATEAHFDTTTPFAAVVIALMGTVAQMELEAIKERNRSAAHFNIRAGKYRGSLPPWGYLPARVNGEWRLAPDPVQRERILEVYHRVVDNHEPLHLVAHDLNRRGVLSPKDYFAQLRGRKPQGRKWSATALKRSMISEAMLGYATLNGKTVRNDDGAPLVRAEPILTREQLEALRAELVKTSRAKPAVSTSSLLLRVLFCAVCGEPAYKFSGGGRKHPRYRCRSMGFPKHCGNGTVAMAEWDAFCEEQVLDLLGDAERLEKVWVAGSDSAVELAEVNAELVGLTSLIGSPAYRAGSPQREALGARIAALAARQEELEGLEARPSGWEWRGAGQRFGDWWREQDTTAKNTWLRSMNVRLTFDVRGGLTRTIDFGDLQEYEQHLRLGSVDERLHTGAS

SEQ ID NO: 11838 - protein, 500 aa, synthetic construct
MRALVVIRLSRVTDATTSPERQLESCQQLCAQRGWDVVGVAEDLDVSGAVDPFDRKRRPNLARWLAFEEQPFDVIVAYRVDRLARSIRHLQQLVHWAGDHKKLVVSATEAHFDTTTPFAAVVIALMGTVAQMELEAIKERSRSAAHFNIRAGKYRGSLPPWGYLPTRVDGEWRLAPDPVQRERILEVYHRVVDNHEPLHLVAHDLNRRGVLSPKDYFAQLRGREPQGRKWSATALKRSMVSEAMLGYATLNGKTVRDDDGAPLVRAEPILTREQLEALRAELVKTSRAKPAVSTPSLLLRVLFCAVCGEPAYKFAGGGRKHPRYRCRSMGFPKHCGNGTVAMAEWDAFCEEQVLDLLGDAERLEKVWVAGSDSAVELAEVNAELVDLTSLIGSPAYRAGSPQREALDARIAALAARQEELEGLEARPSGWEWRETGQRFGDWWREQDTAAKNTWLRSMNVRLTFDVRGELTRTIDFGDLQEYEQHLRLSSVVERLHTGML

SEQ ID NO: 11839 - protein, 500 aa, synthetic construct
MRALVVIRLSRVTDATTSPERQLESCQQLCAQRGWDVVGVAEDLDVSGAVNPFDRKRRPNLARWLAFEEQPFDVIVAYRVDRLTRSTRHLQQLVHWAEDHKKLVVSATEAHFDTTTPFAAVVIALMGTVAQMELEAIKERSRSAAHFNIRAGKYRGSLPPWGYLPARVDGEWRLVPDPVQRERILEVYHRVVDNHEPLHLVAHDLNRRGVLSPKDYFAQLRGREPQGRKWSATALKRSMISVAMLGYATLCGETVRDDDGAPLVRAEPILTREQLEALRAELVKTSRAKPAVSTPSLLLRVLFCAVCGEPAYKFAGGGRKHPRYRCRSMGFPKHCGNGTVAMAEWDAFCEEQVLNLLGDAERLEKVWVAGSDSAVELAEVNKELVDLTSLIGSPAYRAGSPQREALDARIAALAARQEELEGLEARPSGWEWRETGQRFGDWWREQDTAAKNAWLRSMNVRLTFDVRGGLTRTIDFGDLQEYEQHLRLGSVVEHSHTGMS

SEQ ID NO: 11840 - protein, 500 aa, synthetic construct
MRALVVIRLSRVTEATTSPERQLESCQQLCAQRGWEVVGVAEDLDVSGAVDPFDRKRRPNLARWLAFEEQSFDVIVAYRVDRLARSIRHLQQLVHWAEDRKKLVVSATEAHFDTTTPFAAVVIALMGTVAQMELEAIKERNRSAAHYNVRAGKYRGSLPPWGYLPTRVDGEWRLVPDPVQRERILEVYHRVVDNHEPLHLVAHDLNRRGVLSPKDYFAQLRGREPQGRKWSATALKRSMTSVAMLGYATLNGKTVRDDDGAPLVRAEPILTRAQLEALRAELAKTSRAKPAVSTPSLLLRVLFCAVCGEPAYKFAGGGRKHPRYRCRSMGFPKHCGNGTVAMAEWDAFCEEQVLNLLGDAERLEKVWVAGSDSAVELAEVNAELVDLTSLIGSPAYRAGSPQREALDARIAALAARQEELEGLESRPSGWEWRETGQRFGDWWREQDTAVKNTWLRSMSVRLTFDVRGGLTRTIDFGDLQEYGQHLRLGSVVERLRTGMS

SEQ ID NO: 11841 - protein, 500 aa, synthetic construct
MRALVVIRLSRVTDATTSPERQLESCQQLCAQRGWDVVGVAEDLDVSGAVDPFDRKRRPNLARWLAFEEQPFDAIVAYRVDRLARSIRHLQQLVHWAEDHKKLVVSATEAHFDTTTPFAAVVIALMGTVAQMELEAIKERSRSATHFNIRAGKYRGSLPPWGYLPARVDGEWRLVPDPVQRERILEVYHRVVDNHEPLHLVVHDLNRRGVLSPKDYFAQLQGREPQGRKWSATALKRSMISEAMLGYATLNGKIVRDDDGAPLVRAEPILTREQLEALRAEFVKTSRAKPAVSTPSLLLRVLFCAVCGEPAYKFAGGGRKHPRYRCRSMGFPKHCGNGTVAMAEWDTFCEEQVLDLLGDAERLEKVWVAGSDSAVELTEVNAELVDLTSLIGSPAYRAGSPQREALDARIAALAARQGELEGLEARPSGWEWRETGQRFGDWWREQDTAAKNTWLRLMNVRLTFDVRGGLTRTIDFGDLQEYEQHLRLGSVVERLHTGMS

SEQ ID NO: 11842 - protein, 500 aa, synthetic construct
MRALVVIRLSRVTDATTSPERQLESCQQLCAQRGWNVVGVAEDLDVSGAVDPFDRKRRPNLARWLAFEEQPFDVIVAYRVDRLARSVRHLQQLVHWAGDHKKLVVSATEAHFDTTTPFAAVVIALMGTVAQMELEAIKERSRSAAHFNIRAGKYRGSLPPWGYLPARVDGEWRLVPDPVQRERILEVYHRVVDNHEPLHLVAHDLNRRGVLSPKDYFAQLRGREPQGRKWSATALKRSMISVAMLGYASLCGKTVRDDDGAPLVRAEPILTREQLEALRAELVKTSRAKPAVSTPSLLLRVLFCAVCGEPAYKFAGGGRKHPRYRCRSMGFPKHCGNGTVAMAEWDAFCEEQVLNLLGGAERLEKVWVAGSDSAVELAEVNKELVDLTSLIGSPAYRAGSPQREALDARIAALAARQEELEGLEARPSGWEWRGTGQRFGDWWRELDTAAKNTWLRSMNVRLTFDVRDGLTRTIDLGDLQEYEQHLRLGSVVERSHTGMS

SEQ ID NO: 11843 - protein, 500 aa, synthetic construct
MRALVVIRLSRVTDATTSPERQLESCQQLCAQRGWDVVGVAEDLDVSGAVDPFDCKRRPNLARWLAFEEQPFDVIVAYRVDRLTRSTRHLQQLVHWAEDHKKLVVSATEAHFDTTTPFAAVVIALMGTVAQMELEAIKERSRSAAHFNIRAGKYRGSLPPWGYLPTRVDGEWRLVPDPVQRERILEVYHRVVDNHEPLHIVAHDLNRHGVLSPKDYFAQLRGREPQGRKWSATALKRSMISEAMLGYATLNGKTVRDDDGAPLVRAEPILTREQLEALRAELVKTSRAKPAVSTPSLLLRVLFCAVCGEPAYKFAGGGRKHPRYRCRSMGFPKHCGNGTVAMAEWDAFCEEQVLGLLGDAERLEKVWVAGSDSAVELAEVNAELVDLTSLIGSPAYRAGSPQREALDARIAALAARQEELEGLEARPSGWEWRETGQRFGDWWREQDTAAKNTWLRSMNVRLTFDARGGLTRTIDLGDLQEYEQHLRLGSMVDRLHAGMS

SEQ ID NO: 11844 - protein, 500 aa, synthetic construct
MRALVVIRLSRVTEATTSPERQLESCQQLCAQRGWDVVGVAEDLDVSGAVDPFDRKRRPNLARWLASEEQPFDVIVAYRVDRLARSIRHLQQLVHWAEDHKKLVVSATEAHFDTTTPFAAVVIALMGTVAQMELEAIRERNRSAAHFNIRAGKYRGSLPPWGYLPTRVDGEWRLVPDPVQRERILEVYHRVVNNHEPLHLVAHDLNRRGVLSPKDYFAQLQGREPQGRKWSATALKRSMISEAMLGYATLNGKTVRDDDGAPLVRAEPILTREQQEALRAELVKTSRAKPAVSTPSLLLRVLFCAVCGGPAYKFAGGGRKHPRYRCRSMGFPKHCGNGTVAMAEWDAFCEEQVLGLLGDAERLEKVWVAGSDSAVELAEVNAELVDLTSLIGSPAYRAGSPQREALDARIAALAARQEELEGLEARPSGWEWRETGQRFGDWWREQDTAAKNTWLRSMNVRLTFDVRGGLTRMIDFGDLQEYVQHLRLGSVVERLHAGMS

SEQ ID NO: 11845 - protein, 500 aa, synthetic construct
MRALVVIRLSRVTDATTSPERQLESCQQLCAQRGWDIVGVAEDLDVSGAVDPFDRKRRPNLARWLAFEEQPFDVIVAYRVDRLARSIRHLQQLVHWAEDHKKLIVSATEAHFDTTTPFAAVVIALMGTVAQMELEAIKERSRSAAHFNIRAGKYRGSLPPWGYLPTRVNGEWRLVPDPVQRERILEVYHRVVDDHEPLHLVAHDLNRRGVLSPRDYFAQLQGREPQGRKWSATALKRSMISEAMLGYATLNGKIVRDGDGAPLVRAEPILTREQLEAIRAELVKTSRAKPAVSTPSLLLRVLFCAVCGEPAYKFAGGGRKHPRYRCRSMGFPKHCGNGTVAMAEWDAFCEEQVLDLLGDAERLEKVWVAGSDSAVELAEVNAELVDLTSLIGSPAYRAGSPQREALDARIAALAARQEELEGLEARPSGWEWRGTGQRFGDWWRERDSAAKNTWLRSMNVRLTFDVRGGLTRTIDFGDLQEYVQHLRLGSVVERLHTGMS

SEQ ID NO: 11846 - protein, 500 aa, synthetic construct
MRALVVIRLSRVTDATTSPERQLESCQQLCAQRGWDVVGVAEDLDVSGAVDPFDRKRRPNLARWLAFEEQPFDVIVAYRVDRLTRSTRHLQQLVLWAEDHKKLVVSATEAHFDTTTPFAAVVIALMGTVAQMELEAIKERSRSAAHFNIRAGKYRGSLPPWGYLPARVDGEWRLAPDPVQRERILEVYHRVVDNHEPLHSVAHDLNRRGVLSPKDYFAQLQGREPQGRKWSATALKRSMISEAMLGYATLNGKIVRDDDGAPLVRAEPILTREQLEALRAELVKTSRAKPAVSTPSLLLRVLFCAVCGEPAYKFAGGGRKHPRYRCRSMGYPKHCGNGTVAMAEWDAFCEEQVLDLLGDAERLEKVWAAGSDSAVELAEVNAELVDLTSLIGSPAYRAGSPQREALDARIAALAVRQEELEGLEASPSGWEWRETGQRFGDWWREQDTAAKNTWLRSMNVRLTFDVRGGLTRTIDFGDLQEYEQHLRLGSVVERLHTGMS

SEQ ID NO: 11847 - protein, 500 aa, synthetic construct
MRALVVIRLSRVTDATTSPERQLESCQQLCAQRGWDVVGVAEDLDVSGAVDPFDRKRRPNLARWLAFEEQPFDVIVAYRVDRLARSIRHLQQLVHWAEDHKKLVVSATEAHFDTTTPFAAVVIALMGTVAQMELEAIKERNRSAAHFNIRAGKYRGSLPPWGYLPTRVDGEWRLVPDPVQRERILEVYRRVVDNHEPLHLVAHDLNRRGVLSPRDYFAQLRGREPQDRKWSATALKRSMISEAMLGYATLNGKTVRDDDGAPLVRAEPILTREQLEALRAELVKTSRAKPAVSTPSLLLRVLFCAVCGEPAYKFAGGGRKHSRYRCRSMGFPKHCGNGTVAMAEWDAFCEEQVLNLLGDAERLEKVWVAGSDSAVELAEVNTELVDLTSLIGSPAYRAGSPQREALDARIAALAARQEELEGLEARPSGWEWRETGQRFGDWWREQDTAAKNTWLRSMNVRLTFDVRGGLTRTIDFGDLQEYEQHSRLGSVVECLHTGMS

SEQ ID NO: 11848 - protein, 500 aa, synthetic construct
MRALVVIRLSRVTDATTSPERQLESCQQLCAHRGWDVVGVAEDLDVSGAIDPFDRKRRPNLARWLAFEEQPFDVIVAYRVDRLTRSTRHLQQLVHWAEDHKKLLVSATEAHFDTTTPFAAVVIALMGTVAQMELEAIKERNRSAAHFNIRAGKYRGSLPPWGYLPTRVDGEWRLVPDPVQRERILEVYHRVVDNHEPLHLVAHDLNRRGVLSPKDYFAQLRGREPQGRKWSATALKRSMISEAMLGHATLNGKTVRDDDGAPLVRAEPILTREQLEALRAELVKTSRAKPAVSTPSLLLRVLFCAVCGEPAYKFAGGGRKHPRYRCRSMGFPKHCGNGTVAMAEWDAFCEEQVLDLLGDAERLEKVWVTGSDSAVELAEVNAELVDLTSLIGSPVYRAGSPQREALDARIAALAARQEELEGLEARPSGWEWRGTGQRFGDWWREQDTAAKNTWLRSMNVRLTFDVRGGLTRTIDFGDLQEYEQHLRLGSVAERLHTGMS

SEQ ID NO: 11849 - protein, 500 aa, synthetic construct
MRALVVIRLSRVTDATTSPERQLESCQQLCAQRGWDVVGVAEDLDVSGAVDPFDRECRPNLARWLAFEEQPFDAIVAYRVDRLARSIRHLQQLVHWAEDHKKLVVSATEAHFDTTTPFAAVVIALMGTVAQMELEAIKERNRSAAHFNIRAGKYRGSLPPWGYLPTRVDGEWRLVPDPVQRERILEVYHRVVDNHEPLHLVAHDLNRRGVLSPRDYFAQLQGREPQGRKWSATALKRSMISGAMLGYATLCGKTVRDDDGAPLVRAEPILTREQLEALRAELVKTSRAKPAVSTPSLLLRVLFCAVCGEPAYKFAGGGRKHPRYRCRSMGFPKHCGNGTVAMAEWDAFCEEQVLNLLGDAERLEKVWVAGSDSAVELAEVNKELVDLTSLIGSPAYRAGSPQREALDARIAALAARQEELEGLEARPSGWEWRGTGQRFGDWWREQDTAAKNTWLRSMNVRLTFDVRGGLTRTIDFGDLQEYEQHLRLGSVVERLHTGMS

SEQ ID NO: 11850 - protein, 500 aa, synthetic construct
MRALVVIRLSRVTDATTSPERQLESCQQLCAQRGWNVVGVAEDLDVSGAVDPFDRKRRPSLARWLAFEEQPFDVIVAYRVDRLTRSTRHLQQLVHWAEDHKKLVVSATEAHFDTTTPFAAVVIALMGTVAQMELEAIKERNRSAAHFNIRAGKYRGSLPPWGYLPTRVDGEWRLVPDPVQRERILEVYRRVVDNHEPLHLVAHDLNRRGVLSPKDYFAQLQGREPQGRKWSATALKRSMISEAMLGYATLNGKIVRDDDGAPLVRAEPILTREQLEALRAEFVKTSRAKPAVSTPSLLLRVLFCAVCGEPAYKFAGGGRKHSRYRCRSMGFPKHCGNGTVAMAEWDAFCEEQVLGLLGDAERLEKVWVAGSDSAVELAEVNAELVDLTSLIGSPAYRAGSPQREALDARIAALAARQGELEGLEARPSGWEWRETGQRFGDWWREQDTAAKNTWLRSMNVRLTFDVRGGLTRTVDFGDLQEYEQHLRLGSVVERLHTGMS

SEQ ID NO: 11851 - protein, 500 aa, synthetic construct
MRALVVIRLSRVTDATTSPERQLESCQQLCAQRGWDVVGVAEDLDVSGAVDPFDRKRRPNLARWLAFEEQPFDVIVAYRVDRLTRSIRHLQQLVHWAEDHKKLVVSATEAHFDMTTPFAAVVIALMGTVAQMELEAIKERSRSAAHFNIRAGKYRGSLPPWGYLPTRVDGEWRLAPDPVQRERILEVYHRVVDNHEPLHLVAHDLNRRGVLSPKDYFAQLQGREPQGRKWSATALKRSMISEAMLGYATLNGKTVRDDDGAPLVRAEPILTREQQEALRAELVKTSRAKPAVSTPSLLLRVLFCAVCGEPAYKFAGGGRKHPRYRCRSMGFPKHCGNGTVAMAEWDAFCEEQVLDLLGDAERLEKVWVAGSDSAVELAEVNAELVDLTSLIGSPAYRAGSLQREALDARIAALAARQEELKGLEARPSGWEWRETGQRFGDWWRERDTAAKNTWLRSMNVRLTFDVHGGLTRTIDFGDLQEYKQHLRLGSVVERLRTGMS

SEQ ID NO: 11852 - protein, 500 aa, synthetic construct
MRALVVIRLSRVTDATTSPERQLESCQQLCAQRGWDVVGVAEDLDVSGAVDPFDRKRRPNLARWLAFEEQPFDVIVAYRVDRLARSIRHLQQLVHWAEDHKKLVVSATEAHFDTTTPFAAVVIALMGTVAQMELEAIKERSRSAAHFNIRAGKYRGSLPPWGYLPARVDGEWRLVPDPVQRERILEVYHRVVDNHEPLHLVAHDLNRRGVLSPRDYFAQLRGREPQGRKWSATALKRSMISEAMLGYATLNGKTVRDDDGAPLVRAEPILTREQLEALRAVLVKTSRAKPAVSTPSLLLRVLFCAVCGEPAYKFAGGGRKHPRYRCRSMGFPKHCGNGTVAMAEWDAFCEEQVLNLLGDAERLEKVWVAGSDSAVGLAEVNAELVDLTSLIGSPVYRAGSPQREALDARIAALAARQEELEGLEARPSGWEWRETGQRFGDWWREQDTTAKNTWLRSMNVRLTFDVRGGLTRTVDFGDLQGYEQHLRLGSVVERLHTGMS

SEQ ID NO: 11853 - protein, 500 aa, synthetic construct
MRALVVIRLSRVTDATTSPERQLESCQQLCAQRGWDVVGVAEDLDVSGAVDPFDRKRRPNLARWLVFEEQPFDVIVAYRVDRLARSIRHLQQLVHWAEDHKKLVVSATEAHFDTTTPFAAVVIALMGTVAQMELEAIKERTRSAAHFNIRAGKYRGSLPPWGYLPTRVDGEWRLVPDPVQRERILEVYHRVVDNHEPLHLVAHDLNRRGVLSPKDYFAQLQGREPQGRKWSATALKRSMISEAMLGYATLNGKTVRDDDGAPLVRAEPILTRGQQEALRAELVKTSRAKPAVSTPSLLLRVLFCAVCGEPAYKFAGGGRKHPRYRCRSMGFPKHCGNGTVAMAEWDAFCEEQVLGLLGDAERLEKVWVAGSDSAVELAEVNAELVDLTSLISSPAYRAGSPQREALDARIAALAARQEELEGLEARPSGWEWRETGQRFGDWWREQDTAAKNTWLRSMNVRLTFDVRGGLTRTVDFGELQEYGQHLRLGSVVERLHTGMS

SEQ ID NO: 11854 - protein, 500 aa, synthetic construct
MRALVVIRLSRVTDATTSPERQLESCQQLCAQRGWDVVGVAEDLDVSGAVDPFDRKRRPNLARWLAFEEQPFDAIVAYRVDRLTRSIRHLQQLVHWAEDHKKLVVSATEAHFDTTTPFAAVVIALMGTVAQMELEAIKERNRSAAHFNIRAGKYRGSLPPWGYLPARVDGEWRLVPDPVQRERILEVYHRVVDNHEPLHLVAHDLNRRGVLSPRDYFAQLRGREPQGRKWSATALKRSLISEAMLGYATLNGKAVRDDDGAPLVRAEPILTREQLEALRAELVKTSRAKPAVPTPSLLLRVLFCAVCGEPAYKFAGGGRKHPRYRCRSMGFPKHCGNGTVAMAEWDAFCEEQVLDLLGGAERLEKVWVAGSGTAVELAEVNAELVDLTSLIGSPAYRAGSPQREALDARIAALASRQEELKGLEARPSGWGWRETGQRFGDWWREQDTAAKNTWLRSMNVRLTFDIRGELTRTIDFGDLLEYEQHLRLGGVVERLHTGMS

SEQ ID NO: 11855 - protein, 500 aa, synthetic construct
MRALVVIRLSRVTDTTTSPERQLESCQQLCAQRGWDVVGVAEDLDVSGAVDPFDRKRRPNLARWLVFEEQPFDVIVAYRVDRLARSIRHLQQLVHWAEDHKKLVVSATEAHFDTTTPFAAVVIALMGTVAQMELEAIKERNRSAAHFNIRAGKYRGSLPPWGYLPTRVDGEWRLVPDPVQRERILEVYHRVVDNHEPLHLVAHDLNRRGVLSPKDYFAQLQGREPQGRKWSATALKRSMISEAMLGYATLNGKTVRDDDGAPLVRAEPILTREQQEAVRAELVKTSRAKPAVSTPSLLLRVLFCAVCGEPAYKFAGGGRRHPRYRCRSMGFPKHCGNGTVAMAEWDAFCEEQVLDLLGDVERLEKVWVAGSDSTVELAEVNAELVDLTSLIGSPTYRAGSPQREALDARIAALAARQEELEGLEARPSGWEWRETGQRFGDWWREQDIAAKNTWLRSMNVRLTFDVRGGLTRTIDFGDLQEYEQHLRLGSAVERLHTGMS

SEQ ID NO: 11856 - protein, 500 aa, synthetic construct
MRALVVIRLSRVTDATTSPERQLESCQQLCAQRGWDVVGVAEDLDVSGAVDPFDRKRRPNLARWLAFEEQPFDVIVAYRVDRLARSIRHLQQLVHWAEDHKKLVVSATEAHFDTTTPFATVVIALMGTVAQMELEAIKERSRSAAHFNIRAGKYRGSLPPWGYLPARVDGEWRLVPDPVQRERILEVYHRVVDNHEPLHLVAHDLNRRGVLSPKDYFAQLRGREPQGRKWSATALKRPMISEAMLGYATLNGKTVRDEDGAPLVRAEPILTREQLEALRAELVKASRAKPAVSTPSLLLRVLFCAVCGEPAYKFAGGGRKHPRYRCRSMGFPKHCGNGTVTMAEWDAFCEEQVLDLLGDAERLEKVWVAGSDSAVELAEVNAELVDLTSLIGSPAYRAGSPQREALDARIAALAARQEELEGLEARPSGWEWRGTGQRFGDWWREQNTAAKNSWLRSMNVRLTFDVRGGLTRTIDFGVLQEYEQHLRLGSVVERLHTGMS

SEQ ID NO: 11857 - protein, 500 aa, synthetic construct
MRALVVIRLSRVTDATTSPERQLESCQQLCAQRGWDVVGVAEDLDVSGAVDPFDRKRRPNLARWLAFEERPFDVIVAYRVDRLTRSIRHLQQLVHWAEDHKKLVVSATEAHFDTTTPFAAVVIALMGTVAQMELEAIKERSRSAAHFNIRAGKYRGSLPPWGYLPTRVDGEWRLAPDPVQRERILEVYHRVVDNHEPLHLVAHDLNRRGVLSPKDYFAQLQGREPQGRKWSATALKRSMISVAMLGYATLNGKTVRDDDGAPLVRAEPILTRGQLEALRAELVKTSRAKPAVSTPSLLLRVLFCAVCGEPTYKFAGGGRKHPRYRCRSMGFPKHCGNGTVAMAEWDTFCEEQVLDLLGDAERLEKVWVVGSDFAVELAEVNAELVDLTSLIGSPAYRAGSPQREALDARIAALAARQEELEGSEAHPSGWEWRGTGQRFGDWWRELDTAAKNAWLRSMNVRLTFDVRGGLTRTIDFGDLQEYEQHLRLGSVVERLHTGMS

SEQ ID NO: 11858 - protein, 500 aa, synthetic construct
MRALVVIRLSRVTDATTSPERQLESCQQLCAQRGWDVVGVAEDLDVSGAVDPFDRKRRPNLARWLAFEEQPFDVVVAYRVDRLARSIRHLQQLVHWAEDHKKLVVSATEAHFDTTTPFAAVVIALMGTVAQMELEAIKERNRSAAHFNIRAGKYRGSLPPWGYLPTRVDGEWRLAPDPVQRERILEVYHRVVDNHEPLHLVAHDLNRRGVLSPKDYFAQLQGREPQGRKWSATALKRSMISVAMLGYATLNGKTVRDDDGAPLVRAEPILTREQLEALRAELVKTSRAEPAVSTPSLLLRVLFCAVCGEPAYKFTGGGRKHPRYRCRSMGFPKHCGNGTVATAEWDAFCEEQVLDLLGDVERLEKVWVAGSGFAVELAEVNAELVDLTSLIGSPAYRAGSPQREALDARIAALAARQEELGGLGARPSGWEWRETGQRFGDWWREQDTAAKNTWLRSMNVRLTFDVRGGLTRTIDFGDLQEYKQHLRLGSVVERLHTGMS

SEQ ID NO: 11859 - protein, 500 aa, synthetic construct
MRALVVIRLSRVTDATTSPERQLESCRQLCAQRGWDVVGVAEDLDVSGAVDPFDRKRRPNLARWLASEERPFDVIVAYRVDRLTRSIRHLQQLVHWAEDHKKLVVSATEAHFDTTTPFAAVVIALMGTVAQMELEAIKERNRSAAHFNIRAGKYRGSLPPWGYLPTRVDGEWRLVPDPVQRERILEVYHRVVDNHEPLHLVAHDLNRRGVLSPKDYFAQLRGREPQGRKWSATALKRSMISEAMLGYATLNGETVRDDNGAPLVRAEPILTREQLEALRAVLVKTSRAKPAVSTPSLLLRVLFCAVCGEPAYKFAGGGRKHPRYRCRSMGFPKHCGNGTVAMVEWDAFCEEQVLDLLGDAERLEKVWVAGSDSAVELAEVNAELVDLTSLIGSPAYRAGSLQREALDARIAALAARQEELEGLEARPSGWEWRGAGQRFGDWWREQDTAAKNAWLRSMNVRLTFDVRGGLTRTTDLGDLQEYEQHLRLGSVDERLHTGMS

SEQ ID NO: 11860 - protein, 500 aa, synthetic construct
MRALVVIRLSRVTDATTSPERQLESCQQLCAQRGWDVVGVAEDLDVSGAVDPFDRKRRPNLARWLAFEEQPFDVIVAYRVDRLTRSTRHLQQLVHWAEDRKKLVVSATEAHFDTTTPFAAVVIALMGTVAQMELEAIKERSRSAAHFNIRAGKYRGSLPPWGYLPARVDGEWRLVPDPVQRERILEVYHRVVDNHEPLHLVAHDLNRRGVLSPKDYFAQLQGREPQGRKWSATALKRSIISEVMLGYATLNGKTVRDDDGAPLVRAEPILTREQLEAVRAELVKASRAKPAVSTPSLLLRVLFCAVCGEPAYKFVGGGRKHSRYRCRSMGFPKHCGNGTVAMAEWDAFCEEQILNLLGDAERLEKVWVAGSDSAVELAEVNAELVDLTSLIGSPAYRAGSPQREALDARIAALAARQEELEGLEARPSGWEWRGTGQRFGDWWREQDTAAKNTWLRSMNVRLTFDVRGGLTRTVDFGDLQEYEQHLRLGSVVERLHTGMS

SEQ ID NO: 11861 - protein, 500 aa, synthetic construct
MRALVVIRLSRVTDATTSPERQLESCQQLCAQRGWDVVGVAEDLDVSGAVDPFDRKRRPNLARWLAFKERPFDVIVAYRVDRLARSIRHLQQLVHWAEDHKKLVVSATEAHFDTTTPFAAVVIALMGTVAQMELEAIKERSRSAAHFNIRAGKYRGSLPPWGYLPARVDGVWRLVPDPVQRERILEVYHRVVNNHEPLHLVAHDLNRRGVLSPKDYFAQLQGREPQGRKWSATALKRSMISEAMLGYATLNGKTVRDDDGAPLVRAEPVLTREQQEALRAELVKTSRAKPAVSTPSLLLRVLFCAVCGEPAYKFAGGGRKHSRCRCRSMGFPKHCGNGTVPMAEWDAFCEEQVLDLLGDAERLEKVWVAGSDSAVELAEVNAELVDLTSLIGSPAYRAGSPQREALDARIAALAARQEELEGLEARPSGWEWRETGQRFGDWWREQDTAAKNTWLRSMNVRLTFDVRGGLTRTIDFGELQEYKQHLRLGSVVERLHTGMS

SEQ ID NO: 11862 - protein, 500 aa, synthetic construct
MRALVVIRLSRVTDATTSPERQLESCQQLCAQRGWDVVGVAEDLDVSGAVDPFDRKRRPNLARWLAFEEQPFDVIVAYRVDRLARSIRHLQQLVHWAEDHKKLVVSATEAHFDTTTPFAAVVIALMGTVAQMELEAIKERSRSAAHFNIRAGKYRGSLPPWGYLPTRVDGEWRLAPDPVQRERILEVYRRVVDNHEPLHLVAHDLNRRGVLSPRDYFAQLQGREPQGRKWSATALKRSMISEAMLGYATLNGKTVRDDDGAPLVRAEPILTREQLEALRAELVKTSRAKPAVSTPSLLLRVLFCAVCGEPAYKFAGGGRKHPRYRCRSMGFPKHCGNGTVAMAEWDAFCEEQVLDQLGDTERLEKVWVADSDSAVELAEVNAELVDLTSLISSPAYRAGSPQREALDARIAALAARQEELEGLEARPSGWEWRGTGQRFGDWWREQDTAAKNTWLRSMNVRLTFDVRGGLTRTIDFGDLQEYEQHLRLGSVAERLHTGMS

SEQ ID NO: 11863 - protein, 500 aa, synthetic construct
MRALVVIRLSRVTDATTSPERQLESCRQLCAQRGWNVVGVAEDLDVSGAVDPFDRKRRPNLARWLAFEEQPFDVIVAYRVDRLTRSTRHLQQLVRWAEDHKKLVVSATEAHFDTTTPFAAVVIALMGTVAQMELEAIKERNRSAAHFNIRAGKYRGSLPPWGYLPARVDGEWRLAPDPVQRERILEVYRRVVDNHEPLHLVAHDLNRRGVLSPRDYFAQLRGREPQGRKWSATALKRSMISEAMLGYATLNGKTVRDDDGAPLVRAEPILTREQLEALRAELVKTSRAKPAVSTPSLLLRVLFCAVCGEPAYKFAGGGRKHPRYRCRSMGFPKHCGNGTVAMAKWDAFCEEQVLGLLGDAERLEKVWVAGSDSAVELAEVNAELVDLMSLIGSPAYRAGSPQREALDARIAALAARQEELEGLEARPSGWEWRETGQRFGDWWREQNTAAKNTWLRSMNVRLTFDVRGGLTRTIDFGDLQEYEQHLRLGSEVERLHTGMS

SEQ ID NO: 11864 - protein, 500 aa, synthetic construct
MRALVVIRLSRVTDATTSPERQLESCQQLCAQRGWDVVGVAEDLDVSGAVDPFDRKRRPNLARWLAFGEQPFDVIVAYRVDRLARSIRHLQQLVHWAEDHKKLVVSATEAHFDTTTPFAAVVIALMGTVAQMELEAIKERSRSAAHFNIRAGKYRGSLPPWGYLPTRVDGEWRLAPDPVQRERIFEVYHRVVDNHEPLHLVAHDLNRRGVLSPKDYFAQLQGREPQGRKWSATALKRAMISGAMLGYATLNGKTVRDDDGAPLVRAEPILTREQLEALRAELVKTSRAKPAVSTPSLLLRVLFCAVCGEPAYKFAGGGRKHPRYRCRSMGFPKHCGNGTVAMAEWDAFCEEQVLDLLGGAERLEKVWVAGSDSAVELAEVNAELVDLTSLISSPAYRAGSPQREALDARITTLAARQGELEGLEARPSGWEWRGTGQRFGDWWREQDTAAKNTWLRSMNVRLTFDARGGLTRTIDFGDLQEYEQHLRLGGVVERLHTGMS

SEQ ID NO: 11865 - protein, 500 aa, synthetic construct
MRALLVIRLSRVTDATTSPERQLESCLQLCAQRGWDVVGVAEDLDVSGAVDPFDRKRRPNLARWLAFEEQPFDVIVAYRVDRLARSIRHLQQLVHWAEDHKKLVVSATEAHFDTTTPFAAVVIALMGTVAQMELEAIKERSRSAAHFNIRAGKYRGSLPPWGYLPTRVDGEWRLVPDPVQRERILEVYHRVVDNHEPLHLVAHDLNRRGVLSPKDYFAQLRGREPQGRKWSATALKRSMISEAMLGYATLNGKTVRDDDGAPLVRAEPILTREQQEALRAELVKTSRAKPAVSTPSLLLRVLFCAVCGEPAYKFAGGGRKHPRYRCRSMGSLKHCGNGTVAMAEWDAFCEEQVLNLLGDAERLEKVWVAGSDSAVELAEVNAELVDLTSLIGSPAYRAGSPQREALDARIAALAARQEELEGLEARPSGWEWRETGQRFGDWWREQDTATKNTWLRSMNVRLTFDVRGGLTRTIDFGDLQEYEQHFRLGSVAERLHTGMS

SEQ ID NO: 11866 - protein, 500 aa, synthetic construct
MRALVVIRLSRVTDATTSPERQLESCQQLCAQRGWGVVGVAEDLDVSGAVDPFDRKRRPNLARWLAFEEQPFDVIVAYRVDRLTRSVRHLQRLVHWAEDHKKLVVSATEAHFDTTTPFAAVVIALMGTVAQMELEAIRERSRSAAHFNIRAGKYRGSLPPWGYLPTRVDGEWRLVPDPVQRERILEVYHRVVDNHEPLHLVAHDLNRRGVLSPRDYFAQLQGREPQGRKWSATALKRSMISEAMLGYATLNGETVRDDDGAPLVRAEPILTREQLEALRAELVKTSRAKPAVSTPSLLLRVLFCAVCGEPAYKFAGGGRKHPRYRCRSMGFPKHCGNGTVAMAEWDAFCEEQVLDLLGDAERLEKVWVAGSDSAVELAEVNAELVDLTSLIGSPAYRAGSPQREALDARIAALAARQKELEGLEARPSGWGWRETGQRFGDWWREQDTAAKNTWLRSMNVRLTFDVRGGLTRTIDFGDLQEYEQRLRLGSVVGRLHTGMS

SEQ ID NO: 11867 - protein, 500 aa, synthetic construct
MRALVVIRLSRVTDATTSPERQQESCQQFCAQRGWDVVGVAEDLDVSGAVDPFDRKRRPNLARWLAFEEQPFDVIVAYRVDRLTRSIRHLQQLVHWAEDHKKLVVSATEAHFDTTTPFAAVVIALMGTVAQMELEAIKERSRSAAHFNIRAGKYRGSLPPWGYLPARVDGEWRLVPDPVQRERILEVYHRVVDDHEPLHLVAHDLNRRGVLSPKDYFAQLRGREPQGRKWSATALKRSMISEAMLGYATLDGKTVRDDDGAPLVRAEPILTREQLEALRAELVKTPRAKPAVSAPSLLLRVLFCAVCGEPAYKFAGGGRKHPRYRCRSMGFPKHCGNGTVAMAEWDAFCEEQVLNLLGDAERLEKVWVAGSDSAVELAEVNAELVDLTSLIGSPAYRAGSPQREALDARIAALAARQGELEGLEARPSGWEWRGTGQRFGDWWREQDTAAKNTWLRSMNVRLTFDVRGGLTRTIDFGDLQEYEQHLRLGSVVERLHTGMP

SEQ ID NO: 11868 - protein, 500 aa, synthetic construct
MRALVVVRLSRVTDATTSPERQLESCQQLCAQRGWDVVGVAEDLDVSGAVDPFDRKRRPNLARWLAFEEQPFDVIVAYRVDRLTRSTRHLQQLVHWAEDHKKLVVSATEAHFDTTTPFAAVVIASMGTVAQMELEAIKERNRSAAHFNIRAGKYRGSLPPWGYLPMRVDGEWRLAPDPVQRERILEVYHRVVDNHEPLHSVAHDLNRRGVLSPKDYFAQQQGREPQGRKWSATALKRSMISGAMLGYATLNGKIVRDDDGAPLVRAEPILTREQLEALRAELVKTSRAKPAVSAPSLLLRVLFCAVCGEPAYKFAGGGRKHPRYRCRSMGFPKHCGNGTVAMAEWDAFCEEQVLDLLGDVERLEKVWVAGSDSAVELAEVSAELVDLTSLIGSPAYRAGSPQREALDARIAALAARQEELEGLEARPSGWEWRGTGQRFGDWWREQDTAAKNTWLRSMNVRLTFDVRGGLTRTIDLGDLQEYEQHLRLGSVVERLHTGVS

SEQ ID NO: 11869 - protein, 500 aa, synthetic construct
MRALVVIRLSRVTDATTSPERQLESCQQLCAQRGWDVVGVAEDLDVSGAVDPFDRKRRPNLARWLAFEEQPFDVIVAYRVDRLTRSIRHLQQLVHWAEDHKKLVVSATEAHFDTTTPFAAVVIALMGTVAQMELEAIKERNRSAAHFNIRAGKYRGSLPPWGYLPARVDGEWRLVPDPVQRERILEVYRRVVNNHEPLHLVAHDLNRRGVLSPRDYFAQLQGREPQGRKWSATALKRSMISEAMLGYATLNGKTVRDDDGAPLVRAEPILTREQREALRAELVKTSRAKPAVSTPSLLLRVLFCAVCGEPAYKFSGGGRKHPRYRCRSMGFPKHCGNGTVATAEWDAFCEEQVLDLLGDAERLEKVWVAGSDSAVELAEVNAELVDLTSLIGSPAYRAGSPQREALDTRIAALAARQEELEGLEARPSGWEWRETGQRFGDWWREQDTAAKNTWLRSMNVRLTFDVRGGLTRTIDFGDLLEYEQHLRLGGVVERLHTGMS

SEQ ID NO: 11870 - protein, 500 aa, synthetic construct
MHALVVIRLSRVTDATTSPERQLESCQQLCAQRGWDVVGVAEDLDVSGAVDPFDRKRRPNLARWLAFEEQPFDVIVAYRVDRLTRSTRHLQQLVHWAEDHKKLVVSATEAHFDTTTPFAAVVIALMGTVAQMELEAIKERSRSAAHFNIRAGKYRGSLPPWGYLPARVDGEWRLVPDPVQRERILEVYHRVVDNHEPLHLVAHDLNRRGVLSPKDYFAQLQGREPQGRKWSATALKRSMTSEAMLGYATLNGKTVRDEDGAPLVRAEPILTREQLEALRAELVKTSRAKPAVSTPSLLLRVLFCAVCGEPAYKFAGGGRKHPRYRCRSMGFPKHCGNGTVAMAEWDAFCEEQVLDLLGDAERLEKVWVVGSDSAVELAEVNAELADLTSLIGSPAYRAGSPQREALDARIAALAARQVELEGLEARPSGWEWRGTGQRFGDWWHEQDTAAKNTWLRSMNVRLTFDVRGGLTRTIDFGDLQEYEQHLRLGSVVERLHTGMS

SEQ ID NO: 11871 - protein, 500 aa, synthetic construct
MRALVVIRLSRVTDATTSPERQLESCQQLCAQRGWDVVGVAEDLDVSGSVDPFDRKRRPNLARWLAFEEQPFDVIVAYRVDRLARSIRHLQQLVHWAEDHKKLVVSATEAHFDTTTPFAAVVIALMGTVAQMELEAIKERSRSAAHFNIRAGKYRGSLPPWGYLPTRVDGEWRLAPDPVQRERILEVYHRVVDNHEPLHLVAHDLNRRGVLSPKDYFAQLQGREPQGRKWSATALKRSMVSVAMLGYATLNGKTVRDDDGAPLVRAEPILTREQLEALRAELVKTSRAKPAVSTPSLLLRVLFCAVCGEPAYKFAGGGRKHPRYRCRSMGFPKHCGNGTVAMAEWDAFCEKQVLDLLGDAERQEKVWVAGSDSAVELAEVNKELVDLTSLIGSPAYRAGSPQREALDARIAALAARQEELEGLETRPSGWEWRGTGQRFGDWWREQDTAAKNTWLRSMNVRLTFDVRGGLTRTIDFGDLQEYEQHLRSGSVVERLHTGMS

SEQ ID NO: 11872 - protein, 500 aa, synthetic construct
MRALVVIRLSRVTDATTSPERQLESCQQLCAQRGWDVVGVAEDLDVSGAVDPFDCKRRPNLARWLAFEEQPFDVIVAYRVDRLTRSTRHLQQLVHWAEDHKKLVVSATEAHFDTTSPFAAVAIALMGTVAQMELEAIKERNRSAAHFNIRAGKYRGSLPPWGYLPTRVDGEWRLAPDPVQRERILEVYHRVVDNHEPLHLVAHDLNRRGVLSPKDYFAQLQGREPRGRKWSATALKRSMISEAMLGYATLDGKTVRDDDGAPLVRAEPILTREQQEALRAELVKTSRAKPAVSTPSLLLRVLFCAVCGEPAYKFAGGGRKHPRYRCRSMGFPKHCGNGTVAMAEWDAFCEEQVLDLLGDAERLEKVWVAGSDSAVELAEVNAELVDLTSLIGSPAYRAGSPQREALDARIAALAARQEELEGSEARPSGWGWRGTGQRFGDWWCEQDTAAKNTWLRSMNVRLTFDVRGGLTRTIDFGDLQEYEQHLRLGGVVERLHTGMS

SEQ ID NO: 11873 - protein, 500 aa, synthetic construct
MRALVVIRLSRVTDATTSPERQLESCQQLCAQRGWDVVGVAEDLDVSGAVDPFDRKRRPNLARWLASEEQPFDAIVAYRVDRLTRSIRHLQQLVHWAEDHKKLVVSATEAHFDTTTPFAAVVIALMGTVAQMELEAIKERNRSAAHFNIRAGKYRGSLPPWGYLPTRVDGEWRLVPDPVQRERILEVYHRVVDNHEPLHLVAHDLNRRGVLSPKDYFAQLRGREPQGRKWSATALKRSMTSEAMLGYATLNGKTVRDDDGAPLVRAEPILTREQLEALRAVLVKTSRAEPAVSTPSLLLRVLFCAVCGEPAYKFAGGGRKHPRYRCRSMGFPKHCGNGTVAMAEWDAFCEGQVLNLLGDAERLEKVWVAGSDSAVELAEVNAELVDLTSLIGSPAYRAGSTQREALDARIAALAARQEELEGLEARPSGWEWRETGQRFGDWWREQDTAAKNTWLRSMNVRLTYDVRGGLTRTIDFGDLQEYEQHLRSGSVVERLHTGMS

SEQ ID NO: 11874 - protein, 500 aa, synthetic construct
MRALVVIRLSRVTDATTSPERQLESCQQLCAQRGWDVVGVAEDLDVSGAVDPFDRKRRPNLARWLAFEEQPFDVIVAYRVDRLARSIRHLQQLVHWAEDHKKLVVSATEAHFDTTTPFAAVVIALMGTVAQMELEAIKERNRSAAHFNIRAGKYRGSLPPWGYLPTRVDGEWRLVPDPVQRERILEVYHRVVDNHEPLHLVAHDLNRRGVLSPKDYFAQLQGREPQGRKWSATALKRSMISVAMLGYATLNGKIVRDDDGAPLVRAEPILTREQLEALRAELVKTSRAKPAVSTPSLLLRVLFCAVCGEPAYKFAGGGRKHPRYRCRSMGFPKHCGNGTVAMAEWDAFCEEQVLDLLGDAERLEKVWVAGSDSAVELAEVNAELVDLTSLIGSPAYRAGSPQREALDARIAALTARQEELEGLEARPSGWEWRETGQRFGDWWREQDTAAKNTWLRSMNVRLSFDVRGGLTRTIDFGDLQEYEQHLRLGSVVERLHTGMS

SEQ ID NO: 11875 - protein, 500 aa, synthetic construct
MRTLVVIRLSRVTDATTSPERQLESCQQLCAQRGWDVVGVAEDLDVSGAVDPFDRKRRPNLARWLAFEEQPFDAIVAYRVDRLARSIRHLQQLVRWAEDHKKLVVSATEAHFDTTTPFAAVVIALMGTVAQMELEAIKERNRSAAHFNIRAGKYRGSLPPWGYLPARVDGEWRLVPDPVQRERILEVYHRVVDNHEPLHLVAHDLNRRGVLSPKDYFAQLQGREPQGRKWSATALKRSMISVAMLGYATLNGKTVRGDDGAPLVRAEPILTREQLEALRAELVKTSRAKPAVSTPSLLLRVLFCAVCGEPAYKFAGGGRKHPRYRCRSMGFQKHCGNGTVAMAEWDTFCEEQVLDLLGDAERLEKVWVAGSDSAVELAEVNAELMDLTSLIGSPAYRAGSPQREALDARIAALAARQEELEGLEARPSGWEWHETGQRFGDWWREQDTAAKNTWLRSMNVRLTFDVRGGLTRTIDFGDLQEYGQHLRLGSVVERLHTGML

SEQ ID NO: 11876 - protein, 500 aa, synthetic construct
MRALVVIRLSRVTDATTSPERQLESCQQLCAQRGWDVVGVAEDLDVSGAVDPFDRKRRPNLARWLAFEGQPFDVIVAYRVDRLARSVRHLQRLVHWAEDHKKLVVSATEAHFDTTTPFAAVVIALMGTVAQMELEAIKERSRSAAHFNIRAGKYRGSLPPWGYLPTRVDGEWRLVPDPVQRERILEVYRRVVDNHEPLHLVAHDLNRRGVLSPKDYFAQLRGREPQGRKWSATALKRSMISEAMLGYATLNGKTVRDDDGAPLVRAEPILTREQLEALRAELIKTSRAKPAVSTPSLLLRVLFCAVCGEPAYKFAGGGRKHPRYRCRSMEFPKHCGNGTVAMVEWDAFCEEQVLDLLGDAERLEKVWVAGSDSAIELAGVNAELVDLTSLIGSPAYRAGSPQREALDARIAALATRQEELEGLEARPSGWEWRETGQRFGDWWREQDTAAKNTWLRSMNVRLTFDVRGGLARTIDFGDLREYEQHLRLGGVVERLHTGMS

SEQ ID NO: 11877 - protein, 500 aa, synthetic construct
MRALVVIRLSRVTDATTSPERQLESCRQLCAQRGWDVVGVAEDLDVSGAVDPFDRKRRPNLARWLAFEEQPFDVIVAYRVDRLARSIRHLQQLVHWAEDHKKLVVSATEAHFDTTTPFAAVVIALMGTVAQMELEAIKERNRSAAHFNIRAGKYRGSLPPWGYLPTRVDGEWRLVPDPVQRERILEVYHRVVDNHEPLHLVAHDLNRRGVLSPKDYFAQLRGREPQGRKWSATALKRSMISEAMLGYATLNGKTVRDDDGAPLVRAEPILTREQQEALRAELVKTSRAKPAVSTPSLLLRVLFCAVCGEPAYKFAGGGRKHPRYRCRSVGFPKHCGNGTVAMAEWDAFCEEQVLDLLGDAERLEKVWVAGSDSAVELAEVNAELVDLTSLIGSPAYRAGSPQREALDARIAALAARQEELEGLEARPSGWEWRGTGQRFGDWWREQDTAAKNTWLRSMNVRLTFNVRGGLTRTIDFGDLQEYEQHLRLGSVVERLHTGMS

SEQ ID NO: 11878 - protein, 500 aa, synthetic construct
MRALVVIRLSRVTDATTSPERQLESCQQLCAQRGWDVVGVAEDLDVSGAVDPFDRKRRPNLARWLAFEERPFDVIVAYRVDRLTRSIRHLQQLVHWAEDHKKLVVSATEAHFDTTTPFAAIVIALMGTVAQMELEAIKERSRSAAHFNIRAGKYRGSLPPWGYLPTRVDGEWRLAPDPVQRERILEVYHRVVDNHEPLHLVAHDLNRRGVLSPKDYFAQLQGREPQGRKWSATALKRSMISVAMLGYATLSGKTVRDDDGAPLVRAEPILTRGQLEALRAELVKTSRAKPAVPTPSLLLRVLFCAVCGEPAYKFAGGGRKHPRYRCRSMGFPKHCGNGTVAMAEWDAFCEEQVLGLLGDAERLEKVWVAGSDSAVELAEVNAELVDLTSLIGSPAYRAGSPQREALDARIAALAARQGELEGLEARPSGWEWRETGQRFGDWWREQDTAAKNTWLRSMNVRLTFDVRGGLTRTIDFGDLQEYEQHLRLGSVVERLHTGMS

SEQ ID NO: 11879 - protein, 500 aa, synthetic construct
MRALVVIRLSRVTDATTSPERQLESCQQLCAQRGWDVVGVAEDLDVSGAVDPFDRKRRPNLARWLAFEEQPFDVIVAYRVDRLTRSTRHLQQLVHWAEDHRKLVVSATEAHFDTTTPFAAVVIALMGTVAQMELEAIKERSRSAAHFNIRAGKYRGSLPPWGYLPTRVDGEWRLVPDPVQHERILEVYHRVVDNHEPLHLVAHDLNRRGVLSPKDYFAQLQGREPQGRKWSATALKRSMISEAMLGYATLNGKTVRDDDGAPLVRAEPILTREQQEALRAELVKTSRAKPAVSTPSLLLRVLFCAVCGEPAYKFAGGGRKHPRYRCRSMGFPKHCGNGTVAMAEWDAFCEEQVLNLLGDAERLEKVWVAGADSAVELAEVNAELVDLTSLIGSPAYRAGSTQREALDARIAALAARQEELEGLEARPSGWEWRGTGQRFGDWWREQGTAAKNTWLRTMNVRLTYDVRGGLTRTIDFGDLQEYEQHLRSGSVVERLHTGMS

SEQ ID NO: 11880 - protein, 500 aa, synthetic construct
MRALVVIRLTRVTDATTSPERQLESCQQLCAQRGWDVVGVAEDLDVSGAVDPFDRKRRPNLARWLAFEEQPFDVIVAYRVDRLTRSVRHLQQLVHWAEDHKKLVVSATEAHFDTTTPFAAVVIALMGTVAQMELEAIKERSRSAAHFNIRAGKYRGSLPPWGYLPARVDGVWRLVPDPVQRERILEVYHRVVDNHEPLHLVAHDLNRRGVLSPRDYFAQLRGREPQGRKWSATALKRSMVSEAMLGYATLNGKTVRDDDGAPLVRAEPILTREQLEALRAELVKTSRAKPAVSTPSLLLRVLFCAVCGEPAYKFAGGGRKHPRYRCRSMGFPKHCGNGTVAMAEWDAFCEEQVLGLLGDVERLEKVWVAGSDSAVKLAEVNAELVDLTGLIGSPAYRAGSPQREALDARIAALAARQEELEGLEARPSGWEWRGTGRRFGDWWRELDTAAKNTWLRSMNVRLTFDVRGGLTRTIDFGDLQEYEQHLRLGSAVERLHTGMS

SEQ ID NO: 11881 - protein, 500 aa, synthetic construct
MRALVVIRLSRVTDATTSPERQLESCQQLCAQRGWDVVGVAEDLDVSGAVDPFDRKRRPNLARWLAFEEQPFDVIVAYRVDRLARSIRHLQQLVHWAEDHKKLVVSATEAHFDTTTPFAAVVIALMGTVAQMELEAIKERSRSAAHFNIRAGKYRGSLPPWGYLPTRVDGEWRLVPDPVQRERILEVYHRVVDNHEPLHLVAHDLNRRGVLSPKDYFAQLRGREPQGRKWSATALKRSMISEAMLGYATLNGKTVRNDDGAPLVRAEPILTREQLEVLRAELVKTSRAKPAVSTPSLLLRVLFCAVCGEPAYKFAGGGRKHPRYRCRSMGFPKHCGNGTVAMAEWDAFCEEQVLDLLGDAERLEKVWVAGSDSAVELAEVNAELVDLTSLIGSPAYRAGSPQREALDARIATLVARQEELKGLEARPSGWEWRETGQRFGDWWREQDTAAKNTWLRTMNVRLTFGVRGGLTRTIDFGELQEYEQHLRLGGVVERLHTGMS

SEQ ID NO: 11882 - protein, 500 aa, synthetic construct
MRALVVVRLSRVTDATTSPERQLESCQQLCAQRGWDVVGVAEDLDVSGAVDPFDRKRRPNLARWLAFEEQPFDAIVAYRVDRLTRSIRHLQQLVHWAEDHKKLVVSATEAHFDTTTPFAAVVIALMGTVAQMELEAIKERNRSAAHFNIRAGKYRGSLPPWGYLPTRVDGEWRLVPDPVQRERILEVYRRVVDNHEPLHLVAHDLNRRGVLSPKDYFAQLRGREPQGRKWSATALKRSMTSEAMLGYATLNGKTVRDDDGAPLVRAEPILTRGQLEALRAELVKTSRAKPAVSTPSLLLRVLFCAVCGEPAYKFAGGGRKHPRYRCRSMGFPKHCGNGTVAMAEWDAFCEEQVLDLLGDAERLEKVWVAGSDSAVELAEVNAELVDLTSLVGSPAYRAGSPQRGALDARIAALAARQEELEGLEARPSGWEWRETGQRFGDWWREQDTAAKNTWLRSMNVRLTFDVHGGLTRTIDFGDLQEYEQHLRLGSVVERLHTGMS

SEQ ID NO: 11883 - protein, 500 aa, synthetic construct
MRALVVIRLSRVTDATTSPERQLESCQQLCAQRGWDVVGVAEDLDVSGAVDPFDRKRRPNLARWLAFEEQPFDVIVAYRVDRLTRSTRHLQQLVHWAEDHKKLVVSATEAHFDTTTPFAAVVTALMGTVAQMELEAIKERSRSAAHFNIRAGKYRGSLPPWGYLPTRVDGEWRLAPDPVQRERILEVYHRVVDNHEPLHSVAHDLNRRGVLSPKDYFAQLQGREPQGRKWSATALKRSMISVAMLGYATLNGKTVRDDDGAPLVRAEPILTREQLEALRAELVKTSRAEPAVSTPSLLLRVLFCAVCGEPAYKFAGGGRRHPRYRCRSMGFPKHCGNGTVAMAEWDAFCEEQVLDLLGDAERLEKVWVAGSDSAVELAEVNAELVDLTSLIGSPAYRARSPQREALDARIAALAARQEELEGLEARPSGWEWRGTGQRFGDWWREQDTAAKNTWLRSMNVRLTFDVRGGLTRTIDFGDLQEYEQHLRLGSVVERLHTGMS

SEQ ID NO: 11884 - protein, 500 aa, synthetic construct
MRALVVIRLSRVTDATTSPERQLESCQQLCAQRGWDVVGVAEDLDVSGAVDPFDRKRRPNLARWLAFEEQPFDVIVAYRVDRLTRSIRHLQQLVHWAEDHKKLVVSATEAHFDMTTPFAAVVIALMGTVAQMELEAIKERSRSAAHFNIRAGKYRGSLPPWGYLPTRVGGEWRLAPDPVQRERILEVYHRVVDNHEPLHLVAHDLNRRGVLSPKDYFAQLQGREPQGRKWSATALKRSMISVAMLGYATLNGKTVRDDDGAPLVRAEPILTREQLEALRAELVKTSRAKPAVSTPSLLLRVLFCAVCGEPAYKFAGGGRKHPRYRCRSMGFPKHCGNGTVAMAEWDAFCEEQVLGLLGDVERLEKVWVAGSDSAVKLAEVNAELVDLTGLIGSPAYRAGSPQREALDARIAALAARQEELEGLEARPSGWEWRGTGQRFGDWWREQDTAAKNTWLRSMNVRLTFDVRGGLTRTIDFGDLQEYGQHLRLGSVVERSHTGRS

SEQ ID NO: 11885 - protein, 500 aa, synthetic construct
MRALVVIRLSRVTDATTSPERQLESCQQLCAQRGWDVVGVAEDLDVSGAVDPFDRKRRPNLARWLAFEEQPFDVIVAYRVDRLTRSTRHLQQLVHWADDHKKLVVSATEAHFDTTTPFAAVVIALMGTVAQMELEAIKERSRSAAHFNIRAGKYRGSLPPWGYLPARVDGVWRLVPDPVQRERILEVYHRVVNNHEPLHLVAHDLNRRGVLSPKDYFAQLQGREPQGRKWSATALKRSMISEAMLGYATLNGKTVRDDDGAPLVRAEPILTREQQEALRAELVKASRAKPAVSTPSLLLRVLFCAVCGEPAYKFAGGGRKHPRYRCRSMGSPKHCGNGTVAMAEWDAFCEERVLNLLGDAERLEKVWVAGPDSAVELAEVNAELMDLTSLIGSPAYRAGSPQREALDARIAALAARQEELEGLEARPSGWEWRETGQRFGDWWREQDTAAKNTWLRSMKVRLTFDVRGGLTRTIDFGDLQEYEQHLRSGGVVERLHTGMT

SEQ ID NO: 11886 - protein, 500 aa, synthetic construct
MRALVVIRLSRVTDATTSPERQLESCQQLCAQRGWDVVGVAEDLDVSGAVDPFDRKRRPNLARWLAFEEQPFDAIVAYRVDRLTRSIRHLQQLVHWAEDHKKLVVSATEAHFDTTTPFAAVVIALMGTVAQMELEAIRERNRSAAHFNIRAGKYRGSLPPWGYLPTRVDGEWRLVPDPVQRERILEVYHRVVDGHEPLHLVAHDLNRRGVLSPKDYFAQLRGREPQGRKWSATALKRSMISEAMLGHATLDGKTVRDDDGAPLVRAEPILTREQLEALRAELVKTSRAKPAVSTPSLLLRVLFCAVCGEPAYKFAGGGRKHPRYRCRSMGFPKHCGNGTVAMAEWDAFCEEQVLDLLGDAERLEKVWVVGSDSAVELAEVNAELVDLTSLIGSPAYHAGSPQREALDARIAALAARQEELEGLEARPSGWEWRETGQRFGDWWREQDTAAKNTWLRSMNVRLTFDVRGGLTRTIDFGDLQEYEQHLRLGSVVERLHTGTS

SEQ ID NO: 11887 - protein, 500 aa, synthetic construct
MRALVVIRLSRVTDATTSPERQLESCQQLCAQRGWDVVGVAEDLGVSGAVDPFDRKRRPNLARWLAFEEQPFDVIVAYRVDRLTRSIRHLQQLVHWAEDHKKLVVSATEAHFDTTTPFAAVVIALMGTVAQMELEAIKERSRSAAHFNIRAGKYRGSLPPWGYLPARVDGEWRLVPDPVQRERILEVYHRVVDNHEPLHLVAHDLNRRGVLSPKDYFAQLRGREPQGRKWSATALKRSMTSEAMLGYATLNGKTVRDDDGAPLVRAEPILTREQLEALRAVLVKTSRAKPAVSTPSLLLRVLFCAVCGEPAYKFAGGGRKHPRYRCRSMGFPKHCGNGTVAMAEWDAFCEEQVLNLLGDAERLEKVWVAGSDSAVELAEVNAELVDLTSLIGSPAYRAGSPQREALDARIAALAARQEELEGLEARPSGWEWRETGQRFGDWWREQDTAAKNTWLRSMNVRLTFDVRGGPTRTIDFGDLQEYEQHLRLGSVVGRLHTGMP

SEQ ID NO: 11888 - protein, 500 aa, synthetic construct
MRALVVIRLSRVTDATTSPERQLESCQQLCAQRGWDVVGVAEDLDVSGAVDPFDRKRRPNLARWLAFEEQPFDVIVAYRVDRLTRSVRHLQQLVHWAEDHKKLVVSATEAHFDTTTPFAAVVIALMGTVAQMELEAIKERSRSAAHFNIRAGKYRGSLPPWGYLPTRVDGEWRLAPDPVQRERILEVYHRVVDNHEPLHLVAHDLNRRGVLSPKDYFAQLQGREPQGRKWSATALKRSMISEAMLGYATLNGKTVRDDDGAPLVRAEPILTRGQLEALRAELVKTSRAKPAVPTPSLLLRVLFCAVCGEPAYKFAGGGRKHPRYRCRSMGFLKHCGNGTVAMAEWDAFCEEQVLDLLGDAERLEKVWVAGSDSGVELAEVNAELVDLTSLIGSPAYRAGSPQREALDARIAALAARQEELEGLEARPSGWEWRGTGQRFGDWWREQDTAAKNTWLRSMNVRLTFDVRGGLTRTIDFGDLQEYVQHLRLGSVVERLHTGMS

SEQ ID NO: 11889 - protein, 500 aa, synthetic construct
MRALVVIRLSRVTDATTSPERQLESCQQLCAQRGWDIVGVAEDLDVSGAVDPFDRKRRPNLARWLAFEEQPFDVIVAYRVDRLARSIRHLQQLVHWAEDHKKLIVSATEAHFDTTTPFAAVVIALMGTVAQMELEAIKERSRSAAHFNIRAGKYRGSLPPWGYLPTRVNGEWRLVPDPVQRERILEVYHRVVDDHEPLHLVAHDLNRRGVLSPRDYFAQLQGREPQGRKWSATALKRSMISEAMLGYATLNGKIVRDDDGAPLVRAEPILTREQLEAIRAELVKTSRAKPAVSTPSLLLRVLFCAVCGEPAYKFAGGGRKHPRYRCRSMGFPKHCGNGTVAMAEWDAFCEEQVLGLLGDAERLEKVWVAGSDSAVELAEVNAELVDLTSLIGSPAYRAGSPQREALDARIAALAAHQEELEGLEARPSGWEWRGTGQRLGDWWREQDTAAKNAWLRSMNVRLTFDVRGGLTRTIDFGDLQGYEQHLRLGSVVERLHTGMS

SEQ ID NO: 11890 - protein, 500 aa, synthetic construct
MRALVVIRLSRVTDATTSPERQLGSCQQLCAQRGWDVVGVAEDLDVSGAVDPFDRKRRPNLARWLAFEEQPFDVIVAYRVDRLTRSTRHLQQLVHWAEDHKKLVVSATEAHFNTTTPFAAVVIALMGTVAQMELEAIRERSRSAAHFNIRAGKYRGSLPPWGYLPTRVDGEWRLVPDPVQRERILEVYHRVVDNHEPLHLVAHDLNRRGVLSPKDYFAQLQGREPQGRKWSATALKRSMISGAMLGYATLNGKTVRDDDGAPLVRAEPILTREQREALRAELVKTSRAKPAVSTPSLLLRVLFCAVCGEPAYKFSGGGRKHPRYRCRSMGFPKHCGNGTVAMAEWDAFCEEQVLDLLGDAERLEKVWVAGSDSAVELAEVNAELVDLTSLIGSPAYRAGSPQREALDARIAALAARQGELEGLEARPSGWEWRETGQRFGDWWREQDTAAKNTWLRSMNVRLTFDVRGGLTRTIDFGDLQEYEQHLRLGSVVERLRTGMS

SEQ ID NO: 11891 - protein, 500 aa, synthetic construct
MRALVVIRLSRVTDATTSPERQLESCQQLCAQRGWDVVGVAEDLDVSGAVDPFDCKRRPNLARWLAFEEQPFDVIVAYRVDRLARSIRHLQQLVHWAEDHKKLVVSATEAHFDTTTPFAAVVIALMGTVAQMELEAIKERSRSAAHFNIRAGKYRGSLPPWGYLPARVDGEWRLVPDPVQRERILEVYHRVVNNHEPLHLVAHDLNRRGVLSPKDYFAQLRGREPQGRKWSATALKRSMVSGAMLGYATLNGKTVRDDDGAPLVRAEPILTREQLEALRAELVKTSRAKPAVSTPSLLLRVLFCAVCGEPAYKFAGGGRKHPRYRCRSMGFPKHCGNGTVAMAEWDAFCEEQILDLLGDAERLEKVWVAGSDSAIELAEVNAELVDLTSLIGSPAYRAGSPQREALDARIAALAARQEELEGLEARPSGWKWRETGQRFGDWWREQDTAAKNTWLRSMNVRLTFDVRGGLTRTIDFGDLKEYEQHLRLGSVVERLHTGMS

SEQ ID NO: 11892 - protein, 500 aa, synthetic construct
MRALVVIRLSRATDATTSPERQLESCQQLCAQRGWGVVGVAEDLDVSGAVDPFDRKRRPNLARWLTFEEQPFDVIVAYRVDRLTRSIRHLQQLVHWAEDHKKLVVSATEAHFDMTTPFAAVVIALMGTVAQMELEAIKERSRSAAHFNIRAGKYRGSLPPWGYLPTRVDGEWRLAPDPVQRERILEVYHRVVDNHEPLHLVAHDLNRHGVLSPKDYFAQLQGREPQGRKWSATALKRSMISEAMLGYATLNGKTVRGDDGAPLVRAEPILTREQLEALRAELVKTSRAKPAVSTPSLLLRVLFCAVCGKPAYKFSGGGRKHPRYRCRSMGFPKHCGNGTVAMAEWDAFCEEQVLDLLGDAERLEKVWVAGSDSAVELAEVNAELVDLTGLIGSPAYRAGSPQREALDARIAALAARQEELEGLEARPSGWEWRGTGQRFGDWWCEQDTAAKNTWLRSMNVRLTFDVRGGLTRTIDFGDLQEYEQHLRLGSVVERLHTGMS

SEQ ID NO: 11893 - protein, 500 aa, synthetic construct
MRALVVIRLSRVTDATTSPERQLESCQLLCAQRGWDVVGVAEDLDVSGAVNPFDRKRRPNLARWLAFEEQPFDVIVAYRVDRLTRSTRHLQQLVHWAEDHKKLVVSATEAHFDTTTPFAAVVIALMGTVAQMELEAIKERSRSAAHFNIRAGKYRGSLPPWGYLPTRVDGEWRLVPDPVQRERILEVYHRVVVNHEPLHLVAHDLNRRGVLSPKDYFAQLQGREPQGRKWSATALKRSMISEAMLGYATLNGKTARDDDGAPLVRAEPILTREQLEAVRAELVKTSRVKPAVSTPSLLLRVLFCAVCGEPAYKFAGGGRKHPRYRCRSMGFPKHCGNGTVAMAEWDAFCEEQVLDLLGDAERLEKVWVAGSDSAVELAEVNAELADLTSLIGSPAYRAGSPQREALDARIAALAARQEELEGLEARPSGWEWRETGQRFGDWWREQDTAAKNTWLRSMNVRLTFDVRGGLTRTIDFGDLQEYEQHLRLGSVVERLHTGMS

SEQ ID NO: 11894 - protein, 500 aa, synthetic construct
MRALVVIRLSRVTDATTSPERQLESCQQLCAQRGWGVVGVAEDLDVSGAVDPFDRKRRPNLARWLAFEEQPFDVIVAYRVDRLARSIRHLQQLVHWAEDHKKLVVSATEAHFDTTTPFAAVVIALMGTVAQMELEAIKERSRSAAHFNIRAGKYRGSLPPWGYLPTRVDGEWRLVPDPVQRERILEVYHRVVDNHEPLRLVAHDLNRRGVLSPKDYFAQLQGREPQGRKWSTTALKRSMISEAMLGHATLGGKTVRDDDGAPLVRAEPILTREQLEALRAELAKTSRAKPAVPTPSLLLRVLFCAVCGEPAYKFAGGGRKHPRYRCRSMGFPKHCGNGTVAMAEWDAFCEEQVLGLLGDAERLEKVWVAGSDSAVELAEVNAELVDLTSLIGSPAYRAGSPQREALDARIAALAARQEELEGLEARPSGWEWRGTGQRFGDWWHEQGTAAKNTWLRSMNVRLTFDVRGGLTRTIDFGDLQEYEQHLRLGSVVERLRTGMS

SEQ ID NO: 11895 - protein, 500 aa, synthetic construct
MHALVVIRLSRVTDATTSPERQLESCQQLCAQRGWDVVGVAEDLDVSGAVDPFDRKRRPNLARWLAFEEQPFDVIVAYRVDRLARSIRHLQQLVHWAEDHKKLVVSATEAHFDTTTPFAAVVIALMGTVAQMELEAIKERSRSAAHFNIRAGKYRGSLPPWGYLPTCVDGEWRLVPDPVQRERILEVYHRVVDNHEPLHLVAHDLNRRGVLSPKDYFAQLRGREPQGRKWSATALKRSMISEAMLGYATLNGKTVRDDDGAPLVRAEPILTREQQEALRAELVRTSRAKPAVSTPSLLLRVLFCAVCGEPAYKFAGGGRRHPRYRCRSMGFPKHCGNGTVAVAEWDAFCEEQVLDLLGDVERLEKVWVAGSDSAVELAEVNAELVDLTSLIGSPAYRAGSPQRGALDARIAALAARQEELEGLEARPSGWEWRGTGQRFGDWWREQDTAAKNTWLRSMNVRLTFDVRGGLTRTIDFGDLQEYEQHLRLGSVVERLHTGMS

SEQ ID NO: 11896 - protein, 500 aa, synthetic construct
MRALVVIRLSRVTDATTSPERQLESCQQLCAQRGWDVVGVAEDLDVSGAVDPFDRKRRPSLARWLAFEEQPFDVIVAYRVDRLARSIRHLQQLVHWAEDHKKLVVSATEAHFDTTTPFAAVVIALMGTVAQMELEAIKERNRSAAHFNIRAGKYRGSLPPWGYLPTRVDGEWRLAPDPVQRERILEVYHRVVDNHEPLHLVAHDLNRRGVLSPKDYFAQLQGREPQGRKWSATALKRSMISGAMLGYATLNGKIVRDDDGAPLVRAEPILTREQLEALRAELVKTSRAKPAVSTPSLLLRVLFCAVCGEPAYKFAGGGRKHPRYRCRSMGFPKHCGNGTVAMAEWDAFCEEQVLDLLGDVERLEKVWVAGSDSAVELAEVSAELVDLTSLIGSPAYRAGSPQREALDARIAALAARQEELEGLEARPSGWEWRETGQRFGDWWREQDTAAKNTWLRSMNVRLTFDVRGGLTRSIDFGDLQAYEQHLRLGSVVERLHTGMS

SEQ ID NO: 11897 - protein, 500 aa, synthetic construct
MRALVVIRLSRVTDATTSPERQLESCQQLCAQRGWDVVGVAEDLDVSGAVDPFDRKRRPNLARWLAFGEQPFDVIVAYRVDRLTRSIRHLQQLVHWAEDHKKLVVSATEAHFDTTSPFAAVVIALMGTVAQMELEAIKERNRSAAHFNIRAGKYRGSLPPWGYLPTRVDGEWRLVPDPVQRERILEVYHRVVDNHESLHLVAHDLNRRGVLSPKDYFAQLRGREPQGRRWSATALKRSMISEAMLGYATLNGETVRDDDGAPLVRAEPILTREQLEALRAVLVKTSRAKPAVPTPSLLLRVLFCAVCGEPAYKFAGGGRKHSRYRCRSMGFPKHCGNGTVAMAQWDAFCEEQVLNLLGDAERLERVWVAGSDSAVELAEVNAELVDLTSLIGSPAYRAGSPQREALDARIAALAARQEELEGLEARPSGWEWREAGQRFGDWWREQDTAAKNTWLRSMNVRLTFDVRGGLTRTIDFGELQEYEQHLRLGSVVERLHTGMS

SEQ ID NO: 11898 - protein, 500 aa, synthetic construct
MRALVVIRLSRVTDATTSPERQLESCQQLCTQRGWGVVGVAEDLDVSGAVDPFDRKRRPNLARWLAFEEQPFDAIVAYRVDRLTRSIRHLQQLVHWAEDHKKLVVSATEAHFDTTTPFAAVVIALMGTVAQMELEAIKERNRSAAHFNIRAGKYRGSLPPWGYLPTRVDGEWRLAPDPVQRERILEVYHRVVDNHEPLHLVAHDLNRRGVLSPKDYFAQLQGREPQGRKWSATALKRSMTSEAMLGYATLNGKIVRDDDGAPLVRAEPILTREQLEALRAELVKTSRAKPAVSTPSLLLRVLFCAVCGEPAYKFAGGERKHPRYRCRSMGFPKHCGNGTVAMTEWDAFCEEQVLNLLGDAERLEKVWVAGSDAAVELAEVNAELVDLTSLVGSPAYRAGSPQREALDARIAALAARQEELEGLEARPSGWEWRETGQRFGDWWREQDTAAKNTWLRSMNVRLTFDVRGGLTRTIDFGDLQEYKQHLRLGRVVERLYTGMS

SEQ ID NO: 11899 - protein, 500 aa, synthetic construct
MRALVVIRLSRVTDATTSPERQLESCQQLCAQRGWDVVGVAEDLDVSGAVDPFDRKRRPNLARWLAFEEQPFDVIVAYRVDRLTRSVRHLQQLVHWAEDHKKLVVSATEAHFDTTTPFAAVVIALMGTVAQMELEAIKERNRSAAHFNIRAGKYRGSLPPWGYLPTRVDGEWRLAPDPVQRERILEVYHRVVDNHEPLHLVAHDLNRRGVLSPKDYFAQLRGREPQGRKWSATALKRSMTSEAMLGYATLNGKTVRDDDGAPLVRAEPILTRKQQEALRAELVKTSRAKPAVSTPSLLLRVLFCAVCGEPAYKFAGGGRKHPRYRCRSMGFPKHCGNGTVAMAEWDAFCEEQVLDLLGDAERLEKVWVAGSDSAVELAEVNAELVDLTSLIGSPAYRAGSPQREALDARIAALAARQEELEGLEARPSGWEWRETGQRFGDWWRKQDTAAKNTWLRSMNVRLTFDVRGGLTRTIDFGDLREYEQHLRLGSVVERLHTGMS

SEQ ID NO: 11900 - protein, 500 aa, synthetic construct
MRALVVIRLSRVTDATTSPERQLESCQQLCAQRGWDVVGVAEDLDVSGAVNPFDRKRRPNLARWLAFEEQPFDVIVAYRVDRLTRSTRHLQQLVHWAEDHKKLVVSATEAHFDTTTPFAAVVIALMGTVAQMELEAIKERSRSAAHFNIRAGKYRGSLPPWGYLPTRVDGEWRLVPDPVQRERILEVYHRVVDDHEPLHLVAHDLNRRGVLSPKDYFAQLQGREPQGRKWSATALKRSMISEAMLGYATLNGKTVRDDVGAPLVRAEPILTREQLEALRAELVKTSRAKPAVSTPSLLLRVLFCAVCGEPAYKFAGGGRKHPRYRCRSMGFPKHCGNGTVAMAEWDAFCEEQVLDLLGDAERLEKVWVAGSDSAVELAGVNAELVDLTSLIGSRAYRAGSPQREALDARIAALAARQEELEGLEARPSGWEWRETGQRFEDWWRKQDAAAKNTWLRSMNVRLTFDVRGGLTRTIDFGDLQEYEQHLRLGSVVERLHTGMS

SEQ ID NO: 11901 - protein, 500 aa, synthetic construct
MRALVVIRLSRVTDATTSPERQLESCQQLCAQRGWDVVGVAEDLDVSGAVDPFDRKRRPNLARWLAFEEQPFDVIVAYRVDRLTRSVRHLQQLVHWAEDHKKLVVSATEAHFDTTTPFAAVVIALMGTVAQMELEAIKERSRSAAHFNIRAGKYRGSLPPWGYLPMRVDGEWRLVPDPVQRERILEVYHRVVDNHEPLHLVAHDLNRRGVLSPKDYFAQLRGREPQGRKWSATALKRSMTSEAMLGYATLNGRTVRDDDGAPLVRAEPILTRGQLEALRAELVRTSRAKPAVSTPSLLLRVLFCAVCGEPAYKFAGGGRKHPRYRCRSMGFPKHCGNGTVAMAEWDAFCEEQVLNLLGDAERLGKVWVAGSDSAVELAEVNAELVDLTSLIGSPAYRVGSPQREALDARIAALAARQEELEGLEARPSGWEWRETGQRFRDWWREQDTAAKNTWLRSMNVRLTYDVRGGLTRTIDFGDLQEYEQHLRLGSVVERLHTGMS

SEQ ID NO: 11902 - protein, 500 aa, synthetic construct
MRALVVIRLSRVTDATTSPERQLESCQQLCAQRGWDVVGVAEDLDVSGAVDPFDRKRRPNLARWLAFEEQPFDVIVAYRVDRLTRSVRHLQQLVHWAEDHKKLVVSATEAHFDTTTPFAAVVIALMGTVAQMELEAIKERSRSAAHFNIRAGKYRGSLPPWGYLPTRVDGEWRLVPDSVQRERILEVYHRVVDNHEPLRLVAHDLNRRGVLSPKDYFAQLRGREPQGRKWSTTALKRSMISEAMLGYATLGGKTVRNDDGAPLVRAEPILTREQLEALRAELAKTSRAKPAVSTPSLLLRVLFCAVCGEPAYKFAGGGRKHPRYRCRSMGYPKHCGNGTVAMAEWDAFCEEQVLDLLGDAERLEKVWVAGSDSAVELAEVNAELMDLTSLVGSPAYRAGSPQREALDARIAALAARQEELEGLEARPSGWEWRETGQRFGDWWREQDTAAKNTWLRSMNVRLTFDVRGGLTRTIDFGDLREYEQHLRLGSVVGRLHTGMS

SEQ ID NO: 11903 - protein, 500 aa, synthetic construct
MRALVVIRLSRVTDATTSPERQLESCQRLCAQRGWDVVGVAEDLDVSGAVDPFDRKRRPNLARWLAFEEQPFDVIVTYRVDRLTRSTRHLQQLVHWADDHKKLVVSVTEAHFDTTTPFAAVVIALMGTVAQMELEAIKERSRSAAHFNIRAGKYRGSLPPWGYLPTRVDGEWRLVPDPVQRERILEVYHRVVDNHEPLHLVVHDLNRRGVLSPRDYFAQLRGREPQGRKWSATALKRSMTSEAMLGYATLNGKTVRDDDGAPLVRAEPILTREQLEALRAELVKTSRAKPAVSTPSLLLRVLFCAVCGEPAYKFAGGGRKHPRYRCRSMGFPRHCGNGTVAMVEWDAFCEEQVLGLLGDAERLEKVWVAGSDSAVELAEVNAELADLTSLIGSPAYRAGSPQREALDARIAALAARQEELEGLEARPSGWEWRETGQRFGDWWREQDTAAKNTWLRSMNVRLTFDVRGGLARTIDLGDLQEYEQHLRLGSVVERLRTGMS

SEQ ID NO: 11904 - protein, 500 aa, synthetic construct
MRALVVIRLSRVTDATTSPERQLESCQQLCAQRGWDVVGVAEDLDVSGAVDPFDRKRRPNLARWLAFEEQPFDVIVAYRVDRLTRSIRHLQQLVHWAEDHKKLVVSATEAHFDMTTPFAAVVIALMGTVAQMELEAIKERSRSAAHFNIRAGKYRGSLPPWGYLPTRVDGEWRLAPDPVQRERILEVYHRVVDNHEPLHLVAHDLNRRGVLSPKDYFAQLQGREPQGRKWSATALKRSMISVAMLGYATLNGKTVRNDDGVPLVRAEPILTREQLEALRAELVKTSRAKPAVSTPSLLLRVLFCAVCGEPAYKFAGGGRKHPRYRCRSMGFPKHCGNGTVAMAEWDAFCEEQVLGLLGDVERLEKVWVAGSDSAVKLAEVNAELVDLTGLIGSPAYRAGSPQREALDARIAALAARQEELEGLEARPSGWEWRETGQRFGDWWREQDTAAKNTWLRSMNVRLTFDVRGGLTRTVDFGDLQEYERHLRSGSVVERLHTGMS

SEQ ID NO: 11905 - protein, 500 aa, synthetic construct
MRTLVVIRLSRVTDATTSPERQLESCQQLCAQRGWDVVGVAEDLDVSGAVDPFDRKRRPNLARWLAFEEQPFDVIVAYRVDRLTRSIRHLQQLVHWAEDHKKLVVSATEAHFDMTTPFAAVVIALMGTVAQMELEAIKERSRSAAHFNIRAGKYRGSLPPWGYLPTRVDGEWRLAPDPVQRERILEVYHRVVDNHEPLHLVAHDLNRRGVLSPKDYFAQLQGREPQGRKWSATALKRSMISVAMLGYATLNGKTVRGDDGAPLVRAEPILTREQLEALRAELVKTSRAKPAVSTPSLLLRVLFCAVCGEPAYKFAGGGRKHPRYRCRSMGFQKHCGNGTVAMAEWDAYCEEQVLDLLGDTERLEKVWVAGSGSAVGLAEVNAELVDLTSLIGSPAYRVGSPQREALDARIAALAARQEELEGLEARPSGWEWRETGQRFGDWWREQDTATKNTWLRSMNVRLTFDVRGGLTRTIDFGDLQEYEQHLRLGSVVERLHTGMS

SEQ ID NO: 11906 - protein, 500 aa, synthetic construct
MRALVVIRLSRVTDATTSPERQLESCQQLCAQRGWDVVGAAEDLDVSGAVDPFDRKRRPNLARWLVFEEQPFDVIVAYRVDRLTRSIRHLQQLVHWAEDHKKLVVSATEAHFDMTTPFAAVVIALMGTVAQMELEAIKERSRSAAHFNIRAGKYRGSLPPWGYLPTRVDGEWRLAPDPVQRERILEVYHRVVDNHEPLHLVAHDLNRRGVLSPKDYFAQLRGREPQGRKWSATALKRSMTSEAMLGYATLNGKTVRDDDGAPLVRAEPILTREQLEALRAELVKTSRAEPAVSTPSLLLRVLFCAVCGEPAYKFAGGGRKHSRYRCRSMGFPKHCGNGTVAMAEWDAFCEERVLDLLGDAERLEKVWVAGSDSAVELAEVNAELVDLTSLIGSPAYRAGSPQREALDARIAALAARQEELEGLEARPSGWEWRGTGQRFGDWWREQDTAAKNTWLRSMNVRLTFDVRGGLTRTIDFGDLQEYEQHLRLGSVVERLHTGMS

SEQ ID NO: 11907 - protein, 500 aa, synthetic construct
MRALVVVRLSRVTDATTSPERQLESCQQLCAQRGWDVVGVAEDLDVSGAVDPFDRKRRPSLARWLAFEEQPFDAIVAYRVDRLTRSIRHLQQLVHWAEDHKKLVVSATEAHFDTTTPFAAVVIALMGTVAQMELEAIKERSRSAAHFNIRAGKYRGSLPPWGYLPARVDGEWRLAPDPVQRERILEVYHRVVDNHEPLHLVAHDLNRRGVLSPRDYFAQLRGREPQGRKWSATALKRSMISEAMLGYATLNGKTVRDDDGAPLVRAEPILTRGQLEAIRAELVKTSRAKPAVSTPSLLLRVLFCAVCGEPAYKFSGGGRKHPRYRCRSMGFPKHCGNGTVAMAEWDAFCEEQVLDLLGDAERLEKVWVAGSDSAVELAEVNAELVDLTSLIGSPAYRAGSPQREALDARIAALAARQAELEGFEARPSGWEWRETGQGFGDWWREQDTAAKNTWLRSMNVRLTFDVRGGLTRTIDFGDLQEYERHLRLGSVVERLHTGMS

SEQ ID NO: 11908 - protein, 500 aa, synthetic construct
MRALVVIRLSRVTDATTSPERQLESCQQLCAQRGWDVVGVAEDLDVSGAVDPFDRKRRPNLARWLAFEEQPFDVIVAYRVDRLTRSTRHLQQLVHWAEDHKKLVVSATEAHFDTTTPFAAVVIALMGTVAQMELEAIKERNRSAAHFNIRAGKYRGSLPPWGYLPTRVNGEWRLVPDPVQRERILEVYHRVVDNHEPLHLVAHDLNRRGVLSPKDYFAQLRGREPQGRKWSATALKRSMTSEAMLGYATLNGKTVRDDDGAPLVRAEPILTREQLEALRAELVKTSRAKPAVSTPSLLLRVLFCAVCGEPAYKFAGGGRKHSRYRCRSMGFPKHCGNGTVAMAEWDAFCEEQVLDLLGDAERLEKVWVAGSDSAVELAEVNAELVDLTSLIGSPAYRAGSPQREALDARIAALAARQEELEGLEARPSGWEWRETGQRFGDWWREQDTAAKNTWLRSMNVRLTFDVRGGLTRSIDFGDLQVYEQHLRLGSVVERLHTGMS

SEQ ID NO: 11909 - protein, 500 aa, synthetic construct
MRALVVIRLSRVTDATTSPERQLESCQQLCAQRGWDVVGVAEDLDVSGAVDPFDRKRRPNLARWLAFEEQTFDVIVAYRVDRLARSIRHLQQLVHWAEDHKKLVVSATEAHFDTTTPFAAVVIALMGTVAQMELEAIKERNRSAAHFNIRAGKYRGSLPPWGYLPARVDGEWRLVPDPVQRERVLEVYHRVVDNHEPLHSVAHDLNRRGVLSPKDYFAQLQGREPQGRKWSATALKRSMISVAMLGYATLNGKIVRDDDGAPLVRAEPILTREQLEALRAELVKTSRAKPAVSAPSLLLRVLFCAVCGEPAYKFAGGGRKHPRYRCRSMGFPKHCGNGTVAMAEWDAFCEEQVLNLLGDVERLEKVWVAGSDSAVELAEVNAELVDLASLIGSPAYRAGSPQREALDARIAALAARQEELEGLEARPSGWEWRKTGQRFGDWWREQDTAAKNTWLRSMNVRLTFDVRGGLTRTIDFGDLREYEQHLRLASVVERLHTGMS

SEQ ID NO: 11910 - protein, 500 aa, synthetic construct
MRALVVIRLSRVTDATTSPERQLESCQQLCAQRGWDVVGVAEDLDVSGAVDPFDRKRRPNLARWLAFAEQPFDVIVAYRVDRLTRSVRHLQQLVHWAEDHEKLVVSATEAHFDTTTPFAAVVIALMGTVAQMELEAIKERNRSAAHFNIRAGKYRGSLPPWGYLPARVDGEWRLVPDPVQRERILEVYHRVVDNHEPLHLVAHDLNRRGVLSPRDYFAQLQGREPQGRKWSATALKRSMISEAMLGHATLDGKTVRDDDGAPLVRAEPILTREQLETLRAVLVKTSRAKPAVSTPSLLLRVLFCAVCGEPAYKFAGGGRKHPRYRCRSMGFPKHCGNGTVAMAEWDAFCEEQVLNLLGDAERLEKVWVAGSDSAVELAEVNAELVDLTSLIGSPAYRVGSPQREALDARIAALAARQEELEGLEARPSGWEWRGTGQRFGDWWREQDTAAKNTWLRSMNVRLTFDVRGGLTHTIDFGDLQEYELHLRSGGVVERLHTGMS

SEQ ID NO: 11911 - protein, 500 aa, synthetic construct
MRALVVIRLSRVTDATTSPERQLESCQQLCAQRGWDVVGVAEDLDVSGAVDPFDRKRRPNLARWLAFEEQPFDVIVAYRVDRLARSIRHLQQLVHWAEDHKKLVVSATEAHFDTTTPFAAVVIALMGTVAQMELEAIKERSRSAAHFNIRAGKYRGSLPPWGYLPTRVDGEWRLVPDPVQRERILEVYHRVVDNHEPLHLVAHDLNRRGVLSPKDYFAQLQGREPQGRKWSATALKRSMISEAMLGYATLNGKTVRDDDGAPLVRAEPILTREQQEALRAELVKTSRAKPAVSTPSLLLRVLFCAVCGEPAYKFAGGGRKHPRYRCRSMGFPKHCGNGTVAMAEWDAFCEEQVLDLLGDTERLEKVWVAGSDSAVELAEVNAELVDLTSLIGSPAYRAGSPQREALDARIAALAARQEELEGLEARPSGWEWRETGQRFGDWWREQDTAAKNTWLRSMNVRLTFDVRGGLTRTIDFGDLQEYEQHLRLGSVVERLHTGMS

SEQ ID NO: 11912 - protein, 500 aa, synthetic construct
MRALVVIRLSRVTDATTSPERQLESCQQLCAQRGWDAVGVAEDLDVSGAVDPFDRKRRPNLARWLAFEEQPFDAIVAYRVDRLTRSIRHLQRLVHWAEDHKKLVVSATEAHFDTTTPFAAVVIALMGTVAQMELEAIKERNRSAAHFNIRAGKYRGSLPPWGYLPTRVDGEWRLAPDPVQRERILEVYHRVVDNHEPLHLVAHDLNRRGVLSPKDYFAQLRGREPQGRKWSATALKRSMTSEAMLGYATLNGKTVRDDDGAPLVRAEPILTREQLEALRAELVKTSRAKPAVSTPSLLLRVLFCAVCGEPAYKFAGGGRKHPRYRCRSMGFPKHCGNGTVAMAEWDALCEEQVLDLLGDAERLEKVWVAGSDSAVELAEVNAELADLTSLIGSPAYRAGSPQREALDARIAALAARQEELEGLEARPSGWEWRGTGQRFGDWWHEQDTAAKNTWLRSMNVRLTFDVRGGLTRTIDFGDLQEYEQHLRLGSVVERLHTGMS

SEQ ID NO: 11913 - protein, 500 aa, synthetic construct
MRALVVIRLSRVTDATTSPERQLESCQQLCAQRGWDVVGVAEDLDVSGAVDPFDRKRRPNLARWLAFEEQPFDVIVAYRVDRLTRSIRHLQQLVHWAEDHKKLVVSATEAYFDTTTPFAAVVIALMGTVAQLELEAIKERSRSAAHFNIRAGKYRGSLPPWGYLPTRVDGEWRLAPDPVQRERILEVYHRVVDNHEPLHLVAHDLNRRGVLSPKDYFAQLQGREPQGRKWSATAIKRSMISEAMLGYATLNGKTVRDDSGAPLVRAEPILTREQLEALRAELVKTSRAKPAVPTPSLLLRVLFCAVCGEPAYKFAGGGRKHPRYRCRSMGFPKHCGNGTVAMAEWDAFCEEQVLDLLGDAERLEKVWVAGSDSALELAEVNAELVDLMSLIGSPAYRAGSPQREALDARIAALAARQEELEGLEARPSGWEWRETGQRFGDWWREQDTVAKNTWLRSMNVRLTFDVRGGLTRAIDFGDLQGYEQHLRLGSVVERLHTGMS

SEQ ID NO: 11914 - protein, 500 aa, synthetic construct
MRAIVVIRLSRVTDATTSPERQLESCQQLCAQRGWNVVGVAEDLDVSGAVDPFDRKRRPNLARWLAFEEQPFDVIVAYRVDRLTRSTRHLQQLVHWAEDHKKLVVSATEAHFDTTTPFAAVVIALMGTVAQMELEAIKERSRSAAHFNIRAGKYRGSLPPWGYLPTRVDGEWRLVPDPVQRERILEVYHRVVDNHEPLHLVAHDLNRRGVLSPKDYFAQLRGREPQGRKWSATALKRSMTSEAMLGYATLNGKTVRGDDGAPLVRAEPILTREQLEALCAELVKTSRAKPAVSTPSLLLRVLFCAVCGEPAYKFAGGGRKHSRYRCRSMGFSKHCGNGTVAMAEWDAFCEEQVLDLLGDAERLEKVWVAGSDSAVELAEVNAELVDLTSLIGSPAYRAGSPQREALDARIAALAARQEELEGLEARPSGWEWRETGQRFGDWWREQDTAAKNTWLRSMNVRLTFDVRGRLTRTIDFGDLQEYEQHLRLGSVVGRLHTGMS

SEQ ID NO: 11915 - protein, 500 aa, synthetic construct
MRALIVIRLSRVTEATTSPERQLESCQQLCAQRGWDVVGVAEDLDVSGAVDPFDRKRRPNLARWLAFEEQPFDVIVAYRVDRLARSIRHLQRLVHWAEDHKKLVVSATEAHFDTTTPFAAVVIALMGTVAQMELEAIKERNRSAAHFNIRAGKYRGSLPPWGYLPTRVDGEWRLVPDPVQRERILEVYHRVVDNHEPLHLVAHDLNRRGVLSPKDYFAQLRGREPQGRKWSATALKRSMISEAMLGYATLNGKTVRDDDGAPLVRAEPILTREQLEALRAELVKTSRAKPAVSTPSLLLRVLFCAVCGEPAYKFAGGGRKHPRYRCRSMGFPKHCGNGTVAMAEWDAFCEEQVLDLLGDAERLEKVWVAGSDSAVELAEVNAELVDLTSLIGSPVYRAGSPQREALAARIAALAARQEELEGLEARPSGWEWRETGRRFGDWWREQDTAAKNTWLRSMNVRLTFDVRGGLTRTIDFGDLQEYGQHLRLGSVIERLHTGMS

SEQ ID NO: 11916 - protein, 500 aa, synthetic construct
MRALVVIRLSRVTDATTSPERQLESCQQLCAQRGWDVVGVAEDLDVSGAVDPFDRKRRPNLARWLAFEEQPFDAIVAYRVDRLTRSIRHLQQLVHWAEDHKKLVVSATEAHFDTTTPFAAVVIALMGTVAQMELEAIKERSRSAAHFNIRAGKYRGSLPPWGYLPTRVDGEWRLVPDPVQRERILEVYHRVVDNHEPLHLVAHDLNRRGVLSPKDYFAQLQGREPQGRKWSATALKRSMISEAMLGYATLNGKTVRGDDGAPLVRAEPILTREQLGALRAELVKTSRAKPAVSTPSLLLRVLFCAVCGEPAYKFSGGGRKHPRYRCRSMGFPKHCGNGTVAMAEWDAFCEEQVLDLLGDAERLEKVWVAGSDSAAELAEVNAELVDLTSLIGSPAYRAGSPQREALDACIAALAARQEELEGLEARPSGWEWRGTGQRFGDWWREQDTAAKNTWLRSMNVRLTFDVRGGLTRAIDFGDLQEYEQHLRLGSVVERLHTGMS

SEQ ID NO: 11917 - protein, 500 aa, synthetic construct
MRALVVIRLSRVTDATTSPERQLESCQQLCAQRGWDVVGVAEDLDVSGAVDPFDRKRRPNLARWLAFEEQPFDVIVAYRVDRLARSIRHLQLLVHWAEDHKKLVVSATEAHFDTTTPFAAIVIALMGTVAQMELEAIKERSRSAVHFNIRAGKYRGSLPPWGYLPARVDGGWRLVPDPVQRERILEVYHRVVDNHEPLHLVAHDLNRRGVLSPKDYFAQLRGREPQGRKWSATALKRSMISEAMLGYATLNGKTVRDDDGAPLVRAEPILTREQLEALRAELVKTSRAKPAVSTPSLLLRVLFCAVCGEPAYKFAGGGRRHPRYRCRSMGFPKHCGNGTVAMAEWDAFCEEQVLDLLGDAERLERVWVTGSDSAVELAEVNAELEDLTSLIGSPAYRAGSPQREALDARIAALAARQEELEGLEARPSDWEWRETGQRFGDWWREQDTAAKNTWLRSMNVRLTFDVRGGLTRTIDFGDLQEYEQHLRSGSVVERLHTGMS

SEQ ID NO: 11918 - protein, 500 aa, synthetic construct
MRALVVIRLSRVTDATTSPERQLESCQQLCAQRGWDVVGVAEDLDVSGAVDPFDRKRRPNLARWLAFEEQPFDVIVAYRVDRLTRSTRHLQQLVHWAEDHKKLVVSATEAHFDTTTPFAAVVIALMGTVAQMELEAIKERNRSAAHFNIRAGKYRGSLPPWGYLPTRVDGEWRLVPDPVQRERILEVYHRVVVNHEPLHLVAHDLNRRGVLSPKDYFAQLRGREPQGRKWSATALKRSMISDAMLGYATLNGKTVRDDDGTPLVRAEPILTREQLEALRAELVKTSRAKPAVSTPSLLLRVLFCAVCGEPAYKFAGGGRKHPRYRCRSMGFPKHCGNGTVAMAEWDVFCEEQVLDLLGDAERLEKVWVAGSDSAVELAEVNAELVDLTSLIDSPAYRAGSPQREALDARIAALAARQEELEGLEARPSGWEWRETGQRFRDWWREQDTAAKNTWLRSMNVRLTFDVRGGLTRTIDFGDLLEYEQHLRLGSVVERLHTGMS

SEQ ID NO: 11919 - protein, 500 aa, synthetic construct
MRALVVIRLSRVTDATTSPERQLESCQQLCAQRGWDVVGVAEDLDVSGAVDPFDRERRPNLARWLAFEEQPFDAIVAYRVDRLARSIRHLQHLVHWAEDHKKLVVSATEAHFDTTTPFAAVVIALMGTVAQMELEAIKERNRSAAHFNIRAGKYRGSLPPWGYLPTRVDGEWRLAPDPVQRERILEVYHRVVDNHEPLHLVAHDLNRRGVLSPKDYFAQLQGREPQGRKWSATALKRSMISGAMLGYATLNGKTVRDDDGAPLVRAEPILTREQLEALRAELVKTSRAKPAVSTPSLLLRVLFCAVCGEPAYKFSGGGRKHPRYRCRSMGFPRHCGNGTVAMAEWDAFCEEQVLGLLGDAERLEKVWVAGSDSAVELAEVNAELVDLTSLIGSPAYRAGSPQREALDARIAALAARQEELEGLEARPSGWEWRRTGQRFGDWWREQNTAAKNTWLRSMNVRLTFDVRGGLTRTVDFGDLQEYEQHLRLGSVVERLHTGMS

SEQ ID NO: 11920 - protein, 500 aa, synthetic construct
MRALVVIRLSRVTDATTSPERQLESCQQLCAQRGWDVVGVAEDLDVSGAVDPFDRKRRPNLARWLAFEEQPFDAIVAHRVDRLARSIRHLQQLVHWAEDHKKLVVSATEAHFDTTTPFAAVVIALMGTVAQMELEAIKERSRSAAHFNIRAGKYRGSLPPWGYLPARVDGVWRLVPDPVQRERILEVYHRVVNNHEPLHLVAHDLNQRGVLSPKDYFAQLQGREPQGRKWSATALKRSMISEAMLGYATLNGKTVRDDDGAPLVRAEPILTREQREALRAELVKTSRAKPAVSTPSLLLRVLFCAVCGEPAYKFAGGGRKHPRYRCRSMEFPKHCGNGTVAMAEWDAFCEEQVLGLLGDAERLEKVWVAGSDSAVELAEVNAELVDLTSLIGSPAYRAGSPQREALDARIAALAARQEELEGLESRPSGWEWRETGQRFGDWWREQDTAAKNTWLRSMNVRLTFDVRGGLTRTIDFGDLQEYGQHLRLGSVVERLRTGMS

SEQ ID NO: 11921 - protein, 500 aa, synthetic construct
MRALVVIRLSRVTDATTSPERQLESCQQLCAQRGWDVVGVAEDLDVSGAVDPFDRKRRPNLARWLAFEEQPFDVIVAYRVDRLTRSTRHLQQLVRWAEDHEKLVVSATEAHFDTTTPFAAVVIALMGTVAQMELEAIKERNRSAAHFNIRAGKYRGSLPPWGYLPARVDGEWRLVPDPVQRERILEVYHRVVDNHEPLHLVAHDLNRRGVLSPKDYFAQLQGREPQGRKWSATALKRSMISETMLGYATLNGKTVRDDDGAPLVRAEPILTREQQEALRAELVKTSRAKPAVSTPSLLLRVLFCAVCGEPAYKFAGGGRKHPRYRCRSMGFPKHCGNGTVAMAEWDAFCEEQVLGLLGDAERLEKVWVAGSDSAVELAEVNAELVDLTSLIGSPAYRAGSPQREALDARIAALAARQEELEGLGARPSGWEWRETGQRFGDWWREQDTAAKNTWLRSMNVRLTFDVRGELTRTIDSGDLQEYEQHLRLGSVVERLHTGMS

SEQ ID NO: 11922 - protein, 500 aa, synthetic construct
MRALVVIRLSRVTDATTSPERQLESCQQLCAQRGWDVVGVAEDLDVSGAVDPFDRERRPNLARWLAFEEQPFDAIVAYRVDRLARSIRHLQHLVHWAEDHKKLVVSATEAHFDTTTPFAAVVIALMGTVAQMELEAIKERNRSAAHFNIRAGKYRGSLPPWGYLPTRVDGEWRLAPDPVQRERILEVYHRVVDNHEPLHLVAHDLNRRGVLSPKDYFAQLQGREPQGRKWSATALKRSMISGAMLGYATLNGKTVRDDDGVPLVRAEPILTREQLEALRAELVKTSRAKPAVSTPSLLLRVLFCAVCGEPAYKFSGGGRKHPRYRCRSMGFPKHCGNGTVAMAEWDAFCEEQVLDLLGDAERLEKVWVAGSDSAVELAEVNAELVDLTSLIGSPVYRAGSPQREALDARIAALAARQGELEGLEARPSGWEWRGTGQRFGDWWREQDTAAKNTWLRSMNVRLTFDVRGGLTRTIDFGDLQEYEQHLRLGSVVERLHTGMS

SEQ ID NO: 11923 - protein, 500 aa, synthetic construct
MHALVVIRLSRVTEATTSPERQLESCQQLCAQRGWDVVGVAEDLDVSGAIDPFDRKRRPNLARWLAFEEQPFDVIVAYRVDRLTRSTRHLQQLVHWAEDHKKLVVSATEAHFDTTTPFAAVVIALMGTVAQMELEAIKERNRSAAHFNIRAGKYRGSLPPWGYLPTRVDGEWRLAPDPVQRERILEVYHRVVDNHEPLHLVAHDLNRRGILSPKDYFAQLRGREPQGRRWSATALKRSMISEAMLGYATLNGKTVRDDDGAPLVRAEPILTREQLEALRAELVKTSRAKPAVSTPSLLLRVLFCAVCGEPAYKFAGGGRKHPRYRCRSMGFPKHCGNGTVAMAEWDAFCEEQVLDLLGDAERLEKVWVAGSDSAVELAEVNAELVDLTSLIGSPAYRAGSPQREALDARIAALAARQEELESLEARPSGWEWRETGQRFGDWWREQDTAAKNTWLRSMNVRLTFDVRGGLTRTIDLGDLQEYEQHLRLGSVVERLHTGMS

SEQ ID NO: 11924 - protein, 500 aa, synthetic construct
MRALVAIRLSRVTDATTSPERQLESCQQLCAQRGWDVVGVAEDLDVSGAVDPFDRKRRPNLARWLAFEEQPFDVIVAYRVDRLTRSVRHLQQLVHWAEDHKKLVVSATEAHFDTTTPFAAVVIALMGTVAQMELEAIKERSRSAAHFNIRAGKYRGSLPPWGYLPARVDGEWRLVPDPVQRERILEVYHRVVDNHEPLHLVAHDLNRRGVLSPKDYFAQLRGRETQGRKWSATALKRSMISAAMLGYATLCGKTVRDDDGAPLVRAEPILTREQLEALRAELVKTSRAKPAVSTPSLLLRVLFCAVCGEPAYKFAGGGRKHPRYRCRSMGFPKHCGNGTVAMAEWDAFCEEQVLNLLGDAERLEKVWVAGSDSAVELAEVNKELVDLTSLIGSPAYRAGSPQREALDARIAALAARQEELEGLEARPSGWEWRGTGQRFGDWWRELDTAAKNTWLRSMNVRLTFDVRDGLTRTIDFGDLQEYEQHLRLGSVVERSHTGMS

SEQ ID NO: 11925 - protein, 500 aa, synthetic construct
MRALVVIRLSRVTEATTSPERQLESCQQLCAQRGWDVVGVAEDLDVSGAVDPFDRKRRPNLARWLAFEEQPFDVIVAYRVDRLARSIRHLQQLVHWAEDHKKLVVSATEAHFDTTTPFAAVVIALMGTVAQMELEAIRERNRSAAHFNIRAGKYRGSLPPWGYLPTRVDGEWRLVPDPVQRERILEVYHRVVDNHEPLHLVAHDLNRRGVLSPKDYFAQLQGREPQGRKWSATALKRSMISGAMLGYATLNGKIVRDDDGAPLVRAEPILTREQLEALRAEFVKTSRAKPAVSTPSLLLRVLFCAVCGEPAYKFAGGGRKHPRYRCRSMGFPKHCGNGTVAMAEWDAFCEEQVLNLLGDAERLEKVWVAGSDSAVELAEVNAELVDLTSLIGSPAYRAGSPQREALDARIAALAARQEELEGLEARPPGWEWRETGQRFGDWWREQDTAAKNTWLRSMNVRLTFDVRGRLTRTIDFGGLQEYEQHLRLGSVVERLHTGMS

SEQ ID NO: 11926 - protein, 500 aa, synthetic construct
MRALVVIRLSRVTDATTSPERQLESCQQLCAQRGWDVVGVAEDLDVSGAVDPFDRKRRPNLARWLAFEEQPFDVIVAYRVDRLARSIRHLQQLVRWAEDHKKLVVSATEAHFDTTTPFAAVVIALMGTVAQMELEAIKERNRSAAHFNIRAGKYRGSLPPWGYLPTRVDGVWRLVPDPVQRERILEVYHRVVDNHEPLHLVAHDLNRRGVLSPRDYFAQLRGREPQGRKWSATALKRSMVSEAMLGYATLNGKTVRDDDGAPLVRAEPILTREQLEALRAELVKTPRAKPAVSTPSLLLRVLFCAVCGEPAYKFAGGGRKHPRYRCRSMGFPKHCGNGTVAMAEWDAFCEEQVLDLLGDAKRLEKVWVAGSDSAAELAEVNAELVDLTSLIGSPAYRAGSPQREALDARIAALAARQEELEGLEARPSGWEWRETGQRFGDWWRVQDTAAKNSWLRSMNVRLTFDVRGGLTRTIDFGDLQEYEQRLRLGSVVERLHTGMS

SEQ ID NO: 11927 - protein, 500 aa, synthetic construct
MRALVVIRLSRVTDATTSPERQLESCQQLCAQRGWDVVGVAEDLDVSGAVDPFDRKRRPNLARWLAFEEQPFDAIVAYRVDRLTRSIRHLQQLVHWAEDHKKLVVSATEAHFDTTTPFAAVVIALMGTVAQMELEAIKERNRSAAHFNIRAGKYRGSLPPWGYLPTRVGGEWRLAPDPVQRERILEVYHRVVDNHEPLHLVAHDLNRRGVLSPRDYFAQLRGREPRGRKWSATALKRSMTSEAMLGYATLNGKTVRDDDGAPLVRAEPILTREQLEALRAELVKTSRAKPAVSTPSLLLRVLFCAVCGEPAYKFAGGGRKHPRYRCRSMGFPKHCGNGTVAMAEWDAFCEEQVLDLLGDAERLEKVWVAGSDSAVELTEVNAELVDLTSLIGSPAYRAGSPQREALDVRIAALAARQGELEGLEARPSGWEWRETGQRFGDWWREQDTAAKNTWLRSMNVRLTFDVRGGLTRTIDFGDLQEYEQHLRLGSVVGRLHTGMS

SEQ ID NO: 11928 - protein, 500 aa, synthetic construct
MRALVVIRLSRVTDATTSPERQLESCQQLCAQRGWDVVGVAEDLDVSGAVDPFDRKRRPNLARWLVFEEQPFDVIVAYRVDRLARSIRHLQQLVHWAEDHKKLVVSATEAHFDTTTPFAAVVIALMGTVAQMELEAIRERNRSAAHFNIRAGKYRGSLPPWGYLPARVDGEWRLVPDPVQRERILEVYHRVVDNHEPLHLVAHDLNRRGVLSPKDYFAQLRGREPQGRKWSATALKRSMTSEAMLGYATLNGKTVRDDDGAPLVRAEPILTREQLEALRAELVKTSRAKPAVSTPSLLLRVLFCAVCGEPAYKFAGGGRKHPRYRCRSMGFPKHCGNGTVAMAEWDLFCEERVLDLLGDAERLEKVWVAGSDSAVKLAEVNAELEDLTSLIGSPAYRAGSPQREALDARIAALAARQEELEGLEARPSGWEWRETGQRFGDWWREQDTAAKNTWLRLMNVRLTFDVRGGLTRTIDFGDLQEYEQHLRLGSVVERLHTGMS

SEQ ID NO: 11929 - protein, 500 aa, synthetic construct
MRALVVIRLSRVTDATTSPERQLESCQLLCAQRGWDVVGVAEDLDVSGAVNPFDRKRRPNLARWLAFEEQPFDVIVAYRVDRLTRSTRHLQQLVHWAEDHKKLVVSATEAHFDTTTPFAAVVIALMGTVAQMELEAIKERSRSAAHFNIRAGKYRGSLPPWGYLPTRVDGEWRLVPDPVQRERILEVYHRVVDNHEPLHLVAHDLNRRGVLSPKDYFAQLQGREPQGRKWSATALKRSMTSEAMLGYATLDGKTVRDDDGAPLVRAEPILTREQLEALRAELVKTSRAKPAVPTPSLLLRVLFCAVCGEPAYKFAGGGRKHPRYRCRSMGFPKHCGNGTVAMAEWDAFCEEQVLDLLGDAERLEKVWVAGSDSAVELAEVNAELVDLTSLIGSPAYRAGSPQREALDARIAALAARQEELEGLEARPSGWEWRGTGQRFGDWWREQDTAAKNTWLRSMNVRLTFDVRGGLTRTIDFGDLQEYGQHLRLGSVVERLRTGMS

SEQ ID NO: 11930 - protein, 500 aa, synthetic construct
MRALVVIRLSRVTEATTSPERQLESCQQLCAQRGWDVVGVAEDLDVSGAVDPFDRKRRPNLARWLAFEEQPFDVIVAYRVDRLTRSIRHLQQLVHWAEDHKKLVVSATEAHFDMTTPFAAVVIALMGTVAQMELEAIKERSRSAAHFNIRAGKYRGSLPPWGYLPTRVDGEWRLAPDPVQRERILEVYHRVVDNHEPLHLVAHDLNRRGVLSPKDYFAQLQGREPQGRKWSATALKRSMISEAMLGYATLNGKTVRDDDGAPLVRAEPILTREQLEALRAELVKTSRAKPAVSTPSLLLRVLFCAVCGEPAYKFSGGGRKHPRYRCRSMGFPKHCGNGTVAMAEWDAFCEEQVLDLLGDAERLEKVWVAGSDSAVELAEVNAELVDLTSLIGSPAYRAGSPQREALDARIAALAARQEELEGLEARPSGWEWRETGQRFGDWWREQDTAAKNTWLRSMNVRLTFDVRGGLTRTIDFGDLQEYEQHLRLGSAIERLHTGMS

SEQ ID NO: 11931 - protein, 500 aa, synthetic construct
MRALVVIRLSRVTDATTSPERQLESCQQLCAQRGWDVVGVAEDLDVSGAVDPFDRKRRPNLARWLAFEEQPFDVIVAYRVDRLARSIRHLQQLVHWAEDHKKLVVSATEAHFDTTTPFAAVVIALMGTVAQMELEAIKERSRSAAHFNIRAGKYRGSLPPWGYLPTRVDGEWRLVPDPVQRERILEVYHRVVDDHEPLHLVAHDLNRRGVLSPKDYFAQLRGREPQGRKWSATALKRSMISEAMLGYATLNGKTVRNDDGAPLVRAEPILTREQLEALRAELVKTSRAKPAVSTPSLLLRVLFCAVCGEPAYKFAGGGRKHSRYRCRSMGFPKHCGNGTVAMAECDAFCEEQVLNLLGDAERLERVWVAGSDSAVELAEVNAELVDLTRLIGSPAYRAGSPQRAALDARIAALAARQEELEGLEARPSGWEWRETGQRFGDWWREQDTAAKNTWLRSMNVRLTFDVRGGLTRTIDFGDLQEYEQHLRLGSVVERLHTGMS

SEQ ID NO: 11932 - protein, 500 aa, synthetic construct
MRALVVIRLSRVTDATTSPERQLESCQQLCAQRGWDVVGVAEDLDVSGTVDPFDRKRRPSLARWLAFEEQPFDVIVAYRVDRLTRSIRHLQQLVHWAEDHKKLVVSATEAHFDTTTPFAAVVIALMGTVAQMELEAIKERNRSAAHFNIRAGKYRGSLPPWGYLPTRVDGEWRLVPDPVQRERILEVYRRVVDNHEPLHLVAHDLNRRGVLSPKDYFAQLQGREPQGRKWSATALKRSMTSEAMLGHATLNGKTVRDDDGAPLVRAEPILTREQLEALRAELVKTSRAKPAVPTPSLLLRVLFCAVCGEPAYKFAGGGRRHPRYRCRSMGFPKHCGNGTVAMAEWDAFCEEQVLDLLGDAERLEKVWVAGSDSAVELAEVNAELVDLTSLIGSPAYRAGSLQREALDARIAALAARQEELEGLEARTSGWEWRGTGQRFGDWWREQDTAAKNTWLRSMNVRLTFDVRGGLTRTIDFGDLQEYEQHLRLGSVVERLHTGRS

SEQ ID NO: 11933 - protein, 500 aa, synthetic construct
MRALVVIRLSRVTDATTSPERQLESCQQLCAQRGWDVAGVAEDLDVSGAVDPFDRKRRPNLARWLAFEERPFDVIVAYRVDRLTRSTRHLQQLVHWAEDHKKLVVSATEAHFDTTTPFAAVVIALMGTVAQMELEAIRERSRSAAHFNIRAGKYRGSLPPWGYLPTRVDGEWRLVPDPVQRERILEVYHRVVDNHEPLHLVAHDLNRRGVLSPKDYFAQLRGREPQGRKWSATALKRSMISEAMLGYATLNGKTVRDDDGAPLVRAEPILTREQLEALRAGLVKTSRAKPAVSTPSLLLRVLFCAVCGEPAYKFAGGGRKHPRYRCRSMGFPKHCGNGTVAMAEWDAFCEEQVLDLLGDAERLEKVWVAGSDSAVELAEVNAELVDLTSLIGSPAYRAGSPQREALDARIAALAARQEELEGLEARPSGWEWRETGQRFGDWWREQDTAAKNTWLRSMNVRLTFDVRGGLTRTIDFGDLQEYEQHLRLGSAIERLHTGMS

SEQ ID NO: 11934 - protein, 500 aa, synthetic construct
MRALVVIRLSRVTDATTSPERQLESCQQLCAQRGWGVVGVAEDLDVSGAVDPFDRKRRPNLARWLAFEEQPFDVIVAYRVDRLARSIRHLQQLVHWAEDHKKLVVSATEAHFDTTTPFAAVVIALMGTVAQMELEAIKERNRSAAHFNIRAGKYRGSLPPWGYLPTRVDGEWRLAPDPVQRERILEVYHRVVDNHEPLHLVAHDLNRRGVLSPRDYFAQLRGREPQGRKWSATALKRSMISEAMLGYATLNGRTVRDEDGAPLVRAEPILTREQQEALRAELVKTSRAKPAVSTPSLLLRVLFCAVCGEPAYKFAGGGRKHPRYRCRSMGFPKHCGNGTVAMAEWDAFCEEQVLNLLGDAERLERVWVAGSDSAVELAEVNAELVDLTSLIGSPAYRAGSPQREALDARIAALAARQEELVGLEARPSGWEWRETGQRFGDWWREQDTAAKNTWLRSMNVRLTFDVRGGLARTIDFGDLQEYEQHLRSGSVVERLHTGMS

SEQ ID NO: 11935 - protein, 500 aa, synthetic construct
MRALVVIRLSRVTDATTSPERQLESCQQLCAQRGWDVVGVAEDLDVSGAVDPFDRKRRPNLARWLAFEEQPFDVIVTHRVDRLARSIRHLQQLVHWAEDHKKLVVSATEAHFDTTTPFAAVVIALMGTVAQMELEAIKERSRSAAHFNIRAGKYRGSLPPWGYLPTRVDGEWRLVPDPVQRERILEVYRRVVDNHEPLHLVAHDLNRRGVLSPKDYFAQLRGREPQGRKWSATALKRSMISKAMLGYATLNGKTVRDEDGAPLVRAEPILTREQLEALRAELVKTSRAKPAVSTPSLLLRVLFCAVCGEPAYKFAGGGRKHPRYRCRSMGSPKHCGNGSVAMAEWDAFCEEQVLNLLGDAERLEKVWVAGSDSAVELAEVNAELVDLTSLIGSPAYRAGSPQREALDARIAAMAARQEELEGLEARPSGWEWRETGQRFGDWWREQDTAAKNTWLRSMNVRLTFDVRGGLTRAIDFGDLQEYEQHLRSGSVVERLHTGMS

SEQ ID NO: 11936 - protein, 500 aa, synthetic construct
MRALVVIRLSRVTDATTSPERQLGSCQQLCAQRGWDIVGVAEDLDVSGAVDPFDRKRRPNLARWLAFEEQPFDVIVAYRVDRLARSIRHLQQLVHWAEDHKKLVVSATEAHFDTTTPFAAVVIALMGTVAQMELEAIKERSRSAAHFNIRAGKYRGSLPPWGYLPSRVDGEWRLVPDPVQRERILEVYHRVVDNHEPLHLVAHDLNRRGVLSPKDYFAQLQGREPQGRKWSATALKRSMISEAMLGYATLNGKTVRDDDGAPLVRAEPILTRVQLEALRAELVKTSRAKPAVSTPSLLLRVLFCAVCGEPAYKFAGGGRKHPRYRCRSMGFPKHCGNGTVAMAEWDTFCEEQVLDLLGDVERLEKVWVAGSDSAVKLAEVNAELVDLTGLIGSPAYRAGSPQREALDARIAALAARQEELEGLEARPSGWEWRGTGQRFGDWWREQDTAAKNTWLRSMNVRLTFDVRGGLTRTIDFGDLQEYEQHLRLGSVAERLHTGMS

SEQ ID NO: 11937 - protein, 500 aa, synthetic construct
MRALVVIRLSRVTDATTSPERQLESCQQLCAQRGWDVVGVAEDLDVSGAVDPFDRKRRPNLARWLAFEEQPFDVIVAYRVDRLTRSTRHLQQLVHWAEDHKKLVVSATEAHFDTTTPFAAVVIALMGTVAQMELEAIRERSRSAAHFNIRAGKYRGSLPPWGYLPTRVDREWRLVPDPVQRERILEVYHRVVDNHEPLHLVAHDLNRRGVLSPKDYFAQLQGREPQGHKWSATALKRSMISGAMLGYATLNGKAVRDDDGAPLVRAEPILTREQQEALRAELVKTSRAKPAVSTPSLLLRVLFCAVCGEPAYKFSGGGRKHPRYRCRSMGFPKHCGNGTVAMAEWDAFCEEQVLDLLGDAERLEKVWVAGSDSAVELAEVNAELVDLTSLIGSPAYRAGSPQREALDARIAALAARQGELEGLEARPSGWEWRETGQRFGDWWREQDTAAKNTWLRSMNVRLTFDVRGGLTRTIDFGDLQEYEQHLRLGSVVERLHTGMS

SEQ ID NO: 11938 - protein, 500 aa, synthetic construct
MRALVVIRLSRVTDATTSPERQLESCQQLCAQRGWDVVGVAEDLDVSGAVDPFDRKRRPNLARWLAFEERPFDVIVAYRVDRLTRSIRHLQQLVHWAEDHKKLVVSATEAHFDTTTPFAAVVIALMGTVAQMELEAIKERNRSAAHFNIRAGKYRGSLPPWGYLPTRVDGVWRLVPDPVQRERILEVYHRVVDNHEPLHLVAHDLNRRGVLSPKDYFAQLRGREPQGRKWSATALKRSMISEAMLGRATLNGKTVRGDDGAPLVRAEPILTREQLGALRAELVKTSRAKPAVSTPSLLLRVLFCAVCGEPAYKFAGGGRRHPRYRCRSMGFPKHCGNGTVAMAEWDAFCEEQVLDLLGGAERLEKVWVAGSDSAVELAEVNAELVDLTSLIGSPAYRAGSPQREALDARIAALAARQEELEGLEARLSGWEWRGTGQRFGDWWREQDTAAKNTWLRSMNVRLTFDVRGGLTRTIDFGDLQEYEQHLRLGSVVERLHTGMS

SEQ ID NO: 11939 - protein, 500 aa, synthetic construct
MRALVVIRLSRVTDATTSPERQLESCQQLCAQRGWDVVGVAEDLDVSGAVDPFDRKRRPSLARWLAFEEQPFDVIVAYRVDRLTRSTRHLQQLVRWAEDHKKLVVSATEAHFDTTTPFAAVVIALMGTVAQMELEAIKERNRSAAHFNIRAGKYRGSLPPWGYLPTRVDGEWRLVPDPVQRERILEVYHRVVDNHEPLHLVAHDLNRRGVLSPKDYFAQLRGREPQGRKWSATALKRSMISEAMLGYATLNGKIVRDDDGAPLVRAEPILTREQLEALRAELVKTSRAKPAVSTPSLLLRVLFCAVCGEPAYKFTGGGRKHPRYRCRSMGFPKHCGNGTVAMAEWDAFCEKQVLDLLGDAERLEKVWVAGSDSAVELAEVNAELVDLTSLIGSPAYRAGSPQREALDARIAALAARQEELEGLEAHPPGWEWRETGQRFGDWWREQDTAVKNAWLRSMNVRLTFDVRGGLTRTIDFGDLQEYEQHLRLGSVVERLHTGMS

SEQ ID NO: 11940 - protein, 500 aa, synthetic construct
MRALVVIRLSRVTDATTSPERQLESCQQLCAQRGWVVVGVAEDLDVSGAVDPFDRKRRPNLARWLAFEEQPFDVIVAYRVDRLTRSTRHLQQLVHWADDHKKLVVSATEAHFDTTTPFAAVVIALMGTVAQMELEAIKERSRSAAHFNIRAGKYRGSLPPWGYLPARVDGVWRLVPDPVQRERILEVYHRVVNNHEPLHLVAHDLNRRGVLSPKDYFAQLQGREPQGRKWSATALKRSMISEAMLGYATLNGKTVRDDNGAPLVRAEPILTREQQEALRAELVKTSRTKPAVSTPSLLLRVLFCAVCGEPAYKFAGGGRKHSRYRCRSMGFPKHCGNGTVAMAEWDAFCEEQVLNLLGDAERLEKVWVAGSDSAVELAEVNAELVDLTSLIGSPAYRAGSPQREALDARIAALAARQEELEGLEARPSGWEWRETGQRFGDWWREQDTAAKNTWLRSMSVRLTFDVRGGLTRTVDFGDLQEYEQHLRLGSVVERLHTGMS

SEQ ID NO: 11941 - protein, 500 aa, synthetic construct
MRALIVIRLSRVTDATTSPERQLESCQQLCAQRGWDVVGVAEDLDVSGAVDPFDRKRRPNLARWLAFEEQPFDVIVAYRIDRLARSIRHLQQLVHWAEDHKKLVVSATEAHFDTTTPFAAVVIALMGTVAQMELEAIKERSRSAAHFNIRAGKYRGSLPPWGYLPTRVDGEWRLVPDPVQRERILEVYHRVVDNHEPLHLVAHDLNRRGVLSPKDYFAQLRGREPQGRKWSATALKRSMISEAMLGYATLNGKTVRDDDGAPLVRAEPILTREQLEALRAELVKTSRAKPAVSTPSLLLRVLFCAVCGEPAYKFAGGGRKHPRYRCRSMGFPKHCGNGTVAMAEWDAFCEEQVLNLLGDAERLEKVWVAGSDSAVELAEVSAELVDLTSLIGSPAYRAGSPQREALDARIAALAARQEELEGLEARPSGWGWRETGRRFGDWWREQDTAAKNTWLRTMNVRLTFDVRGGLTRTIDFGDLHEYEQHLCLGSVVERPHTGMS

SEQ ID NO: 11942 - protein, 500 aa, synthetic construct
MRALVVIRLSRVTDATTSPERQLESCQRLCAQRGWDVVGVAEDLDVSGAVDPFDRKRRPNLARWLAFEEQPFDVIVAYRVDRLTRSTRHLQQLVHWAEDHKKLVVSATEAHFDTTTPFAAVVIALMGTVAQMELEAIKERSRSAAHFNIRAGKYRGSLPPWGYLPARVDGEWRLVPDPVQRGRILEVYHRVVDNHEPLHLVAHDLNRRGVLSPKDYFAQLRGREPQGRKWSATALKRSMVSEAMLGYATLNGKTVRDDDGAPLVRAEPILTREQLEALRAELVKTSRAKPAVSTPSLLLRVLFCAVCGEPAYKFSGGGRKHPRYRCRSMGFPKHCGNGTAAMAEWDAFCEEQVLDLLGDAERLEKVWVAGSDSAVELAEVNAELVDLTSLISSPAYRAGSPQREALDARIAALAARQEELEGLEARPSGWEWRETGQRFGDWWREQDTAAKNTWLRSMNVRLTFDVRGGRTRTIDFGDLQEYEQHLRLGSVVERLHTGMS

SEQ ID NO: 11943 - protein, 500 aa, synthetic construct
MRALVVIRLSRVTDATTSPERQLESCQQLCAQRGWDVVGVAEDLDVSGAVDPFDRKRRPNLARWLAFEEQPFDVIVAYRIDRLARSIRHLQQLVHWAEDHKKLVVSATEAHFDTTTPFAAVVIALMGTVAQMELEAIKERSRSAAHFNIRAGKYRGSLPPWGYLPTRVDGEWRLVPDPVQRERILEVYHRVVDNHEPLHLVAHDLNRRGVLSPKDYFAQLRGREPQGRKWSATALKRSMISEAMLGYATLNGKTVRDDDGAPLVRAEPILTREQLEALRAELVKTSRAKPAVSTPSLLLRVLFCAVCGEPAYKFAGGGRKHPRYRCRSMGFPKHCGNGTVAMAEWDAFCEEQVLNLLGDAGRLEKVWVAGSDSAVELAEVNAELVDLTSLIGSPAYRAGSPQREALDARIAALAARQEELEGLEARPSGWEWRETGQRFGDWWREQDTAVKNTWLRSMNVRLTFDVRGGLTRTIDFGDLQEYEQHLGLGSVVERLHTGMS

SEQ ID NO: 11944 - protein, 500 aa, synthetic construct
MRALVVIRLSRVTDATTSPERQLESCQQLCAQRGWDVVGVAEDLDVSGAVDPFDRKRRPNLARWLAFEEQPFDVIVAYRVDRLARSIRHLQQLVHWAEDHKKLVVSATEAHFDTTTPFAAVVIALMGTVAQMELEAIKERSRSAAHFNIRAGKYRGSLPPWGYLPTRVDGEWRLAPDPVQRERILEVYHRVVDNHEPLHLVAHDLNRRGVLSPKDYFAQLQGREPRGRKWSATALKRSMISEAMLGYATLDGKTVRDDDGAPLVRAEPILTREQQEALRAELVKTSRAKPAVSTPSLLLRVLFCAVCGEPAYKFAGGGRKHPRYRCRSMGFPKHCGNGTVAMAEWDAFCEEQVLDLLGDAERLEKVWVAGSDSAVELAEVNAELVDLTSLIGSPAYRAGSPQREALDARIAALAARQEELEGLEARPSGWEWRGTGQRFGDWWREQGTAAKNTWLRSMNVRLTFDVRGGLTRTIDFGDLQEYEQHLRLGSVVERLHTGMS

SEQ ID NO: 11945 - protein, 500 aa, synthetic construct
MRALVVIRLSRVTDATTSPERQLESCQQLCAQRGWDVVGVAEDLDVSGAVDPFDRKRRPNLARWLAFEEQPFDVIVAYRVDRLTRSTRHLQQLVHWAEDHKKLVVSATEAHFDTTTPFAAVVIALMGTVAQMELEAIKERSRSAAHFNIRAGKYRGSLPPWGYLPTRVDGEWRLVPDPVQRERILEVYRRVVDNHEPLHLVAHDLNRRGVLSPKDNFAQLRGREPQGRKWSATALKRSMTSEAMLGYATLNGKTVRDDDGAPLVRAEPILTREQLEALRAELVKTSRAKPAVSTPSLLLRVLFCAVCGEPAYKFAGGGRKHPRYRCRSMGFPKHCGNGTVAMAEWDAFCEEQVLNLLGDTERLEKVWVAGSDSAVELAEVNAELVDLTSLIGSPAYRARSPQREALDARIAALAARQEELEGLEARPSGWEWRETGQRFGDWWREQDTAAKNTWLRSMNVRLTFDVRGGLTRTIDFGDLQEYEQHLRLGSVAERLHTGMS

SEQ ID NO: 11946 - protein, 500 aa, synthetic construct
MRALVVIRLSRVTDATTSPERQLKSCQQLCAQRGWDVVGVAEDLDVSGAVDPFDRKRRPNLARWLAFEEQPFDVIVAYRVDRLARSIRHLQQLVHWAEDHKKLVVSATEAHFDTTTPFAAVVIALMGTVAQMELEAIKERSRSAAHFNIRAGKYRGSLPPWGYLPTRVDGEWRLVPDPVQRERILEVYHRVVDNHEPLHLVAHDLNRRGVLSPRDYFAQLRGREPQGRKWSATALKRSMISEAMLGYATLSGRTVRDDDGAPLVRAEPILTREQLEALHAELVKTSRAKPAVSTPSLLLRVLFCAVCGEPAYKFAGGGRKHPRYRCRSMGFPKHCGNGTVATAEWDAFCEEQVLDLLGDTERLEKVWVAGSDSAIELAEVNAELVNLTSLIGSPAYRAGSPQREALDARIAALAARQEKLEGLEARPSGWEWRETGQRFGDWWRKQDTAAKNTWLRSMNVRLTFDVRGGLTRTIDFGDLQEYEQHLRLGSVVDRLHTGMS

SEQ ID NO: 11947 - protein, 500 aa, synthetic construct
MRALVVIRLSRVTDATTSPERQLESCQQLCAQRGWDVVGVAEDLDVSGAVDPFDRKRRPNLARWLAFEEQPFDVIVAYRVDRLARSIRHLQQLVHWAEDHKKLVVSATEAHFDTTTPFAAVVIALMGTVAQMELEAIKERSRSAAHFNIRAGKYRGSLPPWGYLPTRVDGEWRLVPDPVQRERILEVYHRVVDNHEPLHLVAHDLNRRGVLSPKDYFAQLRGREPQGRKWSATALKRSMISEAMLGYVTLNGKTVRDDDGAPLVRAEPILTREQLEALRAELAKTSRAKPAVSTPSLLLRVLFCAVCGEPAYKFAGGGRKHPRYRCRSMGFPKHCGNGTVAMAEWDAFCEEQVLNLLGDAERLEKVWVAGSDSAVELAEVNAELVDLTSLIGSPAYRAGSPQREALDARIAALAARQEELEGLEARPSGWEWRVTGQRFGDWWREQDTAAKNTWLRSMNVRLTFDVRGGLTRTIDFGDLQGYEQHSRLGSVVERLHTGMS

SEQ ID NO: 11948 - protein, 500 aa, synthetic construct
MRALVVIRLSRVTDATTSPERQLESCQQLCAQRGWDVVGVAEDLDVSGAVDPFDRKRRPNLARWLAFEERPFDVIVAYRVDRLTRSTRHLQQLVHWAEDHKKLVVSATEAHFDTTTPFAAVVIALMGTVAQMELEAIKERSRSAAHFNIRAGKYRGSLPPWGYLPARVDGEWRLVPDPVQRERILEVYHRVVDNHEPLHLVAHDLNRRGVLSPKDYFAQLQGREPQGRKWSATALKRSMISGAMLGYATLSGKTVRDGDGAPLVRAEPILTREQQEALRAELAKTSRAKPAVSTPSLLLRVLFCAVCGEPAYKFAGGGRKHPRYRCRSMGFPKHCGNGTVAMAQWDAFCEEQVLNLLGDAERLEKVWVAGSDSAVELAEVNAELVDLTSLIGSPAYRAGSPQREALDARIAALAARQEELEGLESRPSGWEWHETGQRFGDWWREQDSAAKNTWLRSMNVRLTFDVRGGLTRTIDFGDLQEYERHLRLGSVVERLHTGMS

SEQ ID NO: 11949 - protein, 500 aa, synthetic construct
MRALVVIRLSRVTDATTSPERQLESCQQLCAQRGWDVVGVAEDLDVSGAVDPFDRKRRPNLARWLAFEEQPFDAIVAYRVDRLTRSIRHLQQLVHWAEDHKKLVVSATEAHLDTTTPFAAVVIALMGTVAQMELEAIKERNRSAAHFNIRAGKYRGSLPPWGYLPTRVDGEWRLVPDPVQRERILEVYHRVVDNHEPLHLVAHDLNRRGVLSPKDYFAQLRGREPQGRKWSATALKRSMISEAMLGYATLNGKTVRDDDGAPLVRAEPILTREQQEALRAELVKTSRAKPAVSTPSLLLRVLFCAVCGEPAYKFAGGGRKHPRYRCRSMGFPKHCGNGTVAMAEWDAFCEEQVLDLLGDAERLEKIWVAGSDSAVELAEVSAELVDLTSLISSPAYRAGSPQREALDARIAALAARQEELEGLEARPSGWEWRGTGQRFEDWWREQDTAAKNAWLRSMNVRLTFDVRGGLTRTIDFGDLQEYEQHLRLGSVVERLHTGMS

SEQ ID NO: 11950 - protein, 500 aa, synthetic construct
MRALVVIRLSRVTDATTSPERQLESCQLLCAQRGWDVVGVAEDLDVSGAVNPFDRKRRPNLARWLAFEEQPFDVIVAYRVDRLTRSTRHLQQLVHWAEDHKKLVVSATEAHFDTTTPFAAVVIALMGTVAQMELEAIKERSRSAAHFNIRAGKYRGSLPPWGYLPTRVDGEWRLVPDPVQRERILEVYHRVVDNHEPLHLVAHDLNQRGVLSPKDYFAQLRGREPQGRKWSATALKRSMISEAMLGYATLNGKTVRDDDGAPLVRAEPILTREQQEALRAELVKTSRAKPAVSTPSLLLRVLFCAVCGEPAYKFAGGGCKHPRYRCRSMGFPKHCGNGTVAMAEWDAFCEEQVLDLLGDAERLEKVWVAGSDSAVELAEVNAELVDLTSLIGSPAYRAGSPQREALDARIAALAARQGELEGLEARPSGWEWRETGQRFGDWWREQDTAAKNSWLRSMNVRLTFDVRGGLTRTIDFGDLQEYEQHLRLGSVVERLHTGMS

SEQ ID NO: 11951 - protein, 500 aa, synthetic construct
MRALVVIRLSRVTDATTSPERQLESCQQLCAQRGWDVVGVAEDLDVSGAVDPFDRKRRPNLARWLAFEELPFDAIVTYRVDRLTRSIRHLQQLVHWAEDHKKLVVSATEAHFDTTTPFAAVVIALMGTVAQMELEAIKERNRSAAHFNIRAGKYRGSLPPWGYLPARVDGEWRLVPDPVQRERILEVYHRVVDNHEPLHLVAHDLNRRGVLSPKDYFAQLRGREPQGRKWSATALKRSMISEAMLGYATLNGKTVRDDDGAPLVRAEPILTREQLEALRAELAKTSRAKPAVSTPSLLLRVLFCAVCGEPAYKFAGGGRKHPRYRCRSMGFPKHCGNGTVAMAEWDAFCEEQVLDLLGDAERLEKVWVTGSDSAVELAEVSAELVDLTSLIGSPAYRAGSPQRGALDARIAALAARQEELEGLEARPSGWEWRGTGQRFGDWWREQDTAAKNTWLRSMNVRLTFDVRGGLTRTIDFGDLQEHELHLRLGSVVGRLHTGMS

SEQ ID NO: 11952 - protein, 500 aa, synthetic construct
MRALVVIRLSRVTDSTTSPERQLESCQQLCAQRGWDVVGVAEDLDVSGAVDPFDRKRRPNLARWLAFEEQPFDVIVAYRVDRLARSIRHLQQLVHWAEDHKKLVVSATEAHFDTTTPFAAIVIALMGTVAQMELEAIKERSRSAAHFNIRAGKYRGSLPPWGYLPTRVDGEWRLVPDPVQRERILEVYHRVVGNHEPLHLVAHDLNRRGVLSPKDYFAQLQGREPQGRKWSATALKRSMTSEAMLGYATLNGKTVRDDDGAPLVRAEPILTREQLEALRAELVKTSRAKPAVSAPSLLLRVLFCAVCGEPAYKFAGGGRKHLRYRCRSMGFPKHCGNGTVVMAEWDAFCEEQVLNLLGGAERLEKVWVAGSDSAVELAEVSAELVDLTSLIGSPAYRAGSPQREALDARIAALAARQEELEGLEARPSGWEWRETGQRFGDWWREQDTAAKNTWLRSMNVRLTFDVRGGLTRTIDFGDLQEYEQHLRLGGVVERLHTGMS

SEQ ID NO: 11953 - protein, 500 aa, synthetic construct
MRALVVIRLSRVTDATTSPERQLESCQQLCAQRGWNVVGVAEDLDVSGAVDPFDRKRRPNLARWLAFEEQPFDVIVAYRVDRLARSIRHLQQLVHWAEDHKKLVVSATEAHFDTTTPFAAVVIALMGTVAQMELEAIKERNRSAAHFNIRAGKYRGSLPPWGYLPTRVDGEWRLVPDPVQRERILEVYRRVVDNHEPLHLVAHDLNRRGVLSPRDYFAQLRGREPQGRKWSATALKRSMISEAMLGYATLNGKIVRDDDGAPLVRAEPILTREQLEALRAELVKTSRAKPAVSTPSLLLRVLFCAVCGEPAYKFAGGGRKHPRYRCCSMGFPKHCGNGTVAMAEWDAFCEEQVLNLLGDAERLEKVWVAGSDSAVELAEVSAELVDLTSLIGSPAYRAGSPQREALDARIVALAARQEELEGLEARPSGWEWRETGQRFGDWWREQDTAAKNTWLRSMNVRLTFDVRGGLTRTIDFGDLQEYEQHLRSGSVVERLRTGMS

SEQ ID NO: 11954 - protein, 500 aa, synthetic construct
MRALVVIRLSRVTEATTSPGRQLESCQQLCAQRGWNVVGVAEDLDVSGAVDPFDCKRRPNLARWLAFEEQPFDVIVAYRVDRLTRSVRHLQQLVHWAEDHKKLVVSATEAHFDTTTPFAAVVIALMGTVAQMELEAIKERNRSAAHFNIRAGKYRGSLPPWGYLPARVDGVWRLAPDPVQRERILEVYHRVVDNHEPLHLVAHDLNRRGVLSPKDYFAQLQGREPQGRKWSATALKRSMISEAMLGHATLNGKIVRDDDGAPLVRAEPILTREQLEALRAELVKTSRAKPAVSTPSLLLRVLFCAVCGEPAYKFAGGGRKHPRYRCRSMGFPKHCGNGTVAMAEWDAFCEEQVLNLLGDAERLEKVWVAGSDSAVELAEVDAELVDLTSLTGSPAYRAGSPQREALDARIAALAARQEELEGLEARPSGWEWRGTGQRFGDWWREQDTAAKNTWLRSMNVRLTFDVRGGLTRTIDFGDLQEYEQHLRLSSVVERLHTGMS

SEQ ID NO: 11955 - protein, 500 aa, synthetic construct
MRALVVIRLSRVTDATTSPERQLESCQQLCAQRGWDVVGVAEDLDVSGAVDPFDRKRRPNLARWLAFEEQPFDVIVAYRVDRLTRSTRHLQRLVHWAEDHKKLVVSATEAHFDTTTPFAAVVIALVGTVAQMELEAIKERSRSAAHFNIRAGKYRGSLPPWGYLPTRVDGEWRLAPDPVQRERILEVYHRVVDNHEPLHLVAHDLNRRGVLSPRDYFAQLQGREPQGRKWSATALKRSMVSEAMLGYATLNGKTVRDDDGAPLVRAEPVLTREQLEALRAELVKTSRAKPAVSTPSLLLRVLFCAVCGEPAYKFAGGGRKHPRYRCRSMGFPKHCGNGTVAMAEWDAFCEEQVLDLLGDAERLEKVWVAGSDSAVELAEVNAELVDLTSLIGSSAYRAGSPQREALDARIAALAARQEELEGLEARPSGWEWRETGQRFGDWWREQDTAAKNTWLRSMNVRLTFDVRGGLTRTIDFGDLQEYEQHLRLGSAVERLHTGMS

SEQ ID NO: 11956 - protein, 500 aa, synthetic construct
MRALVVIRLSRVTEATTSPERQLESCQQLCAQRGWDVVGVAEDLDVSGAVDPFDRKRRPNLARWLAFEEQPFDVIVTYRVDRLTRSTRHLQQLVHWAEDHKKLVVSATEAHFDTTTPFAAVVIALMGTVAQMELEAIKERSRSAAHYNIRAGKYRGSLPPWGYLPTRVDGEWRLVPDPVQRERILEVYHRVVDNHEPLHLVAHDLNRRGVLSPKDYFAQLRGREPQGRKWSATALKRSMISEAMLGYATLNGKTVRDDDGAPLVRAEPILAREQQEALRAELVKTSRAKPAVSTPSLLLRVLFCAVCGEPAYKFAGGGRKHPRYRCRSMGFPKHCGNGTVAIAEWDAFCEEQVLGLLGDAERLEKVWVAGSDSAVELAEVNAELVDLTSLIGSPAYRAGSPQREALDVRIAALAARQEELEGLEARPSGWEWRETGQRFGDWWREQDTAAKNTWLRSMNVRLTFDVRGGLTRTIDFGDLQEYEQHLRLGSVVERLRTGMS

SEQ ID NO: 11957 - protein, 500 aa, synthetic construct
MRALVVIRLSRVTDATTSPERQLESCRQLCAQRGWNVVGVAEDLDVSGAVDPFDRKRRPNLARWLAFEEQPFDVIVAYRVDRLTRSTRHLQQLVRWAEDHKKLVVSATEAHFDTTTPFAAVVIALMGTVAQMELEAIKERNRSAAHFNIRAGKYRGSLPPWGYLPTRVDGEWRLAPDPVQRERILEVYHRVVDNHEPLHLVAHDLNRRGVLSPKDYFAQLQGREPQGRKWSATALKRSMISEAMLGYATLNGKTVRDDDGAPLVRAEPILTREQQEALRAELVKTSRAKPAVSTPSLLLRVLFCAVCGEPAYKFAGGGRKHSRYRCRSMGFPKHCGNGTVAMAEWDAFCEEQVLDLLRDAERLEKVWVAGSDSAVELAEVNAELMDLTSLIGSPAYRAGSPQREALDARIAALAARQEELEGLEARPSGWEWRETGQRFGDWWREQDTAAKNTWLRSMNVRLTFDVRGGLTRTIGFGDLQEYKQQLRLGSVVERLHTGMS

SEQ ID NO: 11958 - protein, 500 aa, synthetic construct
MRALVVIRLSRVTDATTSPERQLESCQQLCAQRGWDVVGVAEDLDVSGAVDPFDRKRRPNLARWLAFEEQPFDVIVAYRVDRLARSIRHLQQLVHWAEDHKKLVVSATEAHFDTTTPFAAVVIALMGTVAQMELEAIKERSRSAAHFNIRAGKYRGSLPPWGYLPTRVNGEWRLVPDPVQRERILEVYHRVVDNHEPLHLVAHDLNRRGVLSPRDYFAQLQGREPQGRKWSATALKRSMISEAMLGYATLNGKIVRDDDGAPLVRAEPILTREQLEALRAELVKTSRAKPAVSTPSLLLRVLFCAVCGEPAYKFAGGGRKHSRYRCRSMGFPKHCGNGTVAMAEWDAFCEEQVLDLLGDAERLEKVWVAGSDSAVELAEVSAELVDLTSLIGSPAYRAGSPQREALDARIAALAARQGELEGLEARPSGWEWRETGQRFGDWWREQDTAAKNTWLRSMNVRLTFDVRGGLTRTTDLGDLQEYEQHLRLGSEVERLRTGMS

SEQ ID NO: 11959 - protein, 500 aa, synthetic construct
MRALVVIRLSRVTDATTSPERQLESCQQLCAQRGWDVVGVAEDLDVSGAVDPFDRKRRPNLARWLAFEEQPFDVIVAYRVDRLARSIRHLQQLVHWAEDHKKLVVSATEAHFDTTTPFAAVVIALMGTVAQMELEAIKERSRSAAHFNIRAGKYRGSLPPWGYLPTRVDGEWRLVPDPVQRERILEVYHRVVDNHEPLHLVAHDLNRRGVLSPKDYFAQLRGREPQGRKWSATALKRSMISVAMLGYATLCGKTVRDDDGAPLVRAEPILTREQLEALRAEFVKTSRAKPAVSTPSLLLRVLFCAVCGEPAYKFAGGGRKHPRYRCRSMGFPKHCGNGTVAMAEWDAFCEEQVLSLLGDAERLEKVWVAGSDSAVELAEVNAELVDLTSLIGSPAYRAGSPQREALDARIAALAARQEELEGLEARPSGWEWRETGQRFGDWWREQDTVAKNTWLRSMNVRLTFDVRGGLTRTIDFGDLQEYEQHLRLGGVVERLHTGVS

SEQ ID NO: 11960 - protein, 500 aa, synthetic construct
MRALVVIRLSRVTDATTSPERQLESCQQLCAQRGWDVVGVAEDLDVSGAVDPFDRKRRPNLARWLAFEEQPFDVIVAYRVDRLTRSIRHLQQLVHWAEDHKKLVVSATEAHFDTTTPFAAVVIALMGTVAQMELEAIKERNRSAAHFNIRAGKYRGSLPPWGYLPARVDGEWRLVPDPVQRERILEVYHRVVDNHEPLHLVAHDLNRRGVLSPKDYFAQLRGREPQGRRWSATALKRSMISEAMLGYATLNGKTVRDEDGAPLVRAEPILTRGQLEALRAELVKTSRAKPAVSTPSLLLRVLFCAVCGEPAYKFAGGGRKHPRYRCRSMGFPKHCGNGTVAMAEWDAFCEEQVLNLLGDAERLEKVWVAGSDSAVELAEVNAELVDLTSLIGSPAYRAGSPQREALDARIAALAARQEELEGLGARPSGWEWRETGQRFGDWWREQDTAAKNTWLRSMSVRLTFDVRGGLTRTIDFGDLQEYEQHLRLGSVVERLHTGMS

SEQ ID NO: 11961 - protein, 500 aa, synthetic construct
MRALVVVRLSRVTDATTSPERQLESCQQLCAQRGWDVVGVAEDLDVSGAVDPFDRKRRPNLARWLAFEEQPFDVIVAYRVDRLARSVRHLQQLVHWAEDHKKLVVSATEAHFDTTTPFAAVVIALMGTVAQMELEAIKERNRSAAHFNIRAGKYRGSLPPWGYLPTRVDGEWRLVPDPVQRERILEVYHRVVNNHEPLHLVAHDLNRRGVLSPKDYFAQLQGREPQGRKWSATALKRSMVSEAMLGYATLNGKTVRDDDGAPLVRAEPILTREQREALRAELVKTSRAKPAVSTPSLLLRVLFCAVCGEPAYKFTGGGRKHPRYRCRSMGFPKHCGNGTVAMAEWDAFCEEQVLNLLGDAERLEKVWVAGSDFAVELAEVNAELVDLTSLIGSPAYRAGSPQREALDARIAALAARQGELEGLEARPPGWEWRETGQRFGDWWREQNTAAKNTWLRSMNVRLTFDVRGGLTRTIDFGDLQEYEQHSRLGSVVERLHTGMS

SEQ ID NO: 11962 - protein, 500 aa, synthetic construct
MRALVVIRLSRVTDATTSPERQLESCQRLCAQRGWDVVGVAEDLDVSGAVDPFDRKRRPNLARWLAFEEQPFDVIVAYRVDRLTRSIRHLQQLVHWAEDHKKLVVSATEAYFDTTTPFAAVVIALMGTVAQLELEAIKERSRSAAHFNIRAGKYRGSLPPWGYLPTRVDGEWRLAPDPVQRERILEVYHRVVDNHEPLHLVAHDLNRRGVLSPKDYFAQLQGREPQGRKWSATALKRSMTSEAMLGYATLNGKTVRDDDGAPLVRAEPILTREQLEALRAELVKTSRAKPAVSTPSLLLRVLFCAVCGEPAYKFSGGGRKHPRYRCRSMGFPKHCGNGTVAMAEWDAFCEEQVLDLLGDAERLEKVWVAGSDSAVELAEVNAELVDLTSLIGSPAYRAGSPQREALDARIAALAARQEELEGLEARPSGWEWRETGQRFGDWWREQDTAAKNTWLRSMNVRLTFDVRGGLTRAIDFGDLQEYEQRLRLGSVAERLHTGMS

SEQ ID NO: 11963 - protein, 500 aa, synthetic construct
MRALVVIRLSRVTDATTSPERQLESCQQLCAQRGWDVVGVAEDLDVSGAVDPFDRKRRPNLARWLAFEEQPFDVIVAYRVDRLARSIRHLQQLVHWAEDHKKLVVSATEAHFDTTTPFAAVVIALMGTVAQMELEAIKERSRSAAHFNIRAGKYRGSLPPWGYLPTRVDGEWRLVPDPVQRERILEVYHRVVDNHEPLHLVAHDLNRRGVLSPRDYFAQLRGREPQGRKWSATALKRSMISEAMLGYATLNGRTVRDDDGAPLVRAEPILTREQLEALRAELVKTSRAKPAVSTPSLLLRVLFCAVCGEPAYKFAGGGRKHPRYRCRSMGFPKHCGNGTVATAEWDAFCEEQVLDLLGDTERLEKVWVAGSDSAIELAEVNAELVDLTSLIGSPAYRAGSPQREALDARIAALAARQEELEGLEARPSGWEWRETGQRFGDWWREQDTAAKNTWLRSMNVRLTFDVRGGLTRTIVFGDLQEYGQHLRLGSVVERLHTGMS

SEQ ID NO: 11964 - protein, 500 aa, synthetic construct
MRALVVIRLSRVTDATTSPERQLESCQQLCAQRGWDVVGVAEDLDVSGAVNPFDRKRRPNFARWLAFEEQPFDAIVAYRVDRLTRSIRHLQQLVHWAEDHKKLVVSATEAHFDTTTPFAAVVIALMGTVAQMELEAIKERNRSAAHFNIRAGKYRGSLPPWGYLPTRVDGEWRLVPDPVQRERILEVYHRVVDNHEPLHLVAHDLNRRGVLSPRDYFAQLRGREPQGRKWSATALKRSMISEAMLGHATLNGKTVRDEDGAPLVRAEPILTREQLEALRAELVKTSRAKPAVSTPSLLLRVLFCAVCGEPAYKFAGGGRKHPRYRCRSMGFPKHCGNGTVAMAEWDTFCEEQVLGLLEDAERLEKVWVAGSDSAVELAEVNAELVDLTSLIGSPAYRVGSPQREALDARIAALAARQEELEGLEARPSGWEWRETGQRFGDWWRERDTAAKNAWLRSMNVRLTFDVRGGLTRTIDFGDLLEYKQHLRLGSVAERLHTGTS

SEQ ID NO: 11965 - protein, 500 aa, synthetic construct
MRALVVIRLSRVTDATTSPERQLESCQQLCAQRGWDVVGVAEDLDVSGAVDPFDRKRRPNLARWLAFEEQPFDVIVACRVDRLTRSVRHLQQLVHWAEDHKKLVVSATEAHFDTTTPFAAVVIALMGTVAQMELEAIKERSRSAAHFNIRAGKYRGSLPPWGYLPTRVDGEWRLAPDPVQRERILEVYHRVVDNHEPLRSVAHDLNRRGVLSPKDYFARLQGREPQGRKWSATALKRSMISEAMLGYATLNGKIVRDDNGAPLVRAEPILTREQLEALRAELVKTSRAKPAVSTPSLLLRVLFCAVCGEPAYKFAGGGRRHPRYRCRSMGFPKHCGNGTVAIAEWDAFCEEQVLNLLGDAERLEKVWVAGSDSAVELAEVNVELVDLTSLISSPAYRAGSPQREALDARIAALAARQEELEGLEARPSGWEWRETGQRFRDWWREQDTAAKNTWLRSMNVRLTFDVRGGLTRTIDFGDLQEYEQHLRLGSVVERLHTGMS

SEQ ID NO: 11966 - protein, 500 aa, synthetic construct
MRALVVIRLSRVTDATTSPERQLESCQQLCAQRGWDVVGVAEDLDVSGAVDPFDRKRRPNLARWLAFEEQPFDVIVAYRVDRLARSIRHLQQLVHWAEDHKKLVVSATEAHFDTTTPFAAVVIALMGTVAQMELEAIKERSRSAAHFNIRAGKYRGSLPPWGYLPTRVDGEWRLAPDPVQRERILEVYRRVVDNHEPLHLVAHDLNRRGVLSPKDYFAQLQGREPQGRKWSATALKRSMISEAMLGYATLNGKTVRDDDGAPLVRAEPILTREQLEALRAELVKTSRAKPAVSTPSLLLRVLFCAVCGEPAYKFAGGGRKHPRYRCRSMGFPKHCGNGTVAMAEWDAFCEEQVLGLLGDAERLEKVWVAGSDSAVELAEVNAELVDLTSLIGSPAYRVGSPQREALDARIAALAARQEELEGLGARPSGWEWRVTGQRFGDWWREQDTAAKNTWLRSMNVRLTFDVRGGLTRTIDFGDLQEYERHLRLGSVVERLHTGIS

SEQ ID NO: 11967 - protein, 500 aa, synthetic construct
MRALVVIRLSRVTDATTSPERQLESCQQLCAQRGWDVVGVAEDLDVSGAVDPFDCKRRPNLARWLAFEEQPFDVIVAYRVDRLARSIRHLQQLVHWAEDHEKLVVSATEAHFDTTTPFAAVVIALMGTVAQMELEAIKERSRSAAHFNIRAGKYRGSLPPWGYLPTRVDGEWRLVPDPVQRERILEVYHRVVDDHEPLHLVAHDLNRRGVLSPKDYFAQLRGREPQGRKWSATALKRSMISEAMLGYATLNGKTVRDDDGAPLVRAEPILTREQQEALRAELVKTSRAKPAVSTPSLLLRVLFCAVCGEPAYKFAGGGRKHSRYRCRSMGFPKHCGNGTVATAQWDAFCEEQVLNLLGDAERLEKVWVVGPDSAVELAEVNAELVDLTSLIGSPAYRAGSPQREALDARIAALAARQEELEGLEARPSGWEWRETGQRFGDWWREQDTAAKNTWLRSMNVRLTFDVRGGLTRTIDFGELQEYEQHLCSGGVVERLHTGMS

SEQ ID NO: 11968 - protein, 500 aa, synthetic construct
MRALVVIRLSRVTDATTSPERQLESCQQLCAQRGWDVVGVAEDLDVSGAVDPFDRKRRPNLARWLAFEEQPFDVIVAYRVDRLTRSIRHLQQLVHWAEDHKKLVVSATEAYFDTTTPFAAVVIALMGTVAQLELEAIKERSRSAAHFNIRAGKYRGSLPPWGYLPTRVDGEWRLAPDPVQRERILEVYHRVVNNHEPLHLVAHDLNRRGVLSPKDYFAQLQGREPQGRKWSATALKRSMTSEAMLGYATLNGKTVRDDDGAPLVRAEPILTREQLEALRAELVKTSRAKPAVSTPSLLLRVLFCAVCGEPAYKFSGGGRKHPRYRCRSMGFPKHCGNGTVAMAEWDAFCEEQVLDLLGDAERLEKVWVAGSDSAVELAEVNAELVDLTSLIGSPAYRAGSPQREALDARIAALAARQAELEGLEARPSGWEWRETGQGFGDWWREQDTAAKNTWLRSMNVRLTFDVRGGLTSTIDFGDLQEYEQRLRLRSVVERLHTGMS

SEQ ID NO: 11969 - protein, 500 aa, synthetic construct
MRALVVIRLSRVTDATTSPERQLESCQQLCAQRGWDVVGVAEDLDVSGAVDPFDRKRRPNLARWLAFEEQPFDVIVAYRVDRLARSIRHLQQLVRWAEDHKKLVVSATEAHFDTTTPFAAVVIALMGTVAQMELEAIKERNRSAAHFNIRAGKYRGSLPPWGYLPTRVDGEWRLVPDPVQRERILEVYHRVVDNHEPLHLVAHDLNWRGVLSPRDYFAQLRGREPQGRKWSATALKRSMISEAMLGYATLNGKTVRDDDGAPLVRAEPILTREQQEALRAELVKTSRAKPAVSTPSLLLRVLFCAVCGEPAYKFAGGGRKHPRYRCRSMGFPKHCGNGTVAMAEWDAFCEEQVLNLLGDAERLEKVWVAGSDSAVELAEVNAELVDLTSLIGSPAYRAGSTQREALDARIAALAARQEELEGLEARPSGWEWRETGQRFGDWWREQDTAAKNTWLRTMNVRLTYDVRGGLTRTIDFGDLQEYEQHLRSGSVVERLHTGMS

SEQ ID NO: 11970 - protein, 500 aa, synthetic construct
MRALVVIRLSRVTDATTSPERQLESCQQLCAQRGWDVVGVAEDLDVSGAVDPFDRKRRPDLARWLALEEQPFDVIVAYRVDRLTRSTRHLQQLVHWAEDHKKLVVSATEAHFDTTTPFAAVVIALMGTVAQMELEAIKERNRSAAHFNIRAGKYRGSLPPWGYLPTRVDGEWRLAPDPVQRERILEVYHRVVDNHESLHLVAHDLNRRGVLSPKDYFAQLRGREPQGRKWSATALKRSMTSEAMLGYATLNGKTVRDDDGAPLVRAEPILTREQLEALRAELVKTSRAKPAVSTPSLLLRVLFCAVCGEPAYKFAGGGRKHPRYRCRSMGFLKHCGNGTVAMAEWDAFCEEQVLNLLGDAERLEKVWVAGSDPAVELAEVNTELVDLTSLIGSPAYRAGSPQREALDARIAALAARQKELEGLEARPSGWEWRETGQRFGDWWREQDTAAKNTWLRSMNVRLTFDVRGGLTRTIDFGDLQEYEQHLRLGSVVERLHTGMS

SEQ ID NO: 11971 - protein, 500 aa, synthetic construct
MRALVVIRLSRVTDATTSPERQLESCQQLCAQRGWDVVGVAEDLDVSGAVDPFDRKRRPNLARWLAFEEQPFDVIVAYRVDRLARSIRHLQQLVHWAEDHKKLVVSATEAHFDTTTPFAAVVIALMGTVAQMELEAIKERSRSAAHFNIRAGKYRGSLPPWGYLPTRVDGEWRLVPDPVQRERILEVYHRVVDNHEPLHLVAHDLNRRGVLSPKDYFAQLQGREPRGRKWSATALKRSMTSEAMLGYATLNGKTVRDDDGAPLVRAEPILTREQLEALRAELVKTSRAKPAVSTPSLLLRVLFCAVCGEPAYKFAGGGRKHPRYRCRSMGFPKHCGNGTVAMAEWDAFCEERVLDLLGDAERLEKVWVAGSDSAVELAEVNAELVDLTSLIGSPAYRAGSPQREALDARIAALAARQEKLEGLEARPSGWEWRETGQRFGDWWREQNTAAKNTWLRSMNVRLTFDVRGGLTRTIDFGDLQEYEQHLRLGSVVERLHTGMP

SEQ ID NO: 11972 - protein, 500 aa, synthetic construct
MRALVVIRLSRVTDATTSPERQLESCQQLCAQRGWDVVGVAEDLDVSGAVDPFDRKRRPNLARWLAFEEQPFDVIVAYRVDRLTRSTRHLQQLVHWAEDHKKLVVSATEAHFDTTTPFAAVVIALMGTVAQMELEAIKERSRSAAHFNIRAGKYRGSLPPWGYLPARVDGEWRLVPDPVQRERILEVYHRVVDNHEPLHLVAHDLNRRGVLSPKDYFAQLRGREPRGREWSATALKRSMTSEAMLGYATLNGKIVRDDDGAPLVRAEPILTREQQEALRAELVKTSRAKPAVSTPSLLLRVLFCAVCGEPAYKFSGGGRKHPRYRCRSMGFPKHCGNGTVAMAEWDAFCEEQVLDLLGDAERLEKVWVAGSDSAVELAEVNAELVDLTSLIGSPAYRAGSPQREALDTRIAALAARQEELKGLEARPSGWEWRETGQRFGDWWREQDTAAKNTWLRSMNVRLTFDIRGGLTRTIDFGDLQEYEQHLRLGSVVERLHTGMS

SEQ ID NO: 11973 - protein, 500 aa, synthetic construct
MRALVVIRLSRVTDATTSPERQLESCQQLCAQRGWDVVGVAEDLDVSGAVDPFDRKRRPNLARWLAFEEQPFDVIVAYRVDRLTRSVRHLQQLVHWAEDHKKLVVSATEAHFDTTTPFAAVVIALMGTVAQMELEAIKERSRSAAHFNIRAGKYRGSLPPWGYLPTRVDGEWRLVPDPVQRERILEVYRRVVDNHEPLHLVAHDLNRRGVLSPKDYFAQLQGREPQGRKWSATALKRSMTSEAMLGHATLNGKTVRDDDGAPLVRAEPILTREQLEALRAELVKTSRAKPAVSTPSLLLRVLFCAVCGEPAYKFAGGGRKHPRYRCRSMGFPKHCGNGTVAMAEWDAFCEEQVLDLLGDAERPEKVWVAGSDSAVELAEVNAELMDLTSLIGSPAYRAGSPQREALDARIAALAARQEELEGLEARSSGWEWREAGQRFGDWWREQDTAAKNTWLRSMNVRLTFDVRGGLTRTIDFGDLQEYEQHLRLGSEVERLHIGTS

SEQ ID NO: 11974 - protein, 500 aa, synthetic construct
MRALVVIRLSRVTDATTSPERQLESCQQLCAQRGWDVVGAAEDLDVSGAVDPFDRKRRPNLARWLAFEEQPFDVIVAYRVDRLTRSIRHLQQLVHWAEDHKKLVVSATEAHFDMTTPFAAVVIALMGTVAQMELEAIKERSRSAAHFNIRAGKYRGSLPPWGYLPTRVDGEWRLAPDPVQRERILEVYHRVVDNHEPLHLVAHDLNRRGVLSPKDYFAQLQGREPQGRKWSATALKRSMISVAMLGYATLNGKTVRDDDGVPLVRAEPILTREQLEALRAELVKTSRAKPAVSTPSLLLRVLFCAVCGEPAYKFAGGGRKHPRYRCRSMGFPKHCGNGTVAMAEWDAFCEEQVLGLLGDVERLEKVWVAGSDSAVKLAEVNAELVDLTGLIGSPAYRAGSPQREALDARIAALAARQEELEGLEARPSGWEWRGTGQRFGDWWREQDTAAKNTWLRSMNVRLTFDVRGGLTRTIDFGDLQEYEQHLRLGSVVERLHTGMS

SEQ ID NO: 11975 - protein, 500 aa, synthetic construct
MRALVVIRLSRVTDATTSPERQLESCQQLCAQRGWDVVGVAEDLDVSGAVDPFDRKRRPNLARWLAFEEQPFDVIVAYRVDRLTRSVRHLQQLVHWAEDHKKLVVSATEAHFDTTTPFAAVVIALMGTVAQMELEAIKERSRSAAHFNIRAGKYRGSLPPWGYLPARVDGEWRLVPDPVQRERILEVYHRVVDDHEPLHLVAHDLNRRGVLSPKDYFAQLRGREPQGRKWSATALKRSMISVAMLGYATLCGKTVRDDDGAPLVRAEPILTREQLEAVRAELVKTSRAKPAVSTPSLLLRVLFCAVCGEPAYKFAGGGRKHPRYRCRSMGFPKHCGNGTVAMAEWDAFCEEQVLNLLGDAERLEKVWVAGSDSAVELAEVNKELVDLTSLIGSPAYRAGSPQREALDARIAALAARREELEGLEARPSGWEWRGTGQRFGDWWREQDTAAKNTWLRSMNVRLTFDARGGMTRTIDFGDLQEYEQHLRLGSVVERLHTGMS

SEQ ID NO: 11976 - protein, 500 aa, synthetic construct
MRALVVIRLSRVTDATTSPERQLESCQQLCAQRGWDVVGVAEDLDVSGAVDPFDRKRRPNLARWLAFEEQPFDVIVAYRVDRLTRSTRHLQQLVHWAEDHKKLVVSATEAHFDTTTPFAAVVIALMGTVAQMELEAIKERSRSAAHFNIRAGKYRGSLPPWGYLPARVDGEWRLVPDPVQRERILEVYHRVVDNHEPLHLVAHDLNRRGVLSPKDYFAQLRGREPQGRKWSATALKRSMVSEAMLGYATLNGKTVRDDDGAPLVRAEPILTREQLEALRAVLVKTSRAKPAVSTPSLLLRVLFCAVCGEPAYKFAGGGRKHPRYRCRSMGFPKHCGNGTVAMAEWDAFCEEQVLNLLGDAERLEKVWVAGSDSAVELAEVNAELVDLTSLIGSPAYRAGSPQREALDARIAALAARQEELEGLEARPSGWEWRETGQRFGDWWLEQDTAAKNTWLRSMNVRLTFDVRGGLTRTIDFGDLQEYEQHLRLGSVVERLHTGMS

SEQ ID NO: 11977 - protein, 500 aa, synthetic construct
MRALVVIRLSRVTDATTSPERQLESCQQLCAQRGWDVVGVAEDLDVSGAVDPFDRKRRPNLARWLAFEEQPFDVIVAYRVDRLTRSTRHLQQLVHWAEDHKKLVVSATEAHFDTTTPFAAVVIALMGTVAQMELEAIKERNRSAAHFNIRAGKYRGSLPPWGYLPTREDGEWRLVPDPVQRERILEVYHRVVDKHEPLHLVAHDLNRRGVLSPRDYFAQLRGREPQGRKWSATALKRSMISEAMLGYATLNGKTVRDDGGAPLVRAEPILTREQLEALRAELVKASRAKPAVSTPSLLLRVLFCAVCGEPAYKFAGGGRRHPRYRCRSMGFPKHCGNGTVAMAEWDAFCEEQVLDLLGDAEHLEKVWVAGSDSAIELAEVNAELVDLTSLIGSPAYRAGSPQREALDARIAALVARQEELEGLEARPSGWEWRETGQRFGDWWREQDTAAKNTWLRSMNVRLTFDVRGGLTRTIDFGDLQEYEQHSRLGSVVGRLHTGMS

SEQ ID NO: 11978 - protein, 500 aa, synthetic construct
MRALVVIRLSRVTDATTSPERQLESCQQLCAQRGWDVVGVAEDLDVSGAVDPFDRKRRPNLARWLAFEEQPFDVIVAYRVDRLTRSIRHLQQLVHWAEDHKKLVVSATEAHFDTTTPFAAVVIALMGTVAQMELEAIKERSRSAAHFNIRAGKYRGSLPPWGYLPTRVDGEWRLVPDPVQRERILEVYHRVVDNHEPLHLVAHDLNRRGVLSPKDYFAQLQGREPKGRKWSATALKRSMISVAMLGYATLNGKTVRGDDGAPLVRAEPILTREQQEALRAELVKTSRAKPAVSTPSLLLRVLFCAVCGEPAYKFAGGGRKHPRYRCRSMGFPKHCGNGTVAMAEWDAFCEEQVLDLLGDAERLEKVWVAGSDSAVELAEVNTELVDLTSLIGSPAYRAGSPQREALDARIAALAARQEELEGLEARPSGWEWCGTGQRFGDWWREQDTAAKNTWLRSMNVRLTFDVRGGLTRTIDFGDLQEYEQHLRLGSVAERLHTGMS

SEQ ID NO: 11979 - protein, 500 aa, synthetic construct
MRALVVIRLSRVTDATTSPERQLESCQQLCAQRGWDVVGVAEDLDVSGAVDPFDRKRRPNLARWLAFEEQPFDAIVAYRVDRLTRSIRHLQQLVHWAEDHKKLVVSATEAHFDTTTPFAAVVIALMGTVAQMELEAIKERNRSAAHFNIRAGKYRGSLPPWGYLPTRVDGEWRLAPDPVQRECILEVYHRVVDNHEPLHSVAHDLNRRGVLSPKDYFAQLRGREPQGRKWSATALKRSMISGAMLGYATLNGKTVRGDDGAPLVRAEPILTREQLEALRAELVKTSRAKPAVSTPSLLLRVLFCAVCGEPAYKFAGGGRKHPRYRCRSMGFPKHCGNGTVAMAEWDAFCEEQVLSLLGDAERLEKVWVAGSDSAVELAEVSAELVDLTSLIGSPAYRAGSPQREALDARIAALAARQGELEGLEARPSGWEWRETGQRFGDWWREQDTAAKNTWLRSMNVRLTFDVRGGLTRTIDFGDLQEYGQHLRLGSVVERLHTGMS

SEQ ID NO: 11980 - protein, 500 aa, synthetic construct
MRALVVIRLSRVTDATTSPERQLESCQQLCAQRGWNVVGVAEDLDVSGAVDPFDRKRRPNLARWLAFEEQPFDVIVAYRVDRLARSVRHLQQLVRWAEDHKKLVVSATEAHFDTTTPFAAVVIALMGTVAQMELEAIKERSRSAAHFNIRAGKYRGSLPPWGYLPMRVDGEWRLVPDPVQRERILEVYHRVVDNHEPLHLVAHDLNRRGVLSPKDYFAQLRGREPQGRKWSATALKRSMISEAMLGYATLNGKTVRDDDGAPLVRAEPILTREQQEALRAELVKTSRAKPAVSTPSLLLRVLFCAVCGEPAYKFAGGGRKHPRYRCRSMGFPKHCGNGTVAMAEWDAFCEEQVLNLLGDAERLEKVWVAGSDSAVELAEVNAELVDLTSLIGSPAYRAGSPQREALNARIAALAARQEELEGLEARPSGWEWRETGQRFGDWWREQDTAAKNTWLRSMNVRLTFDVRGGLTRTIDFGDLQEYEQRLRLGSVVGRLHTGMS

SEQ ID NO: 11981 - protein, 500 aa, synthetic construct
MRALVVIRLSRVTDATTSPERQLESCQQLCAQRGWDVVGVAEDLDVSGAVDPFDRKRRPNLARWLAFEEQPFDVIVAYRVDRLTRSTRHLQQLVHWAEDHKKLVVSATEAHFDTTTPFAAVVIALMGTVAQMELEAIRERSRSAAHFNIRAGKYRGSLPPWGYLPTRVDGEWRLVPDPVQRERILEVYHRVVDDHEPLHLVAHDLNRRGVLSPKDYFAQLRGRDPQGRKWSATALKRSMISEAMLGYATLNGKTVRGDDGAPLVRAEPILTREQQEALRAELVRTSRAKPAVSTPSLLLRVLFCAVCGEPAYKFAGGGRKHPRYRCRSMGFPKHCGNGTVAMAEWDAFCEEQVLGLLGDAERLEKVWVAGSDSAVELAEVNAELVDLTSLIGSPAYRAGSPQREALDARIAALAARQEGLEGLEARPSGWEWRETGRRFGDWWREQDTAAKNTWLRSMNVRLTFDVRGGLTRTIDFGDLQEYVQHLRLGSVVERLHTGMS

SEQ ID NO: 11982 - protein, 500 aa, synthetic construct
MRALVVIRLSRVTDATTSPERQLESCQQLCAQRGWDVVGVAEDLDVSGAVDPFDRKRRPNLARWLAFEEQPFDAIVAYRVDRLTRSIRHLQQLVHWAEDHKKLVVSATEAHFDTTTPFAAVVIALMGTVAQMELEAIKERNRSAAHFNIRAGKYRGSLPPWGYLPTRVDGEWRLAPDPVQRERILEVYHRVVDNHEPLHLVAHDLNRRGVLSPKDYFAQLQGREPQGRKWSATALKRSMISEAMLGYATLNGETVRDDDGAPLVRAEPILTREQLEALRAVLVKTSRAKPAVSTPSLLLRVLFCAVCGEPAYKFAGGGRKHPRYRCRSMGFPKHCGNGTVAMAEWDAFCEEQVLDLLGDAERLEKVWVAGSDSAVELAEVNAELVDLTSLIGSPAYRAGSPQREALDARIAALGARQEELEGLEARPSGWEWRETGQRFGDWWREQDTAAKNTWLRSMNVRLTFDVRGGLTRTIDFGDLQEYEQHLRLGSVVERLHTGMS

SEQ ID NO: 11983 - protein, 500 aa, synthetic construct
MRALVVIRLSRVTDATTSPERQLESCQQLCARRGWDVVGVAEDLDVSGAVDPFDRKRRPNLARWLAFEEHPFDVIVAYRVDRLTRSTRHLQQLVHWAEDHKKLVVSATEAHFDTTTPFAAVVIALMGTVAQMELEAIKERSRSAAHFNIRAGKYRGSLPPWGYLPARVDGEWRLVPDPVQRERILEVYHRVVDSHEPLHLVAHDLNRRGVLSPKDYFAQLRGREPQGRKWSATALKRSMISEAMLGYATLNGKTVRDDDGAPLVRAEPILTREQLEALRAELVKTSRAKPAVSTPSLLLRVLFCAVCGEPAYKFAGGGRKHPRYRCRSMGFPKHCGNGTVAMAEWDAFCEEQVLDLLGDAERLEKVWVVGSDSAVELAEVNAELVDLTSLIGSPAYRAGSPQREALDARIAALAARQEELEGSEAHPSGWEWRETGQRFGDWWREQDTAAKNTWLRSMNVRLTFDVRGGLTRTIDFGNLQEYEQHLRLGSVVERLHTGMS

SEQ ID NO: 11984 - protein, 500 aa, synthetic construct
MRALVVIRLSRVTDATTSPERQLESCQQLCAQRGWDVVGVAEDLDVSGAVDPFDRKRRPNLARWLAFEERPFDVIVAYRVDRLTRSIRHLQQLAHWAEDHKKLVVSATEAHFDTTTPFAAVVIALMGTVAQMELEAIKERSRSAAHFNIRAGKYRGSLPPWGYLPTRVDGVWRLVPDPVQRERILEVYHRVVDNHEPLHLVAHDLNRRGVLSPKDYFAQLRGREPRGRKWSATALKRSMISEAMLGYATLNGKTVRDDDGAPLVRAEPILTRGQLEALRAELVKTSRAKPAVPTPSLLLRVLFCAVCGEPAYKFAGGGRKRPRYRCRSMGFPKHCGNGTVAMAEWDAFCEEQVLSLLGDAERLEKVWVAGSDSAVELAEVNTELVDLTGLIGSPAYRAGSPQREALDARIAALAARQEELEGLEARPSGWEWRGTGQRLGDWWREQDTAAKNTWLRSLNVRLTFDVRGGLTRTIDFGDLQEYEQHLRLGSVVERLHTGMS

SEQ ID NO: 11985 - protein, 500 aa, synthetic construct
MRALVVIRLSRVTDATTSPERQLESCQQLCAQRGWDVVGVAEDLDVSGAVDPFDRKRRPSLARWLAFEEQPFDVIVVYRVDRLTRSTRHLQQLVHWADDHKKLVVSATEAHFDTTTPFAAVVIALMGTVAQMELEAIKERSRSAAHFNIRAGKYRGSLPPWGYLPARVDGVWRLVPDPVQRERILEVYHRVVDNHEPLHLVAHDLNRRGVLSPRDYFAQLQGREPQGRKWSATALKRSMISEAMLGYATLNGKTVRDDDGAPLVRAEPILTREQQEALRAELVKTSRAKPAVSTPSLLLRVLFCAVCGEPAYKFAGGGRRHPRYRCRSMGFPKHCGNGTVVMAEWDAFCEEQVLNLLGDAERLEKVWVAGSDSAVELAEVNAELVDLTSLIGSPAYRAGSPQREALDARIAVLAARQEELKGLEARPSGWEWRETGQRFGDWWREQDTAAKNTWLRSMNVRLTFDVRGGLTRTIDFGDLQEYEQHLRLGGVVERLHTGMS

SEQ ID NO: 11986 - protein, 500 aa, synthetic construct
MRALVVIRLSRVTDATTSPERQLESCQQLCAQRGWDVVGVAEDLDVSGAVDPFDRKRRPNLARWLAFEGQPFDVIVAYRVDRLTRSVRHLQQLVHWAEDHKKLVVSATEAHFDTTTPFAAVVIALMGTVAQMELEAIRERSRSAAHFNIRAGKYRGSLPPWGYLPTRVDGEWRLVPDPVQRERILEVYRRVVDNHEPLHLVAHDLNRRGVLSPKDYFAQLQGREPQGRKWSATALKRSMISEAMLGYATLNGKTVRGDDGAPLVRAEPILTREQLEAIRAELVKTSRAKPAVSTPSLLLRVLFCAVCGEPAYKFAGGGRKHPRYRCRSMGFPKHCGNGTVAMAEWDAYCEEQVLGLLGDTERLEKVWVAGSDSAVELAEVNAELVDLTSLTGSPAYRAGSPQREALDARIAALAARQEELEGLEARPSGWEWRETGQRFGDWWREQDTAAKNTWLRSMNVRLTFDVRGGLTRTIDFGDLREYEQHLRLGSVVERLHTGMS

SEQ ID NO: 11987 - protein, 500 aa, synthetic construct
MRALVVIRLSRVTDATTSPERQLESCQQLCAQRGWDVVGVAEDLDVSGAVDPFDRKRRPNLARWLAFEEQPFDVIVAYRVDRLARSIRHLQQLVHWAEDHKKLVVSATEAHFDTTTPFAAVAIALMGTVAQMELEAIKERSRSAAHFNIRAGKYRGSLPPWGYLPARVDGEWRLVPDPVQRECILEVYHRVVDNHEPLHLVAHDLNRRGVLSPKDHFAQLQGREPQGRKWSATALKRSMISGAMLGYATLNGKTVRGDDGAPLVRAEPILTREQLEALRAELAKTSRAKPAVSTPSLLLRVLFCAVCGEPAYKFAGGGRKHPRYRCRSMGFPKHCGNGTVAMAEWDAFCEEQVLDLLGDAERLAKVWVAGSDSAVELAEVNAELVDLTSLIGSPAYRAGSPQREALDARIAALAARQEELEGLEARPSGWEWRGTGQRFGDWWREQDTAAKNTWLRSMNVRLTFDVRGGLTRTIDSGDLQEYEQHLRLGSVVGRLHTGTS

SEQ ID NO: 11988 - protein, 500 aa, synthetic construct
MRALVIIRLSRVTDATTSPERQLESCQQLCAQRGWDVVGVAEDLDVSGAVDPFDRKRRPNLARWLAFEVRPFDVIVAYRVDRLTRSIRHLQQLVHWAEDHKKLVVSATEAHFDTTTPFAAVVIALMGTVAQMELEAIKERNRSAAHFNIRAGKYRGSLPPWGYLPTRVDGVWRLVPDPVQRERILEVYHRVVDNHEPLHLVAHDLNRRGVLSPKDYFAQLRGREPQGRKWSATALKRSMISVAMLGYATLNGKTVRDDDGAPLVRAEPILTREQLEALRAELVKTSRAKPAVSTPSLLLRVLFCAVCGEPAYKFSGGGRKHPRYRCRSMGFPKHCGNGTVAMAEWDAFCEEQVLDRLGDAERLEKVWVAGSDSAVELAEVNAELVDLTSLIGSPAYRAGSPQREALDARIAALAARQGELEGLEAHPSGWEWRETGQRFGDWWREQDTAAKNTWLRSMNVRLTFDVRGGLTRTIDFGDLQEYEQHLRLGSVVERLHTGMS

SEQ ID NO: 11989 - protein, 500 aa, synthetic construct
MRALVVIRLSRVTDATTSPERQLESCQRLCAQRGWGVVGVAEDLDVSGAVDPFDRKRRPNLARWLAFEEQPFDVIVAYRVDRLTRSVRHLQQLVHWAEDHKKLVVSATEAHFDTTTPFAAVVIALMGTVAQMELEAIKERSRSAAHFNIRAGKYRGSLPPWGYLPTRVDGEWRLAPDPVQRERILEVYHRVVDNHEPLHLVAHDLNRRGVLSPKDYFAQLQGREPQDRKWSATALKRSMISVAMLGYATLNGKTVRDDDGAPLVRAEPILTREQLEALRAELVKTSRAKPAVSTPSLLLRVLFCAVCGEPAYKFAGGGRKHPRYRCRSMGFPKHCGNGTVAMAEWDAFCEEQVLGLLGDVERLEKVWVAGSDSAVKLAEVNAELVDLTGLIGSPAYRAGSPQREALDARIAALAARQEELEGLEARPSGWEWRGTGQRFGDWWREQDTAAKNTWLRSMNVRLTFDVRGGLTRTIDFGDLQEYEQHLRLGSVVERLHTGMS

SEQ ID NO: 11990 - protein, 500 aa, synthetic construct
MRALVVIRLSRVTDATTSPERQLESCQQLCAQRGWDVVGVAEDLDVSGAVDPFDRKRRPNLARWLAFEEQPFDVIVAYRVDRLTRSTRHLQQLVHWAEDHKKLVVSATEAHFDTTTPFAAVVIALMGTVAQMELEAIKERSRSAAHFNIRAGKYRGSLPPWGYLPTRVDGEWRLVPDPVQRERILEVYHRVVDNHESLHLVAHDLNRRGALSPKDYFAQLRGREPQGRKWSATALKRSMISEAMLGYATLNGKTVRDDDGAPLVRAEPILTREQQEALRAELVKTSRAKPAVSTPSLLLRVLFCAVCGEPAYKFSGGGRKHPRYRCRSMGFPKHCGNGTVAIAEWDAFCEEQVLDLLGDAERLEKVWVAGSDSAVELAEVNGELVDLTSLIGSPAYRAGSPQREALDARIAALAARQEELEGLEARPSGWEWRETGQRFGDWWREQDTAAKNTWLRSMNVRLTFDVRGGLTRTIDFGDLQEYEQHLRLGSVVERLHTGMS

SEQ ID NO: 11991 - protein, 500 aa, synthetic construct
MRALVVIRLSRVTDATTSPERQLESCQQLCAQRGWDVVGVAEDLDVSGAVGPFDRKRRPNLARWLAFEEQPFDVIVAYRVDRLTRSVRHLQQLVHWAEDHKKLVVSATEAHFDTTTPFAAVVIALMGTVAQMELEAIKERSRSAAHFNIRAGKYRGSLPPWGYLPTRVDGEWRLVPDPVQRERILEVYHRVVDDHEPLHLVAHDLNRRGVLSPRDYFAQLRGREPQGRKWSATALKRSMISEAMLGYATLNGKTVRDDDGAPLVRAEPILTREQLEALRAGLVKTSRAKPAVSTPSLLLRVLFCAVCGEPAYKFAGGGRKHPRYRCRSMGFPKHCGNGTVAMAEWDAFCEEQVLDLLGDAERLEKVWVAGSDSAVELAEVNAELVDLTSLIGSPAYRAGSPQREALDARIAALAARQKELEGLEARPSGWGWRETGQRFGDWWREQDTAAKNTWLRSMNVRLTFDVRGGLTRTIDFGDLQEYEQRLRLGSVVGRLHTGMS

SEQ ID NO: 11992 - protein, 500 aa, synthetic construct
MRALVVIRLSRVTEATTSPERQLESCQQLCAQRDWDVVGVAEDLDVSGAVDPFDRKRRPNLARWLAFEEQPFDVIVAYRVDRLTRSIRHLQQLVHWAEDHKKLVVSATEAHFDMTTPFAAVVIALMGTVAQMELEAIKERSRSAAHFNIRAGKYRGSLPPWGYLPTRVDGEWRLAPDPVQRERILEVYRRVVDNHEPLHLVAHDLNRRGVLSPKDYFAQLRGREPQGRKWSATALKRSMISEAMLGYATLNGKTVRDEDGAPLVRAEPILTREQLEALRAELVKTSRAKPAVSTPSLLLRVLFCAVCGEPAYKFAGGGRKHPRYRCRSMGFPKHCGNGTVAMAEWDAFCEEQVLDLLGDAERLEKVWVAGSDSAVELAEVNAELVDLTSLIGSPAYRAGSPQREALDARIAALAARQGELEGLEARPSGWEWRETGQCFGDWWREQDTAAKNTWLRSMNVRLTFDVRGGLTRTIDFGDLQEYEQHLRLGSVVERLHTGMS

SEQ ID NO: 11993 - protein, 500 aa, synthetic construct
MRALVVIRLSRVTDATTSPERQLESCQQLCAQRGWDVVGVAEDLDVSGAVDPFDRKRRPNLARWLAFEEQPFDAIVAYRVDRLTRSIRHLQQLVHWAEDHKKLVVSATEAHFDTTTPFAAVVIALMGTVAQMELEAIKERNRSAAHFNIRAGKYRGSLPPWGYLPARVDGEWRLVPDPVQRERILEVYHRVVDNHEPLHLVAHDLNRRGVLSPKDYFAQLRGREPQGRKWSATALKRSMTSEAMLGYVTLNGKIVRDDGGAPLVRAEPILTREQLEALRAELVRTSRAEPAVSTPSLLLRVLFCAVCGEPAYKFAGGGRKHPRYRCRSMGFPKHCGNGTVAMAEWDAFCEEQVLDLLGDAERLEKVWVAGSDSAVELAEVNAELVDLTSLIGSPTYRTGSPQREALDARIAALAARQEELEGLEARPSGWEWRETGQRFGDWWREQDTAAKNTWLRSMNVRLTFDVRGGLTRTIDFGDLHEYEQHLRLGSVVERLHTGMS

SEQ ID NO: 11994 - protein, 500 aa, synthetic construct
MRALVVIRLSRVTDATTSPERQLESCQQLCAQRGWDVVGVAEDLDVSGAVDPFDRKRRPNLARWLAFEEQPFDVIVAYRVDRLARSIRHLQQLVHWAKDHKKLVVSATEAHFDTTTPFAAVVIALMGTVAQMELEAIKERNRSAAHFNIRAGKYRGSLPPWGYLPARVDGEWRLVPDPVQRERILEVYHRVVDDHEPLHLVAHDLNRRGVLSPKDYFAQLRGREPQGRKWSATALKRSMISVAMLGYATLNGEIVRDDDGAPLVRAEPILTREQLEALRAELVKTSRAEPAVSTPSLLLRVLFCAVCGEPAYKFAGGGRKHPRYRCRSMGFPKHCGNGTVAMAEWDAFCEEQVLDLLGDAERLEKVWVAGSDSAVELAEVNAELVDLTSLIGSPAYRAGSAQREALDARIAALVARQEELEGLEARPSGWEWRETGQRFGDWWREQDTAAKNTWLRSMNVRLTFDVRGGLARTIDFGDLQEYEQHLRLGGVVERLHTGMS

SEQ ID NO: 11995 - protein, 500 aa, synthetic construct
MRALVVIRLSRVTDATTSPERQLESCQQLCAQRGWDVVGVAEDLDVSGAVDPFDRRRRPNLARWLAFEEQPFDTIVAYRVDRLTRSIRHLQQLVHWAEDHKKLVVSATEAHFDTTTPFAAVVIALMGTVAQMELEAIKERSRSAAHFNIRAGKYRGSLPPWGYLPTRVDGEWRLVPDPVQRERILEAYHRVVDNHEPLHLVAHDLNRRGVLSPRDYFAQLRGREPQGRKWSATALKRSLTSEAMLGYATLNGKIVRDDDGAPLVRAEPILTREQLEALRAELVKTSRAKPAVSTPSLLLRVLFCAVCGEPAYKFAGGGRKHPRYRCRSMGFPKHCGNGTVAMAEWDAFCEEQVLDLLGDAERLEKVWVAGSDSAVELAEVNAELVDLTSLLGSPAYRAGSPQREALDARIAALAARQEELEGLEARPSGWEWRETGQRFGDWWREQDTAAKNTWLRSMNVRLTFDVRGGQTRTIDFGDLQEYEQHLRLDSVVERLHTGMS

SEQ ID NO: 11996 - protein, 500 aa, synthetic construct
MRALVVIRLSRVTDATTSPERQLESCQQLCAQRGWDVVGVAEDLDVSGAVDPFDRKRRPNLARWLAFEEQPFDVIVAYRVDRLTRSTRHLQRLVHWAEDHKKLVVSATEAHFDTTTPFAAVVIALMGTVAQMELEAIKERSRSAAHFNIRAGKYRGSLPPWGYLPTRVDGEWRLAPDPVQRERILEVYHRVVDNHEPLHLVAHDLNRRGVLSPRDYFAQLQGREPQGRKWSATALKRSMVSEAMLGYATLNGKTVRDDDGAPLVRAEPILTREQLEALRAELVKTSRAKPAVSTPSLLLRVLFCAVCGEPAYKFAGGGRKHPRYRCRSMGFPKHCGNGTVAMAEWDAFCEEQVLDLLGDAERLEKVWVAGSDSAVELAEVNAELVDLTSLIGSSAYRAGSPQREALDARIAALAARQEELEGLEARPSGWEWRETGQRFGDWWREQDTAAKNTWLRSMNVRLTFDVRGGLTRTIDFGDLQEYEQHLRLGSAVERLHTGMS

SEQ ID NO: 11997 - protein, 500 aa, synthetic construct
MRALVVIRLSRVTDATTSPERQLESCQQLCAQRGWDVVGVAEDLDVSGTVDPFDRKRRPNLARWLAFEEQPFDAIVAYRVDRLTRSIRHLQQLVHWAEDHKKLVVSATEAHFDTTTPFAAVVIALMGTVAQMELEAIKERNRSAAHFNIRAGKYRGSLPPWGYLPTRVDGEWRLVPDPVQRERILEVYHRVVDNHEPLHLVAHDLNRRGVLSPRDYFAQLRGREPQGRKWSATALKRSMISGAMLGHATLNGKTVRDEDGAPLVRAEPILTREQLEALRAELVKTSRAKPAVSTPSLLLRVLFCAVCGEPAYKFAGGGRRHPRYRCRSMGFPRHCGNGTVAMAEWDAFCEEQVLNLLGDAERLEKVWVAGSDSAVELAEVNAELVDLTSLIGSPAYRAGSPQREALDARIAALAARQEELVGLEARPSGWEWRETGQRFGDWWREQDTAAKNTWLRSMNVRLTFDVRGGLTRTIDFGDLLEYEQHLRLGSVVERLHTGMS

SEQ ID NO: 11998 - protein, 500 aa, synthetic construct
MRALVVIRLSRVTDATTSPERQLESCQQLCAQRGWDVVGVAEDLDVSGAVDPFDRKRRPNLARWLAFEEQPFDVIVAYRVDRLARSIRHLQQLVHWAEDHKKLVVSATEAHFDTTTPFAAVVIALMGTVAQMELEAIKERSRSAAHFNIRAGKYRGSLPPWGYLPTRVDGEWRLVPDPVQRERILEVYHRVVDNHEPLHLVAHDLNRRGVLSPRDYFAQLRGREPQGRRWSATALKRSMISEAMLGYATLNGRTVRDDDGAPLVRAEPILTREQLEALRAELVKTSRAEPAVSTPSLLLRVLFCAVCGEPAYKFAGGGRKHSRYRCRSMGFPKHCGNGTVATAEWDAFCEEQVLDLLGDTERLEKVWVAGSDSAIELAEVNAELVDLTSLIGSPAYRAGSPQREALDARIAALAARQEELEGLEARPSGWEWRETGQRFGDWWREQDTAAKNTWLRSMNVRLTFDVRGGLTRTIDFGDLQEYEQHLRLGNAVERLHTGMS

SEQ ID NO: 11999 - protein, 500 aa, synthetic construct
MHALVVIRLSRVTDATTSPERQLESCQQLCAQRGWDVVGVAEDLDVSGAVDPFDRKRRPNLARWLAFEEQPFDVIVAYRVDRLTRSTRHLQQLVHWAEDHKKLVVSATEAHFDTTTPFAAVVIALMGTVAQMELETIKERNRSAAHFNIRAGKYRGSLPPWGYLPTRVDGEWRLVPDPVQRERILEVYHRVVDNHEPLHLVAHDLNRRGILSPKDYFAQLRGREPQGRKWSATALKRSMISEAMLGYATLNGKTVRDDDGAPLVRAEPILTREQQEALRAELVKTSRAKPAVSTPSLLLRVLFCAVCGEPAYKFSGGGRKHPRYRCRSMGFPKHCGNGTVAIAEWDAFCEEQVLDLLGDAERLEKVWVTGSDSAVEFAEVNAELVDLTSLIGSPAYRAGSPQREALDARIAALAARQEELEGLEARPSGWEWRETGQRFGDWWREQDIAAKNTWLRSMNVRLTFDVRGGLTRTIDFGDLQEYEQHLRLGGVVERLHTRMP

SEQ ID NO: 12000 - protein, 500 aa, synthetic construct
MRALVVIRLSRVTETTTSPERQLESCQQLCAQRGWDVVGVAEDLDVSGAVDPFDRKRRPNLARWLAFEEQPFDAIVAYRVDRLARSIRHLQQLVHWAEDHKKLVVSATEAHFDTTTPFAAVVIALMGTVAQMELEAIKERSRSAAHFNIRAGKYRGSLPPWGYLPARVDGEWRLVPDPVQRERILEVYHRVVDNHEPLHLVAHDLNRRGVLSPKDYFAQLQGREPQGRKWSATALKRSLISEAMLGYATLNGKIVRDDDGAPLVRAEPILTREQLEALRAELVKTSRAEPAVSTPSLLLRVLFCAVCGEPAYKFAGGGRKHPRYRCRSMGFPKHCGNGTVAMAEWDAFCEEQVLNLLGDAERLEKVWVAGSDSAVELAEVNAELVDLTGLIGSPAYRAGSPQREALDARIAALAARQEELEGLEARPSGWEWRETGQRFGDWWREQDTAAKNTWLRSMNVRLTFDVRGGLTRTIDFGDLQEYEQHLRLGGVVERLHTGVS

SEQ ID NO: 12001 - protein, 500 aa, synthetic construct
MRALVVIRLSRVTDATTSPERQLESCQQLCAQRGWDVVGVAEDLDVSGAVDPFDRKRRPNLARWLALEEQPFDVIVAYRVDRLTRSTRHLQQLVHWAEDHKKLVVSATEAHFDTTTPFAAVVTALMGTVAQMELEAIKERSRSAAHFNIRAGKYRGSLPPWGYLPARVDGEWRLVPDPVQRERILEVYHRVVDDHEPLHLVAHDLNRRGVLSPKDYFAQLRGREPQGRKWSATALKRSMISEAMLGYATLNGKTVRDDDGAPLVRAEPILTREQQEALRAELVKTSRAKPAVSTPSLLLRVLFCAVCGEPAYKFAGGGRKHPRYRCRSMGFPKHCGNGTVAMAEWDAFCEEQVLGLLGDAERLEKVWIAGSDSAVELAEVNAELVDLTSLIGSPAYRAGSPQREALDARIAALAARQEELEDLEARPSGWEWRETGQRFGDWWREQDTAAKNTWLRSMNVRLTFDVRGGLTRTIDFGDLQEYEQHLRLGSVVERLHTGMS

SEQ ID NO: 12002 - protein, 500 aa, synthetic construct
MRALVAIRLSRVTDATTSPERQLESCQQLCAQRGWDVVGVAEDLDVSGAVDPFDRKRRPNLARWLAFEEQPFDVIVAYRVDRLTRSTRHLQQLVHWADDHKKLVVSATEAHFDTTTPFAAVVIALMGTVAQMELEAIKERSRSAAHFNIRAGKYRGSLPPWGYLPARVDGVWRLVPDPVQRERILEVYHRVVNNHEPLHLVAHDLNRRGVLSPKDYFAQLQGREPQGRKWSATALKRSMISEAMLGYATLNGKTVRDDDGAPLVRAEPILTREQLEALRAELVKTSRAKPAVSTPSLLLRVLFCAVCGEPAYKFAGGGRKHPRYRCRSMGFPKHCGNGTVAMAEWDAFCEEQVLGLLGDAERLEKVWVAGSDSAVELAEVNAELVDLTSLIGSPAYRAGSSQREALDARIAALAARQEELEGLEARPSGWEWRETGQRFGDWWREQDTAAKNTWLRSMNVRLTFDVRGGLTRTIDFGDLQEYEQHLRLGSVAERSHTGMS

SEQ ID NO: 12003 - protein, 500 aa, synthetic construct
MRALVVIRLSRVTDATTSPERQLESCQQLCAQRGWDVVGVAEDLDVSGAVDPFDRKRRPNLARWLAFEEQPFDVIVAYRVDRLTRSTRHLQQLVHWADDHKKLVVSATEAHFDTTTPFAAVVIALMGTVAQMELEAIKERSRSAAHFNIRAGKYRGSLPPWGYLPARVDGVWRLVPDPVQRERILEVYHRVVNNHEPLHLVAHDLNRRGVLSPKDYFAQLQGREPQGRKWSATALKRSMISEAMLGYATLNGKTVRDDDGAPLVRAEPILTRGQLEALRAELVKTSRAKPAVSTPSLLLRVLFCTVCGEPAYKFSGGGRKHPRYRCRSMGFPKHCGNGTVAMAEWDAFCEEQVLDLLGDAERLEKVWVAGSDSAVELAEVNAELVDLTSLIGSPAYRAGSPQREALDARIAALAARQEELEGLETRPSGWEWRETGQRFGDWWREQDTAAKNTWLRSMNVRLTFDVRGGLTRAIDFGDLQEYEQHLRLGSVVERLHTGMS

SEQ ID NO: 12004 - protein, 500 aa, synthetic construct
MRALVVIRLSRVTDATTSPARQLESCQQLCAQRGWDVVGVAEDLDVSGAVDPFDRKRRPNLARWLAFEEQPFDVIVAYRVDRLTRSTRHLQRLVHWAEDHKKLVVSATEAHFDTTTPFAAVVIALMGTVAQMELEAIKERNRSAAHFNIRAGKYRGSLPPWGYLPTRVDGEWRLVPDPVQRERILEVYHRVVDNHEPLHLVAHDLNRRGVLSPKDYFAQLRGREPQGRKWSATALKRSMTSEAMLGYATLNGKTVRNDDGAPLVRAEPILTREQLEALRAELVKTSRAKPAVSTPSLLLRVLFCAVCGEPAYKFAGGGRKHPRYRCRSMGFPKHCGNGTVAVAEWDTFCEEQVLNLLGDAERLEKVWVAGSDSAVELAEVNAELVDLTSLIGSPAYRAGSPQREALDARIAALAARQEELEGLEARPSGWEWRETGQRFGDWWREQDTAAKNTWLRSMNVRLTFDVRGGLTRTIDFGDLQEYEQHLRLGGVVERLHTGMS

SEQ ID NO: 12005 - protein, 500 aa, synthetic construct
MRALVVIRLSRVTDATTSPERQLESCQQLCAQRGWDVVGVAEDLDVSGAVDPFDRKRRPNLARWLAFGEQPFDAIVAYRVDRLTRSVRHLQQLVHWAEDHKKLVVSATEAHFDTTTPFAAVVIALMGTVAQMELEAIKERSRSAAHFNIRAGKYRGSLPPWGYLPTRVDGEWRLVPDPVQRERILEVYHRVVDNHEPLHLVAHDLNRRGVLSPKDYFAQLQGREPQGRKWSATALKRSMISEAMLGYATLNGKTVRDDDGAPLVRAEPILTRGQQEALRAELVKTSRAKPAVSTPSLLLRVLFCAVCGEPAYKFAGGGRKHPRYRCRSMGFPKHCGNGTVAMAEWDAFCEEQVLDLLGDAERLEKVWVAGSDSAVELAEVNAELVDLTSLIGSLAYRAGSPQREALDARIAALAARQEELEGLEARPSGWGWRGTGQRFGDWWREQDTAAKNTWLRSMNVRLTFDVRGGLTRTIDFGDLQEYVQHLRLGSVVERLHTGMS

SEQ ID NO: 12006 - protein, 500 aa, synthetic construct
MRALVVIRLSRVTDATTSPERQLESCQLLCAQRGWDVVGVAEDLDVSGAVNPFDRKRRPNLARWLAFEEQPFDVIVAYRVDRLTRSTRHLQQLVHWAEDHKKLVVSVTEAHFDTTTPFAAVVIALMGTVAQMELEAIKERSRSAAHFNIRAGKYRGSLPPWGYLPARVDGEWRLVPDPVQRERILEVYHRVVDNHEPLHLVAHDLNRRGVLSPKDYFAQLQGREPQGRKWSATALKRSMISEAMLGYATLNGKTVRDDDGAPLVRAEPILTREQQEALRAELVKTSRAKPVVSTPSLLLRVLFCAVCGEPAYKFAGGGRKHPRYRCRSMGFPKHCGNGTVAMAEWDVFCEEQVLSLLGDAERLEKVWVAGSDSAVELAEVNAELVDLTSLIGSPAYHVGSPQRVALDARIAALAARQEELEGLEARPSGWEWRGTGQRFGDWWREQDTAAKNAWLRSMNVRLTFDVRGGLTRTIDFGDLQEYEQRLRLGSVVERLHTGMS

SEQ ID NO: 12007 - protein, 500 aa, synthetic construct
MRALVVIRLSRVTDATTSPERQLESCQQLCAQRGWDVVGVAEDLDVSGAVDPFDRKRRPNLARWLAFEEQPFDAIVAYRVDRLARSIRHLQQLVHWAEDHKKLVVSATEAHFDTTTPFAAVVIALMGTVAQMELEAIKERSRSAAHFNIRAGKYRGSLPPWGYLPTRVDGEWRLVPDPVQRERILEVYHRVVDNHEPLHLVAHDLNRRGVLSPKDYFAQLRGREPQGRKWSATALKRSMISEAMLGYATLNGKIVRDDDGAPLVRAEPILTREQLEALRAEFVKTSRAKPAVSTPSLLLRVLFCAVCGEPAYKFAGGGRKHPRYRCRSMGFPKHCGNGTVAMAEWDAFCEEQVLNLLGDAERLEKVWVAGSDSAVELAEVDAELVDLTSLIGSPAYRAGSPQREALDARIAALAARQEELEGLEARPSGWEWRETGQRFGDWWREQDTAAKNTWLRSMNVRLTFDVRGGLTRTIDFGDLQEYEQHLRLGSVVERLHAGMS

SEQ ID NO: 12008 - protein, 500 aa, synthetic construct
MRALVVIRLSRVTDATTSPERQLESCQQLCAQRGWDVVGVAEDLDVSGAVDPFDRKRRPNLARWLAFEERPFDVIVAYRVDRLARSIRHLQQLVHWAEDHKKLVVSATEAHFDTTTPFAAVVIALMGTVAQMELEAIKERSRSAAHFNIRAGKYRGSLPPWGYLPTRVNGEWRLVPDPVQRERILEVYHRVVDNHEPLHLVAHDLNRRGVLSPKDYFAQLRGREPQGREWSATALKRSMTSEAMLGYATLNGKIVRDDDGAPLVRAEPILTREQLEALRAELVKTSRAKPAVSTPSLLLRVLFCAVCGEPAYKFAGGGRKHSRYRCRSMGFPKHCGNGTVAMAEWDAFCEEQVLDLLGDAERLEKVWIAGSDSAVELAEVNAELVDLTGLTGSPAYRAGSPQREALDARIAALAARQEELEGLEARPSGWVWRETGQRFGDWWREQDTAAKNTWLRSMNVRLTFDVRGGLTRTIDFGDLQEYEQHLRLGSVVERLHTGMS

SEQ ID NO: 12009 - protein, 500 aa, synthetic construct
MRALVVIRLSRVTDATTSPERQLESCQQLCAQRGWDVVGVAEDLDVSGAVDPFDRKRRPNLARWLAFEEQPFDVIVAYRVDRLTRSTRHLQQLVHWAEDHKKLVVSVTEAHFDTTTPFAAVVIALMGTVAQMELEAIKERSRSAAHFNIRAGKYRGSLPPWGYLPTRVDGEWRLVPDPVQRERILEVYHRAVDNHEPLHLVAHDLNRRGVLSPKDYFAQLRGREPQGRKWSATALKRSMTSGAMLGYATLNGKTVRDDDGAPLVRAEPILTREQLEALRAELVKTSRAKPAVSTPSLLLRVLFCAVCGEPAYKFAGGGRKHPRYRCRSMGFPKHCGNGTVAMAEWDAFCEEQVLDLLGDAERLEKVWVAGSDSAVELAEVNAELVDLTSLIGSPAYRADSPQREALDARIAALAARQEELEGLGARPSGWEWRGTGQRFGDWWREQDTAAKNTWLRSMNVRLTFDVRGGLTRTIDFGDLQEYEQHLRLGSVVERLHTGMS

SEQ ID NO: 12010 - protein, 500 aa, synthetic construct
MRALIVIRLSRVTEATTSPERQLESCQQLCAQRGWGVVGVAEDLDVSGAVDPFDRKRRPNLARWLAFEEQPFDVIVAYRVDRLTRSVRHLQRLVHWAEDHKKLVVSATEAHFDTTTPFAAVVIALMGTVAQMELEAIKERSRSAAHFNIRAGKYRGSLPPWGYLPTRVDGEWRLVPDPVQRERILEVYRRVVDNHEPLHLVAHDLNRRGVLSPKDYFAQLRGREPQGREWSATALKRSMTSEAMLGYVTLNGRIVRDDGGAPLVRAEPILTREQLEALRAELVRTSRAKPAASTPSLLLRVLFCAVCGEPAYKFAGGGRKHPRYRCRSMGFPKHCGNGTVAMAEWDAFCEEQVLNLLGDAERLEKVWVAGSDSAVELAEVNAELVDLTSLIGSPAYRTGSPQREALDAHIAALAARQEELEGLEARPSGWEWRGTGQRFGDWWREQGTAAKNTWLRSMNVRLTFDVRGGLTRAIDFGDLQEYEQHLRLGSVVERLHTGMS

SEQ ID NO: 12011 - protein, 500 aa, synthetic construct
MRALVVIRLSRVTDATTSPERQLESCQQLCAQRGWDVVGVAEDLDVSGAVDPFDRKRRPNLARWLAFEEQPFDVIVAYRVDRLTRSIRHLQRLVHWAEDHKKLVVSATEAHFDTTTPFAAVTIALMGTVAQMELEAIKERSRSAAHFNIRAGKYRGSLPPWGYLPTRVDGEWRLAPDPVQRERILEVYHRVVDDHEPLHSVAHDLNRRGVLSPRDYFAQLQGREPRGRKWSATALKRSMISEAMLGYVTLNGKTVRDDDGAPLVRAEPILTREQLEALRAELVKTSRAKPAVSTPSLLLRVLFCAVCGEPAYKFAGGGRKHPRYRCRSMGFPEHCGNGTVAMAEWDAFCEEQVLNLLGDAERLERVWVAGSDSAVELAEVNAELVDLTSLIGSPAYRAGSPQREALDARIAALAARQGELEGLEARPSGWEWRGTGQRFGDWWREQDTAAKNTWLRSMNVRLTFDARGGLTRTIDLGDLQEYEQHLRLGSVVERLHTGMS

SEQ ID NO: 12012 - protein, 500 aa, synthetic construct
MRALVVIRLSRVTDATTSPERQLESCQQLCAQRGWDVVGVAEDLDVSGAVDPFDRKRRPNLARWLAFEEQPFDAIVAYRVDRLTRSIRHLQQLVHWAEDHKKLVVSATEAHFDTTTPFAAVVIALMGTVAQMELEAIKERNRSAAHFNIRAGKYRGSLPPWGYLPTRVDGEWRLAPDPVQRERILEVYHRVVDNHEPLHSVAHDLNRRGVLSPKDYFAQLQGREPQGRKWSATALKRSMISGAMLGYATLNGKIVRDDDGAPLVRAEPILTREQLEALRAELVKTSRAKPAVSTPSLLLRVLFCAVCGEPAYKFAGGGRKHPRYRCRSMGFPKHCGNGTVAMAEWDAFCEEQVLDLLGDVERLEKVWVAGSDSAVEFAEVSAELVDLTSLIGSPAYRAGSPQREALDARIAALAARQEELEGLEARPSGWEWRETGQRFGDWWRGQDTTAKNTWLRSMNVRLTFDVRGGLTRTIDFGDLQEYEQHLRLGSVVERLHTGMS

SEQ ID NO: 12013 - protein, 500 aa, synthetic construct
MRALVVIRLSRVTDATTSPERQLESCQQLCAQRGWDVVGVAEDLDVSGTVDPFDRKRRPNLARWLAFEEQPFDVIVAYRVDRLTRSVRHLQQLVHWAEDHKKLVVSATEAHFDTTTPFAAVVIALMGTVAQMELEAIKERSRSAAHFNIRAGKYRGSLPPWGYLPARVDGEWRLVPDPVQRERILEVYHRVVDNHEPLHLVAHDLNRRGVLSPKDYFAQLQGREPQGRKWSATALKRSMISGAMLGYATLNGKTVRDDDGAPLVRAEPILTREQQEALRAELVKTSRAKPAVSTPSLLLRVLFCAVCGEPAYKFAGGGRKHPRYRCRSMGFPKHCGNGTVAVAEWDAFSEEQVLDLLGDAERLEKVWVAGSDSAVELAEVNAELVDLTSLIGSPAYRAGSPQREALDARIAALAARQEELEGLEAGPSGWEWRETGQRFGDWWREQGTAAKNTWLRSMNVRLTFDVRGGLTRTIDFGDLREYEQHLRLGSVAERLHTGMS

SEQ ID NO: 12014 - protein, 500 aa, synthetic construct
MRALVVIRLSRVTDATTSPERQLESCQQLCAQRGWDVVGVAEDLDVSGAVDPFDRKRRPNLARWLAFEEQPFDVIVAYRVDRLTRSIRHLQQLVHWAEDHKKLVVSATEAHFDMTTPFAAVVIALMGTVAQMELEAIKERSRSAAHFNIRAGKYRGSLPPWGYLPARVDGEWRLVPDPVQRERISEVYRRVVDNHEPLHLVAHDLNRRGVLSPKDYFAQLRGREPQGRKWSATALKRSMTSEAMLGYATLNGKTVRDDDGAPLVRAEPILTREQLEALRAELVKTSRAKPAVSTPSLLLRVLFCAVCGEPAYKFAGGGRKHPRYRCRSMGFPKHCGNGTVAMAEWDAFCEEQVLGLLGDAERLEKVWVAGSDSAVELGEVNAELVDLTSLIGSPAYRAGSPQREALDARIAALAARQEELEGLEVRPSGWEWRETGQRFGDWWREQDTAAKNTWLRSMNVRLTFDVRGGLTRTIDFGDLQEYEQHLRLGRVNERLHTGMS

SEQ ID NO: 12015 - protein, 500 aa, synthetic construct
MRALVVIRLSRVTDATTSPERQLESCQQLCAQRGWDVVGVAEDLDVSGAVDPFDRKRRPNLARWLAFEEQPFDVIVAYRVDRLTRSTRHLQQLVHWAEDHKKLVVSATEAHFDTTTPFAAVVIALMGTVAQMELEAIKERSRSAAHFNIRAGKYRGSLPPWGYLPTRVDGEWRLVPDPVQRERILEVYHRVVDNHEPLHLVAHDLNRRGVLSPRDYFAQLQGREPQGRKWSATALKRSMISEAMLGYATLDGKTVRDDDGAPLVRAEPILTREQLEAVRAELVKTSRAKPAVSTPSLLLRVLFCAVCGEPAYKFAGGGRKHPRYRCRSVGFPKHCGNGTVAMAEWDAFCEEQVLDLLGDAERLEKVWVAGSDSAVELAEVNAGLVDLTSLISSPAYRAGSPQREALDARIAALAARQEELEGLEARPSGWEWRETGQRFGDWWREQDTAAKNAWLRSMNVRLTFDVRGGLTRTIDFGDLQEYEQHLRLGSVVERLHTGMS

SEQ ID NO: 12016 - protein, 500 aa, synthetic construct
MRALVVIRLSRVTDATTSPERQLESCQQLCAQRGWDVVGVAEDLDVSGAVDPFDRKRRPNLARWLAFEEQPFDVIVAYRVDRLTRSTRHLQQLVHWAEDHKKLVVSATEAHFDTTTPFAAVVIALMGTVAQMELEAIKERSRSAAHFNIRAGKYRGSLPPWGYLPARVDGEWRLVPDPVQRERILEVYHRVVDNHEPLHLVAHDLNRRGVLSPKDYFAQLRGREPQGRKWSASALKRSMISEAMLGYATLNGKTVRDDDGAPIVRAEPILTREQLEALRAELVKTSRAKPAVSTPSLLLRVLFCAVCGEPAYKFAGGGRRHPRYRCRSMGFPKHCGNGTVAMAEWDAFCEEQVLNLLGDAERLEKVWVAGSDSAVELAGVNAELVDLTNLIGSPAYRAGSPQREALDARIAALAARQEELEGLEARPSGWEWRGTGQRFGDWWHEQDTAAKNTWLRSMNVRLTFGVRGGLTRTIDFGDLQEYEQHLRLGSVVERLHTGMS

SEQ ID NO: 12017 - protein, 500 aa, synthetic construct
MRALVVIRLSRVTDATTSPERQLESCQQLCAQRGWDVVGVAEDLDVSGAVDPFDRKRRPNLARWLAFEEQPFDVIVAYRVDRLTRSTRHLQQLVHWAEDHKKLVVSATEAHFDTTTPFAAVVIALMGTVAQMELEAIKERSRSAAHFNIRAGKYRGSLPPWGYLPARVDGVWRLVPDPVQRERILEVYHRVVNNHEPLHLVAHDLNQRGVLSPKDYFAQLQGREPQGRKWSATALKRSMISEAMLGYATLNGKTVRDDDGAPLVRAEPILTREQLEALRAELAKTSRAKPAVSTPSLLLRVLFCAVCGEPAYKFSGGGRKHPRYRCRSMGFPKHCGNGTVAMVEWDAFCEEQVLDLLGDAERLERVWVAGADSAVELAEVNAELVDLTSLIGSPAYRAGSPQREALDARIAALTARQEELKGLEARPSGWEWRETGQRFGDWWREQDTTAKNTWLRSMNVRLTFDVRGGLTRTIDFGDLQEYEHHLRLGGVVERLHTGVS

SEQ ID NO: 12018 - protein, 500 aa, synthetic construct
MRALVVIRLSRVTDATTSPERQLESCQQLCAQRGWDVVGVAEDLDVSGAVDPFDRKRRPNLARWLAFEEQPFDVIVAYRVDRLTRSVRHLQQLVHWAEDHKKLVVSATEAHFDTTTPFAAVVIALMGTVAQMELEAIKERSRSAAHFNIRAGKYRGSLPPWGYLPTRVDGEWRLVPDPVQRERILEVYHRVVDDHEPLHLVAHDLNRRGVLSPRDYFARLQGREPQGRKWSATALKRSMISEAMLGYATLNGKTVRDDDGAPLVRAEPILTREQLEALRAELVKTSRAKPAVSTPSLLLRVLFCAVCGEPAYKFAGGGRKHPRYRCRSMGFPKHCGNGTVAMAEWDAFCEEQVLDLLGDAERLEKVWVAGSDSAVELAEVNAELVDLTSLIGSPAYRAGSPQREALDARIAALAARQEELEGLEARPSGWEWRETGRRFGDWWREQDTAAKNTWLRSMNVRLTFDVRGGLTRTIDFGDLQEYEQHLRLGSVVERLHTGMS

SEQ ID NO: 12019 - protein, 500 aa, synthetic construct
MRALVVIRLSRVTDTTTSPERQLESCQQLCAQRGWDVVGVAEDLDVSGAVDPFDRKRRPNLARWLAFEEQPFDVIVAYRVDRLARSIRHLQQLVHWAEDHKKLVVSATEAHFDTTTPFAAVVIALMGTVAQMELEAIKERSRSAAHFNIRAGKYRGSLPPWGYLPTRVDGEWRLAPDPVQRERILEVYHRVVDDHEPLHLVAHDLNRRGVLSPKDYFAQLQGREPQDRKWSATALKRSMISEAMLGYVTLNGKIVRDDDGTPLVRAEPILTREQLEALRAELVKTSRAKPAVSTPSLLLRVLFCAVCGEPAYKFAGGGRKHPRYRCRSMGFPKHCGNGTVAMAEWDAFCEEQVLGLLGDAERLEKVWVAGSDSAVELAEVNAELVDLTSLIGSPAYRVCSPQREALDARIAALAARQEELEGLEARPSGWEWREAGQRFGDWWREQDTAAKNAWLRSMNVRLTFDVRGGLTRTIDFGELQEYEQHLRLGNVVERLHTGMS

SEQ ID NO: 12020 - protein, 500 aa, synthetic construct
MRALVVIRLSRVTDATTSPERQLGSCQQLCAQRGWDVVGVAEDLDVSGAVDPFDRKRRPNLARWLAFEEQPFDVIVAYRVDRLTRSTRHLQQLIHWAEDHKKLVVSATEAHFDTTTPFAAVVIALMGTVAQMELEAIKERSRSAAHFNIRAGKYRGSLPPWGYLPTRVDGEWRLVPDPVQRERILEVYHRVVDNHEPLHLVAHDLNRRGVLSPKDYFAQLRGREPQGRKWSATALKRSMISEAMLGYATLNGKTVRDDDGAPLVRAEPILTREQLEAVRAELVKTSRAKPAVSTPSLLLRVLFCAVCGEPAYKFAGGGRKHPRYRCRSMGFPKHCGNGTVAMAEWDAFCEEQVLDLLGDAERLEKVWVAGSDSAVELAEVNAELVDLTSLIGSPAYRTGSPQREALDARIAALAARQEELEGSEARPSGWEWRGTGQRFGDWWCEQGTAAKNNWLRSMNVRLTFDVRGGLTRTIDFGDLQEYEQHLRLGSVVERLHTGMS

SEQ ID NO: 12021 - protein, 500 aa, synthetic construct
MRALVVIRLSRVTDATTSPERQLESCQQLCAQRGWDVVGVAEDLDVSGAVDPFDRKRRPNLARWLAFEEQPFDVIVAYRVDRLARSIRHLQLLVHWAEDHKKLVVSATEAHFDTTTPFAAIVIALMGTVAQMELEAIKERSRSAAHFNIRAGKYRGSLPPWGYLPARVDGEWRLVPDPVQRERILEVYHRVVDNHEPLHLVAHDLNRRGVLSPKDYFAQLRGREPQGRKWSATALKRSMISEAMLGYATLNGKTVRDDDGAPLVRAEPILTREQLEALRAELVKTSRAKPAVSTPSLLLRVLFCAVCGEPAYKFAGGGRKHPRYRCRSMGFPKHCGNGTVAMAEWDTFCEEQVLDLLGDAERLEEVWVAGSDSAAELAEVNAELVDLTSLIGSPAYRAGSPQREALDARIAALAARQEELEGLEARPSGWEWRETGQRFGDWWREQDTAAKNTWLRSMNVRLTFDVRAGLTRTIDFGDLQEYEQHLRLGSVVERLRTGMS

SEQ ID NO: 12022 - protein, 500 aa, synthetic construct
MRALVVIRLSRVTDATTSPERQLESCQQLCAQRGWDVVGVAEDLDVSGAVDPFDRKRRPNLARWLAFEERPFDVIVTYRVDRLTRSTRHLQQLVHWADDHEKLVVSATEAHFDTTTPFAAVVIALMGTVAQMELEAIKERSRSAAHFNIRAGKYRGSLPPWGYLPARVDGVWRLVPDPVQRERILEVYHRVVNNHEPLHLVAHDLNRRGVLSPKDYFAQLQGREPQGRKWSATALKRSMISEAMLGHATLNGKTVRDDDGAPLVRAEPILTREQLEALRAELVKTSRAKPAVSTPSLLLRVLFCAVCGEPAYKFAGGGRKHPRYRCRSMGFPKHCGNGTVAMAEWDAFCEEQVLDLLGDAERLEKVWVAGSDSAVELAEVNAELVDLMSLISSPAYRAGSPQREALDARIAALAARQEELEGLEARPSGWEWRRTGQRFGDWWREQNTAAKNTWLRSMNVRLTFDVRGGLTRTIDFGDLQEYEQHLRLGSVVERLHTGMS

SEQ ID NO: 12023 - protein, 500 aa, synthetic construct
MRALVVIRLSRVTDATTSPERQLESCQQLCAQRGWGVVGVAEDLDVSGAVDPFDRKRRPNLARWLAFEEQPFDVIVAYRVDRLTRSTRHLQQLVHWAEDHKKLVVSATEAHFDTTTPFAAVVIALMGTVAQMELEAIKERSRSAAHFNIRAGKYRGSLPPWGYLPARVDGEWRLVPDPVQRERILEVYHRVVDNHEPLYLVAHDLNRRGVLSPKDYFAQLQGREPQGRKWSATALKRSMISEAMLGYATLNGKTVRDDDGAPLVRAEPILTREQLEAIRAELVKTSRAKPAVSTPSLLLRVLFCAVCGEPAYKFSGGGRKHPRYRCRSMGFPKHCGNGTVAMAEWDAFCEEQVLDLLGDAERLEKVWVAGSDSVVELVEVNAELVDLTSLIGSPAYRAGSPQREALDARIAALAARQGELEGLEARPSGWEWRETGQRFGDWWREQDTAAKNTWLRSMNVRLTFDVRGGLTRAIDLGGLQEYEQHLRSGSVVERLHTGMS

SEQ ID NO: 12024 - protein, 500 aa, synthetic construct
MRALVAIRLSRVTDATTSPERQLESCQQLCAQRGWDVVGVAEDLDVSGAVDPFDRKRRPNLARWLAFEEQPFDVIVAYRVDRLTRSIRHLQQLVHWAEDHKKLVVSATEAHFDTTTPFAAVVIALMGTVAQMELEAIKERNRSAAHFNIRAGKYRGSLPPWGYLPTRVDGEWRLAPDPVQRERILEVYHRVVDNHEPLHLVAHDLNRRGVLSPKDYFAQLRGREPQGRKWSATALKRSMISEAMLGYATLNGKTVRDDGGAPLVRAEPILTREQLEALRAELVKTSRAKPAVSTPSLLLRVLFCAVCGEPAYKFAGGGRKHPRYRCRSMGFLKHCGNGTVAMAEWDAFCEVQVLDLLGDAERLEKVWVAGSDSAVEFAEVNAELVDLTSLIGSPAYRAGSPQREALDARIAALAARQEELEGLEARPSGWEWRGTGQRFGDWWREQDTAAKNTWLRSMNVRLTFDVRGGLTRTIDFGDLQEYVQHSRPGSVVERLHTGMS

SEQ ID NO: 12025 - protein, 500 aa, synthetic construct
MRALVVIRLSRVTDATTSPERQLESCQQLCAQRGWDVVGVAEDLDVSGAVDPFDRKRRPNLARWLAFEEQPFDVIVAYRVDRLARSIRHLQQLVHWAEDHKKLVVSATEAHFDTTTPFAAVVIALMGTVAQMELEAIKERSRSAAHFNIRAGKYRGSLPPWGYLPARVDGVWRLVPDPVQRERILEVYHRVVDNHEPLHLVAHDLNRRGVLSPKDYFAQLRGREPQGREWSATALKRSMTSEAMLGYATLNGKIVRDDDGAPLVRAEPILTREQQGALRAELVKTSRAKPVVSTPSLLLRVLFCAVCGEPAYRFAGGGRKHPRYRCRSMGFPKHCGNGTVAMAEWDAFCEEQVLGLLGDAERLEKVWVAGSDSAVELAEVNAELVDLTSLIGSPAYRAGSPQREALDARIAALAARQEELEGLEARPSGWGWRKTGQRFGDWWREQDTAAKNTWLRSMNVRLTFDVRGGLTHTIDFGDLQEYEQHLRLGSVVERLHTGMS

SEQ ID NO: 12026 - protein, 500 aa, synthetic construct
MRALVVIRLSRVTDATTSPERQLESCQQLCAQRGWDVVGVAEDLDVSGAVDPFDRKRRPNLARWLAFEEQPFDVIVAYRVDRLTRSVRHLQQLVHWAEDHKKLVVSATEAHFDTTTPFAAVVIALMGTVAQMELEAIKERSRSAAHFNIRAGKYRGSLPPWGYLPARVDGEWRLVPDPVQHERILEVYHRVVDNHEPLHLVAHDLNRRGVLSPKDYFAQLQGREPQGRKWSATALKRSMISVAMLGYATLNGKTVRDDDGAPLVRAEPILTREQLEALRAELVKASRAKPAVSTPSLLLRVLFCAVCGEPAYKFAGGGRKHPRYRCRSMGFPKHCGNGTVAMAEWDAFCEEQVLDLLGDAERLEKVWVAGSDSAVELAGVNAELVDLTSLIGSPAYRTGSPQREALDARIAALAARQEELEGLEARPSGWEWRGTGQRFGDWWREQDTATKNAWLRSMNVRLTFDVRGGLTRTIDFGDLQEYEQHLRLGSVVERLHTGMS

SEQ ID NO: 12027 - protein, 500 aa, synthetic construct
MRALVVIRLSRVTDATTSPERQLESCQQLCAQRGWDVVGVAEDLDVSGAVDPFDRKRRPNLARWLAFEGQPFDVIVAYRVDRLARSIRHLQQLVHWAEDHKKLVVSATEAHFDTTTPFAAVVIALMGTVAQMELEAIRERSRSAAHFNIRAGKYRGSLPPWGYLPTRVDGEWRLVPDPVQRERILEVYRRVVDNHEPLHLVAHDLNRRGILSPKDYFAQLQGREPQGREWSATALRRSMISGAMLGYATLNGKTVRDDDGAPLVRAEPILTREQQEALRAELVKTSRAKPAVSTPSLLLRVLFCAVCGEPAYKFAGGGRKHPRYRCRSMGFPKHCGNGTVAMAEWDVFCEEQVLDLLGDAERLEKVWVAGSDSAVELAEVNAELVDLTSLIGSPAYRAGSPQREALDARIAALAARQEELEGLEARPSGWEWRETGQRFGDWWREQDTAAKNTWLRSMNVRLTFDVRGGLTRTIDFGDLQEYEQHLRLGSVAERLHTGMS

SEQ ID NO: 12028 - protein, 500 aa, synthetic construct
MRALVVTRLSRVTDATTSPERQLESCQQLCAQRGWDVVGVAEDLDVSGAVDPFDRKRRPNLARWLAFEEQPFDVIVAYRVDRLARSIRHLQQLVHWAEDHKKLVVSATEAHFDTTTPFAAVVIALMGTVAQMELEAIKERNRSAAHFNIRAGKYRGSLPPWGYLPTRVDGEWRLVPDPVQRERILEVYHRVVDNHEPLHLVAHDLNRRGVLSPKDYFAQLRGREPQGRKWSATALKRSMISEAMLGHATLNGKTVRDDDGAPLVRAEPILTREQQEALRAELVKTSRAKPAVSTPSLLLRVLFCAVCGEPAYKFAGGGRKHPRYRCRSMGFPKHCGNGTVAMAEWDAFCEEQVLDLLGDAERLEKVWVAGSNSAVELAEVNAELVDLASLIGSPAYRAGSPQREALDARIAALAARQEELEGLEARPSGWEWRGTGQRFGDWWREQDTAARNTWLRSMNVRLTFDVRGGLTRTIDFGDLQEYEQHLRLGSVDERLHTGMS

SEQ ID NO: 12029 - protein, 500 aa, synthetic construct
MRALVVIRLSRVTDATTSPERQLESCQQLCAQRGWDVVGVAEDLDVSGAVDPFDRKRRPNLARWLAFEEQPFDVIVAYRVDRLTRSTRHLQQLVHWAEDHKKLVVSATEAHFDTTTPFAAVVIALMGTVAQMELEAIKERSRSAAHFNIRAGKYRGSLPPWGYLPTRVDGEWRLEPDPVQRERILEVYHRVVDNHEPLHLVAHDLNRRGVLSPKDYFAQLQGREPQGRKWSATALKRSMISGAMLGYATLNGKTVRDDDGAPLVRAEPILTREQLEALRAELVKTSRAKPAVSTPSLLLRVLFCAVCGEPAYKFAGGGRRHPRYRCRSMGFPKHCGNGTVAMAEWDAFCEEQVLDLLGGAERLEKVWVAGSDSSVELAEVNAELADLTSLIGSPAYRAGSPQREALHARIAALAARQEELEGLEARPSGWEWRETGRRFGDWWREQDTAAKNTWLRSMNVRLTFDVRGGLTRTIDFGDLQEYEQHLCLGSVVERLHTGMS

SEQ ID NO: 12030 - protein, 500 aa, synthetic construct
MRALVVIRLSRVTDATTSPERQLESCQQLCAQRGWDVVGVAEDLDVSGTVDPFDRKRRPNLARWLAFEEQPFDVIVAYRVDRLTRSVRHLQQLVHWAEDHKKLVVSATEAHFDTTTPFAAVVIALMGTVAQMELEAIKERSRSAAHFNIRAGKYRGSLPPWGYLPARVDGEWRLVPDPVQRERILEVYHRVVDNHEPLHLVAHDLNRRGVLSPKDYFAQLRGREPQGRKWSATALKRSMISEAMLGYATLNGKTVRDDDGVPLVRAEPILTREQLEALRAELVKTSRAKPAVSTPSLLLRVLFCAVCGEPAYKFAGGGRKHPRYRCRSMGFPKHCGNGTVAMTEWDAFCEEQVLNLLGDAERLEKVWVAGSDSAVELAEVNAELVDLTSLIGSPAYRAGSPQREALDARIAALAARQEELEGLEARPSGWEWCETGQRFGDWWREQDTAAKNTWLRSMNVRLTFDVRGGLTRTIDFGDLQEYEQHLRLGSVVERSHTGMS

SEQ ID NO: 12031 - protein, 500 aa, synthetic construct
MRALIVIRLSRVTDATTSPERQLESCQRLCAQRDWDVVGVAEDLDVSGAVDPFDRKRRPNLARWLAFEEQPFDVIVAYRVDRLARSIRHLQQLVHWAEDHKKLVVSATEAHFDTTTPFAAVVIALMGTVAQMELEAIKERSRSAAHFNIRAGKYRGSLPPWGYLPTRVDGEWRLVPDPVQRERILEVYHRVVVNREPLHLVAHDLNRRGVLSPKDYFAQLRGREPQGREWSATALKRSMLSEAMLGYATLNGKTVRDDDGAPLVRAEPILTREQQEALRAELVKTSRAKPAVSTPSLLLRVLFCAVCGEPAHKFAGGGRKHPRYRCRSMGFPKHCGNGTVAMAEWDAFCEEQVLDLLGDAERLEKVWVAGSDSAVELAEVNAELVDLTCLISSPAYRAGSPQREALDARIAALAARQEELEGLEARPSGWEWRETGQRFGDWWREQDTAAKNTWLRSMNVRLTFDVRGGLTRTIDLGDLQEYEQHLRLGSVVERLHTGMS

SEQ ID NO: 12032 - protein, 500 aa, synthetic construct
MRALVVVRLSRVTDATTSPERQLESCQQLCAQRGWDVVGVAEDLDVSGAVDPFDRKRRPDLARWLAFEEQPFDVIVAYRVDRLARSIRHLQQLVHWAEDHKKLVVSATEAHFDTTTPFAAVVIALMGTVAQMELEAIKERSRSAAHFNIRAGKYRGSLPPWGYLPTRVDGEWRLVPDPVQHERILEVYHRVVDNHEPLHLVAHDLNRRGVLSPKDYFAQLQGREPQGRKWSATALKRSMISEAMLGYATLNGKTVRDDDGAPLVRAEPILTREQQEALRAELVKTSRAKPAVSTPSLLLRVLFCAVCGEPAYKFAGGGRKHPRYRCRSMGFPKHCGNGTVAMAEWDAFCEEQVLNLLGDAERLEKVWVAGSDSAVELAEVNAELVDLTSLIGSPAYRAGSTQREALDARIAALAARQEELEGLEARPSGWEWRGTGQRFGDWWREQDTAAKNTWLRSMNVRLTFDARGGLTRTIDFGDLQEYEQHLRLGSVVERLHTGMS

SEQ ID NO: 12033 - protein, 500 aa, synthetic construct
MRALVVIRLSRVTDATTSPERQLGSCQQLCAQRGWDVVGVAEDLDVSGAVDPFDRKCRPNLARWLAFEEQPFDAIVAYRVDRLTRSIRHLQQLVHWAEDHKKLVVSATEAHFDTTTPFAAVVIALMGTVAQMELEAIKERSRSAAHFNIRAGKYRGSLPPWGYLPMRVDGEWRLVPDPVQRERILEVYRRVVDNHEPLHLVAHDLNRRGVLSPKDYFAQLQGREPQGRKWSATALKRSMISEAMLGYATLNGKTVRDDDGAPLVRAEPILTREQLEAVRAELVKTSRAKPAVSTPSLLLRVLFCAVCGEPAYKFAGGGRKHSRYRCRSMGFPKHCGNGTVAMAEWDAFCEEQVLNLLGDAERLEKVWVAGSDSAAELAEVNAELVDLTSLIGSPAYRAGSPQREALDARIAALAARQEELEGLEARPSGWEWRGTGQRFGDWWREQDTAAKNTWLRSMNVRLTFDVRGGLTRTIDLGDLQEYEQHSRLGSVVERLHTGMS

SEQ ID NO: 12034 - protein, 500 aa, synthetic construct
MRALVVIRLSRVTDATTSPERQLESCQQLCAQRGWDVVGVAEDLDVSGAVDPFDRKRRPNLARWLAFEEQPFDVIVAYRVDRLTRSVRHLQQLVHWAEDHKKLVVSATEAHFDTTTPFAAVVIALMGTVAQMELEAIKERSRSAAHFNIRAGKYRGSLPPWGYLPARVDGEWRLVPDPVQRERILEVYHRVVDNHEPLHLVAHDLNRRGVLSPKDYFAQLRGREPQGRKWSATALKRSMISVAMLGYATLCGKTVRDDDGAPLVRAEPILTREQLEALRAELVRTSRAKPAVSTPSLLLRVLFCAVCGEPAYKFAGGGRKHPRYRCRSMGFPKHCGNGTVAMAEWDAFCEEQVLNLLGDAERLEKVWVAGSDSAVELAEVNKELVDLTSLIGSPAYRAGSPQREALDARIAALAARQEELEGLVARPSGWEWRGTGQRFGDWWRELDTAAKNTWLRSMNVRLTFDVRDGLTRTIDFGDLQEYEQHLRLGSVVERSHTGMT

SEQ ID NO: 12035 - protein, 500 aa, synthetic construct
MRALVVIRLSRVTDATTSPERQLESCQQLCAQRGWDVVGVAEDLDVSGAVDPFDRKRRPNLARWLAFEEQPFDVIVAYRVDRLTRSVRHLQQLVHWAEDHKKLVVSATEAHFDTTTPFAAVVIALMGTVAQMELEAIKERSRSAAHFNIRAGKYRGSLPPWGYLPTRVDGEWRLVPDPVQRERILEVYHRVVDNHEPLHLVAHDLNRRGVLSPKDYFAQLRGREPQGRKWSATALKRSMVSEAMLGYATLNGKTVRDDDGAPLVRAEPILTREQLEALRAELVKTSRTEPAVSTPSLLLRVLFCAVCGEPAYKFSGGGRKHPRYRCRSMGFPKHCGNGTVAMAEWDAFCEEQVLNLLGDAERLEKVWVAGSDSAVELAEVNAELVDLTSLIGSPAYRAGSPQREALDARIAALAARQEELEGLEARPSGWVWRETGQRFGDWWREQDTTAKNTWLRSMNVRLTFDVRGGLTRTIDFGDLQEYEQHLRLGGVVERLHTGMS

SEQ ID NO: 12036 - protein, 500 aa, synthetic construct
MRALVVIRLSRVTDTTTSPERQLESCQQLCAQRGWDVVGVAEDLDVSGAVDPFDRKRRPNLARWLAFEEQPFDVIVAYRVDRLARSIRHLQQLVHWAEDHKKLVVSATEAHFDTTTPFAAVVIALMGTVAQMELEAIKERSRSAAHFNIRAGKYRGSLPPWGYLPTRVDGEWRLAPDPVQRERILEVYHRVVDNHEPLHLVAHDLNRRGVLSPKDYFAQLQGREPQGRKWSATALKRSMTSEAMLGYATLNGKIVRDDDGAPLVRAEPILTREQLEALRAELVKTSRAKPAVSTPSLLLRVLFCAVCGEPAYKFAGGERKHPRYRCRSMGFPKHCGNGTVAMTEWDAFCEEQVLNLLGDAERLEKVWVAGSDAAVELAEVNAELVDLTSLVGSPAYRAGAPQREALDARIAALAARQEELEGLEARPSDWEWRETGQRFGDWWREQDTAAKNTWLRSMNVRLTFDVRGGLTRTIDFGDLQEYEQHLRLGSVVERLYTGMS

SEQ ID NO: 12037 - protein, 500 aa, synthetic construct
MRALVVIRLSRVTDATTSPERQLESCQQLCAQRGWDVVGVAEDLDVSGAVDPFDRKRRPNLARWLAFEEQPFDAIVAYRVDRLTRSIRHLQQLVHWAEDHKKLVVSATEAHFDTTTPFAAVVIALMGTVAQMELEAIRERNRSAAHFNIRAGKYRGSLPPWGYLPTRVDGEWRLVPDPVQRERILEVYHRVVDDHEPLHLVAHDLNRRGVLSPKDYFAQLRGREPQGRKWSATALKRSMISEAMLGHATLNGKTVRDDDGAPLVRAEPILTRKQLEALRAELVKTSRAKPAVSTPSLLLRVLFCAVCGEPAYKFAGGGRKHPRYRCRSMGFPKHCGNGTVAMAEWDAFCEEQVLDLLGDAERLEKVWVVGSDSAVELAEVNAELVDLTSLIGSPAYHAGSPQREALDARIAALATRQEELEGLEARPSGWEWRETGQRFGDWWREQDTAAKNTWLRSMNVRLTFDVRGGLTRTIDFGDLQEYEQHLRLGSVVERLHTGMS

SEQ ID NO: 12038 - protein, 500 aa, synthetic construct [sequence omitted]

SEQ ID NO: 12039 - protein, 500 aa, synthetic construct
MRALVVIRLSRVTDATTSPERQLESCQQLCAQRGWDVVGVAEDLDVSGAVDPFDRKRRPNLARWLAFEEQPFDVIVAYRVDRLARSIRHLQQLVHWAEDHKKLVVSATEAHFDTTTPFAAVVIALMGTVAQMELEAIKERSRSAAHFNIRAGKYRGSLPPWGYLPTRVDREWRLVPDPVQRERILEVYRRVVDNHEPLHLVAHDLNRRGVLSPKDYFAQLRGREPQGRKWSATALKRSMISEAMLGYATLNGKTVRDDDGAPLVRAEPILTRGQLEALRAELVKTSRAKPAVSTPSLLLRVLFCAVCGEPAYKFAGGGRKHPRYRCRSMGFPKHCGNGTVAMAEWDAFCEEQVLELLGDAERLEKVWVAGSGSAVELAEVNAELVDLTSLIGSPAYRAGSPQREALDARIAALAARQEELEGLGARPSGWEWRETGQRFGDWWREQDTAAKNTWLRSMNVRLTFDVRGGLTRTVDFGDLQEYEQHLRSGSVVERLHTGMS

SEQ ID NO: 12040 - protein, 500 aa, synthetic construct
MRALVVIRLSRVTDATTSPERQLESCQQLCAQRGWDVVGVAEDLDVSGAVDPFDRKRRPNLARWLAFEEQPFDVIVAYRVDRLARSIRHLQQLVHWAEDHKKLVVSATEAHFDTTTPFAAVVIALMGTVAQMELEAIKERNRSAAHFNIRAGKYRGSLPPWGYLPARVDGEWRLVPDPVQRERILEVYHRVVDNHEPLHLVAHDLNRRGVLSPKDYFAQLRGREPQGRKWSATALKRSMTSEAMLGYATLNGKTVRNDDGAPLVRAEPILTREQLEALRAELVKTSRAKPAVSTPSLLLRVLFCAVCGEPAYKFAGGGRKHPRYRCRSMGFPKHCGNGTVAMAEWDAFCEEQVLDLLGDAERLEKAWVAGSDSAVELAEVNAELVDLTSFIGSPAYRAGSPQREALDARIAALAARQDELEGLEARPSGWEWRETGQRFGDWWREQDTAAKNTWLRSMNVRLTFDVRGGLTRTIDFGDLLEYEQHLRLGSVVERLHTGMS

SEQ ID NO: 12041 - protein, 500 aa, synthetic construct
MRALVVIRLSRVTDATTSPERQLESCQQLCAQRDWDVVGVAEDLDVSGAVDPFDRKRRPNLARWLAFEEQPFDVIVAYRVDRLARSIRHLQQLVHWAEDHKKLVVSATEAHFDTTTPFAAVVIALMGTVAQMELEAIKERNRSAAHYNIRAGKYRGSLPPWGYLPTRVDGEWRLVPDPVQRERILEVYHRVVDDHEPLHLVAHDLNRRGVLSPRDYFAQLQGREPQGRKWSATALKRSMISEAMLGYATLNGKIVRDDNGAPLVRAEPILTREQLEALRAELVKTSRAKPAVSTPSLLLRVLFCAVCGEPAYKFAGGGRKHPRYRCRSMGFPKHCGNGTVAMAEWDAFCEEQVLDLLGDAKRLEKVWVAGSDSAVELAEVNAELVDLTSLIGSPAYRAGSPQREALDARIAALAARQEELEGLEARPSGWEWRETGQRFGDWWREQDTAAKNTWLRSMNVRLTFDVRGGLTRTIDFGDLQEYEQHLRLGSVVERLHTGMS

SEQ ID NO: 12042 - protein, 500 aa, synthetic construct
MRALVVIRLSRVTDATTSPERQLESCQQLCAQRGWDVVGVAEDLDVSGAVNPFDRKRRPNLARWLAFEEQPFDAIVAYRVDRLTRSIRHLQQLVHWAEDHKKLVVSATEAHFDTTTPFAAVVIALMGTVAQMELEAIKERNRSAAHFNIRAGKYRGSLPPWGYLPTRVDGEWRLAPDPVQRERVLEVYHRVVDDHEPLHSVAHDLNRRGVLSPRDYFAQLRGREPQGRKWSATALKRSMISEAMLGHATLNGKTVRDGDGAPLVRAEPILTREQLEALRAELVKTSRAKPAVSTPSLLLRVLFCAVCGEPAYKFSGGGRRHPRYRCRSMGFPKHCGNGTVAMAEWDAFCEEQVLDLLGDAERLEKVWVAGSDSAVELAEVNAELVDLTSLTGSPAYRAGSPQREALDARIAALAARQEELEGLEARPSGWEWRETGQRFGDWWRVQDTAAKNTWLRSMNVRLTFDVRGGLTRTIDFGDLQEYKQHLRLGSVVERLHTGRS

SEQ ID NO: 12043 - protein, 500 aa, synthetic construct
MRALVVIRLSRVTDATTSPERQLESCQQLCAQRGWDVVGVAEDLDVSGAVDPFDRKRRPNLARWLAFEEQPFDVIVAYRVDRLTRSTRHLQQLVHWAEDHKKLVVSATEAHFDTTTPFAAVVIALMGTVAQMELEAIKERSRSAAHFNIRAGKYRGSLPPWGYLPTRVDGEWRLVPDPVQRERILEVYHRVVDNHEPLHLVAHDLNRRGVLSPKDYFARLQGREPQGRKWSATALKRSMISVAMLGYATLNGKTVRDDDGAPLVRAEPILTREQLEALRAELVKTSRAKPAVSTPSLLLRVLFCAVCGEPAYKFAGGGRKHPRYRCRSMGFPKHCGNGTVAMAEWDAFCEEQVLGLLGDVERLEKVWVAGSDSAVKLAEVNAELVDLTGLIGSPAYRAGSPQREALDARIAALAARQEELEGLEARPSGWEWRGTGQRFGDWWREQDTAAKNTWLRSMNVRLTFDVRGGLTRTIDFGDLQEYEQHLRLGSVVERLHTGMS

SEQ ID NO: 12044 - protein, 500 aa, synthetic construct
MRALVVIRLSRVTDATTSPERQLESCQQLCAQRGWDVIGVAEDLDVSGAVDPFDRKRRPNLARWLAFEEQPFDAIVAYRVDRLTRSIRHLQQLVHWAEDHKKLVVSATEAHFDTTTPFAAVVIALMGTVAQMELEAIKERSRSAAHFNIRAGKYRGSLPPWGYLPARVDGEWRLVPDPVQRERILEVYHRVVDKHEPLHLVAHDLNRRGVLSPKDYFAQLRGREPQGRKWSATALKRSMISEAMLGYATLNGKTVRDDDGAPLVRAEPILTREQLEALRTELVKTSRAKPAVSTPSLLLRVLFCAVCGEPAYKFAGGGRKHPRYRCRSMGFLKHCGNGTVAMAEWDAFCEEQVLDLLGDAERLEKVWVAGSDSAVELAEVNAELVDLTSLIGSPAYRAGSPQREALDARIAALTARQEELEGLEARPSGWEWRGTGQRFGDWWHEQDTAAKNTWLRSMNVRLTFDVRGGLARTIDFGDLQEYEQHLRLGSVVERLHTGMS

SEQ ID NO: 12045 - protein, 500 aa, synthetic construct
MRALVVIRLSRVTDATTSPERQLESCQQLCARRGWDVAGVAEDLDVSGAVDPFDRKRRPNLARWLAFEEQPFDAIVAYRVDRLTRSTRHLQQLVRWAEDHKKLVVSATEAHFDTTTPFAAVVIALMGTVAQMELEAIKERNRSAAHFNVRAGKYRGSLPPWGYLPTRVDGEWRLVPDPVQRERILEVYHRVVDNHEPLHLVAHDLNRRGVLSPRDYFAQLRGREPQGRKWSATALKRSMISEAMLGHATLNGKTVRDNDGAPLVRAEPILTREQLEALRAELVKTSRAKPAVSTPSLLLRVLFCAVCGEPAYKFAGGGRKHPRYRCRSMGFPKHCGNGTVAMVEWDAFCEEQVLDLLGDAERLEKVWVAGSDSAVELAEVNAELVDLTSLIGSPAYRAGSPQREALDARIAALAARQEELEGLEARPSGWEWRETGQRFGDWWREQDTAAKNTWLRSMNVRLTFDVRGGLIRTIDFGDLQEYEQHLRLGSVVERLHTGMS

SEQ ID NO: 12046 - protein, 500 aa, synthetic construct
MRALVVIRLSRVTDATTSPERQLESCQQLCTQRGWDVVGVAEDLDVSGAVDPFDRKRRPNLARWLAFEEQPFDVIVAYRVDRLTRSTRHLQQLVHWAEDHKKLVVSATEAHFDTTTPFAAVVIALMGTVAQMELEAIKERSRSAAHFNIRAGKYRGSLPPWGYLPARVDGEWRLVPDPVQRERILEVYHRVVDNHEPLHLVAHDLNRRGVLSPKDYFAQLQGREPQGRKWSATALKRSMTSEAMLGYATLNGETVRDDDGAPLVRAEPILTREQLEALRAELVKTSRAKPAVSTPSLLLRVLFCAVCGEPAYKFAGGGRKHSRYRCRSMGFLKHCGNGTVAMAEWDAFCEEQVLDLLGDAERLEKVWVAGADSAVELAEVNAELVDLTSLIGSPAYRAGSPQREALDTRIAALAARQEELEGLEARPSGWGWRETGQRFGDWWREQDTAAKNSWLRSMNVRLTFDVRGGLTRTIDFGDLQGYEQHLRLGSVAERLHTGMS

SEQ ID NO: 12047 - protein, 500 aa, synthetic construct
MRALVVIRLSRVTDATTSPERQLESCQQLCAQRGWDVVGVAEDLDVSGAVDPFDRKRRPNLARWLAFEEQPFDVIVAYRVDRLARSIRHLQQLVHWAEDHKKLVVSATEAHFDTTTPFAAVVIALMGTVAQMELEAIKERSRSAAHFNIRAGKYRGSLPPWGYLPSRVDGEWRLVPDPVQRERILEVYHRVVDNHEPLHLVAHDLNRRGVLSPKDHFAQLRGRETQGRKWSATALKRSMISEAMLGYATLNGKTVRDDDGAPLVRAEPILTREQLEALRAELVKTSRAKPAVSTPSLLLRVLFCAVCGEPAYKFAGGGRKHPRYRCRSMGFPKHCGNGTVAMAEWDAFCEEQVLDLLGDAERLEKVWVAGSDSAVELAEVNAELVDLTSLIGSPAYRAGSPQREALDARIAALAARQEELEGLEARPSGWEWRETGQRFGDWWREQDTAAKNTWLRSMNVRLTFDVRGGLTRTIDFGDLQEYEQHLRLGSVVGRLHTGMP

SEQ ID NO: 12048 - protein, 500 aa, synthetic construct
MRALVVIRLSRVTDATTSPERQLESCQQLCAQRGWDVVGVAEDLDVSGAVDPFDRKRRPNFARWLAFEEQPFDAIVAYRVDRLTRSIRHLQQLVHWAEDHKKLVVSATEAHFDTTTPFAAVVIALMGTVAQMELEAIKERSRSAAHFNIRAGKYRGSLPPWGYLPTRVDGEWRLVPDPVQRERILEVYHRVVDNHEPLHLVAHDLNRRGVLSPKDYFAQLRGREPQGRKWSATALKRSMISEAMLGYATLNGRTVRDDDGAPLVRAEPILTREQQEALRAELAKTSRAKPAVSTPSLLLRVLFCAVCGEPAYKFAGGGRKHPRYRCRSMGFPKHCGNGTVAMAEWDAFCEEQVLDLLGDAERLEKVWVAGSDSAVELAEVNAELVDLTSLIGSPAYRAGSPQREALDARIAALVARQEELEGLEARPSGWEWRETGQRFGDWWREQDTAAKNTWLRSMNVRLTFDVRGGLTRTIDFGDLQEYEQHLRLGSVVERLHTGMS

SEQ ID NO: 12049 - protein, 500 aa, synthetic construct
MRALVVIRLSRVTDATTSPERQLESCQQLCAQRGWDVVGVAEDLDVSGAVDPFDRKRRPNLARWLAFEEQPFDVIVAYRVDRLTRSTRHLQQLVHWADDHKKLVVSATEAHFDTTTPFAAVVIALMGTVAQMELEAIKERSRSAAHFNIRAGKYRGSLPPWGYLPARVDGVWRLVPDPVQRERILEVYHRVVNNHEPLHLVAHDLNRRGILSPKDYFAQLQGREPQGRKWSATALKRSMISEAMLGYATLNGKTVRDDDGAPLVRAEPILTREQQEALRAELVKTSRAKPAVSTPSLLLRVLFCAVCGEPAYKFAGGGRKHPRYRCRSMGFPKHCGNGTVAMAEWDAFCEEQVLDLLGDAERLEKVWVASSDSAVELAEVNAELVDLTSLIGSPAYRAGSPQREALDARIAALAARQEELEGLEARPSGWEWRETGQRFGDWWREQDTAAKNTWLRSMNVRLTFDVRGGLTRTIDFGDLQEYEQHLRLGSVVERLHTGMP

SEQ ID NO: 12050 - protein, 500 aa, synthetic construct
MRALVVIRLSRVTDATTSPERQLESCQQLCAQHGWDVVGVAEDLDVPGSVDPFDRKRRPNLARWLAFEEQPFDVIVAYRVDRLARSIRHLQQLVHWAEDNKKLVVSATEAHFDTTTPFAAVVIALMGTVAQMELEAIKERSRSAAHFNIRAGKYRGSLPPWGYLPARVDGEWRLVPDPVQRERILEVYHRVVDNHEPLHLVAHDLNRRGVLSPRDYFAQLQGREPQGRKWSVTALKRSMISEAMLGYATLNGKTVRDDDGAPLVRAEPILTREQLEALRAELVKTSRAKPAVSTPSLLLRVLFCAVCGEPAYKFAGGGRKHPRYRCRSMGFPKHCGNGTVAMAEWDAFCEEQVLDLLGDAERLEKVWVAGSDSAVELAEVNAELVDLMSLIGSPAHRAGSPQREALDARIAALAARQEELEGLEARPSGWEWRGTGQRFGDWWREQDTAAKNTWLRSMNVRLTFDVRGGLTRTIDFGDLQEYEQHLRLGSVVERLHTGTS

SEQ ID NO: 12051 - protein, 500 aa, synthetic construct
MRALVVIRLSRVTDATTSPERQLESCQQLCAQRGWDVVGVAEDLDVSGAVDPFDRKRRPNLARWLAFEEQPFDVIVAHRVDRLTRSTRHLQQLVHWAEDHEKLVVSATEAHFDTTTPFAAVVIALMGTVAQMELEAIKERNRSAAHFNIRAGKYRGSLPPWGYLPARVDGEWRLVPDPVQRERILEVYHRVVDNHEPLHLVAHDLNRRGVLSPRDYFAQLQGREPQGRKWSATALKRSMISEAMLGYATLNGKTVRDDDGAPLVRAEPILTREQLEALRAELVKTSRAKPAVSTPSLLLRVLFCAVCGEPAYKFAGGGRKHPRYRCRSMGFPKHCGNGTVAMAEWDAFCEEQVLDLLGDAERLEKVWVAGTDSAVELAEVNAELVDLTSLIGSPAYRAGSPQREALDARIATLVARQKELEGLEARPSGWGWRETGQRFGDWWREQDTAAKNTWLRTMNVRLTFDVRGGLTRTIDFGELQEYEQHLRLGSVVERLHTGMS

SEQ ID NO: 12052 - protein, 500 aa, synthetic construct
MRALVVIRLSRVTDATTSPERQLESCQQLCAQRGWDVVGVAEDLDVSGAVDPFDRKRRPNLARWLAFEEQPFDVIVAYRVDRLTRSVRHLQQLVHWAEDHKKLVVSATEAHFDTTTPFAAVVIALMGTVAQMELEAIKERNRSAAHFNIRAGKYRGSLPPWGYLPARVDGVWRLVPDPVQRERILEVYHRVVNNHEPLHLVAHDLNRRGVLSPKDYFAQLQGREPQGRKWSATALKRSMISEAMLGYATLNGKTVRDDDGAPLVRAEPILTREQQEALRAELVKTSRAKPAVSTPSLLLRVLFCAVCGEPAYKFAGGGRRHPRYRCRSMGFPKHCGNGTVAMAEWDAFCEEQVLGLLGDAERLEKVWVAGSDSAVELAEVNAELVGLTSLIGSPAYRAGSPQRESLDARIAALAARQEELEGLEARPSGWEWRETGQRFGDWWREQDTAAKNTWLRSMNVRLTFDVRGGLTRTIDFGDLQEYERHLRLGSVVERLHTGMS

SEQ ID NO: 12053 - protein, 500 aa, synthetic construct
MRALVVIRLSRVTDATTSPERQLESCQQLCAQRGWDVVGVAEDLDVSGAVDPFDRKRRPNLARWLAFEEQPFDVIVSHRVDRLTRSTRHLQQLVRWAEDHKKLVVSATEAHFDTTTPFAAVVIALMGTVAQMELEAIKERNRSAAHFNIRAGKYRGSLPPWGYLPARVDGEWRLVPDPVQRERILEVYHRVVDNHEPLHLVAHDLNRRGVLSPKDYFAQLRGREPQGRKWSATALKRSMISEAMLGHATLNGKTVRDDDGAPLVRAEPILTREQQEALRAELVKTSRAKPAVSTPSLLLRVLFCAVCGEPAYKFAGGGRKHPRYRCRSMGFPKHCGNGTVAMAEWDAFCEEQVLDLLGDAKRLEKVWVAGSDSAVELAEVSAELVDLTSLIGSPAYRAGSPQREALDARIAALAARQEGLEGLEARPSGWEWRETGQRFEDWWREQDTAARNTWLRSMNVRLTFDVRGGLTRTIDFGDLQEYEQHLRLGSVVERLHTGMS

SEQ ID NO: 12054 - protein, 500 aa, synthetic construct
MRALVVIRLSRVTDATTSPERQLESCQQLCAQRGWDVVGVAEDLDVSGAVDLFDRERRPNLARWLAFEEQPFDVIVAYRVDRLTRSIRHLQQLVHWAEDHKKLVVSATEAHFDTTTPFAAVVIALMGTVAQMELEAIKERNRSAAHFNIRAGKYRGSLPPWGYLPARVDGEWRLVPDPVQRERILEVYHRVVDNHEPLHLVAHDLNRRGVLSPKDYFAQLRGREPQGRKWSATALKRSMTSEAMLGYATLNGKTVRDDDGAPLVRAEPILTREQLEALRAELVKTSRAKPAVSTPSLLLRVLFCAVCGEPAYKFAGGGRKHPRYRCRSMGFPKHCGNGTVAMAEWDAFCEEQVLGLLGDAEHLEKVWVAGSGSAVELAEVNAELVDLTSLIGSPAYRAGSPQREALDARIAALAARQEELEGLEARPSGWEWRKTGQRFRDWWREQDTAAKNTWLRSMNVRLTFDVRGGLTRTIDFGDLQEYAQHLRLGSVVERLHTGMS

SEQ ID NO: 12055 - protein, 500 aa, synthetic construct
MRALVVIRLSRVTDATTSPERQLESCQQLCAQRGWDVVGVAEDLDVSGAVDPFDRKRRPNLARWLAFEEQPFDVIVAYRVDRLTRSTRHLQQLVHWAEDHKKLVVSATEAHFDTTTPFAAVVIALMGTVAQMELEAIKERSRSAAHFNIRAGKYRGSLPPWGYLPARVDGEWRLVPDPVQRERILEVYHRVVDIHEPLHLVAHDLNRRGVLSPKDYFAQLQGREPQGRKWSATALKRSMISEAMLGYATLNGKIVRDDDGAPLVRAEPILTREQLEALRAELVKTSRAKPAVSTPSLLLRVLFCAVCGEPAYKFSGGGRKHPRYRCRSMGFPKHCGNGTVAMAEWDAFCEEQVLDLLGDAERLEKVWVAGSDSAVELAEVNAELVDLTSLIGSPAYRAGYPQREALDARIAALAARQEELEGLEARPSGWEWRGTGQRFGDWWREQDTAAKNTWLRSMNVRLTFDVRGGLTRTIDFGDLQEYEQHLRLGNVVERLHTGMS

SEQ ID NO: 12056 - protein, 500 aa, synthetic construct
MRALVVIRLSRVTDATTSPERQLESCQQLCAQRGWDVVGVAEDLDVSGAVDPFDRKRRPNLARWLAFEEQPFDAIVAYRVDRLSRSIRHLQQLVHWAEDHKKLVVSATEAHFDTTTPFAAVVIALMGTVAQMELEAIKERNRSAAHFNIRAGKYRGSLPPWGYLPTRVDGEWRLAPDPVQRERILEVYHRVVDNHEPLHLVAHDLNRRGVLSPKDYFAQLQGREPQGRKWSATALKRSMISEAMLGYATLNGKTVRDDDGAPLVRAEPILTREQQEALRAELVKTTRAKPAVSTPSLLLRVLFCAVCGEPAYRFAGGGRKHPRYRCRSMGFPKHCGNGTVAMAEWDAFCEEQVLGLLGDAERLEKVWVAGSDSAAELAEVNAELVDLTSLIGSPAYRAGSPQREALDARIATLAARQEELEGSEARPSGWEWRGTGQRFGDWWREQDTAAKNTWLRSMNVRLTFDVRGGLTRTIDFRDLQKYEQHLRLGGVVERLHTGMS

SEQ ID NO: 12057 - protein, 500 aa, synthetic construct
MRALVVIRLSRVTDATTSPERQLESCQQLCAQRGWDVVGVAEDLDVSGAVDPFDRKRRPNLARWLAFEEQPFDVIVAYRVDRLTRSVRHLQQLVHWAEDHEKLVVSATEAHFDTTTPFAAVVIALMGTVAQMELEAIKERSRSAAHFNIRAGKYRGSLPPWGYLPTRVDGEWRLVPDPVQRERVLEVYRRVVDNHEPLHLVAHDLNRRGVLSPKDYFAQLRGREPQGRKWSATALKRSMISEAMLGYATLNGKTVRDDDGAPLVRAEPILTREQLEALRAELVKTSRAKPAVSTPSLLLRVLFCAVCGEPAYKFAGGGRKHPRYRCRSMGFPKHCGNGTVAMAEWDSFCEEQVLDLLGDAKRLEKVWVAGSDSAVELAEVNAELVDLTSLIGSPAYRAGSPQREALDARIAALAARQEELEGLEARPSGWEWRETGQRFGDWWREQDTAAKNTWLRSMNVRLTFDVRGGLTRTIDFGDLLEYEQHLRLGSVVERLHTGMS

SEQ ID NO: 12058 - protein, 500 aa, synthetic construct
MRALVVIRLSRVTDATTSPERQLESCQQLCAQRGWDVVGVAEDLDVSGAVDPFDRKRRPNLARWLAFEEQPFDAIVAYRVDRLTRSIRHLQQLVHWAEDHKKLVVSATEAHFDTTTPFAAVVIALMGTVAQMELEAIKERNRSAAHFNIRAGKYRGSLPPWGYLPARVDGEWRLAPDPVQRERILEVYHRVVDNHEPLHLVAHDLNRRGVLSPKDYFAQLRGREPQGRKWSATALKRSMISGAMLGYATLNGKTVRDDDGAPLVRAEPILTRGQLEALRAELVKTSRAKPAVSTPSLLLRVLFCAVCGEPAYKFAGGGRKHPRYRCRSMGFPKHCGNGTVAMAEWDAFCEEQVLDLLGDAERLEKVWVAGSDSAVELAEVNAELVDLTCLIGSPAYRAGSPQREALDARIAALAARQEELEGLEARPSGWEWRETGQRFGDWWREQDTAAKNTWLRSMNVRLTFDVRGGLTRTIDFGDLRGYEQQLRLGSVVERLHTGMS

SEQ ID NO: 12059 - protein, 500 aa, synthetic construct
MRALVVIRLSRVTDATTSPERQLESCQQLCAQRGWDVVGVAEDLDVSGAVDPFDRKRRPNLARWLAFEEQPFDVIVAYRVDRLTRSIRHLQQLVHWAEDHKKLVVSATEAHFDTTTPFAAVTIALMGTVAQMELEAIKERSRSAAHFNIRAGKYRGSLPPWGYLPTRVDGEWRLAPDPVQRERILEVYHRVVDDHEPLHSVAHDLNRRGVLSPRDYFAQLQGREPRGRKWSATALKRSMISEAMLGYVTLNGKTVRDDDGAPLVRAEPILTREQLEALRAELVKTSRAKSAVSTPSLLLRVLFCAVCGEPAYKFAGGGRKHPRYRCRSMGFPKHCGNGTVAMAEWDAFCEEQVLDLLGDAERLEKVWVAGSDSAVELAEVNAGLVDLTSLISSPAYRAGSPQREALDARIAALAARQEELEGLEARPSGWEWRETGQRFGDWWREQDTAAKNAWLRSMNVRLTFDVRGGLTRTIDFGDLQEYEQHLRLGSVVERLHTGMS

SEQ ID NO: 12060 - protein, 500 aa, synthetic construct
MRALVVIRLSRVTDATTSPERQLESCQQLCAQRGWDVVGVAEDLDVSGAVDPFDRKRRPNFARWLAFEEQPFDVIVAYRVDRLARSIRHLQQLVHWAEDHKKLVVSATEAHFDTTTPFAAVVIALMGTVAQMELEAIKERNRSAAHFNIRAGKYRGSLPPWGYLPTRVDGEWRLVPDPVQRERILEVYHRVVDNHEPLHLVAHDLNRRGVLSPKDYFAQLQGREPQGRKWSATALKRSMTSEAMLGYATLNGKTVRDEDGAPLVRAEPILTREQLEALRAELVKTSRAKPAVSTPSLLLRVLFCAVCGEPAYKFAGGGRKHPRYRCRSMGFPKHCGNGTVAMAEWDAFCEEQVLDLLGDAERLEKVWVAGSDSAVELAEVNAELVDLTSLIGSPAYRAGSPQREALDARIAALAARQEELEGLEARPSGWEWRETGQRFGDWWREQDTAAKNTWLRSMNVRLTFDVRGGLTRTIDFGDLQEYEQHLRLGSVVERLHTGMS

SEQ ID NO: 12061 - protein, 500 aa, synthetic construct
MRALVVIRLSRVTDATTSPERQLESCQQLCAQRGWDVVGVAEDLDVSGAVDPFDRKRRPNLARWLAFEEQPFDVIVAYRVDRLARSIRHLQQLVHWAEDHKKLVVSATEAHFDTTTPFAAVVIALMGTVAQMELEAIKERNRSAAHFNIRAGKYRGSLPPWGYLPARVDGEWRLVPDPVQRERILEVYHRVVDNHEPLHLVAHDLNRRGVLSPKDYFAQLRGREPQGRKWSATALKRSMISEAMLGYATLNGKTVRDDDGAPLVRAEPILTREQQEALRAELAKTSRAKPAVSTPSLLLRVLFCAVCGEPAYKFAGGGRKHPRYRCRSMGFLKHCGNGTVAMAEWDAFCEEQVLNLLGDAERLEEVWVAGSDSAVELAEVNAELVDLTSLIGSPAYRAGSPQREALGARIAALAARQEELEGLEAHPSGWEWRETGQRFGDWWRKQDTAAKNTWLRSMNVRLTFDVRGGLTRTIDFGDLQEYEQHLRLGSVVKRLHTGMS

SEQ ID NO: 12062 - protein, 500 aa, synthetic construct
MRALVVIRLSRVTDATTSPERQLESCQQLCAQRGWDVVGVAEDLDVSGAVDPFDRKRRPNLARWLAFEEQPFDVIVAYRVDRLTRSTRHLQQLVHWADDHKKLVVSATEAHFDTTTPFAAVVIALMGTVAQMELEAIKERSRSAAHFNIRAGKYRGSLPPWGYLPARVDGVWRLVPDPVQRERILEVYHRVVNNHEPLHLVAHDLNRRGVLSPKDYFAQLRGREPRGREWSATALKRSMISEAMLGYATLNGKTVRDDDGAPLVRAEPILTREQLEALRAELVKTSRAKPAVSTPSLLLRVLFCAVCGEPAYKFAGGGRKHPRYRCRSMGFPKHCGNGTVAMAEWDAFCEKQVLDLLGDAERLEKVWVAGSDSAVELAEVNAELVDLTSLIGSPAYRAGSPQREALDARIAALAARQEELEGLEARPSGWEWRETGQRFGDWWREQDTAAKNTWLRSMNVRLTFDVRGGLTRTIDFGDLREYEQHLRLGSVVERLHAGMS

SEQ ID NO: 12063 - protein, 500 aa, synthetic construct
MRALVVIRLSRVTDATTSPERQLESCQRLCAQRGWDVVGVAEDLDVSGAVDPFDRKRRPNLACWLAFEEQPFDVIVAYRVDRLTRSIRHLQQLVHWAEDHKKLVVSATEAHFDTTTPFAAVTIALMGTVAQMELEAIKERSRSAAHFNIRAGKYRGSLPPWGYLPTRVDGEWRLAPDPVQRERVLEVYHRVVDDHEPLHSVAHDLNRRGVLSPRDYFAQLQGREPRGRKWSATALKRSMISEAMLGYVTMNGKTVRDDDGAPLVRAEPILTREQLEALRAELVRTSRAKPAVSTPSLLLRVLFCAVCGEPAYKFAGGGRKHPRYRCRSMGFPEHCGNGTVAMAEWDAFCEEQVLGLLGDAERLEKVWVAGSDSAVELAEVNAELVDLTSLIGSPAYRAGSPQREALDARIAALAARREELEGLEARPSGWEWRETGQRFGDWWREQDAAAKNTWLRSMNVRLTFDVRGGLTRTIDFGVLREYEQHLRLGSVVERLRTRMS

SEQ ID NO: 12064 - protein, 500 aa, synthetic construct
MRALVVIRLSRVTDATTSPERQLESCQQLCAQRGWDVVGVAEDLDVSGAVDPFDRKRRPNLARWLAFEEQPFDVIVAYRVDRLTRSTRHLQQLVHWAEDHKKLVVSATEAHFDTTTPFAAVIIALMGTVAQMELEAIKERSRSAAHFNIRAGKYRGSLPPWGYLPTRVDGEWRLVPDPVQRERILEVYHRVVVNREPLHLVAHDLNRRGVLSPKDYFAQLRGREPQGREWSATALKRSMLSEAMLGYATLNGKTVRDDDGAPLVRAEPILTREQQEALRAELVKTSRARPAVSTPSLLLRVLFCAVCGEPAYKFAGGGRKHPRYRCRSMGFPKHCGNGTVAMAEWDVFCEEQVLSLLGDAERLEKVWVAGSDSAVELAEVNAELVDLTSLIGSPAYRAGSPQREALDARIAALAARQEELEGLEARPSGWEWRETGQRFGDWWREQDTAAKNTWLRSMNVRLTFDVRGGLTRTIDFGDLQEYEQHLRLGSVVERLHTGMS

SEQ ID NO: 12065 - protein, 500 aa, synthetic construct
MRALVVIRLSRVTEATTSPERQLESCRQLCAQRGWDVVGVAEDLDVSGAVDPFDRKRRPNLARWLAFEEQPFDVIVAYRVDRLARSIRHLQQLVHWAEDHKKLVVSATEAHFDTTTPFAAVVIALMGTVAQMELEAIKERNRSAAHFNIRAGKYRGSLPPWGYLPTRVDGEWRLVPDPVQRERILEVYHRVVDNHEPLHLVAHDLNRRGVLSPKDYFAQLRGREPQGREWSATALKRSMTSEAMLGYATLNGKIVRDDDGAPLVRAEPILTREQLEALRAELVKTSRAKPAVSTPSLLLRVLFCAVCGEPAYKFAGGGRKHPRYRCRSMGFPKHCGNGTVAMAEWDAFCEEQVLNLLGDAERLEKVWVAGSDSAVELAEVNAELVDLTSLIGSPAYRAGSTQREALDARIAALAARQEELEGLEARPSGWEWRETGQRFGDWWREQDTAAKNTWLRSMNVRLTFDVRGGLTRTIDLGDLQEYEQHLRLGSVVERLHTGMS

SEQ ID NO: 12066 - protein, 500 aa, synthetic construct
MRALVVIRLSRVTDATTSPERQLESCQQLCAQRGWDVVGVAEDLDVSGAVDPFDRKRRPNLARWLAFEEQPFDVIVAYRVDRLTRSTRHLQQLVHWADDHKKLVVSATEAHFDTTTPFAAVVIALMGTVAQMELEAIKERSRSAAHFNIRAGKYRGSLPPWGYLPARVDGVWRLVPDPVQRERILEVYHRVVNNHEPLHLVAHDLNRRGILSPKDYFAQLQGREPQGRKWSATALKRSMISEAMLGYATLNGKTVRDDDGTPLVRAEPILTREQLEALRAVLVKTSRAKPAVPTPSLLLRVLFCAVCGEPAYKFAGGGRKHPRYRCRSMGFPKHCGNGTVAMAEWDAFCEEQVLNLLGDAERLEKVWVAGSDSAVEFAEVNAELVDLTSLIGSPAYRAGSPQREALDARIAALAARQEELEGLETRPSGWEWRETGQRFGDWWREQDTAAKNTWLRSMNVRLTFDVRGGPTRTIDFGDLQEYEQHLRLGSVVERLHTGMS

SEQ ID NO: 12067 - protein, 500 aa, synthetic construct
MRALVVIRLSRVTDATTSPERQLESCQQLCAQRGWDVVGVAEDLDVSGAVDPFDRKRRPNLARWLAFEEQPFDVIVAYRVDRLARSIRHLQQLVHWAEDHKKLVVSATEAHFDTTTPFAAVVIALMGTVAQMELEAIKERCRSAAHFNIRAGKYRGSLPPWGYLPTRVDGEWRLVPDPVQHKRILEVYHRVVDNHEPLHLVAHDLNRRGVLSPRDYFAQLQGREPQGRKWSATALKRSITSEAMLGYATLYGKIVRDDDGAPLVRAEPILTREQLEALRAELVKTSRAKPAVSTPSLLLRVLFCAVCGEPAYKFSGGGRKHPRYRCRSMGFPKHCGNGTVAMAEWDAFCEEQVLDLLGDAERLEKVWVAGSDSAVELAEVNAELVDLTSLIGSPAYRAGSPQREALDARIAALAARQEELEGLEARPSGWEWRETGQRFGDWWREQDTAAKNTWLRSMNVRLTFDVRGGLTRTIDFGDLQEYKQHLRLGSVVERLHTGMS

SEQ ID NO: 12068 - protein, 500 aa, synthetic construct
MRALVVIRLSRVTDATTSPERQLESCRQLCAQRGWDVVGVAEDLDVSGAVDPFDRKRRPNLARWLAFEEQPFDVIVAYRVDRLTRSTRHLQQLVHWAEDHKKLVVSATEAHFDTTTPFAAVVIALMGTVAQMELEAIRERNRSAAHFNIRAGKYRGSLPPWGYLPARVGGEWRLVPDPVQRERILEVYHRVVDNHEPLHLVAHDLNRRGVLSPKDYFAQLQGREPQGRKWSATALKRSMISGAMLGYATLNGKTVRDDDGAPLVRAEPILTREQLEALRAELVKTSRAKPAVSTPSLLLRVLFCAVCGEPAYKFAGGGRKHPRYRCRSMGFPKHCGNGTVAMAEWDAFCEEQVLDLLGDAERLEKVWVAGSDSAVELAEVNAELADLTSLIGSPAYRAGSPQREALDARIASLAARQEELEGLEARPSGWEWRETGQRFGDWWREQDTAAKNTWLRSMNVRLTFDVRGGLTRTIDFGDLQEYKQHLRLGSVVERLHTGMS

SEQ ID NO: 12069 - protein, 500 aa, synthetic construct
MRALVVIRLSRVTDATTSPERQLESCQQLCAQRGWDVVGVAEDLDVSGAVDPFDRKRRPNLARWLAFEEQPFDVVVAYRVDRLTRSVRHLQQLVHWAEDHKKLVVSATEAHFDTTTPFAAVVIALMGTVAQMELEAIRERNRSAAHFNIRAGKYRGSLPPWGYLPTRVDGEWRLVPDPVQRERILEVYHRVVDNHEPLHLVAHDLNRRGVLSPKDYFAQLRGREPQGRKWSATALKRSMISGAMLGYATLNGKIVRDDDGAPLVRAEPILTREQLEALRAELVKTSRAKPAVSTPSLLLRVLFCAVCGEPAYKFAGGGRKHPRYRCRSMGFPKHCGNGTVAMAEWDAFCEEQVLDLLGDAERLEKVWVAGSDSAAELGEVNAELVDLTSLIGSPAYRAGSPQREALDARIAALAARQEELEGLEARPSGWEWRETGQRFGDWWREQDTAAKNTWLRSMNVRLTFDVRGGLTRTIDFGDLQEYEQHLRSGSVVERLHTGMS

SEQ ID NO: 12070 - protein, 500 aa, synthetic construct
MRALVVIRLSRVTDATTSPERQLESCQQLCAQRGWDVVGVAEDLDVSGAVDPFDRKRRPNLARWLAFEEQPFDVIVAYRVDRLTRSVRHLQQLVHWAEDHKKLVVSVTEAYFDTTTPFAAVVIALMGTVAQLELEAIKERSRSAAHFNIRAGKYRGSLPPWGYLPTRVDGEWRLAPDPVQRERILEVYHRVVDNHEPLRLVAHDLNRRGVLSPKDYFAQLQGREPQGRKWSATALKRSMTSEAMLGYATLNGKTVRDDDGAPLVRAEPILTREQLEALRAELVKTSRAKPAVSTPSLLLRVLFCAVCGEPAYKFAGGGRKHPRYRCRSMGFPKHCGNGTVAMAEWDAFCEEQVLDLLGDAERLEKVWVAGSDSAVELAEVSAELVDLTSLIGSPAYRTGSPQREALDARIAALAARQEELEGLEARPSGWEWRGTGQRFGDWWREQGTAAKNTWLRSMNVRLTFDVRGGLTRTIDFGDLQEYEQHLRLGSVVERLHTGMS

SEQ ID NO: 12071 - protein, 500 aa, synthetic construct
MRALVVIRLSRVTDATTSPERQLESCQQLCAQRGWDVVGVAEDLDVSGAVDPFDRKRRPNLARWLAFEEQPFDAIVAYRVDRLTRSIRHLQQLVHWAEDRKKLVVSATEAHFDTTTPFAAVVIALMGTVAQMELEAIKERNRSAAHFNIRAGKYRGSLPPWGYLPTRVDGEWRLAPDPVQRERILEVYHRVVDNHEPLHSVAHDLNRRGVLSPKDYFAQLQGREPQGRKWSATALKRSMISGAMLGYATLNGKIVRDDDGAPLVRAEPILTREQLEALRAELAKTSRAKPAVSTPSLLLRVLFCAVCGEPAYKFAGGGRKHSRYRCRSMGLPKHCGNGTVAMAEWDAFCEEQVLDLLGDAERLEKVWVAGSDSAVELAEVNAELVDLTSLIGSPAYRAGSPQREALDARIAALAARQEELEGLEARPSGWEWRETGQRFGDWWREQDTAAKNTWLRSMNVRLTFDVRGGLTRSIDFGDLQEYEQHLRSGSVVERLHTGMS

SEQ ID NO: 12072 - protein, 500 aa, synthetic construct
MRALVVIRLSRVTDATTSPERQLESCQQLCAQRGWDVVGVAEDLDVSGAVDPFDRKRRPNLARWLAFEEQPFDVIVAYRVDRLTRSTRHLQQLVHWAEDHKKLVVSATEAHFDTTTPFAAVVIALMGTVAQMELEAIKERSRSAAHFNIRAGKYRGSLPPWGYLPTRVDGEWRLVPDPVQRERILEVYRRVVDNHEPLHLVAHDLNRRGVLSPKDYFAQLRGREPQGRKWSATALKRSMISEAMLGYATLNGKTVRDEDGAPLVRAEPILTRGQLEALRAELVKTSRAKPAVSTPSLLLRVLFCAVCGEPAYKFAGGGRKHPRYRCRSMGFPKHCGNGTVAMAEWDAFCEEQVLDLLEDAERLEKVWVAGSDSAVELAEVNAELVDLTSLIGSPAYRAGSPQREALDARIAALAARQEELEGLEARPSGWEWRGTGQRFGDWWREQDTATRNAWLRSMNVRLTFDVRGGLTRTIDFGDLQEYEQHLRLGSVVERLHTGMS

SEQ ID NO: 12073 - protein, 500 aa, synthetic construct
MRALVVIRLSRVTDATTSPERQLESCQQLCAQRGWDVVGVAEDLDVSGAVDPFDRKRRPNLARWLAFEEQPFDVIVAYRVDRLTRSTRHLQQLVHWADDHKKLVVSATEAHFDTTTPFAAVVIALMGTVAQMELEAIKERSRSAAHFNIRAGKYRGSLPPWGYLPARVDGVWRLVPDPVQRERILEVYHRVVNNHEPLHLVAHDLNRRGVLSPKDYFAQLQGREPQGRKWSATALKRSMISEAMLGFATLNGKTVRDDDGAPLVRAEPILTREQLEALRAELVKTSRAKPAVSTPSLLLRVLFCAVCGEPAYKFAGGGRKHPRYRCRSMGFPKHCGNGTVAMAEWDAFCEEQVLDLLRDAERLEKVWVAGSDSAVELAEVNAELVDLTSLIGSPAYRAGSPQREALDARIAALAARQEELEGLEARPSGWEWRGTGQRFGDWWREQGTAAKNTWLRSMNVRLTFDVRGGLTRTIDFGDLQEYEQHSRLGSVVERLHTGMS

SEQ ID NO: 12074 - protein, 500 aa, synthetic construct
MRALVVIRLSRVTDATTSPERQLESCQQLCAQRGWDVVGVAEDLDVSGAVDPFDRKRRPNLARWLAFEEQPFDVIVAHRVDRLTRSVRHLQQLVHWAEDHKKLVVSATEAHFDTTTPFAAVVTALMGTMAQMELEAIKERNRSAAHFNIRAGKYRGSLPPWGYLPTRVDGKWRLAPDPVQRERILEVYHRVVDNHEPLHLVAHDLNRRGVLSPRDYFAQLQGREPQGRKWSATALKRSMISVAMLGYATLNGKTVRDDDGAPLVRAEPILTRGQLEALRAELVKTSRAKPAVSTPSLLLRVLFCAVCGEPAYKFAGGGRKHPRYRCRSMGFPKHCGNGTVAMAEWDAFCEEQVLNLLGDAERLEKVWVAGSDSAVELAEVNAELVDLTSLIGSPAYRAGSPQREALDARIAGLVARQEELEGLEARPSGWEWRETGQRFGDWWREQDTAAKNAWLRSMNVRLAFDVRGGLTRTIDFGDLQEYEQHLRLGSVVERLHTGMS

SEQ ID NO: 12075 - protein, 500 aa, synthetic construct
MRALVVIRLSRVTDATTSPERQLESCQQLCGQRGWDVVGVAEDLDVSGAVDPFDRKRRPNLARWLAFEEQPFDVIVAYRVDRLARSIRHLQQLVHWAEDHKKLVVSATEAHFDTTTPFAAVVIALMGTVAQLELEAIKERNRSAAHFNIRAGKYRGSLPPWGYLPTRVDGEWRLAPDPVQRERILEVYHRVVDNHEPLHLVAHDLNRRGVLSPKDYFAQLRGREPQGRKWSATALKRSMISVAMLGYATLNGKTVRDDDGAPLVRAEPILTREQLEALRAELVKTSRAKPAVSTPSLLLHVLFCAVCGEPAYKFAGGGRKHPRYRCRSMGFPKHCGNGTVAMAEWDAFCEEQVLNLLGDAERLEKVWVAGSDSAVELAEVSTELVDLTSLIGSPAYRAGSPQREALDARIAALAARQEELEGLESRPSGWEWRETGQRFGDWWREQDTAAKNTWLRSMNVRLTFDVRGGLIRTIDFGDLQEYEQHLRLGSVVERLHTGMS

SEQ ID NO: 12076 - protein, 500 aa, synthetic construct
MRALVAIRLSRVTDATTSPERQLESCQQLCAQRGWDVVGVAEDLDVSGAVDPFDRKRRPNLARWLAFEEQPFDVIVAYRVDRLTRSVRHLQQLVHWAEDHKKLVVSATEAHFDMTTPFAAVVIALMGTVAQMELEAIKERSRSAAHFNIRAGKYRGSLPPWGYLPTRVDGEWRLAPDPVQRERILEVYHRVVDNHEPLHLVAHDLNRRGVLSPKDYFAQLRGREPQGRKWSATALKRSMISEAMLGYATLNGKTVRDDDGAPLVRAEPILTREQLGALRAELVKTSRAKPAVSTPSLLLRVLFCAVCGEPAYKFTGGGRKHPRYRCRSMGFPKHCGNGTVAMAEWDAFCEEQVLDLLGDAERLERVWVAGSDSAVELAEVNTELVDLTSLIGSPAYRAGSPQREALDARIAALAARQEELEGLEARPSGWEWRETGQRFGDWWREQDTAAKNTWLRSMDVRLTFDVRGGLTRTIVFGDLQEYEQHLRLGSVVERLHTGRS

SEQ ID NO: 12077 - protein, 500 aa, synthetic construct
MRALVVIRLSRVTDATTSPERQLESCQQLCAQRGWDVVGVAEDLDVSGAVDPFDRKRRPNLARWLASEEQPFDVIVAYRVDRLTRSTRHLQQLVHWAEDHKKLVVSATEAHFDTTTPFAAVVIALMGTVAQMELEAIKERNRSAAHFNIRAGKYRGSLPPWGYLPSRVDGEWRLVPDPVQRERILEVYHRVVDNHEPLHLVAHDLNRRGVLSPKDYFAQLQGREPQGRKWSATALKRSMISEAMLGYATLNGKTVRDDDGAPLVRAEPILTRGQLEALRAELVKTSRAKPAVSTPSLLLRVLFCAVCGEPAYKFSGGGRKHPRYRCRSMGFPKHCGNGTVAMAEWDAFCEEQVLDLLGDAERLEKVWVAGSDSAAELAEVNAELVDLTGLISSPAYRAGSPQREALDARIAALAARQEELEGLEARPSGWEWRKTGQRFGDWWREQDTAAKNTWLRSMNVRLTFDVRGGLTRTIDFGDLQEYEQHLRLGSVVERLHTGMS

SEQ ID NO: 12078 - protein, 500 aa, synthetic construct
MRALVVIRLSRVTDATTSPERQLESCQQLCAQRGWDVVGVAEDLDVSGAVDPFDRKRRPNLARWLAFEEQPFDVIVAYRVDRLTRSVRHLQQLVHWAEDHKKLVVSATEAHFDTTTPFAAVVIALMGTVAQMELEAIKERTRSAAHFNIRAGKYRGSLPPWGYLPARVDGEWRLVPDPVQRERILEVYHRVVDNHEPLHLVAHDLNRRGVLSPKDYFAQLQGREPQGRKWSATALKRSMISEAMLGYATLNGKTVRDDDGAPLVRAEPILTREQQEALRAELVKTSRAKPAVSTPSLLLRVLFCAVCGEPAYKFAGGGRKHPRYRCRSMGFPKHCGNGTVAMAEWDAFCEEQVLDLLGDAERLEKVWVAGSDSAVELAEVNAELADLTGLIGSPAYRAGSPQCEALDARIAALAARQEELEGLEARPSGWEWRETGQRFGDWWREQDTAAKNTWLRSMNVRLTFDVRGGLTRTIDFGDLQEYEQHLRLGSVVERLHTGMP

SEQ ID NO: 12079 - protein, 500 aa, synthetic construct
MRALVVIRLSRVTDATTSPERQLESCQQLCAQRGWDVVGVAEDLDVSGAVDPFDRKRRPNLARWLASEEQPFDVIVAYRVDRLARSIRHLQQLVHWAEDHKKLVVSATEAHFDTTTPFAAVIIALMGTVAQMELEAIKERSRSAAHFNIRAGKYRGSLPPWGYLPARVDGEWRLVPDPVQRERILEVYHRVVDNHEPLHLVAHDLNRRGVLSPKDYFAQLQGREPQGRKWSATALKRSMISVAMLGYATLNGKTVRDDDGAPLVRAEPILTRGQLEALRAELVKTSRAKPAVSTPSLLLRVLFCAVCGEPAYKFAGGGRKHPRYRCRSMGFPKHCGNGTVATAEWDTFCEEQVLDLLGDAERLEKVWVVGSDSAVELAEVNAELVDLTSLIGSPAYRAGSPQREALDARIAALAARQEELEGSEAHPSGWEWRGTGQRFGDWWREQDTAAKNTWLRSMNVRLTFDVRGGLTRTIDFGDLQEYEQRLRLGSVVERLHTGMS

SEQ ID NO: 12080 - protein, 500 aa, synthetic construct
MRALVVIRLSRVTDATTSPERQLGSCQQLCAQRGWDVVGVAEDLDVSGAVDPFDRKRRPNLARWLAFEEQPFDVIVAYRVDRLARSIRHLQQLVHWAEDHKKLVVSATEAHFDTTTPFAAVVIALMGTVAQMELEAIKERSRSAAHFNIRAGKYRGSLPPWGYLPSRVDGEWRLVPDPVQRERILEVYHRVVDNHEPLHLVAHDLNRRGVLSPKDYFAQLRGREPQGRKWSATALKRSMISEAMLGYATLNGKTVRNDDGAPLVRAEPILTRGQLEALRAELVKTSRAKPAVSTPSLLLRVLFCAVCGEPAYKFAGGGRKHSRYRCRSMGFPKHCGNGTVAMAEWDAFCEEQVLNLLGDAERLEKVWVAGSDSAVKLAEVNAELVDLTSLIGSPAYRAGSPQREALDARIAALAARQEELEGLGARPSGWEWRETGQRFGDWWREQDTAAKNTWLRSMNVRLTFDVRGGLTRTIDFGDLQEYEQHLRLGSVVERLHAGVS

SEQ ID NO: 12081 - protein, 500 aa, synthetic construct
MRALVVIRLSRVTDATTSPERQLESCQRLCAQRSWDVVGVAEDLDVSGAVDPFDRKRRPNLARWLAFEEQPFDVIVAYRVDRLTRSIRHLQRLVHWTEDHKKLVVSATEAHFDTTTPFAAVVIALMGTVAQMELEAIKERSRSAAHFNIRAGKYRGSLPPWGYLPARVDGEWRLAPDPVQRERILEVYHRVVDDHEPLHLVAHDLNRRGVLSPRDYFAQLRGREPQGRKWSATALKRSMISEAMLGYATLNGKIVRDDDGAPLVRAEPILTRGQLEALRAELVKTSRAEPAVSTPSLLLRVLFCAVCGEPAYKFAGGGRKHPRYRCRSMGFPKHCGNGTVAMAEWDAFCEEQVLNLLGDAERLEKVWVAGSDSAVELAEVNAELVDLTSLIGSPAYRAGSPQREALDARIAALAARQEELEGLEARPSGWEWRETGQRFGDWWREQDTAAKNTWLRSMNVRLTFDVRGGLTRTIDFGDLQEYEQHLRSGSVVERLHTGMP

SEQ ID NO: 12082 - protein, 500 aa, synthetic construct
MRALVVIRLSRVTDATTSPERQLESCQQLCAQRGWDVVGVAEDLDVSGAVDPFDRKRRPNLARWLAFEEQPFDVIVAYRVDRLTRSIRHLQQLVHWAEDHKKLVVSATEAYFDTTTPFAAVVIALMGTVAQLELEAIKERSRSAAHFNIRAGKYRGSLPPWGYLPTRVDGEWRLAPDPVQRERILEVYHRVVDNHEPLHLVAHDLNRRGVLSPKDYFAQLQGREPQGRKWSATALKRSMTSEAMLGYATLNGKTVRDDDGAPLVRAEPILTREQLEALRAELVKTSRAKPAVSTPSLLLRVLFCAVCGEPAYKFAGGGRKHPRYRCRSMGFPKHCGNGTVAMAEWDAFCEEQVLNLLGDAERLEKVWVAGSDSAVELAEVNTELVDLTSLIGSPAYRAGSPQREALDARIAALAARQEELEGLEARPSGWEWRETGQRFGDWWREQNTAAKNTWLRSMNVRLTFDVRGGLTRTIDFGDLQEYEQHSRLGSVVECLHTGMS

SEQ ID NO: 12083 - protein, 500 aa, synthetic construct
MRALVVIRLSRVTDATTSPERQLESCQQLCAQRGWDVVGVAEDLDVSGAVDPFDRKRRPNLARWLAFEEQPFDAIVAYRVDRLTRSIRHLQQLVHWAEDHKKLVVSATEAHFDTTTPFAAVVIALMGTVAQMELEAIKERNRSAAHFNIRAGKYRGSLPPWGYLPARVDGEWRLVPDPVQRERILEVYHRVVNNHEPLHLVAHDLNRRGVLSPKDYFAQLQGREPQGRKWSATALKRSMISGAMLGYATLNGKTVRDDDGAPLVRAEPILTREQQEALRAELVKTSRAKPAVSTPSLLLRVLFCAVCGEPAYKFAGGGRKHPRYRCRSMGFPKHCGNGTVAMAEWDTFCEEQVLDLLGDVERLEKVWVAGSDSAVELAEVSAELVDLTSLIGSPAYRAGSPQREALDARIAALAARQEELEGLEARPSGWEWRETGQRFGDWWREQDTAAKNTWLRSMNVRLTFDVRGGLTRTIDFGDLQEYEQHLRLGSVVERLRTGMS

SEQ ID NO: 12084 - protein, 500 aa, synthetic construct
MRALVVIRLSRVTDATTSPERQLESCQQLCAQRGWDVVGVAEDLDVSGAVDPFDRKRRPNLARWLAFEEQPFDVIVAYRVDRLTRSTRHLQQLVHWADDHKKLVVSATEAHFDTTTPFAAVVIALMGTVAQMELEAIKERSRSAAHFNIRAGKYRGSLPPWGYLPARVDGVWRLVPDPVQRERILEVYHRVVNNHEPLHLVAHDLNRRGVLSPRDYFAQLQGREPQGRKWSATALKRSMISEAMLGFATLNGKTVRDDDGAPLVRAEPILTREQLEALRAELVKTSRAKPAVSTPSLLLRVLFCAVCGEPAYKFAGGGRKHPRYRCRSMGFPKHCGNGTVAMAEWDAFCEEQVLDLLGDAERLEKVWVAGSDSAVELAEVNAELADLTSLTGSPAYRAGSPQREALDARIAALAARQEELEGLEARPSGWVWRETGQRFGDWWREQDTAAKNTWLRSMNVRLTFDVRGGLTRTIDFGDLQEYEQHLRLGSVVERLHTGMS

SEQ ID NO: 12085 - protein, 500 aa, synthetic construct
MRALVVIRLSRVTDATTSPERQLESCLQLCAQRGWDVVGVAEDLDVSGAVDPFDRKRRPNLARWLAFEEQPFDVIVAYRVDRLARSIRHLQQLVHWAEDHKKLVVSATEAHFDTTTPFAAVVIALMGTVAQMELEAIKERSRSAAHFNIRAGKYRGSLPPWGYLPTRVDGEWRLVPDPVQRERILEVYHRVVDNHESLHLVAHDLNRRGVLSPKDYFAQLRGREPQGRKWSATALKRSMTSEAMLGYATLNGKTVRDDDGAPLVRAEPILTREQLEALRAELVKTSRAKPAVSTPSLLLRVLFCAVCGEPAYKFAGGGRKHPRYRCRSMGVPKHCGNGTVAMAEWDAFCEEQVLDLLGDAERLEKVWVAGSDSAVELAEVNAELVDLTSLIGSPAYRAGSPQREALDARIAVLAARQVELEGSEARPSGWEWRETGQRFGDWWREQDTAAKNTWLRSMNVRLTFDVRGGLTRTIDFGDLREYEQHLRLGSMVERLHTGMS

SEQ ID NO: 12086 - protein, 500 aa, synthetic construct
MRALVVIRLSRVTDATTSPERQLESCQQLCAQRGWDVVGVAEDLDVSGAVDPFDRKRRPNLARWMAFEEQPFDVIVAYRVDRLTRSTRHLQQLVHWAEDHKKLVVSATEAHFDTTTPFAAVVIALMGTVAQMELEAIKERNRSAAHFNIRAGKYRGSLPPWGYLPTRVDGEWRLVPDPVQRERILEAYHRVVVNHEPLHLVAHDLNRRGVLSPKDYFAQLRGREPQGRKWSATALKRSMTSEAMLGYATLNGKTVRDDDGAPLVRAEPILTREQLEAVRAELVKTSRAKPAVSTPSLLLRVLFCAVCGEPAYKFSGGGRKHPRYRCRSMGFPKHCGNGTVAMAEWDAFCEEQVLNLLGDAERLEKVWVAGSDSAVELAEVNAELVDLTSLIGSPAYRAGSPQREALDARIAALAARQEELEGLEARPSGWVWRETGQRFGDWWREQDTTAKNTWLRSMNVRLTFDVRGGLTRTIDFGDLQEYEQHLRLGSVVERLHTGMS

SEQ ID NO: 12087 - protein, 500 aa, synthetic construct
MRTLVVVRLSRVTDATTSPERQLESCQQLCAQRGWDVVGVAEDLDVSGAVDPFDRKRRPNLARWLAFEEQPFDVIVTYRVDRLTRSVRHLQRLVHWAEDHKKLVVSATEAHFDTTTPFAAVVIALMGTVAQMELEAIKERSRSAAHFNIRAGKYRGSLPPWGYLPTRVDGEWRLVPDPVQRERILEVYHRVVDSHEPLHLVAHDLNRRGVLSPKDYFAQLRGREPQGRKWSATALKRSMISVAMLGYATLNGKTVRDDDGAPLVRAEPILTHEQLEALRAELVKTSRARPAVSTPSLLLRVLFCAVCGEPAYKFAGGGRKYPRYRCRSMGFPKHCGNGTVAMAEWDAFCEEQVLGLLGDAERLEKVWVAGSDSAVELAEVNAELVDLTSLIGSPAYRVGSPQREALDARIAALAARQEELEGLEARPPGWEWRETGQRFGDWWREQDTAAKNTWLRSMNVRLTFDVRGGLTRTIDFGDLQEYEQHLRLGSVVERLHTGMS

SEQ ID NO: 12088 - protein, 500 aa, synthetic construct
MRALVVIRLSRVTDATTSPERQLESCQQLCARRGWDVVGVAEDLDVSGAVDPFDRKRRPSLARWLAFEEQPFDVIVAYRVDRLTRSIRHLQQLVHWAEDHKKLVVSATEAHFDTTTPFAAVVIALMGTVAQMELEAIKERSRSAAHFNIRAGKYRGSLPPWGYLPARVDGEWRLVPDPVQRERILEVYHRVVDDHEPLHLVAHDLNRRGVLSPKDYFAQLRGREPQGRKWSATALKRSMISEAMLGYATLNGKTVRDDDGAPLVRAEPILTREQQEALRAELVKTSRAKPAVSTPSLLLRVLFCAVCGEPAYKFAGGGRKHPRYRCRSMGFPKHCGNGTVAMAEWDAFCEEQVLGLLGDAECLEKVWVAGSDSAVELAEVNAELVDLTSLIGSPAYRAGSPQREALDARIAALAARQEELEGLEARPSGWEWRETGQRFGDWWREQDTAAKNTWLRSMNVRLTFDVRGGLTRTIDFGDLQEYEQHLRLGSVVERLHTGMS

SEQ ID NO: 12089 - protein, 500 aa, synthetic construct
MRALVVIRLSRVTDATTSPERQLESCQQLCAQRGWDVAGVAEDLDVSGAVDPFDCKRRPNLARWLAFEEQPFDVIVAYRVDRLARSIRHLQQLVHWAEDHKKLVVSATEAHFDTTTPFAAVVIALMGTVAQMELEAIKERSRSAAHFNIRAGKYRGSLPPWGYLPTRVGGEWRLVPDPVQRERILEVYHRVVDNHEPLHLVAHDLNRRGVLSPKDYFAQLRGREPQGRKWSATALKRSMISEAMLGYATLNGKTVRDEDGAPLVRAEPILTREQLEALRAELVKTSRAKPAVSTPSLLLRVLFCAVCGEPAYKFAGGGRKHPRYRCRSMGFPKHCGNGTVAMAEWDAFCEEQVLDLLGDAERLEKVWVAGSDSAVELAEVNAELVDLASLIGSPTYRTGSPQREALDARIAALAARQEELEGLEARPSGWEWRETGQRFGDWWREQDTAAKNTWLRSMNVRLTFDVRGGLTRTIDFGDLQEYEQHSRLGSEVERLRTGMS

SEQ ID NO: 12090 - protein, 500 aa, synthetic construct
MRALVVIRLSRVTDATTSPERQLESCQQLCAQRGWDVVGVAEDLDVSGAVDPFDRKRRPNLARWLAFEEQPFDVIVAYRVDRLVRSIRHLQRLVHWAEDHKKLVVSATEAHFDTTTPFAAVVIALMGTVAQMELEAIKERSRSAAHFNIRAGKYRGSLPPWGYLPSRVDGEWRLVPDPVQRERILEVYHRVVDNHESLHLVAHDLNRRGVLSPKDYFAQLQGREPQGRKWSATALKRSMISEAMLGYATLNGKTVRDDDGALLVRAEPILTREQLGALRAELVKTSRAKPAVSTPSLLLRVLFCAVCGEPAYKFAGGGRKHPRYRCRSMGFPKHCGNGTVAMVEWDAFCEEQVLDLLGDAERLEKVWVAGSDSAVELAEVNAELVDLTSLIGSPAYRAGSPQREALDARIAALAARQEELEGLEARPSGWEWRGTGQRFGDWWREQDTAAKNTWLRSMNVRLTFDVRGGLTRTIDFGDLQEYVQHLRLGSVVGRLHTGMS

SEQ ID NO: 12091 - protein, 500 aa, synthetic construct
MRALVVVRLSRVTDATTSPERQLESCQQLCAQRGWDVVGVAEDLDVSGAVDPFDRKRRPNLARWLAFEEQPFDVIVAYRVDRLTRSTRHLQQLVHWAEDHKKLVVSATEAHFDTTTPFAAVVIALMGTVAQMELEAIRERNRSAAHFNIRAGKYRGSLPPWGYLPARVDGAWRLVPDPVQRERILEVYHRVVDNHEPLHLVAHDLNRRGVLSPKDYFAQLQGREPQGRKWSATALKRSMISEAMLGYVTLNGKTVRDDDGAPLVRAEPILTRGQREALRAELVKTSRAKPAVSTPSLLLRVLFCAVCGEPAYKFAGGGRKHPRYRCRSMGFPKHCGNGTVAMAEWDTFCEEQVLGLLGDAERLEKVWVAGTDSAVELAEVNAELVNLTSLIGSPAYRAGSPQREALDARIAALAARQEELEGLEARPSGWEWRETGQRLGDWWREQDTAARNTWLRSMNVRLTFDVRGGLTRTIDFGDLQEYERHLRLGSVVERLHTGMS

SEQ ID NO: 12092 - protein, 500 aa, synthetic construct
MRALVVIRLSRVTDATTSPERQLESCQQLCAQRGWDVAGVAEDLDVSGAVDPFDRKRRPNLARWLAFEEQPFDVIVAYRVDRLTRSTRHLQQLVHWAEDHKKLVVSATEAHFDTTTPFAAVVIALMGTVAQMELEAIKERSRSAAHFNIRAGKYRGSLPPWGYLPARVDGVWRLVPDPVQRERILEVYHRVVDNHEPLHLVAHDLNRRGVLSPRDYFAQLRGREPRGREWSATALKRSMTSEAMLGYVTLNGKIVRGDDGAPLVRAEPILTREQLEALRAELIKTSRAKPAVSTPSLLLRVLFCAVCGEPAYKFAGGGRKHPRYRCRSMGFPKHCGNGTVAMAEWDAFCEEQVLDLLGDAERLEKVWVAGSDSAVELAEVNAELVDLTSLIGSPTYRAGSPQREALDARIAALAARQEELEGLEARPSGWEWRETGQRFGDWWRGQDTAAKNTWLRLMNVRLTFDVRGGLTRTIDFGDLQEYEQHLRLGSVVERLHTGMS

SEQ ID NO: 12093 - protein, 500 aa, synthetic construct
MRALVVIRLSRVTDATTSPERQLESCQQLCAQRGWDVVGVAEDLDVSGAVDPFDRKRRPNLARWLAFEEQPFDVIVAYRVDRLTRSVRHLQQLVHWAEDHKKLVVSATEAHFDTTTPFAAVVIALMGTVAQMELEAIKERSRSAAHFNIRAGKYRGSLPPWGYLPTRVDGEWRLVPDPVQRERILEVYRRVVDNHEPLHLVAHDLNRRGVLSPKDYFAQLRGREPQGRRWSATALKRSMISEAMLGYATLNGKTVRDEDGAPLVRAEPILTRVQLEALRAELAKTSRAKPAVPTPSLLLRVLFCAVCGEPAYKFAGGGRRHPRYRCRSMGFPKHCGNGTVAMAEWDAFCEEQVLDLLGDAERLEKVWVAGSDSAVELAEVNAELVDLTSLIGSPAYRAGSPQREALDARIAALAARQEELEGLEARPSGWEWRGTGQRFGDWWREQNTAAKNTWLRSMNVRLTFDVRGGLTRTIDFGDLQEYEQHLRSGSVVERLHTGMS

SEQ ID NO: 12094 - protein, 500 aa, synthetic construct
MRALVVIRLSRVTDATTSPERQLESCQQLCAQRGWDVVGVAEDLDVSGAVDPFDRKRRPNLARWLAFEVQPFDAIVAYRVDRLTRSIRHLQQLVHWAEDHKKLVVSATEAHFDTTTPFAAVVIALMGTVAQMELEAIKERNRSAAHFNIRAGKYRGSLPPWGYLPTRVDGEWRLVPDPVQRERILEVYHRVVDNHEPLHLVAHDLNRRGVLSPKDYFAQLRGREPRGRKWSATALKRSMTSEAMLGYATLNGKTVRDDDGAPLVRAEPILTREQLEALRAELVKASRAKPAVSTPSLLLRVLYCAVCGEPAYKFAGGGRKHPRYRCRSMGFPKHCGNGTVAMAEWDAFCEEQVLDLLGDAERLEKVWVAGSDSAVELAEVNAELVDLMSLIGSPAYRVGSPQREALDARIAALAARQEELEGLEARPSGWEWRETGQRFGDWWREQDTAAKNTWLRSMNVRLAFDVRGGLTRTIDFGDLQEYERHLRLGNVVERLHTGMS

SEQ ID NO: 12095 - protein, 500 aa, synthetic construct
MRALVVIRLSRVTDATTSPERQLESCQQLCAQRGWDVVGVAEDLDVSGAVDPFDRKRRPNLARWLAFEEQPFDAIVAYRVDRLARSIRHLQQLVHWAEDHKKLVVSATEAHFDTTTPFAAVVIALMGTVAQMELEAIKERSRSAAHFNIRAGKYRGSLPPWGYLPARVDGEWRLVPDPVQRERILEVYHRVVDNHEPLHLVAHDLNRRGVLSPKDYFAQLQGREPQGRKWSATALKRSMISEAMLGYATLNGKIVRDDDGAPLVRAEPILTREQLEALRAEFVKTSRAKPAVSTPSLLLRVLFCAVCGEPAYKFAGGGRKHPRYRCRSVGFPKHCGNGTVAMAEWDAFCEEQVLNLLGDAERLEKVWVAGSDSAVELAEVNAELVDLTSLIGSPAYRAGSPQREALDARIAALAARQEELEGLEARPSGWEWRETGQRFGDWWREQDTAAKNTWLRSMNVRLTFDVRGGLTRTIDFGDLQEYEQHLRLGGVVERLHTGVS

SEQ ID NO: 12096 - protein, 500 aa, synthetic construct
MRALVVIRLSRVTDATTSPERQLESCQQLCAQRGWDVVGVAEDLDVSGAVDPFDRKRRPNLARWLAFEEQPFDVIVAYRVDRLTRSVRHLQQLVHWAEDHKKLVVSATEAHFDTTTPFAAVVIALMGTVAQMELEAIKERSRSAAHFNIRAGKYRGSLPPWGYLPTRVDGEWRLAPDPVQRERILEVYHRLVDNHEPLHLVAHDLNRRGVLSPRDYFAQLRGREPQGRKWSATALKRSMISEAMLGYATLNGRTVRDDDGAPLVRAEPILTREQLEALRAELVKTPRAKPAVSTPSLLLRVLFCAVCGEPAYKFAGGGRKHPRYRCRSMGFPKHCGNGTVATAEWDAFCEEQVLDLLGDTERLEKVWVAGSDSAIELAEVNAELVDLTSLIGSPAYRAGSPQREALDARIAALAARQEELEGLEARPSGWEWRETGQRFGDWWREQDTAAKNTWLRSMNVRLTFDVRGGLTRTIDFGDLQEYEQHLRLGNAVERLHTGMS

SEQ ID NO: 12097 - protein, 500 aa, synthetic construct
MRALVVIRLSRVTDATTSPERQLESCQQLCAQRGWEVVGVAEDLDVSGAVDPFDRKRRPNLARWLAYEEQPFDVIVAYRVDRLTRSTRHLQQLVHWAEDHKKLVVSATEAHFDTTTPFAAVVIALMGTVAQMELEAIKERSRSAAHFNIRAGKYRGSLPPWGYLPTRVDGEWRLVPDPVQRERILEVYHRVVVNHEPLHLVAHDLNRRGVLSPKDYFAQLRGREPQGRKWSATALKRSMISEAMLGYATLNGKTVRGDDGAPLVRAEPILTREQLEALRAELVKTSRAKPAVSTPSLLLRVLFCAVCGEPAYKFAGGGRKHPRYRCRSMGFPKHCGNGTVAMAEWDAFCEEQVLGLLGDAERLEKVWVAGSDSAVGLAEVNAELVDLTSLIGSPAYRAGSPQREALDARIAALAARQEELEGLEARPSGWEWRGTGQRFGDWWREQDTAVKNTWLRSMNVRLTFDVRGGLTRTIDFGDLQEYEQHLRSGSVVERLHTRMS

SEQ ID NO: 12098 - protein, 500 aa, synthetic construct
MRALVVIRLSRVTDATTSPERQLESCQQLCAQRGWDVVGVAEDLDVSGAVDPFDRKRRPNLARWLAFEEQPFDVIVAYRVDRLTRSTRHLQQLVHWAEDHKKLVVSATEAHFDTTTPFAAVVIALMGTVAQMELEAIKERNRSAAHFNIRAGKYRGSLPPWGYLPTRVDGEWRLVPDPVQRERILEVYHRVVDNHEPLHLVAHDLNRRGVLSPRDYFARLRGREPRGRKWSATALKRSMTSEAMLGYATLNGKTVRDDDGAPLVRAEPILTREQQEALRAELVKTSRAKPAVSTPSLLLRVLFCAVCGEPAYKFSGGGRKHPRYRCRSMGFPKHCGNGTVAMAEWDAFCEEQVLDLLGDAERLEKVWVAGSDSAVELAEVNAELVDLTSLIGSPAYRAGSPQREALDARIAALAARQAELEGLEARPSGWEWRKTGQGFGDWWREQDTAAKNTWLRSMSVRLTFDVRGGLTRTIDFGDLQEYEQHLRLGSVVERLHTGMS

SEQ ID NO: 12099 - protein, 500 aa, synthetic construct
MRALVVIRLSRVTDATTSPERQLESCQQLCAQRGWDVVGVAEDLDVSGAVDPFDRKRRPNLARWLAFEEQPFDVIVAYRVDRLTRSTRHLQQLVHWAEDHKKLVVSATEAHFDTTTPFAAVVIALMGTVAQMELEAIKERNRSAAHFNIRAGKYRGSLPPWGYLPTRVDGEWRLAPDPVQRERILEVYHRVVDNHEPLHLVAHDLNRRGVLSPKDYFAQLRGREPQGRKWSATALKRSMTSEAMLGYATLNGKTVRDDDGAPLVRAEPILTREQLEALRAELVKTSRAKPAVSTPSLLLRVLFCAVCGEPAYKFAGGGRKHPRYRCRSMGFPKHCGNGTVAMAEWDAFCEEQVLDLLGDAERLEKVWVAGSDSAVELVEVNAELVDLTSLIGSPAYRAGSPQREALDARIAALAARQEELEGLEARPSDWEWRETGQRFGDWWREQDTAAKNSWLRSMNVRLTFDVRGGLTRTIDFGDLQEYEQHLRLGSVVERLHTGMS

SEQ ID NO: 12100 - protein, 500 aa, synthetic construct
MRALVVIRLSRVTDATTSPERQLESCQQLCAQRGWDVVGVAEDLDVSGAVDPFDRKRRPNLARWLAFEEQPFDVIVAYRVDRLTRSIRHLQQLVHWAEDHKKLVVSATEAHFDMTTPFAAVVIALMGTVAQMELEAIQERNRSAAHFNIRAGKYRGSLPPWGYLPTRVDGEWRLAPDPVQRERILEVYHRVVDNHEPLNLVAHDLNRRGVLSPKDYFAQLQGREPQGRKWSATALKRSMISEAMLGYATLNGKTVRDDDGAPLVRAEPILTREQQEALRAELVKTSRAKPAVSAPSLLLRVLFCAVCGEPAYKFAGGGRKHPRYRCRSMGFLKHCGNGTVAMVEWDAFCEEQVLNLLGDAERLEKVWVAGSDSAVELAEVNAELVDLTSLIGSPAYRAGSPQREALDARIAALAARQGELEGLEARPSGWEWRGTGQRFGDWWREQDTAAKNAWLRSMNVRLTFDVRGGLTRTIDFGDLQEYEQHLRLGSVVERLHTGMS

SEQ ID NO: 12101 - protein, 500 aa, synthetic construct
MRALVVIRLSRVTDATTSPERQLESCQQLCAQRGWDVVGVAEDLDVSGAVDPFDRKRRPNLARWLAFEEQPFDVIVAYRVDRLARSIRHLQQLVHWAEDHKKLVVSATEAHFDTTTPFAAVVIALMGTVAQMELEAIKERSRSAAHFNIRAGKYRGSLPPWGYLPTRVDGEWRLAPDPVQRERILEVYHRVVDNHEPLHLVAHDLNRRGVLSPKDYFAQLQGREPQGRKWSATALKRSMISVAMLGYATLNGKTVRDDDGAPLVRAEPILTRGQLEALRAELVKTSRAKPAVSTPSLLLRVLFCAVCGEPAYKFTGGGRKHPRYRCRSMGFPKHCGNGTVAMAEWDAFCEEQVLGLLGDAERLEKVWVAGSDSAVELAEVNAELVDLTSLIGSPAHRAGSPQREAIDARIAALAARQEELEGLEARPSGWEWRETGQRFGDWWREQDTAAKNTWLRSMNVRLTFDVRGGLTRTIDFGDLQEYEQHLRLGSVVERLHTGMS

SEQ ID NO: 12102 - protein, 500 aa, synthetic construct
MRALVVIRLSRVTEATTSPERQLESCQQLCAQRGWDVVGVAEDLDVSGAVDPFDRKRRPNLARWLAFEERPFDVIVAYRVDRLTRSIRHLQQLVHWAEDHKKLVVSATEAHFDMTTPFAAVVIALMGTVAQMELEAIKERSRSAAHFNIRAGKYRGSLPPWGYLPARVDGEWRLAPDPVQRERILEVYHRVVDNHESLHLVAHDLNRRGVLSPKDYFAQLQGREPQGRKWSATALKRSMTSEAMLGYATLNGKTVRDDDGAPLVRAEPILTREQLEALRAELVKTSRAKPAVSTPSLLLRVLFCAVCGEPAYKFAGGGRRHPRYRCRSMGFPKHCGNGTVAMAEWDAFCEEQVLDLLGDAERLEKVWVAGSDSAVELAEVNAELVDLASLIGSPAYRAGSPQREALDARIAALAARQEELEGLEARPSGWEWRETGQRFGDWWREQDTAAKNTWLRSMNVRLTFDVRGGLTRTIDFGDLQEYEQHLRLGSVVERLRTGMS

SEQ ID NO: 12103 - protein, 500 aa, synthetic construct
MRALVVIRLSRVTDTTTSPERQLESCQQLCAQRGWDVVGVAEDLDVSGAVNPFDRERRPNLARWLAFEEQPFDVIVAYRVDRLTRSTRHLQQLVHWAEDHKKLVVSATEAHFDTTTPFAAVVIALMGTVAQMELEAIRERNRSAAHFNIRAGKYRGSLPPWGYLPTRVDGEWRLAPDPVQRERILEVYHRVVDNHEPLYLVAHDLNRRGVLSPRDYFAQLQGREPQGRKWSATALKRSMISEAMLGYATLNGKTVRDDDGAPLVRAEPILTREQLEALRAELAKTSRAKPAVSTPSLLLRVLFCAVCGEPAYKFAGGGRKHPRYRCRSMGFPKHCGNGTVAMAEWDAFCEEQVLNLLGDAERLEKVWVAGSGSAVELAEVNAELMDLTSLIGSPAYRAGSPQREALDARIAALAARQEELEGLEARPSGWEWRETGQRFGDWWREQDTAAKNTWLRSMNVRLTFDVRGGLTRTIDFGDLQEYEQHLRLGSVVERLHTGMS

SEQ ID NO: 12104 - protein, 500 aa, synthetic construct
MRALVVIRLSRVTDATTSPERQLESCQQLCAQRGWDVVGVAEDLDVSGAVDPFDRKRRPNLARWLAFEEQPFDVIVAYRVDRLTRSTRHLQQLVHWAEDHKKLVVSATEAHFDTTTPFAAVVIALMGTVAQMELEAIKERSRSAAHFNIRAGKYRGSLPPWGYLPTRVNGEWRLVPDPVQRERILEVYHRVVDDHEPLHLVAHDLNRRGVLSPKDYFAQLQGREPQGRKWSTTALKRSMTSEAMLGYATLNGKIVRDDDGAPLVRAEPILTREQLEALRAELVKTSRAKPAVSTPSLLLRVLFCAVCGEPAYKFAGGGRKHPRYRCRSMGFPKHCGNGTVAMAEWDAFCEEQVLDLLGDAERLEKVWVAGSDSAVELAEVNAELVDLTSLIGSPAYRAGSPQREALDARIAALAARQEELEGLEARPSGWEWRETGQRFGDWWREQDTAAKNTWLRSMNVRLTFDVRGGLTRTIDFGDLQEYEQHLRLGSVVERLHTGMS

SEQ ID NO: 12105 - protein, 500 aa, synthetic construct
MRALVVIRLSRVTDATTSPERQLESCQQLCAQRGWDVVGVAEDLDASGAVDPFDRKRRPNLARWLAFEEQPFDVIVAYRVDRLARSIRHLQQLVHWAEDHKKLVVSATEAHFDTTTPFAAVVIALMGTVAQMELEAIKERSRSAAHFNIRAGKYRGSLPPWGYLPTRVDGEWRLAPDPVQRERILEVYHRLVDNHEPLHLVAHDLNRRGVLSPRDYFAQLRGREPQGRKWSATALKRSMISEAMLGYATLNGRTVRDDDGAPLVRAEPILTREQLEALRAELVKTSRAKPAVSTPSLLLRVLFCAVCGEPAYKFAGGGRKHPRYRCRSMGFPKHCGNGTVATAEWDAFCEEQVLDLLGDTERLEKVWVAGSDSAIELAEVNAELVDLTSLIGSPAYRAGSPQREALDACIAALAARQEELEGLEARPSGWEWRETGQRFGDWWREQDTAAKNTWLRSMNVRLTFDVRGGLTRTIDFGDLQEYEQHLRLGNAVERLHTGMS

SEQ ID NO: 12106 - protein, 500 aa, synthetic construct
MRALVVIRLSRVTDATTSPERQLESCQQLCAQRGWDVVGVAEDLDVSGAVDPFDRKRRPNLARWLAFEEQPFDVIVAYRVDRLTRSTRHLQQLVHWAEDHKKLVVSATEAHFDTTTPFAAVVIALMGTVAQMELEAIKERSRSAAHFNIRAGKYRGSLPPWGYLPTRVDGEWRLVPDPVQRERILEVYHRVVDNHEPLHLVAHDLNRRGVLSPKDYFAQLQGREPQGRKWSATALKRSMTSEAMLGYATLNGKIVRDDDGAPLVRAEPILTREQLEALRAELVKTSRAKPAVSTPSLLLRVLFCAVCGEPAYKFAGGGRKHPRYRCRSMGFPKHCGNGTVAMTEWDAFCEEQVLNLLGDAERLEKVWVAGSDSAVELAEVNAELVDLTSLIGSPAYRAGSPQREALDARIAALAARQEELEGLEARPSGWEWRETGQRFGDWWREQDTAAKNTWLRSMNVRLTFDVRGGLTRTIDFGDLQEYEQHLRLGSVAERLHTGMS

SEQ ID NO: 12107 - protein, 500 aa, synthetic construct
MRALVVIRLSRVTDATTSPERQLESCQQLCAQRGWDVVGVAEDLDVSGAVDPFDRKRRPNLARWLASEEQPFDVIVAYRVDRLARSIRHLQQLVHWAEDHKKLVVSATEAHFDTTTPFAAVVIALMGTVAQMELEAIKERNRSAAHFNIRAGKYRGSLPPWGYLPTRVDGEWRLVPDPVQRERILEVYHRVVDNHEPLHLVAHDLNWRGVLSPKDYFAQLRGREPRGRKWSATALKRSMISEAMLGYATLNGKTVRDDDGAPLVRAEPILTREQLEALRAELVKTSRAKPAVSTPSLLLRVLFCAVCGEPAYKFSGGGRKHPRYRCRSMGFPKHCGNGTVAMAEWDAFCEEQVLGLLGDAERLEKVWVAGSDSAVELAEVNAELVDLTSLIGSPAYRAGSPQREALDARIAALAARQEELEGLEARPSGWEWRETGQRFGDWWREQDTAAKNTWLRSMNVRLTFDVRGGLTRTIDLGDLQEYEQHLRLGSVVERLHTGMS

SEQ ID NO: 12108 - protein, 500 aa, synthetic construct
MRALVVIRLSRVTDATTSPERQLESCQQLCAQRGWDVVGVAEDLDVSGAVDPFNRKRRPNLARWLAFEEQPFDVIVAYRVDRLTRSIRHLQQLVHWAEDHKKLVVSATEAYFDTTTPFAAVVIALMGTVAQLELEAIKERSRSAAHFNIRAGKYRGSLPPWGYLPTRVDGEWRLAPDPVQRERILEVYHRVVDNHEPLHSVAHDLNRRGVLSPKDYFAQLQGREPQGRKWSATALKRSMTSEAMLGYATLNGKTVRDDDGAPLVRAEPILTREQLEALRAELVKTPRAKPAVSTPSLLLRVLFCAVCGEPAYKFSGGGRKHPRYRCRSMGFPKHCGNGTVAMAEWDAFCEEQVLDLLGDAERLEKVWVAGSDSAVELAEVNAELVDLTSLIGSPAYRAGSPQREALDARIAALAARQEELEGLEARPSGWEWRETGQRFGDWWREQDTAAKNTWLRSMNVRLTFDVRGGLTRTIDFGDLQEYEQHLRLGSVVERLHTGMP

SEQ ID NO: 12109 - protein, 500 aa, synthetic construct
MRALVVIRLSRVTDATTSPERQLESCQQLCTQRGWDVVGVAEDLDVSGAVNPFDRRRRPNLARWLAFEEQPFDVIVAYRVDRLARSIRHLQQLVHWAEDHKKLVVSATEAHFDTTTPFAAVVIALMGTVAQMELEAIKERNRSAAHFNIRAGKYRGSLPPWGYLPTRVDGEWRLVPDPVQRERILEVYRRVVDNHEPLHLVAHDLNRRGVLSPKDYFAQLQGREPQGRKWSATALKRSMTSEAMLGYATLNGKTVRDDDGAPLVRAEPILTREQQEALRAELVKTSRAKPAVSTPSLLLRVLFCAVCGEPAYKFAGGGRKHPRYRCRSMGFPKHCGNGTVAMAEWDSFCEEQVLGLLGDAERLEKVWVAGSDSAVELAEVNAELVDLTSLIGSPAYRAGSPQREALDARIAALAARQEELEGLEARPSGWEWRGTGRRFGDWWREQDTAAKNTWLRSMNVRLTFDVRGGLTRTIDFGDLQEYEQHLRLGSVVERLHTGMS

SEQ ID NO: 12110 - protein, 500 aa, synthetic construct
MRALVVIRLSRVTDATTSPERQLESCQQLCAQRGWVVVGVAEDLDVSGAVDPFDRKRRPNLARWLAFEEQPFDVIVAYRVDRLTRSTRHLQQLVHWAEDHKKLVVSATEAHFDTTTPFAAVVIALMGTVAQMELEAIKERSRSAAHFNIRAGKYRGSLPPWGYLPTRVDGEWRLAPDPVQRERILEVYHRVVDNHEPLHLVAHDLNRRGVLSPKDYFAQLRGREPQGRKWSATALKRSMISEAMLGYATLNGKTVRDDDGAPLVRAEPILTREQLEALRAELVKTSRAKPAVSTPSLLLRVLFCAVCGEPAYKFAGGERKHPRYRCRSMGFPKHCGNGTVAMAEWDAFCEEQVLDLLGDAERLEKVWVAGSDSAVELAEVDAELVGLTSLIGSPAYRAGSPQREALDARIAALAARQEELEGLEARPSGWEWRETGQRFGDWWREQDTAAKNTWLRSMNVRLTFDVRGGLTRTIDFGDLREYEQRLRLGSVVERLHTGMS

SEQ ID NO: 12111 - protein, 500 aa, synthetic construct
MRALVVIRLSRVTDATTSPERQLESCQQLCAQRGWDVVGVAEDLDVSGAVDPFDRKRRPNLARWLAFEEQPFDVIVAYRVDRLARSIRHLQQLVHWAEDHKKLVVSATEAHFDTTTPFAAVVIALMGTVAQMELEAIKERSRSAAHFNIRAGKYRGSLPPWGYLPTRVDGEWRLAPDPVQRERILEVYHRLVGNHEPLHLVAHDLNRRGVLSPRDYFAQLRGREPQGRKWSATALKRSMISEAMLGYATLNGRTVRDDDGAPLVRAEPILTREQLEALRAELVKTSRAKPAVSTPSLLLRVLFCAVCGEPAYKFAGGGRKHPRYRCRSMGFPKHCGNGTVATAEWDAFCEEQVLDLLGDTERLEKVWVAGSDSAIELAEVNAELVDLTSLIGSPAYRAGSPQREALDARIAALAARQEELEGLEARPSGWEWRETGQRFGDWWREQDTAAKNTWLRSMNVRLTFDVRGGLTRTIDFGDLQEYEQHLRLGNAVERLHTGMS

SEQ ID NO: 12112 - protein, 500 aa, synthetic construct
MRALVVIRLSRVTDATTSPERQLESCQQLCAQRGWDVVGVAEDLDVSGAVDPFDRKRRPNLARWLAFEVQPFDVIVAYRVDRLARSIRHLQQLVHWAEDHKKLVVSATEAHFDTTTPFAAVVIALMGTVAQMELEAIKERNRSAAHFNIRAGKYRGSLPPWGYLPARVDGEWRLVPDPVQRERILEVYHRVVDNHEPLHLVAHDLNRRGVLSPRDYFAQLRGREPQGRKWSATALKRSMISEAMLGHTTLNGMTVRDDNGAPLVRAEPILTREQLEALRAELAKTSRAKPAVSTPSLLLRVLFCAVCGEPAYKFAGGGRKHPRYRCRSMGFPKHCGNGTVAMAEWDAFCEEQVLDLLGDAERLEKVWVAGSDSAVELAEVNAELVDLTSLIGSPAYRASSPQREALDARIAALAARQEELEGLEARPSGWEWRETGQRFGDWWREQDTAAKNTWLRSMNVRLTFDVRGGLTRTIDFGDLQEYEQHLRLGSLVKRLHTGMS

SEQ ID NO: 12113 - protein, 500 aa, synthetic construct
MRALVVIRLSRVTDATTSPERQLESCQQLCAQRGWDVVGVAEDLDVSGAVDPFDRKRRPNLARWLAFEEQPFDVIVAYRVDRLARSIRHLQQLVHWAEDHKKLVVSATEAHFDTTTPFAAVVIALMGTVAQMELEAIKERSRSAAHFNIRAGKYRGSLPPWGYLPARVDGEWRLVPDPVQRERILEVYHRVVDNHEPLYLVAHDLNRRGVLSPKDYFAQLRGREPQGREWSATALKRSMISKAMLGYATLNGKTVRGDDGAPLVRAEPILTREQQEALRAELVKTSRAKPAVSTPSLLLRVLFCAVCGEPAYKFAGGGRKHPRYRCRSMGFPKHCGNGTVAMAEWDAFCEEQVLGLLGDVERLEKVWVAGSDSAVELAEVNAELVDLTSLIGSPAYRAGSPQREALDARIAALAARQEELEGLEARPSGWEWRKTGQRFGDWWREQDTAAKNTWLRSMNVRLTFDVRGGLTRTIDFGDLQEYEQHLRLDSVVERLHTGMS

SEQ ID NO: 12114 - protein, 500 aa, synthetic construct
MRALAVIRLSRVTDATTSPERQLETCQQLCAQRGWDVVGVAEDLDVSGAVDPFDRKRRPNLARWLAFEEQPFDVIVAYRVDRLVRSIRHLQQLVHWAEDHKKLVVSATEAHFDTTTPFAAVVIALMGTVAQMELEAIKERNRSAAQFNIRAGKYRGSLPPWGYLPARVDGEWRLVPDPVQRERILEVYHRVVDNHEPLHLVAHDLNRRGVLSPRDYFAQLQGREPQGRKWSATALKRSMISGAMLGYATLNGKTVRVDDGAPLVRAEPILTREQLEALRAELVKTSRTEPAVSTPSLLLRVLFCAVCGEPAYKFSGGGRKHPRYRCRSMGFPKHCGNGTVAMAEWDAFCEEQVLNLLGDAERLEKVWVAGSDSAVELAEVNAELVDLTSLIGSPAYRAGSPQREALDARIAALAARQEELEGLEARPSGWEWRETGQRFGDWWREQDTAAKNTWLRSMNVRLTFDVRGGLTRTIDFGDLQGYEQHLRLGSVVKRLHTGMS

SEQ ID NO: 12115 - protein, 500 aa, synthetic construct
MRALVVIRLSRVTDATTSPERQLESCQQLCAQRGWDVVGVAEDLDVSGAVDPFDHKRRPNLARWLAFEEQPFDVIVAYRVDRLTRSTRHLQQLVHWAEDHKKLVVSATEAHFDTTTPFAAVVIALMGTVAQMELEAIKERSRSAAHFNIRAGKYRGSLPPWGYLPTRVDGEWRLAPDPVQRERILEVYHRVVDNHEPLHLVAHDLNRRGVLSPKDYFAQLQGREPQGRKWSATALKRSMISEAMLGYATLNGKTVRDDDGAPLVRAEPILTREQQEALRAELVKTSRAKPAVSTPSLLLRVLFCAVCGEPAYKFAGGGRKHPRYRCRSMGFPKHCGNGTVAMAEWDAFCEEQVLDLLGGVERLEKVWVAGSGSAAELAEVNAELVDLTSLIGSPAYRAGSPQREALDARIAALAARQEELEGLEARPSGWEWRETGQRFGDWWREQDTAAKNTWLRSMNVRLTFDVRGGLTRTIDFGDLQEYEQHSRLGSVVERLHTGMS

SEQ ID NO: 12116 - protein, 500 aa, synthetic construct
MRALVVIRLSRVTDATTSPERQLESCRQLCAQRGWDVVGVAEDLDVSGAVDPFDRKRRPNLARWLAFEEQPFDVIVAYRVDRLTRSTRHLQQLVHWAEDHKKLVVSATEAHFDTTTPFAAVVIALMGTVAQMELEAIKERNRSAAHFNIRAGKYRGSLPPWGYLPTRVDGEWRLVPDPVQRERILEVYHRVVVNHEPLHLVAHDLNRRGVLSPKDYFAQLQGREPQGRKWSATALKRSMISEAMLGHATLNGKIVRDDDGAPLVRAEPILTREQLEALRAELVKTSRAKPAVSTPSLLLRVLFCAVCGEPAYKFAGGGRKHPRYRCRSMGFPKHCGNGTVAMAEWDAFCEEQVLDLLGDAERLEKVWVAGSDSAVELAEVNAELVDLTSLIGSPAYRAGSPQREALDARIAALAARQEKLEGLEARPSGWEWRETGQRFGDWWREQDTAAKNTWLRSMNVRLTFDVRGGLTRTIDFGDLQEYEQHLRLGSVVERLHTGMS

SEQ ID NO: 12117 - protein, 500 aa, synthetic construct
MRALVVIRLSRVTDATTSPERQLESCQQLCAQRGWDVVGVAEDLDVSGAVDPFDRKRRPNLARWLAFEEQPFDVIVAYRVDRLTRSTRHLQQLVHWAEDHKKLVVSATEAHFDTTTPFAAVVIALMGTVAQMELEAIKERNRSAAHFNIRAGKYRGSLPPWGYLPTRVDGEWRLVPDPVQRGRILEVYHRVVDNHEPLHLVAHDLNRRGVLSPKDYFAQLQGREPQGRKWSVTALKRSMISEAMLGYATLNGKTVRDDDGAPLVRAEPILTREQQEALRAELAKTSRAKPAVSTPSLLLRVLFCAVCGEPAYKFSGGGRKHPRYRCRSMGFLKHCGNGTVAMAEWDAFCEEQVLDLLGDAERLEKVWVAGSDSADELAEVNKELVDLTSLIGSLAYRAGSPQREALDARIAALAARQEELEGLEARPSGWEWRGTGQRFGDWWRELDTAAKNTWLRSMNVRLTFDVRDGLTRTIDFGALQEYEQHLRLGSVVERSHTGMS

SEQ ID NO: 12118 - protein, 500 aa, synthetic construct
MRALVVIRLSRVTDATTSPERQLESCQQLCAQRGWDVVGVAEDLDVSGAVDPFDRKRRPNLARWLAFEEQPFDVIVAYRVDRLTRSVRHLQQLVHWAEDHKKLVVSATEAHFDTTTPFAAVVIALMGTVAQMELEAIKERSRSAAHFNIRAGKYRGSLPPWGYLPARVDGEWRLVPDPVQRERILEVYHRVVDNHEPLHLVAHDLNRRGVLSPKDYFAQLRGREPQGRKWSATALKRSMISVAMLGYATLCGKTVRDDDGAPLVRAEPILTREQLEALRAELVKTSRAKPAVSTPSLLLRVLFCAVCGEPAYKFAGGGRKHPRYRCRSMGFPKHCGNGTVAMAEWDAFCEEQVLNLLGDAERLEKVWVAGSDSAVELAEVNAELVDLTSLIGSPAYRAGSPQREALDARIAALAARQEELEGLEARPSGWEWRETGQRFVDWWREQDTAAKNAWLRSMNVRLTFDVRGGLTRTIDFGDLQEYEQHLRLGGVAERLHAGMS

SEQ ID NO: 12119 - protein, 500 aa, synthetic construct
MRALVVIRLSRVTDATTSPERQLESCQQLCAQRGWDVVGVAEDLDVSGAVDPFDRKRRPNLARWLAFEEQPFDVIVAYRVDRVTRSVRHLQQLVHWAEDHKKLVVSATEAHFDTTTPFAAVVIALMGTVAQMELEAIKERNRSAAHFNIRAGKYRGSLPPWGYLPTRVDGEWRLVPDPVQRERILEVYHRVVDNHEPLHLVAHDLNRRGVLSPRDYFAQLRGREPRGRKWSATALKRSMISEAMLGYATLNGKTVRDDDGAPLVRAEPILTREQLEALRVELVKTSRAKPAVSTPSLLLRVLFCAVCGEPAYKFAGGERRHPRYRCRSMGFPKHCGNGTVAMAEWDAFCEEQVLDLLGDAERLEKVWVAGSDSAVELAEVNAELVDLTSLIGSPAYRAGSPQREALDARTAALAARQEELEGLEARPSGWEWRETGQRFRDWWREQDTAAKNTWLRSMNVRLTFDVRGGLTRTIDFGDLQEYEQHLRLGGVVERLHTGMS

SEQ ID NO: 12120 - protein, 500 aa, synthetic construct
MRALVVIRLSRVTDTTTSPERQLESCQQLCAQRGWDVVGVAEDLDVSGAVDPFDRRRRPNLARWLAFEEQPFDVIVAYRVDRLARSVRHLQQLVHWAEDHEKLVVSATEAHFDTTTPFAAVVIALMGTVAQMELEAIKERSRSAAHFNIRAGKYRGSLPPWGYLPARVDGEWRLVPDPVQRERILEVYHRVVDNHEPLHLVAHDLNRRGVLSPKDYFAQLRGREPQGRRWSATALKRSMISGAMLGYATQNGKTVRDDDGAPLVRAEPILTREQLEALRAELVKSSRAEPAVSTPSLLLRVLFCAVCGEPAYKFTGGGRKHPRYRCRSMGFPKHCGNGTVAMAEWDAFCEEQVLNLLGDAERLEKVWVAGSDSAVELAEVNAELVDLTSLIGSPAYRAGSPQREALDARIAALAARQEELEGLEARPSGWEWRGTGQRFGDWWREQDTAAKNTWLRSMNVRLTFDVRGGLTRTIDFGDLQEYEQHLRLGSVVERLYTGMS

SEQ ID NO: 12121 - protein, 500 aa, synthetic construct
MRALVVIRLSRVTDATTSPERQLESCQQLCAQRGWDVVGVAEDLDVSGAVDPFDRKRRPNLARWLAFEEQPFDVIVAYRVDRLTRSTRHLQQLVHWAEDHKKLVVSATEAHFDTTTPFAAVVIALMGTVAQMELEAIKERSRSAAHFNIRAGKYRGSLPPWGYLPTRVDGEWRLVPDPVQRERILEVYHRVVDNHEPLHLVAHDLNRRGVLSPRDYFAQLQGREPQGRKWSATALKRSMISEAMLGYATLNGKTVRDDDGAPLVRAEPILAREQLEALRAELVKTSRAKPAVSTPSLLLRVLFCAVCGEPAYKFTGGGRKHPRYRCRSMGFPKHCGNGTVAMAEWDAFCEEQVLGLLGDAERLEKVWVAGSDSAVELAEVNAELVDLTSLIGSPAYRAGSPQREALGARIAALAARQEELEGLEARPSGWEWRGTGQRFGDWWREQDTAAKNTWLRSMNVRLTFDVRGGRTRTIDFGDLQEYKQHLRSGGVVERLHTGMS

SEQ ID NO: 12122 - protein, 500 aa, synthetic construct
MRALVVIRLSRVTDATTSPERQLESCQQLCAQRGWDVVGVAEDLDVSGAVDPFDRKRRPNLARWLAFEEQPFDVIVAYRVDRLTRSTRHLQQLVHWAEDHKKLVVSATEAHFDTTTPFAAVVIALMGTVAQMELEAIKERSRSAAHFNIRAGKYRGSLPPWGYLPARVDGEWRLVPDPVQRERILEVYHRVVDNHEPLHLVAHDLNRRGVLSPKDHFAQLQGREPQGRKWSATALKRSMISGAMLGYATLSGKTVRDDDGAPLVRAEPILTREQQEALRAELAKTSRAKHAVSTPSLLLRVLFCAVCGEPAYKFAGGGRKHPRYRCRSMGFPKHCGNGTVAMAEWDAFCEEQVLNLLGDAERLEKVWVAGSDSAVELAEVNAELVDLTSLIGSPAYRAGSPQREALDARIAALAARQEELEGLEARPSGWEWRETGQRFGDWWREQDTAAKNTWLRSMNVRLTFDVRGGLTRTIDFGDLQEYEQHLRLGSVAERLHTGMS

SEQ ID NO: 12123 - protein, 500 aa, synthetic construct
MRALVVIRLSRVTDATTSPERQLESCQQLCAQRGWDVVGVAEDLDVSGAVDPFDRKRRPNLARWLAFEEQPFDVIVAYRVDRLARSIRHLQQLVHWAEDHKKLVVSATEAHFDTTTPFAAVVIALMGTVAQMELEAIKERNRSAAHFNIRAGKYRGSLPPWGYLPTRVDGEWRLAPDPVQRERILEVYHRVVDNHEPLHLVAHDLNRRGVLSPKDYFAQLRGREPQGRKWSATALKRSMISEAMLGYATLNGKTVRDDDGAPLVRAEPILTREQLEALRAELVKTSRVKPAVSTPSLLLRVLFCAVCGEPAYKFAGGGRKHPRYRCRSMGFPKHCGNGTVAMAEWDAFCEEQVLNLLGDAERLEKVWVAGSDSAVELAEVNAELMDLTSLIGSPAYRAGSPQREALDARIAALAARQEELEGLEARPSGWEWRETGQRFRDWWREQDTAAKNTWLRSMNVRLTFDVRGGLTRTIDFGDLQEYEQHVRLGSVVERSHTGMS

SEQ ID NO: 12124 - protein, 500 aa, synthetic construct
MRALVVIRLSRVTDATTSPERQLESCQQLCAQRGWDVVGVAEDLGVSGAVDPFDRQRRPNLARWLASEEQPFDVIVAYRVDRLARSIRHLQQLVHWAEDHKKLVVSATEAHFDTTTPFAAVVIALMGTVAQMELEAIKERNRSAAHFNIRAGKYRGSLPPWGYLPTRVDGEWRLVPDPVQRERILEVYHRVVDNHEPLHLVAHDLNRRGVLSPKDYFAQLQGREPQGRKWSATALKRSMISEAMLGYATLNGKTVRDDDGAPLVRAEPILTREQREALRAELAKTSRAKPAVSTPSLLLRVLFCAVCGEPAYKFAGGGRKHPRYRCRSMGFPKHCGNGTVALAEWDAFCEEQVLGLLGDAERLERVWVAGSDSAVELAEVNAELVDLASLIGSPAYRAGSPQREALDARIAALAARQEELEGLEARPSGWEWRETGQRFGDWWREQDTAAKNTWLRSMNVRLTFDVRGGLTRTIDFGDLQEYEQHLRLGSVVERLHTGMS

SEQ ID NO: 12125 - protein, 500 aa, synthetic construct
MRALVVIRLSRVTDATTSPERQLESCQQLCAQRGWDVVGVAEDLDVSGAVDPFDRKRRPNLARWLAFEEQPFDVIVAYRVDRLTRSTRHLQQLVHWAEDHKKLVVSATEAHFDTTTPFAAVVIALMGTVAQMELEAIKERNRSAAHFNIRAGKYRGSLPPWGYLPTRVDGEWRLVPDPVQRERILEVYRRVVDNHEPLHLVAHDLNRRGVLSPKDYFAQLQGREPQGRKWSATALKRSMISEAMLGYATLNGKTVRDDDGAPLVRAEPILTREQLEALRAELVKTSRAKPAVSTPSLLLRVLFCAVCGEPAYKFAGGGRKHPRYRCRSMGFPKHCGNGTVAMAEWDAFCEEQILDLLGDAERLEKVWVAGSDSAIELAEVNAELVDLTSLIGSPAYRAGSPQREALDARIAALAARQEELEGLEARPSGWKWRETGQRFGDWWREQDTAAKNTWLRSMSVRLTFDVRGGLTRTIDFGDLQEYEQHLRLGSVVERLHTGMS

SEQ ID NO: 12126 - protein, 500 aa, synthetic construct
MRALVVIRLSRVTDATTSPERQLESCQQLCAQRGWDVVGVAEDLDVSGAVDPFDRKRRPNLARWLAFEEQPFDVIVAYRVDRLTRSTRHLQQLVHWAEDHKKLVVSATEAHFDTTTPFAAVVIALMGTVAQMELEAIKERTRSAAHFNIRAGKYRGSLPPWGYLPARVDGEWRLAPDPVQRERILEVYHRVVDNHEPLHLVAHDLNRRGVLSPKDYFAQLQGREPQGRKWSATALKRSMISVAMLGYATLNGKTVRDDDGAPLVRAEPILTREQLEALRAELVKTSRAKPAVSTPSLLLRVLFCAVCGEPAYKFAGGGRKHPRYRCRSMGFPKHCGNGTVAMAEWDAFCEEQVLNLLGDAERLEKVWVAGSDSAVELAEVNAELVDLSSLIGSPAYRAGSPQREALDARIAALAARQEELEGLEARPSGWEWRETGQRFGDWWREQDTVAKNTWLRSMNVRLTFDVRGGLTRSIDFGDLREYEQHLRLGSVVERLHTGMS

SEQ ID NO: 12127 - protein, 500 aa, synthetic construct
MRALVVIRLSRVTDATTSPERQLESCQQLCAQRGWDVVGVAEDLDVSGAVDPFDRKRRPNLARWLAFEEQPFDVIVAYRVDRLTRSVQHLQQLVHWAEDHKKLVVSATEAHFDTTTPFAAVVIALMGTVAQMELEAIRERNRSAAHFNIRAGKYRGSLPPWGYLPARVDGEWRLVPDPVQRERILEVYHRVVDNHEPLHSVAHDLNRRGVLSPKDYFAQLRGREPQGRKWSATALKRSMISEAMLGYATLNGKTVRDDDGAPLVRAEPILTREQLEALRAVLVKTSRAKPAVSTPSLLLRVLFCAVCGGPAYKFAGGGRKRPRYRCRSMGFPKHCGNGTVAMAEWDAFCEEQVLDLLGDAERLEKVWVAGSDSAVELAEVNAELVDLTSLIGSPAYRAGSPQREALDARIAALAARQEELEGLEARPSGWEWRGTGQRFGDWWREQDTAAKNTWLRSMNVRLTFDVRGGLTRTIDFGDLREYEQHLRLGSVVERLHTGMS

SEQ ID NO: 12128 - protein, 500 aa, synthetic construct
MRALVVIRLSRVTDATTSPERQLESCQQLCAQRGWDVVGVAEDLDVSGAVDPFDRKRRPNLARWLAFEEQPFDVIVAYRADRLTRSIRHLQQLVHWAEDHKKLVVSATEAHFDTTTPFAAVVIALMGTVAQMELEAIKERNRSAAHFNIRAGKYRGSLPPWGYLPTRVDGEWRLVPDPVQRERILEVYHRVVDNHEPLHLVAHDLNRRGVLSPRDYFAQLRGREPRGRKWSATALKRSMISEAMLGYATLNGKTVRDDDGAPLVRAEPILTREQQEALRAELVKTSRAKPAVSTPSLLLRVLFCAVCGEPAYKFAGGGRKHPRYRCRSMGFPKHCGNGTVAMAEWDAFCEEQVLDLLGDAERLEKVWVAGSDSAVELAEVNAELVDLTSLIGSPAYRTGSPQREALDARIAALAARQEELEGLGARPSGWEWRETGQRFGDWWREQDTAAKNTWLRSMNVRLTFDVRGGPTRTIDFGDLLEYEQHLRLGSVVERLRTGMS

SEQ ID NO: 12129 - protein, 500 aa, synthetic construct
MRALVVIRLSRVTDATTSPERQLESCQQLCAQRGWDVVGVAEDLDVSGAVDPFDRKRRPNLARWLAFEEQPFDVIVAYRVDRLTRSTRHLQQLVHWAEDHKKLVVSATEAHFDTTTPFAAVVIALMGTVAQMELEAIKERSRSAAHFNIRAGKYRGSLPPWGYLPARVDGEWRLVPDPVQRERILEVYHRVVDNHEPLHLVAHDLNRRGVLSPKDYFAQLQGREPQGRKWSATALKRSMISGAMLGYATLGGKTVRDDDGAPLVRAEPILTREQQEALRAELAKTSRAKPAVSTPSLLLRVLFCAVCGEPAYKFTGGGRKHPRYRCRSMGFPKHCGNGTVAMAEWDAFCEEQVLDLLGDAERLEKVWVAGSDSAVELAEVNAELVDLTSLIGSPAYRAGSPQREALDARIAALAARQGELEGLEARPSGWEWRETGQRFGDWWREQDAAAKNTWLRSMNVRLTFDVRGGLTRTIDFGDLQEYGQHLCLGSAVERLHTGMS

SEQ ID NO: 12130 - protein, 500 aa, synthetic construct
MRALVVIRLSRVTDATTSPERQLESCQQLCAQRGWDVVGVAEDLDVSGAVDPFDRKRRPNLARWLAFEEQPFDAIVAYRVDRLTRSIRHLQQLVHWAEDHKKLVVSATEAHFDTTTPFAAVVIALMGTVAQMELEAIKERNRSAAHFNIRAGKYRGSLPPWGYLPTRVDGEWRLAPDPVQRERILEVYHRVVDNHEPLHLVAHDLNRRGVLSPKDYFAQLQGREPQGRKWSATALKRSMTSEAMLGYATLNGKTVRDDDGAPLVRAEPILTREQLEALRAELVKTSRAKPAVSTPSLLLRVLFCAVCGEPAYKFAGGGRKHPRYRCRSMGFPKHCGNGTVAMAEWDAFCEEQVLGLLGDAERLEKVWVAGSDSAAELAEVNAELVDLTSLIGSPAYRAGSPQREALDARIAALAARQEELEGLGARPSGWEWRETGQRFGDWWREQDTAAKNTWLRSMNVRLTFDVRGGLTRTIDFGDLQEYELHLRLGSVVERLHTGMS

SEQ ID NO: 12131 - protein, 500 aa, synthetic construct
MRALVVIRLSRVTDATTSPERQLESCQQLCAQRGWDVVGVAEDLDVSGAVDPFDRKRRPNLARWLAFEEQPFDVIVAYRVDRLTRSVRHLQRLVHWAEDHKKLVVSATEAHFDTTTPFAAVVIALMGTVAQMELEAIKERSRSAAHFNIRAGKYRGSLPPWGYLPTRVDGEWRLVPDPVQRERILEVYRRVVDNHEPLHLVAHDLNRRGVLSPKDYFAQLQGREPQGRKWSATALKRSMISEAMLGYATLNGKTVRDDYGAPLVRAEPILTREQQEALRAELVKASRAKPAVSTPSLLLRVLFCAVCGEPAYKFAGGGRKHPRYRCRSMGFPKHCGNGTVAMAEWDAFCEEQVLGLLGDAEHLEKVWVAGSDSAVELAEVNAELVDLTSLIGSPAYRAGSPQREALDARIALLAARQEELEGLEARPSGWEWRETGQRFGDWWREQDTAAKNTWLRSMNVRLTFDVRSGLTRTIDFGDLQEYEQHLRLGSVVERLHTGTS

SEQ ID NO: 12132 - protein, 500 aa, synthetic construct
MRALVVIRLSRVTDATTSPERQLESCQQLCAQRGWDVVGVAEDLDVSGAVDPFDRKRRPNLARWLAFEEQPFDVIVAYRVDRLTRSTRHLQQLIHWAEDHKKLVVSATEAHFDTTTPFAAVVIALMGTVAQMELEAIKERSRSAAHFNIRAGKYRGSLPPWGYLPARVDGEWRLVPDPVQRERILEVYHRVVDDHEPLHLVAHDLNQRGVLSPKDYFAQLQGREPQGRKWSATALKRSMISEAMHGYATLNGKIVRDDDGAPLVRAEPILTREQLEALRAELVKTSRAKPAVSTPSLLLRVLFCAVCGEPAYKFAGGGRKHPRYRCRSMGFPKHCGNGTVAMAEWDAFCEEQVLGLLGDVERLEKVWVAGSDSAVKLAEVNAELVDLTGLIGSPAYRASSPQREALDARIAALAARQEELEGLEARPSGWEWRGTGQRFGDWWREQDTAAKNTWLRSMNVRLTFDVRGGLTRTIDFGDLQEYEQHLRLGSVVERLHTGMS

SEQ ID NO: 12133 - protein, 500 aa, synthetic construct
MRALVVIRLSRVTDATTSPERQLESCLQLCAQRGWDVVGVAEDLDVSGAVDPFDRKRRPNLARWLAFEEQPFDVIVAYRVDRLTRSTRHLQQLVHWADDHKKLVVSATEAHFDTTTPFAAVVIALMGTVAQMELEAIKERSRSAAHFNIRAGKYRGSLPPWGYLPARVDGEWRLVPDPVQRERILEVYHRVVDNHEPLHLVAHDLNRRGVLSPKDYFAQLRGREPQGRKWSATALKRSMTSEAMLGYATLNGKTVRDDDGAPLVRAEPILTREQLEALRAELVKTSRAKPAVSTPSLLLRVLFCAVCGEPAYKFSGGGRKHPRYRCRSMGFPKHCGNGTVAMAEWDAFCEEQVLDLLGDAERLEKVWVAGSDSAVELAEVNAELADLTSLIGSPAYRAGSPQREALDARIAALVARQAELEGLEARPSGWEWRETGQGFGDWWREQDTAAKNTWLRSMNVRLTFDVRGGPTRTIDFGDLQEYEQHLRLGSVVERLHTGMS

SEQ ID NO: 12134 - protein, 500 aa, synthetic construct
MRALVVIRLSRVTDATTSPERQLESCQQLCAQRGWDVVGVAEDLDVSGAVDPFDRKRRPNLARWLAFEEQPFDVIVAYRVDRLARSIRHIQQLVHWAEDHKKLVVSATEAHFDTTTPFAAVVIALMGTVAQMELEAIKERTRSAAHFNIRAGKYRGSLPPWGYLPARVDGEWRLAPDPVQRERILEVYHRVVDNHEPLHLVAHDLNRRGVLSPKDYFAQLQGREPQGRKWSATALKRSMTSETMLGYATLNGKIVRDDGGAPLVRAEPILTREQLEALRAELVKTSRAKPAVSTPSLLLRVLFCAVCGEPAYKFAGGGRKHPRYRCRSMGFPKHCGNGTVAMAEWDAFCEEQVLNLLGDTERLEKVWVAGSDSAAELAEVNAELADLTSLIGSPVYRAGSPQREALDARIAALAARQEELEGLEARPSGWEWRETGQRFGDWWREQDTAAKNTWLRSMNVRLTFDVRGGLTRTIDFGDLQEYEQHLRLGSVVERLHTGMS

SEQ ID NO: 12135 - protein, 500 aa, synthetic construct
MRALVVIRLSRVTDATTSPERQLESCQQLCAQRGWDVVGVAEDLDVSGAVDPFDRKRRPNLARWLVFEEQPFDAIVAYRVDRLTRSIRHLQQLVHWAEDHKKLVVSATEAHFDTTTPFAAVVIALMGTVAQMELEAIKERNRSAAHFNIRAGKYRGSLPPWGYLPTRVDGEWRLAPDPVQRERILEVYHRVVNNHEPLHLVAHDLNRRGVLSPKDYFAQLQGREPQGRKWSATALKRSMISEAMLGYATLNGKTVRDGDGAPLVRAEPILTREQLEAVRAELVKTSRAKPAVSTPSLLLRVLFCAVCGEPAYKFAGGGRKHPRYRCRSMGFPKHCGNGTVAMAEWDAFCEEQVLGLLGDVERLEKVWVAGSDSAVKLAEVNAELVDLTGLIGSPAYRAGSPQREALDARIAALAARQEELEGLEARPSGWEWRGTGQRFGDWWREQDTAAKNTWLRSMNVRLTFDVRGGLTRTIDFGDLQEYEQHLRLGSVVERLHTGMS

SEQ ID NO: 12136 - protein, 500 aa, synthetic construct
MRALVVIRLSRVTDATTSPERQLESCQQLCAQRGWDVVGVAEDLDVSGAVDPFDRKRRPNLARWLAFEEQPFDVIVAYRVDRLTRSIRHLQQLVHWAEDHKKLVVSATEAHFDTTTPFAAVTIALMGTVAQMELEAIKERSRSAAHFNIRAGKYRGSLPPWGYLPTRVDGEWRLAPDPVQRERILEVYHRVVDSHEPLHLVAHDLNRRGVLSPRDYFAQLRGREPQGRKWSATALKRSLVSEAMLGYATLNGKTVRDDDGAPLARAEPILTREQLEALRAELVKTSRAKPAVPTPSLLLRVLFCAVCGEPAYKFAGGGRKHPRYRCRSMGFPKHCGNGTVAMAEWDAFCEEQVLDLLGDAERLEKVWVAGSDSAVELAEVNAELVDLTSLIGSPAYRAGSPQREALDARIAALAARQGELEGLEARPSGWEWRGTGQRFGDWWRGQGTAAKNTWLRSMNVRLTFDVRGGQTRMIDFGDLQEYEQHLRSGSVVERLHTRMS

SEQ ID NO: 12137 - protein, 500 aa, synthetic construct
MRALVVIRLSRVTDATTSPERQLESCQQLCAQRGWDVVGVAEDLDVSGAVDPFDRKRRPNLARWLASEEQPFDVIVAYRVDRLTRSVRHLQQLVHWAEDHKKLVVSATEAHFDTTTPFAAVVIALMGTVAQMELEAIKERSRSAAHFNIRAGKYRGSLPPWGYLPTRVDGEWRLVPDPVQRERILEVYHRVVDKHEPLHLVAHDLNRRGVLSPKDYFAQLRGREPQGRKWSATALKRSVISEAMLGYATLNGKTVRDDDGAPLVRAEPILTREQLGALRAELVKTSRAKPAVSTPSLLLRVLFCAVCGEPAYKFAGGGRKHSRYRCRSMGFPKHCGNGTVTMAEWDAFCEEQVLDLLGDAERLEKVWVAGSDSAVELAEVNAELVDLTSLIGSPAYRAGSPQREALDARIAALAARQEELEGLEARPSGWEWRETGQRFGDWWREQDTAAKNTWLRSMNVRLTFDVRGGLTRTIDFGDLQEYEPHLRLGSVAERLHTGMS

SEQ ID NO: 12138 - protein, 500 aa, synthetic construct
MRALVVIRLSRVTDATTSPERQLESCQQLCAQRGWDVVGVAEDLDVSGAVDPFDRKRRPNLARWLAFEEQPFDAIVAYRVDRLARSIRHLQQLVHWAEDHKKLVVSATEAHFDTTTPFAAVVIALMGTVAQMELEAIKERNRSAAHFNIRAGKYRGSLPPWGYLPTRVDGEWRLVPDPVQRERILEVYRRVVDNHEPLHLVAHDLNRRGVLSPRDYFAQLQGREPQGRKWSATALKRSMTSEAMLGYATLNGKTVRNDDGAPLVRAEPILTREQLEALRAELVKTSRAKPAVSTPSLLLRVLFCAVCGEPAYKFAGGGRKHPRYRCRSMGFPKHCGNGTVAMAEWDTFCEEQVLDLLGDAERLEKVWAAGSDSAVELAEVNAELVDLTSLIGSPAYRAGSPQREALDARIAELAARQAELEGLEARPSGWEWRETGQGFGDWWREQDTAAKNTWLRSMNVRLTFDVRGGLTRTIDFGDLQGYEQRLRLGSVVERLHTGMS

SEQ ID NO: 12139 - protein, 500 aa, synthetic construct
MRALVVIRLSRVTDATTSPERQLESCQQLCAQRGWDVVGVAEDLDVSGAVDPFDRKRRPNLARWLAFEEQPFDVIVAYRVDRLARSVRHLQQLVRWAEDHKKLVVSATEAHFDTTTPFAAVVIALMGTVAQMELEAIKERNRSAAHFNIRAGKYRGSLPPWGYLPTRVDGEWRLVPDPAQRERILEVYHRVVDNHEPLHLVAHDLNRRGVLSPKDYFAQLRGREPQGRKWSATALKRSMVSEAMLGYATLNGKTVRDDDGAPLVRAEPILTREQLEALRAELVKTSRAKPAVSTPSLLLRVLFCAVCGEPAYKFTGGGRKHSRYRCRSVGFPTHCGNGTVAMAEWDAFCEKQVLDLLGDAERLEKVWVAGSDSAVELAEVNAELVDLTSLIGSPAYRAGSPQREALDARIAALAARQEELEGLEARPSGWEWRETGQRFGDWWREQDTAAKNTWLRSMNVRLTFDVRGGLTRTIDFGDLQEYEQHLRLGSVVERLHTGMP

SEQ ID NO: 12140 - protein, 500 aa, synthetic construct
MRALVVIRLSRVTEATTSPERQLESCQQLCAQRGWDVVGVAEDLDVSGAVDPFDRKRRPNLARWLAFEERPFDVIVAYRVDRLARSIRHLQQLVHWAEDHKKLVVSATEAHFDTTTPFAAVVIALMGTVAQMELEAIKERNRSAAHFNIRAGKYRGSLPPWGYLPTRVDGEWRLVPDPVQRERILEVYHRVVDNHEPLHLVAHDLNRRGILSPKDYFAQLRGREPRGRKWSATALKRSMISEAMLGYATLNGKTVRDDYGAPLVRAEPILTREQLEALRAELVKTSRAKPAVSTPSLLLRVLFCAVCGEPAYKFAGGGRKHLRYRCRSMGFPKHCGNGTVAMAKWDAFCEEQVLGLLGDAERLEKVWVAGSDSAVELAEVNAELVDLTSLIGSPAYRAGSPQREALDARIAALAARQEELEGLEARPSDWEWRETGQRFVDWWREQDTAAKNTWLRSMNVRLTFDVRGGLTRTIDFGELQEYEQHLRLGSVVERLHTGMS

SEQ ID NO: 12141 - protein, 500 aa, synthetic construct
MRALVVIRLSRVTDATTSPERQLECCQQLCAQRGWDVVGVAEDLDVSGAVDPFDRKRRPNLARWLAFEEQPFDVIVAYRVDRLTRSTRHLQQLVHWADDHKKLVVSATEAHFDTTTPFAAVVIALMGTVAQMELEAIKERSRSAAHFNIRAGKYRGSLPPWGYLPARVDGVWRLVPDPVQRERILEVYHRVVNNHEPLHLVAHDLNRRGVLSPKDYFAQLQGREPQGRKWSATALKRSMISEAMLGLATLNGKTVRGDDGAPLVRAEPILTREQLEALRAELVKTSRAKPAVSTPSLLLRVLFCAVCGEPAYKFVGGGRKHPRYRCRSMGFPRHCGNGTVAMAEWDVFCEEQVLGLLEDAERLEKVWVAGSDSAVDLAEVNAELVDLTSLIGSPAYRAGSPQREALDARIAALVARQEELEGLEARPSGWEWRGTGQRFGDWWREQDTAAKNTWLRSMNVRLTFDVRGGLTRTIDFGDLQEYEQHLRLGSVVERLHTGMP

SEQ ID NO: 12142 - protein, 500 aa, synthetic construct
MRALVVIRLSRVTDATTSPERQLESCQQLCAQRGWDVVGVAEDLDVSGAVDPFDRKRRPNLARWLAFEEQPFDAIVAYRVDRLARSIRHLQQLVHWAEDHKKLVVSATEAHFDTTTPFAAVVIALMGTVAQMELEAIKERSRSAAHFNIRAGKYRGSLPPWGYLPARVDGEWRLVPDPVQRERILEVYHRVVDNHEPLHLVALDLNRRGVLSPKDYFAQLRGREPQGRKWSATALKRSMISEAMLGYATLNGKIVRDDDGAPLVRAEPILTREQLEALRAELVKTSRAKPAASTPSLLLRVLFCAVCGEPAYKFAGGGRKHPRYRCRSMGFPKHCGNGTVAMAEWDAFCEEQVLNLLGDAERLEKVWVAGSDSAVELAEVNKELVDLTSLIGSPAYRAGSPQREALDARIAALAARQEELEGLEARPSGWEWRGTGQRFGDWWREQDTAAKNTWLRSMNVRLTFDVRGGLTRTIDFGDLREYEQHLRLGSVVERLHTGMP

SEQ ID NO: 12143 - protein, 500 aa, synthetic construct
MRALVVIRLSRVTDATTSPERQLESCQQLCAQRGWDVVGVAEDLDVSGAVDPFDRKRRPNLARWLAFEGQPFDVIVAYRVDRLARSIRHLQQLVHWAEDHKKLVVSATEAHFDTTTPFAAVVIALMGTVAQMELEAIKERSRSAAHFNIRAGKYRGSLPPWGYLPTRVDGEWRLVPDPVQRERILEAYHRVVDDHEPLHLVAHDLNRRGVLSPKDYFAQLRGREPQGRKWSATALKRSMISEAMLGYATLNGKTVRDDDGAPLVRAEPILTREQLEALRAELVKTSRAKPAVSTPSLLLRVLFCAVCGEPAYKFAGGGRKHPRYRCRSMGFPKHCGNGTVAMAEWDAFCEEQVLKLLGDAERLEKVWVAGSDSAVELAEVSAELVDLTSLIGSPAYRAGSPQREALDARIAALAARQEELEGLEARPSGWEWRGTGQRFGDWWREQDTAAKNTWLRSMNVRLTFDVRGGLTRTIDFGDLQEYEQHLRLGSVVERLHTGMS

SEQ ID NO: 12144 - protein, 500 aa, synthetic construct
MRALVVIRLSRVTDATTSPERQLESCQQLCAQRGWNVVGVAEDLDVSGAVDPFDRKRRPNLARWLAFEEQPFDAIVAYRVDRLTRSIRHLQQLVHWAEDHKKLVVSATEAHFDTTTPFAAVVIALMGTVAQMELEAIKERNRSAAHFNIRAGKYRGSLPPWGYLPTRVDGEWRLVPDPVQRERILEVYHRVVDNHEPLHLVAHDLNRSGVLSPKDYFAQLRGREPQGRKWSATALKRSMISEAMLGHATLNGKTVRDDDGAPLVRAEPILTREQQEALRAELVKTSRAQPAVSTPSLLLRVLFCAVCGEPAYKFSGGGRKHPRYRCRSMGFPKHCGNGTVAMAEWDAFCEEQVLGLLGDAERLEKVWVAGSDSAVELAEVNAELVDLTSLIGSPAYRADSPQRETLDARIAALAARQEELEGLEARPSGWEWRETGQRFGDWWREQDTAAKNTWLRSMNVRLTFDVRGGLTRTIDFGDLQEYEQHLRLGSVVERLHTGMS

SEQ ID NO: 12145 - protein, 500 aa, synthetic construct
MRALVVIRLSRVTDATTSPERQLESCQQLCAQRGWDVVGVAEDLDVSGAVDPFDRKRRPNLARWLAFEEQPFDVIVAYRVDRLTRSTRHLQQLVHWAEDHKKLVVSATEAHFDTTTPFAAVVIALMGTVAQMELEAIKERSRSAAHFNIRAGKYRGSLPPWGYLPTRVDGEWRLAPDPVQRERILEVYHRVVDNHEPLHLVAHDLNRRGVLSPKDYFAQLQGREPQGRKWSATALKRSMISVAMLGYATLNGKTVRDDDGAPLVRAEPILTREQREALRAELVKTSRVKPAVSTPSLLLRVLFCAVCGEPAYKFAGGGRKHPRYRCRSMGFPKHCGNGTVAMAEWDAFCVEQVLDLLGDAERLEKVWVAGSDSAVELAEVNAELVDLTSLICSPAYRAGSPQREALDARIAALAARQEELEGLEARPSGWEWRETGQRFGDWWREQDTAAKNTWLRSMNVRLTFDVRGGLTRTIDFGDLQEYGQHLRLGSVVERLHTGMS

SEQ ID NO: 12146 - protein, 500 aa, synthetic construct
MRALVVIRLSRVTDATTSPERQLESCQQLCAQRGWDVVGVAEDLDVSGAVDPFDRKRRPNLARWLAFEEQPFDAIVAYRVDRLARSIRHLQQLVHWAEDHKKLVVSATEAHFDTTTPFAAVVIALMGTVAQMELEAIKERSRSAAHFNIRAGKYRGSLPPWGYLPARVDGEWRLVPDPVQRERILEVYRRVVDNHEPLHLVAHDLNRRGVLSPKDYFAQLRGREPQGRKWSATALRRSMISEAMLGYATLNGKTVRDDDGAPLVRAEPILTRGQLEALRAELVKTSRAKPAVSTPSLLLRVLFCAVCGEPAYKFAGGGRKHPRYRCRSMGFPKHCGNGTVAMAEWDAFCEEQVLNLLGDAERLEKVWVAGSDSAVELAEVNAELVDLTSLIGSPAYRAGSPQREALDARIAALAARQEELEGSEARPSGWEWRETGQRFGDWWLEQDTAAKNTWLRSMNVRLTFDVRGGLTRTIDFGDLQEYEQHLRLGGVVERLHTGMS

SEQ ID NO: 12147 - protein, 500 aa, synthetic construct
MRALVVIRLSRVTDATTSPERQLESCQQLCAQRGWDVVGVAEDLDVSGAVDPFDRKRRPNLARWLAFEEQPFDVIVAYRVDRLTRSTRHLQQLVHWAEDHKKLVVSATEAHFDTTTPFAAVVIALMGTVVQMELEAIKERNRSAAHFNIRAGKYRGSLPPWGYLPTRVDGEWRLAPDPVQRERILEVYHRVVDDHEPLHLVAHDLNRRGVLSPKDYFAQLQGREPQGRKWSATALKRSMTSEAMLGYATLNGKTVRDDDGAPLVRAEPILTREQLEALRAELVKTSRAKPAVSTPSLLLRVLFCAVCGGPAYKFAGGGRKHPRYRCRSMGFPKHCGNGTVAMAEWDAFCEEQVLNLLGDAERLEKVWVAGSDSAVELAEVNKELVDLTSLIGSPAYRAGSPQREALDARIAALAARQEELEGLEARPSGWEWRGTGQRFGDWWREQDTAAKNTWLRSMNVRLTFGVRGGLTRTIDFGDLREYEQHLRLGSVVERLHTGMS

SEQ ID NO: 12148 - protein, 500 aa, synthetic construct
MRALVVIRLSRVTDATTSPERQLESCQQLCAQRGWNVVGVAEDLDVSGAVDPFDRKRRPNLARWLEFEEQPFDVIVAYRVDRLARSIRHLQQLVHWAEDHKKLVVSATEAHFDTTTPFAAVVIALMGTVAQMELEAIRERSRSAAHFNIRAGKYRGSLPPWGYLPTRVDGEWRLAPDPVQRERILEVYHRVVDNHEPLHLVAHDLNRRGVFSPKDYFAQLRGREPQGRKWSATALKRSMVSEAMLGYATLNGKTVRDDDGAPLVRAEPILTREQLEALRAELVKTSRAKPAVPTPSLLLRVLFCAVCGEPAYKFTGGGRKHPRYRCRSMGFPKHCGNGTVAMAEWDAFCEEQVLDLLGDAERLEKVWVAGSDSAVELAEVNAELVDLTSLIGSPAYRTGSPQREALDARIAALAARQEELEGLEARPSGWGWRETGQRFGDWWLEQDTAAKNTWLRSMNVRLTFDARGGLTRTIDFGDLQEYEQRLRLGSVVERLHTGMS

SEQ ID NO: 12149 - protein, 500 aa, synthetic construct
MRALVVIRLSRVTDATTSPERQLESCQQLCAQRGWDVVGVAEDLDVSGAVDPFDRKHRPNLARWLAFEEQPFDVIVAYRVDRLARSIRHLQQLVHWAEDHKKLVVSATEAHFDTTTPFAAVVIALMGTVAQMELEAIKERSRSAAHFNIRAGKYRGSLPPWGYLPTRVNGEWRLVPDPVQRERILEVYHRVVDNHEPLHLVAHDLNRRGVLSPKDYFAQLQGREPQGRKWSATALKRSMTSEAMLGYATLNGKTVRDDDGAPLVRAEPILTREQREALRAELVKTSRAKPAVSTPSLLLRVLFCAVCGEPAYKFAGGGRRHSRYRCRSMGFPKHCGNGTVAMAEWDAFCEERVLDLLGDAERLEKVWVAGSDSAVELAEVNAELVDLTSLVGSPAYRAGSPQREALDARIAALVARQEELEGLEARPSGWEWRETGQRFGDWWRERDTAAKNTWLRSMNVRLTFDVRGGLTRTINFGDLQEYEQHSRLGSVVERLHTGMS

SEQ ID NO: 12150 - protein, 500 aa, synthetic construct
MRALVVVRLSRVTDATTSPERQLESCQQLCAQRGWDVVGVAEDLDVSGAVDPFDRKRRPNLARWLAFEEQPFDVIVAYRVDRLARSIRHLQQLVHWAEDHKKLVVSATEAHFDTTTPFAAVVIALMGTVAQMELEAIKERNRSAAHFNIRAGKYRGSLPPWGYLPTRVDGEWRLVPDPVQRERILEVYHRVVDNHEPLHLVAHDLNRRGVLSPKDYFAQLQGREPQGRKWSATALKRSMISGAMLGYAALNGKTVRDDDGAPLVRAEPILTREQQEALRAELVKTSRAKPAVSTPSLLLRVLFCAVCGEPAYKFAGGGRKHPRYRCRSMGFPEHCGNGTVAMAEWDAFCEEQVLDLLGDAERLEKVWVAGSDSAVELAEVNAELVDLTSLIGSPAYRAGSPQREALDARIAALAARQGELEGLEACPSGWEWRETGQRFGDWWREQDTAAKNTWLRSMNVRLTFDVRGGLTRTIDFGELQEYEQHLCLGNVVERLHTGKS

SEQ ID NO: 12151 - protein, 500 aa, synthetic construct
MRALVVIRLSRVTDATTSPERQMKSCQQLCAQRGWDVVGVAEDLDVSGAVDPFDRKRRPNLARWLAFEEQPFDAIVAYRVDRLTRSIRHLQLLVHWAEDHKKLVVSATEAHFDTTTPFAAVVIALMGTVAQMELEAIKERNRSAAHFNIRAGKYRGSLPPWGYLPARVDGEWRLVPDPVQRERILEVYHRVVDNHEPLHLVAHDLNRRGVLSPKDYFAQLRGREPQGRKWSATALKRSMTSEAMLGYATLNGKTVRDDDGAPLVRAEPILTREQLEALRAVLVKTSRAEPAVSTPSLLLRVLFCAVCGEPAYKFAGGGRKHPRYRCRSMGFPKHCGNGTVAMAEWDAFCEEQVLNLLGDAERLEKVWVAGSDSAVELAEVNAELVDLTSLIGSPAYRAGSTQREALDARIAALAARQEELEGLEARPSGWEWRETGQRFGDWWREQDTAAKNTWLRSMNVRLTYDVRGGLTRTIDFGDLQEYEQHLRSGSVVERLHTGMS

SEQ ID NO: 12152 - protein, 500 aa, synthetic construct
MRALVVIRLSRVTDATTSPERQLESCQQLCAQRGWDVVGVAEDLDVSGAVDPFDRKRRPNLARWLAFEEQPFDAIVAYRVDRLARSIRHLQQLVHWAEDHKKLVVSATEAHFDTTTPFAAVVIALMGTVAQMELEAIKERSRSAAHFNIRAGKYRGSLPPWGYLPARVDGEWRLVPDPVQRERILEVYHRVVDNHEPLHLVAHDLNRRGVLSPKDYFAQLQGREPQGRKWSATALKRSMISEAMLGYATLNGKTVRDDDGAPLVRAEPILTREQQEALRAELVKTSRAKPAVSTPSLLLRVLFCAVCGEPAYKFAGGGRKHPRYRCRSMGFLKHCGNGTVAMAEWDAFCEEQVLDLLGDAERLEKVWVAGSDSAVELAEVNAELVDLTSLIGSPAYRAGSPQREGLDARIAALAARQEELEGLEARPSGWEWRETGQRFGDWWREQDTAAKNTWLRSMNVRLTFDVRGGLTRTIDFGDLHEYEQHLRLGSVAERLHTGMS

SEQ ID NO: 12153 - protein, 500 aa, synthetic construct
MRALVVIRLSRVTDATTSPERQLESCQQLCAQRSWDVVGVAEDLDVSGAVDPFDRKRRPNLARWLAFEEQPFDVIVAYRVDRLTRSTRHLQQLVHWADDHKKLVVSATEAHFDTTTPFAAVVIALMGTVAQMELEAIKERSRSAAHFNIRAGKYRGSLPPWGYLPARVDGVWRLVPDPVQRERILEVYHRVVNNHEPLHLVAHDLNRRGVLSPKDYFAQLQGREPQGRKWSATALKRSMISEAMLGYATLNGKIVRDDDGAPLVRAEPILTREQQEALRAELVKTSRAKPAVSTPSLLLRVLFCAVCGEPAYRFAGGGRKHPRYRCRSMGFPKHCGNGTVAMAEWDAFCEEQVLGLLGDAERLEKVWVAGSDSAVELAEVNAELVDLTSLIGSPAYRVCSPQREALDARIAALAARQEELEGLGARPSGWEWRETGQRFGDWWREQDTAAKNTWLRSMNVRLTFDVRGGLTRTIDFGELQEYEQHLRLGSVVERLHTGMS

SEQ ID NO: 12154 - protein, 500 aa, synthetic construct
MRALVVIRLSRVTDATTSPERQLESCQQLCAQRGWDVVGAAEDLDVSGAVDPFDRKRRPNLARWLAFEEQPFDVIVAYRVDRLTRSIRHLQQLVHWAEDHKKLVVSATEAHFDMTTPFAAVVIALMGTVAQMELEAIKERSRSAAHFNIRAGKYRGSLPPWGYLPARVDGEWRLAPDPVQRERILEVYHRVVDNHEPLHLVAHDLNRRGVLSPKDYFAQLQGREPQGRKWSATALKRSMISVAMLGYATLNGKTVRDDDGAPLVRAEPILAREQLEALRAELVKTSRAKPAVSTPSLLLRVLFCAVCGEPAYKFAGGGRKHPRYRCRSMGFPKHCGNGTVAMAEWDAFCEEQVLDLLGDAERLEKVWVAGSDPAVELAEVNAELVDLTSLIGSPDYRAGSPQREALDARIAALAARQEELEGLEARPSGWEWRETGQRFGDWWREQDTAAKNTWLRSMNVRLTFDVRGGLTRTIDFGDLQEYEQHLRLGSVVERLHTGMS

SEQ ID NO: 12155 - protein, 500 aa, synthetic construct
MRTLVVIRLSRVTDATTSPERQLESCQQLCARRGWDVVGVAEDLDVSGAVDPFDRKRRPNFARWLAFEEQPFDVIVAYRVDRLTRSIRHLQQLVHWAEDHKKLVVSATEAHFDTTTPFAAVVIALMGTVAQMELEAIRERSRSAAHFNIRAGKYRGSLPPWGYLPARVDGEWRLVPDPVQRERILEVYRRVVDNHEPLHLVAHDLNRRGVLSPKDYFAQLQGREPQGRKWSATALKRSMISEAMLGYATLNGKTVRDDNGAPLVRAEPILTREQQEALRAELVKTSRTKPAVSTPSLLLRVLFCAVCGEPAYKFVGGGRKHPRYRCRSMGFPKHCGNGTVAMAEWDVFCEEQVLNLLGDAERLEKVWVAGSDSAVELAEVNAELVDLTSLIGSPAYRAGSPQREALDARIAALAARQEELEGLEARPSGWEWRETGQRFGDWWREQDTAAKNTWLRSMNVRLTFDVRGGLTRTIDFGDLQEYEQHLRLGSAVERLHTGMS

SEQ ID NO: 12156 - protein, 500 aa, synthetic construct
MRALVVIRLSRVTDATTSPERQLESCRQLCAQRGWNVVGVAEDLDVSGAVDPFDRKRRPNLARWLAFEEQPFDVIVAYRVDRLARSARHLQQLVRWAEDHKKLVVSATEAHFDTTTPFAAVVIALMGTVAQMELEAIKERSRSAAHFNIRAGKYRGSLPPWGYLPTRVGGEWRLVPDPVQRERILEVYHRVVDNHEPLHLVALDLNRRGVLSPKDYFAQLRGREPQGRKWSATALKRSMISEAMLGYATLNGKTVRDDDGAPLVRAEPILTREQQEALRTELVKTSRAKPAVSTPSLLLRVLFCAVCGEPAYKFSGGGRKHPRYRCRSMGFPKHCGNGTVAMAEWDAFCEEQVLDLLGDAERLEKVWVAGSDSAVELAEVNAELVDLTSLIGSPAYRAGSPQREALDARIAALAARQEELEGLEARPSGWEWRETGQRFGDWWREQDTAAKNTWLRSMNVRLTFDVRGGLTRTIDFGDLQEYERHLRLGSVVERLHTGMP

SEQ ID NO: 12157 - protein, 500 aa, synthetic construct
MRALVVIRLSRVTDATTSPERQLESCQQLCAQRSWDVVGVAEDLDVSGAVDPFDRKRRPNLARWLAFEEQPFDVIVAYRVDRLARSVRHLQQLVRWAEDHKKLVVSATEAHFDTTTPFAAVVIALMGTVAQMELEAIKERNRSAAHFNIRAGKYRGSLPPWGYLPTRVDGEWRLVPDPVQRERILEVYHRVVDNHEPLHLVAHDLNRRGVLSPKDYFAQLQGREPQGRKWSATALKRSMISEAMLGYATLNGKTVRDDDGAPLVRAEPILTREQQEALRAELVKTSRAKPAVSTPSLLLRVLFCAVCGEPAYKFAGGGRKHPRYRCRSMGFPKHCGNGTVAMAEWDAFCEEQVLDLLGDTERLEKVWVAGSDSAVELAEVNAELVDLTSLIGSPAYRAGSPQREALDARIAALAARQEELEGLEARPSGWEWRETGQRFGDWWREQDTAAKNTWLRSMNVRLTFDVRGGLTRTIDFGDLQEYEQHLRLGSVVERLHTGMS

SEQ ID NO: 12158 - protein, 500 aa, synthetic construct
MRALVVIRLSRVTEATTSPERQLESCQQLCAQRGWDVVGVAEDLDVSGAVDPFDRKRRPNLARWLAFEEQPFDAIVAYRVDRLTRSIRHLQQLVHWAEDHKKLVVSATEAHFDTTTPFAAVVIALMGTVAQMELEAIKERNRSAAHFNIRAGKYRGSLPPWGYLPTRVDGEWRLAPDPVQRERILEVYHRVVDNHEPLHLVAHDLNRRGVLSPKDYFAQLRGREPQGRKWSATALKRSMTSEAMLGYATLNGQTVRNDDGAPLVRAEPILTREQLEALRAELVKTSRAKPAVSTPSLLLRVLFCAVCGEPAYKFAGGGRKHPRYRCRSMGFLKHCGNGTVAMAEWDAFCEEQVLDLLGDAERLEKVWVAGSDSAVELAEVNAELVDLTGLIGSPAYRAGSPQREALDARIAALAARQEELEGLEARPSGWEWRGTGQRFGDWWREQDTAAKNTWLRSMNVRLTFDVRGGLTRTIDFGDLQEYEQHLRLGSVVERLHTGMS

SEQ ID NO: 12159 - protein, 500 aa, synthetic construct
MRALVVIRLSRVTDATTSPERQLESCQQLCAQRGWDVVGVAEDLDVSGAVDPFDRKRRPNLARWLAFEERPFDVIVAYRVDRLTRSTRHLQQLVHWAEDHKKLVVSATEAHFDTTTPFAAVVIALIGTVAQMELEAIKERNRSAAHFNIRAGKYRGSLPPWGYLPTRVDGEWRLVPDPVQRERILEVYHRVVDNHEPLHLVAHDLNRRGVLSPKDYFAQLRGREPQGRKWSATALKRSMTSEAMLGYATLNGKTVRDDDGAPLVRAEPILTREQLEALRAESVKTSRAKPAVSTPSLLLRVLFCAVCGEPAYKFAGGGRKHPRYRCRSMGFPKHCGNGTVAMAEWDAFCEEQVLDLLGDAERLEKVWVVGSDSAVELAEVNAELVDLTGLIGSPAYRAGSPQREALDARIAALAARQEELEGLEARPSGWEWRETGQRFGDWWREQDTAAKNTWLRSMNVRLTFDVRGGLTRTIDLGDLHEYEQHLRLGSVVERLHTGMS

SEQ ID NO: 12160 - protein, 500 aa, synthetic construct
MRALVVIRLSRVTDATTSPERQLESCQQLCAQRGWDVVGVAEDLDVSGAVDPFDRKRRPNLARWLAFEEQPFDAVVAYRVDRLTRSIRHLQQLVHWAEDHKKLVVSATEAHFDTTTPFAAVVIALMGTVAQMELEAIKERNRSAAHFNIRAGRYRGSLPPWGYLPARVDGEWRLVPDPVQRERILEVYHRVVDNHEPLHLVAHDLNRRGILSPKDYFAQLRGREPRGRKWSATALKRSMISEAMLGYATLNGKTVRDDDGAPLVRAEPILTREQQEALRAELVKTSRAKPAVSTPSLLLRVLFCAVCGEPAYKFAGGGRKHPRYRCRSMGFPKHCGNGTVAMAEWDAFCEEQVLGLLGDAERLEKVWVAGSDSAVELAEVNAELVDLTGLISSPVYRAGSPQREALDARIAALAARQEELEGLEARPSGWEWRETGQRFGDWWREQDTAAKNTWLRSMNVRLTFDVRGGLTRTIDFGDLQEYEQHLRLGSVVERLHTGTS

SEQ ID NO: 12161 - protein, 500 aa, synthetic construct
MRALVVIRLSRVTDATTSPERQLESCQQLCAQRGWDVVGAAEDLDVSGAVDPFDRKRRPNLARWLAFEEQPFDVIVAYRVDRLTRSIRHLQQLVHWAEDHKKLVVSATEAHFDMTTPFAAVVIALMGTVAQMELEAIKERSRSAAHFNIRAGKYRGSLPPWGYLPTRVGGEWRLAPDPVQRERILEVYHRVVDNHEPLHLVAHDLNRRGVLSPKDYFAQLRGREPQGRKWSATALKRSMISGAMLGYATLNGKTVHDDDGAPLVRAEPILTREQQEALRAELVKTSRTKPAVSTPSLLLRVLFCAVCGEPAYKFSGGGRKHPRYRCRSMGYPKHCGNGTVAMAEWDAFCEEQVLDLLGDSERLEKVWVAGSDSAVELAEVNAELVGLTSLIGSPAYRAGSPQREALDARIAALAARQEELEGLEARPSGWEWRETGQRFGDWWREQDTAAKNTWLRSMNVRLTFDVRGGLTRTIDFGDLQEYEQHLRLGSVVERLHTGMP

SEQ ID NO: 12162 - protein, 500 aa, synthetic construct
MRALVVIRLSRVTDATTSPVRQLESCQQLCAQRGWDVVGVAEDLDVSGAVDPFDRKRRPNLARWLASEEQPFDVIVAYRVDRLARSIRHLQQLVHWAEDHKKLVVSATEAHFDTTTPFAAVVIALMGTVAQMELEAIKERNRSAAHFNIRAGKYRGSLPPWGYLPTRVGGEWRLVPDPVQRERILEVYRRVVDNHEPLHLVAHDLNRRGVLSPKDYFAQLRGREPQGRKWSATALKRSMISEAMLGYATLNGKTVRDDDGALLVRAEPILTREQLEALRAELVKTSRAKPAVSTPSLLLRVLFCAVCGEPAYKFAGGGRKHPRYRCRSMGFPKHCGNGTVAMAEWDAFCEEQVLGLLGDVERLEKVWVAGSDSAVRLAEVSAELVDLTGLIGSPAYRAGSPQREALDARIAALAARQEELEGLEARPSGWEWRGTGQRFGDWWREQDTAAKNAWLRSMNVRLTFDVRGGLTRTIDFGDLQEYEQHLRLGGVVERLHTGMS

SEQ ID NO: 12163 - protein, 500 aa, synthetic construct
MRALVVIRLSRVTDATTSPERQLESCQQLCAQRGWDVVGVAEDLDVSGAVDPFDRKRRPNLARWLAFEEQPFDVIVAYRVDRLARSIRHLQQLVHWAEDHKKLVVSATEAHFDTTTPFAAVVIALMGTVAQMELEAIKERSRSAAHFNIRAGKYRGSLPPWGYLPTRVDGEWRLVPDPVQRERILEVYHRVVDNHEPLHLVAHDLNRRGVLSPRDYFAQLRGREPQGRKWSATALKRSMISEVMLGYATLNGRTVRDDDGAPLVRAEPILTREQLEALRAVLVKTSRAKPAVSTPSLLLRVLFCAVCGEPAYKFAGGGRKHPRYRCRSMGFLKHCGNGTVAMAEWDAFCEEQVLDLLGDAERLEKVWVAGSDSAVELAEVNAELVDLTSLIGSPAYRAGSPQREALDARIAALAARQEELEGLEARPSGWEWRGTGQRFGDWWREQDTAAKNTWLRTMNVRLTFDVRDGLTRTIDFGDLQEYEQHLRLGSVVERLHTEMS

SEQ ID NO: 12164 - protein, 500 aa, synthetic construct
MRALVVIRLSRVTDTTTSPERQLESCQQLCAQRGWDVVGVAEDLDVSGAVDPFDRKRRPNLARWLAFEEQPFDVIVAHRVDRLARSTRHLQRLVHWAEDHKKLVVSATEVHFDTTTPFAAVVIALMGTVAQMELEAIKERNRSAAHFNIRAGKYRGSLPPWGYLPTRVDGEWRLMPDPVQRERILEVYHRVVDNHEPLHLVAHDLNRRGVLSPKDYFAQLRGREPQGRKWSATALKRSMISEAMLGYATLNGETVRDDDGAPLVRAEPILTREQLEALRAELVKTSRAKPAVSTPSLLLRVLFCAVCGEPAYKFAGGGRKHPRYRCRSMGFPKHCGNGTVAMAEWDAFCEEQVLDLLGDAERLEKVWVAGSDSAVELAEVNAELVDLTSLISSPAYRAGSPQREALDARIAALATRQEELEGLEARPSGWEWRETGQRFGDWWREQDTAAKNTWLRSMNVRLTFDVRGGLTRTIDFGDLQEYEQHLRLGGVVERLHTGMS

SEQ ID NO: 12165 - protein, 500 aa, synthetic construct
MRTLVVIRLSRVTDATTSPERQLESCQQLCAQRGWDVVGVAEDLDVSGAADPFDRKRRPNLARWLAFEEQPFDVIVAYRVDRLTRSIRHLQQLVHWAEDHKKLVVSATEAHFDMTTPFAAVVIALMGTVAQMELEAIKERSRSAAHFNIRAGKYRGSLPPWGYLPTRVDGEWRLAPDPVQRERILEVYHRVVDNHEPLHLVAHDLNRRGVLSPKDYFAQLQGREPQGRKWSTTALKRSMISVAMLGYATLNGKTVRGDDGAPLVRAEPILTREQLEALRAELVKTSRAKPAVSTPSLLLRVLFCAVCGEPAYKFAGGGRKHPRYRCRSMGFPKHCGNGTVAMTEWDAFCEEQVLNLLGDAERLEKVWVAGSDSAVELVEVNAELVDLTSLIGSPAYRAGSPQREALDARIAALAARQEELEGLKARPSGWEWRETGQRFGDWWREQDTAAKNTWLRSMNVRLTFDVRGGLTRTIDFGDLQEYEQHSRLGSVVERLHTGMS

SEQ ID NO: 12166 - protein, 500 aa, synthetic construct
MRALVVIRLSRVTEATTSPERQLESCQQLCAQRGWDVVGVAEDLDVSGAVDPFDHKRRPNLARWLAFEEQPFDVIVAYRVDRLARSIRHLQQLVHWAEDHKKLVVSATEAHFDTTTPFAAVVIALMGTVAQMELEAIKERNRSAAHFNIRAGKYRGSLPPWGYLPARVDGEWRLVPDPVQRERILEVYHRVVDNHEPLHLVAHDLNRRGVLSPKDYFAQLQGREPQGRKWSATALKRSMISKAMLGYATLNGKTVRDDDGAPLVRAEPILTREQLEALRAELVKTSRAKPAVSAPSLLLRVLFCAVCGEPAYKFAGGGRKHPRYRCRSMGFPKHCGNGTVAMAEWDAFCEEQVLGLLGDAERLEKVWVAGSDSAVELAEVNAELVDLTSLISSPAYRAGSPQREALDARIAALAARQEELEGLEARPSGWEWRETGQRFGDWWREQDTAAKNTWLRSMNVRLTFDVRGGLTRTIDFGDLQEYEQHLRLGSVVERLHTWMS

SEQ ID NO: 12167 - protein, 500 aa, synthetic construct
MRALVVIRLSRVTDATTSPERQLESCQQLCAQRGWDVVGVAEDLDVSGAVDPFDCKRRPNLARWLAFEEQPFDAIVAYRVDRLARSIRHLQQLVHWAEDHKKLVVSATEAHFDTTTPFAAVVIALMGTVAQMELEAIRERNRSAAHFNIRAGKYRGSLPPWGYLPTRVDGEWRLAPDPVQRERILEVYHRVVDNHEPLHLVAHDLNRRGVLSPRDYFAQLRGREPQGREWSATALKRSMISEAMLGYATLNGKTVRDGDGAPLVRAEPILTREQQEALRAELVKTSRAKPAVSTPSLLLRVLFCAVCGEPAYKFAGGGRKHPRYRCRSMGFPKHCGNGTVAMAEWDAFCEEQVLDLLGDAERLEKVWVAGSDSAVELAEANAELVDLTSLVGSPAYRTGSPQREALDARIAALAARQEELEGLEARPSGWEWRETGQRFGDWWREQDTAAKNTWLRSMNVRLTFDVRGGLTRTIDFGDLQEYEQHLRLGSVVERLHTGMP

SEQ ID NO: 12168 - protein, 500 aa, synthetic construct
MRALVVIRLSRVTDATTSPERQLESCQQLCAQRGWDVVGVAEDLDVSGAVDPFDRKRRPNLARWLAFEEQPFDVIVAYRVDRLTRSTRHLQQLVHWAEDHKKLVVSATEAHFDTTTPFAAVVIALMGTVAQMELEAIKERSRSAAHFNIRAGKYRGSLPPWGYLPTRVDGEWRLAPDPVQRERILEVYHRVVDNHEPLHLVAHDLNRRGVLSPKDYFAQLQGREPQGRKWSATALKRSMTSEAMLGYATLNGKTVRDDDGAPLVRAEPILTREQLEALRAELVKTSRAKPAVSTPSLLLRVLFCAVCGEPAYKFAGGGRRHPRYRCRSMGFPKHCGNGTVAMAEWDAFCEEQVLDLLGDAERLEKVWVAGSDSAVELAEVNAELVDLTSLIGSPAYRAGSLQREALDARIAALAARQEELEGLEARPSGWEWRETGQRFGDWWHEQDTAAKNTWLRSMNVRLTFDVRGGLTRTIDFGDLQEYEQHLRLGSVAERLHTGMS

SEQ ID NO: 12169 - protein, 500 aa, synthetic construct
MRALVVIRLSRVTDATTSPERQLESCRQLCAQRGWDVVGVAEDLDVSGAVDPFDRKRRPNLARWLAFEEQPFDAIVAYRVDRLTRSIRHLQQLVHWAEDHKKLVVSATEAHFDTTTPFAAVVIALMGTVAQMELEAIKERNRSAAHFNIRAGKYRGSLPPWGYLPTRVDGEWRLAPDPVQRERILEVYHRVVDEHEPLHLVAHDLNRRGVLSPKDYFAQLRGREPQGRRWSATALKRSMISGAMLGYATLNGKTVRDDDGAPLVRAEPILTREQQEALRAELVKTSRAKPAVSTPSLLLRVLFCAVCGEPAYKFAGGGRKHSRYRCRSMGFPKHCGNGTVTMAEWDAFCEEQVLDLLGDAERLEKVWVAGSDSAVELAEVNAELVDLTSLIGSPAYRAGSQQREALDARIAALAARQEELEGLEARPSGWEWRETGQRFGDWWREQDTAAKNTWLRSMNVRLTFDVRGGLTRTIDFGDLQEYVQHLRLGSVVERLHTGMS

SEQ ID NO: 12170 - protein, 500 aa, synthetic construct
MRALVVIRLSRVTEATTSPERQLESCQQLCAQRGWDVVGVAEDLDVSGAVDPFDRKRRPNLARWLAFEEQPFDVIVAYRVDRLARSIRHLQQLVHWAEDHKKLVVSATEAHFDTTTPFAAVVIALMGTVAQMELEAIKERSRSAAHFNIRAGKYRGSLPPWGYLPARVDGEWRLVPDPVQRERILEVYHRVVDNHEPLHLVAHDLNRRGVLSPKDYFAQLRGREPQGRKWSATALKRSMISGAMLGYATLSGKTVRDDDGAPLVRAEPILTREQLEALRAELVKTSRAKPAVSTPSLLLRVLFCAVCGEPAYKFAGGGRKHPRYRCRSMGFPKHCGNGTVAMAEWDAFCEEQVLNLLGDAERLEKVWAAGSDSAVELAEVNAELVDLTSLIGSPAYRAGSPQREALDARIAALAARQEELEGLEARPSGWEWRETGQRFRDWWREQDTAAKNTWLRSMNVRLTYDVRGGLTRTIDFGDLQEYEQHLRLGSVVERLHTGMS

SEQ ID NO: 12171 - protein, 500 aa, synthetic construct
MRALVVIRLSRVTDATTSPERQLESCQQLCAQRGWDVVGVAEDLDVSGAVDPFDHKRRPNLARWLAFEEQPFDVIVAYRVDRLTRSTRHLQQLVHWAEDHKKLVVSATEAHFDTTTPFAAVVIALMGTVAQMELEAIKERSRSAAHFNIRAGKYRGSLPPWGYLPTRVDGEWRLAPDPVQRERILEVYHRVVDNHEPLHLVAHDLNRRGVLSPKDYFAQLQGREPQGRKWSATALKRSMTSEAMLGYATLNGKTVRDDDGAPLVRAEPILTREQLEALRAELVKTSRAEPAVSTPSLLLRVLFCAVCGEPAYKFSGGGRKHPRYRCRSMGFPKHCGNGTVAMAEWDAFCEEQVLGLLGDAERLEKVWVAGSDSAVELAEVNAELVDLTSLIGSPAYRADSPQREALDARIAALAARQEELEGLEARPSGWEWRETGQRFGDWWREQDTAAKNTWLRSMNVRLTFDVRGGLARTIDLGDLQEYEQHLRSGSVVERLHTGMS

SEQ ID NO: 12172 - protein, 500 aa, synthetic construct
MRALVVIRLSRVTDATTSPERQLESCQQLCAQRGWDVVGVAEDLDVSGAVDPFDRKRRPNLARWLAFEEQPFDVIVAYRVDRLARSIRHLQQLVHWAEDHKKLVVSATEAHFDTTTPFAAVVIALMGTVAQMELEAIKERSRSAAHFNIRAGKYRGSLPPWGYLPIRVDGEWRLVPDPVQRERILEVYHRVVDNHEPLHLVAHDLNRRGVLSPKDYFAQLRGREPQGRKWSATALKRSMISEAMLGYATLNGKTVRDDDGAPLVRAEPILTREQQEALRAELVKTSRAKPAVSTPSLLLRVLFCAVCGEPAYKFAGGGRKHPRYRCRSMGFPKHCGNGTVAMAEWDAFCEEQVLDLLGDAERLEKVWVAGSDSAVELAEVNKELVDLTSLIGSPAYRAGSPQREALDARIAALAARQEELEGLEARPSGWEWRGTGQRFGDWWRELDTAAKNTWLRSMNIRLTFDVRDGLTRTIDFGDLQEYEQHLRLGSVVERSHTGMS

SEQ ID NO: 12173 - protein, 500 aa, synthetic construct
MRALVVIRLSRVTDATTSPERQLESCQQLCAQRGWDVVGVAEDLDVSGAVDPFDRKRRPNLARWLAFEEQPFDVIVAYRVDRLARSIRHLQQLVHWAEDHKKLVVSATEAHFDTTTPFAAVVIALMGTVAQMELEAIKERNRSAAHFNIRAGKYRGSLPPWGYLPTRVDGEWRLVPDPVQRERILEVYHRVVDDHEPLHLVAHDLNRRGVLSPRDYFAQLRGREPQGRGWSATALKRSMTSEAMLGYVTLNGKIVRDDGGAPLVRAEPILTREQLEALRAELVRTSRAKPAVSTPSLLLRVLFCAVCGEPAYKFAGGGRKHPRYRCRSMGFPKHCGNGTVAMAEWDAFCEEQVLDLLGDAERLEKVWVAGSDSAVELAEVNAELVDLTSLIGSPAYRAGSPQREALDARIAALAARQEELEGLEARPSGWEWRETGQRFGDWWREQDTAAKNTWLRSMNVRLTFDVRGGLTRTIDFGDLQEYEQHLRLGSVVERLHTGMS

SEQ ID NO: 12174 - protein, 500 aa, synthetic construct
MRALVVIRLSRVTEATTSPERQLESCRQLCAQRGWDVVGVAEDLDVSGAVDPFDRKRRPNLARWLAFEEQPFDVIVAYRVDRLTRSIRHLQQLVHWAEDHKKLVLSATEAHFDTTTPFAAVVIALMGTVAQMELEAIKERNRSAAHFNIRAGKYRGSLPPWGYLPTRVGGEWRLVPDPVQRERILEVYHRVVDDHEPLHSVAHDLNRRGVLSPKDYFAQLRGREPRGRKWSATALKRSMISEAMLGHATLNGKTVRDGDGAPLVRAEPILTREQLEALRAELVKTSRAKPAVSTPSLLLRVLFCAVCGEPAYKFSGGGRKHPRYRCRSMGFPKHCGNGTVAMAEWDAFCEEQVLDLLGDAERLEKVWVAGSDSAVELAEVNAELVDLTSLIGSPAYRAGSPQREALDTRIAALAARQEELKGLEARPSGWEWRETGQRFGDWWREQDTAAKNTWLRSMNVRLTFDVRGGLTRTIDFGDLQEYEQHLRLGSVVERLHAGMS

SEQ ID NO: 12175 - protein, 500 aa, synthetic construct
MRALVVIRLSRVTDATTSPERQLESCQQLCAQRGWDVVGVAEDLDVSGAVDPFDRKRRPNLARWLAFEEQPFDVIVAYRVDRLTRSTRHLQQLVHWAEDHKKLVVSATEAHFDTTTPFAAVVIALMGTVAQMELEAIKERSRSAAHFNIRAGKYRGSLPPWGYLPARVDGEWRLVPDPVQRERILEVYHRVVNDHEPLHLVAHDLNRRGVLSPKDYFAQLQGREPQGREWSATALKRSMISEAMLGYATLNGKIVRGDDGAPLVRAEPILTREQLEALRAELVKTSRAKPAVSTPSLLLRVLFCAVCGEPAYKFAGGGRKHPRYRCRSMGFPKHCGNGTVAMAEWDAFCEEQVLDLLGDAERLEKVWVAGSDSAVELAEVNAELVDLTSLISSPAYRAGSPQREALDARIAALAARQEELEGLEARPSGWEWRETGQRFGDWWREQDSAAKNTWLRSMNVRLTFDVRGGLTRTIDFGDLQEHEQRLRSGSVVGRLHTGMS

SEQ ID NO: 12176 - protein, 500 aa, synthetic construct
MRALVVIRLSRVTDATTSPERQLESCQLLCAQRGWDVVGVAEDLDVSGAVNPFDRKRRPNLARWLAFEEQPFDVIVAYRVDRLTRSTRHLQQLVHWAEDHKKLVVSATEAHFDTTTPFAAVVIALMGTVAQMELEAIKERSRSAAHFNIRAGKYRGSLPPWGYLPTRVDGEWRLVPDPVQRERILEVYHRVVDNHEPLHLVAHDLNRRGVLSPKDYFAQLQGREPQGRKWSATALKRSMISGAMLGYATLNGETVRDDDGAPLVRAEPILTREQLEALRAELVKTSRAKPAVSTPSLLLRVLFCAVCGEPAYKFAGGGRKHPRYRCRSMGFPKHCGNGTVAMAEWDAFCEEQVLDLLGDAERLEKVWAAGSDSAVELAEVNAELVDMTSLIGSPAYRAGSPQREALDARIAALAARQEELEGLEARPSGWEWRGTGQRFGDWWREQDTAAKNTWLRSMNVRLTFDVRGGLTRTIDFGDLQEYEQHLRLGSVVECLHTGMS

SEQ ID NO: 12177 - protein, 500 aa, synthetic construct
MRALVVIRLSRVTDATTSPERQLESCQQLCAQRGWDVVGVAEDLDVSGAVDPFDRKRRPNLARWLAFEEQPFDAIVAYRVDRLTRSIRHLQQLVHWAEDHKKLVVSATEAHFDTTTPFAAVVIALMGTVAQMELEAIKERNRSAAHFNIRAGKYRGSLPPWGYLPTRVDGEWRLAPDPVQRERILEVYHRVVDNHEPLHLVAHDLNRRGVLSPKDYFAQLRGREPQGRKWSATALKRSMTSEAMLGYATLNGKTVRDDDGAPLVRAEPILTREQLEALRAELVKTSRAKPAVSTPSLLLRVLFCAVCGEPAYKFAGGGRKHPRYRCRSMGFPKHCGNGTVAMAEWDLFCEERVLDLLGDAERLEKVWVAGSDSAVKLAEVNAELEDLTSLIGSPAYRAGSPQREALDARIAALAARQEELEGLEARPSGWEWRETGQRFGDWWREQDTAAKNTWLRSMNVRLTFDVRGGLTRTIDFGDLQEYEQHLRLGSVVERLHTGMS

SEQ ID NO: 12178 - protein, 500 aa, synthetic construct
MRALVVIRLSRVTDATTSPERQLESCQQLCAQRGWDVVGVAEDLDVSGAVDPFDRKRRPSLARWLAFEEQPFDAIVAYRVDRLARSIRHLQQLVHWAEDHKKLVVSATEAHFDTTTPFAAVVIALMGTVAQMELEAIKERSRSAAHFNIRAGKYRGSLPPWGYLPARVDGEWRLVPDPVQRERILEVYHRVVDNHEPLHLVAHDLNRRGVLSPKDYFAQLRGREPQGRKWSATALKRSMTSEAMLGYATLNGKTVRDDDGAPLVRAEPILTREQLEALRAELVKTSRAKPAVSTPSLLLRVLFCAVCGEPAYKFSGGGRKHPRYRCRSMGFPKHCGNGTVAMAEWDAFCEEQVLDLLGDAERLEKVWVAGSDSAVELAEVNAELVDLTSLIGSPAYRAGSPQREALDARIAALAARQEGLEGVEARPPGWEWRETGQRFGDWWREQDTAAKNTWLRSMNVRLTFDVRGGLTRTINFGDLQEYEQHLRLGSVVERLHTGMS

SEQ ID NO: 12179 - protein, 500 aa, synthetic construct
MRALVVIRLSRVTDATTSPERQLESCQQLCAQRGWDVVGVAEDLDVSGAVDPFDRKRRPNLARWIAFEEQPFDVIVAYRVDRLTRSIRHLQQLVHWAEDHKKLVVSATEAHFDTTTPFAAVVIALMGTVAQMELEAIKERSRSAAHFNIRAGKYRGSLPPWGYLPARVDGEWRLVPDPVQRERILEVYHRVVDDHEPLHLVAHDLNRRGVLSPKDYFAQLRGREPQGRKWSATALKRSMISEAMLGYATLNGKTVRDDDGAPLVRAEPILTREQQEALRAELVKTSRAKPAVSTPSLLLRVLFCAVCGEPAYKFAGGGRKHPRYRCRSMGFPKHCGNGTVAIAEWDAFCEEQVLDLLGDAERLEKVWVAGSDSAVELAEVNAELVDLTSLIGSPAYRAGSPQREALDARIAALAARQEELEGLEARPSGWEWRETGQRFGDWWREQDTATKNTWLRSMNVRLTFDVRGGLTRTIDFGDLQEYEQRLRLGSVVERLHTGMS

SEQ ID NO: 12180 - protein, 500 aa, synthetic construct
MRALVVIRLSRVTDATTSPERQLESCQQLCAQRGWDVVGVAEDLDVSGAVDPFDRKRRPNLARWLAFEEQPFDVIVAYRVDRLARSIRHLQQLVHWAEDHKKLVVSATEAHFDTTTPFAAVVIALMGTVAQMELEAIKERNRSAAHFNIRAGKYRGSLPPWGYLPTRVDREWRLVPDPVQRERILEVYHRVVDNHEPLHLVAHDLNRRGVLSPKDYFAQLRGREPQGRKWSATALKRSMTSEAMLGYATLNGKTVRNDDGAPLVRAEPILTREQLEALRAELVKTSRVKPAVSTPSLLLRVLFCAVCGEPAYKFAGGGRKHPRYRCRSMGFPKHCGNGTVAMAEWDAFCEEQVLGLLGDAERLEKVWVAGSDSAVELAEVNAELVDLTSLIGSPAYRAGSPQREALDARIAALAARQEGLEGLEARPSGWEWRETGQRFGDWWREQDTAAKNTWLRSMNVRLTFDVRGGLTRTIDFGDLQEYEQHLRLGGVVEHSHTGMS

SEQ ID NO: 12181 - protein, 500 aa, synthetic construct
MRALVVIRLSRVTDATTSPERQLESCQQLCAQRGWDVVGVAEDLDVSGAVDPFDRKRRPNLARWLAFGEQPFDVIVAYRVDRLARSIRHLQQLVHWAEDHKKLVVSATEAHFDTTTPFAAVVIALMGTVAQMELEAIKERSRSAAHFNIRAGKYRGSLPPWGYLPARVDGEWRLVPDPVQRERILEVYHRVVDNHEPLHLVAHDLNRRGVLSPKDYFAQLRGREPQGRKWSATALKRSMISEAMLGYATLNGKTVRDDDGAPLVRAEPILTREQLEALRAELVKTSRAKPAVSTPSLLLRVLFCAVCGEPAYKFAGGGRKHPRYRCRSMGFPKHCGNGTVAMAEWDAFCEEQVLDLLGDAERLEKVWVAGSDSAVELAEVNAELVDLTSLIGSPAYRAGSPQRVALDARIAALAARQEELEGLEARPSGWEWRETGQRFGDWWREQDTAAKNTWLRSMNVRLTFDVRGGLTRTIDFGDLQEYEQYLRPGSMVERLHTGMS

SEQ ID NO: 12182 - protein, 500 aa, synthetic construct
MRALVVIRLSRVTDATTSPERQLESCQQLCAQRGWDVVGVAEDLDVSGAVDPFDRKRRPNLARWLAFEEQPFDVIVAYRVDRLTRSTRHLQQLVHWAEDHKKLVVSATEAHFDTTTPFAAVVIALMGTVAQMELEAIKERTRSAAHFNIRAGKYRGSLPPWGYLPARVDGEWRLAPDPVQRERILEVYHRVVDNHEPLHLVAHDLNRRGVLSPKDYFAQLQGREPQGRKWSATALKRSMISVAMLGYATLNGKTVRDDDGAPLVRAEPILTREQLEALRAELVKTSRAKPAVSTPSLLLRVLFCAVCGEPAYKFAGGGRKHPRYRCRSMGFPKHCGNGTVAMAEWDAFCEEQVLNLLGDAERLEKVWVAGSDSAVELAEVNAELVDLSSLIGSPAYRAGSPLREALDARIAALAARQEELEGLEARPSGWEWRETGQRFGDWWREQDTVAKNTWLRSMNVRLTFDVRGGLTRTIDFGDLREYEQHLRLGSVVERLHTGMS

SEQ ID NO: 12183 - protein, 500 aa, synthetic construct
MRALVVIRLSRVTDATTSPERQLESCQQLCAQRGWDVVGVAEDLDVSGAVDPFDRKRRPNLARWLAFEEQPFDVIVAYRVDRLTRSIRHLQQLVHWAEDHKKIVVSATEAHFDTTTPFAAVVIALMGTVAQMELEAIKERSRSAAHFNIRAGKYRGSLPPWGYLPTRVDGEWRLVPDPVQRERILEVYHRVVDNHEPLHLVAHDLNRRGVLSPKDYFAQLQGREPQGRKWSATALKRSMISEAMLGHATLNGKTVRDDDGAPLVRAEPILTRGQLEALRAELVKTSRAKPAVSTPSLLLRVLFCAVCGEPAYKFAGGGRKHPRYRCRSMGFPKHCGNGTVAMAEWDAFCEEQVLDLLGDAERLEKVWVAGSDSAVELAEVNAELVDLTSLIGSPAYRAGSPQREALDARIAALAARQEELEGLEARPSGWGWRETGQRFGDWWREQDTAAKNAWLRSMNVRLTFDVRGGLTRTIDLGDLQEHEQHLRLGNVVERSHTGIS

SEQ ID NO: 12184 - protein, 500 aa, synthetic construct
MRALVVIRLSRVTDATTSPERQLESCQQLCAQRGWDVVGVAEDLDVSGAVDPFDRKRRPNLARWLAFEEQPFDVIVAYRVDRLTRSTRHLQQLVHWAEDHKKLVVSATEAHFDTTTPFAAVVIALMGTVAQMELEAIKERNRSAAHFNIRAGKYRGSLPPWGYLPTRVDGEWRLAPDPVQRERILEVYHRVVVNHEPLHLVAHDLNRRGVLSPKDYFAQLQGREPQGRKWSATALKRSMISEAMLGYATLNGKTVRDDDGAPLVRAEPILTREQQEALRAELVRTSRAKPAVSTPSLLLRVLFCAVCGEPAYKFAGGGRKHPRYRCRSMGFPKHCGNGTVATAEWDAYCEEQVLDLLGDAERLEKVWVASSGSAVELAEVNAELVDLTSLIGSPAYRAGSPQREALDARIAALAARQEELEGLEARPSGWEWRETGQRFGDWWREQDTAAKNTWLRSMNVRLTFDVRGGLTRTIDFGDLQEYEQHLHLGSVVERLHTGMS

SEQ ID NO: 12185 - protein, 500 aa, synthetic construct
MRALVVIRLSRVTDATTSPERQLESCQQLCAQRDWDVVGVAEDLDVSGAVDPFDRKRRPNLARWLAFEEQPFDVIVAYRVDRLTRSTRHLQQLVHWAEDHKKLVVSATEAHFDTTTPFAAVVIALMGTVAQMELEAIKERSRSAAHFNIRAGKYRGSLPPWGYLPARVDGEWRLVPDPVQRERILEVYHRVVDNHEPLHLVAHDLNRRGVLSPKDYFAQLRGREPQGRKWSATALKRSMTSEAMLGYATLNGKTVRNDDGAPLVRAEPILTREQLEALRAELVKTSRAKPAVSTPSLLLRVLFCAVCGEPAYKFAGGGRKHPRYRCRSMGFPKHCGNGTVAMAEWDAFCEEQVLDLLGDAERLEKVWVAGSDPAVELAEVNAELVDLTSLIGSPAYRAGSPQREALDARIAALAARQEELEGLEARPSGWEWRETGQRFGDWWREQDTAVKNAWLRSMNVRLTFDVRGGLTRTIDFGNLQEYEQHLRLGSVVERLHTGMS

SEQ ID NO: 12186 - protein, 500 aa, synthetic construct
MRALVVIRLSRVTDATTSPERQLESCQQLCAQRGWDVAGVAEDLDVSGAVDPFDRKRRPNLARWLAFEEQPFDVIVAYRVDRLTRSTRHLQQLVHWAEDHKKLVVSATEAHFDTTTPFAAVVIALMGTVAQMELEAIKERNRSAAHFNIRAGKYRGSLPPWGYLPTRVDGEWRLAPDPVQRERILEVYHRVVDNHEPLHLVAHDLNRRGVLSPKDYFAQLRGREPQGRKWSATALKRSMISVAMLGYATLNGKIVRDDDGAPLVRAEPILTREQLEALRAELVKTSRAKPAVSTPSLLLHVLFCAVCGEPAYKFAGGGRKHPRYRCRSMGFPKHCGNGTVAMAEWDAFCEEQVLDLLGDAERLEKVWVAGSDSAVELAEVNAELVDLTSLIGSPAYRAGSPQREALDAHIAALAARQEELEGSEARPSGWEWRGTGQRFGDWWREQDTAAKNTWLRSMNVRLTFDVRGGLTRTIDFGDLQEYEQHLRSGSVVGRLHTGMS

SEQ ID NO: 12187 - protein, 500 aa, synthetic construct
MRALVVIRLSRVTDATTSPERQLESCQQLCAQRGWDVVGVAEDLDVSGAVDPFDRKRRPNLARWLAFEEQPFDVIVAYRVDRLTRSTRHLQQLVHWAEDHKKLVASATEAHFDTTTPFAAVVIALMGTVAQMELEAIKERSRSAAHFNIRAGKYRGSLPPWGYLPARVDGEWRLVPDPVQRERILEVYHRVVDNHEPLHLVAHDLNRRGVLSPKDYFAQLQGREPQGRKWSATALKRSMISGAMLGYATLSGKTVRDDDGAPLVRAEPILTREQQEALRAELVETSRAKPAVSTPSLLLRVLFCAVCGEPAYKFTGGGRKHSRYRCRSMGFPKHCGNGTVAMAEWDAFCEEQVLNLLGDAGRLEKVWVAGSDSAVELAEVNAELVDLTSLIGSPAYRAGSPQRGALDARIAALAARQEELEGLEARPSGWEWRETGQGFGDWWREQDTAAKNIWLRSMNVRLTFDVRGGLTRTIDFGDLQEYEQHLRLGGVVERLHTGMS

SEQ ID NO: 12188 - protein, 500 aa, synthetic construct
MRALVVIRLSRVTDATTSPERQLESCQQLCAQRGWDVVGVAEDLDVSGAVDPFDRKRRPNLARWLAFEEQPFDVIVAYRVDRLTRSIRHLQQLVHWAEDHKKLVVSATEAHFDTTTPFAAVVIALMGTVAQMELEAIKERNRSAAHYNIRAGKYRGSLPPWGYLPARVDGEWRLVPDPVQRERILEVYHRVVDNHEPLHLVAHDLNRRGVLSPKDYFAQLQGREPQGRKWSATALKRSMISEAMLGYATLNGKTVRDDDGAPLVRAEPILTREQQEALRAELVKTSRAKPAVSTPSLLLRVLFCAVCGEPAYKFAGGGRKHPRYRCRSMGFPKHCGNGTVAMAEWDAFCEEQVLGLLGDAERLEKVWIAGSDSAVELAEVNAELVDLTSLIGSPAYRAGSPQREALDARIAALAARQEELEDLEARPSGWEWRETGQRFGDWWREQDTAAKNTWLRSMNVRLTFDVRGGLTRTIDFGDLQEYEQHLRLGSVVERLHTGMS

SEQ ID NO: 12189 - protein, 500 aa, synthetic construct
MRALVVIRLSRVTDATTSPERQLESCQQLCAQRGWDVVGVAEDLDVSGAVDPFDRKRRPNLARWLAFEEQPFDVIVAYRVDRLTRSTRHLQQLVHWAEDHKKLVVSATEAHFDTTTPFAAVVIALMGTVAQMELEAIKERSRSAAHFNIRAGKYRGSLPPWGYLPARVDGEWRLVPDPVQRERILEVYHRVVDNHEPLHLVAHDLNRRGVLSPKDYFAQLQGREPQGRKWSATALKRSMISGAMLGYATLNGKTVRDDDGAPLVRAEPILTREQLEALRAELVKTSRAKPAVSTPSLLLRVLFCAVCGEPAYKFAGGGRKHPRYRCRSMGFLKHCGNGTVAMAEWDAFCEEQVLDLLGDAERLEKVWVAGSDSAVELAEANAELVDLTSLIGSPAYRAGSPQREALDARIAALAARQEELEGLEARPSGWEWRGTGQRFGDWWREQDTAAKNTWLRSMNVRLTFDVRGGLTRTIDFGDLHEYEQHLRLGSVVERLRTGMS

SEQ ID NO: 12190 - protein, 500 aa, synthetic construct
MRALVVIRLSRVTDATTSPERQLESCQQLCAQRGWDVVGVAEDLDVSGAVDPFDRKRRPNLARWLAFEEQPFDVIVAYRVDRLARSIRHLQQLVHWAEDHKKLVVSATEAHFDTTTPFAAVVIALMGTVAQMELEAIKERNRSAAHFNIRAGKYRGSLPPWGYLPTRVDGEWRLVPDPVQRERILEVYHRVVDNHEPLHLVAHDLNRRGVLSPRDYFAQLQGREPQGRKWSATALKRSMISEAMLGYATLNGKTVRDDHGAPLVRAEPILTREQLEALRAELVKTSRAKPAVPTPSLLLRVLFCAVCGEPAYKFAGGGRKHPRYRCRSMGFPKHCGNGTVAMAEWDAFCEEQVLGLLGDAERLEKVWVAGSDSAVELAEVNAELVDLTSLIGSPAYRAGSPQREALDARIAALAARQEELEGLEARPSGWEWRETGQRFGDWWREQDTAARNTWLRSMNVRLTFDVRGGPTRTIDFGDLQEYEQYLRLGSMVERLHTGMS

SEQ ID NO: 12191 - protein, 500 aa, synthetic construct
MRALVVIRLSRVTDATTSPERQLESCQQLCAQRGWDVVGVAEDLDVSGAVDPFDRKRRPNLARWLAFEEQPFDVIVAYRVDRLTRSTRHLQQLVHWAEDHKKLVVSATEAHFDTTTPFAAVVIALMGTVAQMELEAIRERSRSAAHFNIRAGKYRGSLPPWGYLPARVDGEWRLVPDPVQRERILEVYHRVVDNHEPLHLVAHDLNRRGVLSPKDYFAQLQGREPQGRKWSATALKRSMISEAMLGYATLNGRTVRDDDGAPLVRAEPILTRGQLEALRAELVRTSRAKPAVSTPSLLLRVLFCAVCGEPAYKFAGGGRKHPRYRCRSMGFPKHCGNGTVAMAEWDAFCEEQVLNLLGDAERLEKVWVAGSDSAVELAEVNAELVDLTSLIGSPAYRAGSPQREVLDARIAALAARQEQLEGLEARPSGWEWRGTGQRFGDWWREQDTAAKNTWLRSMNVRLTFDVRGGLTRTIDFGDLQEYGQHLRLGGVVERLHTGMS

SEQ ID NO: 12192 - protein, 500 aa, synthetic construct
MRALVVIRLSRVTDATTSPERQLESCQQLCAQRGWNVVGVAEDLDVSGAVDPFDRKRRPNLARWLAFEEQPFDVIVAYRVDRLTRSVRHLQQLVHWAEDHKKLVVSATEAHFDTTTPFAAVVIALMGTVAQMELEAIKERSRSAAHFNIRAGKYRGSLPPWGYLPARVDGEWRLVPDPVQRERILEVYHRVVDNREPLHLVAHDLNRRGVLSPKDYFAQLRGREPQGRKWSATALKRSMISVAMLGYATLCGKTVRDDDGAPLVRAEPILTREQLEALRAELVKTSRAKPAVSTPSLLLRVLFCAVCGEPAYKFAGGGRKHPRYRCRSMGFPKHCGNGTVAMAEWDAFCEEQVLNLLGDAERLEKVWVAGSDSAVELAEVNKELVDLTSLVGSPAYRAGSPQREALDARIAALAARQEELEGLEARPSGWEWRGTGQRFGDWWRELDTAAKNTWLRSMNVRLTFDVRDGLARTIDFGDLQEYEQHLRLGSVVERSHTGMS

SEQ ID NO: 12193 - protein, 500 aa, synthetic construct
MRALVVIRLSRVTDTTTSPERQLESCQQLCAQRGWNVVGVAEDLDVSGAVDPFDRKRRPNLARWLAFEEQPFDVIVAYRVDRLARSIRHLQQLVHWAEDHKKLVVSATEAHFDTTTPFAAVVIALMGTVAQMELEAIKERSRSAAHFNIRAGKYRGSLPPWGYLPARVDGEWRLVPDPVQRERILEVYHRVVDNHEPLHLVAHDLNRRGVLSPKDYFAQLRGREPQGRKWSATALKRSMISVAMLGYATLCGKTVRDDDGAPLVRAEPILTLEQLEALRAELAKTSRAKPAVSTPSLLLRVLFCAVCGEPAYKFAGGGRKHPRYRCRSMGFPKHCGNGTVAMAEWDAFCEEQVLNLLGDAERLEKVWVAGSNSAVELAEVNAELVDLTSLIGSPAYRAGSPQREALDARIAALAARQEELGGLEARPSGWEWRETGQRFGDWWREQDTAAKNTWLRSMNVRLTFDVRGGLTRTIDFGDLQEYEQRLRLGSVVERLHTGMS

SEQ ID NO: 12194 - protein, 500 aa, synthetic construct
MRALVVIRLSRVTDATTSPERQRESCQQLCAQRGWDVVGVAEDLDVSGAVDPFDRKRRPNLARWLAFEEQPFDVIVAYRVDRLTRSIRHLQQLVHWAEDHKKLVVSATEAHFDTTTPFAAVVIALMGTVAQMELEAIRERNRSAARFNIRAGKYRGSLPPWGYLPTRVDGEWRLAPDPVQRERILEVYHRVVDNHEPLHLVAHDLNRRGVLSPKDYFAQLQGREPQGRKWSATALKRSLISVAMLGYATLNGKTVRDDDGAPLVRAEPILTRGQLEALRAELVKTSRAKPAVSTPSLLLRVLFCAVCGEPAYKFAGGGRKHPRYRCRSMGFPKHCGNGTVAMAEWDAFCEEQVLNLLGDAERLEKVWVAGSDSAVELAEVNAELVDLTSLIGSPAYRAGSPQREALDARIAALTARQEELEGLEARPSGWEWRGTGQRFGDWWREQDTAAKNTWLRSMNVRLTFDVRGGLTRTIDFGDLQEYEQHLRLGSVVERLYTGMS

SEQ ID NO: 12195 - protein, 500 aa, synthetic construct
MRALVVIRLSRVTDATTSPERQLESCQQLCAQRGWDVVGVAEDLDVSGAVDPFDHKRRPNLARWLAFEEQPFDVIVAYRVDRLTRSTRHLQQLVHWAEDHKKLVVSATEAHFDTTTPFAAVVIALMGTVAQMELEAIKERSRSAAHFNIRAGKYRGSLPPWGYLPTRVDGEWRLAPDPVQRERILEVYHRVVDNHEPLHLVAHDLNRRGVLSPKDYFAQLQGREPQGRKWSATALKRSMTSEAMLGYATLNGKTVRDDDGAPLVRAEPILTREQLEALRAELVKTSRAKPAVSTPSLLLRVLFCAVCGEPAYKFSGGGRKHPRYRCRSMGFPKHCGNGTVAMAEWDAFCEEQVLDLLGDAERLEKVWVAGSDSAVELAEVNAELVDLTSLIGSPAYRAGSPQREALDARIAALAARQEELEGLEARPSGWEWRETGQRFGDWWREQDTAAKNTWLRSMNVRLTFDVRGGLTRTIDFGDLQEYEQHLRLGSVVERLHTGMP

SEQ ID NO: 12196 - protein, 500 aa, synthetic construct
MRALVVIRLSRVTDATTSPERQLESCQQLCAQRGWDVVGVAEDLDVSGAVDPFDHKRRPNLARWLAFEEQPFDVIVAYRVDRLTRSTRHLQQLVRWAEDHKKLVVSATEAHFDTTTPFAAVVIALMGTVAQMELEAIKERNRSAAHFNIRAGKYRGSLPPWGYLPTRVDGEWRLVPDPVQRERILEVYHRVVDNHEPLHLVAHDLNRRGVLSPKDYFAQLQGREPQGRKWSATALKRSMISEAMLGYATLNGKTVRDDDGAPLVRAEPILTREQQEALRAELVKTSRAKPAVSTPSLLLRVLFCAVCGEPAHKFAGGGRKHPRYRCRSMGFPKHCGNGTVAMVEWDAFCEEQVLGLLGDAERLEKVWVAGSDSAVELAEVNAELVDLTSLIGSPAYRAGSPQREALDARIAALAARQEELEGLETRPSGWEWRETGQRFGDWWREQDTAAKNTWLRSMNVRLTFDVRGGLTRTIDFGDLQEYEQHLRLGGVVERLHTGMS

SEQ ID NO: 12197 - protein, 500 aa, synthetic construct
MRALVVIRLSRVTDATTSPERQLESCQQLCAQRGWDVVGVAEDLDVSGAVDPFDRKRRPNLARWLAFEEQPFDVIVAYRVDRLTRSTRHLQQLVHWAEDHKKLVVSATEAHFDTTTPFAAVAIALMGTVAQMELEAIKERNRSAAHFNIRAGKYRGSLPPWGYLPTRVDGEWRLVPDPVQRERILEVYHRVVDNHEPLHLVAHDLNRRGVLSPRDYFAQLQGREPQGRKWSATALKRSMISGAMLGYATLNGKTVRDDDGAPLVRAEPILTREQLEALRAELAKTSRAKPAVSTPSLLLRVLFCAVCGEPAYKFSGGGRKHPRYRCRSMGFPKHCGNGTVAMVEWDTFCEEQVLDLLGDAERLEKVWVAGSDSAVELAEVNAELVDLTSLIGSPAYRAGSPQREALDARIAALAARQAELEGLEARPSGWEWRETGQGFGDWWREQDTAAKNTWLRSMNVRLTFDVRGGLTRTIDFGDLQEYEQHLRLGGVVERLHTGMS

SEQ ID NO: 12198 - protein, 500 aa, synthetic construct
MRALVVIRLSRVTDATTSPERQLESCQQLCAQRGWDVVGVAEDLDVSGAVDPFDRKRRPNLARWLAFEEQPFDAIVAYRVDRLARSIRHLQQLVHWAEDHKKLVVSATEAHFDTTTPFAAVVIALMGTVAQMELEAIKERSRSAAHFNIRAGKYRGSLPPWGYLPTRVDGEWRLVPDPVQRERILEVYRRVVNNHEPLHLVAHDLNRRGVLSPKDYFAQLQGREPQGRKWSATALKRSMTSEAMLGYATLNGKTVRDDGGAPLVRAEPILTREQLGALRAELVETSRAKPAVSTPSLLLRVLFCAVCGEPAYKFAGGGRKHPRYRCRSMGFPKHCGNGTVAMAEWDAFCEEQVLGLLGDAERLEKVWVAGSDSAVELAEVNAELVDLTSLIGSPAYRAGSPQREALDARIAALAARQEELEGLEARPSGWEWRETGQRFGDWWRVQDTAAKNTWLRSMNVRLTFDVRGGLTRTIDFGDLHEYEQHLRLGSVVERLHTGMS

SEQ ID NO: 12199 - protein, 500 aa, synthetic construct
MRALVVIRLSRVTDATTSPERQLESCQQLCAQRGWDVVGVAEDLDVSGAVDPFDRKRRPNLARWLAFEEQPFDVIVAYRVDRLARSIRHLQQLVHWAEDHKKLVVSATEAHFDTTTPFAAVVIALMGTVAQMELEAIKERSRSAAHYNIRAGKYRGSLPPWGYLPTRVDREWRLAPDPVQRERILEVYHRVVDNHEPLHLVAHDLNRRGVLSPKDYFAQLRGREPQGRKWSATALKRSMISEAMLGYATLNGKIVRDDDGAPLVRAEPILTREQLEALRAELVKTSRAKPAVSTPSLLLRVLFCAVCGEPAYKFAGGGRKHPRYRCRSMGFLKHCGNGTVAMAEWDAFCEEQVLELLGDAGRLEKVWVAGSDSAVELAEVNAELVDLTSLIGSPAYRAGSPQREALDARIAALAARQEELEGLEARPSGWEWRETGQRFGDWWREQDIAAKNTWLRSMNVRLTFDVRGGLTRTIDFGDLQEYEQHLRLGSVVERLHTGMS

SEQ ID NO: 12200 - protein, 500 aa, synthetic construct
MRALVVIRLSRVTEATTSPERQLESCQRLCAQRGWDVVGVAEDLDVSGAVDPFDRKRRPNLARWLAFEEQPFDVIVAYRVDRLARSIRHLQQLVHWAEDHKKLVVSATEAHFDTTTPFAAVVIALMGTVAQMELEAIKERNRSAAHFNIRAGKYRGSLPPWGYLPTRVDGEWRLVPDPVQRERILEVYHRVVDNHEPLHLVAHDLNRRGVLSPKDYFAQLRGREPQGRKWSATALKRSMISEAMLGYATLNGKTVRDDDGAPLVRAEPILTREQLEALRAELVKTSRAKPAVSTPSLLLRVLFCAVCGEPAYKFAGGGRKHPRYRCRSMGFPKHCGNGTVAMAEWDAFCEEQVLDLLGDTERLEKVWVAGSDSAVKLAEVNAELVDLTSLIGSPAYRAGSPQREALDARIAALAARQEELGGLEARPSGWEWRETGQRFGDWWREQDTAAKNTWLRSMNVRLTFDVRGGLTRTIDFGDLQEYEQHLRLGSAVERLHTGMS

SEQ ID NO: 12201 - protein, 500 aa, synthetic construct
MRALVVIRLSRVTDATTSPERQLESCQQLCAQRGWDVVGVAEDLDVSGAVDPFDRKRRPNLARWLAFEEQPFDVIVTYRVDRLTRSIRHLQQLVHWAEDHKKLVVSATEAHFDTTTPFAAVVIALMGTVAQMELEAIKERSRSAAHFNIRAGKYRGSLPPWGYLPARVDGEWRLVPDPVQRERILEVYHRVVDNHEPLHLVAHDLNRRGVLSPKDYFAQLRGREPQGRKWSATALKRSMTSEAMLGYATLNGKTVRDDDGAPLVRAEPILTREQLEALRAVLVKTSRAKPAVSTPSLLLRVLFCAVCGEPAYKFAGGGRKHPRYRCRSMGFPKHCGNGTVAMAEWDAFCEEQVLDLLGDTEHLEKVWIAGSDSAAELAEVNVELVDLTSLIGSPAYRVGSPQREALDARIAALAARQEELEGLEARPSGWEWRETGQRFGDWWREQDTAAKNTWLRSMNVRLTFDVRGGPTRTIDFGDLQGYEQHLRLGNAVERLHTGMS

SEQ ID NO: 12202 - protein, 500 aa, synthetic construct
MRALVVIRLSRVTDATTSPERQLESCQQLCAQRGWDVVGVAEDLDVSGAVDPFDRKRRPNLARWLAFEEQPFDVIVAYRVDRLARSIRHLQQLVHWAEDHKKLVVSATEAHFDTTTPFAAVVIALMGTVAQMELEAIKERSRSAAHFNIRAGKYRGSLPPWGYLPTRVDGEWRLVPDPVQRERILEVYHRVVDDHEPLHLVAHDLNRRGILSPKDYFAQLRGREPQGRKWSATALKRSMISVAMLGYATLNGKTVRDDDGAPLVRAEPILTREQLEALRAELVKTSRAKPAVSTPSLLLRVLFCAVCGEPAYKFAGGGRKHPRYRCRSMGFPKHCGNGTVAMAEWDAFCEEQVLNLLGDAERLEKVWVAGSDSAVELAEVNAELVDLTSLIGSPAYRAGSPQREALDARIAALAARQEELEGLEARPSGWEWRETGQRFGDWWREQDTAAKNTWLRSMNVRLTFDVRGGLTRMIDFGDLQEYEQHLRIGSVVERLHTGMS

SEQ ID NO: 12203 - protein, 500 aa, synthetic construct
MRALVVIRLSRVTDATTSPERQLESCQQLCAQRGWDVVGVAEDLDVSGAVDPFDRKRRPNLARWLAFEEQPFDVIVAYRVDRLTRSVRHLQQLVHWAEDHKKLVVSATEAHFDTTTPFAAVVIALMGTVAQMELEAIKERSRSAAHFNIRAGKYRGSLPPWGYLPARVDGEWRLVPDPVQRERILEVYHRVVDNHEPLHLVAHDLNRRGVLSPKDYFAQLRGREPQGRKWSATALKRSMISVAMLGYATLCGKTVRDDDGAPLVRAEPILTREQLEALRAELVKTSRAKPAVSTPSLLLRVLFCAVCGEPAYKFAGGGRKHPRYRCRSMGFPKHCGNGTVAMAEWDAFCEEQVLDLLGDAERLEKVWVAGSDSAVELAEVNKELVDLTSLIGSPAYRAGSPQREALDARTAALAARQEELEGLEARPSGWEWRGTGQRFGDWWRELDTAAKNTWLRSMNVRLTFDVRDGLTRTIDFGDLQEYEQHSRLGSVVERSHTGMS

SEQ ID NO: 12204 - protein, 500 aa, synthetic construct
MRALVVTRLSRVTDATTSPERQLESCQQLCAQRGWDVVGVAEDLDVSGAVDPFDRKRRPNLARWLAFEEQPFDVIVVYRVDRLTRSVRHLQQLVHWAEDHKKLVVSATEAHFDTTTPFAAVVIALMGTVAQMELEAIKERSRSAAHFNIRAGKYRGSLPPWGYLPARVDGEWRLVPDPVQRERILEVYHRVVDNHEPLHLVAHDLNRRGVLSPKDYFAQLRGREPQGRKWSATALKRSMISVAMLGYATLCGKTVRDDDGAPLVRAEPILTREQLEALRAELVKTSRAKPAVSTPSLLLRVLFCAVCGEPAYKFAGGGRKHPRYRCRSMGFPKHCGNGTVAMAEWDAFCEEQVLDLLGDAERLEKVWVAGSDSAVELAEVNAELVDLMSLISSPAYRAGSPQREALDARIAALAARQEELEGSEARPSGWEWRETGQRFGDWWREQDTAAKNTWLRSMNVRLTFDVRGGLTRTIDFGDLQEYEQHLRLGSVVERLHTGMS

SEQ ID NO: 12205 - protein, 500 aa, synthetic construct
MRALVVIRLSRVTDATTSPERQLGSCQQLCAQRGWDVVGVAEDLDVSGAVDPFDRKRRPNLARWLAFEKQPFDVIVAYRVDRLARSIRHLQQLVHWAEDHKKLVVSATEAHFDTTTPFAAVVIALMGTVAQMELEAIKERNRSAAHFNIRAGKYRGSLPPWGYLPARVDGVWRLVPDPVQRERILEVYHRVVDDHEPLHLVAHDLNRRGVLSPKDYFAQLQGREPQGRKWSATALKRSMISEAMLGYATLNGKTVRDDDGAPLVRAEPILTRGQLEALRAELAKTSRAKPAVSTPSLLLRVLFCAVCGEPAYKFTGGGRKHPRYRCRSMGFPKHCGNGTVAMAEWDAFCEEQVLSLLGDAERLEKVWVAGSDSAVELAEVNAELVDLTSLIGSPAYRAGSPQREALDARIAALAARQEELEGLEARPSGWEWRETGQRFGDWWREQDTAAKNTWLRSMNVRLTFDVRGGLTRTIDFGDLQEYEQHLRLGSVVERLHTGMS

SEQ ID NO: 12206 - protein, 500 aa, synthetic construct
MRALVVIRLSRVTDATTSPERQLESCQQLCAQRGWDVVGVAEDLDVSGAVDPFDRKRRPNLARWLAFEERPFDVIVAYRVDRLARSIRHLQQLVHWAEDHKKLVVSATEAHFDTTTPFAAVVIALMGMVAQMELEAIKERSRSAAHFNIRAGKYRGSLPPWGYLPTRVDGEWRLVPDPVQRERILEVYHRVVVNHEPLYLVAHDLNRRGVLSPKDYFAQLQGREPQGRKWSATALKRSMISEAMLGYATLNGKTVRDDDGAPLVRAEPILTRGQLEALRAELVRTSRAKPAVSTPSLLLRVLFCAVCGEPAYKFAGGGRKHPRYRCRSMGFPKHCGNGTVAMAEWDTFCEEQVLDLLGDAERLEKVWVAGSDSAVELAEVNAELVDLTSLIGSPAYRAGSPQREALDARIAALAARQGELEGLEARPSGWEWRETGQRFGDWWREQDTAAKNTWLRLMNVRLTFDVRGGLTRTIDFGDLQEYEQHLRLGSVVERLHTGMS

SEQ ID NO: 12207 - protein, 500 aa, synthetic construct
MRALVVIRLSRVTDATTSPERQLESCQQLCAQRGWDVVGVAEDLDVSGAVNPFDRKRRPNLARWLAFEEQPFDVIVAYRVDRLTRSTRHLQQLVHWAEDHKKLVVSATEAHFDTTTPFAAVVIALMGTVAQMELEAIKERSRSAAHFNIRAGKYRGSLPPWGYQPTRVDGEWRLVPDPVQRERILEVYHRVVDNHEPLHLVAHDLNRRGVLSPKDYFAQLQGREPQGRKWSATALKRSMISEAMLGYATLNGKIVRDDDGAPLVRAEPILTREQLGALRAELVKTSRAKPAVSTPSLLLRVLFCAVCGEPAYKFAGGGRKHPRYRCRSMGFPKHCGNGTVAMAEWDAFCEEQVLDLLGDAERLEKVWVAGSDSAVELAEVNAELVDLTSLIGSPAYRAGSPQREALDARIAALAARQEELEGLEARPSGWEWHETGQRFGDWWREQDTAAKNTWLRSMNVRLTFDVRGGLTRTIDFGDLQEYEQHLRLGSVVERLHTGMS

SEQ ID NO: 12208 - protein, 500 aa, synthetic construct
MRALVVIRLSRVTDATTSPERQLESCQQLCAQRGWDVVGVAEDLDVSGAVDPFDRKRRPNLARWLAFEEQPFDAIVAYRVDRLTRSIRHLQQLVHWAEDHKKLVVSATEAHFDTTTPFAAVVIALMGTVAQMELEAIKERVRSAAHFNIRAGKYRGSLPPWGYLPTRVDGEWRLAPDPVQRERILEVYHRVVDNHESLHLVAHDLNRRGVLSPKDYFAQLRGREPQGRKWSATALKRSMTSEAMLGYATLNGKTVRDDDGAPLVRAEPILTREQLEAIRAELVKTSRAKPAVSTPSLLLRVLFCAVCGEPAYKFAGGGRKHPRYRCRSMGFPKHCGNGTVAMAEWDAFCEEQVLDLLGDAERLEKVWVAGSDSAVELAEVNAELVDLTSLIGSPAYRAGSPQREALDARIAALAARQEELEGLEARPSGWEWRETGQRFGDWWREQDTAAKNTWLRSMNVRLTFDVRGGLTRTIDLGDLQEYEQHLRLGSVVERSHTGMP

SEQ ID NO: 12209 - protein, 500 aa, synthetic construct
MRALVVIRLSRVTEATTSPERQLESCQQLCAQRGWDVVGVAEDLDVSGAVDPFDHKRRPNLARWLAYEEQPFDVIVAYRVDRLTRSVRHLQQLVHWAEDHEKLVVSATEAHFDTTTPFAAVVIALMGTVAQMELEAIKERGRSAAHFNIRAGKYRGSLPPWGYLPARVDGEWRLVPDPVQRERILEVYHRVVDNHEPLHLVAHDLNRRGVLSPKDYFAQLRGREPQGRKWSATALKRSMISEAMLGYATLNGKTVRDDDGAPLVRAEPILTREQQEALRAELVKTSRAKPAVSTPSLLLRVLFCAVCGEPAYKFAGGGRKHPRYRCRSMGFLKHCGNGTVAMAEWDAFCEEQVLDLLGDAERLEKVWVAGSDSAVELAEVNAELVDLTSLIGSPAYRAGSPQREALDARIAALAARQEELVSLEARPSGWEWREAGQRFGDWWREQDTAAKNTWLRSMNVRLTFDVRGGLTRTIDFGDLREYEQHLRLGSVVERLHTGMS

SEQ ID NO: 12210 - protein, 500 aa, synthetic construct
MRALVVIRLSRVTDATTSPERQLESCQQLCAQRGWDVVGVAEDLDVSGAVDPFDRKRRPSLARWLAFEEQPFDAIVAYRVDRLTRSIRHLQQLVHWAEDHKKLVVSATEAHFDTTTPFAAVVIALMGTVAQMELEAIKERNRSAAHFNIRAGKYRGSLPPWGYLPTRVDGEWRLVPDPVQRERILEVYHRVVNNHEPLHLVAHDLNRRGVLSPRDYFAQLRGREPQGRKWSATALKRSMISEAMLGYATLNGKIVRDDDGAPLVRAEPILTREQLEALRAELVKTSRAKPAVSTPSLLLRVLFCAVCGEPAYKFAGGGRKHPRYRCRSMGFPKHCGNGTVAMAEWDAFCEEQVLDLLGDAERLEKVWVAGSDSAVELAEVNAELVDLTSLIGSPVYRAGSPQREALDARIAALAARQEELEGLEARPSGWEWRETGQRFGDWWRVQDTAAKNTWLRSMNVRLTFDVRGGRTRTIDFGDLHEYEQRLRLGSVVERLHTGMS

SEQ ID NO: 12211 - protein, 500 aa, synthetic construct
MRALVVIRLSRVTDATTSPERQLESCQQLCAQRGWDVVGVAEDLDVSGAVDPFDRKRRPNLARWLAFEEQPFDAIVAYRVDRLTRSIRHLQQLVHWAEDHKKLVVSATEAHFDTTTPFAAVVIALMGTVAQMELEAIKERNRSAAHFNIRAGKYRGSLPPWGYLPTRVNGEWRLVPDPVQRERILEVYHRVIDNHEPLHLVAHDLNRRGVLSPKDYFAQLQGREPQGRKWSATALKRSMTSEAMLGYATLNGKTVRDDDGAPLVRAEPILTREQREALRAELAKTSRAKPAVSTPSLLLRVLFCAVCGEPAYKFSGGGRKHPRYRCRSMGFPKHCGNGTVAMAEWDAFCEEQVLGLLGDAERLEKVWVAGSDSAVELAEVNAELVDLTSLIGSPAYRADSPQREALDARIAALAVRQEELEGLEARPSGWEWRETGQRFGDWWREQDTAAKNTWLRSMNVRLTFDVRGGLTRTIDFGDLQEYVQHLRLGSVVERLHTGMS

SEQ ID NO: 12212 - protein, 500 aa, synthetic construct
MRALVVIRLSRVTDATTSPERQLESCQQLCAQRGWDVVGVAEDLDVSGAVDPFDRKRRPNLARWLAFEEQPFDAIVAYRVDRLARSIRHLQQLIHWAEDHKKLVVSATEAHFDTTTPFAAVVIALMGTVAQMELEAIRERSRSAAHFNIRAGKYRGSLPPWGYLPTRVDGEWRLVPDPVQHERILEVYHRVVDNHEPLHLVAHDLNRRGVLSPKDYFAQLRGREPQGRRWSATALKRSMISEAMLGYATLNGRTVRDDDGAPLVRAEPILTREQLEALRAELVKTSRAKPAVSTPSLLLRVLFCAVCGEPAYKFAGGGRKHPRYRCRSMGFPKHCGNGTVAMAEWDAFCEKQVLDLLGDAERLEKVWVAGSDSAVELAEVNAELVDLTSLICSPAYRAGSPQREALDARIAALAARQEELEGLEARSSGWEWRETGQRFGDWWREQDTAARNTWLRSMNVRLTFDVRGGLTRTIDFGDLQEYEQHLRLGSAVERLHTGMS

SEQ ID NO: 12213 - protein, 500 aa, synthetic construct
MRALVVIRLSRVTDATTSPERQLESCQQLCARRGWDVVGVAEDLDVSGAVDPFDRKRRPNLAHWLAFEEQPFDVIVAYRVDRLARSIRHLQQLVNWAEDHKKLVVSATEAHFDTTTPFAAVVIALMGTVAQMELEAIKERNRSAAHFNIRAGKYRGSLPPWGYLPTRVDGEWRLVPDPVQRERILEVYHRVVDNHEPLHLVAHDLNRRGVLSPKDYFAQLRGREPQGRKWSATALKRSMTSEAMLGYATLNGKTVRDDDGAPLVRAEPILTREQLEALRAELVKTSRAKPAVSTPSLLLRVLFCAVCGEPAYKFAGGGRKHPRYRCRSMGFPKHCGNGTVAMAEWDAFCEEQVLVLLGDAERLEKVWVAGSDSAVELAEVNAELVDLTSLIGSPVYRAGSPQREALDARIAALAARQEELEGLGARPSGWEWRETGQRFGDWWREQDTAAKNTWLRSMDVRLTFDVRGGLTRTIDFGDLQGYEQHLRSGSGAERLHTGMS

SEQ ID NO: 12214 - protein, 500 aa, synthetic construct
MRALVVIRLSRVTDATTSPERQLESCQQLCAQRGWDVVGVAEDLDVSGAVDPFDRKRRPNLARWLAFEEQPFDVIVAYRVDRLTRSIRHLQRLVHWAEDHKKLVVSATEAHFDTTTPFAAVTIALMGTVAQMELEAIKERSRSAAHFNIRAGKYRGSLPPWGYLPTRVDGEWRLAPDPVQRERILEVYHRVVDDHEPLHSVAHDLNRRGVLSPRDYFAQLQGREPRGRKWSATALKRSMISEAMLGYVTLNGKTVRDDGGAPLVRAEPILSREQLEALRAELVKTSRAKPAVSTPSLLLRVLFCAVCGEPAYKFAGGGRKHPRYRCRSMGFPKHCGNGTVAMAEWDAFCEEQVLNLLGGAERLEKVWVAGSDSAVELAEVNAELVGLTSLIGSPAYRAGSPQREALDARIAALAARQEELEGLEARPSGWEWRETGQRFGDWWREQDTAAKNTWLRSMNVRLTFDVRGGLTRTIDFGDLQEYEQHLRLGSVVERLHTGMS

SEQ ID NO: 12215 - protein, 500 aa, synthetic construct
MRALVVIRLSRVTDATTSPERQLESCQQLCAQRGWDVVGVAEDLDVSGAVDPFDRKRRPNLARWLAFEEQPFDVIVAYRVDRLTRSTRHLQQLVHWAEDHRKLVVSATEAHFDTTTPFAAVVIALMGTVAQMELEAIKERNRSAAHFNIRAGKYRGSLPPWGYLPTRVDGEWRLVPDPVQHERILEVYHRVVDNHEPLHLVAHDLNRRGVLSPKDYFAQLQGREPQGRKWSATALKRSMISGAMLGYATLNGKTVRDDDGAPLVRAEPILTREQQEALRAELVKTSRAKPAVSTPSLLLRVLFCAVCGEPAYKFAGGGRKHPRYRCRSMGFPKHCGNGTVAMAEWDAFCEEQVLNLLGDAERLEKVWVAGSDSAVELAEVNAELVDLTSLIGSPAYRAGSTQREALDARIAALAARQEELEGLEARPSGWEWRETGQRFGDWWREQDTAAKNTWLRTMNVRLTYDVRGGLTRTIDFGDLQEYEQHLRSGSVVERLHTGMS

SEQ ID NO: 12216 - protein, 500 aa, synthetic construct
MRALVVIRLSRVTDATTSPERQLESCQQLCAQRGWDVVGVAEDLDVSGAVDPFDRKRRPNLARWLAFEEQPFDVIVAYRVDRLTRSVRHLQQLVHWAEDHKKLVVSATEAHFDTTTPFAAVVIALMGTVAQMELEAIKERSRSAAHFNIRAGKYRGSLPPWGYLPARVDGEWRLVPDPVQRERILEVYHRVVDNHEPLHLVAHDLNRRGVLSPKDYFAQLRGREPQGRKWSATALKRSMISVAMLGYATLCGETVRDDDGAPLVRAEPILTREQLEALRAELVKTSRAKPAVSTSSLLLRVLFCAVCGEPAYKFAGGGRKHPRYRCRSMGFPKHCGNGTVAMAEWDAFCEEQVLNLLGDAERLEKVWVAGSDSAVELAEVNKELVDLTSLIGSPAYRAGSQQREALDARIAALAARQEELEGLEARPPGWEWRETGQRFGDWWREQDTAAKNTWLRSMNVRLTFDVRGGLTRTIDFGDLQEYEQHLRLGSAVERLYTGMS

SEQ ID NO: 12217 - protein, 500 aa, synthetic construct
MRALVVIRLSRVTDATTSPERQLESCQQLCAQRGWDVVGVAEDLDVSGAVDPFDRKRRPNLARWLAFEEQPFDVIVAYRVDRLTRSVRHLQQLVHWAEDHKKLVVSATEAHFDTTTPFAAVVIALMGTVAQMELEAIKERSRSAAHFNTRAGKYRGSLPPWGYLPARVDGEWRLVPDPVQRERILEVYHRVVDDHEPLHLVAHDLNRRGVLSPKDYFAQLQGREPQGRKWSATALKRSMISEAMLGYATLNGKTVRDGYGAPLVRAEPILTREQQEALRAELVKTSRAKPAVSTPSLLLRVLFCAVCGEPAYKFAGGGRKHPRYRCRSMGFPKHCGNGTVAMAEWDAFCEEQVLDLLGDAERLEKVWVAGSDSAVELAEVNAELVDLTSLIGSPAYRAGSPQREALDARIAALAARQEELEGLEARPSGWEWRGTGQRFGDWWREQDTAAKNTWLRSMNVRLTFDVRGGLTRTIDFGDLQEYEQHLRLGSVVERLHTGMS

SEQ ID NO: 12218 - protein, 500 aa, synthetic construct
MRALVVIRLSRVTDATTSPERQLESCQQLCAQRGWDVVGVAEDLDVSGAVDPFDRKRRPNLARWLAFEEQPFDAIVAYRVDRLTRSIRHLQQLVHWAEDHKKLVVSATEAHFDTTTPFAAVVIALMGTVAQMELEAIKERNRSAAHFNIRAGKYRGSLPPWGYLPTRVDGEWRLAPDPVQRERILEVYHRVVDDHEPLHSVAHDLNRRGVLSPRDYFAQLRGREPQGRKWSATALKRSMISEAMLGHATLNGKTVRDGDGAPLVRAEPILTREQLEALRAELVKTSRAKPAASTPSLLLRVLFCAVCGEPAYKFSGGGRRHPRYRCRSMGFPKHCGNGTVAMAEWDAFCEEQVLDLLGDAERLEKVWVAGSDSAVELAEVNAELVDLTGLIGSPAYRAGSPQREALDARIAALAARQEELEGLEARPSGWEWRETGQRFGDWWRVQDTAAKNTWLRSMNVRLTFDVRGGLTRTIDFGDLQEYMQHLRLGSVVERLHTGMS

SEQ ID NO: 12219 - protein, 500 aa, synthetic construct
MRALVVIRLSRVTDATTSPERQLESCQQLCAQRGWDVVGVAEDLDVSGAVDPFDRKRRPNLARWLAFEEQPFDVIVAYRVDRLVRSIRHLQQLVHWAEDHKKLVVSATEAHFDTTTPFAAVVIALMGTVAQMELEAIRERSRSAAHFNIRAGKYRGSLPPWGYLPTRVDGEWRLVPDPVQRERILEVYHRVVDKHEPLHLVAHDLNRRGVLSPKDYFAQLRGREPQGRKWSATALKRSMISEAMLGYATLNGKTVRDDDGAPLVRAEPILTREQQEALRAELVKTSRAKPAVSTPSLLLRVLFCAVCGEPAYKFAGGGRKHPRYRCRSMGFPKHCGNGTVAMAEWDAFCEEQVLDLLGDAERLEKVWVAGSDSAVELAEVNAELADLTSLIGSPAYRAGSPQREALDARIAALAARQAELEGLEARPSGWEWRETGQRFGDWWREQDTAAKNTWLRSMNVRLTFDVHGGLTRTIDFGDLQEYKQHLRLGSVVERSHTGMS

SEQ ID NO: 12220 - protein, 500 aa, synthetic construct
MRALVVIRLSRVTDATTSPERQLESCQQLCAQRGWDVVGVAEDLDVSGAVDPFDRKRRPNLARWLAFEEQPFDVIVAYRVDRLTRSTRHLQQLVHWAEDHKKLVVSATEAHFDTTTPFAAVVIALMGTVAQMELEAIKERSRSAAHFNIRAGKYRGSLPPWGYLPTRVDGEWRLVPDPVQRERILEVYHRVVVNREPLHLVAHDLNRRGVLSPKDYFAQLRGREPQGREWSATALKRSMLSEAMLGYATLNGKTVRDDDGAPLVRAEPILTREQQEALRAELVKTSRAKPAVSTPSLLLHVLFCAVCGEPAYKFAGGGRKHPRYRCRSMGFPKHCGNGTVAMAEWDTFCEEQVLDLLGDAERLEKVWVAGSDSAVELAEVNAELVDLTSLIGSPAYRAGSTQREALDARIAALAARQEELEGLEARPSGWEWRGTGQRFGDWWREQDTAAKNTWLRSMNVRLTYDVRGGLTRTIDFGDLQEYEQHLRSGSVVERLHTGMS

SEQ ID NO: 12221 - protein, 500 aa, synthetic construct
MRALVVIRLSRVTDATTSPERQLESCQQLCAQRGWDVVGVAEDLDVSGSVDPFDRKRRPNLARWLASEEQPFDVIVAYRVDRLTRSIRHLQQLVHWAEDHKKLVVSATEAHFDTTTPFAAVVIALMGTVAQMELEAIRERSRSAAHFNIRAGKYRGSLPPWGYLPARVDGEWRLVPDPVQRERILEVYHRVVDDHEPLHLVAHDLNRRGVLSPKDYFAQLRGREPQGRKWSATALKRSMISKAMLGYATLNGKTVRDDDGAPLVRAEPILTREQQEALRAELVKTSRAKPAVSTTSLLLRVLFCAVCGEPAYKFAGGGRKHPRYRCRSMGFPKHCGNGTVAMAEWDTFCEEQVLDLLGDAERLEKVWVAGPDSAVELAEVNAELVDLTSLIGSPAYRAGSPQREALDARIAALAARQEELEGLEARPSGWEWREAGQRFGDWWREQDTAAKNAWLRSMNVRLTFDVRGGLTRTIDFGDLQEYEQHLRLGSVVERLHTGMS

SEQ ID NO: 12222 - protein, 500 aa, synthetic construct
MRALVVIRLSRVTDATTSPERQLESCQQLCAQRGWDVVGVAEDLDVSGAVDPFDRKRRPNLARWLAFEEQPFDAIVAYRVDRLARSIRHLQQLVHWAEDHKKLVVSATEAHFDTTTPFAAVVIALMGTVAQMELEAIKERSRSAAHFNIRAGKYRGSLPPWGYLPARVDGEWRLVPDPVQRERILEVYHRVVDNHEPLHLVAHDLNRRGVLSPKDYFAQLQGREPQGREWSATALKRSMTSVAMLGYATLNGETVRDDDGAPLVRAEPILTREQLEALRAELVKTSRAKPAVSTPSLLLRVLFCAVCGEPAYKFSGGGRKHPRYRCRSMGFPKHCGNGTVAMAEWDAFCEEQVLDLLGDAERLEKVWVAGSDSAVELAEANAELVDLTSLIGSPAYRAGSPQREALDARIAALAARQEELEGLEARPSGWEWRGTGQRFGDWWREQGTAAKNTWLRSMNVRLTFDVRGGLTRTIDFGDLQEYERHLRLGSVVERLHTGTS

SEQ ID NO: 12223 - protein, 500 aa, synthetic construct
MRALVVIRLSRVTDATTSPERQLESCQQLCAQRGWDVVGVAEDLDVSGAVDPFDRKRRPNLARWLAFEEQPFDVIVAYRVDRLARSIRHLQQLVHWAEDHKKLVVSATEAHFDTTTPFAAVVIALMGTVAQMELEAIKERNRSAAHFNIRAGKYRGSLPPWGYLPTRVDGEWRLVPDPVQRERILEVYHRVVDDHEPLHLVAHDLNRRGVLSPKDYFAQLRGREPQGRKWSATALKRSMISEAMLGYATLNGKTVRDDDGAPLVRAEPILTREQLEAIRAELVKTSRAKPAVSTPSLLLRVLFCAVCGEPAYKFAGGGRKHPRYRCRSMGFPKHCGNGTVAMAEWDAFCEEQVLDLLGDAERLEKVWVAGSDSAVELSEVNAELVDLTSLIGSPAYRASSPQREALDARIAALAARQEELEGLEARPSGWEWRETGQRFGDWWREQDTAAKNTWLRSMNVRLTFDVRGGLTRTIDFGDLQVYEQHLRLGSVVERLHTGMS

SEQ ID NO: 12224 - protein, 500 aa, synthetic construct
MRALVVIRLSRVTDATTSPERQLESCQQLCAQRGWDVVGVAEDLDVSGAVDPFDRKRRPNLARWLAFEEQPFDVIVAYRVDRLARSIRHLQQLVHWAEDHKKLVVSATEAHFDTTTPFAAVAIALMGTVAQMELEAIKERTRSAAHFNIRAGKYRGSLPPWGYLPSRVDGEWRLVPDPVQRERILEVYHRVVDNHEPLHLVAHDLNRRGVLSPKDYFAQLRGREPQGRKWSATALKRSMTSEAMLGYATLNGKTVRDDDGAPLVRAEPILTREQLEALRAELVKTARAKPAVSTPSLLLRVLFCAVCGEPAYKFAGGGRRHPRYRCRSMGFPKHCGNGTVAMAEWDAFCEEQVLDLLGDAERLEKVWVAGSDSAAELAEVNAGLVDLTSLIGSPAYRTGSPQREALDARIAALAARQEELEGLEARPSGWEWRETGQRFGDWWREQDTAAKNTWLRSMNVRLTFDVRGGLTRTIDLGDLQECEQRLRSGSAVERLHTGMS

SEQ ID NO: 12225 - protein, 500 aa, synthetic construct
MRALVAIRLSRVTDATTSPERQLESCQQLCAQRGWDIVGVAEDLDVSGAVDPFDRKRRPNLARWLAFEEQLFDVIVAYRVDRLTRSIRHLQQLVHWAEDHKKLVVSATEAHFDMTTPFAAVVIALMGTVAQMELEAIKERNRSAAHFNIRAGKYRGSLPPWGYLPTRVDGEWRLAPDPVQRERILEVYHRLVDNHEPLHLVAHDLNRRGVLSPRDYFAQLRGREPQGRKWSATALKRSMISEAMLGYATLNGRTVRDDGGAPLVRAEPILTREQQEALRAELVKTSRAKPAVSTPSLLLRVLFCAVCGEPAYKFAGGGRKHPRYRCRSMGFPKHCGNGTVAMAEWDAFCEEQVLNLLGDAERLEKVWVAGSDSAVELAGVNAELVDLTSLIGSPAYRAGSPQREALDARIAALVARQEELEGLEARPSGWEWRETGQRFGDWWCEQDTAAKNTWLRSMNVRLTFDVRGGLTRTIDFGDLQGYEQHLRLGSVVERSHTGMS

SEQ ID NO: 12226 - protein, 500 aa, synthetic construct
MRALVVIRLSRVTDATTSPERQLESCQQLCAQRGWDVVGVAEDLDVSGAVDPFDRKRRPNLARWLAFEEQPFDVVVAYRVDRLARSIRHLQQLVHWAEDHKKLVVSATEAHFDTTTPFAAVVIALMGTVAQMELEAIKERSRSAAHFNIRAGKYRGSLPPWGYLPTRVDGEWRLAPDPVQRERILEVYHRVVDNHEPLHLVAHDLNRRGVLSPKDYFAQLRGREPQGRKWSATALKRSMVSEAMLGYATLNGKTVRDDDGAPLVRAEPILTREQLEALRAELVKTSRAKPAVSTPSLLLRVLFCAVCGEPAYKFAGGGRKHPRYRCRSMGFPKHCGNGTVAMAEWDAFCEEQVLDLLGDAERLEKVWVAGSDSAVELAEVNAELVDLTSLIGSPAYRTGSPQREALDARIAALATRQEELEGLEARPSGWGWRETGQRFGDWWLEQDTAAKNTWLRSMNVRLTFDARGGLTRTIDFGDLQEYEQRLRLGSVVERLHTGMS

SEQ ID NO: 12227 - protein, 500 aa, synthetic construct
MRALVVIRLSRVTDATTSPERQLESCQQLCAQRGWDVVGVAEDLDVSGAVDPFDRKRRPNLARWLAFEERPFDVIVAYRVDRLTRSTRHLQQLVHWAEVHKKLVVSATEAHFDTTTPFAAVVIALMGTVAQMELEAIKERSRSAAHFNIRAGKYRGSLPPWGYLPARVDGEWRLVPDPVQRERILEVYHRVVDNHEPLHLVAHDLNRRGVLSPKDHFAQLRGREPQGRKWSATALKRSMISEAMLGYATLNGKTVRDDDGAPLVRAEPILTREQLEALRAELVKTSRAKPAVSTPSLLLRVLFCAVCGEPAYKFAGGGRKHPRYRCRSMGFPKHCGNGTVAMAEWDAFCEEQVLDLLGDAERLEKVWVADSDSAVKLAEVNAELVDLTGLIGSPAYRAGSPQREALDARIAALAARQEELEGLEARPSGWEWRGTGQRFGDWWREQDTAAKNTWLRSMNVRLTFDVRGGLTRTIDFGDLQEYEQHLRLGSVVERLHTGMS

SEQ ID NO: 12228 - protein, 500 aa, synthetic construct
MRALVVIRLSRVTDTTTSPERQLESCQQLCAQRGWDVVGVAEDLDVSGAVDPFDHKRRPNLARWLAFEEQPFDVIVAYRVDRLARSIRHLQQLVHWAEDHKKLVVSATEAHFDTTTPFAAVVIALMGTVAQMELEAIKERNRSAAHFNIRAGKYRGSLPPWGYLPARVDGVWRLVPDPVQRERILEVYHRVVDDHEPLHLVAHDLNRRGVLSPKDYFAQLRGREPQGRKWSATALKRSMISEAMLGYATLYGKTVRDDDGAPLVRAEPILTREQQEALRAELVKTSRAKPAVSTPSLLLRVLFCAVCGEPAYKFAGGGRKHPRYRCRSMGFLKHCGNGTVATAEWDAFCEEQVLDLLGDAERLEKVWVAGSDSVVELAEVSAELVDLTSLIGSPAYRAGSPQREALDARIAALAARQEELEGLEARPSGWEWRETGQRFGDWWREQDTAAKNTWLRSMNVRLTFDVRGGLTRTIDFGDLQEYEQHSRLGSVVERLHTGMS

SEQ ID NO: 12229 - protein, 500 aa, synthetic construct
MRALVVIRLSRVTDATTSPERQLESCQQLCAQRGWDVVGVAEDLDVSGAVDPFDRKRRPNLARWLAFEEQPFDAIVAYRVDRLTRSVRHLQQLVHWAGDHKKLVVSATEAHFDTTTPFAAVVIALMGTVAQMELEAIKERSRSAAHFNIRAGKYRGSLPPWGYLPTRVDGEWRLAPDPVQRERILEVYHRVVDNHEPLHLVAHDLNRRGVLSPRDYFAQLRGREPQGRKWSATALKRSMISEAMLGYATLNGKTVRDDDGAPLVRAEPILTREQLEAIRAELVKTSRAKPAVSTPSLLLRVLFCAVCGEPAYKFAGGGRKHPRYRCRSMGFPKHCGNGTVAMAEWDAFCEEQVLNLLGGAERLEKVWVAGSDSAVELAEVNAELVDLTSLIGSPAYRAGSPQREALDARIAALAARQEELEGLEARPSGWEWRETGQRFGDWWREQDTAAKNTWLRSMNVRLTFDVRGGLTRTIDFGDLQEYEQHLRLGSVVERLHTGTS

SEQ ID NO: 12230 - protein, 500 aa, synthetic construct
MRALVVIRLSRVTDATTSPERQLESCQQLCAQRGWDVVGVAEDLDVSGAVDPFDRKRRPNLARWLAFEEQPFDVIVAYRVDRLARSIRHLQQLVHWAEDHKKLVVSATEAHFDTTTPFAAVVIALMGTVAQMELEAIKERSRSAAHFNIRAGKYRGSLPPWGYLPTRVDGEWRLAPDPVQRERILEVYHRVVDNHEPLHLVAHDLNRRGVLSPRDYFARLRGREPQGRKWSATALKRSMVSEAMLGYATLNGRTVRDDDGAPLVRAEPILTREQLEALRAELVKTSRAKPAVSTPSLLLRVLFCAVCGEPAYKFAGGGRKHPRYRCRSMGFPKHCGNGTVATAEWDAFCEEQVLDLLGDTERLEKVWVAGSDSAIELAEVNAELVDLTSLIGSPAYRAGSPQREALDARIAALAARQEVLEGLEARPSGWEWRETGQRFGDWWREQDTAAKNTWLRSMNVRLTFDVRGGLTRTIDFGDLQEYEQHLRLGNAVERLHTGMS

SEQ ID NO: 12231 - protein, 500 aa, synthetic construct
MRALVVIRLSRVTDATTSPERQLESCQQLCAQRGWDVVGVAEDLDVSGAVDPFDRKRRPNLARWLAFEEQPFDVIVAYRVDRLTRSVRHLQRLVHWAEDHKKLVVSATEAHFDTTTPFAAVVIALMGTVAQMELEAIKERSRSAAHFNIRAGKYRGSLPPWGYLPTRVDGEWRLVPDPVQRERILEVYHRVVDDHEPLHLVAHDLNRRGVLSPKDYFAQLQGREPQGRKWSATALKRSMISGAMLGYATLNGKTVRDNDGAPLVRAEPILTREQLEALRAELVKTSRAKPAVSTPSLLLRVLFCAVCGEPAYKFAGGGRKHPRYRCRSMGLPKHCGNGTVAMAEWDAFCEEQVLNLVGDAERLEKVWVAGSDSAVELAEVNAELEDLTSLIGSPAYRAGSPQREALDARIAALAARQEELEGLEARPSGWEWRETGQRFGDWWREQDTAAKNTWLRSMNVRLTFDVRGGLTRTIDLGDLQEYEQHLRLGSVVGRLHTGMS

SEQ ID NO: 12232 - protein, 500 aa, synthetic construct
MRALVVIRLSRVTDATTSPERQLESCQQLCAQRGWDVVGVAEDLDVSGAADPFDRKRRPNLARWLAFEEQPFDVIVAYRVDRLTRSTRHLQQLVHWAEDHKKLVVSATEAHFDTTTPFAAVVIALMGTVAQMELEAIKERTRSAAHFNIRAGKYRGSLPPWGYLPARVDGEWRLVPDPVQRERILEVYHRVVDNHEPLHLVAHDLNRRGVLSPRDYFAQLQGREPQGRKWSATALKRSMISEAMLGYATLNGKIVRDDDGAPLVRAEPILTREQLEAIRAELVKTSRAKPAVSTPSLLLRVLFCAVCGEPAYKFAGGGRKHPRYRCRSMGFPKHCGNGTVAMAKWDAFCEEQVLDLLRDAERLEKVWVAGSDSAVELAEVNAELVDLTSLIGSPAYRAGSSQREALDVRIAALAARQEELEGLEARPSGWEWRETGQRFGDWWREQDTAARNSWLRSMNVRLTFDVRGGLTRTIDFGDLREYEQHLRLGSAVERLHTGMS

SEQ ID NO: 12233 - protein, 500 aa, synthetic construct
MRALVVIRLSRVTDATTSPERQLESCQQLCAQRGWDVVGVAEDLDVSGAVDPFDHKRRPNLARWLAFEEQPFDVIVAYRVDRLTRSVRHLQQLVHWAEDRKKLVVSATEAHFDTTTPFAAVVIALMGTVAQMELEAIKERSRSAAHFNIRAGKYRGSLPPWGYLPARVDGEWRLVPDPVQRERILEVYHRVVDNHEPLHLVAHDLNRRGVLSPRDYFAQLRGREPRGRKWSATALKRSMISEAMLGYATLDGKTVRNDDGAPLVRAEPILTREQREALRAELVKTSRAKPAVSTPSLLLRVLFCAVCGEPAYKFAGGGRKHPRYRCRSMGFPKHCGNGTVAMAEWDAFCEEQVLNLLGDAERLEKVWVAGSDSAVELAEVNAELVDLTSLIGSPAYRAGSPQREALDARIAALAARQEELEGLEARPSGWEWRETGQRFGDWWREQDTAAKNTWLRSMNVRLTFDVRGGPTRTIDFGDLQEYEQHLRLGSVVERLHTGMS

SEQ ID NO: 12234 - protein, 500 aa, synthetic construct
MRALVVIRLSRVTDATTSPERQLESCQQLCAQRGWDVVGVAEDLGVSGAVDPFDRQRRPNLARWLASEEQPFDVIVAYRVDRLARSIRHLQQLVHWAEDHKKLVVSATEAHFDTTTPFAAVVIALMGTVAQMELEAIKERNRSAAHFNIRAGKYRGSLPPWGYLPTRVDGEWRLVPDPVQRERILEVYHRVVDNHEPLHLVAHDLNRRGVLSPKDYFAQLQGREPQGRKWSATALKRSMISEAMLGYATLNGKTVRDDDGAPLVRAEPILTREQQEALRAELVKTSRAKPVVSTPSLLLRVLFCAVCGEPAYKFAGGGRKHPRYRCRSMGFPKHCGNGTVAMAEWDVFCEEQVLSLLGDAERLEKVWVAGSDSAVELAEVNAELVDLTSLIGSPAYRAGSPQREALDARIAALAARQEELEGLEARPSGWEWRGTGQRFGDWWREQDTAAKNAWLRSMNVRLTFDVRGGLTRTIDFGDLQEYEQHLRLGSVVERLHTGMS

SEQ ID NO: 12235 - protein, 500 aa, synthetic construct
MRALVVIRLSRVTDATTSPERQQESCQQLCAQRGWDVVGVAEDLDVSGAVDPFDRKRRPNLARWLAFEEQPFDVIVAYRVDRLTRSTRHLQRLVHWAEDHKKLVVSATEAHFDTTTPFAAVVIALMGTVAQMELEAIRERNRSAAHFNIRAGKYRGSLPPWGYLPTRVDGEWRLVPDPVQRERILEVYHRVVDNHEPLHLVAHDLNRRGVLSPKDYFAQLRGREPQGRKWSATALKRSMISEAMLGYATLNGKTVRDDNGAPLVRAEPILTREQLEALRAELVKTSRAKPAVSTPSLLLRVLFCAVCGEPAYKFAGGGRKHPRYRCRSMGFPKHCGNGTVAMAEWDAFCEEQVLNLLGDAERLEKVWVAGSDSAVELAEVSAELVDLTSLIGSPAYRAGSPQREALDARIAALAARQEELEGLEARPSGWEWRETGQRFGDWWLEQDTAAKNTWLRSMNVRLTYDVRGGLTRTIDFGDLLEYEQHLRLGSVVERSHTGTS

SEQ ID NO: 12236 - protein, 500 aa, synthetic construct
MRALVVIRLSRVTDATTSPERQLESCQQLCAQRGWDVVGVAEDLDVSGAVDPFDRKRRPNLARWLASEEQPFDVIVAYRVDRLARSIRHLQQLVHWAEDHKKLVVSATEAHFDTTTPFAAVVIALMGTVAQMELEAIKERSRSAAHFNIRAGKYRGSLPPWGYLPARVDGEWRLVPDPVQRERILEVYHRVVDKHEPLHLVAHDLNRRGVLSPRDYFAQLQGREPQGRKWSATALKRSMISEAMLGYATLNGKTVRDDDGAPLVRAEPILTREQREALRAELVKTSRAKPAVSTPSLLLRVLFCAVCGEPAYKFAGGGRKHPRYRCRSMGFPKHCGNGTVAMAEWDAFCEEQVLGLLGDAERLEKVWVAGSDSAVELAEVNAELVDLTSLIGSPAYRAGSPQREALDARVAALAARQEELEGLEARPSGWEWRETGQRFGDWWREQDTAAKNTWLRSMNVRLTFDVRGELTRTIDFGDLQEYGQHLRSGGVVERLHTGMS

SEQ ID NO: 12237 - protein, 500 aa, synthetic construct
MRALVVIRLSRVTDATTSPERQLGSCQQLCAQRGWDVVGVAEDLDVSGAVDPFDRKRRPNLARWLAFEEQPFDVIVAYRVDRLARSIRHLQQLVHWAEDHKKLVVSATEAHFDTTTPFAAVVIALMGTVAQMELEAIKERSRSAAHFNIRAGKYRGSLPPWGYLPTRVDGEWRLVPDPVQRERILEVYHRVVDNHEPLHLVAHDLNRRGVLSPKDYFAQLRGREPQGRKWSATALKRSMISEAMLGYATLNGETVRDDGGAPLVRAEPILTREQLEALRAELVKTSRAKPAVSTPSLLLRVLFCAVCGEPAYKFAGGGRKHPRYRCRSMGFPKHCGNGTVAMAEWDAFCEEQVLDLLGDAERLEKVWVAGSDSAVELAEVNAELVDLASLIGSPAYRAGSPQREALDARIAALAARQEELEGLEARPSGWEWRETGQRFGGWWREQDTAAKNTWLRSMNVRLTFDVRGGLTRTIDFGDLQEYEQHLRLGSVVERLHTGMS

SEQ ID NO: 12238 - protein, 500 aa, synthetic construct
MRALVVIRLSRVTDATTSPERQLESCQQLCAQRGWDVVGVAEDLDVSGAVDPFDRKRRPNLARWLAFEEQPFDVIVAYRVDRLTRSTRHLQQLVHWAEDHKKLIVSATEAHFDTTTPFAAVVIALMGTVAQMELEAIKERSRSAAHFNIRAGKYRGSLPPWGYLPTRVDGEWRLAPDPVQRERILEVYHRVVDDHEPLHLVAHDLNRRGVLSPKDYFAQLRGREPQGRKWSATALKRSMISEAMLGYATLNGKTVRDDDGAPLVRAEPILTREQLEALRVELVKTSRAKPAVSTPSLLLRVLFCAVCGEPAYKFTGGGRKHPRYRCRSMGFPKHCGNGTVAMAEWDAFCEEQMLDLLGDAERLEKVWVAGSDSAVELAEVNAELVDLTSLIGSPAYRAGSPQREALDARIAALAARQEELEGLEARPSGWEWRETGQRFGDWWREQDTAAKNTWLRSMNVRLTFDVCGGLTRTIDFGDLQEYEQHLRLGSVVERLHTGMS

SEQ ID NO: 12239 - protein, 500 aa, synthetic construct
MRALVVIRLSRVTDATTSPERQLESCQQLCAQRGWDVVGVAEDLDVSGAVDPFDRKRRPNLARWLAFEEQPFDVIVAYRVDRLTRSTRHLQQLVRWAEDHGKLVVSATEAHFDTTTPFAAVVIALMGTVAQMELEAIKERNRSAAHFNIRAGKYRGSLPPWGYLPARVDGVWRLVPDPVQRERILEVYHRVVDNHEPLHLVAHDLNRRGVLSPKDYFAQLRGREPQGRKWSATALKRSMISEVMLGYATLNGKTVRDDDGAPLVRAEPILTREQLEALRAELVKTSRAKPAVSTPSLLLRVLFCAVCGEPAYKFAGGGRKHPRYRCRSMGFPKHCGNGTVAMAEWDAFCEEQVLNLLGDAERLEKVWVAGSDSAVELAEVNAELVDLTSLIGSPAYRAGSPQREALDARIAALAARQEVLEGLEARPSGWEWRGTGQRFGDWWREQDTAAKNTWLRSMNVRLTFDVRGGLTRTIDFGDLQEYGQHLRLGSVVERLHTGMS

SEQ ID NO: 12240 - protein, 500 aa, synthetic construct
MRALVVIRLSRVTDATTSPERQLESCQQLCAQRGWDVVGVAEDLDVSGAVDPFDRKRRPNLARWLAFEEQPFDVIVAYRVDRLTRSTRHLQQLVHWADDHKKLVVSATEAHFDTTTPFAAVVIALMGTVAQMELEAIKERSRSAAHFNIRAGKYRGSLPPWGYLPARVDGVWRLVPDPVQRERILEVYHRVVNNHEPLHLVAHDLNRRGILSPKDYFAQLQGREPQGRKWSATALKRSMISEAMLGYATLNGKTVRDDDGAPLVRAEPILTREQQEALRAGLVKTSRAKPAVSTPSLLLRVLFCAVCGEPSYKFAGGGRKHPRYRCRSMGFPKHCGNGTVAMAEWDAFCEEQVLNLLGDAERLEKVWVAGSDSAVELAEVNAELVDLTSLIGSPAYRAGSPQREALDARIAALAARQEELEGLEARPPGWEWRKTGQRFGDWWREQDTAAKNTWLRSMNVRLTFDVRGGLTRTIDFGDLQEYEQHLRLGSVVERLHTGTS

SEQ ID NO: 12241 - protein, 500 aa, synthetic construct
MRALVVIRLSRVTDATTSPERQLESCQQLCAQRGWDVVGVAEDLDVSGAVDPFDRKRRPNLARWLAFEEQPFDVIVAYRVDRLTRSVRHLQQLVHWAEDHKKLVVSATEAHFDTTTPFAAVVIALMGTVAQMELEAIKERSRSAAHFNIRAGKYRGSLPPWGYLPTRVDGEWRLAPDPVQRERILEVYHRVVDNHEPLHLVAHDLNRRGVLSPKDYFAHLQGREPQGRKWSATALKRSMTSEAMLGYATLNGKTVRDDDGAPLVRAEPILTREQLEAIRAELVKTSRAKPAVSTPSLLLRVLFCAVCGEPAYKFAGGGRKHPRYRCRSMGFPKHCGNGTVAMAEWDAFCEEQVLDLLGDAERLEKVWVAGSDSAVELAEVSAELVDLTSLIGSPVYRAGSPQREALDARIAALAARQEELEGLEARPSGWEWRETGQRFGDWWREQDTAAKNTWLRSMNVRLTFDVRGGLARTIDFGDLQEYEQHLRSGSVVERLHTGMS

SEQ ID NO: 12242 - protein, 500 aa, synthetic construct
MRALVVIRLSRVTDATTSPERQLESCQQLCAQRSWEVVGVAEDLDVSGAVDPFDRKRRPNLARWLAFEEQPFDVIVAYRVDRLTRSTRHLQQLVHWADDHKKLVVSATEAHFDTTTPFAAVVIALMGTVAQMELEAIKERSRSAAHFNIRAGKYRGSLPPWGYLPARVDGVWRLVPDPVQRERILEVYHRVVNNHEPLHLVAHDLNRRGVLSPKDYFAQLQGREPQGRKWSATALKRSMISEAMLGFATLNGKTVRDDDGAPLVRAEPILTREQLEALRAELVKTSRAKPAVSTPSLLLRVLFCAVCGEPAYKFAGGGRKHPRYRCRSMGFPKHCGNGTVAMAEWDAFCEEQVLDLLGDAERLEKVWVAGSDSAVELAEVNAELVDLTSLTGTPAYRAGSPQREALDARIAALAARQEELEGLEARPSGWVWRETGQRFGDWWREQDTAAKNTWLRSMNVRLTFDVRGGLTRTIDFGDLQEYEQHLRLGSVVERLHTGMS

SEQ ID NO: 12243 - protein, 500 aa, synthetic construct
MRALVVIRLSRVTDATTSPERQLESCQQLCAQRGWDVVGVAEDLDVSGAVDPFDRKRRPNLARWLAFEEQPFDVIVAYRVDRLTRSTRHLQQLVHWADDHKKLVVSATEAHFDTTTPFAAVVIALMGTVAQMELEAIKERSRSAAHFNIRAGKYRGSLPPWGYLPARVDGVWRLVPDPVQRERILEVYHRVVNNHEPLHLVAHDLNQRGVLSPKDYFAQLQGREPQGRKWSATALKRSMISEAMLGYATLNGKTVRDDDGAPLVRAEPILTREQQEALRAELAKTSRAKPSVSTPSLLLRVLFCAVCGKPAYKFSGGGRKHPRYRCRSMGFPKHCGNGTVAMAEWDAFCEEQVLDLLGDAERLEKVWVAGSDSAVELAEVNAELADLTSLIGSPAYRAGSPQREALDARIAALAARQEELEGLEARPSGWEWRETGQRFGDWWREQDTAAKNTWLRSMNVRLTFDVRGGLTRTIDFGDLREYEQHLRLGGVVERLHTGMS

SEQ ID NO: 12244 - protein, 500 aa, synthetic construct
MRALVVIRLSRVTDATTSPERQLESCQQLCAQRGWDVVGVAEDLDVSGAVDPFDRKRRPNLARWLAFEEQPFDVIVAYRVDRLARSIRHLQQLVHWAEDHKKLVVSATEAHFDTTTPFAAVVIALMGTVAQMELEAIKERSRSAAHFNIRAGKYRGSLPPWGYLPTRVDGEWRLAPDPVQRERILEVYHRVVNNHEPLHLVAHDLNRRGVLSPKDYFAQLQGREPQGRKWSATALKRSMISVAMLGYATLNGKTVRDDDGAPLVRAEPILTREQLEALRTELVKTPRAKPAVSTPSLLLRVLFCAVCGEPAYKFAGGGRKHPRYRCRSMGFPKHCGNGTVAMAEWDTFCEEQVLDLLGDAERLEKVWVVGSDSAAELAEVNAELVDLTSLIGSPAYRAGSPQREALDARIAALAARQEELEGLEARPSGWEWRETGQRFGDWWREQDTAAKNTWLRSMNVRLTFDVRAGLTRTIDFGDLQEYEQHLRLGSVVERLHTGMS

SEQ ID NO: 12245 - protein, 500 aa, synthetic construct
MRALVVIRLSRVTDATTSPERQLESCQQLCTQRGWDVAGVAEDLDVSGAVDPFDRKRRPNLARWLAFEEQPFDAIVAYRVDRLTRSIRHLQQLVHWAEDHKKLVVSATEAHFDTTTPFAAVVIALMGTVAQMELEAIKERNRSAAHFNIRAGKYRGSLPPWGYLPARVDGEWRLVPDPVQRERILEVYHRAVDNHEPLHLVAHDLNRRGVLSPRDYFAQLRGREPRGRKWSATALKRSMISEAMLGYATLNGKTVRDDDGAPLVRAEPILTREQLEALRVELAKTSRAKPAVSTPSLLLRVLFCAVCGEPAYKFAGGGRKHPRYRCRSMGFPKHCGNGTVAMAEWDAFCEEQVLDLLGDAERLEKVWVAGSDSAVELAEVNTELVGLTSLIGSPAYRAGSPQREALDARIAALAARQEELEGLEARPSGWEWRGTGQRFGDWWREQDTAAKNTWLRSMNVRLTFDVRGGLTRTIDFGDLQEYEQHLRLGGVVERLHTGMS

SEQ ID NO: 12246 - protein, 500 aa, synthetic construct
MRALVVIRLSRVTDATTSPERQLESCQQLCAQRGWDVVGVAEDLDVSGAVDPFDRKRRPNLARWLAFEEQPFDVIVAYRVDRLTRSIRHLQQLVHWAEDHKKLVASATEAHFDTTTPFAAVTIALMGTVAQMELEAIKERSRSAAHFNIRAGKYRGSLPPWGYLPTRVDGEWRLAPDPVQRERILEVYHRVVDDHEPLHSVAHDLNRRGVLSPRDYFAQLQGREPRGRKWSATALKRSMISEAMLGYVTLNGKTVRDDDGAPLVRAEPILTREQLEALRAELVKTSRAKPAVSTPSLLLRVLFCAVCGEPAYKFAGGGRKHPRYRCRSMGFPEHCGNGTVAMAEWDAFCEEQVLDLLGGAERLEKVWVAGSDSAVELAEVNAELVDLTSLIGSPAYRAGSPQREALDARIAALAARQEELEGLEARPSGWGWRETGQRFGDWWREQDTAAKNTWLRSMNVRLTFDARGGLTRTIDFGDLQEYEQQLRLGSVVERLHTGMS

SEQ ID NO: 12247 - protein, 500 aa, synthetic construct
MRALVVIRLSRVTDATTSPERQLESCQQLCAQRGWDVVGVAEDLDVSGAVDPFDRKRRPNLARWLAFEEQPFDVIVAYRVDRLTRSIRHLQQLVHWAEDHKKLVVSATEAHFDTTTPFAAVTIALMGTVAQMELEAIKERSRSAAHFNIRAGKYRGSLPPWGYLPTRVDGEWRLVPDPVQRERILEVYHRVVDDHEPLHLVAHDLNRRGVLSPKDYFAQLRGREPQGRKWSATALKRSMISEAMLGHATLNGKTVRDDDGAPLVRAEPILTREQLEALRAELVKTSRAKPAVSTPSLLLRVLFCAVCGEPAYKFAGGGRKHPRYRCRSMGFPKHCGNGTVAMAEWDAFCEEQVLDLLGDTERLEKVWVAGSDSAVELAEVNAELVDLMSLIGSPAYRAGSPQREALDARIAALAARQEELEGLEARPSGWEWRETGQRFGDWWREQDTAAKNTWLRSMNVRLTFDVRGGLTRTIDFGDLQEYEQHLRLGSVVERLHTGMS

SEQ ID NO: 12248 - protein, 500 aa, synthetic construct
MRALVVIRLSRVTDATTSPERQLESCQQLCAQRGWGVVGVAEDLDVSGAVDPFDRKRRPNLARWLAFEEQPFDVIVAYRVDRLARSIRHLQQLVHWAEDHKKLVVSATEAHFDTTTPFAAVVIALMGTVAQMELEAIKERSRSAAHFNIRAGKYRGSLPPWGYLPTRVDGEWRLAPDPVQRERILEVYHRVVDDHEPLHLVAHDLNRRGVLSPKDYFAQLQGREPQDRKWSATALKRSMISEAMLGYVTLNGKIVRDDDGAPLVRAEPILTREQLEALRAELVKTSRAKPAVSTPSLLLRVLFCAVCGEPAYKFAGGGRKHPRYRCRSMGFPKHCGNGTVAMAEWDAFCEEQVLGLLGDAERLEKVWVAGSDSAVELAEVNAELVDLTSLIGSPAYRVCSPQREALDARIAALAARQEELEGLEARPSGWEWRETGQRFGDWWREQDTAAKNTWLRSMNVRLTFDVRGGLTRTIDFGELQEYEQHLCLGNVVERLHTGKS

SEQ ID NO: 12249 - protein, 500 aa, synthetic construct
MRALVVIRLSRVTDTTTSPERQLESCQQLCAQRGWDVVGVAEDLDVSGAVDPFDRKRRPNLARWLAFEEQPFDVIVAYRVDRLTRSTRHLQQLVHWAEDHKKLVVSATEAHFDTTTPFAAVVVALMGTVAQMELEAIKDRSRSAAHFNIRAGKYRGSLPPWGYLPARVDGEWRLVPDPVQRERILEVYHRVVDNHEPLHLVAHDLNRRGVLSPKDYFAQLRGREPQGRKWSATTLKRSMISEAMLGYATLNGKTVRDDDGAPLVRAEPILTREQQEALRAELVKTSRAKPAVSTPSLLLRVLFCAVCGEPAYKFAGGGRKHPRYRCRSMGFPKHCGNGTVAMAEWDAFCEEQVLDLLGDAERLEKVWVAGSDSAVELAEVNAELVDLTSLIGSPAYRTGSPQREALDARIAALAARQEELEGLGAHPSGWEWRGTGQRFGDWWRGQDTAAKNTWLRSMNVRLTFDVRGGLTRTIDFGDLREHEQHLRLGSVVERLHTGMS

SEQ ID NO: 12250 - protein, 500 aa, synthetic construct
MRALVVIRLSRVTDATTSPERQLESCQQLCAQRGWDVVGVAEDLDVSGAVNPFDRKRRPNLARWLAFEEQPFDVIVAYRVDRLTRSTRHLQQLVHWAEDHKKLVVSATEAHFDTTTPFAAVVIALMGTVAQMELEAIKERSRSAAHFNIRAGKYRGSLPPWGYLPTRVDGEWRLVPDPVQRERILEVYHRVVDNHEPLHLVAHDLNRRGVLSPKDYFAQLQGREPQGRKWSATALKRSMISEAMLGYATLNGKTVRDDDGAPLVRAEPILTREQLEALRTELVKTSRAKPAVSTPSLLLRVLFCAVCGEPAYKFAGGGRKHPRYRCRSMGFPKHCGNGTVAMAEWDAFCEEQVLDLLGDAERLEKVWVTGSNSAVELAEMNAELVDLTSLIGSPAYRAGSPQREALDARIAALAARQEELEGLEARPSGWEWRGTGQRFGDWWREQDTTAKNTWLRSMNVRLTFDVRGGLTRTIDFGDLQEYEQHLRLGSVVERLHTGMS

SEQ ID NO: 12251 - protein, 500 aa, synthetic construct
MRALVVIRLSRVTEATTSPERQLESCQQLCAQRGWDVVGVAEDLDVSGAVDPFDRKRRPNLARWLAFEEQPFDVVVAYRVDRLARSIRHLQQLVHWAEDHKKLVVSATEAHFDTTTPFAAVVIALMGTVAQMELEAIKERSRSAAHFNIRAGKYRGSLPPWGYLPSRVDGEWRLVPDPVQRERILEVYHRVVNNHEPLHLVAHDLNRRGVLSPKDYFAQLQGREPQGRKWSATALKRSMISEAMLGYATLNGKTVRDDDGAPLVRAEPILTREQQEALRAELVKTSRAKPAVSTPSLLLRVLFCAVCGEPAYKFAGGGRKHPRYRCRSMGFPKHCGNGTVAMAEWDAFCEEQVLGLLGDAGRLEKVWVAGSDSAVELAEVNAELVDLTSLIGSPAYRAGSPQREALDARIAALAARQEELEGLEARPSGWEWRETGQRFGDWWREQDTAAKNTWLRSMNVRLTFDVRGELTRTIDFGDLQEYEQHLRLGSVVERLHTGMS

SEQ ID NO: 12252 - protein, 500 aa, synthetic construct
MRALVVIRLSRVTDATTSPERQLESCQQLCAQRGWDVVGVAEDLDVSGAVDPFDRKRRPNLARWLAFEEQPFDVIVAYRVDRLARSIRHLQQLVHWAEDHKKLVVSATEAHFDTTTPFAAVVIALMGTVAQMELEAIKERSRSAAHFNIRAGKYRGSLPPWGYLPTRVDGEWRLAPDPVQRERILEVYHRVVDNHEPLHLVAHDLNRRGVLSPRDYFAQLRGREPQGRKWSATALKRSMISEAMLGYATLNGKTVRDEDGAPLVRAEPILTREQLEALRAELVKTTRAKPAVSTPSLLLRVLFCAVCGEPAYKFAGGGRKHPRYRCRSMGFPKHCGNGTVAMAEWDAFCEEQVLDLLGDAERLEKVWVAGSDSAVELAEVNAELVDLTSLIGSPAYRAGSPQREALDARIAALAARQEELEGLEARPSGWEWRETGQRFGDWWREQDTAAKNTWLRSMNVHLTFDVRGGLTRTIDFGDLQEYEQHLRLGSVVERLHTGMS

SEQ ID NO: 12253 - protein, 500 aa, synthetic construct
MRALVVIRLSRVTDATTSPERQLESCQQLCAQRGWDVVGVAEDLDVSGAVDPFDRKRRPNLARWLAFEEQPFDVIVAYRVDRLTRSTRHLQQLVHWAEDHKKLVVSATEAHFDTTTPFAAVVIALMGTVAQMELEAIKERSRSAAHFNIRAGKYRGSLPPWGYLPARVDGEWRLVPDPVQRERILEVYHRVVDDHEPLHLVAHDLNRRGVLSPKDYFAQLRGREPQGRKWSATALKRSMISEAMLGYATLNGKTVRDDDGAPLVRAEPILTREQQEALRAELVRSSRAKPAVSTPSLLLRVLFCAVCGEPAYKFAGGGRKHPRYRCRSMGFPKHCGNGTVAMAEWDAFCEEQVLDLLGDAERLEKVWVAGSDSAVELAEVNAELVDLTSLIGSPAYRAGSPQREALDARIAALAARQAELEGLEARPSGWEWRETGQRFGDWWREQDTAAKNTWLRSMNVRLTFDVRGGLTRTIDFGDLQEYEQHLRLGSVVERLHTGMS

SEQ ID NO: 12254 - protein, 500 aa, synthetic construct
MRALVVIRLSRVTDATTSPERQLESCLQLCARRGWDVVGVAEDLDVSGAVDPFDRKRRPNLARWLAFEEQPFDVIVAYRVDRLARSIRHLQQLVHWAEDHKKLVVSATEAHFDTTTPFAAVVIALMGTVAQMELEAIKERSRSAAHFNIRAGKYRGSLPPWGYLPTRVDGEWRLVPDPVQRERILEVYHRVVDSHEPLHLVAHDLNRRGVLSPRDYFAQLRGREPQGRKWSATALKRSMISEAMLGYATLNGRTVRDDDGAPLVRAEPILTREQLEALRAELVKTSRAKPAVSTPSLLLRVLFCAVCGEPAYKFAGGGRKHPRYRCRSMGFPKHCGNGTVAMAEWDAFCEEQVLGLLGDVERLEKVWVAGSDSAVKLAEVNAELADLTSLIGSPAYRAGSPQREALDARIAALAARQEELEGLEARPSGWEWRGTGQRFGDWWREQDTAAKNTWLRSMNVRLTFDVRGGLTRTIDFGDLQEYEQHLRLGSVVERLHTGMS

SEQ ID NO: 12255 - protein, 500 aa, synthetic construct
MRALVVIRLSRVTDATTSPERQLESCQQLCAQRGWDVVGVAEDLDVSGAVNPFDRKRRPNLARWLAFEEQPFDVIVAYRVDRLTRSTRHLQQLIHWAEDHKKLVVSATEAHFDTTTPFAAVVIALMGTVAQMELEAIKERSRSAAHFNIRAGKYRGSLPPWGYLPTRVDGEWRLVPDPVQRERILEVYHRVVDNHEPLHLVAHDLNRRGVLSPKDYFAQLRGREPRGRKWSATALKRSMISEAMLGYATLNGKTVRDDDGAPLVRAEPILTREQLEALRAELVKTSRAKPAVSTPSLLLRVLFCAVCGEPAYKFAGGGRKHPRYRCRSMGFPKHCGNGTVAMAEWDAFCEEQVLGLLGDAERLEKVWVAGSDSAVELAEVNAELVDLTSLISSPAYRAGSPQREALDARIAALAARQEELEGLEARPSGWEWHETGQRFGDWWREQDTAAKNTWLRSMNVRLTFDVRGGPTRTIDFGDLQEYEQHLRLGSVVERLHTGMS

SEQ ID NO: 12256 - protein, 500 aa, synthetic construct
MRALVVIRLSRVTDATTSPERQLESCQLLCAQRGWDVVGVAEDLDVSGAVNPFDRKRRPNLARWLAFEEQPFDVIVAYRVDRLTRSTRHLQQLVHWAEDHKKLVVSATEAHFDTTTPFAAVVIALMGTVAQMELEAIKERSRSAAHFNIRAGKYRGSLPPWGYLPTRVDGEWRLVPDPVQRERILEVYHRVVDNHEPLHLVAHDLNRRGVLSPKDYFAQLQGREPQGRKWSATALKRSMISEAMLGYATLNGKTVRDDDGAPLVRAEPILTREQLEAVRAELVKTSRAKPAVSTPSLLLRVLFCAVCGEPAYKFAGGGRKHPRYRCRSMGFPKHCGNGTVAMAEWDAFCEEQVLDLLGDAERLEKVWVAGPDSAVELAEMNAELVDLTSLIGSPAYRAGSPQREALDARIAALAARQEELEGLEARPSGWEWRETGQRFGDWWREQDTAAKNAWLRSMNVRLTFDVRGGLTRTIDFGDLQEYEQHLRLGSVVERLHTGMS

SEQ ID NO: 12257 - protein, 500 aa, synthetic construct
MRALVVIRLSRVTDATTSPERQLESCQQLCAQRGWDVVGVAEDLDVSGAVDPFDRKRRPNLARWLAFEERPFDVIVAYRVDRLTRSIRHLQQLVHWAEDHKKLVVSATEAHFDTTTPFAAVVIALMGTVAQMELEAIKERNRSAAHFNIRAGKYRGSLPPWGYLPTRVDGVWRLVPDPVQRERILEVYHRVVDNHEPLHLVAHDLNRRGVLSPKDYFAQLRGREPQGRKWSATALKRSMISVAMLGYATLNGKTVRDDDGAPLVRAEPILTREQLEALRAELVKTSRAKPAVSTPSLLLRVLFCAVCGEPAYKFSGGGRKHPRYRCRSMGFPKHCGNGTVAMAEWDAFCEEQVLDLLGDAERLEKVWVAGSDSAVELAEVNAELVDLTSLIGSPAYRAGSPQREALDARIAALAARQGELEGLGARPSGWEWRETGQRFGDWWREQNTAAKNTWLRSMNVRLTFDVRGGLARTIDFGDLQEYEQHLRSGSGVERLHTGMS

SEQ ID NO: 12258 - protein, 500 aa, synthetic construct
MRALVVIRLSRVTDATTSPERQLESCQQLCAQRGWDIVGVAEDLDVSGAVDPFDRKRRPNLARWLAFEEQPFDVIVAYRVDRLARSIRHLQQLVHWAEDHKKLVVSATEAHFDTTTPFAAVVIALMGTVAQMELEAIKERNRSAAHFNIRAGKYRGSLPPWGYLPTRVDGEWRLVPDPVQREHILEVYHRVVDNHEPLHLVAHDLNRRGVLSPKDYFAQLRGREPQGRKWSATALKRSMISEAMLGYATLNGKTVRDDDGAPLVRAEPILTREQQEALRAELVKTSRAKPAVSTPSLLLRVLFCAVCGEPAYKFAGGGRKHPRYRCRSMGFPKHCGNGTVAMAEWDAFCEEQVLGLLGDAERLEKVWVAGSDSAVELAEVNAELVDLTSLIGSPAYRAGSPQREALDTRIAALAARQEELKGLEARPSGWEWRETGQRFRDWWREQDTAAKNAWLRSMNVRLTFDVRGGLTRTIDFGDLQEYKQHLRLGSVVERLHTGMS

SEQ ID NO: 12259 - protein, 500 aa, synthetic construct
MRALVVIRLSRVTDATTSPERQLESCQQLCAQRGWDVVGVAEDLDVSGAVDPFDRKRRPNLARWLAFEEQPFDVIVAYRVDRLTRSVRHLQQLVHWAEDHKKLVVSATEAHFDTTTPFAAVVIALMGTVAQMELEAIRERSRSATHFNIRAGKYRGSLPPWGYLPTRVDGEWRLVPDPVQRERILEVYHRVVDNHEPLHLVAHDLNRRGVLSPKDYFAQLRGRKPQGRKWSATALKRSMISEAMLGYATLNGKTVRDDDGAPLVRAEPILTREQQEALRVELVKTSRAKPAVSAPSLLLRVLFCAVCGEPAYKFAGGGRKHPRYRCRSMGFPKHCGNGTVAMAEWDAFCEEQVLNLLGDAERLEKVWVAGSDSAVELAEVNAELVDLTSLIGSPAYRAGSPQREALDTRIAALAARQEELEGLEARPSGWEWRGTGQRFGDWWREQDTAAKNTWLRSMNVRLAFDVRGGLTRTIDVGDLREYGQHLRLGSVVERLRTGMS

SEQ ID NO: 12260 - protein, 500 aa, synthetic construct
MRALVVIRLSRVTDATTSPERQLESCQQLCAQRGWDIVGVAKDLDVSGAVDPFDRKRRPNLARWLAFEEQSFDVIVAYRVDRLTRSTRHLQQLVRWAEDHKKLVVSATEAHFDTTTPFAAVVVALMGTVAQMELEAIKERNRSAAHFNIRAGKYRGSLPPWGYLPTRVDGEWRLAPDPVQRERILEVYRRVVDNHEPLHLVAHDLNRRGVLSPKDYFAQLRGREPQGRKWSATALKRSMISEAMLGYATLSGKTVRDEDGAPLVRAEPILTREQLEAIRAELVKTSRAKPAVSTPSLLLRVLFCAVCGEPAYKFSGGGRKHPRYRCRSMGFPKHCGNGTVAMAEWDAFCEEQVLDLLGDAERLEKVWVAGSDSAAELAEVNTELVDLTSLIGSPAYRAGSPQREALDARITALAARQEELEGLGARPSGWEWRGTGQRFGDWWREQDTAAKNTWLRSMNVRLTFDVRGGLTRTIDFGDLHEYEQHLRLGSVVEHLHAGMS

SEQ ID NO: 12261 - protein, 500 aa, synthetic construct
MRALVVIRLSRVTDATTSPERQLESCQQLCAQRGWDVVGVAEDLDVSGTVDPFDRKRRPSLARWLAFEEQPFDVIVAYRVDRLARSIRHLQQLVHWAEDHKKLVVSATEAHFDTTTPFAAVVIALMGTVAQMELEAIRERNRSAAHFNIRAGKYRGSLPPWGYLPARVGGEWRLVPDPVQRERILEVYHRVVDDHEPLHLVAHDLNRRGVLSPKDYFAQLQGREPQGRKWSATALKRSMISEAMLGYATLNGKTVRDDDGAPLVRAEPILTREQQEALRAELVKTSRAKPAVSTPSLLLRVLFCAVCGEPAYKFAGGGRKHPRYRCRSMGFPKHCGNGTVAMAEWDAFCEKQVLDLLGDAERLEKVWVAGSDSAVELAEVNAELVDLTSLIGSPAYRAGTPQREALDARIAALAARQEELKGLEARPSGWEWRETGQRFGDWWREQDTAAKNTWLRSMNVRLTFDVRGGLTRTIDFGDLQEYEQHLRLGGVVERLHTGMS

SEQ ID NO: 12262 - protein, 500 aa, synthetic construct; identical to SEQ ID NO: 10884

SEQ ID NO: 12263 - protein, 500 aa, synthetic construct
MRALVVIRLSRVTDATTSPERQLESCQQLCAQRSWDVVGVAEDLDVSGAVDPFDRKRRPNLARWLAFEERPFDVIVAYRVDRLTRSIRHLQQLVHWAEDHKKLVVSATEAHFDTTTPFAAVVIALMGTVAQMELEAIKERNRSAAHFNIRAGKYRGSLPPWGYLPARVDGEWRLVPDPVQRERILEVYHRVVDNHEPLHLVAHDLNRRGVLSPKDYFAQLRGREPQGRKWSATALKRSMISEAMLGYVTLNGKTVRDDVGAPLVRAEPILTREQQEALRAELAKTSRAKPAVSTPSLLLRVLFCAVCGEPAYKFTGGGRKHPRYRCRSMGFPKHCGNGTVAMAEWDAFCEEQVLDLLGDAERLEKVWVAGSDSAVELAEVNAELVDLTSLIGSPAYRAGSPQREALDARIAALAARQEELEGLEARPSGWEWRETGQRFGDWWREQDTAAKNTWLRSMNVRLTFDVRGGLTRTIDFGDLQEYEQHLRLGSAVERLHTGMS

SEQ ID NO: 12264 - protein, 500 aa, synthetic construct
MRALVVIRLSRVTDATTSPERQLESCQQLCAQRGWDVVGVAEDLDVSGAVDPFDRKRRPNLARWLAFEEQPFDVIVAYRVDRLTRSVRHLQQLVHWAEDHKKLVVSATEAHFDTTTPFAAVVIALMGTVAQMELEAIKERNRSAAHFNIRAGKYRGSLPPWGYLPTRVDGEWRLVPDPVQRERILEVYHRVVDNHEPLHLVAHDLNRRGVLSPRDYFAQLRGRETQGRKWSATALKRSMISGAMLGYATLNGRTVRDDDGAPLVRAEPILTREQLEALRAELVKTSRAKPAVSTPSLLLRVLFCAVCGEPAYKFAGGGRKHPRYRCRSMGFPKHCGNGTVATAEWDAFCEEQVLDLLGDTERLEKVWVAGSDSAIELAEVNAELVDLTSLIGSPAYRAGSPQREALDARIAALAARQEELEGLEARPSGWEWRETGQRFGDWWREQDTAAKNTWLRSMNVRLTFDVRGGLTRTIDFGDLQEYEQHLRLGNAVERLHTGMS

SEQ ID NO: 12265 - protein, 500 aa, synthetic construct
MRALVVIRLSRVTDATTSPERQLESCQQLCAQRGWDVVGAAEDLDVSGAVDPFDRKRRPNLARWLAFEEQPFDVIVAYRVDRLTRSIRHLQQLVHWAEDHKKLVVSATEAHFDMTTPFAAVVIALMGTVAQMELEAIKERSRSAAHFNIRAGKYRGSLPPWGYLPTRVDGEWRLAPDPVQRERILEVYHRVVDNHEPLHLVAHDLNRRGVLSPKDYFAQLQGREPQGRKWSATALKRSMISEAMLGYATLNGKTVRDDDGAPLVRAEPILTREQQEALRAELVKTSRAKPAVSTPSLLLRVLFCAVCGEPAYKFSGGGRKHPRYRCRSMGFPKHCGNGTVAMAEWDAFCEEQVLDLLGGAERLEKVWVAGSDSAVELAEVNAELVDLTSLIGSPAYRAGSPQREALDARIAALAARQEELEGLEARPSGWEWRGTGQRFGDWWREQGTAAKNTWLRSMNVRLTFDVRGGLTRMIDFGDLQEYERHLRLGSAVERLHTGMS

SEQ ID NO: 12266 - protein, 500 aa, synthetic construct
MRALVVIRLSRVTDATTSPERQLESCQQLCAQRGWDVVGVAEDLDVSGAVDPFDRKRRPNLARWLAFEEQPFDAIVAYRVDRLARSIRHLQQLVHWAEDHKKLVVSATEAHFDTTTPFAAVVIALMGTVAQMELEAIKERSRSAAHFNIRAGKYRGSLPPWGYLPTRVDGEWRLVPDPVQRERILEVYRRVVDNHEPLHLVAHDLNRRGVLSPRDYFAQLQGREPQGRKWSATALKRSMTSEAMLGYATLSGKTVRDDDGAPLVRAEPILTREQLEALRAELVKTSRAKPAVSTPSLLLRVLFCAVCGEPAYKFAGGGRKHPRYRCRSMGFPKHCGNGTVAMAEWDAFCEEQVLDLLGDAERLEKVWVAGTDSAVELAEVNAELVDLTSLIGSPAYRAGSPQREALDARIAALAARQEELEGLEARPSGWEWRETGQRFGDWWREQDTAAKNAWLRSMNVRLTFDVRGGLTRTIDFGDLQEYEQHLRLGSVAERLHTGMS

SEQ ID NO: 12267 - protein, 500 aa, synthetic construct
MRALVVIRLSRVTDATTSPERQLESCQQLCAQRGWDVVGVAEDLDVSGAVDPFDRKRRPNLARWLAFEEQPFDAIVAYRVDRLTRSIRHLQQLVHWAEDHKKLVVSATEAHFDTTTPFAAVVIALMGTVAQMELEAIKERNRSAAHFNIRAGKYRGSLPPWGYLPTRVDGEWRLAPDPVQRERILEVYHRVVDNHEPLHLVAHDLNRRGILSPKDYFAQLRGREPQGRKWSATALKRSMISEAMLGYATLNGKTVRDDDGAPLVRAEPILTREQLEALRAELVKTSRAKPAVSTPSLLLRVLFCAVCGEPAYKFSGGGRKHPRYRCRSMGFPKHCGNGTVAMAEWDAFCEEQVLDLLGDAERLEKVWVAGSDYAVELAEVNAELVDLTSLIGSPAYRAGSPQREALDARIAALTARQEELEGLEARPPGWEWRETGQRFGDWWREQDTAAKNTWLRSMNVRLTFDVRGGLTRTIDFGDLQEYEQHLRFGSVVERLHTGMS

SEQ ID NO: 12268 - protein, 500 aa, synthetic construct
MRALVVIRLSRVTDATTSPERQLESCQQLCAQRGWDVVGVAEDLDVSGAVDPFDRKRRPNLARWLAFEEQPFDAIVAYRVDRLARSIRHLQQLVHWAEDHKKLVVSATEAHFDTTTPFAAVVIALMGTVAQMELEAIKERSRSAVHFNIRAGKYRGSLPPWGYLPARVDGEWRLVPDPVQRERILEVYHRVVDNHEPLYLVAHDLNRRGVLSPKDYFAQLQGREPQGRKWSATALKRSMISEAMLGYATLNGKIVRDDDGAPLVRAEPILTREQLEALRAEIVKTSRAKPAVSTPSLLLRVLFCAVCGEPAYKFAGGGRKHSRYRCRSMGFPKHCGNGTVAMAEWDAFCEEQVLDLLGDAERLEKVWVVGSDSAVELAEVNAELVDLTSLIGSPAYRVCSPQREALDARIAALAARQEELEGLEARPSGWEWRETGQRFGDWWREQDTAAKNTWLRSMNVRLTFDVRGGLTRTIDFGELQEYEQHLRLGNVVERLHTGMS

SEQ ID NO: 12269 - protein, 500 aa, synthetic construct
MRALVVIRLSRVTDATTSPERQLESCQQLCAQRGWDVVGVAEDLDVSGAVDPFDRKRRPNLARWLAFEEQPFDVIVAYRVDRLTRSTRHLQQLVHWAEDHKKLVVSATEAHFDTTTPFAAVVTALMGTVAQMELEAIKERNRSAAHFNIRAGKYRGSLPPWGYLPTRVDGEWRLAPDPVQRERILEVYHRVVDNHEPLHLVAHDLNRRGVLSPKDYFAQLRGREPQGRKWSATALKRSMISEAMLGYATLNGKTVRGDDGAPLVRAEPILTREQLEALRAELVKTSRAKPAVSTPSLLLRVLFCAVCGEPAYKFAGGGRKHPRYRCRSMGFPKHCGNGTVATAEWDAFCEEQVLDLLGDTERLEKVWVAGSDSAIELAEANAELVDLTSLIGSPAYRAGSPQREALDARIAALAARREELEGLEARPSGWEWRETGQRFGDWWREQDTAAKNTWLRSMNVRLTFDVRGGLTRTIDFGDLQEYEQHLRLGNAVGRLHTGMS

SEQ ID NO: 12270 - protein, 500 aa, synthetic construct
MRALVVIRLSRVTEATTSPERQLESCQQLCAQRGWDVVGVAEDLDVSGAVDPFDRKRRPNLARWLAFEEQPFDVIVAYRVDRLTRSIRHLQQLVHWAEDHKKLVVSATEAHFDTTTPFAAVVIALMGTVAQMELEAIKERNRSAAHFNIRAGKYRGSLPPWGYLPTRVDGEWRLAPDPVQRERILEVYHRVVDNHEPLHLVAHDLNRRGVLSPKDYFAQLQGREPQGRKWSATALKRSMISEVMLGYATLNGKTVRDDDGAPLVRAEPILTRGQLEAVRAELAKTSRAKPAVSTPSLLLRVLFCAVCGEPAYKFAGGGRKHPRYRCRSMGFPKHCGNGTVAMAEWDAFCEEQVLNLLGGAERLEKVWVAGSDSAVELAEVNAELVDLTSLIGSPAYRAGSPQREALDARIAALAARQEELEGSEARPSGWEWRGTGQRFGDWWREQDTAAKNTWLRSMNVRLTFDVRGGLTRTIDLGDLHGYEQHLRLGSVVERLHTGMS

SEQ ID NO: 12271 - protein, 500 aa, synthetic construct
MRALVVIRLSRVTDATTSPERQLESCQQLCAQRGWDVVGVAEDLDVSGAVDPFDRKRRPNLARWLAFEEQPFDVIVAYRVDRLTRSTRHLQQLVHWADDHKKLVVSATEAHFDTTTPFAAVVIALMGTVAQMELEAIKERSRSAAHFNIRAGKYRGSLPPWGYLPARVDGVWRLVPDPVQRERILEVYHRVVNNHEPLHLVAHDLNRRGVLSPKDYFAQLQGREPQGRKWSATALKRSMISEAMLGYATLNGKTVRDDDGAPLVRAEPILTREQQEALRVELVKTSRAKPAVSTPSLLLRVLFCAVCGEPAYKFAGGGRKHPRYRCRSMGFPKHCGNGTVAMAEWDAFCEEQVLGLLGDAERLEKVWVAGSDSAVELAEVNAELVDLTSLTGSPAYRAGSPQREALDARIAALAARQEELEGLEARPSGWEWRETGQRFGDWWREQDTAARNTWLRSMNVRLTFDVRGGPTRTIDFGDLQEYEQYLRLGSMVERLHTGTS

SEQ ID NO: 12272 - protein, 500 aa, synthetic construct
MRALVVIRLSRVTDATTSPERQLESCQQLCAQRGWDVVGVAEDLDVSGAVDPFDRKRRPNLARWLAFEEQPFDVIVAYRVDRLARSIRHLQQLVHWAEDHKKLVVSATEAYFDTTTPFAAVVIALMGTVAQLELEAIKERSRSAAHFNIRAGKYRGSLPPWGYLPTRVDGEWRLAPDPVQRERILEVYHRVVDNHEPLHLVAHDLNRRGVLSPKDYFAQLQGRESQGRKWSATALKRSMTSEAMLGYATLNGKTVRDDDGAPLVRAEPILTREQLEALRAELVRTSRAKPAVSTPSLLLRVLFCAVCGEPAYKFSGGGRKHPRYRCRSMGFPKHCGNGTVAMAEWDAFCEEQVLDLLGDAERLEKVWVAGSDSAVELAEVNAELVDLTSLIGSPAYRAGSPQREALDARIAALAARQAELEGLEARPSGWEWRETGQGFGDWWREQDTAAKNTWLRSMNVRLTFDVRSGLTRTIDFGDLQEYEQHLRLGSVVERLHTGMS

SEQ ID NO: 12273 - protein, 500 aa, synthetic construct
MRALVVIRLSRVTDATTSPERQLESCQQLCAQRGWDVVGVAEDLDVSGAVDPFDRKRRPNLARWLAFEEQPFDVIVAYRVDRLTRSTRHLQQLVHWAEVHKKLVVSATEAHFDTTTPFAAVVIALMGTVAQMELEAIKERNRSAAHFNIRAGKYRGSLPPWGYLPTRVDGEWRLVPDPVQRERILEVYHRVVDNHEPLHLVAHDLNRRGVLSPKDYFAQLRGREPQGRKWSATALKRSMISEAMLGYATLNGKTVRGDDGAPLVRAEPILTREQLEALRAELVKTSRAKPAVSTPSLLLRVLFCAVCGEPAYKFAGGGRKHPRYRCRSMGFPKHCGNGTVAMAEWDAFCEEQVLDLLGDVERLEKVWVAGSDSAVELAEVNAELADLTSLIGSPAYRAGSPQREALDARIASLAARQEELEGLEARPSGWEWRETGQRFGDWWREQDTAAKNTWLRSMNVRLTFDVRGGLTRTIDFGDLQEYKQHLRLGSVVERLHTGMS

SEQ ID NO: 12274 - protein, 500 aa, synthetic construct
MRALVVIRLSRVTDATTSPERQLESCQQLCAQRGWDVVGVAEDLDVSGAVDPFDRKRRPNLARWLAFEEQPFDVIVAYRVDRLARSIRHLQQLVHWAEDHKKLVVSATEAHFDTTTPLAAVVIALMGTVAQMELEAIKERSRSAAHFNIRAGKYRGSLPPWGYLPTRVDGEWRLVPDPVQRERILEVYHRVVDNHEPLHLVAHDLNRRGVLSPKDYFAQLQGREPQGRKWSATALKRSMISEAMLGYATLNGKTVRDDDGAPLVRAEPILTREQQEALRAELVKTSRAKPAVSTPSLLLRVLFCAVCGEPAYKFAGGGRKHPRYRCRSMGFPKHCGNGTVAMAEWDAFCEEQVLGLLGDAERLEKVWVAGSDSAVELAEVNAELVDLTSLIGSPAHRAGSPQREALDARIAALAARQEELEGLEARPSGWEWRETGQRFGDWWREQDTAAKNTWLRSMNVRLTFDVRGELTRTIDFGDLQEYEQHLRLGRVVERLHTGVP

SEQ ID NO: 12275 - protein, 500 aa, synthetic construct
MRALVVIRLSRVTDATTSPERQLESCQQLCAQRGWDVVGVAEDLGVSGAVDPFDRQRRPNLARWLASEEQPFDVIVAYRVDRLARSIRHLQQLVRWAEDHKKLVVSATEAHFDTTTPFAAVVIALMGTVAQMELEAIKERNRSAAHFNIRAGKYRGSLPPWGYLPTRVDGEWRLAPDPVQRERILEVYHRVVDNHEPLHLVAHDLNQRGVLSPRDYFAQLQGREPQGRKWSATALKRSMTSEAMLGYATLNGETVRDDDGAPLVRAEPILTRGQLEALRAELVKTSRAMPAVSTPSLLLRVLFCAVCGEPAYKFSGGGRKHPRYRCRSMGFPKHCGNGTVAMAEWDAFCEEQVLNLLGDAERLEKVWVAGSDSAVELAEVNTELVDLTSLIGSPAYRAGSPQREALDTRIAALAARQEELKGLEARPSGWEWRETGQRFGDWWREQDTAAKNAWLRSMNVRLTFDVRGGLTRAIDFGDLQEYKQHLRLGSVVERLHTGMS

SEQ ID NO: 12276 - protein, 500 aa, synthetic construct
MRALVVIRLSRVTDATTSPERQLESCQQLCAQRGWDVVGVAEDLDVSGAVDPFDRKRRPNLARWLAFEEQPFDVIVAHRVDRLARSIRHLQQLVHWAEDHKKLVVSATEAHFDTTTPFAAVVIALMGTVAQMELEAIKERSRSAAHFNIRAGKYRGSLPPWGYLPSRVDGEWRLVPDPVQRERILEVYHRVVDNHEPLHLVAHDLNRRGVLSPKDYFAQLQGREPQGCKWSATALKRSMTSKAMLGYATLNGKTVRDDDGAPLVRAEPILTREQLEALRAELDKTSRAKPAVSTPSLLLRVLFCAVCGEPAYKFSGGGRKHPRYRCRSMGFPKHCGNGTVAMAEWDAFCEEQVLNLLGDAERLEKVWVAGSDSAVELAEVNAELVDLTSLIGSPAYRAGSPQREALDARIAALAARQEELEGLEARPSGWEWRETGQRFGDWWREQDTAAKNTWLRSMDVRLTFDVRGGLTRTIDFGDLQEYEQRLRSGSVVERSHTGMS

SEQ ID NO: 12277 - protein, 500 aa, synthetic construct
MRALVVIRLSRVTDATTSPERQLESCQQLCAQRGWDVVGVAEDLDVSGAVDPFDRKRRPNLARWLAFEEQPFDVIVAYRIDRLARSIRHLQQLVHWAEDHKKLVVSATEAHFDTTTPFAAVVIALMGTVAQMELEAIKERNRSAAHFNIRAGKYRGSLPPWGYLPARVDGEWRLVPDPVQRECILEVYHRVVDNHEPLRLVAHDLNRRGVLSPKDYFAQLRGREPQGRKWSATALKRSMTSEAMLGYATLNGKTVRGDDGAPLVRAEPILTREQLEALRAELVKTSRAKPAVSTPSLLLRVLFCAVCGEPAYKFAGGGRKHPRYRCRSMGFPKHCGNGTVAMAEWDAFCEEQVLDLLGDAERLEKVWVAGSDSAVELAEVSAELVDLMSLIGSPAYRAGSPQREALDARIAALAARQEELEGLEARPSGWEWRETGQRFGDWWREQDTAAKNTWLRSMNVRLTFDVRGGLTRTIDFGDLQEYEQHLRSGSVVERLRTGMS

SEQ ID NO: 12278 - protein, 500 aa, synthetic construct
MRALVVIRLSRVTDATTSPERQLESCQQLCAQRGWDVVGVAEDLDVSGAVDPFDRKRRPNLARWLAFEEQPFDVIVAYRVDRLTRSTRHLQQLVHWAEDHKKLVVSATEAHFDTTTPFAAVVIALMGTVAQMELEAIKERNRSAAHFNIRAGKYRGSLPPWGYLPTRVDGEWRLAPDPVQRERILEVYHRVVDNHEPLHLVAHDLNRRGVLSPKDYFAQLQGREPQGRKWSATALKRSMTSEAMLGYATLNGKTVRDDDGAPLVRAEPILTREQLEALRAELVKTSRAKPAVSTPSLLLRVLFCAVCGEPAYKFTGGERKHPRYRCRSMGFPKHCGNGTVAMAEWDAFCEEQVLGLLGDAERLEKVWVAGSDSAVELAEVTAELVDLTSLIGSPAYRAGSPQREALDARIAALAARQEELEGLEARPSGWEWRETGQRFGDWWRGQDTAAKNTWLRSMNVRLTFDVRGGLTRTIDFGDLQEYEQHLRLGSVVERLHTGMS

SEQ ID NO: 12279 - protein, 500 aa, synthetic construct
MRALVVIRLSRVTDATTSPERQLESCQQLCAQRGWDVVGVAEDLDVSGAVDPFDRKRRPNLARWLAFEEQPFDAIVAYRVDRLTRSIRHLQQLVHWAEDHKKLVVSATEAHFDTTTPFAAIVIALMGTVAQMELEAIKERSRSAAHFNIRAGKYRGSLPPWGYLPTRVDGEWRLVPDPVQRERILEVYHRVVDNHEPLHLVAHDLNRRGVLSPKDYFAQLQGREPQGRKWSATALKRSMTSEAMLGYATLNGKTVRDDDGAPLVRAEPILTREQREALRAELVKTSRAKPAVSTPSLLLRVLFCAVCGEPAYKFAGGGRKHPRYRCRSMGFPKHCGNGTVAMAEWDAFCEEQVLDLLGDAERLEKIWVAGSDSAVELAEVNAELVDLMSLIGSPAYRAGSPQREALDARIAALAARQEELEGLEARPSGWVWRETGQRFGDWWREQDTAAKNTWLRSMNVRLTFDVRGGLTRTIDFGDLQEYEQHLRLGSVVERLHTGMS

SEQ ID NO: 12280 - protein, 500 aa, synthetic construct
MRALVVIRLSRVTDATTSPERQLESCQQLCAQRGWDVVGVAEDLDVSGAVDPFDRKRRPNLARWLAFEEQPFDVIVAYRVDRLARSIRHLQQLVHWAEDHKKLVVSATEAHFDTTTPFAAVVIALMGTVAQMELEAIKERSRSAAHFNIRAGKYRGSLPPWGYLPTRVDGEWRLVPDPVQRERILEVYHRVVDDHEPLHLVAHDLNRRGVLSPKDYFAQLRGREPQGRKWSATALKRSMISEAMLGYATLNGKTVRDDHGAPLVRAEPILTREQLEALRAELVRTSRAKPAVSTPSLLLRVLFCAVCGEPAYKFAGGGRKHPRYRCRSMGFPKHCGNGTVAMAEWDAFCEEQVLDLLGDTERLEKVWVAGSDSAVELAEVNAELVDLTSLIGSPAYRAGSPQREALDARIAALAARQEELEGLEARPSGWEWRETGQRFGDWWREQDTAAKNTWLRSMNVRLTFDVRGGLTRTIDFGDLQEYEQHLRLGSVVERLHTGMS

SEQ ID NO: 12281 - protein, 500 aa, synthetic construct
MRALVVIRLSRVTEATTSPERQLESCQQLCAQRGWDVVGVAEDLDVSGAVDPFDPKRRPNLARWLAFEEQPFDVIVAYRVDRLARSIRHLQQLVHWAEDHKKLVVSATEAHFDTTTPFAAVVIALMGTVAQMELEAIKERSRSAAHFNIRAGKYRGSLPPWGYLPTRVDGEWRLVPDPVQRERILEVYHRVVDNHEPLHLVAHDLNRRGVLSPKDYFAQLRGREPQGRKWSATALKRSMISEAMLGYATLNGETVRDDGGAPLVRAEPILTREQLEALRAELVKTSRAKPAVSTPSLLLRVLFCAVCGEPAYKFAGGGRKHPRYRCRSMGFPKHCGNGTVAMAEWDAFCEEQVLDLLGDAERLEKVWVAGSDSAVELAEVNAELVDLTSLIGSPAYRAGSPQREALDARIAALAARQEELEGLEARPSGWEWRETGQRFRDWWREQDTAAKNTWLRSMNVRLTFDVRGGLTRTIDFGDLQEYEQHLRLGSVVERLHTGMS

SEQ ID NO: 12282 - protein, 500 aa, synthetic construct
MRALVVIRLSRVTDATTSPERQLESCQQLCAQRGWDVVGVAEDLDVSGAVDPFDRKRRPNLARWLAFEEQPFDVIVAYRVDRLTRSTRHLQQLVHWAEDHKKLVVSATEAHFDTTTPFAAVVIALMGTVAQMELEAIKERNRSAAHFNIRAGKYRGSLPPWGYLPTRVDGEWRLVPDPVQRERILEVYHCVVDNHEPLHLVAHDLNRRGVLSPKDYFAQLRGREPQGRKWSATALKRSMISEAMLGYATLNGKTVRDDDGAPLVRAEPILTREQLEALRAELVKTSRARPAVSTPSLLLRVLFCAVCGEPAYKFAGGGRKHPRYRCRSMGFPKHCGNGTVAMAEWDAFCEEQVLDLLGDAERLEKVWVAGSDSAVELAEVNAELVDLMSLIGSPAYRAGSPQREALDARIAALAARQEELEGLEARPSGWEWRETGQRFGDWWREQDTAAKNTWLRSMNVRLTFDVRGGLTRTIDFGDLQEYVQHLRLGSVVERLHTGMS

SEQ ID NO: 12283 - protein, 500 aa, synthetic construct
MRALVVIRLSRVTDATTSPERQLESCQQLCAQRGWDVVGVAEDLDVSGAVDPFDRKRRPNLARWLAFEEQPFDAIVAYRVDRLTRSIRHLQQLVHWAEDHKKLVVSATEAHFDTTTPFAAVVIALMGTVAQMELEAIKERNRSAAHFNIRAGKYRGSLPPWGYLPARVDGVWRLVPDPVQRERILEVYHRVVVNHEPLHLVAHDLNRRGVLSPKDYFAQLQGREPQGRKWSATALKRSMISEAMLGYATLNGKTVRDEDGAPLVRAEPILTREQLEALRAELVKTSRAKPAVSTPSLLLRVLFCAVCGEPAYKFAGGGRKHPRYRCRSMGFPKHCGNGTVAMAEWDAFCEEQVLNLLGDAERLEKVWVAGSDSAVELAEVNAELVDLTSLIGSPAYRAGSPQREALDARIAALAARQEELEGLEARPSGWEWRETGQRFGDWWREQNTAAKNTWLRSMNVRLTFDVRGGLTRTIDFGDLQECEPHLRLGSVAERLHTGMS

SEQ ID NO: 12284 - protein, 500 aa, synthetic construct
MRALVVIRLSRVTDATTSPERQLESCQQLCAQRGWDVVGVAEDLDVSGAVDPFDRKRRPSLARWLAFEERPFDVIVAYRVDRLTRSTRHLQQLVHWAEDHKKLVVSATEAHFDTTTPFAAVVIALMGTVAQMELEAIKERSRSAAHFNIRAGKYRGSLPPWGYLPTRVDGEWRLVPDPVQRERILEVYHRVVDNHEPLYLVAHDLNRRGVLSPKDYFAQLRGREPQGRKWSATALKRSMISEAMLGYATLGGKTVRDDDGAPLVRAEPILTREQLEALRAELVKTSRAKPAVSTPSLLLRVLFCAVCGEPAYKFSGGGRKHPRYRCRSMGFPKHCGNGTVAMAEWDAFCEEQVLDLLGDAERLEKVWVAGPDSAVKLAEVNAELVDLTSLIGSPAYRAGSPQREALDARIAALAARQGELEGLEARPSGWEWRETGQRFGDWWREQDTAAKNTWLRSMNVRLTFDVRGGLTRTIDFGDLQEYEQHLRLGSVVERLHTGMS

SEQ ID NO: 12285 - protein, 500 aa, synthetic construct
MRALVVIRLSRVTDATTSPERQLESCQQLCAQRGWDVVGVAEDLDVSGAVDPFDRKRRPNLARWLAFEVQPFDAIVAYRVDRLTRSIRHLQQLVHWAEDHKKLVVSATEAHFDTTTPFAAVVIALMGTVAQMELEAIKERNRSAAHFNIRAGKYRGSLPPWGYLPTRVDGEWRLVPDPVQRERILEVYHRVVDNHEPLHLVAHDLNRRGVLSPKDYFAQLRGREPQGRKWSATALKRSMTSEAMLGYATLNGKTVRDDDGAPLVRAEPILTREQQEALRAELVKTSRAKPAVSTPSLLLRVLFCAVCGEPAYKFAGGGRKHPRYRCRSMGFPKHCGNGTVAMAEWDTFCEEQVLDLLGDAERLEKAWVAGSNSAVELAEVNAELVDLTSLIGSPAYRAGSPQREALDARIAALAARQEELEGLEARPSGWEWRETGQRFGDWWREQDTAAKNAWLRTMNVRLTFDVRGGLTRTIDFGDLQEYEQHLRLGSVVERLHTGMS

SEQ ID NO: 12286 - protein, 500 aa, synthetic construct
MRALVVIRLSRVTDATTSPERQLESCQQLCAQRGWDVVGVAEDLDVSGAVDPFDRKRRPNLARWLASEEQPFDVIVAYRVDRLTRSTRHLQQLVHWAEDHKKLVVSATEAHFDTTTPFAAVVIALMGTVAQMELEAIRERNRSAAHFNIRAGKYRGSLPPWGYLPTRVDGEWRLAPDPVQRERILEVYHRVVDNHEPLHLVARDLNQRGVLSPRDYFAQLQGREPQGRKWSATALKRSMTSGAMLGYATLNGKTVRDDDGAPSVRAEPILTREQLEALRAELVKTSRAKPAVSTPSLLLRVLFCAVCGEPAYKFAGGGRKHPRYRCRSMGSPKHCGNGTIAMAEWDAFCEEQVLELLGDAERLEKVWVAGSDSAVELAEVNAELVDLTSLIGSPAYRAGSPQREALDARIAALAARQEELEGFEARPSGWGWRETGQRFGDWWREQDTAAKNTWLRSMNVRLTFDVRGGLTRTIDFGDLQEYEQHLRLSSVVERLHTGMS

SEQ ID NO: 12287 - protein, 500 aa, synthetic construct
MRALVVIRLSRVTDATTSPERQLESCQQLCAQRGWDVVGVAEDLDVSGAVDPFDRKRRPNLARWLAFEEQPFDVIVAYRVDRLTRSVRHLQQLVHWAEDHKKLVVSATEAHFDTTTPFAAVVIALMGTVAQMELEAIKERIRSAAHFNIRAGKYRGSLPPWGYLPTRVNGEWRLAPDPVQRERILEVYHRVVDNHEPLHLVAHDLNRRGVLSPKDYFAQLRGRKPQGRKWSATALKRSMISEAMLGYATLNGKTVRNDDGAPLVRAEPILTREQLEALRAELVKTSRAKPAVSTPSLLLRVLFCAVCGEPAYKFSGGGRKHPRYRCRSMGFPEHCGNGTVAMAEWDAFCEEQVLDLLGDAERLEKVWVAGSDSAVELAEVNAELVDLTSLIGSPACRAGSPQREALDARIAALAARQAELEGLEARPSGWEWRETGQGFGDWWREQDTAAKNTWLRSMNVRLTFDVRGGLTRTIDFGDLQEYEQHLRLGSVVERLHTGMS

SEQ ID NO: 12288 - protein, 500 aa, synthetic construct
MRALVVIRLSRVTDATTSPERQLESCQRLCAQRGWDVVGVAEDLDVSGAVDPFDRKRRPNLARWLAFEEQPFDVIVAYRVDRLTRSIRHLQQLVHWAEDHKKLVVSATEAYFDTTTPFAAVVIALMGTVAQMELEAIKERSRSAAHFNIRAGKYRGSLPPWGYLPTRVDGEWRLAPDPVQRERILEVYHRVVDNHEPLHLVAHDLNRRGVLSPKDYFAQLQGREPQGRKWSATALKRSMTSEAMLGYATLNGKTVRDDDGAPLVRAEPILTREQLEALRAELVRTSRAKPAVSTPSLLLRVLFCAVCGEPAYKFSGGGRKHPRYRCRSMGFPKHCGNGTVAMAEWDAFCEEQVLDLLGDAERLEKVWVAGSDSAVDLAEVNAELVDLTSLIGSPAYRAGSPQREALDARIAALAARQAELEGLEARPSGWEWRETGQGFGDWWREQDTAAKNTWLRSMNVRLTFDVRGGLTRTIDFGDLQEHEQHLRLGSVVEHLHTGMS

SEQ ID NO: 12289 - protein, 500 aa, synthetic construct
MRALVVIRLSRVTDATTSPERQLESCQQLCAQRGWDVVGVAEDLDVSGAVDPFDRKRRPNLARWLAFEEQPFDVIVAYRVDRLARSIRHLQQLVHWAEDHKKLVVSATEAHFDTTTPFAAVVIALMGTVAQMELEAIKERNRSAAHFNIRAGKYRGSLPPWGYLPARVDGEWRLVPDPVQRERILEVYHRVVDNHEPLHLVAHDLNRRGVLSPKDYFAQLRGREPQGRKWSATALKRSMTSEAMLGYATLNGKTVRDDDGAPLVRAEPILTREQLEALRAELVKTSRAKPAVSTPSLLLRVLFCAVCGEPAYKFAGGGRKHPRYRCRSMGFPKHCGNGTVAMAEWDAFCEEQVLDLLGDAERLEKVWVAGSDSAVELAEVNAELVDLTSLIGSPAYRAGSPQREALDARIAALAARQEELDGLEARPSGWEWRETGQRFGDWWREQDTAARNTWLRSMNVRLTFDVRGGLTRTIDFGDLQEYEQHLRLGSVVERLHTGMS

SEQ ID NO: 12290 - protein, 500 aa, synthetic construct
MRALVVIRLSRVTDATTSPERQLESCQQLCAQRGWDVVGVAEDLDVSGAVDPFDRKRRPNLARWLAFEEQPFDVIMAYRVDRLTRSIRHLQQLVHWAEDHKKLVVSATEAHFDTTTPFAAVVIALMGTVAQMELEAIKERNRSAAHFNIRAGKYRGSMPPWGYLPTRVDGEWRLVPDPVQRERILEVYHRVVDNHEPLHLVAHDLNRRGVLSPKDYFAQLRGREPQGRKWSATALKRSMISVAMLGYATLNGKTVRDDDGAPLVRAEPILTREQLGALRAELVKTSRAKPAVSTPSLLLRVLFCAVCGEPAYKFAGGGRKHPRYRCRSMGFPKHCGNGTVAMAEWDAFCEEQVLNLLGDAERLEKVWVAGSDSAVELAEANKELVDLTSLIGSPAYRAGSPQREALDARIAALAARQEELEGLEARPSGWEWRGTGQRFGDWWRELDTAAKNTWLRSMNVRLTFDVRDGLTRTIDFGDLQEYEQHLRLGSVVERSHTGMS

SEQ ID NO: 12291 - protein, 500 aa, synthetic construct
MRALVVIRLSRVTDATTSPERQLESCQQLCAQRGWDVVGVAEDLDVSGAVDPFDRKRRPNLARWLAFEEQPFDVIVAYRVDRLARSIRHLQQLVHWAEDHKKLVVSATEAHFDTTTPFAAVVIALMGTVAQMELEAIKERNRSAAHFNIRAGKYRGSLPPWGYLPTRVDGEWRLAPDPVQRERILEVYHRVVDNHEPLHLVAHDLNRRGVLSPRDYFAQLQGREPQGRKWSATALKRSMISKAMLGYATLNGKIVRDDDGAPLVRAEPILTCEQLEALRAELVKTSRAKPAVSTPSLLLRVLFCAVCGEPAYKFAGGGRKHPRYRCRSMGFPKHCGNGTVATAEWDAFCEEQVLDLLGDTERLEKVWVAGSDSAIELAEVNAELVDLTSLIGSPAYRAGSPQREALDARIAALAARQEELEGLEARPSGWEWRETGQRFGDWWREQDTAAKNTWLRSMNVRLTFDVRGGLTRSIDFGDLQEYEQHLRLGSVVERLHTGMS

SEQ ID NO: 12292 - protein, 500 aa, synthetic construct
MRALVVIRLSRVTDATTSPERQLESCQQLCAQRGWDVVGVAEDLDVSGAVDPFDRKRRPNLARWLAFEEQPFDVIVAYRVDRLARSIRHLQQLVHWAEDHKKLVVSATEAHFDTTTPFAAVVIALMGTVAQMELEAIKERCRSAAHFNIRAGKYRGSLPPWGYLPTRVDGEWRLAPDPVQRERILEVYHRVVDNHEPLHLVAHDLNRRGVLSPRDYFAQLRGREPQGRKWSATALKRSMISEAMLGYATLNGRTVRDDDGAPLVRAEPILTREQLEALRAELVKTSRAKPAVSTPSLLLRVLFCAVCGEPAYKFAGGGRKHPRYRCRSMGFPKHCGNGTVATAEWDAFCEEQVLDLLGDTERLEKVWVAGSDSAIELAEVNAELVDLTSLIGSPAYRAGSPQREALDARIAALAARQEELEGLEARPSGWEWRETGQRFGDWWREQDTAAKNTWLRSMNVRLTFDVRGGLTRTIDLGDLQEYEQHLRLGSVVGRLHTGMS

SEQ ID NO: 12293 - protein, 500 aa, synthetic construct
MRALVVIRLSRVTDATTSPERQLESCQQLCAQRGWGVVGVAEDLGVSGAVDPFDRKRRPNLARWLAFEEQPFDVIVAYRVDRLTRSVRHLQQLVHWAEDHKKLVVSATEAHFDTTTPFAAVVIALMGTVAQMELEAIKERSRSAAHFNIRAGKYRGSLPPWGYLPARVDGEWRLVPDPVQRERILEVYHRVVDNHEPLHLVAHDLNRRDVLSPKDYFAQLRGREPQGRKWSATALKRSMISVAMLGYATLCGKTVRDDDGAPLVRAEPILTREQLEALRAELVKTSRAKPAVSTPSLLLRVLFCAVCGEPAYKFAGGGRKHPRYRCRSMGFPKHCGNGTVAMAEWDAFCEEQVLNLLGDAERLEKVWVAGSDSAVELAEVNKELVDLTSLIGSPAYRAGSPQREALDARIAALAARQEELEGLEARPSGWEWRGTGQRFGDWWREQDTAAKNTWLRSMNVRLTFGVRGGLTRTIDFGDLQEYEQHLRLGSVVERSHTGMS

SEQ ID NO: 12294 - protein, 500 aa, synthetic construct
MRALVVIRLSRVTDATTSPERQLESCQQLCTQRGWDVVGVAEDLDVSGAVDPFDRKRRPNLARWLAFEVQPFDVIVAYRVDRLTRSTRHLQQLVHWAEDHKKLVVSATEAHFDTTTPFAAVVIALMGTVAQMELEAIRERNRSAAHFNIRAGKYRGSLPPWGYLPTRVDGEWRLVPDPVQRERILEVYHRVVDNHEPLHLVAHDLNRRGVLSPKDYFAQLQGREPQGRKWSATALKRSMISEAMLGHATLNGKTVRDDDGAPLVRAEPILTREQQEALRAELAKTSRAKPAVSTPSLLLRVLFCAVCGEPAYKFSGGGRKHPRYRCRSMGFPKHCGNGTVAMAEWDAFCEEQVLGLLGDAERLEKVWVADSDSAVELAEVNAELVDLTSLIGSPAYRAGSPQRGALDARIAALAARQEELEGLEARPSGWEWRGTGQRFGDWWREQDTAAKNTWLRSMNVRLTFDVRGGLTRTIDFGDLQEYEQHLRLGSVVERLHTGMS

SEQ ID NO: 12295 - protein, 500 aa, synthetic construct
MRALVVIRLSRVTDATTSPERQLESCQQLCAQRGWDVVGVAEDLDVSGAVDPFDRKRRPNLARWLAFEEQPFDVIVAYRVDRLTRSVRHLQQLVHWAEDHKKLVVSATEAHFDTTTPFAAVVIALMGTVAQMELEAIKERSRSAAHFNIRAGKYRGSLPPWGYLPARVDGEWRLVPDPVQRERILEVYHRVVDNHEPLHLVAHDLNRRGVLSPRDYFAQLRGREPQGREWSATALKRSMTSEAMLGYATLNGKIVRDDDGAPLVRAEPILTREQLEALRAELVKTSRARPAVSTPSLLLRVLFCAVCGEPAYKFAGGGRKHPRYRCRSMGFPKHCGNGTVAMAEWDAFCEEQVLDLLGDAERLEKVWVADSDSAVELAEVNAELVDLTSLIGSPAYRAGSPQREALDARIAALAARQEELEGLEARPSGWEWRETGQRFGDWWREQDTAAKNTWLRSMNVRLTFDVRGGLTRTIDFGDLQEYEQHLRLGSVVERLHTGMS

SEQ ID NO: 12296 - protein, 500 aa, synthetic construct
MRALVVIRLSRVTDATTSPERQLESCQQLCAQRGWDVVGVAEDLDVSGAVDPFDRMRRPNLARWLAFEEQPFDAIVAYRVDRLTRSTRHLQQLVHWAEDHKKLVVSATEAHFDTTTPFAAVVIALMGTVAQMELEAIRERNRSAAHFNIRAGKYRGSLPPWGYLPTRVDGEWRLVPDPVQRERILEVYHRVVDNHEPLHLVAHDLNRRGVLSPKDYFAQLRGREPQGRKWSATALKRSMISVAMLGYATLDGKTVRDDDGAPLVRAEPILTREQQEALRAELVKTSRAKPAVSTPSLLLRVLFCAVCGEPAYKFAGGGRKHPRYRCRSMGFPKHCGNGTVAVAEWDAFCEEQVLDQLGDVERLEKVWVAGSDSAVELAEVSAELVDLTSLIGSPAYRAGSPQREALDARIAALVARQEELEGLEARPSGWEWRETGQRFGDWWREQDTAAKNTWLRSMNVRLTFDVRGGLTRTIDFGDLQEYEQHLRLGSVVERLHTGMA

SEQ ID NO: 12297 - protein, 500 aa, synthetic construct
MRALVVIRLSRVTDATTSPERQLESCQQLCAQRGWDVVGVAEDLDVSGAVDPFDRKRRPNLARWLAFEVQPFDVIVAYRVDRLTRSTRHLQQLVHWAEDHKKLVVSATEAHFDTTTPFAAVVIALMGTVAQMELEAIKERNRSAAHFNIRAGKYRGSLPPWGYLPTRVDGEWRLAPDPVQRERILEVYHRVVDNHEPLHLVAHDLNRRGVLSPKDYFAQLRGREPQGRKWSATALKRSMTSEAMLGYATLNGKIVRDDDGAPLVRAEPILTREQQEALRAELVKTSRAKPAVSTPSLLLRVLFCAVCGEPAYKFAGGGRKHPRYRCRSMGFPKHCGNGTVAMAEWDAFCEEQVLDLLGDAERLEKVWVAGPDSAVELAEVNAELMDLTSLIGSPAYRAGSPQREALDARIAALAARQEELEGLEARPSGWEWRETGQRFGDWWREQDTAAKNTWLRSMNVRLTFDVRGGLTRTIDFGDLQEYERHLRLGSVVERLHTGMS

SEQ ID NO: 12298 - protein, 500 aa, synthetic construct
MRALVAIRLSRVTDATTSPERQLESCQQLCAQRGWDVVGVAEDLDVSGAVDPFDRKRRPNLARWLAFEEQPFDVIVAYRVDRLTRSTRHLQQLIHWAEDHKKLVVSATEAHFDTTTPFAAVVIALMGTVAQMELEAIKERSRSAAHFNIRAGKYRGSLPPWGYLPTRVDGEWRLAPDPVQRERILEVYHRVVDNHEPLHLVAHDLNRRGVLSPKDYFAQLQGREPQGRKWSATALKRSMISVTMLGYATLNGKTVRDDDGAPLVRAEPILTREQLEALRAELVKTSRAKPAVSTPSLLLRVLFCAVCGGPAYKFAGGGRKHPRYRCRSMGFPKHCGNGTVAMAEWDAFCEEQVLGLLGDVERLEKVWVAGSDSAVKLAEVNAELVDLTGLIGSPAYRAGSPQREALDARIAALAARQEELEGLEARPSGWEWRGTGQRFGDWWRKQDTAAKNTWLRSMNVRLTFDVRGGLTRTIDFGDLQEYEQHLRLGSVVERLHTGMS

SEQ ID NO: 12299 - protein, 500 aa, synthetic construct
MRALVVIRLSRVTDATTSPERQLESCQQLCAQRGWDVVGVAEDLDVSGAVNPFDRKRRPNLARWLAFEEQPFDVIVAYRVDRLTRSTRHLQQLVHWAEDHKKLVVSATEAHFDTTTPFAAVVIALMGTVAQMELEAIKERSRSAAHFNIRAGKYRGSLPPWGYLPTRVDGEWRLVPDPVQRERILEVYHRVVDNHEPLHLVAHDLNRRGVLSPKDYFAQLRGREPQGRRWSATALKRSMISEAMLGYATLNGKTVRDDDGAPLVRAEPILTRKQLEALRAELVKTSRAKPAVSTPSLLLRVLFCAVCGEPAYKFAGGGRKHPRYRCRSMGFPKHCGNGTVAMAEWDAFCEEQVLGLLGDAERLEKVWVTGSDSAVELAEVNAELVDLTSLIGSPAYRAGSPQRVALDARIAALAARQEELEGLEARPSGWEWRGTGQRFGDWWREQDTAAKNTWLRSMNVRLTFDVRGGLTRTIDFGDLQEYEQHLRLGSVAERLHTGMS

SEQ ID NO: 12300 - protein, 500 aa, synthetic construct
MRALVVIRLSRVTDATTSPERQLESCQQLCAQRGWDVVGVAEDLDVSGAVDPFDRMRRPNLARWLAFEEQPFDVIVAYRVDRLTRSTRHLQQLVHWAEDHKKLVVSATEAHFDTTTPFAAVVIALMGTVAQMELEAIKERSRSAAHFNIRAGKYRGSLPPWGYLPTRVDGEWRLVPDPVQRERILEVYHRVVDNHEPLHLVAHDLNRRGVLSPKDYFAQLRGREPQGRKWSATALKRSMISEAMLGYATLNGKIVRVDDGAPLVRAEPILTREQLEALRAELVKTSRAKPAVSTPSLLLRVLFCAVCGEPAYKFAGGGRKHPRYRCRSMGFPKHCGNGTVAMAEWDAFCEEQVLDLLGDAERLEKVWVAGSDSAVELAEVNAELMDLTSLIGSPAYRAGSPQREALDARIAALAARQEELEGLETRPSGWEWRETGQRFGDWWREQDTAAKNTWLRSMNVRLTFDARGGLTRTIDFGDPQEYEQHLRLGSVVERLHTGMS

SEQ ID NO: 12301 - protein, 500 aa, synthetic construct
MRALVVIRLSRVTDATTSPERQLESCQQLCAQRGWDVVGVAEDLDVSGAVDPFDRKRRPNLARWLASEEQPFDVIVAYRVDRLTRSTRHLQQLVHWADDHKKLVVSATEAHFDTTTPFAAVVIALMGTVAQMELEAIKERSRSAAHFNIRAGKYRGSLPPWGYLPARVDGVWRLVPDPVQRERILEVYHRVVNNHEPLHLVAHDLNRRGVLSPKDYFAQLQGREPQGRKWSATALKRSMISEAMLGYATLDGKTVRDDDGAPLVRAEPILTREQQEALRAELVKTSRAKPAVSTPSLLLRVLFCAVCGEPAYKFAGGGRKHPRYRCRSMGFPKHCGNGTVAMAEWDAFCEEQVLGLLGDAERLEKVWVAGSDSAVELAEVNAELVDLTSLIGSPAYRAGSPQREALDARIAALAARQEELEGLEARPSGWEWRETGQRFGDWWREQDTAAKNTWLRSMNVRLTFDVRGGLTRTIDFGDLQGYEQHLRLGSVAERLHTGMS

SEQ ID NO: 12302 - protein, 500 aa, synthetic construct
MRALVVIRLSRVTDATTSPERQLESCQQLCAQRGWDVVGVAEDLDVSGAVDPFDRKRRPNLARWLAFEEQPFDVIVAYRVDRLARSIRHLQQLVHWAEDHKKLVVSATEAHFDTTTPFAAVVIALMGTVAQMELEAIKERSRSAAHFNIRAGKYRGSLPPWGYLPARVDGEWRLVPDPVQRERILEVYHRVVDNHEPLHLVAHDLNRRGVLSPKDYFAQLRGREPQGRKWSATALKRSMTSEAMLGYATLNGKTVRDEDGAPLVRAEPILTREQLEALRAELVKASRAKPAVSTPSLLLRVLFCAVCGEPAYKFAGGGRKHPRYRCRSMGFPKHCGNGTVTMAEWDAFCEEQVLDLLGDAERLEKVWVAGSDSAVELAEVNAELVDLTSLIGSPAYRAGSPQREALDARIAALAARQEELEGLEARPSGWEWRGTGQRFGDWWREQNTAAKNSWLRSMNVRLTFDVRGGLTRTIDFGVLQEYEQHLRLGSVVERLHTGMS

SEQ ID NO: 12303 - protein, 500 aa, synthetic construct
MRALVVIRLSRVTDATTSPERQLESCQLLCAQRGWEVVGVAEDLDVSGAVDPFDRKRRPSLARWLAFEEQPFDVIVAYRVDRLTRSTRHLQQLVHWAKDHKKLVVSATEAHFDTTTPFAAVVIALMGTVAQMELEAIKERNRSAAHFNIRAGKYRGSLPPWGYLPARVDGEWRLVPDPAQRERILEVYHRVVDNHEPLHLVAHDLNRRGVLSPKDYFAQLRGREPQGRKWSATALKRSMTSEAMLGYATLNGKTVRGDDGAPLVRAEPILTREQLEALRAELVKTPRAKPAVSTPSLLLRVLFCAVCGEPAYKFAGGGRKHPRYRCRSMGFPKHCGNGTVAMVEWDAFCEEQVLDLLGDAERLEKVWVAGSDSAVELAEVNAELVDLTSLIGSPAYRAGSPQREALDARIAALAARQEELEGLEARPSGWEWRETGQRFGDWWREQDTAAKNTWLRSMNVRLTFDVRGGLTRTIDFGDLQEYEQHLRLGSVVERLHTGMS

SEQ ID NO: 12304 - protein, 500 aa, synthetic construct
MRALVVIRLSRVTEATTSPERQLESCQQLCAQRGWDVVGVAEDLDVSGAIDPFDRKRRPNLARWLAFEEQPFDVIVAHRVDRLTRSIRHLQQLVHWAEDHKKLVVSATEAHFDTTTPFAAVVIALMGTVAQMELEAIKERSRSAAHFNIRAGKYRGSLPPWGYLPTRVDGEWRLAPDPVQRERILEVYHRVVDNHEPLHLVAHDLNRRGVLSPKDYFAQLQGREPQGRKWSATALKRSMISEAMLGYATLNGKIVRDDDGAPLVRAEPILTREQLEALRAEFVKTSRAKPAVSTPSLLLRVLFCAVCGEPAYKFAGGGRKHPRYRCRSMGFPKHCGNGTVAMAEWDAFCEEQVLNLLGDAERLEKVWVAGSDSAVELAEVNAELVDLTSLIGSPAYRAGSPQREALDARIAALAARQEELEGLEARPSGWEWRETGQRFGDWWREQDTAAKNTWLRSMNVRLTFDVRGGPTRTIDFGDLQEYEQHLRLGGVVERLHTGMS

SEQ ID NO: 12305 - protein, 500 aa, synthetic construct
MRALVVIRLSRVTDATTSPERQLESCQQLCAQRGWVVVGVAEDLDVSGAVDPFDRKRRPNLARWLAFEEQPFDVIVAYRVDRLTRSTRHLQQLVRWAEDHKKLVVSATEAHFDTTTPFAAVVIALMGTVAQMELEAIKERNRSAAHFNIRAGKYRGSLPPWGYLPTRVDGEWRLVPDPVQRERILEVYHRVVDNHEPLHLVAHDLNRRGVLSPRDYFAQLRGREPQGRKWSATALKRSMISEAMLGYATLNGKTVRDDDGVPLVRAEPILTREQQEALRAELVKTSRAKPAVSTPSLLLRVLFCAVCGEPAYKFAGGGRKRPRYRCRSMGFPKHCGNGTVAMAEWDAFCEEQVLDLLGDAERLEKVWVAGSGSAVELAEVNAELVDLTSLIGSPAYRAGSPQREALDARIAALAARQEELEGLESRPSGWEWRETGQRFGDWWREQDTAAKNTWLRSMNVRLTFDVRGGLTRTIDFGDLQEYEQHLRSGGVVERLHTGMS

SEQ ID NO: 12306 - protein, 500 aa, synthetic construct
MRALVVIRLSRVTDATTSPERQLESCQQLCAQRGWDVVGVAEDLDVSGAVDPFDRKRRPNLARWLAFEEQPFDVIVAYRVDRLARSIRHLQQLVHWAEDHKKLVVSATEAHFDTTTPFAAVVIALMGTVAQMELEAIKERNRSAAHFNIRAGKYRGSLPPWGYLPTRVDGEWRLVPDPVQRERILEVYHRVVDNHEPLHLVAHDLNRRGVLSPRDYFAQLQGREPQGRKWSATALKRSMISVAMLGYATLNGKTVRDDYGAPLVRAEPILTREQLGALRAELVKTSRAKPAVSTPSLLLRVLFCAVCGEPAYKFAGGGRKHPRYRCRSMGFPKHCGNGTVAMAEWDAFCEEQVLDLLGNAERLEKVWVAGSDSAVELAEVSAELVDLTSLIGSPAYRAGSPQREALDARIAALAARQEELEGLEARPSGWEWRGTGQRFGDWWREQDTAAKNTWLRSMNVRLTFDVRGGLTRTFDFGDLQEYERHLRLGSVVERLHTGMS

SEQ ID NO: 12307 - protein, 500 aa, synthetic construct
MRALVVIRLSRVTDATTSPERQLESCQQLCAQRGWDVVGVAEDLDVSGAVNPFDHKRRPNLARWLAFEEQPFDVIVAHRVDRLTRSTRHLQQLVHWAEDHKKLVVSATEAHFDTTTPFAAVVIALMGTVAQMELEAIKERSRSAAHFNIRAGKYRGSLPPWGYLPTRVDGEWRLAPDPVQRERILEVYHRVVDNHEPLHLVAHDLNRRGVLSPKDYFAQLQGREPQGRKWSATALKRSMISEAMLGYVTLNGKIVRDDDGAPLVRAEPILTREQLEALRAELVKTSRVKPAVSTPSLLLRVLFCAVCGEPAYKFAGGGRKHPRYRCRSMGFPKHCGNGTVTMAEWDAFCEEQVLDLLGDAERLEKVWVADSDSAVELAEVNAELVDLTSLIGSPAYRAGSPQREALDARIAALAARQEELEGLEARPSGWEWRGTGQRFGDWWREQNTAAKNSWLRSMNVRLTFDVRGGLTRTIDFGVLQEYEQHLRLDSVVERLHTGMS

SEQ ID NO: 12308 - protein, 500 aa, synthetic construct
MRALVVIRLSRVTDATTSPERQLESCQQLCAQRGWDVVGVAEDLDVSGAADPFDRKRRPNLARWLAFEEQPFDVIVAYRVDRLTRSTRHLQQLVHWAEDHKKLVVSATEAHFDTTTPFAAVVIALMGTVAQMELEAIKERNRSAAHFNIRAGKYRGSLPPWGYLPARVDGEWRLVPDPVQRERILEVYHRVVDNHEPLHSVAHDLNRRGVLSPKDYFAQLQGREPQGRKWSATALKRSMISEAMLGYATLNGKTVRDDDGAPLVRAEPILTREQQEALRAELVKTSRAKPAVSTPSLLLRVLFCAVCGEPAYKFAGGGRKHPRYRCRSMGFPKHCGNGTVAMAEWDAFCEEQVLDLLGDAERLEKVWVAGSDSAVELAEVNAELADLTSLIGSPAYRAGSPQREALDARIAALAARQEELEGLEARPSGWEWRETGQRFGDWWREQDTAAKNTWLRSMNVRLTFDVRGGLTRTIDFGDLQEYEQHLRLGSVVERLHTGMS

SEQ ID NO: 12309 - protein, 500 aa, synthetic construct
MRALAVIRLSRVTDATTSPERQLESCQQLCAQRGWDVVGVAEDLDVSGAVDPFDRKRRPNLARWLAFEEQPFDVIVAYRVDRLARSIRHLQQLVHWAEDHKKLVVSATEAHFDTTTPFAAVVIALMGTVAQMELEAIKERSRSAAHFNIRAGKYRGSLPPWGYLPARVDGEWRLVPDPVQRERILEVYHRVVVNHEPLRSVAHDLNRRGVLSPKDYFAQLRGREPQGRKWSATALKRSLISEAMLGYATLNGKTVRDDDGAPLVRAEPILTREQLEALRAELVKTSRAKPAVPTPSLLLRVLFCAVCGEPAYKFAGGGRKHPRYRCRSMGFPKHCGNGTVAMAQWDTFCEEQVLNLLGDAERLEKVWVAGSDSAVELAEVNAELVDLTSLVGSPAYRAGSPQREALDARIAALAARQEELEGLEARPSGWEWREAGQRFGDWWREQDTAAKNAWLRSMNVRLTFDVRGGLTRTIDFGDLHEYEQHLRLGSVVGRLHTGMS

SEQ ID NO: 12310 - protein, 500 aa, synthetic construct
MRALVVIRLSRVTDATTSPERQLESCQQLCAQRGWDVVGVAEDLDVSGAVDPFDRKRRPNLARWLAFEEQPFDVIVAYRVDRLTRSVRHLQQLVHWAEDHKKLVVSATEAHFDTTTPFAAVVIALMGTVAQMELEAIKERSRSAAHFNIRAGKYRGSLPPWGYLPARVDGEWRLVPDPVQRERILEVYHRVVDNHEPLHLVAHDLNRRGVLSPKDYFAQLRGREPQGRKWSATALKRSMISAAMLGYATLNGKTVRDGDGAPLVRAEPILTREQLEALRAELVKTSRAKPAVSTPSLLLRVLFCAVCGEPAYKFAGGGRKHPRYRCRSMGFPKHCGNGTVAMAEWDAFCEEQVLNLLGDAERLEKVWVAGSDSAVELAEVNAELVDLTSLIGSPAYRAGSPQREALDARIAALAARQEELEGLEARPSGWEWRETGQRFGDWWREQNTAAKNTWLRSMNVRLTFDVRGGLTRTIDFGDLQECEPHLRLGSVAERLHTGMS

SEQ ID NO: 12311 - protein, 500 aa, synthetic construct
MRALVVIRLSRVTDATTSPERQLESCQQLCAQRGWGVIGVAEDLDVSGAVDPFDRKRRPNLARWLAFEEQPFDAIVAYRVDRLTRSIRHLQQLVHWAEDHKKLVVSATEAHFDTTTPFAAVVIALMGTVAQMELEAIKERSRSAAHFNIRAGKYRGSLPPWGYLPTRVDGEWRLAPDPVQRERILEVYHRVVDNHEPLHLVAHDLNRRGVLSPKDYFAQLRGREPQGRKWSATALKRSMISEAMLGYATLNGKTVRDDDGAPLVRAEPILTREQLEALRAELVKTSRAKPAVPTPSLLLRVLFCAVCGEPAYKFAGGGRKHPRYRCRSMGFPKHCGNGTVAMAEWDAFCEEQVLDLLGDAGRLEKVWVAGSDSAVELAEVNAELVDLTSLIGSPAYRAGSPQREALDARIAALAARQEELEGLEARPSGWEWRETGQRFGDWWREQDTAAKNAWLRSMNVRLTFDVRGGLTRTIDFGDLQEYEQHLCLGSVVKRLHTGMS

SEQ ID NO: 12312 - protein, 500 aa, synthetic construct
MRALVVIRLSRVTDATTSPERQLESCQQLCAQRGWDVVGVAEDLDVSGAVDPFDRKRRPNLARWLAFEEQPFDVIVAYRVDRLTRSVRHLQQLVHWAEDHKKLVVSATEAHFDTTTPFAAVVIALMGTVAQMELEAIKERSRSAAHFNIRAGKYRGSLPPWGYLPTRVDGEWRLAPDPVQRERILEVYHRVVDNHEPLHLVAHDLNRRGVLSPKDYFAQLRGREPQGRKWSATALKRSMISVAMLGYATLNGKTVRDDDGAPLVRAEPILTREQLEALRAELVKTSRAKPAVSTPSLLLRVLFCAVCGEPAYKFAGGGRKHPRYRCRSMGFPKHCGNGTVAMAQWDAFCEEQVLNLLGDAERLEKVWVAGSDSAVELAEVNAELVDLTSLIGSPAYRAGSPQREALDARIAALAARQEELEGLEARPSGWEWRETGQRFGDWWREQDTAAKNTWLRSMNVRLTFDVRGGLARTIDFGDLQEYEQHLRLGSVVERLHTGMS

SEQ ID NO: 12313 - protein, 500 aa, synthetic construct
MRALVVIRLSRVTDATTSPERQLESCRQLCAQRGWDVVGVAEDLDVSGAVDPFDRKRRPNLARWLAFEEQPFDAIVAYRVDRLTRSIRHLQQLVHWAEDHKKLVVSATEAHFDTTTPFAAVVIALMGTVAQMELEAIKERNRSAAHFNIRAGKYRGSLPPWGYLPARVDGEWRLVPDPVQRERILEVYHRVVNNHEPLHLVAHDLNRRGILSPKDYFAQLRGREPQGRKWSATALKRSMISEAMLGYATLNGKTVRDDDGAPLVRAEPILTREQLEALRAELVKTSRAEPGVSTPSLLLRVLFCAVCGEPAYKFTGGGRKHPRYRCRSMGFPKHCGNGTVAMAEWDAFCEERVLDLLGDAERLEKVWVAGSGSAVELAEVNAELVDLTSLIGSPAYRAGSPQREALDARIAALAARQEELEGLGARPSGWEWRETGQRFGDWWREQDTAAKNTWLRSMNVRLTFDVRGGLTRTIDFGDLQEYEQHLRLGSVVERLHTGMS

SEQ ID NO: 12314 - protein, 500 aa, synthetic construct
MRALVVIRLSRVTDATTSPERQLESCQQLCAQRGWDVVGVAEDLDVSGAVDPFDHKRRPNLARWLAFEERPFDVIVAYRVDRLTRSTRHLQQLVHWAENHKKLVVSATEAHFDTTTPFAAVVIALMGTVAQMELEAIKERNRSAAHFNIRAGKYRGSLPPWGYLPARVDGVWRLVPDPVQRERILEVYHRVVDNHEPLHLVAHDLNRRGVLSPRDYFAQLQGREPQGRRWSATALKRSMISEAMLGYATLNGKTVRDDDGAPLVRAEPILTREQQEALRAELVKTSRAKPAVSTPSLLLRVLFCAVCGEPAYKFAGGGRKHPRYRCRSVGFPKHCGNGTVAMAEWDAFCEEQVLNLLGDAERLEKVWVAGSDSAVELAEVNAELVDLTSLIGSPAYRAGSPQREALDARIAALAARQEELKGLEARPSGWEWRETGQRFGDWWREQDTAAKNTWLRSMNVRLTFDVRGGLTRTIDFGDLQEYEQHLRLGGVVERLHTGMS

SEQ ID NO: 12315 - protein, 500 aa, synthetic construct
MRALVVIRLSRVTDATTSPERQLESCQQLCAQRGWGVVGVAEDLDVSGAVDPFDRKRRPNLARWLAFEEQPFDVIVAYRVDRLARSIRHLQQLVHWAEDHKKLVVSATEAHFDTTTPFAAVVIALMGTVAQMELEAIKERSRSAAHFNIRAGKYRGSLPPWGYLPTRVDGEWRLVPDPVQRERILEVYHRVVDNHEPLHLVAHDLNRRGVLSPKDYFAQLQGREPRGRKWSATALKRSMASEAMLGYATLNGKTVRDDDGAPLVRAEPILTREQLEALRAELVKTSRAKPAVSTPSLLLRVLFCAVCGEPAYKFAGGGRKHPRYRCRSMGFPKHCGNGTVAMAEWDAFCEERVLDLLGDAERLEKAWVAGSDSAVELAEVNAELVDLTSLIGSPAYRAGSPQREALDARIAALAARQEKLEGLEARPSGWEWRETGQRFGDWWREQNTAAKNTWLRLMNVRLTFDVRGGLTRTIDFGDLQEYEQHLRLGSVVERLHTGMP

SEQ ID NO: 12316 - protein, 500 aa, synthetic construct
MRALVVIRLSRVTDATTSPERQLESCQQLCAQRGWDVVGVAEDLDVSGAVDPFDRKRRPNLARWLAFEEQPFDVIVAYRVDRLTRSIRHLQQLVHWAEDHKKLVVSATEAHFDTTTPFAAVVIALMGTVAQMELEAIKERSRSAAHFNIRAGKYRGSLPPWGYLPARVDGEWRLVPDPVQRERILEVYHRVVDNHEPLHLVAHDLNRRGVLSPKDYFAQLRGREPQGRKWSATALKRSMISEAMLGYATLNGKTVRDDDGAPLVRAEPILTREQRGALRAVLVKTSRAKPAVSTPSLLLRVLFCAVCGEPAYKFAGGGRKHPRYRCRSMGFPKHCGNGTVAMAEWDAFCEEQVLNLLGDAERLEKVWVAGSDSAVELAEVNAELVDLTSLIGSPAYRAGTPQREALDARIAALAARQEELEGLEARPSGWEWRETGQRFGDWWLEQDTAAKNTWLRSMNVRLTFDVRGGLTRTIDFGGLQEYEQHLRLGSVVERLHTGMS

SEQ ID NO: 12317 - protein, 500 aa, synthetic construct
MRALVVVRLSRVTDATTSPERQLESCQQLCAQRGWDVVGVAEDLDVSGAVDPFDRKRRPNLARWLAFEEQPFDVIVAYRVDRLARSIRHLQQLVHWAEDHKKLVVSATEAHFDTTTPFAAVVIALMGTVAQMELEAIKERSRSAAHFNIRAGKYRGSLPPWGYLPTRVDGEWRLVPDPVQRERILEVYHRVVDNHEPLHLVAHDLNRRGVLSPRDYFAQLRGREPQGRKWSATALKRSMTSKAMLGYATLNGKTVRDDDGAPLVRAEPILTREQLEALRAELVKTSRAQPAVSTPSLLLRVLFCAVCGEPAYKFAGGGRKHPRYRCRSMGFPKHCGNGTVAMAEWDAFCEEQVLGLLGDAERLEKVWVAGSDSAVELAEVNAELVDLTSLIGSPAYRVGSPQREALDARIAALAARQEELEGLEARPSGWEWRGTGQRFGDWWREQDTAAKNTWLRSMNVRLTFDVRGGLTRTIDFGDLQEYEQHLRLGSVVERLHTGVT

SEQ ID NO: 12318 - protein, 500 aa, synthetic construct
MRALVVIRLSRVTDATTSPERQLESCQQLCAQRGWDVVGVAEDLDVSGAVDPFDRKRRPNLARWLAFEERPFDVIVAYRVDRLTRSIRHLQQLVHWAEDHKKLVVSVTEAHFDTTTPFAAVVIALMGTVAQMELEAIKERNRSAAHFNIRAGKYRGSLPPWGYLPTRVDGVWRLVPDPVQRERILEVYHRVVDDHEPLHLVAHDLNRRGVLSPKDYFAQLRGREPQGRKWSATALKRSMISVAMLGYATLNGKTVRDDDGAPLVRAEPILTREQQEALRAELVKTPRAKPAVSTPSLLLRVLFCAVCGEPAYKFAGGGRKHPRYRCRSMGFPKHCGNGTVAMAEWDAFCEEQVLDLLGDAERLEKVWVAGSDSAAELAEVNAELVDLTSLIGSPAYRAGSPQREALDARIAVLAARQEELEGLEARPSGWEWRETGQRFGDWWREQDTAAKNTWLRSMNVRLTFDVRGGLTRTIDFGDLQEYEQHLRIGSVVERLHTGMS

SEQ ID NO: 12319 - protein, 500 aa, synthetic construct
MRALVVIRLSRVTDATTSPERQLESCQQLCAQRGWDVVGVAEDLDVSGAVNPFDRKRRPNLARWLAFEEQPFDVIVAYRVDRLTRSTRHLQQLVHWAEDHKKLVVSATEAHFDTTTPFAAVVIALMGTVAQMELEAIKERSRSAAHFNIRAGKYRGSLPPWGYLPTRVDGEWRLVPDPVQRERILEVYHRVVDNHEPLHLVAHDLNRRGVLSPKDYFAQLRGREPQGRRWSATALKRSMISEAMLGYATLNGKTVRDDDGAPLVRAEPILTRKQLEALRAELVKTSRAKPAVSTPSLLLRVLFCAVCGEPAYKFAGGGRKHPRYRCRSMGFPKHCGNGTVAMAEWDAFCEEQVLGLLGDAERLEKVWVTGSDSAVELAEVNAELVDLTSLIGSPAYRAGSPQRVALDARIAALAARQEELEGLEARPSGWEWRGTGQRFGDWWREQDTATKNTWLRSMSVRLTFDVRGGLTRTIDFGDLQEYEQHLRLGSVAERLHTGMS

SEQ ID NO: 12320 - protein, 500 aa, synthetic construct
MRALVVIRLSRVTDATTSPERQLESCQQLCAQRGWDVVGVAEDLDVSGAVDPFDRKRRPNLARWLAFEEQPFDVIVAYRVDRLARSIRHLQQLVHWAEDHKKLVVSATEAHFDTTTPFAAVVIALMGTVAQMELEAIKERSRSAAHFNIRAGKYRGSLPPWGYLPSRVDGEWRLVPDPVQRERILEVYHRVVDNHEPLHLVAHDLNRRGVLSPKDYFAQLRGREPQGRKWSATALKRSMISVAMLGYATLNGKTVRDDDGAPLVRAEPILTREQLEALRAELAKTSRAKPAVSTPSLLLRVLFCAVCGEPAYKFAGGGRKHSRYRCRSMGFPKHCGNGTVAMAEWDAFCEEQVLGLLGDAERLEKVWVAGSDSAVELAEVNAELVDLTGLIGSPAYREGSPQREALDARIAALAARQEELEGLEARPSGWEWRETGQRFGDWWREQDTAAKNTWLRSMNVRLTFDVRGGLTRTVDFGDLQGYEQHLRLGSVVERIHTGMS

SEQ ID NO: 12321 - protein, 500 aa, synthetic construct
MRALVVIRLSRVTDTTTSPERQLESCQQLCAQRGWDVVGVAEDLDVSGAVDPFDRKRRPNLARWLAFEGQPFDVIVAYRVDRLTRSVRQLQQLVHWAEDHKKLVVSATEAHFDTTTPFAAVVIALMGTVAQMELEAIKERSRSAAHFNIRAGKYRGSLPPWGYLPTRVDGEWRLVPDPVQRERILEVYHRVVDNHEPLHLVAHDLNRRGVLSPKDYFAQLRGRKPQGRKWSATALKRSMISEAMLGYATLNGKTVRDDDGAPLVRAEPILTREQLEALRAELVKTSRAKPAVSTPSLLLRVLFCAVCGEPAYKFAGGGRKHSRYRCRSMGFPKHCGNGTVAMAEWDAFCEERVLDLLGDAERLEKVWVAGSDPAVELAEVNAELVDLTSLIGSPAYRAGSPQREALDARIAALAARQEELEGLEARPSGWEWRETGQRFGDWWREQDTAAKNTWLRSMNVRLTFDVRGGLTRTIDFGDLQEYEQHLRLGSVVERLHTGMS

SEQ ID NO: 12322 - protein, 500 aa, synthetic construct
MRALVVIRLSRVTDATTSPERQLESCQQLCAQRGWDVVGVAEDLDVSGAVDPFDRKRRPNLARWLAFEEQPFDAIVAYRVDRLTRSIRHLQQLVHWAEDHKKLVVSATEAHFDTTTPFAAVVIALMGTVAQMELEAIKERNRSAAHFNIRAGKYRGSLPPWGYLPTRVDGEWRLVPDPVQRERILEVYHRAVDNHEPLHLVAHDLNRRGVLSPKDYFAQLRGREPQGRKWSATALKRSMISGAMLGYATLNGKTVRDDDGAPLVRAEPILTREQQEALRAELVKTSRAKPAVSTPSLLLRVLFCAVCGEPAYKFAGGGRKHPRYRCRSMGFPKHCGNGTVAMAEWDAFCEEQVLDLLGDVERLEKVWVAGSDSTVELAEVNAELVDLTSLIGSLAYRAGSPQREALDARIAALAARQEELEGLEARPSGWEWRGTGQRFGDWWREQDTAAKNTWLRSMNVRLTFDVRGGLTRTIDFGDLQEYEQHLRLGSVVERLHTGMS

SEQ ID NO: 12323 - protein, 500 aa, synthetic construct
MRALVVTRLSRVTDATTSPERQLESCQQLCAQRGWDVVGVAEDLDVSGAVNPFDRKRRPNLARWLAFEEQPFDAIVAYRVDRLTRSIRHLQQLVHWAEDHKKLVVSATEAHFDTTTPFAAVVIALMGTVAQMELEAIKERNRSAAHFNIRAGKYRGSLPPWGYLPTRVDGEWRLVPDPVQRERILEVYRRVVDNHEPLHLVAHDLNRRGVLSPRDYFAQLRGREPQGRKWSATALKRSMISEAMLGYATLNGKTVRDDDGAPLVRAEPILTREQLEALRAELVKTSRAKPAVSTPSLLLRVLFCAVCGEPAYKFAGGGRKHPRYRCRSMGFPKHCGNGTVAMAEWDAFCEEQVLDLLGDAERLEKVWVAGSDSAVELAEVNAELVDLTSLIGSPAYRAGSPQREALDARIAALAACQEELEGLEARPSGWGWRETGQRFGDWWREQDTAAKNAWLRSMNVRLTFDVRGGLTRTIDFGDLQEHEQHLRLGNVVERSHTGMS

SEQ ID NO: 12324 - protein, 500 aa, synthetic construct
MRALVVIRLSRVTDATTSPERQLESCQQLCAQRGWDVVGVAEDLDVSGAVDPFDHKRRPNLARWLAFEEQPFDVIVAYRVDRLTRSTRHLQQLVRWAEDHKKLVVSATEAHFDTTTPFAAVVIALMGTVAQMELEAIKERNRSAAHFNIRAGKYRGSLPPWGYLPTRVDGEWRLVPDPVQRERILEVYHRVVDNHEPLRLVAHDLNRRGVLSPKDYFAQLQGREPQGRKWSATALKRSMISEAMLGYATLNGKTVRGDDGAPLVRAEPILTREQQEALRAELVKTSRAKPAVSTPSLLLRVLFCAVCGEPAYKFAGGGRKHPRYRCRSMGFPKHCGNGTVAMVEWDAFCEEQVLGLLGDAERLEKVWVAGSDSAVELAEVNAELVDLTSLIGSPAYRAGSPQREALDARIAALAARQEELEGLEARPSGWEWRETGQRFGDWWREQDTAARNTWLRSMNVRLTFDVRGGLTRTIDFGDLQEYEQHLRLGGVVERLHTGMS

SEQ ID NO: 12325 - protein, 500 aa, synthetic construct
MRALVVIRLSRVTDATTSPERQLESCQQLCAQRGWDVVGVAEDLDVSGAVDPFDRKRRPNLARWLAFEEQPFDVIVAYRVDRLTRSTRHLQQLVHWAEDHKKLVVSATEAHFDTTTPFAAVVIALMGTVAQMELEAIKERNRSAAHFNIRAGKYRGSLPPWGYLPTRVDGEWRLVPDPVQRERILEVYHRVVDNHEPLHLVAHDLNRRGVLSPKDYFAQLRGREPQGRKWSATALKRSMISEAMLGYATLNGKTVRGDDGAPLVRAEPILTRGQLEVLRTELVKTSRAKPAVSTPSLLLRVLFCAVCGEPAYKFSGGGRKHPRYRCRSMGFPKHCGNGTVAMAEWDAFCEEQVLDLLGDAERLEKVWVAGSDSAVELAEVNAELVDLTSLISSPAYRAGSPQREALDARIAALAARQEELESLEARPSGWEWRETGQRFGDWWREQDTAAKNTWLRSMNVRLTFDVRGRLTRTIDFGDLQEYEQHLRLGSVVGCLRTGMS

SEQ ID NO: 12326 - protein, 500 aa, synthetic construct
MRALVVIRLSRVTDATTSPERQLESCQQLCAQRGWDVVGVAEDLDVSGAVDPFDRKRRPNLARWLAFEEQPFDVIVAYRVDRLTRSARHLQQLVHWAEDHKKLIVSATEAHFDTTTPFAAVVIALMGTVAQMELEAIKERSRSAAHFNIRAGKYRGSLPPWGYLPARVDGVWRLVPDPVQRERILEVYHRVVNNHEPLHLVAHDLNRCGILSPKDYFAQLQGREPQGRKWSATALKRSMISEAMLGYATLNGKTVRDDDGAPLVRAEPILTREQQKALRAELVKTSRAKPAVSTPSLLLRVLFCAVCGEPAYKFAGGGRKHPRYRCRSMGFPKHCGNGTVAMAEWDAFCEKQVLDLLGDAERLEKVWVAGSDSAVELAEVNAELVDLTSLISSPAYRAGSPQREALDARIAALAARQEELEGLEARPSGWEWRETGQRFEDWWREQDTAAKNAWLRSMNVRLTFDVRGGLTRTIDFGDLQEYERHLRSGSVVERLHTGMS

SEQ ID NO: 12327 - protein, 500 aa, synthetic construct
MRALVVIRLSRVTDATTSPERQLESCQQLCAQRGWDVVGVAEDLDVSGAVDPFDRKRRPNLARWLAFEEQPFDAIVAYRVDRLARSIRHLQQLVHWAEDHKKLVVSATEAHFDTTTPFAAVVIALMGTVAQMELEAIKERNRSAAHFNIRAGKYRGSLPPWGYLPARVDGEWRLVPDPVQRERILEVYHRVVDNHEPLHLVAHDLNRRGVLSPKDYFAQLRGREPQGRKWSATALKRSMTSEAMLGCATLNGETVRVDDGAPLVRAEPILTREQLEALRAELVKTSRAKPAVSTPSLLLRVLFCAVCGEPAYKFSGGGRRHPRYRCRSMGFPKHCGNGTVAMAEWDAFCEEQVLDLLGDAERPEKVWVAGSDSAVELAEVSAELVDLTSLISSPAYRAGSPQREALDARIAALAARQEELEGLEARPSGWEWRRTGQRFGDWWREQDTAAKNTWLRSMNVRLTFDVRGGLTRTIDFGDLREYEQHLRLGSVVERLHTGMS

SEQ ID NO: 12328 - protein, 500 aa, synthetic construct
MRALVVIRLSRVTDATTSPERQLGSCQQLCAQRGWDVVGIAEDLDVSGAVSPFDRKRRPNLARWLAFEEQPFDVIVVYRVDRLTRSIRHLQQLVHWAEDHKKLVVSATEAHFDTTTPFAAVVIALMGTVAQMELEAIKERSRSAAHFNIRAGKYRGSLPPWGYLPARVDGEWRLVPDPVQRERILEVYHRVVDDHEPLHLVAHDLNRRGVLSPKDYFAQLRGREPQGRKWSATALKRSMISEAMLGYATLNGKTVRDDDGAPLVRAEPILTREQQEALRAELVKTSRAKPAVSTPSLLLRVLFCAVCGEPAYKFAGGGRKHPRYRCRSMGFPKHCGNGTVAMAEWDAFCEEQVLGLLGDAERLEKVWVAGSDSAVELAEVNAELVDLTSLIGSPDYRAGSPQREALDARIAALAARQGELEGLEVRPSGWEWRGTGQRFGDWWREQDTAAKNTWLRSMGVRLTFDVRGGLTRTIDFGDLQEYEQHLRLGSVVERLHTGMS

SEQ ID NO: 12329 - protein, 500 aa, synthetic construct
MRVLVVIRLSRVTDATTSPERQLESCQQLCAQRGWDVVGVAEDLDVSGAVDPFDRKRRPNLARWLAFEEQPFDVIVAYRVDRLTRSTRHLQQLVHWAEDHKKLVVSATEAHFDTTTPFAAVVIALMGTVAQMELEAIKERTRSAAHFNIRAGKYRGSLPPWGYLPTRVDGEWRLVPDPVQRERILEVYHRVVDNHEPLHLVAHDLNRRGVLSPKDYFAQLQGREPQGRKWSATALKRSMISEAMLGYATLNGKTVRDDDGAPLVRAEPILTREQQEALRAELVKTSRAKPAVSTPSLLLRVLFCAVCGEPAYKFAGGGRKHPRYRCRSMGFPKHCGNGTVAMAEWDAFCEEQVLDLLGDVERLEKVWVAGSDSAVELAEVSAELVDLTSLIGSPAYRAGSPQREALDARIAALVARQEELEGLEARPSGWEWRETGQRFGDWWREQDTAAKNTWLRSMNVRLTFDVRGGLTRTIDFGDLQEYEQHLRLGSVVERLHTGMP

SEQ ID NO: 12330 - protein, 500 aa, synthetic construct
MRALVVIRLSRVTDATTSPERQLGSCQQLCAQRGWDVVGVAEDLDVSGAVDPFDRKRRPNLARWLAFEEHPFDVIVAYRVDRLTRSTRHLQQLVHWAEDHKKLVVSATEAHFDTTTPFAAVVIALMGTVAQMELEAIKERSRSAAHFNIRAGKYRGSLPPWGYLPARVDGEWRLVPDPVQRERILEVYHRVVDNHEPLHLVALDLNRRGVLSPKDYFAQLRGREPQGRKWSATALKRSMTSEAMLGYATLNGKTVRDDDGAPLVRAEPILTREQLGALRAELVKTSRAKPAVSTPSLLLRVLFCAVCGEPAYKFAGGGRKHPRYRCRSMGFPKHCGNGTVAMTEWDAYCEEQVLNLLGDAERLEKVWVAGSDSAVELAEVNAELVDLTSLIGSPAYRVGSPQREALDARIAALAARQEELEGLEARPSGWEWRGTGQRFGDWWREQDAAAKNAWLRSMNVRLTFDVHGGLTRTIDFGDLQEYEQHLRLGSVVERLHTGMS

SEQ ID NO: 12331 - protein, 500 aa, synthetic construct
MRALVVIRLSRVTDATTSPERQLESCQQLCAQRGWDVVGVAEDLDVSGAVDPFDRKRRPNLARWLAFEEQPFDVIVAYRVDRLARSIRHLQQLVHWAEDHKKLVVSATEAHFDTTTPFAAVVIALMGTVAQMELEAIKERNRSAAHFNIRAGKYRGSLPPWGYLPTRVDGEWRLVPDPVQRERILEVYRRVVDNHEPLHLVAHDLNRRGVLSPRDYFAQLRGREPQGRKWSATALKRSMISEAMLGYATLNGKTVRDDDGAPLVRAEPILTREQLEALRAELVKTSRAKPAVSTPSLLLRVLFCAVCGEPAYKFAGGGRKHPRYRCRSMGFPKHCGNGTVAMAEWDAFCEEQVLDLLGDAERLEKVWVAGSDSAVELAEVNAELVDLTSLIGSPAYRAGSPQREALDARIAALAARQEELEGLEARPSGWELRETGQRFGDWWREQDTAAKNTWLRSMNVRLTFDVRGGLTRTIDFGDLQEYEQHLRLGSVVERLHTGMS

SEQ ID NO: 12332 - protein, 500 aa, synthetic construct
MRALIVIRLSRVTDATTSPERQLESCQQLCAQRGWDVVGVAEDLDVSGAVDPFDRQRRPNLARWLAFEEQPFDVIVAYRVDRLARSIRHLQQLVHWAEDHKKLVVSATEAHFDTTTPFAAVVIALMGTVAQMELEAIKERSRSAAHFNIRAGKYRGSLPPWGYLPTRVDGEWRLAPDPAQRKRILEVYHRVVDNHEPLHLVAHDLNRRGVLSPKDYFAQLQGREPQGRKWSATALKRSMISVAMLGYATLNGKTVRDDDGAPLVRAEPILTREQLEALRAELVKTSRAKPAVSTPSLLLRVLFCAVCGEPAYKFAGGGRKHPRYRCRSMGFPKHCGNGTVAMAEWDAFCEEQVLGLLGDMERLEKVWVAGSDSAIKLAEVNAELVDLTGLIGSPAYRAGSPQREALDARIAALAARQEELEGLEARPSGWEWRGTGQRFGDWWREQDTATKNTWLRSMNVRLTFDVRGGLTRTIDFGDLQEYEQHLRLGSVVERLHTGMS

SEQ ID NO: 12333 - protein, 500 aa, synthetic construct
MRALIVIRLSRVTDATTSPERQLESCQQLCAQRGWDVVGVAEDLDVSGAVDPFDRKRRPNLARWLAFEEQPFDVIVAYRVDRLARSIRHLQQLVHWAEDHKKLVVSATEAHFDTTTPFAAVVIALMGTVAQMELEAIKERSRSAAHFNIRAGKYRGSLPPWGYLPTRVDGEWRLAPDPAQRERILEVYHRVVDNHEPLHLVAHDLNRRGVLSPKDYFAQLQGREPQGRKWSATALKRSMISVAMLGYATLNGKTVRDDDGAPLVRAEPILTREQLEALRAELVKTSRAKPAVSTPSLLLRVLFCAVCGEPAYKFAGGGRKHPRYRCRSMGFPKHCGNGTVAMAEWDAFCEEQVLNLLGDAERLEKVWVAGSDSAIELAEVNAELVDLTSLIGSPAYRTGSPQREALDARIAALAARQEELEGLEARPSGWEWRETGQRFGDWWREQDTAAKNTWLRSMNVRLTFDVRGGLTRTIDFGDLQEYEQHLRSGSVVERLRTGMS

SEQ ID NO: 12334 - protein, 500 aa, synthetic construct
MRALVVIRLSRVTDATTSPERQLESCQQLCAQRGWDVVGVAEDLDVSGTVDPFDRKRRPNLARWLAFEELPFDVIVAYRVDRLTRSTRHLQQLVHWAEDHKKLVVSATEAHFDTTTPFAAVVIALMGTVAQMELEAIKERNRSAAHFNIRAGKYRGSLPPWGYLPTRVDGEWRLVPDPVQRERILEVYRRVVDNHEPLHLVAHDLNRRGVLSPKDYFAQLRGREPQGRKWSATALKRSMISEAMLGYATLNGKTVRDDGGAPLVRAEPILTREQLEALRAELAKTSRAKPAVSTPSLLLRVLFCAVCGEPAYKFAGGGRKHPRYRCRSMGFPKHCGNGTVAMAEWDAFCEEQVLDLLGGAERLEKVWVASSDSAVELAEVNAELVDLTSLIGSPAYRAGSPQREALDARIAALAARQGELEGLEARPSGWEWRETGQRFGDWWREQDTAAKNTWLRSMNVRLTFDVRGGLTRTIDLGDLQEYKQRLRLGSVVERLHTGMS

SEQ ID NO: 12335 - protein, 500 aa, synthetic construct
MRALVVIRLSRVTDATTSPERQLESCQQLCAQRGWDVVGVAEDLDVSGAVDPFDRKRRPNLARWLAFEEQPFDAIVAYRVDRLARSIRHLQQLVHWAEDHKKLVVSATEAHFDTTTPFAAVVIALMGTVAQMELEAIKERSRSAAHFNIRAGKYRGSLPPWGYLPTRVDGEWRLVPDPAQRERILEVYRRVVDNHEPLHLVAHDLNRRGVLSPKDYFAQLRGREPQGRKWSATALKRSMISEAMLGYATLNGKTVRDDDGAPLVRAEPILTREQLAALRAELVKTSRAKPAVSTPSLLLRVLFCAVCGEPAYKFAGGGRKHPRYRCRSMGFPRHCGNGTVAMAEWDAFCEEQVLNLLGDAERLEKVWVAGSDSAVELAEVNAELVDLTSLISSPAYRAGSPQREALDARIAALAARQEELEGLEARPSGWEWRGTGQRFEDWWREQDTAAKNTWLRSMNVRLTFDARGGLTRTIDFGDLQEYERHLRSGSVVERLHTGMS

SEQ ID NO: 12336 - protein, 500 aa, synthetic construct
MRALVVIRLSRVTDATTSPERQLESCQQLCAQRGWDVVGVAEDLDVSGAVDPFDRKRRPNLARWLAFEEHPFDAIVAYRVDRLTRSIRHLQQLVHWAEDHKKLVVSATEAHFDTTTPFAAVVIALMGTVAQMELEAIRERNRSAAHFNIRAGKYRGSLPPWGYLPTRVDGEWRLAPDPVQRERILEVYHRVVNNHEPLHLVAHDLNRRGVLSPKDHFAQLRGREPQGRKWSATALKRSMISEAMLGHATLNGKTVRDDDGAPLVRAEPILTREQLEALRAELVKTSRAKPAVSTPSLLLRVLFCAVCGEPAYKFAGGGRKHPRYRCRSMGFPKHCGNGTVAMAEWDAFCEEQVLGLLGDAERLEKVWVAGSDSAVELAEVNAELVDLTSLISSPAYRAGSPQREALDARIAALAARQEELEGLEARPSGWEWRETGQRFGDWWREQDTAAKNTWLRSMNVRLTFDVRGGLTRTIDFGDLQEYEQHLRLGSVVERLHTGMS

SEQ ID NO: 12337 - protein, 500 aa, synthetic construct
MRALVVIRLSRVTDATTSPERQLESCQQLCAQRGWDVVGVAEDLDVSGAVNPFDRKRRPNLARWLAFGEQPFDVIVAYRVDRLTRSIRHLQQLVHWAEDHKKLVVSATEAYFDTTTPFAAVVIALMGTVAQLELEAIKERSRSAAHFNIRAGKYRGSLPPWGYLPTRVDGEWRLVPDPVQRERILEVYHRVVDNHEPLHLVAHDLNRRGVLSPKDYFAQLQGREPQGRKWSATALKRSMISEVMLGYATLNGKTVRDDDGAPLVRAEPILTREQLEALRAELVKTSRAKPAVSTPSLLLRVLFCAVCGEPAYKFAGGGRKHPRYRCRSMGFPKHCGNGTVAMAEWDAFCEEQVLGLLGDVERLEKVWVAGSDSAVKLAEVNAELVDLTGLIGSPAYRAGSPQREALDARIAALAARQEELEGLEARPSGWEWRGTGQRFGDWWREQDTTAKNTWLRSMNVRLTFDVRGGLTRTIDFGDLQEYEQLLRLGSVVERLHTGMS

SEQ ID NO: 12338 - protein, 500 aa, synthetic construct
MRALVVIRLSRVTDATTSPERQLESCQQLCAQRGWDVVGVAEDLDVSGAVDPFDRKRRPNLARWLAFEEQPFDVIVAYRVDRLTRSIRHLQQLVHWAEDHKKLVVSATEAYFDTTTPFAAVVIALMGTVAQLELEAIKERSRSAAHFNIRAGKYRGSLPPWGYLPARVDGEWRLAPDPVQRERILEVYHRVVDNHEPLHLVAHDLNRRGVLSPKDYFAQLQGREPQGRKWSATALKRSMTSEAMLGYATLDGKTVRDDDGAPLVRAEPILTREQLEALRAELVKTSRAKPAVSTPSLLLRVLFCAVCGEPAYKFSGGGRKHPRYRCRSMGFPKHCGNGTVAMAEWDAFCEEQVLDLLGDEERLEKVWVAGSDSAVELAEVNAELVDLTSLIGSPAYRAGSPQREALDARIAALAARQAELEGLEARPSGWEWRETGQGFGDWWREQDTAAKNTWLRSMNVRLTFDVRGGLTRTIDFGDLQEYEQHLRLGSVVERLHTGMS

SEQ ID NO: 12339 - protein, 500 aa, synthetic construct
MRALVVIRLSRVTEATTSPERQLESCQQLCAQRGWDVVGVAEDLDVSGAVHPFDRKRRPNLARWLAFEEQPFDVIVAYRVDRLTRSIRHLQQLVHWAEDHKKLVVSATEAHFDTTTPFAAVVIALMGTVAQMELEAIRERNRSAAHFNIRAGKYRGSLPPWGYLPTRVDGEWRLVPDPVQRERILEVYHRVVDNHEPLHLVAHDLNRRGVLSPKDYFAQLRGREPQGRKWSATALKRSMTSVAMLGYATLSGKTVRDNDGVPLVRAEPILTREQLEALRAELVKTSRAKPAVSTPSLLLRVLFCAVCGEPAYKFAGGGRKHPRYRCRSMGFPKHCGNGTVAMAEWDAFCEEQVLDLLGDAERLEKVWVAGSDSAVELAEVNAELVDLTSLIGSPAYRAGSPQREALDARIAALAARQEELEGLEARPSGWEWRKTGQRFGDWWREQDTAAKNTWLRSMNVRLTFDVRGGLTRTIDFGDLQEYEQHLRLGSVVERLHTGMS

SEQ ID NO: 12340 - protein, 500 aa, synthetic construct
MRALVVIRLSRVTDATTSPERQLESCRQLCAQRGWDVVGVAEDLDVSGAVDPFDRKRRPNLARWLAFEEQPFDVIVAYRVDRLTRSTRHLQQLVHWAEDHKKLVVSATEAHFDTTTPFAAVVIALMGTVAQMELEAIKERSRSAAHFNIRAGKYRGSLPPWGYLPTRVDGEWRLVPDPVQRERILEVYHRVVDNHEPLHLVAHDLNRRGVLSPKDYFAQLQGREPQGRKWSATALKRSMISEAMLGYATLNGKIVRNDDGAPLARAEPILTRGQLEALRAELVKTSRAKPAVSTPSLLLRVLFCAACGEPAYKFAGGGRKHPRYRCRSMGFPKHCGNGTVAMAEWDAFCEEQVLDLLGDAERLEKVWVAGSGSAVKLAEVNAELVDLTSLIGSPAYRAGSPQREALDARIAALVARQEELEGLEARPSGWEWRETGQRFGDWWREQDTAAKNTWLRSMNVRLTFDVRGGLTRTIDFGDLQEYEQHLRLGSVVERLHTGMS

SEQ ID NO: 12341 - protein, 500 aa, synthetic construct
MRALVVIRLSRVTDATTSPERQLESCQQLCAQRGWDVVGVAEDLDVSGAVDPFDHKRRPNLARWLAFEEQPFDVIVAYRIDRLTRSTRHLQQLVHWAEDHKKLVVSATEAHFDTTTPFAAVVIALMGTVAQMELEAIKERSRSAAHFNIRAGKYRGSLPPWGYLPTRVDGEWRLAPDPVQRERILEVYHRVVDNHEPLHLVAHDLNRRGVLSPKDYFAQLQGREPQGRKWSATALKRSMTSEAMLGYATLNGKTVRDDDGAPLVRAEPILTRGQLEALRAELVKTSRAKPAVSTPSLLLRVLFCAVCGEPAYKFAGGGRKHPRYRCRSMGFPKHCGNGTVAMAEWDAFCEEQVLDLLGDAERLEKVWVAGSDSAVELAEVNAELVDLTSLIGSPAYRAGSPQREALDARIAALAARQGELEGLEARPSGWEWRETGQRFGDWWREQDTVAKNTWLRSMNVRLTFDVRGGLTRTIDFGDLQEYEQHLRLGSVVERLHTGMS

SEQ ID NO: 12342 - protein, 500 aa, synthetic construct
MRALVVIRLSRVTDATTSPERQLESCQQLCAQRGWVVVGVAEDLDVSGAVDPFDRKRRPNLARWLAFEEQPFDVIVAYRVDRLARSIRHLQQLVHWAEDHKKLVVSATEAHFDTTTPFAAVVIALMGTVAQMELEAIKERSRSAAHFNIRAGKYRGSLPPWGYLPARVDGEWRLVPDPVQRERILEVYHRVVDDHEPLHLVAHDLNRHGVLSPKDYFAQLRGREPQGRKWSATALKRSMISGAMLGYATLNGKTVRDGDGAPLVRAEPILTREQLEALRAELVKTSRAEPAVSTPSLLLRVLFCAVCGEPAYKFAGGGRKHPRYRCRSMGFPKHCGNGTVAMAEWDAFCEEQVLGLLGDAERLEKVWVAGSDSAVELAEVNAELVDLTSLIGSPAYRAGSPQREALDARIAALVARQEELEGLEARPSGWEWRETGQRFGDWWREQDTAAKNTWLRSMNVRLTFDVRGGLTRTIDFGDLQEYEQHLRLGSVVKRLHTGMS

SEQ ID NO: 12343 - protein, 500 aa, synthetic construct
MRALVVIRLSRVTDATTSPERQLESCQQLCVQRGWDVVGVAEDLDVSGAVDPFDRKRRPNLARWLAFEEQPFDVVVAYRVDRLARSIRHLQQLVHWAEDHKKLVVSATEAHFDTTTPFAAVVIALMGTVAQMELEAIKERNRSAAHFNIRAGKYRGSLPPWGYLPTRVNGEWRLVPDPVQRERILEVYRRVVDNHEPLHLVAHDLNRRGVLSPKDYFAQLQGREPQGRKWSVTALKRSMTSEAMLGYATLNGKTVRDDDGAPLVRAEPILTREQREALRAELAKTSRAKPAVSTPSLLLRVLFCAVCGEPAYKFAGGGRKHPRYRCRSTGFPKHCGNGTVAMAEWDAFCEEQVLGLLGDVERLEKVWVAGSDSAVKLAEVNAELVDLTGLIGSPAYRVGSPQREALDARIAALAARQEELEGLEARPSGWEWRGTGQRFGDWWREQDTAAKNTWLRSMNVRLTFDVRGGLTRTIDFGDLQEYEQHLRLGSVVERLHTGMS

SEQ ID NO: 12344 - protein, 500 aa, synthetic construct
MRALVVIRLSRVTDATTSPERQLESCQQLCAQRGWDVVGVAQDLDVSGAVDPFDRKRRPNLARWLAFEEQPFDVIVAYRVDRLARSIRHLQQLVHWAEDHKKLVVSATEAHFDTTTPFAAVVIALMGTVAQMELEAIKERSRSAAHFNIRAGKYRGSLPPWGYLPARVDGEWRLVPDPVQRERILEVYHRVVNNHEPLHLVAHDLNQRGVLSPKDYFAQLQGREPQGRKWSATALKRSMISEAMLGYATLSGKAVRDDDGAPLVRAEPILTREQQEALRAELVKTSRAKPAVSTPSLLLRVLFCAVCGEPAYKFAGGGRKHPRYRCRSMGFPKHCGNGTVAMAEWNAFCEEQVLGLLGDAERLEKVWVAGSDSAVELAEVNAELVDLTSLIGSPAYRAGSPQREALDTRIATLAARQEELEGLEARPSGWEWRETGQRFGDWWREQDTAAKNTWLRSMNVRLTFDVRGGLTRTIDFGDLQEYEQHLRLGSVVERLHTGMS

SEQ ID NO: 12345 - protein, 500 aa, synthetic construct
MRALVVIRLSRVTDATTSPERQLESCQQLCAQRGWDVVGVAEDLDVSGAVDPFDRKRRPNLARWLAFGEQPFDVIVAYRVDRLARSIRHLQQLVRWAEDHKKLVVSATEAHFDTTTPFAAVVIALMGTVAQMELEANKERSRSAAHFNIRAGKYRGSLPPWGYLPARVDGEWRLVPDPVQHERILEVYHRVVDNHEPLHLVAHDLNRRGVLSPKDYFAQLQGREPQGRKWSATALKRSMISEAMLGYATLNGKIVRDDDGAPLVRAEPILTREQLEALRAEFVKTSRAKPAVSTPSLLLRVLFCAVCGEPAYKFAGGGRKHPRYRCRSMGFPKHCGNGTVAMAEWDAFCEEQVLDLLGDAERLEKVWVVGSDSAVELAEVNAELVDLSSLVGSPAYRTGSPQREALDARIAALAARQEELEGLEARPSGWEWRGTGQRLGDWWREQDTAAKNTWLRSMNVRLTFDVRGGLTRTIDFGDLQEYEQHLRLGSVVERLHTGMS

SEQ ID NO: 12346 - protein, 500 aa, synthetic construct
MRALVVIRLSRATDATTSPERQLESCQQLCAQRGWVVVGVAEDLDVSGAVNPFDRKRRPNLARWLAFEEQPFDVIVAYRVDRLTRSTRHLQQLVHWAEDHEKLVVSATEAHFDTTTPFAAVVIALMGTVAQMELEAIKERTRSAAHFNIRAGKYRGSLPPWGYLPTRVDGEWRLVPDPVQRERILEVYHRVVDNHEPLHLVAHDLNRRGVLSPRDYFAQLRGREPQGRKWSATALKRSMISEAMLGYATLNGRTVRDDDGAPLVRAEPILTREQLEALRAELVKTSRAKPAVSTPSLLLRVLFCAVCGEPAYKFAGGGRKHPRYRCRSMGFPKHCGNGTVATAEWDAFCEEQVLDLLGDTERLEKVWVAGSDSAIELAEVNAELVDLTSLIGSPAYRAGSPQREALDARIAALAARREELEGLEARPSGWEWRETGQRFGDWWREQDTAAKNTWLRSMNVRLTFDVRGGLTRTIDFGDLQEYEQHLRLGNAVGRLHTGMS

SEQ ID NO: 12347 - protein, 500 aa, synthetic construct
MRALVVIRLSRVTDATTSPERQLESCRQLCAQRGWDVVGVAEDLDVSGAVDPFDRKRRPNLARWLAFEEHPFDVIVAYRVDRLTRSTRHLQQLVHWAEDHKKLVVSATEAHFDTTTPFAAVVIALMGTVAQMELEAIKERNRSAAHFNIRAGKYRGSLPPWGYLPTRVDGEWRLAPDPVQRERILEVYHRVVDNHEPLHLVAHDLNRRGVLSPKDYFAQLRGREPQGRKWSATALKRSMISEAMLGYATLNGKTVRDDDGAPLVRAEPILTREQLEALRAELVKTSRVKPAMSTPSLLLRVLFCAVCGEPAYKFAGGGRKHPRYRCRSMGFPKHCGNGTVAMAEWDAFCEEQVLNLLGDAERLEKVWVAGSDSAVELAEVNAELMDLTSLIGSPAYRAGSPQREALDARIAALAARQEELEGLEARPSGWEWRETGQRFRDWWREQDTAAKNTWLRSMNVRLTFDVRGGLTRTIDFGDLQEYEQHVRLGSVVERSHTGMS

SEQ ID NO: 12348 - protein, 500 aa, synthetic construct
MRALVVVRLSRVTDATTSPERQLESCQQLCAQRGWDVVGVAEDLDVSGAVDPFDRKRRPNLARWLAFEEQPFDAIVAYRVDRLTRSTRHLQRLVHWAEDHKKLVVSATEAHFDTTTPFAAVVIALMGTVAQMELEAIKERSRSAAHFNIRAGKYRGSLPPWGYLPTRVDGEWRLAPDPVQRERILEVYHRVVDNHEPLHLVAHDLNRRGVLSPRDYFAQLQGREPQGRKWSATALKRSMVSEAMLGYATLNGKTVRDDDGAPLVRAEPILTREQLEALRAELVKTSRAKPAVSTPSLLLRVLFCAVCGEPAYKFAGGGRKHPRYRCRSMGFPKHCGNGTVATAGWDAFCEEQVLDLLGDAERLEKVWVAGSGSAVELAEVNAELVDLASLIGSPAYRAGSPQREALDARIAALAARQEELEGLEARPSGWEWRGTGQRFGDWWREQDTAAKNTWLRSMNVRLTFDVRGRLTRTIDFGDLQEYEQHLRLGGVVERLHTGMS

SEQ ID NO: 12349 - protein, 500 aa, synthetic construct
MRALVVIRLSRVTDATTSPERQLESCQQLCAQRGWDVVGVAEDLDVSGAVDPFDRKRRPNLARWLAFEEQPFDVIVAYRVDRLTRSSRHLQQLVHWAEDHKKLVVSATEAHFDTTTPFAAVVIALMGTVAQMELEAIKERSRSAAHFNIRAGKYRGSLPPWGYLPTRVDGEWRLVPDPVQRERILEVYHRVVVNHEPLHLVAHDLNRRGVLSPKDYFAQLQGREPQGRKWSATALKRSMISEAMLGYATLNGKTVRDDDGAPLVRAEPILTREQLEALRAELVKTSRAKPAVSAPSLLLRVLFCAVCGEPAYKFAGGGRKHPRYRCRSMGFPKHCGNGTVAMAEWDAFCEEQVLVLLGDAERLEKVWVAGSDSAVELAEVSAELVDLTSLIGSPAYRAGSPQREALDARIAALAARQEELEGLETRPSGWEWRETGQRFGDWWREQDTAAKNTWLRSMNVRLTFDVRGGLTRTIDFGDLQEYEQHLRLGSVVERLHTGTS

SEQ ID NO: 12350 - protein, 500 aa, synthetic construct
MRALVVIRLSRVTDATTSPERQLESCQQLCAQRGWDVVGVAEDLDVSGAVDPFDRKRRPNLARWLAFEEQPFDVIVAYRVDRLTRSTRHLQQLVHWAEDHKKLVVSATEAHFDTTTPFAAVVIALMGTVAQMELEAIKERNRSAAHFNIRAGKYRGSLPPWGYLPARVDGEWRLVPDPVQRERILEVYRRVVDNHEPLHLVAHDLNRRGVLSPRDYFAQLRGREPQGRKWSATALKRSMISEAMLGCATLNGKTVRDDDGAPLVRAEPILTREQLEALRAELVKTSRAKPAVSTPSLLLRVLFCAVCGEPAYKFAGGGRKHPRYRCRSMGFPKHCGNGTVAMAEWDAFCEEQVLDLLGDAERLEKVWVAGSDSAVELAEVSAELVDLTSLIGSPAYRAGSPQREALDARIAALAARQEELEGLEARPSGWEWRETGQRFGDWWREQDTAAKNSWLRSMNVRLTFDVRGGLTRTIDFGDLQEYEQRLRLGSAVERLHTGMS

SEQ ID NO: 12351 - protein, 500 aa, synthetic construct
MRALVVIRLSRVTDATTSPERQLESCQQLCAQRGWDVVGVAEDLDVSGAVDPFDRKRRPNLARWLAFEEQPFDVVVAYRVDRLARSIRHLQQLVHWAEDHKKLVVSATEAHFDTTTPFAAVVIALMGTVAQMELEAIKERCRSAAHFNIRAGKYRGSLPPWGYLPTRVDGEWRLVPDPVQRERILEVYHRVVDNHEPLHLVAHDLNRRGVLSPRDYFAQLQGREPRGRKWSATALKRSMISEAMLGYVTLNGKTVRDDDGAPLVRAEPILTREQLEALRAELVKTSRAKPAVSTPSLLLRVLFCAVCGEPAYKFAGGGRKHPRYRCRSMGFPKHCGNGTVAMAEWDAFCEKQVLDLLGDAERLEKVWVAGSDSAVELAEVNAELMDLTSLIGSPAYRVGSPQREALDARIAALAARQEELEGLEARPSGWEWRETGQRFGDWWREQDTAAKNTWLRSMNVRLTFDVRDGLTRTIDFGDLQEYEQHLHLGSVVERLHTGMS

SEQ ID NO: 12352 - protein, 500 aa, synthetic construct
MRALVVIRLSRVTDATTSPERQLESCQQLCAQRGWDVVGVAEDLDVSGAVDPFDRKRRPNLARWLAYEEQPFDVIVAYRVDRLTRSVRHLQQLVHWAEDHEKLVVSATEAHFDTTTPFAAVVIALMGTVAQMELEAIKERSRSAAHFNIRAGKYRGSLPPWGYLPARVDGEWRLVPDPVQRERILEVYHRVVDNHEPLHLVAHDLNRRGVLSPKDYFAQLRGREPQGRKWSATALKRSMISEAMLGYATLNGKTVRDDDGAPLVRAEPILTREQQEALRAELVKTSRAKPAVSTPSLLLRVLFCAVCGEPAYKFAGGGRKHPRYRCRSMGFLKHCGNGTVAMAEWDAFCEEQVLDLLGDAERLEKVWVAGSDSAVELAEVNAELVDLTSLIGSPAYRAGSPQREALDARIAALAARQEELVSLEARPSGWEWREAGQRFGDWWREQDTAAKNTWLRSMNVRLTFDVRGGLTRTIDFGDLREYEQHLRLGSVVERLHTGMS

SEQ ID NO: 12353 - protein, 500 aa, synthetic construct
MRALVVIRLSRVTDATTSPERQLESCQQLCAQRGWDVVGVAEDLDVSGAVDPFDRKRRPNLARWLAFEEQPFDVIVAYRVDRLTRSIRHLQQLVHWAEDHKKLVVSATEAHFDMTTPFAAVVIALMGTVAQMELEAIKERSRSAAHFNIRAGKYRGSLPPWGYLPTRVDGEWRLAPDPVQRERILEVYHRVVDNHEPLHLVAHDLNRRGVLSPKDYFAQLQGREPQGRKWSATALKRSMISVAMLGYATLNGKTVRDDDGAPLVRAEPILTREQLEALRAELVKTSRAKPAVSTPSLLLRVLFCAVCGEPAYKFAGGGRKHPRYRCRSMGFPKHCGNGTVAMAEWDAFCEEQVLDLLGDAERLEKVWVAGSDSAVELAEVNAELVNLTSLIGSPAYRAGSPQREALDARIAALAARQEELEGLEARPSGWEWRGTGQRFRDWWRGQDTAAKNTWLRSMNVRLTFDVRGGLTRTIDFGDLQGYEQHLRLGSVVERLHTRMS

SEQ ID NO: 12354 - protein, 500 aa, synthetic construct
MRALVVIRLSRVTDATTSPERQLESCQQLCAQRGWDVVGVAEDLDVSGAVDPFDRKRRPNLARWLAFEEQPFDVIVAYRVDRLTRSTRHLQQLVHWAEDHKKLVVSATEAHFDTTTPFAAVVIALMGTVAQMELEAIKERNRSAAHFNIRAGKYRGSLPPWGYLPTRVDGEWRLVPDPVQRERILEVYHRVVDNHEPLHLVAHDLNRRGVLSPRDYFAQLQGREPQGRKWSATALKRSMISGAMLGYATLNGKTVRDDDGAPLVRAEPILTREQLEALRAELVKTSPAKPAVSTPSLLLRVLFCAVCGEPAYKFAGGGRKHPRYRCRSMGFPKHCGNGTVAMAEWDAFCEEQVLNLLGDAERLEKVWVAGSDSAVELAEVNAELVDLTRLIGSPAYRAGSPQREALGARIAALAARQEELEGLEARPSGWEWRETGQRFGDWWREQDTAAKNTWLRSMNVRLTYDVRGGLARTIDFGDLQEYERHLRLGSVVKRLHTGMS

SEQ ID NO: 12355 - protein, 500 aa, synthetic construct
MRALVVIRLSRVTDATTSPERQLESCQQLCAQRGWDVVGVAEDLDVSGAVDPFDRKRRPNLARWLAFEEQPFDVIVAYRVDRLTRSTRHLQRLVHWAEDHKKLVVSATEAHFDTTTPFAAVVIALMGTVAQMELEAIKERSRSAAHFNIRAGKYRGSLPPWGYLPTRVDGEWRLVPDPVQRERILEVYHRVVDDHEPLHSVAHDLNRRGVLSPRDYFAQLQGREPRGRKWSATALKRSMISEAMLGYVTLNGKTARDDDGAPLVRAEPILTREQLEALRAELVKTSRAKPAVSTPSLLLRVLFCAVCGEPAYKFAGGGRKHPRYRCRSMGFPEHCGNGTVAMAEWDAFCEEQVLGLLGDAERLEKVWVAGSDSAVELAEVNAELVDLTSLIGSPAYRAGSPQREALDARIAALAARQEELEGLAARPSGWEWRETGQRFGDWWREQDTEAKNTWLRSMNVRLTFDVRGGLTRTIDFGDLQEYEQHLRSGSVVERLHTGMS

SEQ ID NO: 12356 - protein, 500 aa, synthetic construct
MRALIVIRLSRVTDATTSPERQLESCQQLCAQRGWDVVGVAEDLDVSGAVDPFDRKRRPNLARWLAFEEQPFDVIVAYRVDRLTRSTRHLQQLVHWAEDHKKLVVSATEAHFDTTTPFAAVVIALMGTVAQMELEAIKERNRSAAHFNIRAGKYRGSLPPWGYQPTRVDGEWRLVPDPVQRERILEVYHRVVDNHEPLHLVAHDLNRRGVLSPKDYFAQLQGREPQGRKWSATALKRSMTSEAMLGYATLNGKTVRDDSGAPLVRAEPILTREQLEALRAELAKTSRAKPAVSTPSLLLRVLFCAVCGEPAYKFAGGGRKHPRYRCRSMGFPKHCGNGTVAMAEWDAFCEEQVLNLLGDAERLEKVWVAGSDSAVELAEVNTELVDLTSLIGSPAYRAGSPQREALDARIAALTERQEELEGLEARPSGWEWRETGQRFGDWWREQDTAAKNTWLRSMNVRLTFDVRGGLTRTIDFGDLQEYEQHLRLGSVAERLHTGTS

SEQ ID NO: 12357 - protein, 500 aa, synthetic construct
MRALVVIRLSRVTDATTSPERQLESCQQLCAQRGWDVAGVAEDLDVSGAVDPFDRKRRPNLARWLAFEEQPFDVIVAYRVDRLTRSTRHLQQLVHWAEDHKKLVVSATEAHFDTTTPFAAVVIALMGTVAQMELEAIKERSRSAAHFNIRAGKYRGSLPPWGYLPTRVDGEWRLVPDPVQRERILEVYHRVVDNHEPLHLVAHDLNRRGVLSPKDYFAQLRGREPRGRKWSATALKRSMTSEAMLGYATLNGKTVRNDDGAPLVRAEPILTREQLEALRAELAKTSRAKPAVSTPSLLLRVLFCAVCGEPAYKFAGGGRKHPRYRCRSMGFPKHCGNGTVAMAEWDAFCEEQVLDLLGDAERLEKVWVAGSDSAVELAEVNAELVDLTSLICSPAYRAGSPQREALDARIAALAARQEELEGLEARPSGWKWRETGQRFGDWWCEQDTAAKNTWLRSMNVRLTFDVRGGLTRTIDFGDLQEYEQHLRLGSVVKRLHTGMS

SEQ ID NO: 12358 - protein, 500 aa, synthetic construct
MRALVVIRLSRVTDATTSPERQLESCQQLCAQRGWDVVGVAEDLDVSGAIDPFDRKRRPNLARWLAFEERPFDVIVAYRVDRLTRSTRHLQQLVHWAEDHKKLVVSATEAHFDTTTPFAAVVIALMGTVAQMELEAIKERSRSAAHFNIRAGKYRGSLPPWGYLPARVDGEWRLVPDPVQRERILEVYRRVVDNHEPLHLVAHDLNRRGVLSPKDYFAQLRGREPQGRKWSATALKRSMISEAMLGYATLNGKTVRDEDGAPLVRAEPILTREQLEALRAELVKTSRAKPAASTPSLLLRVLFCAVCGEPAYKFAGGGRKHPRYRCRSMGFPKHCGNGTVAMAEWDAFCEEQVLDLLGDAERLEKVWVAGSDSAVELAEVNAELVDLTSLIGSPAHRAGSPQREALDARIAALVARQEELEGLEARPSGWEWRGTGQRFGDWWREQDTAAKNTWLRSMNVRLTFDVRGGLTRTIDFGDLQEYEQHLRLGSVVERLHTGRS

SEQ ID NO: 12359 - protein, 500 aa, synthetic construct
MRALVVIRLSRVTDTTTSPERQLESCQQLCAQRGWDVVGVAEDLDVSGAVDPFDRKRRPNLARWLAFEEQPFDVIVAYRVDRLARSIRHIQQLVHWAEDHKKLVVSATEAHFDTTTPFAAVVIALMGTVAQMELEAIKERNRSAAHYNIRAGKYRGSLPPWGYLPTRVDGEWRLVPDPVQRERILEVYHRVVDNHEPLHLVAHDLNRRGVLSPKDYFAQLRGREPQGRKWSATALKRSMISVAMLGYASLCGKTVRDDDGAPLVRAEPILTREQLEALRAELVKTSRAKPAVSTPSLLLRVLFCAVCGEPAYKFAGGGRKHPRYRCRSMGFPKHCGNGTVAMAEWDAFCEEQVLNLLGGAERLEKVWVAGSDSAVELAEVNKELVDLTSLIGSPAYRAGSPQREALDARIAALAARQEELEGLEARPSGWEWRGTGQRFGDWWRELDTAAKNTWLRSMNVRLTFDVRDELTRTIDFGDLQEYEQHLRLGSVVERSHTGMS

SEQ ID NO: 12360 - protein, 500 aa, synthetic construct
MRALVVIRLSRVTDATTSPERQLESCQQLCAQRGWDVVGVAEDLDVSGAVDPFDRKRRPNLARWLAFGEQPFDVIVAYRVDRLARSIRHLQQLVHWAEDHKKLVVSATEAHFDTTTPFAAVVIALMGTVAQMELEAIKERNRSAAHFNIRAGKYRGSLPPWGYLPARVDGEWRLVPDPVQRERILEVYHRVVDNHEPLHLVAHDLNRRGVLSPKDHFAQLRGREPQGRKWSATALKRSMTSEAMLGYATLNGKTVRDDDGAPLVRAEPILTREQLEALRAELVKTSRAKPAVSAPSLLLRVLFCAVCGEPAYKFAGGGRKHPRYRCRSMGFPKHCGNGTVAMAEWDAFCEEQVLDLLGDAERLEKVWVAGSDSAVELAEVNAELADLTSLIGSPAYRAGSPQREALDARIAALAARQEELEGLEARPSGWEWRETGQRFGDWWREQDTAAKNTWLRSMNVRLTFDVRGGLTRTIDFGDLQEYEQHSRLGSVVERLHTGMS

SEQ ID NO: 12361 - protein, 500 aa, synthetic construct
MRALVVIRLSRVTDTTTSPERQLESCQQLCAQRGWDVVGVAEDLDVSGAVDPFDRKRRPNLARWLAFEEQPFDVIVAYRVDRLARSIRHLQQLVHWAEDHKKLVVSATEAHFDTTTPFAAVVIALMGTVAQMELEAIKERSRSAAHFNIRAGKYRGSLPPWGYLPTRVDGEWRLAPDPVQRERILEVYHRVVDNHEPLHLVAHDLNRRGVLSPKDYFAQLQGREPQGRKWSATALKRSMTSEAMLGYATLNGKIVRDDDGAPLVRAEPILTREQLEALRAELVKTSRAKPAVSTPSLLLRVLFCAVCGEPAYKFAGGERKHPRYRCRSMGFPKHCGNGTVAMTEWDAFCEEQVLNLLGDAERLEKVWVAGSDAAVELAEVNAELVDLTSLVGSPAYRAGSPQREALDARIAALAARQEELEGLEARPSGWEWRETGQRFGDWWREQDTAAKNTWLRSMNVRLTFDVRGGLTRTIDFGDLQEYEQHLRLGSVVERLHTGTP

SEQ ID NO: 12362 - protein, 500 aa, synthetic construct
MRALVVIRLSRVTDATTSPERQLESCRQLCAQRGWDVVGVAEDLDVSGAVDPFDRKRRPNLARWLAFEEQPFDVIVAYRVDRLTRSTRHLQQLVHWADDHKKLVVSATEAHFDTTTPFAAVVIALMGTVAQMELEAIKERSRSAAHFNIRAGKYRGSLPPWGYLPARVDGVWRLVPDPVQRERILEVYHRVVDNHEPLHLVAHDLNRRGVLSPKDYFAQLQGREPQGRKWSATALKRSMISVAMLGYATLNGKTVRDDDGAPLVRAEPILTHEQLEALRAELVKTSRAKPAVSTPSLLLRVLFCAVCGEPAYKFAGGGRKHPRYRCRSMGFPKHCGNGTVAMAEWDAFCEEQVLDLLGDAERLEKVWVAGSDSAVELAEVNAELVDLTSLIGSPAYRAGSPQRDALDARIAALAARQEELEGLEARPSGWEWRETGQRFGDWWREQDTAAKNTWLRSMNVRLTFDVRGGLTRTIDFGDLQEYEQRLRLGSVVERLHTGMS

SEQ ID NO: 12363 - protein, 500 aa, synthetic construct
MRALVVIRLSRVTDATTSPERQLESCQQLCAQRGWDVVGVAEDLDVSGAVDPFDRKRRPNLARWLAFEERPFDVIVAYRVDRLTRSIRHLQQLVHWAEDHKKLVVSATEAHFDMTTPFAAVVIALMGTVAQMELEAIKERSRSAAHFNIRAGKYRGSLPPWGYLPTRVDGEWRLAPDPVQRERILEVYHRVVDNHEPLHLVAHDLNRRGVLSPRDYFAQLQGREPQGRKWSATALKRSMISEAMLGYATLNGKIVRDDDGAPLVRAEPILTREQLEALRAELVKTSRAKPAVSTPSLLLRVLFCAVCGEPAYKFTGGGRKHPRYRCRSMGFPKHCGNGTVAMAEWDAFCEEQVLNLLGDAERLEKVWVAGSDFAVELAEVNAELVDLTSLIGSPAYRAGSPQREALDARIAALAARQGELEGLEARPPGWEWRETGQRFGDWWREQNTAAKNTWLRSMNVRLTFDVRGGLTRTIDFGDLQEYEQHSRLGSVVERLHTGMS

SEQ ID NO: 12364 - protein, 500 aa, synthetic construct
MRALVVIRLSRVTDATTSPERQLESCRQLCAQRGWDIAGVAEDLDVSGAVDPFDRERRPNLARWLAFEEQPFDVIVAYRVDRLTRSTRHLQQLVHWAEDHKKLVVSATEAHFDTTTPFAAVVIALMGTVAQMELEAIKERNRSAAHFNIRAGKYRGSLPPWGYLPTRVDGEWRLVPDPVQRERILEVYHRVVDNHEPLHLVAHDLNRRGVLSPKDYFAQLQGREPQGRKWSATALKRSMISGAMLGYATLSGETVRDDDGAPLVRAEPILTREQQEALRAELVKTSRAKPAVSTPSLLLRVLFCAVCGEPAYKFTGGGRKHSRYRCRSMGFPKHCGNGTVAMAEWDAFCEEQVLDLLGDAERLEKVWVAGSDSAVELAEVNAELVDLTSLIGSPAYRAGSPQREALDARIAALAARQEELEGLEARPSGWEWRGTGQRFGDWWREQDTAAKNTWLRSMNVRLTFDVRGGLTRTIDFGDLQEYEQHLRLGSVVERLHTGMS

SEQ ID NO: 12365 - protein, 500 aa, synthetic construct
MRALVVIRLSRVTDATTSPERQLESCQQLCAQRGWDVVGVAEDLDVSGAVDPFDRKRRPNLARWLAFEEQPFDVIVAYRVDRLTRSTRHLQQLVHWADDHKKLVVSATEAHFDTTTPFAAVVIALMGTVAQMELEAIKERSRSAAHFNIRAGKYRGSLPPWGYLPARVDGVWRLVPDPVQRERILEVYHRVVNNHEPLHLVAHDLNRRGVLSPKDYFAQLQGREPQGRKWSATALKRSMISEAMLGYATLNGKTVRDDDGAPLVRAEPILTREQQEALRAELVKTSRAKPAVSTPSLLLRVLFCAVCGEPAYKFAGGGRKHPRYRCRSMGFPKHCGNGTVAMAEWDSFCEEQVLGLLGDAERLEKVWVAGSDSAVELAEVNAELVDLTSLIGSPAYRAGSTQREALDARIAALAARQEELEGLEARPSGWEWRETGQRFGDWWREQDTAAKNTWLRSMNVRLTFDVRGGLTRTIDFGDLQVYEQHLRIGSVVERLHSGMS

SEQ ID NO: 12366 - protein, 500 aa, synthetic construct
MRALVVIRLSRVTDATTSPERQLESCQQLCAQRGWDVVGVAEDLDVSGAVDPFDRKRRPSLARWLAFEEQPFDAIVAYRVDRLTRSIRHLQQLVHWAEDHKKLVVSATEAHFDTTTPFAAVVIALMGTVAQMELEAIKERNRSAAHFNIRAGKYRGSLPPWGYLPTRVDGEWRLVPDPVQRERILEVYHRVVDNHEPLHLVAHDLNRRGVLSPKDYFAQLRGREPQGRKWSATALKRSMISEAMLGHATLNGKTVRDDDGAPLVRAEPILTREQQEALRAELVRTSRAKPAVSTPSLLLRVLFCAVCGEPAYKFSGGGRKHPRYRCRSMGFPKHCGNGTVATAEWDAFCEEQVLDLLGDAERLEKVWVAGSDSAVEFAEVNAELVDLTSLIGSPAYRAGSPQREALDARIAALAARQEELEGLEARPSGWEWRETGQRFGDWWREQDIAAKNTWLRSMNVRLTFDVRSGLTRTIDFGDLQEYEQHLRLGSVVERLHTGMS

SEQ ID NO: 12367 - protein, 500 aa, synthetic construct
MRALVVIRLSRVTDATTSPERQLESCQQLCAQRGWDVVGVAEDLDVSGAVDPFDRKRRPNLARWLAFEEHPFDVIVAYRVDRLTRSTRHLQQLVHWAEDHKKLVVSATEAHFDTTTPFAAVVIALMGTVAQMELEAIKERSRSAAHFNIRAGKYRGSLPPWGYLPTRVDGEWRLVPDPVQRERILEVYHRVVDNHEPLHLVARDLNRRGVLSPKDYFAQLRGREPQGRKWSATALKRSMTSEAMLGYATLNGRTVRNDDGAPLVRAEPILTREQLEALRAELVKTSRAKPAVSTPSLLLRVLFCAVCGEPAYKFAGGGRKHPRYRCRSMGFPKHCGNGTVAMAEWDAFCEEQVLDLLGDAERLEKVWVAGSDSAVELAEVNAELVDLTSLIGSPAYRAGSPQREALDARIAALAARQEELEGLEARPSGWELRETGQRFGDWWREQDTAAKNTWLRSMNVRLTFDVRGGLTRTIDFGDLREYEQHLRLGSVVERLHTEMP

SEQ ID NO: 12368 - protein, 500 aa, synthetic construct
MRALVVIRLSRVTDATTSPERQLASCQQLCAQRGWDVVGVAEDLDVSGAVDPFDSKRRPNLARWLAFEEQPFDVIVAHRIDRLTRSIRHLQQLVHWAEDHKKLVVSATEAHFDTTTPFAAVVIALMGTVAQMELEAIKERNRSAAYFNIRAGKYRGSLPPWGYLPARVDGEWRLVPDPVQRERILEVYHRVVGNHEPLHLVAHDLNRRGVLSPKDYFAQLRGREPQGRKWSATALKRSMTSEAMLGYATLNGKTVRDDDGAPLVRAEPILTREQLEALRAELVKTSRAKPAVSTPSLLLRVLFCAVCGEPAYKFAGGGRKHPRYRCRSMGFPRHCGNGTVAMAEWDAFCEEQVLNLLGDAERLEKVWVAGSDSAVELAEVNAELVDLTSLIGSPAYRAGSPQREALGARIAALAARQEELEGLEARPSGWEWRETGQRFGDWWREQDTAAKNTWLRSMNVRLTFDVRGGLTRTIDFGDLQEYEQHLRLGSVVERLHTGMS

SEQ ID NO: 12369 - protein, 500 aa, synthetic construct
MRALVVIRLSRVTDATTSPERQLESCQQLCAQRGWDVVGVAEDLDISGAVDPFDRKRRPNLARWLAFEEQPFDVIVAYRVDRLTRSTRHLQQLVHWAEDHKKLVVSATEAHFDTTTPFAAVVIALMGTVAQMELEAIKERNRSAAHFNIRAGKYRGSLPPWGYLPTRVDGEWRLAPDPVQRERILEVYHRVVDNHEPLHLVAHDLNRRGVLSPKDYFAQLRGREPQGRKWSATALKRSMTSEAMLGYATLNGKTVRDDDGAPLVRAEPILTREQLEALRAELVKTSRAEPAVSTPSLLLRVLFCAVCGEPAYKFAGGGRKHPRYRCRSMGFPKHCGNGTVAMAEWDAFCEEQVLDLLGDAERLEKVWVAGSDSAVELAEVNAELVDLTSLIGSPAYRAGSPQREALDARIAALAARQEELEGLEARPSGWGWRETGQRFGDWWHEQDTAAKNTWLRSMNVRLTFDVRGGLTRTIDFGDLQEYEQHLRSGSVVERLHTGMS

SEQ ID NO: 12370 - protein, 500 aa, synthetic construct
MRALVVIRLSRVTDATTSPKRQLESCQQLCAQRGWDVVGVAEDLDVSGAVDPFDRKRRPNLARWLAFEEQPFDVIVAYRVDRLTRSIRHLQQLVHWAEDHKKLVVSTTEAHFDTTTPFAAVVIALMGTVAQMELEAIKERSRSAAHFNIRAGKYRGSLPPWGYLPTRVDGEWRLVPDPVQRERILEVYHRVVDNHEPLHLVAHDLNRRGVLSPKDYFAQLQGREPQGRKWSATALKRSMTSVTMLGYATLNGKTVRDDNGAPLVRAEPILTREQLEALRAELVKTSRAKPAVSTPSLLLRVLFCAVCGEPAYKFAGGGRKHPRYRCRSMGFPKHCGNGTVAMAEWDTFCEEQVLDLLGDAERLEKVWVAGSDSAVELAEVNAELVDLTSLIGSPAYRAGSPQREALDARIAALAARQEELEGLEARPSGWEWRETGQRFGDWWREQDTAAKNTWLRSMNVRLTFDVRGGLTRTIDFGDLQEYEQHLRLGSVVERLHTGMS

SEQ ID NO: 12371 - protein, 500 aa, synthetic construct
MRALVVIRLSRVTDATTSPERQLESCQQLCAQRGWDVVGVAEDLDVSGAVDPFDRKRRPNLARWLAFEEQPFDVIVAYRVDRLTRSTRHLQQLVHWAEDHKKLVVSATEAHFDTTTPFAAVVIALMGTVAQMELEAIKERNRSAAHFNIRAGKYRGSLPPWGYLPTRVDGEWRLVPDPVQRERILEVYHRVVDNHEPLHLVAHDLNRRGVLSPKDYFAQLRGREPQGRKWSATALKRSMISEAMLGHATLNGKIVRDDDGAPLVRAEPILTREQLEALRAELVKTSRAKPAVSTPSLLLRVLFCAVCGEPAYKFAGGGRKHPRYRCRSMGFPKHCGNGTVAMAEWDAFCEEQVLNLLGDAERLEKVWVAGSDSAVELAEVNKELVDLTSLIGSPAYRAGSLQREALDARIAALAARQEELEGLEARPSGWEWRETGQRFGDWWREQDTAAKNTWLRSMNVRLTFDVRGGLTRAIDFGDLQEYEQHLRLGSVVERLHTGRS

SEQ ID NO: 12372 - protein, 500 aa, synthetic construct
MRALVVIRLSRVTDATTSPERQLESCQQLCAQRGWDVVGVAEDLDVSGAVDPFDRKRRPNLARWLAFEEQPFDVIVAYRVDRLTRSTRHLQQLVHWAEDHRKLVVSATEAHFDTTTPFAAVVIALMGTVAQMELEAIKERSRSAAHFNIRAGKYRGSLPPWGYLPTRVDGEWRLVPDPVQHERILEVYHRVVDNHEPLHLVAHDLNRRGVLSPKDYFAQLQGREPQGRKWSATALKRSMISAAMLGYATLNGKTVRDDDGAPLVRAEPILTREQQEALRAELVKTSRAKPAVSTPSLLLRVLFCAVCGEPAYKFAGGGRKHPRYRCRSMGFPKHCGNGTVAMAEWDAFCEGQVLNLLGDAERLEKVWVAGADSAVELAEVNAELVDLTSLIGSPAYRAGSTQREALDARIAALAARQEELEGLEARPSGWEWRGTGQRFGDWWREQDTAAKNTWLRTMNVRLTYDVRGGLTRTIDFGDLQEYEQHLRSGSVVERLHTGMS

SEQ ID NO: 12373 - protein, 500 aa, synthetic construct
MRALVVVRLSRVTDATTSPERQLESCQQLCAQRGWDVVGVAEDLDVSGAVDPFDRKRRPNLARWLAFEEQPFDVIVAYRVDRLARSIRHLQQLVHWAEDHKKLVVSATEAHFDTTTPFAAVVIALMGTVAQMELEAIKERSRSAAHFNIRAGKYRGSLPPWGYLPARVDGEWRLVPDPVQRERILEVYHRVVNNHEPLHLVAHDLNRRGVLSPKDYFAQLQGREPQGRKWSATALKRSMISVAMLGYATLNGKTVRDDDGAPLVRAEPILTREQLEALRTELVKTPRAKPAVSTPSLLLRVLFCAVCGEPAYKFAGGGRKHPRYRCRSMGFPKHCGNGTVAMAEWDAFCEEQVLNLLGGTERLEKVWVAGSDSAVELAELNAELVDLTSLIGSPAYRAGSPQREALDARIAALAARQGELEGLEARPSGWEWRGTGQRFGDWWREQGTAAKNTWLRSMNVRLTFDVRGGQTRMIDFGDLQEYEQHLRSGSVVERLHTRMS

SEQ ID NO: 12374 - protein, 500 aa, synthetic construct
MRALVVIRLSRVTDATTSPERQLESCQQLCAQRGWDVVGVAEDLDVSGAVDPFDRKRRPNLARWLAFEEQPFDVVVAYRVDRLARSIRHLQQLVHWAEDHKKLVVSATEAHFDTTTPFAAVVIALMGTVAQMELEAIKERNRSAAHFNIRAGKYRGSLPPWGYLPTRVDGEWRLAPDPVQRERILEVYHRVVDNHEPLHSVAHDLNRRGVLSPKDYFAQLQGREPQDRKWSATALKRSMISEAMLGYTTLNGKIVRDDNGAPLVRAEPILTREQLEALRAELVKTSRAEPAVSTPSLLLRVLFCAVCGEPAYKFAGGGRKHSRYRCRSMGFPKHCGNGTVAMAEWDAFCEEQVLGLLGDVERLEKVWVAGSDSAVELAEVNAELVDLTSLIGSPAYRADSPQREALDARIAALAARQEELEGLEARPSGWAWRETGQRFGDWWREQDTAAKNTWLRSMNVRLTFDVRGGLTRTIDFGDLQEYEQHLRLGSVVGRLHTGMS

SEQ ID NO: 12375 - protein, 500 aa, synthetic construct
MRALVVTRLSRVTDATTSPERQLESCQQLCAQRGWDVVGVAEDLDVSGAVDPFDRKRRPNLARWLAFEEQPFDVIVAYRVDRLTRSVRHLQQLVHWAEDHKKLVVSATEAHFDTTTPFAAVVIALMGMVAQMELEAIKERSRSAAHFNIRAGKYRGSLPPWGYLPTRVDGEWRLAPDPVQRERILEVYHRVVDNHEPLHLVAHDLNRRGVLSPRDYFAQLQGREPQGRKWSATALKRSMISEAMLGYATLNGKIVRDDDGAPLVRAEPILTREQLEALRAELVKTSRAKPAVSTPSLLLRVLFCAVCGEPAYKFAGGGRKHSRYRCRSMGFPKHCGNGTVAMAEWDAFCEEQVLNLLGDTERLEKVWVAGSDSAVELAEVNAELVDLTSLIGSPAYRARSPQREALDARIAALAARQEELEGLEARPSGWEWRETGQRFGDWWREQDTAAKNTWLRSMNVRLTFDVRGGLTRTIDLGDLQEYEQHLRLGSVAERLRTGMS

SEQ ID NO: 12376 - protein, 500 aa, synthetic construct
MRALVVIRLSRVTDATTSPERQLESCQQLCAQRGWDVVGVAEDLDVSGAVDPFDRKRRPNLARWLAFEEQPFDVIVAYRVDRLTRSTRHLQQLVHWAEDHKKLVVSATEAHFDTTTPFAAVVIALMGTVAQMELEAIKGRSRSAAHFNIRAGKYRGSLPPWGYLPTRVDGEWRLVPDPVQRERILEVYHRVVDNHEPLHLVAHDLNRRGVLSPKDYFAQLRGREPQGRKWSATALKRSMISEAMLGYATLNGKTVRGDDGAPLVRAEPILTREQLEALRAELVKTSRAKPAVSTPSLLLRVLFCAVCGEPAYKFAGGGRKHPRYRCRSMGFPKHCGNGTVAMAEWDAFCEEQVLDLLGDAERLEKVWVAGSDSAVELAEVNAELVDLTSLIGSPAYRAGSPQREALDARIAALAARQEELEGLEARPSGWEWRGTGQRFGDWWREQDTAAKNTWLRSMNVRLTFDVRGGLTRTIDFGDLQEYVQHLRLGSVVERLHTGMS

SEQ ID NO: 12377 - protein, 500 aa, synthetic construct
MRALVVIRLSRVTDATTSPERQLESCQQLCAQRGWDVVGVAEDLDVSGAVDPFDRKRRPNLARWLAFEGQPFDVIVAYRVDRLARSIRHLQQLVHWAEDHKKLVVSATEAHFDTTTPFAAVVIALMGTVAQMELEAIKERIRSAAHFNIRAGKYRGSLPPWGYLPTRVNGEWRLAPDPMQRERILEVYHRVVDNHEPLHLVAHDLNRRGVLSPKDYFAQLRGRKPQGRKWSATALKRSMISEAMLGYATLNGKTVRNDDGAPLVRAEPILTREQLEALRAVLVKTSRAKPAVSTPSLLLRVLFCAVCGEPAYKFAGGGRKHSRYRCRSMGFPKHCGNGTVAMAEWDAFCEEQVLGLLGDAERLEKVWVAGSDSAVELAEVNAELVDLTSLIGSPAYRAGSPQREALDARVAALAARQEELEGLEARPSGWEWRETGQRFGDWWREQDTAAKNTWLRSMNVRLTFDVRGELTRTIDFGDLQEYEQHLRSGGVVERLHTGMS

SEQ ID NO: 12378 - protein, 500 aa, synthetic construct
MRALVVIRLSRVTDATTSPERQLESCQQLCAQRGWDVVGVAEDLDVSGAVNPFDRKRRPNLARWLAFEEQPFDAVVAYRVDRLTRSIRHLQQLVHWAEDHKKLVVSATEAHFDTTTPFAAVVIALMGTVAQMELEAIKERSRSAAHFNIRAGKYRGSLPPWGYLPTRVDGVWRLAPDPVQRERILEVYHRVVDNHEPLHLVAHDLNRRGILSPKDYFAQLRGREPQGRRWSATALKRSMISEAMLGYATLNGKTVRDDDGAPLVRAEPILTREQLEALHAELVKTSRAKPAVSTPSLLLRVLFCAVCGEPAYKFAGGGRRHPRYRCRSMGFPKHCGNGTVAMAEWDAFCEEQVLDLLGDAERLEKVWVAGSDSAVELAEVNAELVDLTSLIGSPAYRAGSPQREALDARIAALAARQEELEGLEACPSGWEWRGTGQRFGDWWREQDTVAKNTWLRSMNVRLTFDVRGGLTRTIDFGDLRGYEQHLRLGSVVERSHTGMS

SEQ ID NO: 12379 - protein, 500 aa, synthetic construct
MRALVVIRLSRVTDATTSPERQLESCQQLCAQRGWVVVGVAEDLDVSGAVDPFDRKRRPNLARWLAFEEQPFDVIVAYRVDRLTRSTRHLQQLVHWAEDHKKLVVSATEAHFDTTTPFAAVVIALMGTVAQMELEAIKERNRSAAHFNIRAGKYRGSLPPWGYLPTRVDGEWRLVPDPVQRERILEVYHRVVDNHEPLHLVAHDLNRRGVLSPKDYFAQLQGREPQGRKWSATALKRSMTSVTMLGYATLNGKTVRDDNGAPLVRAEPILTRGQLEALRAELVKTSRAKPAVSTPSLLLRVLFCAVCGEPAYKFSGGGRKHPRYRCRSMDFPKHCGNGTVAMAEWDAFCGEQVLDLLGDAERLEKVWVAGSDSAVELAEVSAELVDLTSLIGSPAYRAGSPQREALDARIAALAARQEELEGLEARPSGWEWRETGQRFGDWWREQDTAAKNTWLRSMNVRLTFDVRGGLTRTIDFGDLQEYEQHLRLGSVAERLHTGMS

SEQ ID NO: 12380 - protein, 500 aa, synthetic construct
MRALVVIRLSRVTDATTSPERQLESCQQLCAQRGWDVVGVAEDLDVSGAVDPFDRKRRPNLARWLAFEERPFDVIVAYRVDRLTRSIRHLQQLVHWAEDHKKLVVSATEAHFDTTTPFAAVVIALMGTVAQMELEAIKERSRSAAHFNIRAGKYRGSLPPWGYLPTRVDGEWRLVPDPVQRERILEVYHRVVDNHEPLHLVAHDLNRGGVLSPKDYFAQLRGREPQGRKWSATALKRSMISEAMLGYATLNGKTVRDDDGAPLVRAEPILTREQQEALRAELVKTSRAKPAVSTPSLLLRVLFCAVCGEPAYKFAGGGRKHPRYRCRSMGFLKHCGNGTVAMAEWDAFCEEQVLDLLGDAERLEKVWVAGSDSAVELAEVNAELVDLTSLIGSPAYRAGSPQREALDARIAALAARQEELESLEARPSGWEWRGTGQRFGDWWREQDTAAKNTWLRSMNVRLTFDVRGGLTRTIDFGDLQEYEQHLRLGSVVERLHTGMS

SEQ ID NO: 12381 - protein, 500 aa, synthetic construct
MRALVVIRLSRVTDTTTSPERQLESCQQLCAQRGWDVVGVARDLDVSGAVDPFDRKRRPNLARWLAFEEQPFDVIVAYRVDRLTRSIRHLQQLVHWAEDHKKLVVSATEAHFDMTTPFAAVVIALMGTVAQMELEAIKERNRSAAHFNIRAGKYRGSLPPWGYLPARVDGEWRLAPDPVQRERILEVYHRVVDNHEPLHLVAHDLNRRGVLSPKDYFAQLQGREPQGRKWSATALKRSMISEAMLGYATLNGKIVRDDDGAPLVRAEPILTRGQLEALRAELVKTSRAKPAVSTPSLLLRVLFCAVCGEPAYKFAGGGRKHSRYRCRSMGFPKHCGNGTVAMAEWDAFCEEQVLDLLGDVVRLEKVWVAGSDSAVELAEVSAELVDLTSLIGSPAYRAGSPQREALDARIAALAARQEGLEGLEARPSGWEWRETGQRFGDWWREQDTAAKNTWLRSMNVRLTFDVRGGLTRTADFGDLQEYEQHLRLGSVVERLHTGMS

SEQ ID NO: 12382 - protein, 500 aa, synthetic construct
MRALVVIRLSRVTDATTSPERQLESCQQLCAQRGWDVVGVAEDLDVSGAVDPFDRKRRPDLARWLAFEEQPFDVIVAYRVDRLTRSTRHLQQLVHWAEDHKKLVVSATEAHFDTTTPFAAVVIALMGTVAQMELEAIKERSRSAAHFNIRAGKYRGSLPPWGYLPTRVDGEWRLAPDPVQRERILEVYHRVVDNHEPLHLVAHDLNRRGVLSPKDYFAQLQGREPRGRKWSATALKRSMISEAMLGYATLNGKTVRDDDGAPLVRAEPILTREQLEAIRAELVKTSRAKPAVSTPSLLLRVLFCAVCGEPAYKFTGGGRKHPRYRCRSMGFPKHCGNGTVAMAEWDAFCEEQVLDLLGDAERLEKVWVAGSDSAVELAEVNAELVDLTSLIGSPAYRAGSPQRQALDARIAALAARQEELEGLEARPSGWEWRGTRQRFGDWWREQDTAAKNTWLRSMNVRLTFDVRGGLTRTIDFGDLQEYEQHLRLGSVVERSHTGMS

SEQ ID NO: 12383 - protein, 500 aa, synthetic construct
MRALVVIRLSRVTDATTSPERQLESCQQLCAQRGWDVVGVAEDLDVSGAVDPFDRKRRPNLARWLAFEEQPFDVIVAYRVDRLARSIRHLQQLVHWAEDHKKLVVSATEAHFDTTTPFAAVVIALMGTVAQMELEAIKERSRSAAHFNIRAGKYRGSLPPWGYLPTRVDGEWRLAPDPVQRERILEVYHRVVDNHEPLHLVAHDLNRRGVLSPKDYFAQLQGREPQGRKWSATALKRSMTSEAMLGYATLNGKTVRDDGGAPLVRAEPILTREQLEALRAVLVKTSRAKPAVSTPSLLLRVLFCAVCGEPAYKFAGGGRKHPRYRCRSMGFPKHCGNGTVAMAEWDAFCEEQVLDLLGDAERLEKVWVAGSDSAVELAEVNAELVDLTSLIGSPAYRAGSPQREALDARIAALAARQEELEGLEARPSGWEWRETGQRFGDWWREQDTAAKNTWLRSMNVRLTFDVRGGLTRTIDFGDLQEYEQHLRLGSVVERLHTGMS

SEQ ID NO: 12384 - protein, 500 aa, synthetic construct
MRALVVIRLSRVTDVTTSPERQLESCQQLCAQRGWDVVGVAEDLDVSGAVDPFDRKRRPNLARWLTFEEQPFDVIVAYRIDRLTRSIRHLQQLVHWAEDHKKLVVSATEAHFDTTTPFAAVVIALMGTVAQMELEAIKERNRSAAHFNIRAGKYRGSLPPWGYLPTRLDGEWRLVPDPVQRERILEVYHRVVNNHEPLHLVAHDLNRRGVLSPKDYFAQLQGREPQGRKWSATALKRSMTSEAMLGYATLNGKTVRDDDGAPLVRAEPILTREQQEALRAELVKTSRAKPTVSTPSLLLRVLFCAVCGEPAYKFAGGGRKHPRYRCRSMGFPKHCGNGTVAMAEWDAFCEEQVLGLLGDAERLEKVWVAGSDSAVELAEVNAELVDLTSLIGSPAYRAGSPQREALDARIAALAARQEELEGLEARPSGWEWRETGQRFGDWWREQDTAAKNTWLRSMNVRLTFDVRGGLTRTIDFGGLQGYEQHLRLGSVVERLHTGMS

SEQ ID NO: 12385 - protein, 500 aa, synthetic construct
MRALVVIRLSRVTDATTSPERQLESCQQLCAQRGWDVVGVAEDLDVSGAVDPFDRKRRPNLARWLAFEEQPFDAIVAYRVDRLARSIRHLQQLVRWAEDHKKLVVSATEAHFDTTTPFAAVVIALMGTVAQMELEAIKERNRSAAHFNIRAGKYRGSLPPWGYLPTRVDGEWRLVPDPVQRERILEVYHRVVDNHEPLHLVAHDLNRRGILSPKDYFAQLRGREPQGRKWSATALKRSMISEAMLGYATLNGKTVRDDDGAPLVRAEPILTREQQEALRAELVKTSRAKPAVSTPSLLLRVLFCAVCGEPAYKFAGGGRKHPRYRCRSMGLPKHCGNGTVAMAEWDAFCEEQVLDLLGDAERLEKVWVAGSDSAVELAEVNAELVDLTSLIGSPAYRAGSPQREALDARIAALAARQEELEGLEARPSGWEWRETGQRFGDWWREQDTATKNTWLRSMNVRLTFDVRGGLTRTIDFGDLREYEQHLRLGSVVERLHTGMS

SEQ ID NO: 12386 - protein, 500 aa, synthetic construct
MRALVVIRLSRVTDATTSPERQLKSCQQLCAQRSWDVVGVAEDLDVSGAVDPFDRKRRPNLARWLAFEEQPFDVIVAYRVDRLTRSTRHLQQLVHWAEDHKKLVVSATEAHFDTTTPFAAVVIALMGTVAQMELEAIKERNRSAAHFNIRAGKYRGSLPPWGYLPTRVDGEWRLAPDPVQRERILEVYHRVVDNHEPLHLVAHDLNRRGVLSPKDYFAQLRGREPQGRKWSATALKRSMTSEAMLGYATLNGKTVRDVDGAPLVRAEPILTREQLEALRAELVKTSRAKPAVSTPSLLLRVLFCAVCGEPAYKFAGGGRKHPRYRCRSMGFPKHCGNGTVAMAEWDAFCEEQVLNLLGDAERLEKVWVAGSDSAVELAEVNAELVNLTSLIGSPAYRAGSPQREALDARIAALAARQEELEGLEARPSGWEWRETGQRFGDWWREQDTAAKNTWLRSMNVRLTFDVRGGLTRTIDFGDLQEYEQHLRLGSVVERLHTGMS

SEQ ID NO: 12387 - protein, 500 aa, synthetic construct
MRALVVIRLSRVTDATTSPERQLESCQQLCAQRGWDVVGVAEDLDVSGAVDPFDRKRRPNLARWLAFEEQPFDAIVAYRVDRLTRSIRHLQQLVHWAEDHKKLVVSATEAHFDTTTPFAAVVVALMGTVAQMELEAIKERNRSAAHYNIRAGKYRGSLPPWGYLPTRVDGEWRLVPDPVQRERILEVYHRVVDDHEPLHLVARDLNRRGVLSPKDYFAQLRGREPQGRKWSATALKRSMISEAMLGYATLNGKTVRDDDGAPLVRAEPILTREQLEALRAELVKTSRAKPAVSTPSLLLRVLFCAVCGEPAYKFAGGGRRHPRYRCRSMGFPKHCGNGTVAMAEWDAFCEEQVLNLLGDAERLERVWVAGSDSAVELAEVSAELVDLTSLIGSPAYRAGSPQREALDARIAALAARQEELEGLEARPSGWVWRETGQRFGDWWREQDTAAKNTWLRSMNVRLTFDVRGGLTRTIDFGDLQEYEQHLRLGSVVECLHTGMS

SEQ ID NO: 12388 - protein, 500 aa, synthetic construct
MRALVVIRLSRVTDATTSPERQLESCQQLCAQRGWDVVGVAEDLDVSGAVDPFDRKRRPNLARWLAFEGQPFDVIVAYRVDRLARSIRHLQQLVHWAEDHKKLVVSATEAHFDTTTPFAAVVIALMGTVAQMELEAIKERNRSAAHFNIRAGKYRGSLPPWGYLPARVDGEWRLVPDPVQRERILEVYHRVVDNHEPLHLVAHDLNRRGVLSPKDYFAQLRGREPQGRKWSATALKRSMISEAMLGYATLNGKTVRDDDGAPLVRAEPILTREQLEALRAELVKTSRAKPAVSTPSLLLRVLFCAVCGEPAYKFAGGGRKHSRYRCRSMGFPKHCGNGTVAMAEWDAFCEEQVLDLLGDVERLEKVWVAGSDSAVELAEVNAELADLTSLIGSPAYRAGSPQREALDARIAALAARQEELEGLEARPSGWEWRETGQRFGDWWREQDTAAKNTWLRSMNVRLTFDVRGGLTRTIDFGDLQEYEQHLRLGSVVERLHTGMS

SEQ ID NO: 12389 - protein, 500 aa, synthetic construct
MRALVVIRLSRVTDATTSPERQLESCQQLCAQRGWDVVGVAEDLDVSGAVDPFDRKRRPNLARWLAFEERPFDVIVAYRVDRLARSIRHLQQLVHWAEDHKKSVVSATEAHFDTTTPFAAVVIALMGTVAQMELEAIKERNRSAAHFNIRAGKYRGSLPPWGYLPARVDGVWRLVPDPVQRERILEVYHRVVDNHEPLHLVAHDLNRRGVLSPRDYFAQLRGREPQGRKWSATALKRSMVSEAMLGYATLNGKTVRGDDGAPLVRAEPILTREQLEALRAELVKTSRAKPAVSTPSLLLRVLFCAVCGEPAYKFAGGGRKHPRYRCRSMGFPKHCGNGTVAMAEWDAFCEEQVLDLLGDAERLEKVWVAGSDSAVELAEVNAELVDLTSLIGSPAYRAGSPQREALDARIAALAARQEELEGLEARPSGWEWRETGQRFGDWWREQDTAAKNAWLRSMNVRLTFDVRGGLTRTIDFGDLQEYEQHLRLGSVAERLHTGMS

SEQ ID NO: 12390 - protein, 500 aa, synthetic construct
MRALVVIRLSRVTDATTSPERQLESCLQLCARRGWDVVGVAEDLDVSGAVDPFDRKRRPNLASWLAFEEQPFDAIVAYRVDRLTRSIRHLQQLVHWADDHKKLVVSATEAHFDTTTPFAAVVIALMGTVAQMELEAIKERSRSAAHFNIRAGKYRGSLPPWGYLPARVDGVWRLVPDPVQRERILEVYHRVVNDHEPLHLVAHDLNRRGVLSPKDYFAQLQGREPQGRKWSATALKRSMISEAMLGYATLNGKTVRDDDGAPLVRAEPILTREQQEALRAELVKTSRAEPAVSAPSLLLRVLFCAVCGEPAYKFAGGGRKHPRYRCRSMGFPKHCGNGTVAMAEWDAFCEEQVLGLLGDAERLEKVWVAGSDSAVELAEVNAELVDLTSLIGSPAYRAGSPQREALDARIAALAARQEELEGLEARPSGWEWRGTGQCFGDWWREQDTAAKNTWLRSMNVRLTFDVRGGLTRTIDFGDLQEYEQHSRLGSVVERLHSGMS

SEQ ID NO: 12391 - protein, 500 aa, synthetic construct
MRALVVIRLSRVTDATTSPERQLESCQQLCAQRGWDVVGVAEDLDVSGAVDPFDRKRRPNLARWLAFEEQPFDAIVAYRVDRLTRSIRHLQQLVHWAEDHKKLVVSATEAHFDTTTPFAAVVIALMGTVAQMELEAIKERSRSAAHFNIRAGKYRGSLPPWGYLPARVDGEWRLVPDPVQRERILEVYHRVVDNHEPLHLVAHDLNRRGVLSPKDYFAQLQGREPQGRKWSATALKRSMISGAMLGYATLSGKIVRDDDGAPLVRAEPILTREQQEALRAELVKTSRAKPAVSTPSLLLRVLFCAVCGEPAYKFAGGGRKHPRYRCRSMGFPKHCGNGTVAMAEWDAFCEEQVLNLLGDAERLERVWVAGSDSAAELAEVNAELVDLTSLIGSPAYRAGSPQREALDARIAALAARQEELEGLEARPSGWEWRGTGQRFGDWWREQDTAAKNAWLRSMNVRLTFDVRGGLTRTIDFGDLQECEQRLRLGSAVERLHTGMP

SEQ ID NO: 12392 - protein, 500 aa, synthetic construct
MRALVVVRLSRVTDATTSPERQLESCQQLCAQRGWDVVGVAEDLDVSGAVDPFDRKRRPNLARWLAFEEQPFDVIVAYRVDRLARSIRHLQQLVHWAEDHKKLVVSATEAHFDTTTPFAAVVIALMGTVAQMELEAIKERSRSAAHFNIRAGKYRGSLPPWGYLPTRVDGEWRLAPDPVQRERILEVYHRVVDNHEPLHLVAHDLNRRGVLSPKDYFAQLRGREPQGRKWSATALKRSMISVAMLGYATLNGKTVRDDDGAPLVRAEPILTREQLEALRAELVKTSRAKPAVSTPSLLLRVLFCAVCGEPAYKFAGGGRKHPRYRCRSMGFPKHCGNGTVAMAEWDAFCEEQVLNLLGDAERLEKVWVAGSDSAVELAEVSTELVDLTSLIGSPAYRAGSPQREALDARIAALAARQEELEGLEARPSGWEWRGTGQRFGDWWREQDTAAKNTWLRSMNVRLTFDARGGLTRTIDFGDLQEYEQHLRLGSAVECLDTGMS

SEQ ID NO: 12393 - protein, 500 aa, synthetic construct
MRALVVIRLSRVTEATTSPERQLESCQQLCAQRGWDVVGVAEDLDVSGAVDPFDRKRRPNLARWLAFEEQPFDVIVAYRVDRLTRSIRHLQQLVHWAEDHKKLVVSATEAHFDTTTPFAAVVIALMGTVAQMELEAIKERNRSAARFNIRAGKYRGSLPPWGYLPARVDGEWRLVPDPVQRERILEVYHRVVNNHEPLHLVAHDLNRRGVLSPKDYFAQLQGREPQGRKWSATALKRSMISGAMLGYATLNGKTVRDDDGAPLVRAEPILTREQQEAIRAELVKTSRTKPAVSTPSLLLRVLFCAVCGEPAYKFAGGGRKHMRYRCRSMGFPKHCGNGTVAMAEWDAFCEEQVLSLLGDAERLEKVWVAGSDSAVELAEVNAELVDLTSLIGSPAYRAGSPQREALDARIAALAARQEELEGLEARLSGWEWRETGQRFRDWWREQDTAAKNTWLRSMNVRLTFDVRGGLARTIDLGDLQEYEQHLRLGSVVERLHTGMS

SEQ ID NO: 12394 - protein, 500 aa, synthetic construct
MRALVAIRLSRVTDATTSPERQLESCQQLCAQRGWDVVGVAEDLDVSGAVDPFDRKRRPNLARWLAFEEQPFDVIVAYRVDRLTRSIRHLQQLVHWAEDHKKLVVSATEAHFDMTTPFAAVVVALMGTVAQMELEAIKERSRSAAHFNIRAGKYRGSLPPWGYLPTRVDGEWRLAPDPVQRERILEVYHRVVDNHEPLHLVAHDLNRRGVLSPKDYFAQLQGREPQGRKWSATALKRSMISVAMLGYATLNGKTVRDDDGAPLVRAEPILTRGQLEALRAELVKTSRAKPAVSTPSLLLRVLFCAVCGEPAYKFAGGGRKHPRYRCRSMGFPKHCGNGTVAMAEWDAFCEEQVLGLLGDVERLEKVWVAGSDSAVKLAEVNAELVDLTGLIGSPAYRAGSPQREALDARIAALAARQEELEGLEARPSGWEWRGTGQRFGDWWREQDTAAKNTWLRSMNVRLTFDVRGGLTRTIDFGDLQEYEQHLRLGSVVERLHTGMS

SEQ ID NO: 12395 - protein, 500 aa, synthetic construct
MRALVVIRLSRVTEATTSPERQLESCQQLCAQRGWDVVGVAEDLDVSGAVDPFDRKRRPNLARWLAFEEQPFDVIVAYRVDRLTRSVRHLQQLVHWAEDHKKLVVSATEAHFDTTTPFAAVVIALMGTVAQMELEAIKERNRSAAHFNIRAGKYRGSLPPWGYLPTRVDGEWRLAPDPVQRERILEVYHRVVDNHEPLHLVAHDLNRRGILSPKDYFAQLRGREPQGRRWSATALKRSMISEAMLGHATLNGKTVRDDDGAPLVRAEPILTREQLEALRAELVKTSRAKPAVSTPSLLLRVLFCAVCGEPAYKFAGGGRKHPRYRCRSMGFPRHCGNGTVAMAEWDAFCEEQVLDLLGDTERLEKVWVAGSDSAVELAEVNAELVDLTSLIGSPAYRAGSPQREALDARIAALAARQEELGGLEARPSGWEWRETGQRFGDWWREQDTAAKNAWLRSMNVRLTFDVRGGLTRTIDFGDLQEYKQHLRLGSVVERLHTGMS

SEQ ID NO: 12396 - protein, 500 aa, synthetic construct
MRALVVIRLSRVTDATTSPERQLESCRQLCAQRGWDVVGVAEDLDVSGAVDPFDRKRRPNLACWLAFEEQPFDVIVAYRVDRLTRSVRHLQQLVHWAEDHKKLVVSATEAHFDTTTPFAAVVIALMGTVAQMELEAIRERSRSAAHFNIRAGKYRGSLPPWGYLPTRVDGEWRLAPDPVQRERILEVYHRVVDNHEPLHLVAHDLNRRGVLSPKDYFAQLQGREPQGRKWSATALKRSMTSEAMLGYATLNGKTVRDDDGAPLVRAEPILTREQLEALRAELVKTSRAKPAVSTPSLLLRVLFCAVCGEPAYKFAGGGRKHPRYRCRSMGFPKHCGNGTVAMAEWDAFCEEQVLDLLGDAERLEKVWVVGSDSAVELAEVNTELVDLTSLIGSPAYRAGSPQREALDARIAALAARQEELEGLEARPSGWEWRETGQRFGDWWREQGTAAKNTWLRSMNVRLTFDVRGGLTRTIDFGDLQEYEQHLRLGSVVERLHTGTS

SEQ ID NO: 12397 - protein, 500 aa, synthetic construct
MRALVVIRLSRVTDATTSPERQLESCQQLCAQRGWDVVGVAEDLDVSGAVDPFNRKRRPNLARWLAFEERPFDVIVAYRVDRLTRSIRHLQQMVHWAEDHKKLVVSATEAHFDTTTPFAAVVVALMGTVAQMELEAIKERSRSAAHFNIRAGKYRGSLPPWGYLPARVDGEWRLAPDPVQRERILEVYHRVVDDHEPLHLVAHDLNRRGVLSPRDYFAQLRGREPQGRKWSATALKRSMTSEAMLGYATLSGKTVRDDDGAPLVRAEPILTREQLEALRAELAKTSRAKPAVSTPSLLLRVLFCAVCGEPAYKFAGGGRKHLRYRCRSMGFPKHCGNGTVAMAEWDAFCEEQVLGLLGDAERLEKVWVAGSDSAVELAGVNAELVDLTSLIGSPAYRAGSPQREALDARIAALAARQEELEGLEARPSGWEWRETGQRFGDWWREQDTAAKNTWLRSMNVRLTFDVRGGLTRTIDFGDLQEYEQHLRSGSVVERLYTGMS

SEQ ID NO: 12398 - protein, 500 aa, synthetic construct
MRALVVIRLSRVTDATTSPERQLESCQQLCAQRGWNVVGVAEDLDVSGAVDPFDRKRRPNLARWLAFEEQPFDVIVAYRVDRLARSVRHLQQLVRWAEDHKKLVVSATEAHFDTTTPFAAVVIALMGTVAQMELEAIKERSRSAAHFNIRAGKYRGSLPPWGYLPMRVDGEWRLVPDPVQRERILEVYHRVVDNHEPLHLVAHDLNRRGVLSPKDYFAQLQGREPQGRKWSATALKRSMISVAMLGYATLNGKTVRDDDGAPLVRAEPILTREQLEALRAELVKTSRAKPAVSTPSLLLRVLFCAVCGEPAYKFAGGGRKHPRYRCRSMGFPKHCGNGTVAMAEWDAFCEEQVLDLLGDAERLEKVWVAGSDSAVELAEVNAELVDLTSLIGSPAYRAGSPQREALDARIAALAARQEELEGLEARPSGWEWRETGQRFGDWWREQDTAAKNTWLRSMNVRLTFDVRGGLTRTIDFGDLQEYEQHLRLGSVVERLHTGMS

SEQ ID NO: 12399 - protein, 500 aa, synthetic construct
MRALVVIRLSRVTEATTSPERQLESCQQLCAQRGWDVVGVAEDLDVSGAVDPFDRKRRPNLARWLAFEEQPFDAIVAYRVDRLTRSIRHLQQLVHWAEDNKKLVVSATEAHFDMTTPFAAVVVALMGTVAQMELEAIKERSRSAAHFNIRAGKYRGSLPPWGYLPTRVDGEWRLAPDPVQRERILEVYHRVVDNHEPLHLVAHDLNRRGVLSPKDYFAQLQGREPQGRKWSATALKRSMISVTMLGYATLNGKTVRDDDGAPLVRAEPILTREQLEALRAELVKTSRAKPAVSTPSLLLRVLFCAVCGEPAYKFAGGGRKHPRYRCRSMGFPKHCGNGTVAMAEWDAFCEEQVLGLLGDVERLEKVWVAGSDSAVKLAEVNAELVDLTGLIGSPAYRAGSPQREALDARIAALAARQEELEGLEARPSGWEWRGSGQRFGDWWREQDTAAKNTWLRSMNVRLTFDVRGGLTRTIDFGDLQEYEQHLRLGSVVERLHTGMS

SEQ ID NO: 12400 - protein, 500 aa, synthetic construct
MRALVVIRLSRVTDATTSPERQLESCQQLCAQRGWNVVGVAEDLDVSGAVDPFDRKRRPNLARWLAFEEQPFDVIVAYRVDRLARSVRHLQQLVRWAEDHKKLVVSATEAHFDTTTPFAAVVIALMGTVAQMELEAIKERSRSAAHFNIRAGKYRGSLPPWGYLPMRVDGEWRLVPDPVQRERILEVYHRVVDNHEPLHLVAHDLNRRGVLSPKDYFAQLQGREPQGRKWSATALKRSMISVAMLGYATLNGKTVRDDGGAPLVRAEPILTRKQLEALRAELVKTSRAKPAVSTPSLLLRVLFCAVCGEPAYKFAGGGRKHPRYRCRSMGFPKHCGNGTVAMAEWDAFCEEQVLDLLGDAERLEKVWVAGSDSAVELAEVNAELVDLTSLIGSPAYRAGSPQREALDARIAALAARQEELEGLEARPSGWEWRGTGQRFGDWWREQDTAAKNTWLRSMNVRLTFDVRGGLTRTIDFGDLQEYEQHLRLGSVVERLHTGMS

SEQ ID NO: 12401 - protein, 500 aa, synthetic construct
MRALVVIRLSRVTDATTSPERQLESCQQLCAQRGWDVVGVAEDLDVSGAVDPFDRKRRPSLARWLAFEEQPFDAIVAYRVDRLARSIRHLQQLVHWAEDHKKLVVSATEAHFDTTTPFAAVVIALMGTVAQMELEAIKERSRSAAHFNIRAGKYRGSLPPWGYLPARVDGEWRLVPDPVQRERILEVYHRVVDNHEPLHLVAHDLNRRGVLSPKDYFAWLRGREPQGRKWSATALKRSMTSEAMLGYATLNGKTVRDDDGAPLVRAEPILTREQLEALRAELVKTSRAKPAVSTPSLLLRVLFCAVCGEPAYKFSGGGRKHPRYRCRSMGFPKHCGNGTVAMAEWDAFCEEQVLDLLGDAERLEKVWVAGSDSAVELAEVNAELVDLTSLIGSPAYRAGSPQREALDARIAALAARQEGLEGVEARPPGWEWRETGQRFGDWWREQDTAAKNTWLRSMNVRLTFDVRGGLTRTIDFGDLQEYEQHLRLGSVVERLHTGMS

SEQ ID NO: 12402 - protein, 500 aa, synthetic construct
MRALAVIRLSRVTDATTSPERQLESCQQLCAQRGWDVVGVAEDLDVSGAVDPFDRKRRPNLARWLAFEEQPFDVIVAYRVDRLTRSVRHLQQLVHWAEDHKKLVVSATEAHFDTTTPFAAVVIALMGTVAQMELEAIKERSRSAAHFNIRAGKYRGSLPPWGYLPTRVDGEWRLAPDPVQRERILEVYHRVVDNHEPLHLVAHDLNRRGVLSPKDYFAQLQGREPQGRKWSATALKRSMISGAMLGYATLNGKTVRDDDGAPLVRAEPILTREQLEALRAELVKTSRAKPAVSTPSLLLRVLFCAVCGEPAYKFAGGGRKHPRYRCRSMGFPKHCGNGTVAMAEWDAFCEEQVLDLLGDAERLEKVWAAGSDSAVELAEVNAELVDMTSLIGSPAYRAGSPQREALDARIAALAARQEELEGLEARPSGWEWRGTGQRFGDWWREQDTAAKNTWLRSMNVRLTFDVRGGLTRTIDFGDLQEYEQHLRLGSVVECLHTGMS

SEQ ID NO: 12403 - protein, 500 aa, synthetic construct
MRTLVVIRLSRVTEATTSPERQLESCQQLCAQRGWDVVGVAEDLDVSGAVDPFDRKRRPNLARWLAFEEQPFDVIVAYRIDRLTRSIRHLQQLVHWAEDHKKLVVSATEAHFDTTTPFAAVVIALMGTVAQMELEAIKERSRSAAHFNIRAGKYRGSLPPWGYLPARVDGEWRLVPDPVQRERILEVYHRVVDNHEPLHLVAHDLNRRGVLSPKDYFAQLRGREPQGRKWSATALKRSMISEAMLGYATLNGKTVRDDDGAPLVRAEPILTREQQEALRAELVKTSRAKPAVSTPSLLLRVLFCAVCGEPAYKFAGGGRKHPRYRCRSMGFPKHCGNGTVAMAEWDAFCEEQVLDLLGDAERLEKVWVASSDSAVELAEVNAELVGLTSLIGSPAYRAGSPQREALDARIAALAARQGELEGLEARPSGWEWRETGQRFGDWWREQDTAARNTWLRSMNVRLTFDVRGGLTRTIDFGDLQEYEQHLRLGSVAERLHTGMS

SEQ ID NO: 12404 - protein, 500 aa, synthetic construct
MRALVVIRLSRVTDATTSPERQLESCQQLCAQRGWDVAGVAEDLDVSGAVDPFDRKRRPNLARWLAFEEQPFDAIVAYRVDRLTRSIRHLQQLVHWAEDHKKLVVSATEAHFDTTTPFAAVVIALMGTVAQMELEAIKERSRSAAHFNIRAGKYRGSLPPWGYLPTRVDGEWRLAPDPVQRERILEVYHRVVDDHEPLHLVAHDLNRRGVLSPRDYFAQLRGREPQGRRWSATALKRSMISEAMLGHATLNGKTVRDENGAPLVRAEPILTREQLEALRAELVKTPRAKPAVSTPSLLLRVLFCAVCGEPAYKFAGGGRKHPRYRCRSMGFPKHCGNGTVAMAEWDAFCEEQVLDLLGDAERLEKVWVAGSDSAVELAEVNAELVDLTGLIGSPAYRAGSPQREALDARITALAARQGELEGLEARPSGWEWRETGQRFGDWWREQDTAAKNTWLRSMNVRLTFDVRGGLTRTIDFGDLQEYEQHLRLGSVAERLHTGMS

SEQ ID NO: 12405 - protein, 500 aa, synthetic construct
MRALVVIRLSRVTDATTSPERQLESCQQLCAQRGWDVVGVAEDLDVSGAVDPFDRKRRPNLARWLAFEEQPFDVIVAYRVDRLARSIRHLQQLVHWAEDHKKLVVSATEAHFDTTTPFAAVVIALMGTVAQMELEAIKERNRSAAHFNIRAGKYRGSLPPWGYLPARVDGEWRLVPDPVQRERILEVYHRVVDNHEPLHLVAHDLNRRGVLSPKDYFAQLQGREPQGRKWSATALKRSMTSEAMLGYATLNGKTVRDDDGAPLVRAEPILTRGQLEAIRAELVKTSRAKPAVSTPSLLLRVLFCAVCGEPAYKFAGGGRKHPRYRCRSMGFPKHCGNGTVAMAEWDAFCEEQVLDLLGDAERLEKVWVAGSDSAVELAEVNAELVDLTSLIGSPAYHAGSPQREALDARIAALAARQEELEDLEARPSGWEWRGTGQRFGDWWREQDTAAKNTWLRSMNVRLTFDVRGGLTRTIDFGDLQEYVQHLRLGSVVGRLHTGMS

SEQ ID NO: 12406 - protein, 500 aa, synthetic construct
MRALVVIRLSRVTDATTSPERQLESCQQLCAQRGWDVVGVAEDLDVSGSVDPFDRKRRPNLARWLAFEEQPFDVVVAYRVDRLTRSTRHLQQLVHWAEDHRKLVVSATEAHFDTTTPFAAVVIALMGTVAQMELEAIKERSRSAAHFNIRAGKYRGSLPPWGYLPTRVDGEWRLVPDPVQRERILEVYHRVVDNHEPLHLVAHDLNRRGVLSPRDYFAQLRGREPQGRKWSATALKRSMISEAMLGYATLNGKTVRDDDGAPLVRAEPILTREQLEALRAELVKTSRAKPAVSTPSLLLRVLFCAVCGEPAYKFAGGGRKHPRYRCRSMGFPKHCGNGTVAMVEWDAFCEEQVLNLLGDAERLEKVWVAGSDSAVELAEVNAELVDLTSLIGSPAYRAGSPQREALDARIAALAARQEELEGLEARPSGWEWRKTGQRFGDWWREQDTAAKNTWLRSMNVRLTFDVRGGLTRTIDFGDLQEYEQRLRLGSVVERLHTGMS

SEQ ID NO: 12407 - protein, 500 aa, synthetic construct
MRALVVIRLSRVTDATTSPERQLESCQQLCAQRGWDVVGVAEDLDVSGAVDPFDRKRRPNLARWLAFEEQPFDVIVAYRVDRLTRSVRHLQQLVHWAEDHKKLVVSATEAHFDTTTLFAAVVIALMGTVAQMELEAIKERSRSAAHFNIRAGKYRGSLPPWGYLPTRVDGEWRLVPDPVQRERILEVYHRVVDKHEPLHLVAHDLNRRGVLSPKDYFAQLRGREPQGRKWSATALKRSMISEAMLGYATLNGKTVRDDDGAPLVRAEPILTREQLGALRAELVKTSRAKPAVSTPSLLLRVLFCAVCGEPAYKFAGGGRKHSRYRCRSMGFPKHCGNGTVAMAEWDAFCEEQVLDLLGDAERLEKVWVAGSDSAVELAEVNAELVDLTSLIGSPAYRAGSPQREALDARIAALAARQEELEGLEARPSGWEWRGTGQRFGDWWREQDTAAKNTWLRSMNVRLTFDVRGGLTRTIDFGDLQEYEQHLRLGSVVECLHTGMS

SEQ ID NO: 12408 - protein, 500 aa, synthetic construct
MRALVVIRLSRVTDATTSPERQLESCQQLCAQRGWDVVGVAEDLDVSGAVDPFDRKRRPNLARWLAFEEQPFDVIVAYRVDRLTRSTRHLQQLVHWAEDHKKLVVSATEAHFDTTTPFAAVVIALMGTVAQMELEAIKERSRSAAHFNIRAGKYRGSLPPWGYLPTRVDGEWRLVPDPVQRERILEVYHRVVDNHEPLHLVAHDLNRRGFLSPKDYFAQLQGREPQGCKWSATALKRSMTSEAMLGYAALNGKTVRDDDGAPLVRAEPILTREQLEALRAELVKTSRAKPAVSTPSLLLRVLFCAVCGEPAYKFAGGGRKHPRYRCRSMGFPKHCGNGTVAMAEWDAFCEEQVLDLLGDTERLEKVWVAGSDSTVKLAEVNAELVDLTSLIGSPAYRAGSPQREALDARIAALAARQEELEGLGARQPGWEWRETGQRFGDWWREQDTAAKNAWLRSMNVRLTFDVRGGLTRTIDFGDLQEYEQHLRLGSVVERLHTGMS

SEQ ID NO: 12409 - protein, 500 aa, synthetic construct
MRALVVIRLSRVTDATTSPERQLESCQQLCAQRGWDVAGVAEDLDVSGAVDPFDRKRRPNLARWLAFEEQPFDAIVAYRVDRLTRSIRHLQQLVHWAEDHKKLVVSATEAHFDTTTPFAAVVIALMGTVAQMELEAIKERNRSAAHFNIRAGKYRGSLPPWGYLPARVDGEWRLVPDPVQRERILEVYHRVVNNHEPLHLVAHDLNRRGVLSPRDYFAQMQGREPQGRKWSATALKRSMTSEAMLGYATLNGKTVRDDDGAPLVRAEPILTREQLEALRAELVKTSRAKPAVSTPSLLLRVLFCAVCGEPAYKFAGGGRKHPRYRCRSMGFPKHCGNGTVAMAEWDAFCEEQVLGLLGDAERLEKVWVAGSDSAAELAEVNAELVDLTSLIGSPAYRAGSPQREALDARIAALAARQEELEGLEARPSGWEWRGTGQCFGDWWRVQDTAAKNTWLRSMNVRLTFDVRGGLTRAIDFGDLQEYEQHLRLGSVVERLHTGMS

SEQ ID NO: 12410 - protein, 500 aa, synthetic construct
MRALVVIRLSRVTDATTSPERQLESCQQLCAQRGWDVVGVAEDLDVSGAVDPFDRKRRPNLARWLAFEEQPFDVIVAYRVDRLTRSVRHLQQLVHWAEDHKKLVVSATEAHFDTTTPFAAVVIALMGTVAQMELEAIKERSRSAAHFNIRAGKYRGSLPPWGYLPARVDGEWRLVPDPVQRERILEVYHRVVDNHEPLHLVAHDLNRRGVLSPKDYFAQLRGREPQGRKWSATALKRSMISGAMLGYATLNGKTVRVDDGAPLVRAEPILTREQLEALRAELVKTSRTEPAVSTPSLLLRVLFCAVCGEPAYKFSGGGRKHPRYRCRSMGFPKHCGNGTVAMAEWDAFCEEQVLNLLGDAERLEKVWVAGSDSAVELAEVNAELVDLTSLIGSPAYRAGSPQREALDARIAALAARQEELEGLEARPSGWVWRETGQRFGDWWREQDTTAKNTWLRSMNVRLTFDVRGGLTRTIDFGDLQEYEQHLRLGSVVERLHTGMS

SEQ ID NO: 12411 - protein, 500 aa, synthetic construct
MRALVVIRLSRVTDATTSPERQLESCQQLCAQRGWDVVGVAEDLDVSGAVDPFDRKRRPNLARWLAFEEQPFDVVVAYRVDRLARSIRHLQQLVHWAEDHKKLVVSATEAHFDTTTPFAAVVIALMGTVAQMELEAIRERNRSAAHFNIRAGKYRGSLPPWGYLPTRVDGEWRLVPDPVQRERILEVYHRVVVNHEPLHLVAHDLNRHGVLSPRDYFAQLRGREPQGRKWSATALKRSMISEAMLGYATLNGKTVRDDGGAPLVRAEPILTREQLGALRAELVKTSRAKPAVSTPSLLLRVLFCAVCGEPAYKFAGGGRKHPRYRCRSMGFPKHCGNGTVAMAQWDAFCEEQVLNLLGDAERLEKVWVAGSDSAVELAEVNAELVDLTSLIGSPAYRAGSPQREALDARIAALAARQEELEGLEARPSGWEWRETGQRFGDWWREQDTAAKNTWLRSMNVRLTFDVRGGLTRTIDFGDLQEYEQHLHLGSVVERLHTGMS

SEQ ID NO: 12412 - protein, 500 aa, synthetic construct
MRALVVIRLSRVTDATTSPERQLESCQQLCAQRGWDVVGVAEDLDVSGAVDPFDRKRRPNLARWLAFEEQPFDAIVAYRVDRLTRSIRHLQQLVHWAEDHKKLVVSATEAHFDTTTPFAAVVIALMGTVAQMELEAIKERNRSAAHFNIRAGKYRGSLPPWGYLPTRVDGEWRLAPDPVQRERILEVYHRVVDDHEPLHSVAHDLNRRGVLSPRDYFAQLRGREPQGRKWSATALKRSMISEAMLGYATLNGRTVRDDDGAPLVRAEPILTRGQLEALRAELVRTSRAKPAVSIPSLLLRVLFCAVCGEPAYKFAGGGRKHPRYRCRSMGFPKHCGNGTVAMAEWDAFCEEQVLNLLGDAERLEKVWVAGSDSAVELAEVNAELVDLTSLIGSPAYRVGSPQREALDARIAALAARQEELEGLEARPSGWEWRETGQRFRDWWREQDTAAKNTWLRSMNVRLTYDVRGGLTRTIDLGDLQEYEQHLRLGSVVERLHTGMS

SEQ ID NO: 12413 - protein, 500 aa, synthetic construct
MRALVVIRLSRVTDATTSPERQLESCQQLCAQRGWDVVGVAEDLDVSGAVDPFDRKRRPNLARWLAFEEQPFDVIVAYRVDRLTRSIRHLQQLVHWAEDHKKLVVSATEAHFDMTTPFAAVVIALMGTVAQMELEAIKERSRSAAHFNIRAGKYRGSLPPWGYLPARVDGEWRLVPDPVQRERILEVYRRVVDNHEPLHLVAHDLNRRGVLSPKDYFAQLRGREPQGRKWSATALKRSMTSEAMLGYATLNGKTVRDDDGAPLVRAEPILTREQLEALRAELVKTSRAKPAVSTPSLLLRVLFCAVCGEPAYKFAGGGRKHPRYRCRSMGFPKHCGNGTVAMAEWDAFCEEQVLDLLGDAERLEKVWVAGSDSAVELAEVNAELVDLTSLIGSPAYRAGSPQREALDARIAALAARQEGLEGLEARPSGWGWRETGQRFGDWWREQDTAAKNTWLRSMNVRLTFDVRGGLTRMIDFGDLQEYEQHSRLGSAVERLHTGMS

SEQ ID NO: 12414 - protein, 500 aa, synthetic construct
MRALVVIRLSRVTDATTSPERQLESCQQLCAQRGWDVVGVAEDLDVSGAVDPFDRKRRPNLARWLAFEEQPFDVIVAYRVDRLTRSVRHLQQLVHWAEDHKKLVVSATEAHFDTTTPFAAVVIALMGTVAQMELEAIKERSRSAAHFNIRAGKYRGSLPPWGYLPTRVDGEWRLVPDPVQRERILEVYHRVVDNHEPLHLVAHDLNRRGVLSPKDYFAQLRGREPQGRKWSATALKRSMISEAMLGYATLNGKTVRGDDGAPLVRAEPILTREQLEALRVELVKTSRAKPAVSTPSLLLRVLFCAVCGEPAYKFAGGGRKHPRYRCRSMGFPKHCGNGTLAMAEWDAFCEEQVLDLLGDAGRLEKVWVVGSDSAVELAEVNAELVDLTSLIGSPAYRAGSPQREALDARIAALAARREELEGLEARPAGWEWRETGQRFGDWWHEQDTAAKNTWLRSMNVRLTFDVRGGLTRTIDFGDLQEYEQHLRLGSVVERLHTGMS

SEQ ID NO: 12415 - protein, 500 aa, synthetic construct
MRALVVIRLSRVTDATTSPERQLESCQQLCTQRGWDVVGVAEDLDVSGAVDPFDRKRRPNLARWLAFEEQPFDVIVAYRVDRLARSIRHLQQLVHWAGDHKKLVVSATEAHFDTTTPFAAVVIALMGTVAQMELEAIKERNRSAAHFNIRAGKYRGSLPPWGYLPTRVDGEWRLAPDPVQRERILEVYHRVVDNHEPLHLVAHDLNRRGILSPRDYFAQLQGRGPQGRKWSATALKRSMTSEAMLGYATLNGETVRDDDGAPLVRAEPILTRGQLEALRAELVKTSRAKPAVSTPSLLLRVLFCAVCGEPAYKFAGGGRKHPRYRCRSMGFPKHCGNGTVAMAEWDAFCEEQVLDLLGDAERLEKVWVAGSDSAVELAEVNAELVDLTSLIGSPAYRAGSPQREALDARIAALAARQEELEGLEARPSGWEWRETGQRFGDWWRGQDTAAKNTWLRSMNVRLTFDVRGGLTRTIDFGDLQEYEQHLRLGSVVERLHTGMS

SEQ ID NO: 12416 - protein, 500 aa, synthetic construct
MRALVVIRLSRVTDATTSPERQLESCQQLCAQRGWDVVGVAEDLDVSGAVDPFDRKHRPNLARWLAFEEQPFDVIVAYRVDRLTRSIRHLQQLVHWAEDHKKLVVSATEAHFDMTTPFAAVVIALMGTVAQMELEAIKERNRSAAHFNIRAGKYRGSLPPWGYLPARVDGEWRLVPDPVQRERILEVYRRVVDSHEPLHLVAHDLNRRGVLSPKDYFAQLRGREPQGRKWSATALKRSMTSEAMLGYATLNGKTVRDGDGAPLVRAEPILTREQQETLRAELVKTSRAKPAVSTPSLLLRVLFCAVCGEPAYKFAGGGRKHPRYRCRSMGFPKHCGNGTVAMAEWDAFCEEQVLDLLGDAERLEKVWVAGSDSAVELAEVNAELVDLTSLIGSPAYRAGSPQREALDARIEALAARQEELEGLEARPPGWEWRETGQRFVDWWREQDTAAKNTWLRSMNVRLMFDVRGGLTRTIDFGDLQEYEQHLRLGSVVERLHTGMS

SEQ ID NO: 12417 - protein, 500 aa, synthetic construct
MRALAVIRLSRVTDATTSPERQLESCQQLCAQRGWDVVGVAEDLDVSGAVDPFDRKRRPNLARWLAFEEQPFDVIVAYRVDRLARSIRHLQQLVHWAEDHKKLVVSATEAHFDTTTPFAAVVIALMGTVAQMELEAIKERSRSAAHFNIRAGKYRGSLPPWGYLPARVDGVWRLVPDPVQRERILEVYHRVVNNHEPLHLVAHDLNRRGVLSPKDYFAQLQGREPQGRKWSATALKRSMISEAMLGYATLNGKTVRDGDGAPLVRAEPILTREQQEALRAELVKTSRAKPAVSTPSLLLRVLFCAVCGEPAYKFAGGGRKHPRYRCRSMGFPKHCGNGTVAMAEWDAFCEEQVLNLLGDAERLEKVWVAGSDSAVELAEVNAELVDLTSLIGSPAYRAGSPQREVLDARIAALAARQEELEGLEARPSGWVWRETGQRLGDWWREQDAAAKNTWLRSMNVRLTFDVRGGLTRTIDFGDLQEYEQHLRLGSVVERLHTGMS

SEQ ID NO: 12418 - protein, 500 aa, synthetic construct
MRALVVIRLSRVTDATTSPERQLESCQQLCAQRGWDVVGVAEDLDVSGAVDPFDRKHRPNLARWLALEEQPFDAIVAYRVDRLTRSIRHLQQLVHWAEDHKKLVVSATEAHFDTTTPFAAVVIALMGTVAQMELEAIKERSRSAAHFNIRAGKYRGSLPPWGYLPTRVDGEWRLAPDPVQRERILEVYHRVVDNHEPLHLVAHDLNRRGVLSPKDYFAQLRGREPQGHKWSATALKRSMTSEAMLGYATLNGKTVRDDDGAPLVRAEPILTREQLEALRAELVKTSRAKPAVSTPSLLLRVLFCAVCGEPAYKFAGGGRKHPRYRCRSMGFPKHCGNGTVAMAEWDGFCEEQVLDLLGDAERLEKVWVAGSDFAVELAEVNAELVDLTSLISSPAYRAGSPQRGALDARIAALAARQEELEGLEARPSGWEWRGTGQRFGDWWREQDTAAKNTWLRSMNVRLTFDVRGGLTRTIDFGDLQEYVQHLRLGSVVGRLHTGMS

SEQ ID NO: 12419 - protein, 500 aa, synthetic construct
MRALVVIRLSRVTDATTSPERQLESCQQLCAQRGWDVVGVAEDLDVSGAVDPFDRKRRPNLARWLAFEEQPFDVIVAYRVDRLARSIRHLQLLVHWAEDHKKLVVSATEAHFDTTTPFAAIVIALMGTVAQMELEAIKERSRSAAHFNIRAGKYRGSLPPWGYLPARVDGEWRLVPDPVQRERILEVYHRVVDNHEPLHLVAHDLNRRGVLSPKDYFAQLRGREPQGRKWSATALKRSMISEAMLGYATLNGKTVRDDDGAPLVRAEPILTREQLEALRAELVKTSRAKPAVSTPSLLLRVLFCAVCGEPAYKFAGGGRKHPRYRCRSMGFPKHCGNGTVAMAEWDAFCEEQVLELLGDAERLEKVWVAGSDSAVELAEVNAELVDLTSLIGSPAYRAGSPQREALDARIAALAARQEELEGLEARPSGWEWRETGQRFGDWWREQDTAAKNAWLRSMNVRLTFDARGGLTRTIDFGDLQEYEQHLRLGSVVERSHTGMS

SEQ ID NO: 12420 - protein, 500 aa, synthetic construct
MRALVVIRLSRVTDATTSPERQLESCQQLCAQRGWDVVGVAEDLDVSGAVDPFDRKRRPNLARWLAFEEQPFDVIVAYRVDRLTRSVRHLQQLVHWAEDHKKLVVSATEAHFDTTTPFAAVVIALMGTVAQMELEAIKERSRSAAHFNIRAGKYRGSLPPWGYLPTRVDGEWRLAPDPVQRERILEVYHRVVDNHEPLHLVAHDLNRRGVLSPKDYFAQLQGREPQGRKWSATALKRSMISEAMLGYATLNGKTVRGDDGAPLVRAEPILTREQLEALRAELVKTSRAKPAVSTPSLLLRVLFCAVCGEPAYKFAGGGRKHPRYRCRSMGFPKHCGNGTVAMAEWDVFCEEQVLDLLRDAERLEKVWVAGSDSAVELAEVNAELVDLTSLIGSPAYRAGSPQREALDARIAALAARREELEGLEARPSGWEWRGTGQRFGDWWREQDTAARNTWLRSMNVRLTFDVRGGLTRTIDFGDLQEYEQHLRLGSVVERLHTGMS

SEQ ID NO: 12421 - protein, 500 aa, synthetic construct
MHALVVIRLSRVTDATTSPERQLESCQQLCAQRGWDVVGVAEDLDVSGAVDPFDRKRRPNLARWLAFEEQPFDVIVAYRVDRLTRSIRHLQQLVHWAEDHKKLVVSATEAHFDTTTPFAAVVIALMGTVAQMELEAIRERSRSAAHFNIRAGKYRGSLPPWGYLPARVDGEWRLVPDPVQRERILEVYHRVVDDHEPLHLVAHDLNRRGVLSPKDYFAQLRGREPQGRKWSATALKRSMISKAMLGYATLNGKTVRDDDGAPLVRAEPILTRGQQEALRAELVKTSRAKPAVSTPSLLLRVLFCAVCGEPAYKFAGGGRKHPRYRCRSMGFPKHCGNGTVAMAEWDTFCEEQVLDLLGDAERLEKVWVAGSDSAVELAEVNAELVDLTSLIGSPAYRAGSPQREALDARIAALAARQEELEGLEARPSGWEWRETGQRFGDWWREQDTAAKNAWLRSMNVRLTFDVRGGLTRTIDFGDLQEYEQHLRLGSVVERLYTGMS

SEQ ID NO: 12422 - protein, 500 aa, synthetic construct
MRALVVIRLSRVTDATTSPERQRESCQQLCAQRGWDVVGVAEDLDVSGTVDPFDRKRRPNLARWLAFEEQPFDVIVAYRVDRLTRSIRHLQQLVHWAEDHKKLVVSATEAHFDTTTPFAAVVIALMGTVAQMELEAIRERSRSAAHFNIRAGKYRGSLPPWGYLPTRVDGEWRLVPDPVQRERILEVYHRVVDNHEPLHLVAHDLNRRGVLSPKDYFAQLRGREPQGRKWSATALKRSMTSVAMLGYATLYGKTVRDDDGAPLVRAEPILTREQLEALRAELVKTSRAKLAVSTPSLLLRVLFCAVCGEPAYKFAGGGRKHPRYRCRSMGFPKHCGNGTVAMAEWDAFCEEQVLDLFGDAERLEKVWVAGSDSAVELAEVNAELVDLTSLIGSPAYRTGSPQREALDARIAALAARQEELEGLEARPSGWEWRETGQRFGDWWREQDTAAKNAWLRSMNVRLTFDVRGGLTRMIDFGDLQEYEQHLRLGSVVERLHTGMS

SEQ ID NO: 12423 - protein, 500 aa, synthetic construct
MRALVVIRLSRVTDATTSPERQLESCQQLCAQRGWDVVGVAEDLDVSGAVDPFDRKRRPNLARWLASEEQPFDVIVAYRVDRLTRSVRHLQQLVHWAEDHKKLVVSATEAHFDTTTPFAAVVIALMGTVAQMELEAIKERNRSAAHFNIRAGKYRGSLPPWGYLPTRVDGEWRLAPDPVQRERILEVYHRVVDNHEPLHLVAHDLNRRGVLSPKDYFAQLQGREPQGRKWSATALKRSMISEAMLGYATLNGKTVRDDDGAPLVRAEPILTREQQEALRAELVKTSRAKPAVSTPSLLLRVLFCAVCGEPAYKFAGGGRKHPRYRCRSMGFPKHCGNGTVAMAEWDAFCEEQVLGLLGDAERLEKVWVAGSDSAVELAEVSAELVDLTGLIGSPAYRAGSPQREALDARIAALAARQEELEGLEAHPSGWEWRETGQRFGDWWRGQDTAAKNTWLRSMNVRLTFDVRGGLTRMIDFGDLQEYEQRLRLGSVVERLHTGMS

SEQ ID NO: 12424 - protein, 500 aa, synthetic construct
MRALVVIRLSRVTDATTSPERQLESCQQLCAQRGWDVVGVAEDLDVSGAVDPFDRKRRPNLARWLAFEEQPFDVIVAYRVDRLARSIRHLQQLVHWAEDHKKLVVSATEAHFDTTTPFAAVVIALMGTVAQMELEAIRERSRSAAHYNIRAGKYRGSLPPWGYLPARVDGEWRLVPDPVQRERILEVYRRVVDNHEPLRLVAHDLNRRGVLSPKDYFAQLRGREPQGRKWSATALKRSMTSEAMLGYATLNGKTVRDDDGAPLVRAEPILTREQLGALRAELVKTSRAKPAVSTPSLLLRVLFCAVCGEPAYKFAGGGRKHPRYRCRSMGFPKHCGNGTVAMAEWDAFCEEQVLGLLGDAERLEKVWVAGSDSAVKLAEVNAELADLTGLVGSPAYRAGSPQREALDARIAALAARQEELEGLEARPSGWEWRGTGQRFGDWWRGQDTAAKNTWLRSMNVRLTFDVRGGLTRTIDFGDLQEYEQHLRLGSVVERLHTGMS

SEQ ID NO: 12425 - protein, 500 aa, synthetic construct
MRALVVIRLSRVTDATTSPERQRESCQQLCAQRGWDVVGVAEDLDVSGAVDPFDRKRRPNLARWLAFEEQPFDVIVAYRVDRLTRSTRHLQQLVRWAEDHKKLVVSATEAHFDTTTPFAAVVIALMGTVAQMELEAIKERNRSAAHFNIRAGKYRGSLPPWGYLPTRVDGEWRLVPDPVQRERILEVYHRVVDNHEPLHLVAHDLNRRGVLSPKDYFAQLRGREPQGRKWSATALKRSMISEAMLGHATLNGRTVRDDDGAPLVRAEPILTREQLEAVRAELVKTSRAKPAVSTPSLLLRVLFCAVCGEPAYKFAGGGRKHPRYRCRSMGFPKHCGNGTVAMAEWDAFCEEQVLDLLGDAERLEKVWVAGSDSAVELAEVNAELVDLTSLIGSPAYRAGSPQREALDARIAALAARQEELEGLEARPSGWEWRETGQRFGDWWREQDTAAKNTWLRTMNVRLTFDVRGGQTRTIDFGDLQGYEQHLRLGSVVERLHTGMS

SEQ ID NO: 12426 - protein, 500 aa, synthetic construct
MRALVVIRLSRVTDATTSPERQLESCQQLCAQRGWDVVGVAEDLDVSGAVDPFDRKRRPNLARWLAFEEQPFDVIVAYRVDRLTRSVRHLQQLVHWAEDHKKLVVSATEAHFDTTTPFAAVVIALMGTVAQMELEAIKERSRSAAHFNIRAGKYRGSLPPWGYLPARVDGEWRLVPDPVQRERILEVYRRVVDNHEPLHLVAHDLNRRGVLSPKDYFAQLQGREPQGRKWSATALKRSMISEAMLGYATLNGKTVRDDDGAPLVRAEPILTREQQEALRAVLVKTSRAKPAVSTPSLLLRVLFCAVCGEPAYKFAGGGRKHPRYRCRSMGFPKHCGNGTVAMAEWDAFCEEQVLDLLGDAERLEKVWVAGSDSAVELAEVNAELVDLTSLVGSSAYRAGSPQREALDARIAALAARQEELEGLEARPSGWEWRETGQRFGDWWREQDTAAKNIWLRSMNVRLTFDVRGGLTRTIDFGDLQEYEQHLRLGSVVERLHTGMS

SEQ ID NO: 12427 - protein, 500 aa, synthetic construct
MRALVVIRLSRVTDATTSPERQLESCLQLCAQRGWDVVGVAEDLDVSGAVDPFDRKRRPNLARWLAFEEQPFDVIVAYRVDRLTRSVRHLQQLVHWAEDHKKLVVSATEAHFDTTTPFAAVVIALMGTVAQMELEAIKERNRSAAHFNIRAGKYRGSLPPWGYLPARVDGEWRLVPDPVQRERILEVYHRVVDNHEPLHLVAHDLNRRGVLSPKDYFAQLQGREPQGRKWSATALKRSMTSEAMLGYATLNGKIVRDDDGAPLVRAEPILTREQLEALRAELVKTSRAKPAVSTPSLLLRVLFCAVCGEPAYKFAGGGRKHPRYRCRSMGFPKHCGNGTVAMTKWDAFCEEQVLNLLGDAERLEKVWVAGSDSAVELAEVNAELVDLTSLIGSPAYRAGSPQREALDTRIAALAARQEELEGLEARPSGWEWRETGQRFGDWWREQDTAAKNTWLRSMNVRLTFDVRGGLTRTIDFGDLQEYEQHLRLGSVVERSHTGMS

SEQ ID NO: 12428 - protein, 500 aa, synthetic construct
MRALVVVRLSRVTDATTSPERQLESCQQLCAQRGWDVVGVAEDLDVSGAVDPFDRKRRPNLARWLAFEEQPFDVIVAYRVDRLARSIRHLQQLVHWAEDHKKLVVSATEAHFDTTTPFAAVVIALMGTVAQMELEAIKERSRSAAHFNIRAGKYRGSLPPWGYLPTRVDGEWRLVPDPVQRERILEVYHRVVDNHEPLHLVAHDLNRRGVLSPRDYFAQLRGREPQGRKWSATALKRSMISEAMLGYATLSGKTVRDDDGAPLVRAEPILTREQLEALRAELVKTSRAKPAVSTPSLLLRVLFCAVCGEPAYKFAGGGRKHSRYRCRSMGFPKHCGNGTVAMAEWDAFCEERVLDLLGDAERLEKVWVAGSDPAVELAEVNAELVDLTSLIGSPAYRAGSPQREALDARIAALAARQEELEGLEARPSGWEWRETGQRFGDWWREQDTAAKNTWLRSMNVRLTFDVRGGLARTIDFGDLQEYEQHLRLGSVAERLHTGMS

SEQ ID NO: 12429 - protein, 500 aa, synthetic construct
MRALVVIRLSRVTDATTSPERQLESCQQLCAQRGWGVVGVAEDLDVSGAVDPFDRKRRPNLARWLAFEEQPFDVIVAYRVDRLTRSTRHLQQLVHWAEDHKKLVVSATEAHFDTTTPFAAVVIALMGTVAQMELEAIRERNRSAAHFNIRAGKYRGSLPPWGYLPARVGGEWRLVPDPVQRERILEVYHRVVDNHEPLHLVAHDLNRRGVLSPKDYFAQLRGREPQGRKWSATALKRSMISEAMLGYATLNGKTVRDDDGAPLVRAEPILTREQQEALRAELVKTSRAKPAVSTPSLLLRVLFCAVCGEPAYKFAGGGRKHPRYRCRSMGFPKHCGNGTVAMAEWDAFCEERVLDLLGDAERLEKVWVAGPDSAVELAEVNAELVDLTSLIGSPAYRAGSPQREALDARIAALAARQEELEGLEARPSGWEWRETGQRFGDWWREQDTAAKNTWLRSMNVRLTFDVRGGLTRTIDFGDLQEYEQHLRLGSVVERLHIGMS

SEQ ID NO: 12430 - protein, 500 aa, synthetic construct
MRALVAIRLSRVTDATTSPERQLESCQQLCAQRGWDVVGVAEDLDVSGAVDPFDRKRRPNLARWLAFEEQPFDVIVAYRVDRLSRSTRHLQQLVRWAEDHKKLVVSATEAHFDTTTPFAAVVIALMGTVAQMELEAIKERNRSAAHFNIRAGKYRGSLPPWGYLPTRVDGEWRLAPDPEQRERILEVYHRVVDNHEPLHLVAHDLNRRGVLSPKDYFAQLQGREPQGRKWSATALKRSMTSEAMLGYATLNGKTVRGDDGAPLVRAEPILTREQLEALRAELVKTSRAKPAVSTPSLLLRVLFCAVCGEPAYKFAGGGRKHPRYRCRSMGFPKHCGNGTVAMAEWDAFCEEQVLGLLGDAERLEKVWVAGSDSAVELAEVNAELVDLTSLIGSPAYRADSPQREALDARIAALAARQEELEGLEARPSGWEWRGTGQRFGDWWREQDTAAKNTWLRSMNVRLTFDVRGGLTRTIDFGDLQEYEQHLRLGSVVERLHTGMS

SEQ ID NO: 12431 - protein, 500 aa, synthetic construct
MRALVVIRLSRVTDATTSPERQLESCQQLCAQRGWDVVGVAEDLDVSGAVDPFDRKRRPNLARWLAFEEQPFDVIVAYRVDRLARSIRHLQQLVHWAEDHKKLVVSATEAHFDTTTPFAAVVIALMGTVAQMELEAIKERSRSAAHFNIRAGKYRGSLPPWGYLPTRVDGEWRLVPDPVQRERILEVYRRVVDNHEPLHLVAHDLNRRGVLSPKDYFAQLRGREPQGRKWSATALKRSMISEAMLGYATLNGKTVRDDDGAPLVRAEPILTRGQLEALRAELVKTSRAKPAVSTPSLLLRVLFCAVCGEPAYKFAGGGRKHPRYRCRSMGFPKHCGNGTVAMAEWDAFCEEQVLDLLGDAERLERVWVAGSDSAVELAEVNAELEDLTSLIGSPAYRAGSPQREALDARIAALAARQEELEGLEARPFGWEWRETGQRFGDWWREQDTAAKNTWLRSMNVRLTFDVRGGLTRTIDFGDLQEYEQHLRLNSVVERLHTGMS

SEQ ID NO: 12432 - protein, 500 aa, synthetic construct
MRALVVIRLSRVTDATTSPERQLESCQQLCAQRGWDVVGVAEDLDVSGAVDPFDRKRRPNLARWLAFEEQPFDMIVAYRVDRLARSIRHLQQLVHWAEDHKKLVVSATEAHFDTTTPFAAVVIALMGTVAQMELVAIKERSRSAAHFNIRAGKYRGSLPPWGYLPARVDGEWRLVPDPVQRERILEVYHRVVDNHEPLHLVAHDLNRRGVLSPKDYFAQLRGREPQGRKWSATALKRSMISEAMLGYATLNGKTVRDDDGAPLVRAEPILTREQQEALRAELVKTSRAKPAVSTPSLLLRVLFCAVCGEPAYKFAGGGRKHPRYRCRSMGFPKHCGNGTVAMAEWDAYCEEQVLDLLGDAERLEKVWVAGSDSAVELAEVNAELVDLTSLIGSPAYRAGSPQREALDARIAALAARQEELEGLEARSSGWEWRETGQRFGDWWREQDTVAKNTWLRSMNVRLTFDVRGGLTRTIDFGDLQEYEQHLRLGSVVERLHAGMS

SEQ ID NO: 12433 - protein, 500 aa, synthetic construct
MRALVVIRLSRVTDATTSPERQLESCQQLCAQRGWDVVGVAEDLDVSGAVNPFDRKRRPNLARWLAFEEQPFDVIVAYRVDRLTRSTRHLQQLVHWAEDHKKLVVSATEAHFDTTTPFAAVVIALMGTVAQMELEAIKERSRSAAHFNIRAGKYRGSLPPWGYLPTRVDGEWRLVPDPVQRERILEVYHRVVDNHESLHLVAHDLNRRGVLSPKDYFAQLQGREPRGRKWSATALKRSMISEAMLGYVTLNGKTVRDDDGAPLVRAEPILTREQLEALRAELVKTSRAKPAVSTPSLLLRVLFCAVCGEPAYKFAGGGRKHPRYRCRSMGFPKHCGNGTVAMAEWDALCEEQVLDLLGDAERLEKVWVAGSDSAVELAEVNAELVDLTSLIGSPAYHAGSPQREALDARIAALAARQEELEGLEARPSGWEWRKTGQRFGDWWREQDTAAKNTWLRSMNVRLMFDARGGLTRTIDFGDLREYEQHLRLGSVVERLHTGMS

SEQ ID NO: 12434 - protein, 500 aa, synthetic construct
MRALVVIRLSRVTDATTSPERQLESCQQLCAQRGWDVVGAAEDLDVSGAVDPFDRKRRPNLARWLAFEEQPFDVIVAYRVDRLTRSVRHLQQLVHWAEDHKKLVVSATEAHFDTTTPFAAVVIALMGTVAQMELEAIKERSRSAAHFNIRAGKYRGSLPPWGYLPTRVDGEWRLVPDPVQRERILEVYHRVVDKHEPLHLVAHDLNRRGVLSPKDYFAQLRGREPQGRRWSATALKRSMISEAMLGYATLNGKTVRDDDGAPLVRAEPILTREQLGALRAELVKTSRAKPAVSTPSLLLRVLFCAVCGEPAYKFAGGGRKHSRYRCRSMGFPKHCGNGTVTMAEWDAFCEEQVLDLLGDAERLEKVWVAGSDSAVELAEVNAELVDLTSLIGSPAYRAGSPQREALDARIAALAARQGELEGLEARPSGWEWRETGQRFGDWWREQDTAAKNTWLRSMNVRLTFDVRGGLTRSIDFGDLQVYEQHLRLGSVVERLHTGMS

SEQ ID NO: 12435 - protein, 500 aa, synthetic construct
MRALVVIRLSRVTDATTSPERQLESCQQLCAQRGWDVVGVAEDLDVSGAVDPFDRKRRPNLARWLAFEEQPFDVIVAYRVDRLARSIRHLQQLVHWAEDHKKLVVSATEAHFDTTTPFAAVVIALMGTVAQMELEAIKERSRSAAHFNIRAGKYRGSLPPWGYLPTRVDGEWRLAPDPVQRERILEVYHRVVDNHEPLHLVAHDLNRRGVLSPKDYFAQLRGREPQGRKWSATALKRSMVSEAMLGYATLNGKTVRDDDGAPLVRAEPILTREQLEALRAELVKTSRAKPAVSTPSLLLRVLFCAVCGEPAYKFAGGGRKHPRYRCRSMGFPKHCGNGTVAMAEWDAFCEEQVLDLLGDAERLEKVWVAGSDSAVELAEVNAELVDLTSLVGSSAYRAGSPQREALDARIAALAARQEELEGIEARPSGWEWRETGQRFGDWWREQDTAAKNTWLRSMNVRLTFDVRGGLTRTIDFGDLQEYEQHLRLGSVVERLHTGMS

SEQ ID NO: 12436 - protein, 500 aa, synthetic construct
MRALVVIRLSRVTDATTSPERQLESCRQLCAQRGWDVVGVAEDLDVSGAVDPFDRKRRPNLARWLAFEEQPFDVIVAYRVDRLARSIRHLQRLVHWAEDHKKLVVSATEAHFDTTTPFAAVVIALMGTVAQMELEAIKERNRSAAHFNIRAGKYRGSLPPWGYLPTRVDGEWRLAPDPVQRERILEVYHRVVDNHEPLHLVAHDLNRRGVLSPKDYFAQLQGREPQGRKWSATALKRSMISGAMLGYATLNGKTVRDDDGAPLVRAEPILTREQQEALRAELVKTSRARPAVSTPSLLLRVLFCAVCGEPAYKFAGGGRKHPRYRCRSMGFPKHCGNGTVAMAEWDAFCEEQVLDLLGDAERLEKVWVAGSDSAVELAGVNAELVDLAGLIGSPAYRAGSPQREALDARIAALAARQEELEGLEARPSGWEWRGTGQRFGDWWHEQDTAAKNTWLRSMNVRLTFDVRGGLTRTIDFGDLQEYEQHSRLGSVVERLHTGMS

SEQ ID NO: 12437 - protein, 500 aa, synthetic construct
MRALVVIRLSRVTDATTSPERQLESCQQLCAQRGWGVVGVAEDLDVSGAVDPFDRKRRPNLARWLAFEEQPFDVIVAYRVDRLTRSIRHLQQLVHWAEDHKKLVVSATEAHFDTTTPFAAVVIALMGTVAQMELEAIKERSRSAAHFNIRAGKYRGSLPPWGYLPARVDGEWRLVPDPVQRERILEVYHRVVDNHEPLHLVAHDLNRRGVLSPRDYFAQLRGREPQGRKWSATALKRSMISEAMLGYATLNGKIVRDDDGAPLVRAEPILTREQLEALRAELVKTSRAKPAVSTPSLLLRVLFCAVCGEPAYKFAGGGRKHPRYRCRSMGFPKHCGNGTVTMAEWDAFCEEQVLGLLGDAERLEKVWVAGSDSAVELAEVNAELVDLTSLIGSPAYRAGSPQREALDARIAALAARQEELEGLEARPSGWEWRGTGQRFGDWWREQDTAAKNTWLRSMNIRLTFDVRGGLTRTIDFGDLQEYEQHLRLGSVAERLHTGTS

SEQ ID NO: 12438 - protein, 500 aa, synthetic construct
MRVLVVIRLSRVTDATTSPERQLESCQQLCAQRGWDVVGVAEDLDVSGAVDPFDRKRRPNLARWLAFEEQPFDVIVAYRVDRLARSIRHLQQLVHWAEDHKKLVVSATEAHFDTTTPFAAVVIALMGTVAQMELEAIKERNRSAAHFNIRAGKYRGSLPPWGYLPTRVDGEWRLAPDPVQRERILEVYHRVVDNHEPLHLVAHDLNRRGVLSPKDYFAQLQGREPQGRKWSATALKRSMISGAMLGYATLNGKTVRDDNGAPLVRAEPILTREQQEALRAELVKTSRTKPAVSTPSLLLRVLFCAVCGEPAYKFSGGGRKHPRYRCRSMGYPKHCGNGTVAMAEWDAFCEEQVLDLLGDAERLEKVWVACSDSAVELAEVNAELVDLTSLIGSPAYRAGSQQREALDARIAALAARQEELEGLGARPSGWEWRETGQRFGDWWREQDTAAKNTWLRSMNVRLTFDVRGELTRTIDFGDLQEYEQHLRLGSVVERLHTGMS

SEQ ID NO: 12439 - protein, 500 aa, synthetic construct
MRALVVIRLSRVTDATTSPERQLESCQQLCAQRGWDVVGVAEDLDVSGAVDPFDRKRRPNLARWLAFEEQPFDVIVAYRVDRLARSIRHLQQLVHWAEDHKKLVVSATEAHFDTTTPFAAVVIALMGTVAQMELEAIKERNRSAAHFNIRAGKYRGSLPPWGYLPTRVDGEWRLVPDPVQRERILEVYHRVVDNHEPLHLVAHDLNRRGVLSPKDYFAQLRGREPQGRKWSATALKRSMISEAMLGYATLNGKTVRDDDGAPLVRAEPILTREQLEALRVELVKTSRAKPAVSTPSLLLRVLFCAVCGEPAYKFAGGGRKHPRYRCRSMGFPKHCGNGTVAMAEWDAFCEEQVLDLLGDAERLEKVWVAGSDSAVELAEVNAELVDLTSLIGSPAYRTGSPQREALDARIAALAARQEELEGLGARPSGWEWRETGQRFGDWWREQDTAAKNTWLRSMNVRLTFDVRGGPTRTIDFGDLLEYEQHLRLGSVVERLRTGMS

SEQ ID NO: 12440 - protein, 500 aa, synthetic construct
MRALVVIRLSRVTDATTSPERQLESCQQLCAQRGWDVVGVAEDLDVSGAVDPFDRKRRPNLARWLAFEEQPFDVIVAYRVDRLTRSTRHLQQLVHWAEDHKKLVVSATEAHFDTTTPFAAVVIALMGTVAQMELEAIKERSRSAAHFNIRAGKYRGSLPPWGYLPTRVDGEWRLVPDPVQRERILEVYHRVVDSHEPLHLVAHDLNRRGVLSPRDYFAQLQGREPQGRKWSATALKRSMISGAMLGYATLNGKTVCDDDGAPLVRAEPILTREQLEALRAELVKTSRAKPAVSAPSLLLRVLFCAVCGEPAYKFAGGGRKHPRYRCRSMGFPKHCGNGTVAMAEWDAFCEEQVLDLLGDAERLEKVWVAGSDSAVELAEVSAELVDLTSLIGSPAYRAGSPQREALDARIAALAARQEELEGLGARPSGWEWRETGQRFGDWWREQDTAAKNTWLRSMNVRLTFDVRGGLTRTIDFGDLQEYEQHSRLGSVAERLHTGMS

SEQ ID NO: 12441 - protein, 500 aa, synthetic construct
MRALVVIRLSRVTDATTSPERQLESCQQLCAQRGWDVVGVAEDLDVSGAVDPFDRKRRPNLARWLAFEEQPFDVIVAYRVDRLTRSVRHLQQLVHWAEDHKKLVVSATEAHFDTTTPFAAVVIALMGTVAQMELEAIKERSRSAAHFNIRAGKYRGSLPPWGYLPTRVDGEWRLVPDPVQRERILEVYHRVVDNHEPLHLVAHDLNRLGVLSPKDYFAQLRGREPQGRKWSATALKRSMTSEAMLGYATLNGKTVRDDDGAPLVRAEPILTRGQLEALRAVLVKTSRAKPAVSTPSLLLRVLFCAVCGEPAYRFAGGGRKHPRYRCRSMGFPKHCGNGTVAMTEWDAFCEEQVLDLLGDAERLEKVWVAGSDSAVELAEVNAELVDLTSLIGSPAYRAGSPQREALDARIAALAARQGELEGLEARPSGWEWRETGQRFGDWWREQDTAAKNTWLRSMNVRLTFDVRGGLTRSIDFGDLQVYEQHLRLGSVVERLRTGMS

SEQ ID NO: 12442 - protein, 500 aa, synthetic construct
MRALVVIRLSRVTDATTSPERQLESCQQLCAQRGWDVVGVAEDLDVSGAVDPFDRKRRPNLARWLAFEEQPFDAIVAYRVDRLTRSIRHLQQLVHWAEDHKKLVVSATEAHFDTTTPFAAVVIALMGTVAQMELEAIKERSRSAAHFNIRAGKYRGSLPPWGYLPTRMDGEWRLAPDPVQRERILEVYHRVVDNHEPLHLVAHDLNRRGVLSPKDYFAQLQGREPQGRKWSATALKRSMISKAMLGYATLNGKTVRDDDGAPLVRAEPILTREQLDALRAELVKTSRAKPAVSTPSLLLRVLFCAVCGEPAYKFAGGGRKHPRYRCRSMGFPKHCGNGTVAMAEWDAFCEEQVLDLLGDAERLEKVWVAGADSAVELAEVNAELVDLTSLIGSPAYRAGSPQREALDARIAALAARQEELEGLEARPSGWEWRETGQRFGDWWREQDTAAKNTWLRSMNVRLTFDVRGGLTRTIDFGDLQEYEQHLRLGSVVERLHTGMS

SEQ ID NO: 12443 - protein, 500 aa, synthetic construct
MRALVVIRLSRVTDATTSPERQLESCQQLCAQRGWDVVGVAEDLDVSGAVDPFDRKRRPNLARWLAFEEQPFDVIVAYRVDRLTRSTRHLQQLVHWAEDHRKLVVSATEAHFDTTTPFAAVVIALMGTVAQMELEAIKERSRSAAHFNIRAGKYRGSLPPWGYLPTRVDGEWRLVPDPVQRERILEVYHRVVNNHEPLHLVAHDLNRRGVLSPKDYFAQLQGREPQGRKWSATALKRSMISEAMLGYATLNGKTVRGDDGAPLVRAEPILTREQLEALRAELVKTSRAKPAVSTPSLLLRVLFCAVCGEPAYKFAGGGRKHPRYRCRSMGFPKHCGNGTVAMAEWDAFCEEQVLNLLGDAERLGKVWVAGSDSAVELAEVNAELVDLTSLIGSPAYRAGSPQREALDARIAALAACQEELKGLEARPSGWEWRETGQRFGDWWREQDTAAKNTWLRSMNVRLTFDVRGGLTRTIDFGDLQEYEQRLRLGGVVDRLHTGMS

SEQ ID NO: 12444 - protein, 500 aa, synthetic construct
MRALVVIRLSRVTDATTSPERQLESCQQLCAQRGWDVVGVAEDLDVSGAVDPFDRKRRPNLARWLAFEEQPFDAIVAYRVDRLTRSIRHLQQLVHWAEDHKKLVVSATEAHFDTTTPFAAVVIALMGTVAQMELEAIKERNRSAAHFNIRAGKYRGSLPPWGYLPARVDGVWRLVPDPVQRERILEVYHRVIVNHEPLHLVAHDLNRRGVLSPKDYFAQLQGREPQGRKWSATALKRSMISEAMLGYATLNGKTVRDDDGAPLVRAEPILTREQLEALRAELVKTSRAKPAVSTPSLLLRVLFCAVCGEPAYKFTGGGRKHPRYRCRSMGFPKHCGNGTVAMAEWDAFCEEQVLNLLGNAERLEKVWVAGSDSAVELAEVNAELVDLTSLIGSPAYRAGSPQREALDARIAALAARQEELEGLEARPSGWEWRETGQRFGDWWREQDTAAKNTWLRSMNVRLTFDIRGGLTRTIDFGDLQEYEQHLRSGSVVERLHAGMS

SEQ ID NO: 12445 - protein, 500 aa, synthetic construct
MRALVVIRLSRVTDATTSPERQLESCQQLCAQRGWDVVGVAEDLDVSGAVDPFDRKRRPNLARWLAFEEQPFDVIVAYRVDRLTRSTRHLQQLVHWAEGHKKLVVSATEAHFDTTTPFAAVVIALMGTVAQMELEAIKERSRSAAHFNIRAGKYRGSLPPWGYLPARVDGVWRLVPDPVQRERILEVYHRVVNNHEPLHLVAHDLNRRGVLSPKDYFAQLQGREPQGRKWSATALKRSMISEAMLGYATLNGKTVRDDDGAPLVRAEPILTREQQEALRAELVKTSRAKPAVSTPSLLLRVLFCAVCGEPAYKFAGGGRRHPRYRCRSMGFPKHCGNGTVVMTEWDAFCEEQVLGLLGDAERLEKVWVAGSDSAVELAEVNAELVDLTSLIGSPAYRAGSPQREALDARIAALAARQEELEGLEARPSGWEWRETGQRFGDWWREQDTAAKNIWLRSMNVRLTFDVRGGLTRTIDFGDLQEYEQHSRLGSVVERLHSGMS

SEQ ID NO: 12446 - protein, 500 aa, synthetic construct
MRALVVIRLSRVTDATTSPERQLESCQQLCAQRGWDVVGAAEDLDVSGAVDPFDRKRRPNLARWLAFEEQPFDVIVAYRVDRLTRSIRHLQQLVHWAEDHKKLVVSATEAHFDMTTPFAAVVIALMGTVAQMELEAIKERSRSAAHFNIRAGKYRGSLPPWGYLPTRVDGEWRLAPDPVQRERILEVYHRVVDNHEPLHLVAHDLNRRGVLSPRDYFAQLRGREPQGRKWSATALKRSMISEAMLGYATLNGKTVRDDDGAPLVRAEPILTREQREALRAELVKTSRAKPAVSTPSLLLRVLFCAVCGEPAYKFAGGGRKHPRYRCRSMGFPKHCGNGTVAVAEWDAFCEEQVLDLLGDAERLEKVWVAGSDSAVRLAEVNAELVDLTSLIGSPAYRAGSPQREALDARIAALAARQEELEGLEARPSGWEWRGSGQRFGDWWREQNTAAKNTWLRSMNVRLTFDVRGGLTRTIDFGDLQEYEQYLRLGSVAERLHTGMS

SEQ ID NO: 12447 - protein, 500 aa, synthetic construct
MRALVVIRLSRVTDATTSPERQLESCQQLCAQRGWDVVGVAEDLDVSGAVDPFDRKRRPNLARWLAFEERPFDAIVAYRVDRLTRSIRHLQQLVHWAEDHKKLVISATEAHFDTTTPFAAVVIALMGTVAQMELEAIKERNRSAAHFNIRAGKYRGSLPPWGYLPARVDGEWRLVPDPVQRERILEVYHRVVDNHEPLHLVAHDLNRRGVLSPKDYFAQLRGREPQGRRWSATALKRSMISEAMLGYATLNGKTVRDEDGAPLVRAEPILTRGQLEALRAELVKTSRAKPAVSTPSLLLRVLFCAVCGEPAYKFAGGGRKHPRYRCRSMGFPKHCGNGTVAMAEWDAFCEEQVLNLLGDAERLEKVWVAGSDSAVELAEVNAELVDLTSLIGSPAYRAGSPQREALDARIAALAARQEELEGLEARPSGWEWRETGQRFGDWWREQDTAARNTWLRSMNVRLTFDVRGGLTRTIDFGDLQEYGQHLRLGSVAECLHTGTS

SEQ ID NO: 12448 - protein, 500 aa, synthetic construct
MRALVVIRLSRVTDATTSPERQLESCQQLCAQRGWDVVGVAEDLDVSGAVDPFDRKRRPNLARWLAFEEQPFDAIVAYRVDRLTRSIRHLQQLVHWAEDHKKLVVSATEAHFDTTTPFAAVVIALMGTVAQMELEAIKERNRSAAHFNIRAGKYRGSLPPWGYLPTRVDGEWRLVPDPVQRERILEVYRRVVVNHEPLHLVAHDLNRRGVLSPRDYFAQLQGREPQGRKWSATALKRSMISEAMLGYATLNGKIVRDDDGAPLVRAEPILTREQLEALRAELAKTSRAKPAVSTPSLLLRVLFCAVCGEPAYKFAGGGRKHPRYRCRSMGFPKHCGNGTVAMTEWDVFCEEQVLDLLGDAERLEKVWVAGSDSAVKLAEVNAELVDLTSLIGSPAYRVGSPQREALDARIAALVARQEELEGLEARPSGWEWRETGQRFGDWWREQDTAAKNTWLRSMNVRLTFDVRGGLTRTIDFGDLQEYEQHLRLGSVVERLHTGMS

SEQ ID NO: 12449 - protein, 500 aa, synthetic construct
MRALVVIRLSRVTDATTSPERQLESCQQLCAQRGWDVVGVAEDLDVSGAVDPFDRKRRPNLARWLAFEEQPFDVIVAYRVDRLARSIRHLQQLVHWAEDHKKLVVSATEAHFDTTTPFAAVVIALMGTVAQMELEAIKERNRSAAHFNIRAGKYRGSLPPWGYLPTRVDGEWRLVPDPVQRERILEVYHRVVDNHEPLHLVAHDLNRRGVLSPKDYFAQLRGREPQGRKWSATALKRSMISEAMLGYATLNGTTVRDDDGAPLVRAEPILTREQLEALRAELVKTSRAKPAVSTPSLLLRVLFCAVCGEPAYKFAGGGRKHPRYRCRSMGFPKHCGNGTVAMAEWDAFCEEQVLDLLGDAERLEKVWVAGSDSAVELAEVNAELVDLTSLIGSPAYRAGSPQREALDARIAALAARQEELKGLEARPSGWEWRETGQRFGDWWREQDTAAKNTWLRSMNVRLTFDVRGGLTRTIDFGDLQEYEQHLRLGSVVERLHTGMS

SEQ ID NO: 12450 - protein, 500 aa, synthetic construct
MRALVVIRLSRVTDATTSPERQLESCQQLCAQRGWDVVGVAEDLDVSGAVDPFDRKRRPNLARWLAFEEQPFDVIVAHRVDRLTRSTRHLQQLVRWAEDHKKLVVSATEAHFDTTTPFAAVVIALMGTVAQMELEAIKERSRSAAHFNIRAGKYRGSLPPWGYLPTRVDGEWRLAPDPVQRERILEVYRRLVDNHEPLHLVAHDLNRRGVLSPRDYFAQLRGREPQGRKWSATALKRSMISVAMLGYATLSGKTVRDDDGAPLVRAEPILTREQQEALRAELVKTSRAKPAVSTPSLLLRVLFCAVCGEPAYKFAGGGRKHMRYRCRSMGFPKHCGNGTVAMAEWDAFCEEQVLDLLGDAERLEKVWVAGSDSAVELAEVNAELVDLTSLIGSPAYRAGSPQREALDARIAALAARQEELEGLEARPSGWEWRETGQRFGDWWREQDTAAKNTWLRSMNVRLTFDVRSGLTRTIDFGDLQEYEQHLRLGSVVERLHTGMS

SEQ ID NO: 12451 - protein, 500 aa, synthetic construct
MRALVVIRLSRVTDATTSPERQLESCQQLCAQRGWDVVGVAEDLDVSGAVEPFDRKRRPNLARWLAFEEQPFDVIVAYRVDRLTRSIRHLQQLVHWAEDHKKLVVSATEAHFDTTTPFAAVVIALMGTVAQMELEAIKERSRSAAHFNIRAGKYRGSLPPWGYLPARVDGEWRLVPDPVQRERILEVYHRVVDNHEPLYLVAHDLNRRGVLSPKDYFAQLRGREPQGREWSATALKRSMISKAMLGYATLNGKTVRGDDGAPLVRAEPILTREQQEALRAELVKTSRAKPAVSTPSLLLRVLFCAVCGEPAYKFTGGGRKHPRYRCRSMGFPKHCGNGTVAMAEWDAFCEEQVLGLLGDAERLEKVWVAGSDSAVELAEVNAELVDLTSLIGSPAYRAGSPQREALDARIAALAARQEELEGLETRPSGWEWRETGQRFGDWWREQDTAAKNTWLRSMNVRLTFDVRGGLTRTIDFGDLQEYEQHLRLGSVVKRLRTGMS

SEQ ID NO: 12452 - protein, 500 aa, synthetic construct
MRALVVIRLSRVTDATTSPERQLESCQQLCAQRGWDVVGVAEDLDVSGAVDPFDRKRRPNLARWLAFEEQPFDVIMAYRVDRLARSIRHLQQLVHWAEDHKKLVVSATEAHFDTTTPFAAVVIALMGTVAQMELEAIKERSRSAAHFNIRAGKYRGSLPPWGYLPARVDGEWRLVPDPVQRERILEVYHRVIDNHEPLHLVAHDLNRRGVLSPRDYFAQLRGREPQGRKWSATALKRSMISEAMLGYATLNGKTVRDDDGAPLVRAEPILTREQLEALRAVLVKTSRAKPAVSTPSLLLRVLFCAVCGEPAYKFAGGGRKHPRYRCRSMGFPKHCGNGTVAMAEWDAFCEEQVLNLLGDAERLEKVWVAGSDSAVELAEVNAELVDLTSLIGSPVYRAGSSQREALDARIAALAARQEELEGLEARPSGWEWRETGQRFGDWWREQDTTAKNTWLRSMNVRLTFDVRGELTRTVAFGDLQEYEQHLRLGSVVERLHTGMS

SEQ ID NO: 12453 - protein, 500 aa, synthetic construct
MRALVVIRLSRVTDATTSPERQLESCQQLCAQRGWDVVGVAEDLDVSGAVDPFDRKRRPNLARWLAFEEQPFDVIVAYRVDRLTRSIRHLQQLVHWAEDHKKLVVSATEAHFDTTTPFAAVVIALMGTVAQMELEAIKERSRSAAHFNIRAGKYRGSLPPWGYLPTRVDGEWRLVPDPVQRERILEVYRRVVDNHEPLHLVAHDLNRRGVLSPKDYFAQLRGREPQGRKWSATALKRSMISEAMLGYVTLNGKTVRDDDGAPLVRAEPILTREQLEALRAELVKTSRAKPAVSTPSLLLRVLFCAVCGEPAYKFAGGGRKHPRYRCRSMGFPEHCGNGTVAMAEWDAFCEEQVLGLLGDAERLEKVWVAGSDSAVELAEVNAELVDLTSLIGSPAYRAGSPQREALDARIAALAARQEELEGLEARPSGWEWRETGQRFGDWWREQDTAAKNTWLRSMNVRLTFDVRGGLTRTIDFGDLQEYEQHLRLGSVVERLHTGMS

SEQ ID NO: 12454 - protein, 500 aa, synthetic construct
MRALVVIRLSRVTDATTSPERQLESCQQLCAQRGWDVVGVAEDLDVSGAVDPFDRKRRPNLARWLAFEEQPFDVIVAYRIDRLTRSIRHLQQLVHWAEDHKKLVVSATEAHFDTTTPFAAVVIALMGTVAQMELEAIKERNRSAAHFNIRAGKYRGSLPPWGYLPTRVDGEWRLAPDPVQRKRILEVYHRVVDNHEPLHLVAHDLNRRGVLSPKDYFAQLQGREPQGRKWSATALKRSMISEAMLGYATLNGKIVRDDDGAPLVRAEPILTREQLEALRAELVKTSRAKPAVSTPSLLLRVLFCAVCGEPAYKFTGGGRKHPRYRCRSMGFPKHCGNGTVAMAEWDAFCEEQVLVLLGDAERLEKVWVAGSDSTVELAEVNAELVDLASLIGSPAYRAGSPQREALDARIAALVARQEELEGLEARPSGWEWRETGQRFGDWWREQDTAAKNTWLRSMNVRLTFDVRGGLTRTIDFGDLQEYEQHLRLGSVVERLYTGMS

SEQ ID NO: 12455 - protein, 500 aa, synthetic construct
MRALVVIRLSRVTDATTSPERQLESCQQLCAQRGWVVVGVAEDLDVSGAVDPFDRKRRPNLARWLAFEEQPFDVIVAYRVDRLARSIRHLQQLVHWAEDNKKLVVSATEAHFDTTTPFAAVVIALMGTVAQMELEAIKERNRSAAHFNIRAGKYRGSLPPWGYLPTRVDGEWRLVPDPVQRERILEVYHRVVDNHEPLHLVAHDLNRRGVLSPRDYFAQLQGREPQGRKWSATALKRSMISGAMLGYATLNGKTVRVDDGAPLVRAEPILTREQLEALRAELVKTSRTEPAVSTPSLLLRVLFCAVCGEPAYKFSGGGRKHPRYRCRSMGFPKHCGNGTVAMAEWDAFCEEQVLNLLGDAERLEKVWVAGSDSAVELAEVNAELVDLTSLIGSPAYRAGSPQREALDARIAALAARQEELEGLEARPSGWVWRETGQRFGDWWREQDTAAKNTWLRSMNVRLTFDVRGGLTRTIDFGDLQEYEQHLRLGSVVERLHTGMS

SEQ ID NO: 12456 - protein, 500 aa, synthetic construct
MHALVVIRLSRVTDATTSPERQLESCQQLCAQRGWDVVGVAEDLDVSGAVDPFDRKRRPNLARWLAFEEQPFDVIVAYRVDRLTRSVRHLQQLVHWAEDHKKLVVSATEAHFDTTTPFAAVVIALMGTVAQMELEAIRERSRSAAHFNIRAGKYRGSLPPWGYLPARVDGVWRLVPDPVQRERILEVYHRVVDNHEPLHLVAHDLNRRGVLSPKDYFAQLRGREPQGREWSATALKRSMTSEAMLGYATLDGKIVRDDDGAPLVRAEPILTREQLEALRAELVKTSRAKPAVSTPSLLLRVLFCAVCGEPAYKFAGGGRKHPRYRCRSMGFPKHCGNGTVAMAEWDTFCEEQVLDLLGDAERLEKVWVAGSDSAVELAEVNAELVDLTSLIGSPAYRAGSPQREALDARIAALAARQEELEGLGARPSGWEWRETGQRFGGWWREQDTVAKNTWLRSMNVRLTFDVRGGLTRTIDFGDLQEYEQHLRLGSVVERLHTGMS

SEQ ID NO: 12457 - protein, 500 aa, synthetic construct
MRALVVIRLSRVTDATTSPERQLESCQQLCAQRGWDIVGVAEDLDVSGAVDPFDRKRRPNLARWLAFEEQPFDVIVAYRVDRLARSIRHLQQLVHWAEDHKKLIVSATEAHFDTTTPFAAVVIALMGTVAQMELEAIKERSRSAAHFNIRAGKYRGSLPPWGYLPTRVDGEWRLVPDPVQRERILEVYHRVVDNHEPLHLVAHDLNRRGVLSPRDYFAQLQGREPQGRKWSATALKRSMISGAMLGYATLNGKTVRDDDGAPLVRAEPILTREQLEALRAELVKATRAKPAVSTPSLLLRVLFCAVCGEPAYKFAGGGRKHPRYRCRSMGFPKHCGNGTVAMAEWDAFCEEQVLNLLGDAERLEKVWVAGSDSAVELAEVNAELVDLTSLIGSPAYRAGSPQREALDARIAALAARQEELEGLEARPSGWEWRETGQRFGDWWREQDTAAKNTWLRSMNVRLTFDVRGGLTRTIDFGDLQEYEQHLRLGSVAERLHTGMS

SEQ ID NO: 12458 - protein, 500 aa, synthetic construct
MRALVVIRLSRVTDATTSPERQLESCQQLCAQRGWDVVGVAEDLDVSGAVDPFDRKRRPNLARWLAFEEQPFDVIMAYRVDRLARSIRHLQQLVHWAEDHKKLVVSATEAHFDTTTPFAAVVIALMGTVAQMELEAIKERNRSAAHFNIRAGKYRGSLPPWGYLPTRVDGEWRLVPDPVQRERILEVYHRVVDNHEPLHLVAHDLNRRGVLSPKDYFAQLRGREPQGRKWSATALKRSMTSEAMLGYATLNGRTVRDDDGAPLVRAEPILTREQLEALRAELVKTSRAKPAVSTPSLLLRVLFCAVCGEPAYKFAGGGRKHPRYRCRSMGFPKHCGNGTVAMAEWDAFCEKQVLDLLGDAERLEKVWVTGSDSAVELAEVNAELVDLTSLIGSPAYRASSPQREALDARIAALAARQEELEGLEARPSGWEWRETGQRFGDWWREQDTAAKNTWLRSMNVRLTFDVRGELTRTTDFGDLQEYEQHLRSGSVVERLHTGMS

SEQ ID NO: 12459 - protein, 500 aa, synthetic construct
MRALVVIRLSRVTEATTSPERQLESCQQLCAQRGWDVVGVAEDLDVSGAVDPFDRKRRPNLARWLAFEEQPFDAIVAYRVDRLTRSIRHLQQLVHWAEDHKKLVVSATEAHFDTTTPFAAVVIALMGTVAQMELEAIKERNRSAAHFNIRAGKYRGSLPPWGYLPARVDGEWRLVPDPVQRERILEVYHRVVDNHEPLHSVAHDLNRRGVLSPKDYFAQLQGREPQGRKWSATALKRSMISEAMLGYTTLNGKIVRDDNGAPLVRAEPILTREQLEALRAELVKTSRAKPAVSTPSLLLRVLFCAVCGEPAYKFAGGGRKHMRYRCRSMGFPKHCGNGTVAMAEWDAFCEEQVLDLLGDVERLEKVWVAGSDSAIELAEVNAELVDLTSLIGSPAYRAGSPQREALDARIAALAARQEELEGLEARPSGWEWRETGQRFGDWWREQDTAAKNTWLRSMNVRLTFDVRGGLTRTIDFGDLQEYEQHLRLGNAVERLHTGMS

SEQ ID NO: 12460 - protein, 500 aa, synthetic construct
MRALVVIRLSRVTDATTSPERQLESCQQLCAQRGWDVVGVAEDLDVSGAVDPFDRKRRPNLARWLACEEQPFDVIVAYRVDRLTRSTRHLQQLVHWAEDHKKLVVSATEAHFDTTTPFAAVVIALMGTVAQMELEAIKERSRSAAHFNIRAGKYRGSLPPWGYLPTRVDGEWRLVPDPVQRERILEVYRRVVDNHEPLHLVAHDLNRRGVLSPKDYFAQLRGREPQGRKWSATALKRSMISEAMLGYATLNGKTVRDDDGAPLVRAEPILTREQLEALRAGLVKTSRAKPAVSTPSLLLRVLFCAVCGEPAYKFAGGGRKHSRYRCRSMGFPKHCGNGTVAMAEWDAFCEEQVLDLLGDAERLEKVWVAGSDSAAELAEVNAELVDLTSLIGSPAYRAGSPQREALDARIAALAARQEELEGLEARPSGWEWRETGQRFGDWWREQDTAAKNTWLRSMNVRLTFDVRGGLTRTIDLGDLQEYKQHLRLGSVVERLQTGMS

SEQ ID NO: 12461 - protein, 500 aa, synthetic construct
MRALVVIRLSRVTDATTSPERQLESCQQLCAQRGWDVVGVAEDLDVSGAVDPFDRKRRPNLARWLAFEEQPFDVIVAYRVDRLTRSTRHLQQLVHWAEDHKKLVVSATEAHFDTTTPFAAVVIALMGTVAQMELEAIKERNRSAAHFNIRAGKYRGSLPPWGYLPMRVDGEWRLVPDPAQRERILEVYHRVVDNHESPHLVAHDLNRRGVLSPKDYFAQLRGREPQGRKWSATALKRSMISEAMLGYATLNGKIVRGDDGAPLVRAEPILTREQLEALRAELVKTSRAKPAVSTPSLLLRVLFCAVCGEPAYKFAGGGRKHPRYRCRSMGFPKHCGNGTVAMAEWDAFCEEQVLNLLGDAGRLEKVWVAGSDSAVELAEVNAELVDLTSLIGSPAYRAGSLQREALDARIAALAARQEELEGLEARPSGWEWRETGQRFGDWWREQDTAAKNTWLRTMNVRLTFDVRGGLTRTIDFGELLEYEQHLRSGSVVERLHTGMS

SEQ ID NO: 12462 - protein, 500 aa, synthetic construct
MRALVVIRLSRVTDATTSPERQLESCQQLCAQRGWDVVGVAEDLDVSGAVDPFDRKRRPNLARWLAFEEQPFDVIVAYRVDRLTRSTRHLQQLVHWAEDHKKLVASATEAHFDTTTPFAAVVIALMGTVAQMELEAIKERSRSAAHFNIRAGKYRGSLPPWGYLPARVDGEWRLVPDPVQRERILEVYHRVVDNHEPLHLVAHDLNRRGVLSPKDYFAQLQGREPQGRKWSATALKRSMISGAMLGYATLSGKTVRDDDGAPLVRAEPILTREQQEALRAELVETSRAKPAVSTPSLLLRVLFCAVCGEPAYKFTGGGRKHSRYRCRSMGFPKHCGNGTVAMAEWDAFCEEQVLNLLGDAGRLEKVWVAGSDSAVELAEVNAELVDLTSLIGSPAYRAGSPQRGALDARIAALAARQEELEGLEARPSGWEWRETGQGFGDWWREQDTAAKNIWLRLMNVRLTFDVRGGLTRTIDFGDLQEYEQHLRLGGVVERLHTGMS

SEQ ID NO: 12463 - protein, 500 aa, synthetic construct
MRALVVIRLSRVTDATTSPERQLESCQQLCAQRGWDVVGVAEDLDVSGAVDPFDRKRRPNLARWLAFEEQPFDAIVAYRVDRLTRSIRHLQQLVHWAEDHKKLVVSATEAHFDTTTPFAAVVIALMGTVAQMELEAIKERNRSAAHFNIRAGKYRGSLPPWGYLPTRVDGEWRLAPDPVQRERILEVYHRVVDDHEPLHSVAHDLNRRGVLSPKDYFAQLRGREPQGRKWSATALKRSMISEAMLGHATLNGKTVRDGDGAPLVRAEPILTRGQLEALRAELVKTSRAKPAVSTPSLLLRVLFCAVCGEPAYKFSGGGRKHPRYRCRSMGFPKHCGNGTVAMAEWDAFCEEQVLDLLGDAERLEKVWVAGSDSAVELAEVNAELVDLTSLIGSPAYRAGSPQRETLDARIAALAARQEELEGLEARPSGWEWRETGQRFGDWWRVQDTAAKNTWLRSMNVRLTFDVRGGLTRTIDFGDLQEYEQHLRLGSVVERLHTGMS

SEQ ID NO: 12464 - protein, 500 aa, synthetic construct
MRALVVIRLSRVTDATTSPERQLESCQQLCAQRGWDVVGVAEDLDVSGAVDPFDRKRRPNLARWLAFEEQPFDVIVAYRVDRLTRSTRHLQQLVHWAEDHKKLVVSATEAHFDTTTPFAAIVIALMGTVAQMELEAIKERTRSAAHFNIRAGKYRGSLPPWGYLPARVDGEWCLAPDPVQRERILEVYHRVVDNHEPLHLVAHDLNRRGVLSPRDYFAQLQGREPQGRKWSATALKRSMISEAMLGYATLNGKTVRDDDGAPLVRAEPILTREQLEALRAELVKTSRAKPAVSTPSLLLRVLFCAVCGEPAYKFAGGGRKHPRYRCRSMGFPKHCGNGTVAMAGWDAFCEEQVLDLLGDAERLEKVWVAGSDSAVELAEVNAELVDLTSLIGSPAYRAGSPQREALDARIAALAARREELEGLEARPSGWEWRGTGQRFGDWWREQDTAAKNTWLRSMNVRLTFDVRGGLTRTIDFGDLQEYEQHLRSGSEVERLHTGMS

SEQ ID NO: 12465 - protein, 500 aa, synthetic construct
MRALVVIRLSRVTDATTSPERQLESCQQLCAQRGWDVVGVAEDLDVSGAVDPFDRKRRPNLARWLAFEKQPFDAIVAYRVDRLTRSIRHLQQLVHWAEDHKKLVVSATEAHFDTTTPFAAVVIALMGTVAQMELEAIKERNRSAAHFNIRAGKYRGSLPPWGYLPTRVDGEWRLVPDPVQRERILEVYHRVVDNHEPLHLVAHDLNRRGVLSPKDYFAQLRGREPQGRKWSATALKRSMISEAMLGYATLNGKTVRDDDGAPLVRAEPILTRGQLEALRAELVKTSRAKPAVSTPSLLLRVLFCAVCGEPAYKFAGGGRKHPRYRCRSMGFPKHCGNGTVAMAEWDAFCEEQVLDLLGDAERLEKAWVAGSDSAVELAEVNAELVDLTSLIGSPAYRAGSPQREALDARIAALAARQEELEGLEARPPGWEWRETGQRFGDWWREQDTAAKNTWLRSMNVRLTFDVRGGLTRTIDFGDLLEYERHLRLGSVVERLHTGMS

SEQ ID NO: 12466 - protein, 500 aa, synthetic construct
MRALVVIRLSRVTDATTSPERQLESCQQLCAQRGWDVVGVAEDLDVSGAVDPFDRKRRPNLARWLAFEEQPFDAIVAYRVDRLTRSIRHLQQLVHWAEDHKKLVVSATEAHFDTTTPFAAVVIALMGTVAQMELEAIKERTRSAAHFNIRAGKYRGSLPPWGYLPTRVDGEWRLAPDPMQRERILEVYHRVVDNHEPLHLVAHDLNRRGVLSPKDYFAQLRGREPQGRKWSATALKRSMTSEAMLGYATLNGETVRDDDGAPLVRAEPILTREQLEALRAELVKTSRAKPAVSTPSLLLRVLFCAVCGEPAYKFAGGGRKHPRYRCRSMGFPKHCGNGTVAMAEWDAFCEEQVLGLLGDAERLEKVWVAGSDSAIELAEVNAELVGLTSLIGSPAYRAGSPQREALDARIAALAARQEELEGLEARPSGWEWRETGQRFGDWWREQDTAAKNTWLRSMNVRLTFDVRGGLTRTIDFGDLQEYEQHLRLGSVVGRLHTGVS

SEQ ID NO: 12467 - protein, 500 aa, synthetic construct
MRALVVIRLSRVTDATTSPERQLESCQQLCAQRGWDVVGVAEDLDVSGAVDPFDRKRRPNLARWLAFEEQPFDVIVAYRVDRLTRSVRHLQQLVHWAEDHKKLVVSATEAHFDTTTPFAAVVIALMGTVAQMELEAIKERSRSAAHFNIRAGKYRGSLPPWGYLPARVDGEWRLVPDPVQRERILEVYHRVVDNHEPLHLVAHDLNRRGVLSPKDYFAQLRGREPQGRKWSATALKRSMISEAMLGYATLNGKTVRGDDGAPLVRAEPILTREQLEALRAELVKASRAKPAVSTPSLLLRVLFCAVCGEPAYKFAGGGRKHPRYRCRSMGSPKHCGNGTVAMAEWDAFCEEQVLNLLGDTERLEKVWVAGSDSAVELAEVNAELVDLTSLIGSPAYRAGSPQREALDARIAALAARQEELEGLEARPSGWEWRETGQRFGDWWREQDTAAKNTWLRSMNVRLTFDVRGGLTRTIDFGDLQECEQHLRLGSVVERLHTGTS

SEQ ID NO: 12468 - protein, 500 aa, synthetic construct
MRTLVVIRLSRVTDATTSPERQLESCQQLCAQRGWDVVGVAEDLDVSGAVDPFDRKRRPNLARWLAFEEQPFDVIVAYRVDRLTRSVRHLQQLVHWAEDHKKLVVSATEAHFDTTTPFAAVVIALMGTVAQMELEAIRERSRSAAHFNIRAGKYRGSLPPWGYLPARVDGVWRLVPDPVQRERILEVYHRVVDNHEPLHLVAHDLNRRGVLSPKDYFAQLRGREPQGRKWSATALKRSMISEAMLGYATLNGKTVRDDDGAPLVRAEPILTREQLEALRAELVKTSRAKPAVSTPSLLLRVLFCAVCGEPAYKFSGGGRKHPRYRCRSMGFPKHCGNGTVAMAEWDAFCEEQVLNLLGDAERLEKVWVAGSDSAVELAEVNAELVDLTSLIGSPAYRVGSPQREALDARIAALAARQEELEGLEARPSGWEWRETGQRFGDWWREQDTAAKNTWLRSMNVRLTFDVRGGLTRTINFGDLQEYEQHLRLGSVVERLHTGMS

SEQ ID NO: 12469 - protein, 500 aa, synthetic construct
MRALVVIRLSRVTDATTSPERQLESCQQLCAQRGWDVVGVAEDLDVSGAVDPFDRKRRPNLARWLAFEEQPFDVIVAYRVDRLARSIRYLQQLVHWAEDHKKLVVSATEAHFDTTTPFAAVVIALMGTVAQMELEAIKERSRSAAHFNIRAGKYRGSLPPWGYLPTRVDGEWRLAPDPVQRERILEVYHRVVDNHEPLHLVAHDLNRRGVLSPKDYFAQLQGREPQGRKWSATALKRSMISGAMLGYATLSGKTVRDDDGAPLVRAEPILTREQQEALRAELVGTSRAKPAVSTPSLLLRVLFCAVCGEPAYKFTGGGRKHSRYRCRSMGFPKHCGNGTVAMAEWDAFCEEQVLNLLGDAGRLEKVWVAGSDSAVELAEVNAELVDLTSLIGSPAYRAGSPQRGALDARIAALAARQEELEGLEARPSGWEWRETGQRFGDWWRGQDTAAKNIWLRSMNVRLTFDVRGGLTRTIDFGDLQEYEQHLRLGGVVERLHTGMS

SEQ ID NO: 12470 - protein, 500 aa, synthetic construct
MRALVVIRLSRVTDATTSPERQLESCQQLCAQRGWDVVGIAEDLDVSGAVDPFDRKRRPNLARWLASEEQPFDVIVAYRVDRLTRSTRHLQQLVHWADDHKKLVVSATEAHFDTTTPFAAVVIALMGTVAQMELEAIKERSRSAAHFNIRAGKYRGSLPPWGYLPTRVDGVWRLVPDPVQRERILEVYHRVVNSHEPLHLVAHDLNRRGVLSPKDYFAQLQGREPQGRKWSATALKRSMISGAMLGYATLNGKTVRDGDGAPLVRAEPILTREQQEALRAELVKTSRAKPAVSTPSLLLRVLFCAVCGEPAYKFAGGGRKHPRYRCRSMGFPKHCGNGTVAMAEWDAFCEEQVLDLLGDAERLEKVWVAGSDSAVELAEVNAELVDLTSLIGSPAYRAGSPQREALDARIAALAARQEELEGLEARPSGWEWRETGQRLGDWWREQDTATKNTWLRSMNVRLTFDVRGGLIRTVDFGDLQEYEQHLRLGSVVERLHTGMS

SEQ ID NO: 12471 - protein, 500 aa, synthetic construct
MRALVVIRLSRVTDATTSPERQLESCQQLCAQRGWNVVGVAEDLDVSGAVDPFDRKRRPNLARWLAFEEQPFDVIVAYRVDRLARSVRHLQQLVRWAEDHKKLVVSATEAHFDTTTPFAAVVIALMGTVAQMELEAIKERSRSAAHFNIRAGKYRGSLPPWGYLPMRVDGEWRLVPDPVQRERILEVYHRVVDNHEPLHLVAHDLNRRGVLSPKDYFAQLQGREPQGRKWSATALKRSMISVAMLGYATLNGKTVRDDDGAPLVRAEPILTREQLEALRAELVKTSRAKPAVSTPSLLLRVLFCAVCGEPAYKFAGGGRKHPRYRCRSMGFPKHCGNGTVAMAEWDAFCEEQVLNLLGDAERLEKVWVAGSDSAVELAEVNAELVDLTSLIGSPAYRAGSLQREALDARIAALAARQEELEGLEARPSGWEWRETGQRFGDWWREQDTAAKNTWLRSMGVRLTFDVHGGLTRTIDFGDLQEYEQHLRLGSVVERLHTGMS

SEQ ID NO: 12472 - protein, 500 aa, synthetic construct
MRALVVIRLSRVTDATTSPERQLESCQQLCAQRGWDVVGVAEDLDVSGAVDPFDRKRRPNLARWLAFEEQPFDVIVAYRVDRLTRSTRHLQQLVHWAEGHKKLVVSATEAHFDTTTPFAAVVIALMGTVAQMELEAIKERSRSAAHFNIRAGKYRGSLPPWGYLPTRVDGEWRLVPDPVQRERILEVYHRVVDNHEPLHLVAHDLNRRGVLSPKDYFAQLRGREPQGRKWSATALKRSMISEAMLGYATLNGKIVRDDDGAPLVRAEPILTREQLEALRAELVKTSRAKPAVSTPSLLLRVLFCAVCGEPAYKFAGGGRKHPRYRCRSMGFPKHCGNGTVAMAEWDAFCEEQVLDLLGDAERLEKVRVAGSDSAVELAEVNAELVDLTSLIGSPTHRAGSPQREALDARIAALAARQEELEGLEARLSGWEWRETGQRFGDWWREQDTAAKNTWLRSMNVRLTFDVRGGLTRTIDFGDLQEYEQHLRLGSVVERLHTGML

SEQ ID NO: 12473 - protein, 500 aa, synthetic construct
MRALVVIRLSRVTDATTSPERQLESCQQLCAQRGWDVVGVAEDLDVSGAVDPFDRKRRPNLARWLAFEEQPFDVVVAYRVDRLARSIRHLQQLVHWAEDHKKLVVSATEAHFDTTTPFAAVVIALMGTVAQMELEAIKERSRSAAHFNIRAGKYRGSLPPWGYLPTRVDGEWRLVPDPVQRERILEVYHRVVDDHEPLHLVAHDLNRRGVLSPKDYFAQLQGREPQGRKWSATALKRSMVSVAMLGYATLNGKTVRDDDGAPLVRAEPILTREQLEAIRAELVKTSRAKPAVSTPSLLLRVLFCAVCGEPAYKFAGGGRKHPRYRCRSMGFPKHCGNGTVAMAEWDAFCEEQVLDLLGDAERLEKVWVAGSDSAVELAEVNAELVDLTSLIGSPAYRAGSPQREALGARIAALAARREELEGLEARPSGWEWRETGQRFGDWWREQDTAAKNTWLRSMNVRLTFDVRGGLTRTIDFGELQEYEQHLRLGSVVERLHTGMS

SEQ ID NO: 12474 - protein, 500 aa, synthetic construct
MRALVVIRLSRVTDATTSPERQLESCQQLCTQRGWDVVGVAEDLDVSGAVDPFDRKRRPNLARWLAFEEQPFDVIVAYRVDRLTRSTRHLQQLVHWAEDHKKLVVSATEAHFDTTTPFAAVVIALMGTVAQMELEAIKERNRSAAHFNIRAGKYRGSLPPWGYLPTRVDGEWRLVPDPVQRERILEVYHRVVDNHEPLYLVAHDLNRRGVLSPRDYFAQLRGREPQGRKWSATALRRSMISEAMLGYATLNGKTVRDDDGAPLVRAEPILTREQLEALRAELDKTSRAKPAVSTPSLLLRVLFCAVCGEPAYKFAGGGRKHPRYRCRSMGFPKHCGNGTVAMAEWDAFCEEQVLDLLGDAERLEKVWVAGSDSAVELAEVNAELVGLTSLIGSPAYRAGSPQREALDARIAALAARQEELEGLEARPSGWGWRETGQRFGDWWREQDTAAKNTWLRSMNVRLTFDVRGGLTRTIDFGDLQEYEQHLRSGSVVERLHTGMS

SEQ ID NO: 12475 - protein, 500 aa, synthetic construct
MRALVVIRLSRVTDATTSPERQLESCQQLCAQRGWDVVGVAEDLDVSGAVDPFDRKRRPNLARWLAFEEQPFDVIVACRVDRLTRSVRHLQQLVHWAEDHKKLVVSATEAHFDTTTPFAAVVIALMGTVAQMELEAIKERSRSAAHFNIRAGKYRGSLPPWGYLPTRVDGEWRLAPDPVQRERILEVYHRVVDNHEPLRSVAHDLNRRGVLSPKDYFARLQGREPQGRKWSATALKRSMISEAMLGYATLNGKIVRDDNGAPLVRAEPILTREQLEALRAELVKTSRAKPAVSTPSLLLRVLFCAVCGEPAYKFAGGGRRHPRYRCRSMGFPKHCGNGTVAMAEWDAFCEEQVLNLLGDAERLEKVWVAGSDSAVELAEVNVELVDLTSLISSPAYRAGSPQREALDARIAALAARQEELEGLEARPSGWEWRETGQRFRDWWREQDTAAKNTWLRSMNVRLTFDVRGGLTRTIDFGDLQEYEQHLRLGSVVERLHTGMS

SEQ ID NO: 12476 - protein, 500 aa, synthetic construct
MRALVVIRLSRVTDATTSPERQLESCQRLCAQRGWDVVGVAEDLDVSGAVDPFDRKRRPNLARWLAFEEQPFDVIVAYRVDRLARSVRHLQQLVHWAGDHKKLVVSATEAHFDTTTPFAAVVIALMGTVAQMELEAIKERSRSAAHFNIRAGKYRGSLPPWGYLPARVDGVWRLVPDPVQRERILEVYHRVVDNHEPLHLVAHDLNRRGVLSPKDYFAQLQGREPQGRKWSATALKRSMTSEAMLGYATLNGKTVRDDDGAPLVRAEPILTREQLEALRAELVKTSRAKPAVSTPSLLLRVLFCAVCGEPAYKFSGGGRKHPRYRCRSMGFPKHCGNGTVAMAEWDAFCEEQVLDLLGDAERLEKVWVAGSDSAVELAEVNAELVDLTSLIGSPAYRAGSPQREALDARIAALAARQEELEGLEARPSGWEWRGTGQRFGDWWREQDTAAKNTWLRSMNVRLTFDVRGGLTRTIDFGDLQEYEQHLRLGSVVERLHTGRS

SEQ ID NO: 12477 - protein, 500 aa, synthetic construct
MRALVVIRLSRVTDATTSPERQLESCQQLCAQRGWDVVGVAEDLDVSGAVDPFDRKRRPNLARWLAFEEQPFDVIVAYRVDRLARSIRHLQQLVHWAEDHKKSVVSATEAHFDTTTPFAAVVIALMGTVAQMELEAIKERNRSAAHFNIRAGKYRGSLPPWGYLPARVDGEWRLVPDPVQRERILEVYHRVVDDHEPLHLVAHDLNRRGVLSPKDYFAQLRGREPQGRKWSATALKRSMISEAMLGYATLNGKTVRDDDGAPLVRAEPILTREQQEALRAELVKTSRAKPAVSTPSLLLRVLFCAVCGEPAYKFVGGGRKHPRYRCRSMGFPEHCGNGTVAMAEWDAFCEEQVLDLLGDAERLEKVWVAGSDSAVELAEVNAELVDLTSLIGSPAYRAGSPQREALDARIAALAARQEELEGLEARPSGWEWRGTGQRFGDWWREQDTAAKNTWLRSMNVRLTFDVRGGLTRTIDFGDLQEYEQHLRLGSVVERLHTGMS

SEQ ID NO: 12478 - protein, 500 aa, synthetic construct
MRALVVIRLSRVTDATTSPARQLESCQQLCAQRGWDIVGVAEDLDVSGAVDPFDRKRRPNLARWLAFEEQPFDVIVAYRVDRLARSIRHLQQLVHWAEDHKKLVVSATEAHFDTTTPFAAVVIALMGTVAQMELEAIKERNRSAAHFNIRAGKYRGSLPPWGYLPARVDGVWRLVPDPVQRERILEVYHRVVNNHEPLHLVAHDLNRRGVLSPKDYFAQLQGREPQGRKWSATALKRSMISEAMLGYATLNGKTVRDDDGAPLVRAEPILTREQQEALRAELAKTSRAKPAVSTPSLLLRVLFCAVCGEPAYKFAGGGRKHPRYRCRSMGLPKHCGNGTVAMAEWDAFCEEQVLGLLGDAERLEKVWVAGSDSAVELAEVNAELVDLTSLIGSPAYRAGSPQREALDARIAALAARQEELEGLEARPSGWEWRETGQRFGDWWREQDTAAKNTWLRSMNARLTFDVRGELTRTIDFGDLQEYEQHLRSGSVVGRLHTGMS

SEQ ID NO: 12479 - protein, 500 aa, synthetic construct
MRALVVIRLSRVTDATTSPERQLESCQQLCAQRGWDVVGVAEDLDVSGAVDPFDRKRRPNLARWLAFEEQPFDVIVAYRVDRLARSIRHLQQLVHWAEDHKKLVVSATEAHFDTTTPFAAVVIALMGTVAQMELEAIRERNRSAAHFNIRAGKYRGSLPPWGYLPTRVDGEWRLAPDPVQRERILEVYHRVVDDHEPLHSVAHDLNRRGVLSPRDYFAQLQGREPRGRKWSATALKRSMISEAMLGYVTLNGKTVRDDDGAPLVRAEPILTREQLEALRAELVKTSRAKPAVSTPSLLLRVLCCAVCGEPAYKFAGGGRKHPRYRCRSMGFPKHCGNGTVAMAEWDTFCEEQVLDLLGDAERLEKVWVAGSDSAVELAEVNAELVDLTSLIGSPAYRAGSPQREALDARIAALAARQEELEGLEARPSGWEWRETGQRFGDWWREQDTAAKNTWLRSMNVRLTFDVRGGLTRTIDFGDLQEYEQHLRLGSVVERLHTGMS

SEQ ID NO: 12480 - protein, 500 aa, synthetic construct
MRALVVIRLSRVTDATTSPERQLESCQQLCAQRGWDVVGVAEDLDVSGAVDPFDRKRRPNLARWLAFEEQPFDVIVAYRVDRLTRSTRHLQRLVHWAEDHKKLVVSATEAHFDTTTPFAAVVIALMGTVAQMELEAIKERSRSAAHFNIRAGKYRGSLPPWGYLPTRVDGEWRLAPDPVQRERILEVYHRVVDNHEPLHLVAHDLNRRGVLSPRDYFAQLQGREPQGRKWSATALKRSMVSEAMLGYATLNGKTVRDDDGAPLVRAEPILTREQLEALRAELAKTSRAKPAVSTPSLLLRVLFCAVCGEPAYKFAGGGRKHPRYRCRSMGFPKHCGNGTVAMAEWDAFCEEQVLDLLGDAERLEKVWVAGSDSAVELAEVNAELVDLTSLIGSPDYRAGSPQREALDARIAALAARQEELEGLEARPSGWEWRETGQRFGDWWREQDTAAKNTWLRSMNVRLTFDVRGGLTHTIDFGDLQEYEQHLRLGSVVGRLHTGMS

SEQ ID NO: 12481 - protein, 500 aa, synthetic construct
MRTLVVIRLSRVTDATTSPERQLESCQQLCAQRGWDVVGVAEDLDVSGAVDPFDRKRRPNLARWLAFEEQPFDVIVAYRVDRLTRSIRHLQQLVHWAEDHKKLVVSATEAHFDTTTPFAAVVIALMGTVAQMELEAIKERNRSAAHFNIRAGKYRGSLPPWGYLPARVDGEWRLVPDPVQRERILEVYHRVVDNHEPLHLVAHDLNRRGALSPKDYFAQLRGREPQGRKWSATALKRSMISVAMLGYATLNGKTVRDDNGAPLVRAEPILTREQLEALRAELAKTSRAKPAVSTPSLLLRVLFCAVCGEPAYKFAGGGRKHPRYRCRSMGFPKHCGNGTVAMAEWDAFCEEQVLNLLGDAERLEKVWVAGSDSAVELAEVNAELVDLTSLIGSPVYRAGSPQREALDARIAALAARQEELEGLEARPSGWEWHETGQRFGDWWREQDTAAKNAWLRSMDVRLTFDARGGLTRTIDFGDLQEYEQHLRLGSVIERLHTGMS

SEQ ID NO: 12482 - protein, 500 aa, synthetic construct
MRALVVIRLSRVTDATTSPERQLESCQQLCAQRGWDVVGVAEDLDVSGAVDPFDRKRRPNLARWLAFEEQPFDAIVAYRVDRLTRSIRHLQQLVHWAEDHKKLVVSATEAHFDTTTPFAAVVIALMGTVAQMELEAIKERSRSAAHFNICAGKYRGSLPPWGYLPARVDGVWRLVPDPVQRERILEVYHRVVNNHEPLHLVAHDLNRRGVLSPKDYFAQLQGREPQGRKWSATALKRSMISEAMLGYATLNGKTVRDDDGAPLVRAEPILTGEQQEALRAELVKTSRAKPAVSTPSLLLRVLFCAVCGEPAYKFAGGGRKHPRYRCRSMGFPKHCGNGTVAMAEWDAFCEEQVLGLLGDAERLEKVWVAGSDSAVELAEVNAELVDLTSLIGSPAYRAGSPQREALDARIAALAARQEELEGLEARPSGWEWRETGQRFGDWWREQDTAAKNTWLRSMNVRLTFDARGGLTRTIDFGDLQEYEQHLRLGSVAERLHTGMS

SEQ ID NO: 12483 - protein, 500 aa, synthetic construct
MRALVAIRLSRVTDATTSPERQLESCQQLCAQRGWDVVGVAEDLDVSGAVDPFDRKRRPNLARWLTFEEQPFDVIVAYRVDRLTRSVRHLQQLVHWAEDHKKLVVSATEAHFDTTTPFAAVVIALMGTVAQMELEAIRERSRSAAHFNIRAGKYRGSLPPWGYLPTRVDGEWRLVPDPVQRERILEVYHRVVDNHEPLHLVAHDLNRRGVLSPKDYFAQLQGREPQGRKWSATALKRSMTSEAMLGYATLNGKTVRDDDGAPLVRAEPILTREQLEALRAELAKTSRAKPAVSTPSLLLRVLFCAVCGEPAYKFAGGGRKHPRYRCRSMGFPKHCGNGTVAMAEWDAFCEEQVLDLLRDAERLEKVWVAGSDSAVEFAEVSAELVDLTSLIGSPAYRAGSPQREALDARIAALAARQEELEGLEARPSGWEWRGTGQRFGDWWREQDTAAKNTWLRSMNVRLTFDVRGGLTRTIDFGDLQEYEQHLRSGSVVERLHTGMS

SEQ ID NO: 12484 - protein, 500 aa, synthetic construct
MRALVVIRLSRVTDATTSPERQLESCQQLCAQRGWDVVGVAEDLDVSGAADPFDRKRRPNLARWLAFEEQPFDVIVAYRVDRLTRSVRHLQQLVHWAEDHKKLVVSATEAHFDTTTPFAAVVIALMGTVAQMELEAIKERNRSAAHFNIRAGKYRGSLPPWGYLPTRVDGEWRLAPDPVQRERILEVYHRVVDNHEPLHLVAHDLNQRGVLSPKDYFAQLRGREPQGRKWSATALKRSMISEAMLGYATLNGKTVRDDDGAPLVRAEPILTREQQEALRAELVKTSRAKPAVSTPSLLLRVLFCAVCGEPAYKFAGGGRKHPRYRCRSMGFPKHCGNGTVAMAEWDAFCEEQVLDLLGDAERLEKVWVAGSDSAVELAEVNAELVDLTSLIGSPAYRAGSPQREALDARIEALAARQEELEGLEARPPGWEWRETGQRFVDWWREQDTAAKNTWLRSMNVRLMFDVRGGLARAIDFGDLQEYEQHLRLGSVVERLHTGMS

SEQ ID NO: 12485 - protein, 500 aa, synthetic construct
MRALVVIRLSRVTDATTSPERQLESCQQLCAQRGWDVVGVAEDLDVSGAVDPFDRKRRPNLARWLAFEEQPFDVIVAYRVDRLTRSTRHLQQLVHWADDHKKLVVSATEAHFDTTTPFAAVVIALMGTVAQMELGAIKERSRSAAHFNIRAGKYRGSLPPWGYLPARVDGVWRLVPDPVQRERILEVYHRVVNNHEPLHLVAHDLNRRGVLSPKDYFAQLQGREPQGRKWSATALKRSMISEAMLGYATLNGKTVRDDDGAPLVRAEPILTREQQEALRAELVKTSRAKPAVSTPSLLLRVLFCAVCGEPAYKFAGGGRKHPRYRCRSMGFPKHCGNGTVAMAEWDAFCEEQVLDLLGDAERLEKVWVAGSDSAVELAEVNAELVDLTSLIGSPAYRAGSPQREALDARIAALAARQGELEGLEARPSGWEWRETGQRFGDWWREQDTAAKNTWLRSMNVRLTFDVRGGPTRTIDFGDLQEYEQHLRLGSVVERLHTGMS

SEQ ID NO: 12486 - protein, 500 aa, synthetic construct
MRALVVIRLSRVTDATTSPERQLESCQQLCAQRGWDVVGVAEDLDVSGAVDPFDRKRRPNLARWLAFEEQPFDVIVAYRVDRLTRSIRHLQQLVHWAEDHKKLVVSATEAHFDTTTPFAAVVIALMGTVAQMELEAIKERNRSAAHFNIRAGKYRGSLPPWGYLPTRVDGEWRLAPDPVQRERILEVYHRVVDNHEPLHLVAHDLNRRGVLSPKDYFAQLQGREPQGRKWSATALKRSMISKAMLGYATLNGKIVRDDDGAPLVRAEPILTRGQLEALRAELVKTSRAKPAVSTPSLLLRVLFCAVCGEPAYKFAGGGRKHPRYRCRSMGFPKHCGNGTVAMAEWDAFCEEQVLDLLGDAERLEKVWVAGSDSAVELAEVNAELVDLTSLIGSPAYRAGSPQREALDARIAALAARQGELEGLEARPSGWEWRGTGQRFGDWWREQGTAAKNTWLRSMNVRLTFDVRGGLTRTIDFGDLQEYERHLRLGSVVERLHTGMS

SEQ ID NO: 12487 - protein, 500 aa, synthetic construct
MRALVVIRLSRVTDATTSPERQLESCQQLCAQRGWDVVGVAEDLDVSGAVDPFDRKRRPNLARWLAFEEQPFDVIVAYRVDRLARSIRHLQQLVHWAEDHKKLVVSATEAHFDTTTPFAAVVIALMGTVAQMELEAIKERSRSAAHFNIRAGKYRGSLPPWGYLPTRVDGVWRLVPDPVQRERILEVYRRVVDNHEPLHLVAHDLNRRGVLSPKDYFAQLRGREPQGRKWSATALKRSMISEAMLGYATLNGKTVRDDDGAPLVRAEPILTREQLEALRAELVKTSRAKPAVSTPSLLLRVLFCAVCGEPAYKFAGGGRKHPRYRCRSMGFPKHCGNGTVAMAEWDAFCEEQVLDLLGDAERLEKVWVAGSDSAVELAEVNAELVDLTSLIGSPAYRAGSPQREALDARIAALAARQEELEGLEARPSGWEWRETGQRFGDWWREQDTAAKNTWLRSMNVRLTFDVRGGLTRTIDFGDLQEYEQHSRLGSVVERLHTGMS

SEQ ID NO: 12488 - protein, 500 aa, synthetic construct
MRALVVIRLSRVTDATTSPERQLESCQQLCAQRGWDVVGVAEDLDVSGAVDPFDRKRRPNLARWLAFEEQPFDVIVAYRVDRLTRSIRHLQQLVHWAEDHKKLVVSATEAHFDTTTPFAAVVIALMGTVAQMELEAIKERSRSAAHFNIRAGKYRGSLPPWGYLPTRVDGEWRLAPDPVQRERILEVYHRVVDNHEPLHLVAHDLNRRGVLSPKDYFAQLQGREPQGRKWSATALKRSMISEAMLGYAILNGKTVRDDDGAPLVRAEPILTREQLEAIRAELVKTSRAKPAVSTPSLLLRVLFCAVCGEPAYKFVGGGRKHPRYRCRSMGFPKHCGNGTVAMAEWDAFCEEQVLDLLGDAERLEKVWVAGSDSAVELAEVNAELVDLTSLIGSPAYRAGSPQRGALDARIAALAARQGELEGLEARPPGWEWRETGQRFGDWWREQNTAAKNAWLRSVNIRLTFDVRGGLTRTIDFGDLQEYEQHSRLGSVVERLYTGMS

SEQ ID NO: 12489 - protein, 500 aa, synthetic construct
MRALVVIRLSRVTDATTSPERQLESCQQLCAQRGWGVVGVAEDLDVSGAVDPFDRKRRPNLARWLAFEEQPFDVVVAYRVDRLARSIRHLQQLVHWAEDHKKLVVSATEAHFDTTTPFAAVVIALMGTVAQMELEAIKERSRSAAHFNIRAGKYRGSLPPWGYLPTRVDGEWRLVPDPVQRERILEVYHRVVDNHESLHLVAHDLNRRGALSPKDYFAQLRGREPQGRKWSATALKRSMISEAMLGYATLNGKTVRDDDGAPLVRAEPILTREQQEALRAELVKTSRAKPAVSTPSLLLRVLFCAVCGEPAYKFSGGGRKHPRYRCRSMGFPKHCGNGTVAIAEWDAFCEEQVLDLLGDAERLEKVWVAGSDSAVELAEVNGELVDLTSLIGSPAYRAGSPQREALDARIAALAARQEELEGLEARPSGWEWRETGQRFGDWWREQDTAAKNTWLRSMNVRLTFDVRGGLTRTIDFGDLQEYEQHLRLGSVVERLHTGMS

SEQ ID NO: 12490 - protein, 500 aa, synthetic construct
MRALVVIRLSRVTDATTSPERQLESCQQLCAQRGWDVVGVAEDLDVSGAVDPFDRKRRPNLARWLAFEEQPFDVIVAYRVDRLTRSTRHLQQLVHWAEDHKKLVVSATEAHFDTTTPFAAVVIALMGTVAQMELEAIKERNRSAAHFNIRAGKYRGSLPPWGYLPARVDGEWRLVPDPVQRERILEVYHRVVDNHEPLHLVAHDLNRRGVLSPKDYFAQLRGREPQGREWSATALKRSMTSEAMLGYVTLNGKTVRDDDGAPLVRAEPILTREQLEALRAELVKTSRAKPAVSTPSLLLRVLFCAVCGEPAYKFAGGGRKHSRYRCRSMGFPKHCGNGTVAMAEWDAFCEERVLDLLGDAERLEKVWVAGSDSAVELAEVNAELMDLTSLIGSPAYRAGSPQREALDARIAALAARQGELEGLEARPSGWEWRGTGQRFGDWWREQDTAAKNTWLRSMNVRLTFDVRGGLTRTIDFGDLQEYEQHLRLGSVVERLHTGMS

SEQ ID NO: 12491 - protein, 500 aa, synthetic construct
MRALVVIRLSRVTDATTSPERQLESCQQLCAQRGWDVVGAAEDLDVSGAVDPFDRKRRPNLARWLAFEEQPFDVIVAYRVDRLTRSIRHLQQLVHWAEDHKKLVVSATEAHFDMTTPFAAVVIALMGTVAQMELEAIKERSRSAAHFNIRAGKYRGSLPPWGYLPTRVDGEWRLAPDPVQRERILEVYHRVVDNHEPLHLVAHDLNRRGVLSPKDYFAQLQGREPQGRKWSATALKRSMISVAMLGYATLNGKTVRDDDGAPLVRAEPILTREQLEALRAELVKTSRAKPAVSTPSLLLRVLFCAVCGEPAYKFAGGGRKHPRYRCRSMGFPKHCGNGTVAMAEWDAFCEEQVLGLLGDAERLEKVWVAGSDSAVKLAEVNAELVDLTGLVGSPAYRAGSPQREALDARIAALAARQEELEGLEARPSGWEWRGTGQRFGDWWREQDTAAKNTWLRSMNVRLTFDVRGGLTRTIDFGDLQEYEQHLRLGSVVERLHTGMS

SEQ ID NO: 12492 - protein, 500 aa, synthetic construct
MRALVVIRLSRVTDATTSPERQLESCQQLCAQRGWDVVGVAEDLDVSGAVDPFDRKRRPNLARWLAFEEQPFDVIVAYRVDRLTRSIRHLQQLVHWAEDHKKLVVSATEAHFDTTTPFAAVVIALMGTVAQMELEAIKERNRSAAHFNIRAGKYRGSLPPWGYLPARVDGVWRLVPDPVQRERILEVYHRVVDNHEPLHLVAHDLNRRGVLSPKDYFAQLRGREPQGRKWSATALKRSMISEAMLGYATLNGKTVRDDDGAPLVRAEPILTREQLEALRAELVKTSRAKPAVSTPSLLLRVLFCAVCGEPAYKFAGGGRKHPRYRCRSMGFPKHCGNGTVAMAEWDAFCEEQVLNLLGDAERLERVWVAGSDSAVELAEVNAELVDLTSLISSPAYRAGSPQREALDARIAALAARQEELEGLEARPSGWEWRETGQRFGDWWREQDTAAKNTWLRSMNVRLTFDVRGGLTRTIDFGDLQEYERHLRLGSVVERLHTGMS

SEQ ID NO: 12493 - protein, 500 aa, synthetic construct
MRALVVIRLSRVTDATTSPERQLESCQQLCAQRGWDVVGVAEDLDVSGAVGPFDRKRRPNLARWLAFEEQPFDVIVAYRVDRLTRSVRHLQQLVHWAEDHKKLVVSATEAHFDTTTPFAAVVIALMGTVAQMELEAIKERSRSAAHFNIRAGKYRGSLPPWGYLPTRVDGEWRLVPDPVQRERILEVYHRVVGNHEALHLVAHDLNRRGVLSPKDYFAQLQGREPRGRKWSATALKRSMVSEAMLGYATLNGKIVRDDDGAPLVRAEPILTREQLEALRAELVKTSRAKPAVSTPSLLLRVLFCAVCGEPAYKFAGGGRKHPRYRCRSMGFPKHCGNGTVAMAEWDAFCEKQVLDLLGDAERLEKVWVAGSDSAVELAEVNAELVDLTGLIGSPAYRAGSPQREALDARIAALAARQGELEGLEARPSGWEWRETGQRFGDWWREQDTAAKNTWLRSMNVRLTFDVRGGLTRTIDFGDLQEYKQHLRLGSVVERLHTGMS

SEQ ID NO: 12494 - protein, 500 aa, synthetic construct
MRALVAIRLSRVTDTTTSPERQLESCQQLCAQRGWDVVGVAEDLDVSGAVDPFDRKRRPNLARWLAFEEQPFDVIVAYRVDRLARSIRHLQQLVHWAEDHKKLVVSATEAHFDTTTPFAAVVIALMGTVAQMELEAIKERNRSAAHFNIRAGKYRGSLPPWGYLPARVDGEWRLVPDPVQRERILEVYHRVVDNHEPLHLVAHDLNRRGVLSPKDYFAQLQGREPQGRKWSATALKRSMTSEAMLGYATLNGKTVRDDDGAPLVRAEPILTREQLGALRAELVRTSRAKPAVSTPSLLLRVLFCAVCGEPAYKFAGGGRKHPRYRCRSMGFPKHCGNGTVAMAQWDAFCEEQVLNLLGDAERLEKVWVAGSDSAVELAEVNAELVDLTSLIGSPAYRAGSPQREALDARIAALAARQEELEGLEARPSGWEWRETGQRFGDWWREQDTAAKNTWLRSMNVRLTFDVRGGLTRTIDFGDLQEYEQHLRLGSVVERLHTGMS

SEQ ID NO: 12495 - protein, 500 aa, synthetic construct
MHALVVVRLSRVTDATTSPGRQLESCQQLCAQRGWDVVGVAEDLDVSGAVDPFDRKRRPNLARWLAFEEQPFDAIVAYRVDRLTRSIRHLQRLVHWAEDHKKLVVSATEAHFDTTTPFAAVVIALMGTVAQMELEAIKERSRSAAHFNIRAGKYRGSLPPWGYLPTRVDGEWRLVPDPVQRERILEVYRRVVDNHEPLHLVAHDLNRRGVLSPKDYFAQLRGREPQGRKWSATALKRSMTSEAMLGYATLNGKTVRDDDGAPLVRAEPILTREQQEALRAELVKTSRAKPAVSTPSLLLRVLFCAVCGEPAYKFAGGGRKHPRYRCRSMGFPKHCGNGTVAMAEWDAFCEEQVLGLLGDAERLEKVWVAGSDSAAELAEVNAELVDLTSLIGSPAYRTGSPQREALDARIAALAARQEELEGLEARPSGWEWRGTGQRFGDWWREQGTAAKNTWLRSMNVRLTFDVRGGLTRTIDFGDLQEYEQHLRLGSVVERLHTGMS

SEQ ID NO: 12496 - protein, 500 aa, synthetic construct
MRALVVIRLSRVTDATTSPERQLESCQQLCAQRGWDVVGVAEDLDVSGAVDPFDRKRRPNLARWLAFEEQPFDVIVAYRVDRLARSIRHLQQLVHWAEDHKKLVVSATEAHFDTTTPFAAVVIALMGTVAQMELEAIKERSRSAAHFNIRAGKYRGSLPPWGYLPTRVDGGWRLVPDPVQRERILEVYHRVVDNHEPLHLVAHDLNRRGVLSPRDYFAQLRGREPQGRKWSATALKRSMISEAMLGYATLNGKTVRDGDGAPLARAEPILTREQQEALRAELVKTSRAKPAVSTPSLLLRVLFCAVCGEPAYKFAGGGRKHPRYRCRSMGFPKHCGNGTVAMAEWDAFCEEQVLGLLGDAERLEKVWVAGSDSAVELAEVDAELVDLTSLIGSPAYRAGSPQREALDARIAALAARQEELEGLEARPSGWEWRETGQRFGDWWREQDTAAKNTWLRSMNVRLTFDVRGGLTRTIDFGDLQEYEQHLRSGSVVERLHTGVS

SEQ ID NO: 12497 - protein, 500 aa, synthetic construct
MRALVVIRLSRVTDATTSPERQLESCQQLCAQRGWDVVGVAEDLDVSGAVDPFDRKRRPNLARWLAFEEQPFDVIVAYRVDRLTRSTRHLQQLVHWAEDHKKLVVSATEAHFDTTTPFAAVVIALMGTVAQMELEAIKERSRSAAHFNIRAGKYRGSLPPWGYLPTRVDGEWRLVPDPVQRERILEVYHRVVDNHEPLHLVAHDLNRRGVLSPKDYFAQLRGREPQGRKWSATALKRSMISEAMLGYATLGGKTVRDDDGAPLVRAEPILTREQLEALRAELAKTSRAKPAVSTPSLLLRVLFCAVCGEPAYKFAGGGRKHPRYRCRSMGFPKHCGNGTVAMAEWDAFCEEQVLDLLGDAERLEKVWVAGSDSAVELAEVNAELVDLTSLIGSPAYRAGSPQREALDARIAALAARQEELEGLEARPSGWEWRETGQRFRDWWREQDTAAKNTWLRSMNVRLTFDVRGGLTRTIDFGDLQEYEQHLRLGSVVERLHTGMS

SEQ ID NO: 12498 - protein, 500 aa, synthetic construct
MRALVVIRLSRVTDATTSPERQLESCQQLCAQRGWDVVGVAEDLDVSGAVDPFDRKRRPNLARWLAFEEQPFDVIVAYRVDRLTRSIRHLQQLVHWAEDHKKLVVSATEAHFDTTTPFAAVVIALMGTVAQMELEAIKERSRSAAHFNIRAGKYRGSLPPWGYLPARVDGEWRLVLDPVQRERILEVYHRVVDNHEPLHLVAHDLNRRGVLSPRDYFAQLRGREPQGRKWSATALKRSMISEAMLGYATLNGKTVRDDDGAPLVRAEPILTREQLEALRAELVKTSRAKPAVSTPSLLLRVLFCAVCGEPAYKFAGGGRKHPRYRCRSMGFPKHCGNGTVAMAEWNAFCEEQVLGLLGDAERLEKVWVAGSDSAVELAEVNAELVDLTSLIGSPAYRAGSPQREALDARIAALAARQEELEGLEARPSGWEWRETGQRFGDWWREQDTAAKNTWLRSMNVRLTFDVRGGLTRTIDFGDLQEYKQHSRLGSVVERLHTGMS

SEQ ID NO: 12499 - protein, 500 aa, synthetic construct
MRALVVIRLSRVTDATTSPERQLESCQQLCAQRGWDVVGVAEDLDVSGAVDPFDRKRRPSLARWLAFEEQPFDVIVAYRVDRLARSIRHLQQLVHWAEDHKKLVVSATEAHFDTTTPFAAVVIALMGTVAQMELEAIKERSRSAAHFNIRAGKYRGSLPPWGYLPTRVDGEWRLAPDPVQRERILEVYHRVVDNHEPLHLVAHDLNRRGVLSPKDYFAQLQGREPQGRKWSATALKRSMISEAMLGYATLNGKTVRDDDGAPLVRAEPILTRGQLEALRAELVKTSRAKPAVSTPSLLLRVLFCAVCGEPAYKFAGGGRKHPRYRCRSMGFPKHCGNGTVAMAEWDAFCEEQVLGLLGDAERLEKVWVAGADSAVELAEVNAELVDLTSLIGSSAYRAGSPQREALDARIAALAARQEELEGLEARPSGWGWRETGQRFGDWWREQDTVAKNTWLRSMNVRLTFDVRGGLTRTIDFGDLQEYEQHLRLGSVVERLHTGMS

SEQ ID NO: 12500 - protein, 500 aa, synthetic construct
MRALVVIRLSRVTDATTSPERQLESCQQLCAQRGWDVVGVAEDLDVSGAVDPFDRKRRPNLARWLAFEEQPFDVIVAYRVDRLTRSVRHLQQLVHWAEDHKKLVVSATEAHFDTTTPFAAVVIALMGTVAQMELEAIKERSRSAAHFNIRAGKYRGSLPPWGYLPARVDGEWRLVPDPVQRERILEVYHRVVNNHEPLHLVAHDLNRRGILSPKDYFAQLQGREPQGRKWSATALKRSMISEAMLGYATLNGKTVRDDDGAPLVRAEPILTREQQEALRAELVKTSRAKPAVSTPSLLLRVLFCAVCGEPAYKFAGGGRKHPRYRCRSMGFPKHCGNGTVAMAEWDAFCEEQVLDLLGDAERLEKVWVASSDSAVELAEVNAELVDLTSLIGSPAYRAGSPQREALDARIAALAARQEELEGLEARPSGWEWRETGQRFGDWWREQDTAAKNTWLRSMNVRLTFDVRGGLTRTIDFGDLQEYEQHLRLGSVVERLHTGMP

SEQ ID NO: 12501 - protein, 500 aa, synthetic construct
MRALVVIRLSRVTDATTSPERQLESCQQLCAQRGWDVVGVAEDLDVSGAVDPFDRKRRPNLARWLAFEEQPFDVIVAYRIDRLTRSIRHLQQLVHWAEDHKKLVVSATEAHFDTTTPFAAVVIALMGTVAQMELEAIKERNRSAAHFNIRAGKYRGSLPPWGYLPARVDGEWRLVPDPVQRERILEVYHRVVDNHEPLHLVAHDLNRRGVLSPKDYFAQLRGREPQGRKWSATALKRSMISEAMLGYATLNGKIVRDDDGAPLVRAEPILTREQLEALRAELVKASRAKPAVSTPSLLLRVLFCAVCGEPAYKFAGGGRKHPRYRCRSMGFPKHCGNGTVATAEWDAFCEEQVLDLLGDTERLEKVWVAGSDSAIELAEVNAELVDLTSLIGSPAYRAGSPQREALDARIAALAARQEELEGLEARPSGWEWRETGQRFGDWWREQDTAVKNAWLRSMNVRLTFDVRGGLTRTIDFGDLQEYEQHLRLGNAVERLHTGMS

SEQ ID NO: 12502 - protein, 500 aa, synthetic construct
MRALVVIRLSRVTDATTSPERQLESCQQLCAQRGWDVVGVAEDLDVSGAVDPFDRKRRPNLARWLAFEEQPFDVIVAYRVDRLTRSTRHLQQLVHWAEDHKKLIVSATEAHFDTTTPFAAVVIALMGTVAQMELEAIKERSRSAAHFNIRAGKYRGSLPPWGYLPTRVDGEWRLAPDPVQRERILEVYHRVVDDHEPLHLVAHDLNRRGVLSPKDYFAQLRGREPQGRKWSATALKRSMISEAMLGYATLNGKTVRDDDGAPLVRAEPILTREQLEALRVELVKTSRAKPAVSTPSLLLRVLFCAVCGEPAYKFTGGGRKHPRYRCRSMGFPKHCGNGTVAMAEWDAFCEEQVLDLLGDAERLEKVWVAGSDSAVELAEVNAELVDLTSLIGSPAYRAGSPQREALDARIAALAARQEELEGLEARPSGWEWRETGQRFGDWWREQDTAAKNTWLRSMNVRLTFDVCGGLTRTIDFGDLQEYEQHLRLGSVVERLHTGMS

SEQ ID NO: 12503 - protein, 500 aa, synthetic construct
MRALVVIRLSRVTDATTSPERQLESCQQLCAQRGWDIVGVAEDLDVSGAVDPFDRKRRPNLARWLAFEEQPFDVIVAYRVDRLARSIRHLQQLVHWAEDHKKLVVSATEAHFDTTTPFAAVVIALMGTVAQMELEAIKERNRSAAHFNIRAGKYRGSLPPWGYLPTRVDGEWRLVPDPVQRERILEVYHRVVDNHEPLHLVAHDLNRRGVLSPKDYFAQLQGREPQGRKWSATALKRSMISEAMLGYVTLNGKIVRDDDGAPLVRAEPILTREQLEALRAELVKTSRAKPAVSTPSLLLRVLFCAVCGEPAYKFAGGGRKHPRYRCRSMGFPKHCGNGTVAMAEWDAFCEEQVLDLLGDTERLEKVWVAGSDSAVELAEVSAELVDLTSLIGSPAYRAGSPQREALDARVAALAARQEELEGLEARPSGWEWRETGQRFGDWWREQDTAAKNTWLRSMNVRLTFDVRGGLTRTIDFGDLHEYEQHLRSGGVVERLHTGMS

SEQ ID NO: 12504 - protein, 500 aa, synthetic construct
MRALVVIRLSRVTEATTSPERQLESCQQLCAQRGWDVVGVAEDLDVSGAVDPFDRKRRPNLARWLAFEEQSFDVIVAYRVDRLARSIRHLQQLVHWAEDHKKLVVSATEAHFDTTTPFAAVVIALMGTVAQMELEAIKERSRSAAHYNIRAGKYRGSLPPWGYLPTRVDGVWRLVPDPVQRERILEVYHRVVDNHEPLRSVAHDLNRRGVLSPKDYFARLQGREPQGRKWSATALKRSMISEAMLGYATLNGKIVRDDNGAPLVRAEPILTREQLEALRAELVKTSRAKPAVSTPSLLLRVLFCAVCGEPAYKFAGGGRRHPRYRCRSMGFPKHCGNGTVAMAEWDAFCEEQVLNLLGDAERLEKVWVAGSDSAVELAEVNVELVDLTSLISSPAYRAGSPQREALDARIAALAARQEELEGLEARPSGWEWRGTGQRFGDWWREQDTAAKNTWLRSMNVRLTFDIRGGLTRTIDFGDLQEYEQHLRLGSVVERLHTGMS

SEQ ID NO: 12505 - protein, 500 aa, synthetic construct
MRALVVIRLSRVTEATTSPERQLESCQQLCAQRGWGVVGVAEDLDVSGAVDPFDRKRRPNLARWLAFEEQPFDVIVAYRVDRLARSIRHLQQLVHWAEDHKKLVVSATEAHFDTTTPFAAVVIALMGTVAQMELEAIKERNRSAAHFNIRAGKYRGSLPPWGYLPTRVDGEWRLVPDPVQRERILEVYHRVVDDHEPLHLVAHDLNRRGVLSPRDYFAQLQGREPQGRKWSATALKRSMISEAMLGYATLNGKTVRGDDGAPLVRAEPILTREQLEALRAELDKTSRAKPTVSTPSLLLRVLFCAVCGEPAYKFAGGGRKHPRYRCRSMGFPKHCGNGTVAMAEWDAFCEEQVLDLLGDTERLEKVWVAGSDSAVELAEVSAELVDLTSLIGSPAYRACSPQREALDARIAALAARQEELEGLEARPSGWEWRGTGQRFGDWWREQDTAAKNTWLRSMNVRLTFDVRGGLTRTIDFGGLQEYEQHLRLGSVVERLHTGMS

SEQ ID NO: 12506 - protein, 500 aa, synthetic construct
MRALVVIRLSRVTDATTSPERQLESCQQLCAQRGWDVVGVAEDLDVSGAVNPFDRKRRPNLARWLAFEEQPFDVIVAYRVDRLTRSTRHLQQLVHWAEDHKKLVVSATEAHFDTTTPFAAVVIALMGTVAQMELEAIKERSRSAAHFNIRAGKYRGSLPPWGYLPTRVDGEWRLVPDPVQRERILEVYHRVVDNHEPLHLVAHDLNRRGVLSPKDYFAQLRGREPQGRKWSATALKRSMISEAMLGYATLNGKTVRDDDGAPLVRAEPILTREQLEALRAELVKTSRAKPAVSTPSLLLRVLFCAVCGEPAYKFAGGGRKHPRYRCRSMGFPKHCGNGTVAMAEWDAFCEEQVLDLLGDAERLEKVWVAGSDSAVELAEVNAELVDLTSLISSPAYRAGSPQREALDARVAALAARQEELEGLEARPSGWEWRETGQRFGDWWREQDTAAKNTWLRSMNVRLTFDVRGGLTRTIDFGDLQEYEQHLRLGSVVGRLHTGMS

SEQ ID NO: 12507 - protein, 500 aa, synthetic construct
MRALVVIRLSRVTDATTSPERQLESCQQLCAQRGWDVVGVAEDLDVSGAVDPFDRKRRPSLARWLAFEEQPFDAIVAYRVDRLTRSIRHLQQLVHWAEDHKKLVVSATEAHFDTTTPFAAVVIALMGTVAQMELEAIKERNRSAAHFNIRAGKYRGSLPPWGYLPARVDGEWRLVPDPVQRERIFEVYHRVVDNHEPLHLVAHDLNRRGVLSPKDYFAQLRGREPQGRKWSATALKRSMTSEAMLGYATLNGKTVRDDDGAPLVRAEPILTREQLEALRAELVKTSRAKPAVSTPSLLLRVLFCAVCGEPAYKFAGGGRKHPRYRCRSMGFPKHCGNGTVAMAEWDAFCEEQVLGLLGDAERLEKVWVAGSDSAVELAEVNAELVDLMSLIGSPAYRAGSPQREALDARIAALAARQEELEGLEARPSGWEWRETGQRFGDWWREQDTAAKNTWLRSMNVRLTFDVRGGLTRTIDFGDLQEYEQHLRSGSVVERLHSGMS

SEQ ID NO: 12508 - protein, 500 aa, synthetic construct
MRALVVIRLSRVTDATTSPERQLESCQQLCAQRGWDVVGVAEDLDVSGAVDPFDCKRRPNLARWLAFEEQPFDVIVAYRVDRLARSIRHLQQLVHWAEDHKKLVVSATEAHFDTTTPFAAVVIALMGTVAQMELEAIKERSRSAAHFNIRAGKYRGSLPPWGYLPARVDGEWRLVPDPVQRERILEVYHRVVDNHEPLHLVARDLNRRGVLSPKDYFAQLRGREPQGRKWSATALKRSMISVAMLGYATLSGKTVRDDDGAPLVRAEPILTREQLEALRAELVKTSRAKPAVSTPSLLLRVLFCAVCGEPAYKFAGGGRKHPRYRCRSMGFPKHCGNGTVAMAEWDAFCEEQVLDLLGDAERLEKVWVAGSDTAVELAEVNAELVDLTSLIGSPAYRAGSPQREALDARIAALAARQEELEGLEARPSGWEWRRTGQRFGDWWREQDTAAKNTWLRSMNVRLTFDVRGGLTRTIDFGDLQEYEQHLRLGSVVKRLHTGTS

SEQ ID NO: 12509 - protein, 500 aa, synthetic construct
MRALVVIRLSRVTDATTSPERQLESCQQLCAQRGWDVVGVAEDLDVSGAVDPFDRKRRPNLARWLAFEEQPFDVIVAYRVDRLTRSTRHLQQLVHWAEDHKKLVVSATEAHFDTTTPFAAVVIALMGTVAQMELEAIRERSRSAAHFNIRAGKYRGSLPPWGYLPARVDGEWRLVPDPVQRERILEVYHRVVDNHEPLHLVAHDLNRRGVLSPKDYFAQLRGREPQGRKWSATALRRSMISVAMLGYATLCGKTVRDDDGAPLVRAEPILTREQLEALRAELVKTSRAKPAVSTPSLLLHVLFCAVCGEPAYKFAGGGRKHPRYRCRSMGFPKHCGNGTVAMAEWDAFCEEQVLSLLGDAERLEKVWVAGSDSAVELAEVNKELVDLTSLIGSPAYRAGSPQREALDARIAALAARQEELEGLEARPSGWEWRGTGQRLGDWWREQDTAAKNTWLRSMNVRLTFDVRGGLTRTIDFGDLQEYEQHLRLGSVVERLHTGMS

SEQ ID NO: 12510 - protein, 500 aa, synthetic construct
MRALVVIRLSRVTDTTTSPERQLGSCQQLCAQRGWDVVGVAEDLDVSGAVDPFDRKRRPNLARWLAFEEQPFDVIVAYRVDRLTRSTRHLQQLVHWAEDHKKLVVSATEAHFDTTTPFAAVVIALMGTVAQMELEAIKERSRSAAHFNIRAGKYRGSLPPWGYLPTRVDGEWRLAPDSVQRERILEVYHRVVDNHEPLHLVAHDLNRRGVLSPKDYFAQLQGREPQGRKWSTTALKRSMISEAMLGYATLNGKTVRDDDGAPLVRAEPILTREQLEALRAELVKTSRAKPAVSTPSLLLRVLFCAVCGEPAYKFAGGGRKHPRYRCRSMGFPKHCGNGTVAMAEWDAFCEEQVLDLLGDTERLEKVWVAGSDSAVELAEVNAELTDLTSLIGSPAYRAGSPQREALDARIAALAARQEELEGFEARPSGWEWRGTGQRFGDWWREQDTAAKNTWLRSMNVRLTFDVRGGLTRTIDFGDLQEYVQHLRLGSVVERLHTGMS

SEQ ID NO: 12511 - protein, 500 aa, synthetic construct
MRALVVIRLSRVTDATTSPERQLESCQQLCAQRGWDVVGVAEDLDVSGAVDPFDRKRRPNLARWLAFEEQPFDVIVAYRVDRLTRSTRHLQQLVHWADDHKKLVVSATEAHFDTTTPFAAVVIALMGTVAQMELEAIKERSRSAAHFNIRAGKYRGSLPPWGYLPARVDGVWRLVPDPVQRERILEVYHRVVNNHEPLHLVAHDLNRRGVLSPKDYFAQLQGREPQGRKWSATALKRSMISEAMLGYATLNGKTVRGDDGAPLVRAEPILTREQQEALRAELVKTPRAKPAVSTPSLLLRVLFCAVCGEPAYKFAGGGRKHPRYRCRSMGFPKHCGNGTVAMAEWDAFCEEQVLGLLGDAERLEKVWVAGSDSAVELAEVNAELEDLTSLIGSPAYRAGSPQREALDARIAALAARQEELEGLEARPSGWEWRETGQRFGDWWRKQDTAAKNTWLRSMNVRLTFDVRGGLTRTIDFGDLQGYEQHLRLGSVAERLHTGMS

SEQ ID NO: 12512 - protein, 500 aa, synthetic construct
MRALVVIRLSRVTDATTSPERQLESCQQLCAQRGWDVVGVAEDLDVSGAVDPFDRKRRPNLARWLAFEEQPFDVIVAYRVDRLTRSTRHLQQLVHWAEDHKKLVVSATEAHFDTTTPFAAVVIALMGTVAQMELEAIKERSRSAAHFNIRAGKYRGSLPPWGYLPTRVDGEWRLVPDPVQRERILEVYHRVVDNHEPLHLVAHDLNRRGVLSPRDYFAQLRGREPQGRKWSATALKRSMISEAMLGYVTLNGKIVRDDDGAPLVRAEPILTREQLEALRAELVKTSRAKPAVSTPSLLLRVLFCAVCGEPAYKFAGGGRKHPRYRCRSMGSPKHCGNGTVAMAEWDAFCEEQVLNLLGDAERLEKVWVAGSDSAVELAEVYAELVDLTSLIGSPAYRAGSPQRKALDARIAALAARQEELKGLEARPSGWEWRETGQRFGDWWREQDTAAKNTWLRSMNVRLTFDVRGGLTRTIDFGDLQEYEQHLRLGGVVERLHTGMS

SEQ ID NO: 12513 - protein, 500 aa, synthetic construct
MRALVVIRLSRVTDATTSPERQLVSCQQLCAQRGWDVVGVAEDLDVSGAVDPFDRKRRPNLARWLAFEGQPFDVIVAYRVDRLTRSTRHLQQLVRWAEDHKKLVVSATEAHFDTTTPFAAVVIALMGTVAQMELEAIKERSRSAAHYNIRAGKYRGSLPPWGYLPTRVDGEWRLVPDPVQRERILEVYHRVVDNHEPLHLVAHDLNRRGVLSPKDYFAQLQGREPQGRKWSATALKRSMISEAMLGYATLNGKTVRDDDGAPLVRAEPILTREQQEALRAELVKTSRAKPAVSTPSLLLRVLFCAVCGEPAYKFAGGGRKHSRYRCRSMGFPKHCGNGTVAMAEWDAFCEKQVLDLLGDAERLEKVWVAGSDSAVELAEVNAELVDLTSLIGSPAYRAGSPQREALDARIAVLAARQEELEGLEARPSGWEWRETGQRFGDWWREQDTAAKNTWLRSMNVRLTFDVRGGLTRTIDFGDLQGYEQHLRSGSVVERLHTGMS

SEQ ID NO: 12514 - protein, 500 aa, synthetic construct
MRALVVIRLSRVTDATTSPERQLESCQQLCAQRGWDVVGVAEDLDVSGAVDPFDRERRPNLARWLAFEEQPFDAIVAYRVDRLARSIRHLQHLVHWAEDHKKLVVSATEAHFDTTTPFAAVVIALMGTVAQMELEAIKERSRSAAHFNIRAGKYRGSLPPWGYLPTRVDGEWRLAPDPVQRERILEVYHRVVDNHEPLHLVAHDLNRRGVLSPKDYFAQLQGREPQGRKWSATALKRSMISEAMLGYATLNGKTVRNDDGAPLVRAEPILTREQLEALRAELVKTSRAKPAVSTPSLLLRVLFCAVCGEPAYKFSGGGRKHPRYRCRSMGFLEHCGNGTVAMAEWDAFCEEQVLDLLGDAERLEKVWVAGSDSAVELAEVNAELVDLTSLIGSPAYRAGSPQREALDARIAALAARQAELEGLEARPSGWEWRETGQGFGDWWREQDTAAKNTWLRSMNVRLTFDVRGGLTRTIDFGDLQEYEQHLRLGSVVERLHTGMS

SEQ ID NO: 12515 - protein, 500 aa, synthetic construct
MRALVVIRLSRVTDATTSPERQLESCQQLCAQRGWDVVGVAEDLDVSGAVDPFDRKRRPNLARWLAFEERPFDVIVAYRVDRLARSIRHLQQLVHWAEDHKKLVVSATEAHFDTTTPFAAVVIALMGTVAQMELEAIKERSRSAAHFNIRAGKYRGSLPPWGYLPTRVDGEWRLAPDPVQRERILEVYHRVVDNHEPLHLVAHDLNRRGVLSPRDYFAQLQGREPQGRKWSATALKRSMISGTMLGYATLNGKTVRDDDGAPLVRAEPILTREQLEALRAELVKTSRARPAVSTPSLLLRVLFCAVCGEPAYKFVGGGRKHPRYRCRSMGFPKHCGNGTVAMAEWDAFCEEQVLDLLGDAERLEKVWVAGSDSAVELAEVNAELVDLTSLVGSPAYRAGSPQREALDARIAALAARQEELEGLEARPSGWEWRETGQRFGDWWREQDTAAKNTWLRSMNVRLTFDVRGGLTRTIDYGDLQEYEQHSRLGSVIERLHTGTS

SEQ ID NO: 12516 - protein, 500 aa, synthetic construct
MRALVVIRLSRVTDATTSPERQLESCQQLCAQRGWDVVGVAEDLDVSGAVDPFDRKRRPNLARWLAFEERPFDVIVAYRVDRLARSIRHLQQLVHWAEDHKKLVVSATEAHFDTTTPFAAVVIALMGTVAQMELEAIKERSRSAAHFNIRAGKYRGSLPPWGYLPTRVNGEWRLVPDPVQRERILEVYHRVVDNHEPLHLVAHDLNRRGVLSPKDYFAQLRGREPQGREWSATALKRSMTSEAMLGYATLNGKIVRDDDGAPLVRAEPILTREQLEALRAELAKTSRAKPAVSTPSLLLRVLFCAVCGEPAYKFAGGGRKHLRYRCRSMGFPKHCGNGTVAMAEWDAFCEEQVLDLLGDAERLEKVWVAGSDSAVELAEVNAELVDLTSLIGSPAYRAGSPQREALDARVAALAARQEELEGLEARPSGWEWRGTGQRFGDWWREQDTAAKNTWLRSMNVRLTFDVRGGLTRTIDFGDLQEYEQHLRLGSVVERLHTGMS

SEQ ID NO: 12517 - protein, 500 aa, synthetic construct
MRALVVIRLSRVTDATTSPERQLESCQQLCAQRGWDVVGVAEDLDVSGAVDPFDRKRRPNLARWLAFEEQPFDVIVAYRVDRLARSIRHLQQLVHWAEDHKKLVVSATEAHFDTTTPLAAVVVALMGTVAQMELEAIKERSRSAAHFNIRAGKYRGSLPPWGYLPTRVDGEWRLVPDPVQRERILEVYRRVVDNHEPLHLVAHDLNRRGVLSPRDYFAQLQGREPQGRKWSATALKRSMISGAMLGYATLNGKTVRDDDGAPLVRAEPILTREQLEALRAELAKTSRAKPAVSTPSLLLRVLFCAVCGEPAYKFAGGGRKHPRYRCRSMGFPKHCGNGTVAMAGWDAFCEEQVLDLLRDAERLEKVWVAGSDSAVELAEVNAELVDLTSLIGSPAYRAGSPQREALDARIAALAARQEELEGLEARPSGWEWRETGQRFGDWWREQDTAVKNTWLRSMNVRLTFDVRGGLTRTIDFGDLQEYEQHLRLGSVVERLHTGMS

SEQ ID NO: 12518 - protein, 500 aa, synthetic construct
MRALVVIRLSRVTDATTSPERQLESCQQLCAQRGWDVVGVAEDLDVSGAVDPFDRKRRPNLARWLAFEEQPFDVIVAYRVDRLARSIRHLQQLVHWAEDHKKLVVSATEAHFDTTTPFAAVVIALMGTVAQMELEAIKERNRSAAHFNIRAGKYRGSLPPWGYLPTRVDGGWRLAPDPVQRERILEVYRRVVDNHEPLHLVAHDLNRRGVLSPRDYFAQLRGREPQGRKWSATALKRSMISEAMLGYATLNGKTVRDDDGAPLVRAEPILTREQLEALRAELAKTSRAKPAASTPSLLLRVLFCAVCGEPAYKFAGGGRKHPRYRCRSMGFPKHCGNGTVAMAEWDAFCEEQVLDLLGDAERLEKVWVAGSDSAVELAEVNAELVDLTSLIGSPAYRAGSPQREALDARIAALAARQEELEGLEARPSGWEWRGTGQRFGDWWREQDTAAKNTWLRSMNVRLTFDVRGGLTRTIDFGDLQEYEQHLRLGSAVERLHTGRS

SEQ ID NO: 12519 - protein, 500 aa, synthetic construct
MRALVVIRLSRVTDATTSPERQLESCQQLCAQRGWDVVGVAEDLDVSGAVDPFDRKRRPNLARWLAFEEQPFDVIVAYRVDRLARSVRHLQQLVQWAEDHEKLVVSATEAHFDTTTPFAAVVIALMGTVAQMELEAIKERNRSAAHFNIRAGKYRGSLPPWGYLPTRVDGEWRLVPDPVQRERILEVYRRVVDNHEPLHLVAHDLNRRGVLSPRDYFAQLRGREPLGRKWSATALKRSMTSEAMLGYATLNGKTVRDDDGAPLVRAEPILTREQLEALRAELVKTSRAKPAVSTPSLLLRVLFCAVCGEPAYKFAGGGRKHPRYRCRSMGFPKHCGNGTVAMAEWDAFCEEQVLDLLGDAERLEKVWVAGSDSAVELAEVNAELVDLASLIGSPAYRAGSPQREALDARIAALAARQEELEGLEARPPGWEWRETGQRFEDWWHEQDTAAKNTWLRSMNVRLTFDVRGELTRTIDFGDLQEYEQHLRLGSLVERLHTGMS

SEQ ID NO: 12520 - protein, 500 aa, synthetic construct
MRALVVIRLSRVTDATTSPERQLESCQQLCAQRGWDVVGVAEDLDVSGAVDPFDRKRRPNLARWLAFEEQPFDVIVAYRVDRLARSIRHLQQLVHWAEDHKKLVVSATEAHFDTTTPFAAVVIALMGTVAQMELEAIKERSRSAAHFNIRAGKYRGSLPPWGYLPARVDGEWRLAPDPVQRERILEVYHRVVDNHEPLHLVAHDLNRRGILSPRDYFAQLQGREPQGRKWSATALKRSMISGAMLGYATLNGKTVRDDDGAPLVRAEPILAREQLEALRAELVKTSRAKPAVSTPSLLLRVLFCAVCGEPAYKFTGGGRKHPRYRCRSMGFPKHCGNGTVAMAEWDAFCEEQVLGLLGDAERLEKVWVAGPDSAVELAEVNAELVDLTGLIGSPAYRAGSPQREALDARIAALAARQGELEGLEARPSGWEWRETGQRFGDWWREQDTAAKNTWLRSMNVRLTFDVRGGLTRTIDFGDLQEYEQHLRLGSVVGRLHTGTS

SEQ ID NO: 12521 - protein, 500 aa, synthetic construct
MRALVVIRLSRVTDATTSPERQLESCQQLCAQRGWDVVGVAEDLDVSGAVDPFDRKRRPNLARWLAFEGQPFDVIVAYRVDRLTRSIRHLQQLVHWAEDHKKLVVSATEAHFDTTTPFAAVVIALMGTVAQMELEAIKERNRSAAHFNIRAGKYRGSLPPWGYLPTRVDGEWRLAPDPVQRERILEVYHRVVDNHEPLHLVAHDLNRRGVLSPKDYFAQLRGREPQGHKWSATALKRSMTSEAMLGYATLNGKTVRDNDGAPLVRAEPILTREQLEALRAELVKTSRAKPAVSTPSLLLRVLFCAVCGEPAYKFAGGGRKHPRYRCRSMGFPKHCGNGTVAMAEWDAFCEEQVLDLLGDAERLEKVWVAGSDFAVELAEVNAELVDLTSLISSPAYRAGSPQRVALDARIAALAARQEELEGLEARPSGWEWRGTGQRFGDWWREQDTAAKNTWLRSMNVRLAFDVRGGLTRTIDSGDLQEYVQHLRLGSVVGRLHTGMS

SEQ ID NO: 12522 - protein, 500 aa, synthetic construct
MRALVVIRLSRVTDATTSPERQLESCQQLCAQRGWDVVGVAEDLDVSGAVDPFDRKRRPNLARWLAFEEQPFDAIVAYRVDRLTRSIRHLQLLVHWAEDHKKLVVSATEAHFDTTTPFAAVVIALMGTVAQMELEAIKERNRSAAHFNIRAGKYRGSLPPWGYLPARVDGEWRLAPDPVQRERILEVYHRVVDNHEPLHLVAHDLNRRGVLSPKDYFAQLQGREPQGRKWSATALRRSMISVAMLGYATLNGKTVRDDDGAPLVRAEPILTREQQEALRAELVKTSRAKPAVSTPSLLLRVLFCAVCGEPAYKFAGGGRKHPRYRCRSMGFPKHCGNGTVAMAEWDAFCEEQVLDLLGDAERLEKVWVAGSDSAVELAEVNAELMDLTSLIGSPAYRAGSPQREALDARIAALAARQEELEGLEARPSGWEWRGTGQRFGDWWREQDTAAKNTWLRSMNVRLTFDVRGGLIRTIDFGDLQEYEQHLRLGSVVERLHTGMS

SEQ ID NO: 12523 - protein, 500 aa, synthetic construct
MRALVVIRLSRVTDATTSPERQLESCQQLCAQRGWDVVGVAEDLDVSGAADPFDRKRRPNLARWLAFEEQPFDVIVAYRVDRLTRSTRHLQQLVHWAEDHKKLVVSATEAHFDTTTPFAAVVIALMGTVAQMELEAIKERNRSAAHFNIRAGKYRGSLPPWGYLPARVDGEWRLVPDPVQRERILEVYHRVVDNHEPLHLVAHDLNRRGVLSPRDYFAQLQGREPQGRKWSPTALKRSMTSEAMLGYATLNGKTVRDEDGAPLVRAEPILTREQLEALRAELVKTPRAKPAVSTPSLLLRVLFCAVCGEPAYKFSGGGRKHPRYRCRSMGFPKHCGNGTVATAEWDAFCEEQVLDLLGDAERLEKVWVAGSDSAVELAEVNAELVDLTSLIGSPAYRAGSPQREALDARIAALVARQEELEGLEARPSGWEWRETGQRFGDWWREQDTAAKNTWLRSMNVRLTFDVRGGLTRTIDFGDLQEYGQHLRLGSVVERLHAGMS

SEQ ID NO: 12524 - protein, 500 aa, synthetic construct
MRAIVVIRLSRVTDATTSPERQLESCQQLCARRGWDVVGVAEDLDVSGAVDPFDRKRRPNLARWLAFEEQPFDAIVAYRVDRLTRSIRHLQQLVHWAEDHKKLVVSATEAHFDTTTPFAAVVIALMGTVAQMELEAIKERNRSAAHFNIRAGKYRGSLPPWGYLPTRVDGEWRLAPDPVQRERILEVYHRVVDDHEPLHLVAHDLNRRGVLSPKDYFAQLQGREPQGRKWSATALKRSMISVAMLGYATLNGKTVRDDDGAPLVRAEPILTREQLEALRAELVKTSRAKPAVSTPSLLLRVLFCAVCGEPAYKFAGGGRKHPRYRCRSMGFPKHCGNGTVAMAEWDAFCEKQVLDLLGDAERLEKVWVAGSDSAVELAEVSAELVDLTSLIGSPAYRAGSPQREALDARIAALAARQEELEGLEARPPGWEWRETGQRFGDWWREQDTAAKNAWLRSMNVRLTFDVRGGLTRTIDFGDLQEYEQHLRLGSVVERLHTGMS

SEQ ID NO: 12525 - protein, 500 aa, synthetic construct
MRALVVIRLSRVTDATTSPERQLESCQQLCAQRGWDVVGVAEDLDVSGAVDPFDRKRRPNLARWLAFEGQPFDVIVAYRVDRLARSIRHLQQLVHWAEDHKKLVVSATEAHFDTTTPFAAVVIALMGTVAQMELEAIKERSRSAAHFNIRAGKYRGSLPPWGYLPTRVDGEWRLAPDPVQRERILEVYHRVVDNHEPLHLVAHDLNRRGVLSPKDYFAQLQGREPQGRKWSATALKRSMISEAMLGYATLNGKTVRDDDGAPLVRAEPILTREQLEALRAELVKTSRAKPAVSTPSLLLRVLFCAVCGEPAYKFAGGGRKHPRYRCRSMGFPKHCGNGTVAMAEWDAFCEEQVLDLLGDAERLEKVWIVGSDSAVELAEVNAELVDLTSLIGSPAYRAGSPQREALDARIAALAARQEELEGLEARPSGWEWRETGQRFGDWWREQDTAAKNTWLRSMNVRLTFDVRGGLTRTIDFGDLQEYEQHLRLGSVVERSHTGTS

SEQ ID NO: 12526 - protein, 500 aa, synthetic construct
MRTLVVIRLSRVTDATTSPERQLESCQQLCAQRGWDVVGVAEDLDVSGAVDPFDRKRRPNLARWLAFEEQPFDAIVAYRVDRLTRSIRHLQQLVHWAEDHKKLVVSATEAHFDTTTPFAAVVIALMGTVAQMELEAIKERSRSAAHFNIRAGKYRGSLPPWGYLPTRVDGEWRLVPDPEQRERILEVYHRVVDNHEPLHLVAHDLNRRGVLSPKDYFAQLQGRETQGRKWSATALKRSMVSVAMLGYATLNGKTVRDGDGAPLVRAEPILTRGQLEALRAELVKTSRAKPAVSTPSLLLRVLFCAVCGEPAYKFAGGGRKHPRYRCRSMGFPKHCGNGTVAMAEWDAFCEEQVLDLLGDAERLEKVWVAGSDSAVELAEVNAELVDLTSLIGSPAYRAGSPQREALDARIAALAARQEELEGLEARLSGWEWRETGQRFGDWWREQDTAAKNTWLRSMNVRLTFDVRGGLTRTIDFGDLQEYEQHLRLGSVVERLHTAMS

SEQ ID NO: 12527 - protein, 500 aa, synthetic construct
MRALVVIRLSRVTDATTSPERQLESCQQLCAQRSWDVVGVAEDLDVSGAVDPFDRKRRPNLARWLAFEEQPFDAIVAYRVDRLTRSIRHLQQLVHWAEDHKKLVVSATEAHFDTTTPFAAVVIALMGTVAQMELEAIRERSRSAAHFNIRAGKYRGSLPPWGYLPARVDGVWRLVPDPVQRERILEVYHRVVNNHEPLHLVAHDLNRRGVLSPKDYFAQLQGREPQGRKWSATALKRSMISEAMLGYATLNGKTVRDDDGAPLVRAEPILTREQQEALRVELVKTSRAKPAVSTPSLLLRVLFCAVCGEPAYKFAGGGRKHPRYRCRSMGFPKHCGNGTVAMAEWDAFCEEQVLGLLGDAERLEKVWVAGSDSAVELAEVNAELVDLTSLVGSPAYRAGSPQREALDARIAALAARQEELEGLEARPSGWEWRETGQRFGDWWREQDTAARNTWLRSMNVRLTFGVRGGPTRTIDFGDLQEYEQYLRLGSMVERLHTGMS

SEQ ID NO: 12528 - protein, 500 aa, synthetic construct
MRALVVIRLSRVTDATTSPERQLESCQQLCAQRGWDVVGVAEDLDVSGAVDPFDRKRRPNLARWLAFEEQPFDVIVAYRVDRLARSIRHLQQLVHWAEDHKKLVVSATEAHFDTTTPFAAVVIALMGTVAQMELEAIKERSRSAAHFNIRAGKYRGSLPPWGYLPARVDGEWRLVPDPVQRERILEVYHRVVDNHEPLHLVAHDLNRRGVLSPKDYFAQLRGREPQGRKWSATALKRSMISVAMLGYATLCGKTVRDDDGDPLVRAEPILTREQLEALRAELVKTSRAKPAVSTPSLLLRVLFCAVCGEPAYKFAGGGRKHPRYRCRSMGFPKHCGNGTVAMAEWDAFCEEQVLNLLGDAERLEKVWVAGSDSAVELAEVNKELVDLTSLISSPAYRAGSPQREALDARIAALAARQEELEGLEARPPGWEWRGTGQRFGDWWREQDTAAKNTWLRSMSVRLTFDVRGGLTRTIDFGDLLEYEQHLRLGSVVERLHTGLS

SEQ ID NO: 12529 - protein, 500 aa, synthetic construct
MRALVVIRLSRVTDATTSPERQLESCQQLCTQRGWDVVGVAEDLDVSGAVDPFDCKRRPNLARWLAFEERPFDVIVAYRVDRLTRSVRHLQQLVHWAEDHKKLVVSATEAHFDTTTPFAAVVIALMGTVAQMELEAIKERSRSAAHFNIRAGKYRGSLPPWGYLPTRVDGEWRLVPDPAQRERILEVYHRVVDNHEPLHLVAHDLNRRGVLSPKDYFAQLRGREPQGRKWSATALKRSMTSEAMLGYATLNGKTVRGDDGAPLVRAEPILTREQLEALRAELVKTSRAKPAVSTPSLLLRVLFCAVCGEPAYKFAGGGRKHPRYRCRSMGFPKHCGNGTVVMVEWDAFCEEQVLDLLGDAERLEKVWVTGSDSAVELAEVNAELVDLTSLIGSPAYRAGSPQREALDARIAALAARQGELEGLEARPSGWEWRETGQRFGDWWREQDTAAKNTWLRSMNVRLTFDVRGGLTRTFDFGDLLEYEQHLRLGSVVERLHTGMS

SEQ ID NO: 12530 - protein, 500 aa, synthetic construct
MRALVVIRLSRVTDATTSPERQLESCQQLCAQRGWDVVGVAEDLDVSGAVDPFDRKRRPNLARWLAFEEQPFDVIVAYRVDRLTRSVRHLQQLVHWAEDHKKLVVSATEAHFDTTTPFAAVVIALMGTVAQMELEAIKERSRSAAHFNIRAGKYRGSLPPWGYLPTRVDGEWRLVPDPVQRERILEVYHRVVDNHESLHSVAHDLNRRGVLSPKDYFAQLQGREPQGRKWSATALKRSIISVAMLGYATLNGKTVRDDDGAPLVRAEPILTREQLEALRAELVKTSRAKPAVSTPSLLLRVLFCAVCGEPAYKFAGGGRKHPRYRCRSMGFPKHCGNGTVAMAEWDAFCEEQVLGLLGDAERLEKVWVAGSDSAVELAEVNTELVDLTSLIGSPAYRAGSPQREALDARIAALAARQEELEGLEARPSGWEWRETGQRFGDWWREQDTAAKNTWLRSMNVRLTFDVRGGLTRTVDFGDLQEYEQHLRLGSVVERLHTGMS

SEQ ID NO: 12531 - protein, 500 aa, synthetic construct
MRALVVIRLSRVTDATTSPERQLESCQQLCAQRGWDVVGVAEDLDVSGAVDPFDRKRRPNLARWLAFEEQPFDVIVAYRVDRLTRSVRHLQQLVHWAEDHKKLVVSATEAHFDTTTPFAAVVIALMGTVAQMELEAIRERSRSAAHFNIRAGKYRGSLPPWGYLPTRVDGEWRLVPDPVQRERILEVYHRVVDNHEPLHLVAHDLNRRGVLSPRDYFAQLRGREPQGRGWSATALKRSMISEAMLGYATLNGKTVRDDDGAPLVRAEPILTREQQEALRAVLVKTSRTKPAVSTPSLLLRVLFCAVCGEPAYKFAGGGRKHPRYRCRSMGFPKHCGNGTVAMAEWDAFCEEQVLGLLGDAERLEKVWVAGSDSAVELAEVNAELVDLTSLVSSPAYRAGSPQREALDVRIAALAARQEELEGLEARPSGWEWREAGQRFGDWWREQDTAAKNAWLRSMNVRLTFDVRGGLTRTIDFGDLQEYEQHLRLGSVVERSHTGMS

SEQ ID NO: 12532 - protein, 500 aa, synthetic construct
MRALVVIRLSRVTDATTSPERQLESCQQLCAQRGWDVVGVAEDLDVSGAVDPFDRKRRPNLARWLAFEEQPFDVIVAYRVDRLARSIRHLQQLVHWAEDHKKLVVSATEAHFDTTTPFAAVVIALMGTVAQMELEAIKERNRSAAHFNIRAGKYRGSLPPWGYLPTRVDGEWRLVPDPVQRERILEVYRRVVDNHEPLHLVAHDLNRRGVLSPKDYFAQLQGREPQGRKWSATALKRSMISEAMLGYATLNGKTVRDDDGAPLVRAEPILTREQQEALRAELVKTSRAKPAVSTPSLLLRVLFCAVCGEPAYKFAGGGRKHPRYRCRSMGFPKHCGNGTVAMAEWDAFCEEQVLDLLGDAERLEKVWVAGSDSAVELAEVNAELVDLTSLIGSPAYRAGSPQREALDARIAALAARQEELVGLEARPSGWEWRETGQRFGDWWREQDTAAKNTWLRSMNVRLTFDVRGGLTRTIDFGDLLEYEQHLRLGSVVERLHTGMS

SEQ ID NO: 12533 - protein, 500 aa, synthetic construct
MRALVVIRLSRVTDATTSPERQLESCQQLCAQRGWDVVGVAEDLDVSGAVDPFDRKRRPNLARWLAFEEQPFDVIVAYRVDRLTRSIRHLQQLVHWAEDHKKLVVSATEAHFDMTTPFAAVVIALMGTVAQMELEAIKERSRSAAHFNIRAGKYRGSLPPWGYLPTRVDGEWRLAPDPVQRERILEVYHRVVDNHEPLHLVAHDLNRRGVLSPRDYFAQLQGREPQGRKWSATALKRSMISEAMLGYATLNGKIVRDDDGAPLVRAEPILTREQLEALRAELVKTSRAKPAVSTPSLLLRVLFCAVCGEPAYKFAGGGRKHSRYRCRSMGFPKHCGNGTVAMAEWDAFCEEQVLNLLGDTERLEKVWVAGSDSAVELAEVNAELVDLTSLIGSPAYRARSPQREALDARIAALAARQEELEGLEARPSGWEWRETGQRFGDWWREQDTAAKNTWLRSMNVRLTFDVRGGLTRTIDLGDLQEYEQHLRLGSVAERLRTGMS

SEQ ID NO: 12534 - protein, 500 aa, synthetic construct
MRALVVIRLSRVTDATTSPERQLESCQQLCAQRGWDVVGVAEDLDVSGAVDPFDRKRRPNLARWLAFEEQPFDVIVAYRVDRLTRSTRHLQQLVRWAEDHKKLVVSATEAHFDTTTPFAAVVIALMGTVAQMELEAIRERSRSAAHFNIRAGKYRGSLPPWGYLPARVDGEWRLVPDPVQRERILEVYHRVVDNHEPLHLVAHDLNRRGVLSPKDYFAQLQGREPQGRKWSATALKRSMISGAMLGYATLNGKTVRDDDGAPLVRAEPILTREQLEALRAELVKATRAKPAVSTPSLLLRVLFCAVCGEPAYKFAGGGRKHPRYRCRSMGFPKHCGNGTVAMAEWDAFCEEQVLNLLGDAERLEKVWVAGSDSAVELAEVNAELVDLTSLIGSPAYRAGSPQREALDARIAALAARQEELEGLEARPSGWEWRGTGQRFGDWWREQDTAAKNTWLRSMNVRLTFDVRGGLTRTIDFGDLQEYEQHLRLGSVAERLHTGMS

SEQ ID NO: 12535 - protein, 500 aa, synthetic construct
MRALVVIRLSRVTDATTSPERQRESCQQLCAQRGWDVVGVAEDLDVSGAVDPFDRKRRPNLARWLAFEEQPFDVIVAYRVDRLTRSTRHLQQLVRWAEDHKKLVVSATEAHFDTTTPFAAVVIALMGTVAQMELEAIKERNRSAAHFNIRAGKYRGSLPPWGYLPTRVDGEWRLVPDPVQRERILEVYHRVVDNHEPLHLVAHDLNRRGVLSPKDYFAQLRGREPQGRKWSATALKRSMISEAMLGHATLNGKTVRDEDGAPLVRAEPILTREQLEALRAELAKTSRAKPAVSTPSLLLRVLFCAVCGEPAYKFAGGGRKHPRYRCRSMGFPKHCGNGTVAMAEWDAFCEEQVLDLLGDAERLEKVWVAGSDSAVELAEVNAELVDLTSLIGSPAYRAGSPQREALDARIAALAARQEELEGLEARPSGWEWRETGQRFGDWWREQGTAAKNTWLRSMNVRLTFDVRGGLARTIDFGDLQEYEQHLRLGSVVERLHTGMS

SEQ ID NO: 12536 - protein, 500 aa, synthetic construct
MRALVVIRLSRVTDATTSPERQLESCQQLCAQRGWDVVGVAEDLDVSGAVDPFDRKRRPNLARWLAFEEQPFDVIVAYRVDRLTRSTRHLQQLVHWADDHKKLVVSATEAHFDTTAPFAAVVIALMGTVAQMELEAIKERSRSAAHFNIRAGKYRGSLPPWGYLPARVDGVWRLVPDPVQRERILEVYHRVVDNHEPLHLVAHDLNRRGVLSPKDYFAQLRGREPQGRKWSATALKRSMISVAMLGYATLCGKTVRDDDGAPLVRAEPILTREQLEALRAELVKTSRAKPAVSTPSLLLRVLFCAVCGEPAYKFAGGGRKHPRYRCRSMGFPKHCGNGTVAMAEWDAFCEEQVLNLLGDAERLEKVWVAGSDSAVELAEVNKELVDLTSLICSPAYRAGSPQREALDARIAALAARQEELEGLEARLSGWEWRETGQRFGDWWREQDTAAKNTWLRSMNVRLTFDVRGGLTRTIDFGDLQEYEQHLRLGSVVERLHTGMS

SEQ ID NO: 12537 - protein, 500 aa, synthetic construct
MRALVVIRLSRVTDATTSPERQLESCQQLCAQRGWDVVGVAEDLDVSGAVDPFDRKRRPNLARWLAFEEQPFDVIVAYRVDRLARSIRHLQQLVHWAEDHKKLVVSATETHFDTTTPFAAVVIALMGTVAQMELEAIKERSRSAAHFNIRAGKYRGSLPPWGYLPTRVGGEWRLAPDPVQRERILEVYHRVVDNHEPLHLVAHDLNRRGVLSPKDYFAQLQGREPQGRRWSATALKRSMISVAMLGYATLNGKTVRDDDGAPLVRAEPILTREQLEALRAELVKTSRTKPAVATPSLLLRVLFCAVCGEPAYKFAGGGRKHPRYRCRSMGFPKHCGNGTVAMAEWDAFCEEQVLDLLGDAERLEKVWVAGSDSAVELAEVNAELVDLTSLIGSPAYRAGSPQREALGARIAALAARQEELEGLEARPSGWEWRGTGQRFGDWWREQDTTAKNTWLRSMNVRLTFDVRGGLTRTIDFGDLQEYERHLRLGSVDERLHTGMP

SEQ ID NO: 12538 - protein, 500 aa, synthetic construct
MRALVVIRLSRVTDATTSPERQLESCQQLCAQRGWDVVGVAEDLDVSGAVDPFDRKRRPNLARWLAFEEQPFDAIVAYRVDRLTRSIRHLQQLVHWAEDHKKLVVSATEAHFDTTTPFAAVVIALMGTVAQMELEAIRERNRSAAHFNIRAGKYRGSLPPWGYLPARVDGVWRLVLDPVQRERILEVYHRVVNNHEPLHLVAHDLNRRGVLSPKDYFAQLQGREPQGRRWSATALKRSMISEAMLGYATLNGKTVRDDDGAPLVRAEPILTREQQEALRAELVKTSRAKPAVSTPSLLLRVLFCAVCGEPAYKFAGGGRKHPRYRCRSMGFPKHCGNGTAAMAEWDAFCEEQVLGLLGDAERLEKVWVAGSDSAVELAEVNAELVDLTSLIGSPAYRAGSPQREALDARIAALAARQKELEGLEARPSGWEWRETGQRFGDWWREQDTAAKNTWLRSMNVRLTFDVRGGLTRTIDFGDLQEYEQHLRLGSVVERLHTGVS

SEQ ID NO: 12539 - protein, 500 aa, synthetic construct
MRALVVIRLSRVTDATTSPERQLESCQQLCAQRGWDVVGVAEDLDVSGAVDPFDRKRRPNLARWLAFEEQPFDVIVAYRVDRLTRSTRHLQQLVHWAEDHKKLVVSATEAHFDTTTPFAAVVIALMGTVAQMELEAIKERSRSAAHFNIRAGKYRGSLPPWGYLPTRVDGEWRLVPDPVQRERILEVYHRVVDNHEPLHLVAHDLNRRGILSPKDYFAQLRGREPQGRKWSATALKRSMISEAMLGYATLNGKTVRDDDGAPLVRAEPILTREQLEALRAELVKTSRAKPAVSTPSLLLRVLFCAVCGEPAYKFSGGGRKHPRYRCRSMGFPKHCGNGTVAMAEWDAFCEGQVLDLLGDTERLEKVWVAGSDSTVELAEVNAELVDLTSLIGSPAYRAGSPQREALDARIAALAARQEELEGLEARPSGWEWRETGQRFGDWWREQDTAAKNTWLRSMNVRLTFDVRGGLTRTIDFGDLQEYEQHLRLGSVVERLHTGMS

SEQ ID NO: 12540 - protein, 500 aa, synthetic construct
MRALVVIRLSRVTEATTSPERQLESCQQLCAQRGWDVVGVAEDLDVSGAVDPFDRKRRPNLARWLAFEEQPFDVIVAYRVDRLTRSVRHLQRLVHWAEDHKKLVVSATEAHFDTTTPFAAVVIALMGTVAQMELEAIKERSRSAAHFNIRAGKYRGSLPPWGYLPTRVDGEWRLVPDPVQRERILEVYHRAVDNHEPLHLVAHDLNRRGVLSPRDYFAQLRGREPQGRKWSATALKRSMISEAMLGYATLNGKTVRGDDGAPLVRAEPILTREQLEALRAELVKTSRAKPAVSTPSLLLRVLFCAVCGEPAYKFAGGGRKHPRYRCRSMGFPKHCGNGTVAMAEWDAFCEEQVLGLLGDAERLERVWVAGSDSAVKLAEANAELVDLTSLIGSPAYRAGSPQREALDARIAALAARQEELESLEARPSGWEWRETGQRFGDWWREQDTAAKNTWLRSMNVRLTFDVRGGLTRTIDFGDLQEYEQHLRLGSVVERPHAGMS

SEQ ID NO: 12541 - protein, 500 aa, synthetic construct
MRALVVIRLSRVTDATTSPERQLESCQQLCAQRGWDVVGVAEDLDVSGAVDPFDRKCRPNLARWLAFEEQPFDVIVAYRVDRLTRSTRHLQQLVHWAEDHRKLVVSATEAHFDTTTPFAAVVIALMGTVAQMELEAIKERSRSAAHFNIRAGKYRGSLPPWGYLPTRVDGEWRLVPDPVQHERILEVYHRVVDNHEPLHLVAHDLNRRGVLSPKDYFAQLQGREPQGRKWSATALKRSMISEAMLGYATLNGKTVRDDDGAPLVRAEPILTREQQEALRAELVKTSRAKPAVSTPSLLLRVLFCAVCGEPAYKFAGGGRKHPRYRCRSMGFPKHCGNGTVAMAEWDAFCEEQVLNLLGDAERLEKVWVAGSDSAVELAEVNAELVDLTSLIGSPAYRAGSTQREALDARIAALAARQEELEGLEARPSGWEWRGTGQRFGDWWRGQDTAAKNTWLRTMNVRLTYDVRGGLTRTIDFGDLQEYEQHLRSGSVVERLHTGMS

SEQ ID NO: 12542 - protein, 500 aa, synthetic construct
MRALVVIRLSRVTDATTSPERQLESCQQLCAQRGWDVVGVAEDLDVSGAVDPFDRKRRPNLARWLAFEEQPFDVIVAYRVDRLTRSTRRLQQLVHWAEDHKKLVVSATEAHFDTTSPFAAVVIALMGTVAQMELEAIRERSRSAAHFNIRAGKYRGSLPPWGYLPARVDGEWRLVPDPVQRERILEVYHRVVDNHEPLHLVAHDLNRRGVLSPKDYFAQLRGREPQGRKWTATALKRSMISGAILGYATLNGKTVRDDSGAPLVRAEPILTREQLEALRAELVKTSRAKPAVSTPSLLLRVLFCAVCGEPAYKFAGGGRKHPRYRCRSMGFPKHCGNGTVAMAEWNAFCEEQVLDLLGDAERLEKVWVAGSDYAVELAEVNAELVDLTSLIGSPAYRAGSPQREALDARIAALAARQEELEGLEARPSGWVWRETGQRFGDWWREQDTAAKNTWLRSMNVRLTFDVRGGLTRTIDFGDLHEYEQHLRLGSVAERLHTGMS

SEQ ID NO: 12543 - protein, 500 aa, synthetic construct
MRALVVIRLSRVTDTTTSPERQLESCQQLCAQRGWDVVGVAEDLDVSGAVDPFDRKRRPNLARWLAFEEQPFDAIVAYRVDRLTRSVRHLQQLVHWAEDHKKLVVSATEAHFDTTTPFAAVIIALMGTVAQMELEAIKERNRSAAHFNIRAGKYRGSLPPWGYLPTRVDGEWRLVPDPVQRERILEVYHRVVDNHEPLHLVAHDLNRRGVLSPRDYFAQLQGREPQGRKWSATALKRSMISGAMLGYATLNGKTVRDDDGAPLVRAEPILTRGQLEALRAELVKTSRAKPAVSTPSLLLRVLFCAVCGEPAYKFAGGGRKHPRYRCRSMGFPKHCGNGTVAMAEWDAFCEEQVLDLLGDAERLEKVWVAGSDSAVELAEVNAGLEDLTSLIGSPAYRAGSPQREALDARIAALAARQEELEGLEARPSGWEWRETGQRFGDWWREQDTAAKNTWLRSMNVRLTFDVRGGLTRTIDFGDLQEYEQHLRLGSVDERLHTGMS

SEQ ID NO: 12544 - protein, 500 aa, synthetic construct
MRALVVIRLSRVTEATTSPERQLESCQQLCAQRGWDVVGVVEDLDVSGAVDPFDRKRRPNLARWLAFEERPFDAIVAYRVDRLARSIRHLQQLVHWAEDHKKLVVSATEAHFDTTTPFAAVVIALMGTVAQMELEAIKERSRSAAHFNIRAGKYRGSLPPWGYLPTRVDGEWRLVPDPVQRERILEVYHRVVDNHEPLHLVAHDLNRRGVLSPKDYFAQLRGREPQGRKWSATALKRSMTSEAMLGYATLNGKTVRNDDGAPLVRAEPILTREQLEALRAELVKTSRAKPAVSTPSLLLRVLFCAVCGEPAYKFAGGGRKHPRYRCRSMGFPKHCGNGTVAMAEWDAFCEEQVLDLLGDAERLEKVWVAGTDSAVELAEVNAELVDLTSLICSPAYRAGSPQREALDARIAALAARQEELEGLEARLSGWEWRETGQRFGDWWREQDTAAKNTWLRSMNVRLTFDVRGGLTRTIDFGDLQEYEQHLRLGSVVERLHTGMS

SEQ ID NO: 12545 - protein, 500 aa, synthetic construct
MRALVVIRLSRVTDATTSPERQLESCQQLCAQRGWDVVGVAEDLDVSGAVDPFDRKRRPNLARWLAFEEQPFDVIVAYRVDRLTRSVRHLQQLVHWAEDHKKLVVSATEAHFDTTTPFAAVVIALMGTVAQMELEAIKERSRSAAHFNIRAGKYRGSLPPWGYLPARVDGEWRLVPDPVQRERILEVYHRVVDNHEPLHLVAHDLNRRGVLSPKDYFAQLRGREPQGRKWSATALKRSMISVAMLGYATLCGETVRDDDGAPLVRAEPILTREQLEALRAELVKTSRAKPAVSTPSLLLRVLFCAVCGEPAYKFAGGGRKHPRYRCRSMGFPKHCGNGTVAMAEWDAFCEEQVLNLLGDAERLEKVWVAGSDSAVELAEVNKELVDLTSLIGSPAYRAGSPQREALDARIAALAARQEELEGLEARPSGWEWRGTGQRFGDWWREQDTAAKNTWLRSMNVRLTFDVRGGLTRTIDFGDLQEYEQHLRLGSVVERLHTGMS

SEQ ID NO: 12546 - protein, 500 aa, synthetic construct
MRALVVIRLSRVTDTTTSPERQLESCQQLCAQRGWDVVGVAEDLDVSGAVDPFDRKRRPNLARWLAFEEQPFDVIVAYRVDRLARSIRHLQQLVLWAEDHKKLVVSATEAHFDTTTPFAAVVIALMGTVAQVELEAIKERSRSAAHFNIRAGKYRGSLPPWGYLPTRVDGEWRLVPDPVQRERILEVYRRVVDNHEPLHLVAHDLNRRGVLSPKDYFAQLRGREPRGRKWSATALKRSMTSEAMLGYATLNGKTVRDDDGAPLVRAEPILTREQLEALRAELVKTSRAKPAVSTPSLLLRVLFCAVCGEPAYKFSGGGRKHPRYRCRSMGFPKHCGNGTVAMAEWDAFCEEQVLDLLGDAERLEKVWVAGSDSAVELAEVNAELVDLTSLIGSPAYRAGSPQREALDARIAALAARQEELEGLEARPSGWEWRETGQRFGDWWREQDTAAKNTWLRSMNVRLTFDVRGGLTRTIDFGDLQEYEQHLRLGSVVGRLHTGMS

SEQ ID NO: 12547 - protein, 500 aa, synthetic construct
MRALVVIRLSRVTDATTSPERQLESCQQLCAQRGWDVVGVAEDLDVSGAVDPFDRKRRPNLARWLAFEEQPFDVIVAYRVDRLARSIRHLQQLVHWAEDHKKLVVSATEAHFDTTTPFAAVVIALMGTVAQMELEAIKERSRSAAHFNIRAGKYRGSLPPWGYLPARVDGEWRLVPDPVQRERILEVYHRVVDNHESLHLVAHDLNRRGVLSPKDYFAQLRGREPQGRKWSATALKRSMTSEAMLGYATLNGKTVRDDDGAPLVRAEPILTREQLEAIRAELVKTSRAKPAVSTPSLLLRVLFCAVCGEPAYKFAGGGRKHSRYRCRSMGFPKHCGNGTVAMAEWDAFCEERVLDLLGDAERLEKVWVAGSDSAVELAEVNAELVDLTSLIGSPAYRVSSPQREALDARIAALAARQEELEGLEARPSGWEWRETGQRFGDWWREQDTAAKNTWLRSMNVRLTFDVRGGLTRTIDFGDLWEYEQHLRLGDVVERLHTGMS

SEQ ID NO: 12548 - protein, 500 aa, synthetic construct
MRALVVIRLSRVTDATTSPERQLESCQQLCAQRGWDVVGVAEDLDVSGAVDPFDRKRRPNLARWLASEEQPFDVIVAYRVDRLARSIRHLQQLVHWAEDHEKLVVSATEAHFDTTTPFAAVVIALMGTVAQMELEAIKERNRSAAHFNIRAGKYRGSLPPWGYLPTRVDGEWRLAPDPVQRERILEVYHRVVDNHEPLHLVAHDLNRRGVLSPRDYFAQLQGREPQGRKWSATALKRSMISKAMLGYATLNGRTVRDDDGAPLVRAEPILTREQQEALRAELVKTSRAKPAVSTPSLLLRVLFCAVCGEPAYKFAGGGRKHPRYRCRSMGFPKHCGNGTVAMAEWDAFCEKQVLDLLGDAERLEKVWVVGSDSAVEFAEVNAELVDLMSLIGSPTYRAGSPQREALDARIAALAARQEELEGLEARPSGWEWRETGQRFGDWWREQDTAAKNTWLRSMNVRLTFDVRGGLTRTIDFGDLQEYEQHLRLGSVVERLHTGMS

SEQ ID NO: 12549 - protein, 500 aa, synthetic construct
MRALVVIRLSRVTDATTSPERQLESCQQLCAQRGWDVVGVAEDLDVSGAVDPFDRKRRPNLARWLAFEERPFDVIVACRVDRLTRSIRHLQQLVHWAEDHKKLVVSATEAHFDTTTPFAAVIIALMGTVAQMELEAIKERSRSAAHFNIRAGKYRGSLPPWGYLPTRVDGEWRLVPDPVQRERILEVYHRVVVNREPLHLVAHDLNRRGVLSPKDYFAQLRGREPQGREWSATALKRSMLSEAMLGYATLNGKTVRDDDGAPLVRAEPILTREQQEALRAELVKTSRAKPAVSTPSLLLRVLFCAVCGEPAYKFAGGGRKHPRYRCRSMGFPKHCGNGTVAMAEWDAFCEEQVLDLLGDAERLEKVWVAGSDSAAELAEVNAELVDLTNLIGSPAYRAGSPQREALDARIVALAARQAELEGLEARPSGWEWRETGQRFGDWWREQDTAAKNTWLRSMNVRLTFDVRGGLTRTIDFGILQEYEQHLRLGSVVERLHTGMS

SEQ ID NO: 12550 - protein, 500 aa, synthetic construct
MRALVVIRLSRVTDATTSPERQLESCQQLCAQRGWDVVGVAEDLDVSGAVDPFDRKRRPNLARWLAFEEQPFDVIVAYRVDRLARSIRHLQQLVHWAEDHKKLVVSATEAHFDTTTPFAAVVIALMGTVAQMELEAIKERNRSAAHFNIRAGKYRGSLPPWGYLPTRVDGEWRLVPDPVQRERILEVYHRIVDNHEPLHLVAHDLNRRGVLSPKDYFAQLRGREPQGRKWSATALKRSMISEAMLGYATLNGKIVRDDDGAPLVRAEPILTREQLEALRAELVKTSRAKPAVSTPSLLLRVLFCAVCGEPAYKFAGGGRKHPRYRCRSMGFPKHCGNGTVAMAEWDAFCEEQVLDLLGDAERLEKVWVAGSDSALEFAEVNAELVDLTSLIGSPAYRAGSPQREALDARIAALAARQEELEGLEARPSGWEWRETGQRFGDWWREQDTATKNTWLRSMNVRLTFGVRGGLTRTIDFGDLQEYEQHLRLGSVVEHLHTGTP

SEQ ID NO: 12551 - protein, 500 aa, synthetic construct
MRALVVIRLSRVTDATTSPERQLESCQQLCAQRGWDVVGVAEDLDVSGAVDPFDRKRRPNLARWLAFEERPFDVIVAYRVDRLARSIRHLQQLVHWAEDHKKLVVSATEAHFDTTTPFAAVVIALMGTVAQMELEAIKERSRSAAHFNIRAGKYRGSLPPWGYLPTRVNGEWRLVPDPVQRERILEVYHRVVDNHEPLHSVAHDLNRRGVLSPKDYFAQLQGREPQGRKWSATALKRSMISEAMLGYATLNGKTVRNDDGAPLVRAEPILTREQLEALRAELVKTSRAKPAVSTPSLLLRVLFCAVCGEPAYKFAGGGRKHPRYRCRSMGFPKHCGNGTVAMAEWDAFCEEQVLGLLGDAERLEKVWVAGSDSAVELAEVNAELVDLTSLIGSPAYRAGSPQREALDARIAALASRQEELEGLEARPPGWGWRETGQRFGDWWREQDTAAKNTWLRSMNVRLTFDVRGGLTRAIDFGDLQEYEQHLRLGSVVERLHTGMS

SEQ ID NO: 12552 - protein, 500 aa, synthetic construct
MRTLVVIRLSRVTDATTSPERQLESCQQLCAQRGWDVVGVAEDLDVSGAVDPFDRKRRPNLARWLAFEEQPFDVIVAYRMDRLTRSIRHLQQLVHWAEDHKKLVVSATEAHFDMTTPFAAVVIALMGTVAQMELEAIKERSRSAAHFNIRAGKYRGSLPPWGYLPTRVDGEWRLAPDPVQRERILEVYHRVVDNHEPLHLVAHDLNRRGVLSPKDYFAQLQGREPQGRKWSATALKRSMISVAMLGYATLNGKTVRGDDGAPLVRAEPILTREQLEALRAELVKTSRAKPAVSTPSLLLRVLFCAVCGEPAYKFAGGGRKHPRYRCRSMGFQKHCGNGTVAMAEWDAYCEEQVLDLLGDTERLEKVWVAGSDSAVELAEVNAELVDLTSLIGSPAYRAGSPQREALDARIAALAARQEELEGLEARPSGWEWRETGQRFGDWWREQDTAAKNTWLRSMNVRLTFDVRGGLTRTIDFGDLQEYEQHLRLGGVVERLHTGMS

SEQ ID NO: 12553 - protein, 500 aa, synthetic construct
MRALVVIRLSRVTDATTSPERQLESCQQLCAQRGWDVVGVAEDLDVSGAVDPFDRKRRPNLARWLAFEEQPFDAIVAYRVDRLTRSIRHLQQLVRWAEDHKKLVVSATEAHFDTTTPFAAVVIALMGTVAQMELEAIKERSRSAAHFNIRAGKYRGSLPPWGYLPTRVDGEWRLVPDPVQRERILEVYHRVVDNHEPLHSVAHDLNRRGVLSPKDYFAQLRGREPQGRKWSATALKRSMISVTMLGYATLNGKIVRDDSGAPLVRAEPILTREQLEALRAELVKTSRAKPAVSTPSLLLRVLFCAVCGEPAYKFAGGGRKHPRYRCRSMGFPKHCGNGTVAMAEWDAFCEEQVLDLLGDAERLEKVWVAGADSAVELAEVNAELVDLTSLIGSPAYRAGSPQREALDARIAALAARQEELEGLEARPSGWEWRETGQRFGDWWREQDTAAKNTWLRSMNVRLTFDVRGGLTRTIDFGELQEYEQHLRLGSVVERLHTGMS

SEQ ID NO: 12554 - protein, 500 aa, synthetic construct
MRALVVIRLSRVTDATTSPERQLESCQQLCAQRGWDVVGVAEDLDVSGTVDPFDRKRRPNLARWLAFEEQPFDAIVAYRVDRLTRSIRHLQQLVHWAEDHKKLVVSATEAHFDTTTPFAAVVIALMGTVAQMELEAIKERNRSAAHFNIRAGKYRGSLPPWGYLPTRVDGEWRLVPDPVQRERILEVYHRVVDNHEPLHLVAHDLNRRGVLSPRDYFAQLRGREPQGRKWSATALKRSMISEAMLGHATLNGKTVRDEDGAPLVRAEPILTREQLEALRAELVKTSRAKPAVSTPSLLLRVLFCAVCGEPAYKFAGGGRKHSRYRCRSMGFPKHCGNGTVAMAEWDAFCEEQVLNLLGDAERLEKVWVAGSDSAVELAEVNTELMDLTSLIGSPAYRAGSPQREALDARIAALAARQEELEGLEARPSGWEWRETGQRFGDWWREQDTAAKNTWLRSMNVRLTFDVRGGLTRTIDFGDLQEYEQHSRLGSVVECLHTGMS

SEQ ID NO: 12555 - protein, 500 aa, synthetic construct
MRALVVIRLSRVTDATTSPERQLESCQQLCAQRGWDVVGVAEDLDVSGAVDPFDRKRRPNLARWLAFEERPFDVIVAYRVDRLARSIRHLQQLVHWAEDHKKLVVSATEAHFDTTTPFAAVVIALMGTVAQMELEAIKERSRSAAHFNIRAGKYRGSLPPWGYLPTRVDGEWRLVPDPAQRERILEVYHRVVDNHEPLHLVAHDLNRRGVLSPRDYFAQLRGREPQGRKWSATALKRSMISEAMLGYATLNGRTVRDDDGAPLVRAEPILTREQLEALRAELVKTSRAKPAVSTPSLLLRVLFCAVCGEPAYKFTGGGRKHPRYRCRSMGFPKHCGNGTVAMAEWDTFCEEQVLGLLGDTERLEKVWVAGSDSAIELAEVNAELVDLTSLIGSPAYRAGSPQREALDARIAALAARQEELEGLEARPSGWEWRETGQRFGDWWREQDTAAKNTWLRSMNVRLTFDVRGGLARTIDFGDLQEYEQHLRLGNAVERLHTGMS

SEQ ID NO: 12556 - protein, 500 aa, synthetic construct
MRALVVIRLSRVTDATTSPERQLESCQQLCAQRGWDVVGVAEDLDVSGAVDPFDRKRRPNLARWLASEEQPFDVIVAYRVDRLTRSVRHLQQLVHWAEDHKKLVVSATEAHFDTTTPFAAVVIALMGTVAQMELEAIKERSRSAAHFNIRAGKYRGSLPPWGYLPARVDGEWRLVPDPVQRERILEVYHRVVDDHEPLHLVAHDLNRRGVLSPRDYFAQLQGREPQGRRWSATALKRSMISEAMLGYATLNGKTVRDDDGAPLVRAEPILTREQLEALRAELVKTSRAKPAVSTPSLLLRVLFCAVCGEPAYKFAGGGRKHPRYRCRSMGFPKHCGNGTVAMAEWDAFCEEQVLDLLGDAERLEKVWVAGSDSAVELAEVNAELVDLTSLIGSPAYRAGSQQREALDARIAALAARQEELEGLEARPSGWEWRETGQRFGDWWREQDTAAKNTWLRSMNVRLTFDVRGGLTRTIDFGDLQEYEQHLRLGSVAERLHTGMS

SEQ ID NO: 12557 - protein, 500 aa, synthetic construct
MRALVVIRLSRVTDATTSPERQLESCQQLCAQRGWDVVGVAEDLDVSGAVDPFDRKRRPNLARWLAFEEQPFDAIVAYRVDRLTRSIRHLQQLVHWAEDHKKLVVSATEAHFDTTTPFAAVVIALMGTVAQMELEAIKERNRSAAHFNIRAGKYRGSLPPWGYLPARVDGEWRLAPDPVQRERILEVYHRVVDNHEPLHLVAHDLNRRGVLSPKDYFAQLQGREPQGRKWSATALKRSMVSVAMLGYATLNGKTVRDDDGAPLVRAEPILTREQLEALRAELVKTSRAKPAVSTPSLLLRVLFCAVCGEPAYKFAGGGRKHPRYRCRSMGFPKHCGNGTVAMAEWDAFCEEQVLDLLGDAERLERVWVAGSDSAIELAEVSAELVDLTSLIGSPAYRAGSPQREALDARIAALAARQEELEGLEAHPSGWEWRETGQRFGDWWREQNTAAKNTWLRSMNVRLTFDVRGGLTRTIDFGDLHEYEQHLRLGSVVERLHTGMS

SEQ ID NO: 12558 - protein, 500 aa, synthetic construct
MRALVVIRLSRVTDATTSPERQLESCQQLCAQRGWDVVGVAEDLDVSGAVDPFDRKRRPNLARWLTFEEQPFDVIVAYRVDRLTRSVRHLQQLVHWAEDHKKLVVSATEAHFDTTTPFAAVVIALMGTVAQMELEAIKERSRSAAHFNIRAGKYRGSLPPWGYLPARVDGEWRLVPDPVQRERILEVYHRVVDNHEPLHLVARDLNRRGVLSPKDYFAQLRGREPQGREWSATALKRSMTSEAMLGYATLNGKIVRDDDGAPLVRAEPILTREQLEALRAELVKTSRAKPAVSTPSLLLRVLFCAVCGEPAYKFAGGGRKHPRYRCRSMGFPKHCGNGTVAMAEWDAFCEEQVLGLLGDAERLERVWVAGSDSAVELAEVNAELVDLTSLIGSPAYRAGSPQREALDARIAALAARQVGLEGLEARPSGWEWRETGQRFGDWWREQDTAAKNTWLRSMNVRLTFDVRGGLTRTIDFGDLQEHEQHLRLGSVVERLHTGMS

SEQ ID NO: 12559 - protein, 500 aa, synthetic construct
MRALVVIRLSRVTDATTSPERQLESCQQLCAQRGWDVVGVAEDLDVSGAVDPFDRKRRPNLARWLAFEEQPFDVIVAYRVDRLARSIRHLQQLVHWAEDHKKLVVSATEAHFDTTTPFAAVVIALMGTVAQMELEAIKERSRSAAHFNIRAGKYRGSLPPWGYLPTRVDGEWRLVPDPVQRERILEVYHRVVDNHEPLHLVAHDLNRRGVLSPRDYFAQLRGREPQGRKWSATALKRSMTSEAMLGYATLNGKTVRDDDGAPLVRAEPILTREQLEALRAELAKTSRAKPAVSTPSLLLRVLFCAVCGEPAYKFSGGGRKHPRYRCRSMGFPKHCGNGTVAMVEWDAFCEEQVLDLLGDAERLEQVWVAGSDSAVELAEVNAELVDLTSLIGSPAYRAGSPQREALDARIAALTARQEELKGLEARPSGWEWRGTGQRFGDWWREQDTTAKNTWLRSMNVRLTFDVRGGLTRTIDFGDLQEYELHLRLGSVVERLHTGMS

SEQ ID NO: 12560 - protein, 500 aa, synthetic construct
MRALVVIRLSRVTDATTSPERQLESCQQLCAQRGWDVVGVAEDLDVSGAVDPFDRKRRPNLARWLAFEEQPFDVIVAYRVDRLARSIRHLQQLVHWAEDHKKLVVSATEAHFDTTTPFAAVVIALMGTVAQMELEAIKERSRSAAHFNIRAGKYRGSLPPWGYLPTRVDGEWRLVPDPVQRERILEVYHRVVDNHEPLHLVAHDLNRRGVLSPRDYFAQLRGREPQGRKWSATALKRSMISEAMLGYATLNGKTVRDDSGAPLVRAEPILTREQLEALRAELVKTSRAKPAVSTPSLLLRVLFCAVCGEPAYKFAGGGRKHPRYRCRSMGFPKHCGNGTVAMAEWNAFCEEQVLDLLGDAERLEKVWVAGSDSAVELAEVNAELVDLTSLIGSPAYRAGSPQREALDARIAALAARQEELEGSEARPSGWKWRETGQRFGDWWREQDTAAKNTWLRSMNVRLTFDVRGGLTRTIDFGDLREYEQHLCLGSVVERLHTGTS

SEQ ID NO: 12561 - protein, 500 aa, synthetic construct
MRALVVIRLSRVTDATTSPERQLESCQQLCAQRGWDVVGVAEDLDVSGAVDPFDRKRRPNLARWLAFEEQPFDVIVAYRVDRLTRSVRHLQQLVHWAEDHKKLVVSATEAHFDTTTPFAAAVIALMGTVAQMELEAIKERTRSAAHFNIRAGKYRGSLPPWGYLPMRVDGEWRLVPDPVQRERILEVYRRVVDNHEPLHLVAHDLNRRGVLSPKDYFAQLQGREPQGRKWSATALKRSMISEAMLGYATLNGKTVRDDDGAPLVRAEPILTREQLEAVRAELVKTSRAKPAVSTPSLLLRVLFCAVCGEPAYKFAGGGRKHPRYRCRSMGFPKHCGNGTVAMAEWDAFCEEQVLNLLGDAERLEKVWVAGSDSAAELAEVNAELVDLTSLIGSPAYRAGSPQREALDARIAALAARQEELEGLEARPSGWEWCVTGQRFGDWWRKQDTAAKNTWLRSMNVRLTFDVRGGLTRTIDLGDLQEYEQLLRSGSVVERLHTGMS

SEQ ID NO: 12562 - protein, 500 aa, synthetic construct
MRALVVIRLSRVTDATTSPERQLESCQQLCAQRGWDVIGVAEDLDVSGAVDPFDRKRRPNLARWLAFEEQPFDVIVAYRVDRLTRSTRHLQQLVHWAEDHKKLVVSATEAHFDTTTPFAAVVIALMGTVAQMELEAIKERSRSAAHFNIRAGKYRGSLPPWGYRPTRVDGEWRLVPDPVQRERILEVYHRVVDNHEPLHLVAHDLNRRGVLSPKDYFAQLQGREPRGRKWSATALKRSMISEAMLGYATLDGKTVRDDDGAPLVRAEPILTREQQEALRAELVKTSRAKPAVSTPSLLLRVLFCAVCGEPAYKFAGGGRKHPRYRCRSMGFPKHCGNGTVAMAEWDAFCEEQVLDLLGDAERLEKVWVAGSDSAVELAEVNAELVDLTSLIGSPAYRAGSPQREALDARIAALAARQEELEGSEARPSGWEWRGTGQRFGDWWCEQDTAAKNTWLRSMNVRLTFDVRGGLTRTIDFGDLQEYEQHLRLGGVVERLHTGMS

SEQ ID NO: 12563 - protein, 500 aa, synthetic construct
MRALVVIRLSRVTDATTSPERQLESCQQLCAQRGWDVVGVAEDLDVSGAVDPFDRKRRPNLARWLAFEEQPFDVIVAYRVDRLARSIRHLQQLVHWAEDHKKLVVSATEAHFDTTTPFAAVVIALMGTVAQMELEAIKERSRSAAHFNIRAGKYRGSLPPWGYLPTRVDGEWRLAPDPVQRERILEVYHRVVDNHEPLHLVAHDLNRRGVLSPKDYFAQLQGREPQGRKWSATALRRSMISVAMLGYATLNGKTVRDDDGAPLVRAEPILTREQLEALRAELVKTSRAKPAVSTPSLLLRVLFCAVCGEPAYKFAGGGRRHPRYRCRSMGFPKHCGNGTVAMAEWDAFCEEQVLGLLGDAERLEKVWVAGSDSAVELAEVNAELEDLTSIIGSPAYRAGSPQREALDARIAALAARQEELEGLEARPSGWEWRETGQRFGDWWREQDTAAKNTWLRSMNVRLTFDVRGGLTRTIDFGDLQEYEQHLRLGSEVERLHTGMS

SEQ ID NO: 12564 - protein, 500 aa, synthetic construct
MRALVVIRLSRVTDATTSPERQLESCQQLCAQRGWDVVGVAEDLDVSGAVDPFDRKRRPNLARWLAFEEQPFDVIVAYRVDRLARSIRHLQQLVHWVEDHKKLVVSATEAHFDTTTPFAAVVIALMGTVAQMELEAIKERSRSAAHFNIRAGKYRGSLPPWGYLPTRVDGEWRLVPDPVQRERILEVYHRVVDNHEPLHLVAHDLNRRGVLSPRDYFAQLRGREPQGRKWSATALKRSMISEVMLGYATLNGRTVRDDDGAPLVRAEPILTREQLEALRAVLVKTSRAKPAVSTPSLLLRVLFCAVCGEPAYKFAGGGRKHPRYRCRSMGFLKHCGNGTVAMAEWDAFCEEQVLDLLGDAERLEKVWVAGSDSAVELAEVNAELVDLTSLIGSPAYRAGSPQREALDARIAALAARQEELEGLEARPSGWEWRGTGQRFGDWWREQDTAAKNTWLRTMNVRLTFDVRDGLTRTIDFGGLQEYEQHLRLGSVVERLHTGMS

SEQ ID NO: 12565 - protein, 500 aa, synthetic construct
MRALVVIRLSRVTDATTSPERQLESCQQLCAQRGWDVVGVAEDLDVSGAVDPFDRKRRPNLARWLAFEEQPFDVIVAYRVDRLARSIRHLQQLVHWAEDHKKLVVSATEAHFDTTTPFAAVVIALMGTVAQMELEAIKERSRSAAHFNIRAGKYRGSLPPWGYLPTRVDGEWRLAPDPVQRERILEVYHRVVDNHEPLHLVAHDLNRRGVLSPRDYFAQLRGREPQGRKWSATVLKRSMISEAMLGYATLNGRTVRDDDGAPLVRAEPILTREQLEALRAELVKTSRAKPAVSTPSLLLRVLFCAVCGEPAYKFAGGGRKHPRYRCRSMGFPKHCGNGTVATAEWDAFCEEQVLDLLGDTERLEKVWVAGSDSAIELAEVNAELVDLTSLIGSPAYRAGSPQREALDARIAALAARQEELGGLEARPSGWEWRGTGQRFGDWWREQDTAAKNTWLRSMNVRLAFDVRGGLTRTIDFGDLQEYGQHLRLGSVVERLHTGMS

SEQ ID NO: 12566 - protein, 500 aa, synthetic construct
MRALVVIRLSRVTDATTSPERQLESCQQLCAQRGWDVVGVAEDLDVSGAVDPFDRKRRPNLARWLAFEEQPFDVIVAYRVDRLTRSTRHLQRLVHWAEDHKKLVVSATEAHFDTTTPFAAVVIALMGTVAQMELEAIKERNRSAAHFNIRAGKYRGSLPPWGYLPTRVDGEWRLVPDPVQRERILEVYRRVVNNHEPLHLVAHDLNRRGVLSPKDYFAQLRGREPQGRKWSATALKRSMTSEAMLGYATLNGKTVRDDDGAPLVRAEPILTREQLEALRAELDKTSRAKPAVSTPSLLLRVLFCAVCGEPAYKFAGGGRKHSRYRCRSMGFPKHCGNGTVAMAEWDAFCEEQVLDLLGDAERLEKVWVAGSDSAVELAEVNAELVDLTSLIGSPAYRAGSPQREALDARIAALAARQEELEGLEARPSGWEWRETGQRFGDWWREQDTAAKNTWLRSMNVRLTFDVRGGLTRSIDFGDLQVYEQHLRLGSVVERLHTGMS

SEQ ID NO: 12567 - protein, 500 aa, synthetic construct
MRALVVIRLSRVTDATTSPERQLESCQQLCAQRGWDVVGVAEDLDVSGAVDPFDRKRRPNLARWLAFEEQPFDVIVAYRVDRLTRSVRHLQQLVHWAEDHKKLVVSATEAHFDTTTPFAAVVIALMGTVAQMELEAIKERIRSAAHFNIRAGKYRGSLPPWGYLPTRVDGEWRLVPDPVQRERILEVYHRVVDNHEPLHLVAHDLNRRGVLSPKDYFAQLRGREPQGRKWSATALRRSMISEAMLGYATLNGKTVRDDDGAPLVRAEPILTREQQEALRAELVKTSRAKPAVSTPSLLLRVLFCAVCGEPAYKFAGGGRKHPRYRCRSMGFPKHCGNGTVAMAEWDAFCEEQVLGLLGDAERLEKVWVAGSDSAVELAEVNAELVDLTSLIGSPAYRAGSPQREALDARIAALAARQEELEGLEARPSGWEWRETGQRFGDWWREQDTAARNTWLRSMNVRLTFDVRGGLTRTIDFGDLQEYEQHLRLGSVVERLHTGMS

SEQ ID NO: 12568 - protein, 500 aa, synthetic construct
MRALVVIRLSRVTDATTSPERQLESCQQLCAQRGWNVVGVAEDLDVSGAVDPFDRKRRPNLARWLAFEEQPFDVIVAYRVDRLARSVRHLQQLVRWAEDHKKLVVSATEAHFDTTTPFAAVVIALMGTVAQMELEAIKERSRSAAHFNIRAGKYRGSLPPWGYLPMRVDGEWRLVPDPVQRERILEVYHRVVDNHEPLHLVAHDLNRRGVLSPKDYFAQLQGREPQGRKWSATALKRSMISVAMLGYATLNGKTVRDDDGAPLVRAEPILTREQLEALRAELVKTSRAKPAVSTPSLLLRVLFCAVCGEPAYKFTGGGRKHPRYRCRSMGFPKHCGNGTVAMAEWDAFCEEQVLDLLGDAERLEKVWVAGSDSAVELAEVNAELVDLTSLIGSPAYRAGSPQREALDARIAALAARQEELGGLEARPSGWKWRETGQRFGDWWREQDTAAKNTWLRSMNVRLTFDVRGGLTRTIDFGDLQEYEQHLRLGSVVERLHTGMS

SEQ ID NO: 12569 - protein, 500 aa, synthetic construct
MRALVVIRLSRVTDATTSPERQLESCQQLCAQRGWDVVGVAEDLDVSGAVDPFDRKRRPNLARWLAFEEQPFDVIVAYRVDRLTRSTRHLQQLVQWAEDHEKLVVSATEAHFDTTTPFAAVVIALMGTVAQMELEAIKERNRSAAHFNIRAGKYRGSLPPWGYLPTRVGGEWRLVPDPVQRERILEVYHRVVDNHEPLHSVAHDLNRRGVLSPKDYFAQLQGREPQGRKWSATALKRSMISEAMLGYATLNGKTVRDDDGAPLVRAEPILTREQQEALRAELVKTSRAKPAVSTPSLLLRVLFCAVCGEPAYKFAGGGRKHPRYRCRSMGFPKHCGNGTVATAEWDAFCEEQVLDLFGDAERLEKVWVAGSDSAVELAEVNAELVDLTSLIGSPAYRAGSPQREALDARIAALAARQEELESLEARPPGWEWRETGQRFGDWWREQDTAAKNTWLRSMNVRLTFDVRGGLTRTIDFGDLQEYEQHLRLGSVVERLHTGMS

SEQ ID NO: 12570 - protein, 500 aa, synthetic construct
MRALVVIRLSRVTDATTSPERQLESCQQLCAQRGWDVVGVAEDLDVSGAVDPFDRKRRPNLARWLAFEEQPFDVIVAYRVDRLARSIRHLQQLVHWAEDHKKLVVSATEAHFDTTTPFAAVVIALMGTVAQMELEAIKERNRSAAHFNIRAGKYRGSLPPWGYLPARVDGEWRLVPDPVQRERILEVYHRVVDNHEPLHLVAHDLNRRGVLSPKDYFAQLQGREPQGRKWSATALKRSMTSEAMLGYATLNGKTVRDEDGAPLVRAEPILTREQLEALRAELVKTSRAKPAVSTPSLLLRVLFCAVCGEPAYKFAGGGRKHPRYRCRSMGFPKHCGNGTVAMAKWDAFCEEQVLDLLGDAERLEKVWVAGSDSAVELAEVNAELVDLTSLIGSPAYRAGSPQREALDARIAALAARQEELEGLEARPSGWEWRETGQRFGDWWREQDTAAKNTWLRSMNVRLTFDVRGGLARTIDFGDLQEYEQHLRLGSVVERLHTGMS

SEQ ID NO: 12571 - protein, 500 aa, synthetic construct
MRALVVIRLSRVTEATTSPERQLESCQQLCAQRGWNVVGVAEDLDVSGAVDPFDRRRRPNLARWLAFEEQPFDVIVAYRVDRLTRSIRHLQQLVHWAEDHKKLVVSATEAHFDMTTPFAAVVIALMGTVAQMELEAIKERSRSAAHFNIRAGKYRGSLPPWGYLPTRVDGEWRLVPDPVQRERILEVYHRVVDNHEPLHLVAHDLNRRGVLSPKDYFAQLQGREPQGRKWSATALKRSMISEAMLGYATLNGKIVRGDDGAPLVRAEPILTREQQEALRAELVETSRAKPAVSTPSLLLRVLFCAVCGEPAYKFVGGGRKHPRYRCRSMGFPKHCGNGTVAMAEWDAFCEDQVLDLLGDAERLEKVWVAGSDSAVELAEVNAELVDLTSLIGSPAYRAGSPQREALDARIAALAARQEKLEGLEARPSGWEWRETGQRFGDWWREQDTAAKNAWLRSANVRLTFDVRGGLTRTIDFGDLQEYEQHLRLGSVVERLHTGVS

SEQ ID NO: 12572 - protein, 500 aa, synthetic construct
MRALVVIRLSRVTDATTSPERQLESCQQLCAQRGWGVVGVAEDLDVSGAVDPFDRKRRPNLARWLAFEEQPFDVIVAYRVDRLTRSTRHLQRLVHWAEDHKKLVVSATEAHFDTTTPFAAVVIALMGTVAQMELEAIKERNRSAAHFNIRAGKYRGSLPPWGYLPTRADGEWRLVPDPVQRERILEVYHRVVDNHEPLHLVAHDLNRRGVLSPKDYFAQLRGREPRGRKWSATALKRSMISEAMLGYATLNGKTVRDDDGAPLVRAEPILTREQLEALRAELVKTSRAKPAVSTPSLLLRVLFCAVCGEPAYKFSGGGRKHPRYRCRSMGFPKHCGNGTVAMAEWDAFCEEQVLDLLGDAERLEKVWVAGPDSAVELAEVNAELVDLTSLIGSPAYRAGTPQREALDARIAALAARQEELEGLEARPSGWEWRETGQRFGDWWREQDTAAKNTWLRSMNVRLTFDVRGGLTRTIDFGDLQEYGQHLRLGSVVERLRTGMS

SEQ ID NO: 12573 - protein, 500 aa, synthetic construct
MRALVVIRLSRVTDATTSPERQLESCQQLCAQRGWDVVGVAEDLDVSGAVDPFDRKRRPNLARWLAFEEQPFDVIVVYRVDRLTRSVRHLQQLVHWAEDHKKLVVSATEAHFDTTTPFAAVVIALMGTVAQMELEAIKERSRSAAHFNIRAGKYRGSLPPWGYLPARVDGEWRLVPDPVQRERILEVYHRVVDNHEPLHLEAHDLNRRGVLSPKDYFAQLRGREPQGREWSATALKRSMISVAMLGYATLCGKTVRDDDGAPLVRAEPILTREQLEALRAELVKTSRAKPAVSTPSLLLRVLFCAVCGEPAYKFAGGGRKHPRYRCRSMGFPKHCGNGTVAMAEWDAFCEEQVLNLLGDAERLEKVWVAGSDSAVELAEVNKELVDLTSLIGSPAYRAGSPQREVLDARTAALAARQEELEGLEARPSGWEWRGTGQRFGDWWRELDTAAKNTWLRSMNVRLTFDVRDGLTRTIDFGDLQEYEQHLRLGSVVERSHTGMS

SEQ ID NO: 12574 - protein, 500 aa, synthetic construct
MRALVVIRLSRVTDATTSPERQLESCQQLCAQRGWDVVGVAEDLDVSGAVDPFDRKRRPNLARWLAFEEQPFDVIVAYRVDRLARSIRHLQQLVHWAEDHKKLVVSATEAHFDTTTPFAAVVIALMGTVAQMELEAIKERSRSAAHFNIRAGKYRGSLPPWGYLPARVDGVWRLVPDPVQRERILEVYHRVVNNHEPLHLVAHDLNRRGILSPKDYFAQLQGREPQGRKWSATALKRSMISEAMLGYATLNGKTVRDDDGAPLVRAEPILTREQQEALRAELVKTSRAKPAVSTPSLLLRVLFCAVCGEPAYKFAGGGRKHPRYRCRSMGFPKHCGNGTVAMAEWDAFCEEQVLDLLGDAERLEKVWVAGSDSAVELAEVNAELVDLTSLIGSPAYRTGSPQREALDARIAALAARQEELEGLEARPSGWEWRETGQRFGDWWREQDTAAKNTWLRSMNVRLTFDVRGGLTRTIDFGDLQEYEQHLRLGSVVERLHTGMP

SEQ ID NO: 12575 - protein, 500 aa, synthetic construct
MRALVVIRLSRVTDATTSPERQLESCQQLCAQRGWDVVGVAEDLDVSGAVDPFDRKRRPNLARWLAFEEQPFDVIVAYRVDRLTRSIRHLQQLVHWAEDHKKLVVSATEAHFDMTTPFAAVVVALMGTVAQMELEAIKERSRSAAHFNIRAGKYRGSLPPWGYLPTRVDGEWRLAPDPVQRERILEVYHRVVDNHEPLHLVAHDLNRRGVLSPKDYFAQLQGREPQGRKWSATALKRSMISVAMLGYATLNGKTVRDDDGAPLVRAEPILTREQLEALRAELVKTSRAKPAVSTPSLLLRVLFCAVCGEPAYKFAGGGRKHPRYRCRSMGFPKHCGNGTVAMAEWDAFCEEQVLDLLGDAERLEKVWVAGSDPAVELAEVNAELVDLTSLISSPAYRAGSPQREALDARIAALAARQEELEGLEARPSGWEWRETGQRFGDWWREQDTAAKNTWLRSMNVRLTFDVRGGLTRTIDLGDLQEYEQHLRLGSLVERLHAGMS

SEQ ID NO: 12576 - protein, 500 aa, synthetic construct
MRALVVIRLSRVTDATTSPERQLESCRQLCAQRGWDIVGVAEDLDVSGAVDPFDRKRRPSLARWLAFEEQPFDVIVAYRVDRLTRSTRHLQQLVHWAEDHKKLVVSATEAHFDTTTPFAAVVIALMGTVAQMELEAIKERNRSAAHFNIRAGKYRGSLPPWGYLPTRVDGEWRLVPDPVQRERILEVYRRVVDNHEPLHLVAHDLNRRGVLSPRDYFAQLQGREPQGRKWSATALKRSMTSEAMLGYATLNGKTVRDDDGAPLVRAEPILTREQLEALRAELVKASRAKPAVSTPSLLLRVLFCAVCGEPAYKFAGGGRKHSRYRCRSMGFPKHCGNGTVAMAEWDAFCEEQVLDLLGDAERLEKVWVAGSDSAVELAEVNAELVDLTSLIGSPAYRARSPQREALDARIAALAARQEVMEGLEARPSGWEWRGTGQRFGDWWREQDTAAKNTWLRSMNVRLTFDVRGGLTRTIDFGDLQEYEQHLRLGGVVERLHTGMP

SEQ ID NO: 12577 - protein, 500 aa, synthetic construct
MRALVVIRLSRITDATTSPERQLESCQQLCAQRGWDVVGVAEDLDVSGAVDPFDRKRRPNLARWLAFEERPFDVIVAYRVDRLARSIRHLQQLVHWAEDHKKLVVSATEAHFDTTTPFAAVVIALMGTVAQMELEAIKERSRSAAHFNIRAGKYRGSLPPWGYLPTRVDGEWRLVPDPAQRERILEVYHRVVDNREPLHLVAHDLNRRGVLSPRDYFAQLRGREPQGRKWSATALKRSMISEAMLGYATLNGRTVRDDDGAPLVRAEPILTREQLEALRAELVKTSRAKPAVSTPSLLLRVLFCAVCGEPAYKFTGGGRKHPRYRCRSMGFPKHCGNGTVAMAEWDTFCEEQVLGLLGDTERLEKVWVAGSDSAIELAEVNAELVDLTSLIGSPAYRAGSPQREALDARIAALAARQEELEGLEARPSGWEWRETGQRFGDWWREQDTAAKNTWLRSMNVRLTFDVRGGLARTIDFGDLQEYEQRLRLGNAAERLHTGMS

SEQ ID NO: 12578 - protein, 500 aa, synthetic construct
MRALVVIRLSRVTDATTSPERQLESCQQLCAQRGWDVVGVAEDLDVSGAVDPFDRERRPNLARWLAFEEQPFDVIVAYRVDRLTRSTRHLQQLVHWAEDHKKLVVSATEAHFDTTTPFAAVVIALMGTVAQMELEAIKERSRSAAHFNIRAGKYRGSLPPWGYLPTRVDGEWRLAPDPVQRERILEVYHRVVDNHEPLHLVAHDLNRRGVLSPRDYFAQLQGREPQGRKWSATALKRSMVSEAMLGYATLNGKTVRDDDGAPLVRAEPILTREQLEALRAELVKTSRAKPAVSTPSLLLRVLFCAVCGEPAYKFAGGGRKHPRYRCRSMGFPKHCGNGTVAMAEWDAFCEEQVLDLLGDAERLEKVWVAGSDSAVELAEVNAELVDLTSLIGSSAYRAGSPQREALDARIAALAARQEELEGLEARPSGWEWRETGQRFGDWWREQDTAAKNTWLRSMNVRLTFDVRGGLTRTIDFGDLQEYEQHLRLGSAVERLHTGMS

SEQ ID NO: 12579 - protein, 500 aa, synthetic construct
MRALVVIRLSRVTDATTSPERQLESCQQLCARRGWDVVGVAEDLDVSGAVDPFDRKRRPNLARWLAFEEQPFDVIVAYRVDRLARSIRHLQQLVHWAEDHKKLVVSATEAHFDTTTPFAAVVIALMGTVAQMELEAIKERTRSAAHFNIRAGKYRGSLPPWGYLPARVDGEWRLAPDPVQRERILEVYHRVVDNHEPLHLVAHDLNRRGVLSPKDYFAQLQGREPQGRKWSATALKRSMISVAMLGYATLNGKTVRDDDGAPLVRAEPILTREQLEALRAELVKTSRAKPAVSTPSLLLRVLFCAVCGEPAYKFAGGGRKHPRYRCRSMGFPKHCGNGTVAMAEWDAFCEEQVLNLLGDAERLEKVWVAGSDSAVELAEVDAELVDLSSLIGSPAYRAGSPQREALDARIAALAARQEELEGLEARPSGWEWRETGQRFGDWWREQDTVAKNTWLRSMNVRLTFDVRGGLTRTIDFGDLREYEQHLRLGSVVERLHTGMS

SEQ ID NO: 12580 - protein, 500 aa, synthetic construct
MRALVVIRLSRVTDATTSPERQLESCQQLCAQRGWDVVGVAEDLDVSGAVDPFDHKRRPNLARWLAFEEQPFDVIVAYRVDRLTRSTRHLQQLVHWAEDHKKLVVSATEAHFDTTTPFAAVVIALMGTVAQMELEAIKERSRSAAHFNIRAGKYRGSLPPWGYLPTRVDGEWRLAPDPVQRERILEVYHRVVDNHEPLHLVAHDLNRRGVLSPKDYFAQLQGREPQGRKWSATALKRSMISEAMLGYATLNGKTVRDDSGAPLVRAEPILTREQLEALRAELVKTSRAKPAVPTPSLLLRVLFCAVCGEPAYKFAGGGRKHPRYRCRSMGFPKHCGNGTVAMAEWDAFCEEQVLDLLGDAERLEKVWVAGSDSAVELAEVNAELVDLTSLIGSPAYRADSPQREALDARIAALAARQEELEGLEARPSGWEWRETGQRFGDWWREQDTAAKNTWLRSMNVRLTFDVRGGLTRTIDFGALQEYEQRLRLGSVVERLHTGMS

SEQ ID NO: 12581 - protein, 500 aa, synthetic construct
MRALVVIRLSRVTDATTSPERQLESCQQLCAQRGWDVVGVAEDLDVSGAVDPFDRKCRPNLARWLAFEEQPFDVIVAYRVDRLTRSTRHLQQLVHWAEDHKKLVVSATEAHFDTTTPFAAVVIALMGTVAQMELEAIKERNRSAAHFNIRAGKYRGSLPPWGYLPARVDGEWRLVPDPVQRERILEVYHRVVDKHEPLHLVAHDLSRRGVLSPKDYFAQLRGREPQGRKWSATALKRSMISEAMLGYATLNGKTVRDDDGAPLVRAEPILTREQLEALRAELVKTSRAKPAVSTPSLLLRVLFCAVCGEPAYKFAGGGRKHPRYRCRSMGFPKHCGNGTVAMAEWDAFCEEQVLNLLGDAERLEKVWVAGSDSAVELAEVNAELVDLTSLIGSPAYRAGSPQREALDAHIAALAARQEELEGLEARPSGWEWRGTGQRFGDWWREQGTAAKNTWLRSMNVRLTFDVRGGLTRTIDFGDLQEYEQHLRLGSVVERLHTGMS

SEQ ID NO: 12582 - protein, 500 aa, synthetic construct
MRTLVVIRLSRVTDATTSPERQLESCQQLCAQRGWDVVGVAEDLDVSGAVDPFDRKRRPNLARWLAFEEQPFDAIVAYRVDRLTRSIRHLQQLVHWAEDHKKLVVSATEAHFDTTTPFAAVVIALMGTVAQMELEAIKERSRSAAHFNIRAGKYRGSLPPWGYLPTRVDGEWRLVPDPEQRGRILEVYRRVVDNHEPLHLVAHDLNRRGVLSPKDYFAQLQGREPQGRKWSATALKRSMISETMLGYATLNGKTVRDDDGAPLVRAEPILTRGQLEALRAELVKTSRAKPAVSTPSLLLRVLFCAVCGEPAYKFAGGGRKHPRYRCRSMGFPKHCGNGTVAMAEWDAFCEEQVLNLLGDAERLEKVWVAGSDSAVELAEVNAELVDLTSLIGSPAYRAGSPQREALDARIAALAARQGELESLEARPSGWEWRETGQRFGDWWREQDTAAKNTWLRSMNVRLTFDVRGGLTRAIDFGDLQVYEQHLRLGSVVERLHTGMS

SEQ ID NO: 12583 - protein, 500 aa, synthetic construct
MRALVVIRLSRVTEATTSPERQLESCQQLCAQRGWDVVGVAEDLDVSGAVDPFDRKRRPNLARWLAFEEQPFDVVVAYRVDRLARSIRHLQQLVHWAEDHKKLVVSATEAHFDTTTPFAAVVIALMGTVAQMELEAIKERSRSAAHFNIRAGKYRGSLPPWGYLPSRVDGEWRLVPDPVQRERILEVYHRVVDNHEPLHLVAHDLNRRGVLSPKDYFAQLQGREPQGRKWSATALKRSMISEAMLGHATLNGKTVRDDDGAPLVRAEPILTRGQLEALRAELVKTSRAKPAMSTPSLLLRVLFCAVCGEPAYKFSGGGRKHPRYRCRSMGFPKHCGNGTVAMAEWDAFCEEQVLDLLGDAERLEKVWVAGSDSAVELAEANAELVDLTSLIGSPAYRAGSPQREALDARIAALAARQEELEGLEARPSGWEWRETGQRFGDWWREQDTAAKNTWLRSMNVRLTFDVRGGLTRTIDFGDLQEYEQHLRLGSVVERLHTGMS

SEQ ID NO: 12584 - protein, 500 aa, synthetic construct
MRALVVIRLSRVTDATTSPERQLESCQQLCAQRGWDVVGVAEDLDVSGAVDPFDRKRRPNLARWLAFEEQPFDVIVAYRVDRLSRSIRHLQQLVHWAEDHKKLVVSATEAHFDTTTPFAAVVIALMGTVAQMELEAIKERSRSAAHFNIRAGKYRGSLPPWGYLPTRVDGEWRLAPDPVQRERILEVYHRVVDSHEPLHLVALDLNRRGVLSPRDYFAQLRGREPQGRKWSATALKRSLISEAMLGYATLNGKTVRDDDGAPLVRAEPILTREQLEALRAELVKTSRAKPAVLTPSLLLRVLFCAVCGEPAYKFAGGGRKHPRYRCRSMGFPKHCGNGTVAMAEWDAFCEEQVLDLLGDAERLEKVWVAGSDSAVELAEVNAELVDLTSLIGSPAYRAGSPQREALDARIAALAARQGELEGLEARPSGWEWRGTGQRFGDWWREQGTAAKNTWLRSMNVRLTFDVRGGQTRMIDFGDLQEYEQHLRSGSVVERLHTRMS

SEQ ID NO: 12585 - protein, 500 aa, synthetic construct
MRALVVIRLSRVTDATTSPERQLESCQQLCAQRGWDVVGVAEDLDVSGAVDPFDRKRRPNLARWLAFEEQPFDVIVAYRVDRLTRSTRHLQQLVHWADGHKKLVVSATEAHFDTTTPFAAVVIALMGTVAQMELEAIKERSRSAAHFNIRAGKYRGSLPPWGYLPARVDGAWRLVPDPVQRERIIEVYHRVVNNHEPLHLVAHDLNRRGVLSPKDYFAQLQGREPQGRKWSATALKRSMISEAMLGYATLNGKTVRDDDGAPLVRAEPILTREQQEALRAELVKTSRAKPAVSTPSLLLRVLFCAVCGEPAYKFAGGGRKHPRYRCRSMGFPKHCGNGTVAMAEWDAFCEEQVLGLLGDAERLEKVWVAGSDSAVELAEVNAELVDLTSLIGSPAYRAGSPQREALDARIAALAARQEELEGLEARPSGWEWRETGQRFGDWWREQDTAAKNTWLRSMNVRLTFDVRGGLTRTIDFGDLQEYAQHLRLGSVVERLHTGMS

SEQ ID NO: 12586 - protein, 500 aa, synthetic construct
MRALVVIRLSRVTDATTSPERQLESCQQLCAQRGWDVVGVAEDLDVSGAVDPFDRKRRPNLARWLAFEEQPFDAIVAYRVDRLTRSIRHLQQLVHWAEDHKKLVVSATEAHFDTTTPFAAVVIALMGTVAQMELEAIRERSRSAAHFNIRAGKYRGSLPPWGYLPTRVDGEWRLVPDPVQRERILEVYHRVVDNHEPLHLVAHDLNRRGVLSPKDYFAQLRGREPQGRKWSATALKRSMISEAMLGYAILNGKTVRDDDGAPLVRAEPILTREQLEALRAELVKTSRAKPAVSTPSLLLRVLFCAVCGEPAYKFAGGGRKHPRYRCRSMGFPKHCGNGTVAMAEWDAFCEEQVLDLLGDAERLEKVWVAGSDSAVELAEVNAELVDLTSLIGSPAYRAGSPQREALDARIAALAARQEELEGLEARPSGWEWRETGQRFGDWWREQDTAAKNTWLRSMNVRLTFDVRGGLTRTIDFGDLQEYEQHLRLGSVVERLHTGMS

SEQ ID NO: 12587 - protein, 500 aa, synthetic construct
MRALVVIRLSRVTDTTTSPERQLESCQQLCAQRGWDVVGVAEDLDVSGAVDPFDRKRRPNLARWLAFEEQPFDVIVAYRVDRLARSIRHLQQLVHWAEDHKKLVVSATEAHFDTTTPFAAVVIALMGTVAQMELEAIKERSRSAAHFNIRAGKYRGSLPPWGYLPTRVDGEWRLVPDPVQRERILEVYHRVVANHESLHSVAHDLNRRGVLSPKDYFAQLQGREPQGRKWSATALKRSMISEAMLGYATLNGKTVRDDDGAPLVRAEPILTREQLEALRAVLAKTSRAKPAVSTPSLLLRVLFCAVCGEPAYKFAGGGRKHPRYRCRSMGFPKHCGNGTVAMAEWDAFCEEQVLGLLGDAERLEKVWVAGSDSAVELAEVSAELVDLTSLVGSPAYRAGSPQREALDARIAALAARQEELEGLEARPSGWEWRETGQRFGDWWREQDTAAKNTWLRSMNVRLTFDVRGGLTRTIDFGDLREYEQHLRLGSVVERLHTGMP

SEQ ID NO: 12588 - protein, 500 aa, synthetic construct
MRALVVIRLSRVTEATTSPERQLESCQQLCAQRGWDVVGVAEDLDVSGAVDPFDRKRRPNLARWLAFEEQPFDVIVAYRVDRLTRSTRHLQQLVHWAEDHKKLVVSATEAHFDTTTPFAAVVIALMGTVAQMELEAIKERSRSAAHFNIRAGKYRGSLPPWGYLPARVDGEWRLVPDPVQRERILEVYHRVVDNHEPLHLVAHDLNRRGVLSPKDYFAQLQGREPQGRKWSATALKRSMISEAMLGYATLNGKIVRDDDGAPLVRAEPILTREQLEALRAELVKTSRAKPAVSTPSLLLRVLFCAVCGEPAYKFAGGGRKHPRYRCRSMGFPKHCGNGTAAMAEWDAFCEEQVLNLLGDAERLEKVWVAGSDSAVELAEVNAELVDLTSLIGSPAYRAGSPQREALDARIAALAARQEELEGLEARPSGWEWRETGQRFGDWWREQDTAAKNTWLRSMNVRLTFDVRGGLTRTIDFGDLQEYEQHLRLGSVVERLHTGMS

SEQ ID NO: 12589 - protein, 500 aa, synthetic construct
MRALVVIRLSRVTDATTSPERQLESCQQLCAQRGWDVVGVAEDLDVSGAVDPFDRKRRPNLARWLAFEEQPFDVIVAYRVDRLARSIRHLQQLVHWAEDHKKLVVSATEAHFDTTTPFAAVVIALMGTVAQMELEAIKERSRSAAHFNIRAGKYRGSLPPWGYLPTRVDGEWRLAPDPVQRERILEVYHRVVDNHEPLHLVAHDLNRRGVLSPKDYFAQLQGREPQGRKWSATALKRSMISEAMLGYATLNGKTVRDDDGAPLVRAEPILTREQLEALRAELVKTSRAKPAVSTPSLLLRVLFCAVCGEPAYKFAGGGRKHPRYRCRSMGFPKHCGNGTVAMAEWDAFCEEQVLDLLGDAERLEKVWVAGSDSAVELAEVNAELVDLTSLIGSPAYHAGSPQREALDARIAALAARQEELEGLEARPSGWGWRGTGQRFGDWWREQDTAAKNTWLRSMNVRLTFDVRGGLTRTIDFGDLQEYEQHLRLGSVVERLHTGMS

SEQ ID NO: 12590 - protein, 500 aa, synthetic construct
MRALVVIRLSRVTEATTSPERQLESCQQLCAQRGWDVVGVAEDLDVSGAVDPFDRKRRPNLARWLAFEEQPFDVIVAYRVDRLTRSTRHLQQLVHWAEDHKKLVVSATEAHFDTTTPFAAVVIALMGTVAQMELEATKERSRSAAHFNIRAGKYRGSLPPWGYLPTRVDGEWRLVPDPVQRERILEVYHRVVDNHEPLHLVAHDLNRRGVLSPKDYFAQLQGREPQGRKWSATALKRSMISEAMLGYATLNGKTVRDGDGAPLVRAEPILTREQLEALRAELVKTSRAKPAVSTPSLLLRVLFCAVCGEPAYKFAGGGRKHPRYRCRSMGFPKHCGNGTVAMAEWDAFCEEQVLGLLGDVERLEKVWVAGSDSAVKLAEVNAELVDLTGLIGSPAYRAGSPQREALDARIAALAARQEELEGLEARPSGWEWRGTGQRFGDWWREQDTAAKNTWLRSMNVRLTFDVRGGLTRTIDFGDLQEYEQHLRLGSVVERLHTGMS

SEQ ID NO: 12591 - protein, 500 aa, synthetic construct
MRALVVIRLSRVTDATTSPERQLESCQQLCAQRGWDVVGVAEDLDVSGAVDPFDRKRRPNLARWLAFEEQPFDVIVAYRVDRLTRSTRHLQQLVHWAEDHKKLVVSATEAHFDTTTPFAAVAIALMGTVAQMELEAIKERNRSAAHFNIRAGKYRGSLPPWGYLPTRVDGEWRLVPDPVQRERILEVYHRVVVNHEPLHLVAHDLNRRGVLSPKDYFAQLRGREPQGRKWSATALKRSMISDAMLGYATLNGKTVRDDDGAPLVRAEPILTREQLEALRAELVKTSRAKPAVSTPSLLLRVLFCAVCGEPAYKFAGGGRKHPRYRCRSMGFPKHCGNGTVAMAEWDVFCEEQVLDLLGDAERLEKVWVAGSDSAVELAEVNAELVDLTSLIGSPAYRAGSPQREALDARIAALAARQEELEGLEARPSGWEWRETGQRFRDWWCDQDTAAKNTWLRSMNVRLTFDVRGGLTRTIDFGDLLEYEQHLRLGSVVERLHTGMS

SEQ ID NO: 12592 - protein, 500 aa, synthetic construct
MRALVVIRLSRVTDATTSPERQLESCQQLCAQRGWDVVGVAEDLDVSGAVDPFNRKRRPNLARWLAFEEQPFDVIVAYRVDRLARSIRHLQQLVHWAEDHKKLVVSATEAHFDTTTPFAAVVIALMGTVAQMELEAIRERSRSAAHFNIRAGKYRGSLPPWGYLPTRVDGEWRLAPDPVQRERILEVYHRVVDNHEPLHLVAHDLNRRGVLSPKDYFAQLQGREPQGRKWSATALKRSMISGAMLGYATLNGKTVRDDDGVPLVRAEPILTREQLEALRAELVKTSRAKPAVSTPSLLLRVLFCAVCGEPAYKFVGGGRKHPRYRCRSMGFPRHCGNGTVAMAEWDVFCEEQVLGLLEDAERLEKVWVAGSDSAVDLAEVNAELVDLTSLIGSPAYRAGSPQREALDARIAALAARQEELEGLEARPSGWEWRGTGQRFGDWWREQDTAAKNTWLRSMNVRLTFDVRGGLTRTIDFGDLQEYEQHLRSGSVVERLRTGMS

SEQ ID NO: 12593 - protein, 500 aa, synthetic construct
MRALVVIRLSRVTDATTSPERQLESCQQLCAQRGWDVVGVAEDLDVSGAVDPFDRKRRPNLARWLAFEERPFDVIVAYRVDRLTRSIRHLQQLVHWAEDHKKLVVSATEAHFDTTTPFAAVVIALMGTVAQMELEAIKERSRSAAHFNIRAGKYRGSLPPWGYLPARVDGEWRLAPDPVQRERILEVYHRVVDNHEPLHLVAHDLNRRGVLSPKDYFAQLQGREPQGRKWSATALKRSMISVAMLGYATLNGKTVRDDDGAPLVRAEPILTREQLEALRAELVKTSRAKPAVSTPSLLLRVLFCAVCGEPAYKFAGGGRKHPRYRCRSMGFPKHCGNGTVAMAEWDAFCEEQILDLLGDAERLEKVWVAGSDSAIELAEVNAELVDLTSLIGSPAYRAGSPQREALDARIAALAARQEELEGLEARPSGWKWRETGQRFGDWWREQDTAAKNTWLRSMNVRLTFDVRGGLTRTIDFGDLQEYEQHLRLGSVVERLHTGTS

SEQ ID NO: 12594 - protein, 500 aa, synthetic construct
MRALVVIRLSRVTDATTSPERQLESCQQLCAQRGWDVVGVAEDLDVSGAVDPFDRKRRPNLARWLAFGERPFDVIVAYRVDRLTRSVRHLQQLVHWAEDHKKLVVSATEAHFDTTTPFAAVVIALMGTVAQMELEAIKERNRSAAHFNIRAGKYRGSLPPWGYLPTRVDGEWRLVPDPVQRERILEVYHRVVDNHEPLHLVAHDLNRRGVLSPKDYFAQLRGREPQGRKWSATALKRSMISEAMLGYATLNGKIVRDDDGAPLVRAEPILTREQLEALRAELVKTSRAKPAVSTPSLLLRVLFCAVCGEPAYKFAGGGRRHPRYRCRSMGFPKHCGNGTVAMAEWDAFCEEQVLDLLGDAERLEKVWVVGSDSAVELVEVNAELVDLTSLIGSPAYRAGSPQREALDARIAALAARQGELEGVEARPSGWEWRETGQRFGDWWREQDTAAKNTWLRSMNVRLTFDVRGGLTRAIDFGDLQEYEQHLRLGSVVERLHTGMS

SEQ ID NO: 12595 - protein, 500 aa, synthetic construct
MRALVVIRLSRVTDATTSPERQLESCQQLCAQRGWDVVGVAEDLDVSGAVDPFDRKRRPNLARWLVFEEQPFDAIVAYRVDRLTRSIRHLQQLVHWAEDHKKLVVSATEAHFDTTTPFAAVVIALMGTVAQMELEAIKERNRSAAHFNIRAGKYRGSLPPWGYLPTRVDGEWRLAPDPVQRERILEVYHRVVNNHEPLHLVAHDLNRRGVLSPKDYFAQLQGREPQGRKWSATALKRSMISEAMLGYATLNGKIVRDDDGAPLVRAEPILTREQLEALRAELVKTSRAKPAVSTPSLLLRVLFCAVCGEPAYKFAGGGRKHPRYRCRSMGFPKHCGNGTVAMAEWDAFCEEQVLDLLGDAERLEKVWVAGSDSAVELAEVNAELVDLTSLIGSPAYRAGSPQRDALDARIAALAARQEELEGLEARPSGWEWRETGQRFGDWWREQDAAAKNTWLRSMNVRLTFDARGGLTRTIDFGDLQEYEQHLRLGSVVEHLHTGMS

SEQ ID NO: 12596 - protein, 500 aa, synthetic construct
MRALVVIRLSRVTETTTSPERQLESCQQLCAQRGWDVVGVAEDLDVSGAVDPFDRKRRPNLARWLAFEEQPFDVIVAYRVDRLTRSTRHLQRLVHWAEDHKKLVVSATEAHFDTTTPFAAVVIALMGTVAQMELEAIKERNRSAAHFNIRAGKYRGSLPPWGYLPTRVDGEWRLVPDPVQRERILEVYHRVVDNHEPLHLVAHDLNRRGVLSPKDYFAQLRGREPQGRKWSATALKRSMISEAMLGYATLNGKTVRVDDGAPLVRAEPILTREQLEAIRAELVKTSRAKPAVSTPSLLLRVLFCAVCGEPAYKFSGGGRKHPRYRCRSMGFPKHCGNGTVAMAEWDAFCEEQVLDLLGGAERLEKVWVAGSDSAVELAEVNAELVDLTSLIGSPAYRGGSPQREALGARIAALAARQEELEGLEARPSGWEWRGTGQRFGDWWREQDTAAKNTWLRSMNVRLTFDVRGGLTRTIDFGDLQEYEQHLRFGSVVERLHTGMS

SEQ ID NO: 12597 - protein, 500 aa, synthetic construct
MRALVVIRLSRVTDTTTSPERQLESCQQLCAQRGWDVVGVAEDLDVSGSVDPFDRKRRPNLARWLAFEEQPFDVIVAYRVDRLARSIRHLQQLVHWAEDHKKLVVSATEAHFDTTTPFAAVVIALMGTVAQMELEAIKERNRSAAHFNIRAGKYRGSLPPWGYLPARVDGEWRLVPDPVQRERILEVYHRVVDNHEPLHLVAHDLNRRGVLSPKDYFAQLRGREPQGRKWSATALKRSMISEAMLGYATLNGKTVRDDDGVPLVRAEPILTREQLEALRAELVKTSRAKPAVSTPSLLLRVLFCAVCGEPAYKFAGGGRKHPRYRCRSMGFPKHCGNGTVAMAEWDAFCEEQMLDLLGDAERLEKVWVAGSDSAVELAEVNAELVDLTSLISSPAYRAGSPQREALDARIAALAARQEELEGLEARPSGWEWRETGQRFGDWWREQDTAAKNTWLRSMNVRLTFDVRGALTRTIDFGDLQEYERHLRSGSVVERLHTGMS

SEQ ID NO: 12598 - protein, 500 aa, synthetic construct
MRALVVIRLSRVTDATTSPERQLESCQQLCAQRGWDVVGVAEDLDVSGAVDPFDRKRRPNLARWLAFEEQPFDAIVAYRVDRLTRSIRHLQQLVHWAEDHKKLVVSATEAHFDTTTPFAAVVIALMGTVAQMELEAIKERNRSAAHFNIRAGKYRGSLPPWGYLPTRVDGEWRLAPDPVQRERILEVYHRVVDNHEPLHLVAHDLNRRGVLSPKDYFAQLRSREPQGRKWSATALKRSMTSVAMLGYATLNGKTVRDDDGAPLVRAEPILTREQLGALRAELVKTSRAKPAVSTPSLLLRVLFCAVCGEPAYKFSGGGRKHPRYRCRSMGFPKHCGNGTVAMAEWDAFCEEQVLGLLGDAERLEKVWVAGSDSAVELAEVNAELVDLTSLIGSPAYRAGSPQREALDARIAALAARQEELEGLEARPSGWEWRETGQRFGDWWREQDTTAKNTWLRSMNVRLTFDVRGGLTRTVDFGDLREYEQLLRLGGVVERLHTGMS

SEQ ID NO: 12599 - protein, 500 aa, synthetic construct
MRALVVIRLSRVTDATTSPERQLESCQQLCAQRGWDVVGVAEDLDVSGAVDPFDRKRRPNLARWLAFEEQPFDAIVAYRVDRLTRSIRHLQQLVHWAEDHKKLVVSATEAHFDTTTPFAAVVIALMGTVAQMELEAIKERSRSAAHFNIRAGKYRGSLPPWGYLPARVGGEWRLVPDPVQRERILEVYHRVVDNHEPLHLVAHDLNRRGVLSPKDYFAQLRGREPQGRKWSATALKRSMISEAMLGYATLNGKTVRDDDGAPLVRAEPILTREQLEALRAELVKTSRAKPAVSTPSLLLRVLFCAVCGGPAYKFAGGGRKHPRYRCRSMGFPKHCGNGTVAMAEWDAFCEEQVLDLLGDAERLEKVWVAGSDSAVELAEVNAELVDLTSLIGSPAYRAGSPQREALDARIAALAARQKELEGLEARPSGWEWRKTGQRFGDWWREQDTAAKNTWLRSMNVRLTFDVRGGLTRTIDFGDLQEYVQHLRLGSVVERLHTGMS

SEQ ID NO: 12600 - protein, 500 aa, synthetic construct
MRALVVIRLSRVTDATTSPERQLESCLQLCAQRGWDVVGVAEDLDVSGAVDPFDRKRRPNLARWLAFEEQPFDVIVAYRVDRLARSIRHLQQLVHWAEDHKKLVVSATEAHFDTTTPFAAVVIALMGTVAQMELEAIKERSRSAAHFNIRAGKYRGSLPPWGYLPTRVDGEWRLVPDPVQRERILEVYHRVVVNHEPLHLVAHDLNRRGVLSPKDYFAQLQGREPQGRKWSATALKRSMISEAMLGYATLNGKTVRNDDGAPLVRAEPILTREQLEALRAELVKTSRAKPAVSTPSLLLRVLFCAVCGEPAYKFAGGGRKHPRYRCRSMGFPKHCGNGTVAMAEWDAFCEEQVLDLLGDAERLEKVWVAGSDSAVELAEVNAELVDLTSLIGSPAYRARSPQREALDARIAALATRQEELEGLEARPSGWEWRGTGQRFGDWWREQDTAAKNTWLRSMNVRLTFDVRGGLTRTIDFGDLQEYEQHLRLGSVVERLHTGMS

SEQ ID NO: 12601 - protein, 500 aa, synthetic construct
MRALVVIRLSRVTDATTSPERQLESCQQLCAQRGWDVVGVAEDLDVSGAVDPFDRKRRPNLARWLAFEEQPFDVIVAYRVDRLARSIRHLQQLVHWAEDHKKLVVSATEAHFDTTTPFAAVVIALMGTVAQMELEAIKERNRSAAHFNIRAGKYRGSLPPWGYLPTRVDGEWRLAPDPVQRERILEVYHRVVDNHEPLHLVAHDLNRRGVLSPKDYFAQLQGREPQGRKWSATALKRSMISEAMLGYATLNGKIVRDDDGAPLVRAEPILTREQLEALRAELVKTSRAEPAVSTPSLLLRVLFCAVCGEPAYKFAGGGRKHPRYRCRSMGFPKHCGNGTVAMAEWDAFCEKQVLDLLGDAERLEKVWVAGSDSAVELAEVNAELVDLTSLIGSPAYRAGSPQREALDARIAALAARQEELEGLEARPSGWEWRETGQRFGDWWREQDTAAKNAWLRSMNVRLTFDVRGGLTRTIDFGDLQEYEQHLRLGNVVERLHTGMS

SEQ ID NO: 12602 - protein, 500 aa, synthetic construct
MRALVVIRLSRVTDATTSPERQLESCQQLCAQRGWDVVGVAEDLDVSGAVNPFDRKRRPNLARWLAFEEQPFDVIVAYRVDRLTRSVRHLQRLVHWAEDHKKLVVSATEAHFDTTTPFAAVVIALMGTVAQMELEAIKERSRSAAHFNIRAGKYRGSLPPWGYLPTRVDGEWRLVPDPVQRERILEVYHRAVDNHEPLHLVAHDLNRRGVLSPRDYFAQLRGREPQGRKWSATALKRSMISEAMLGYATLNGKTVRGDDGAPLVRAEPILTREQLEALRAELVKTSRAKPAVSTPSLLLRVLFCAVCGEPAYKFAGGGRKHPRYRCRSMGSPKHCGNGTVAMAEWDAFCEEQVLNLLGDTERLEKVWVAGSDSAVELAEVNAELVDLTSLIGSPAYRAGSPQREALAARIAALAARQEELEGLGARPSGWEWRGTGQRFGDWWREQDTAAKNTWLRSMNVRLTFDVRGGLTRTIDFGDLQEYGQHLRLGSVVERLHTGMS

SEQ ID NO: 12603 - protein, 500 aa, synthetic construct
MRALVVIRLSRVTDATTSPERQLESCQQLCAQRGWDVVGVAEDLDVSGAVDPFDRTRRPNLARWLAFEEQPFDVIVAYRVDRLTRSTRHLQRLVHWAEDHKKLVVSATEAHFDTTTPFAAVVIALMGTVAQMELEAIRERNRSAAHFNIRAGKYRGSLPPWGYLPTRVGGEWRLVPDPVQRERILEVYHRVVDNHEPLHLVAHDLNRRGVLSPRDYFAQLRGREPQGRKWSATALKRSMISEAMLGYATLNGETVRDDDGAPLVRAEPILTREQLGALRAELVKTSRAKPAVSTPSLLLRVLFCAVCGEPAYKFTGGGRKHSRYRCRSMGFPKHCGNGTVAMAEWDAFCEEQVLDLLGDAERLEKVWVAGSDSAVELAEVNAELVNLTSLIGSPAYRAGSPQREALDARIAALAARQEELEGLEARPSGWEWRGTGQRFGDWWREQDTAAKNAWLRSMNVRLTFDVRGGLTRTIDFGDLQGYEQHLRIGSVVERLHTGMS

SEQ ID NO: 12604 - protein, 500 aa, synthetic construct
MRALVVIRLSRVTDATTSPERQLESCRQLCAQRGWDVVGVAEDLDVSGAVDPFDRKRRPNLARWLAFEGQPFDVIVAYRVDRLARSIRHLQQLVHWAEDNKKLVVSATEAHFDTTTPFAAVVIALMGTVAQMELEAIKERSRSAAHFNIRAGKYRGSLPPWGYLPARVDGEWRLVPDPVQRERILEVYHRVVDNHEPLHLVAHDLNRRGVLSPKDYFAQLQGREPQGRKWSATALKRSMISEAMLGYATLNGKIVRDDDGAPLVRAEPILTREQLEALRAEFVKTSRAKPTVSTPSLLLRVLFCAVCGEPAYKFAGGGRKHPRYRCRSMGFPKHCGNGTVAMAEWDAFCEEQVLSLLGDAERLEKVWVAGSDSAVELAEVNAELVDLTSLIGSPAYRAGSPQREALDARIAALAARQEELEGLEARPSGWEWRETGQRFGDWWREQDTAAKNTWLRSMNVRLTFDVRGGLTRTIDFGDLQEYERHLRLGSVVERLHTGMS

SEQ ID NO: 12605 - protein, 500 aa, synthetic construct
MRALVVIRLSRVTDATTSPERQLESCQQLCAQRGWDVVGVAEDLDVSGAVDPFDRKRRPNLARWLAFEEQPFDVIVACRVDRLTRSIRHLQQLVHWAEDHKKLVVSATEAHFDTTTPFAAVVIALMGTVAQMELEAIKERSRSAAHFNIRAGKYRGSLPPWGYLPSRVDGEWRLVPDPVQRERILEVYHRVVDNHEPLHLVAHDLNRRGVLSPKDYFAQLQGREPQGRKWSATALKRSMISEAMLGYATLNGKTVRDDDGAPLVRAEPILTREQQEALRAELVKTSRARPAVPTPSLLLRVLFCAVCGEPAYKFAGGGRKHPRYRCRSMGFPKHCGNGTVAMAEWDAFCEEQVLNLLEDAERLEKVWVAGSDSAVELAGVNAELVDLTSLIGSPAYRAGSPQREALDARIAALAARQEELEGLEARPSGWEWRETGQRFGDWWREQDTAARNAWLRSMNVRLTFDVRGGLTRTIDFGDLQEYEQRLRLGSVVERSHTGMS

SEQ ID NO: 12606 - protein, 500 aa, synthetic construct
MRALVVIRLSRVTDATTSPERQLESCQQLCAQRSWDVVGVAEDLDVSGAVDPFDRKRRPNLARWLAFEEQPFDVIVAYRVDRLARSIRHLQQLVHWAEDHKKLVVSATEAHFDTTTPFAAVVIALMGTVAQMELEAIKERSRSAAHFNIRAGKYRGSLPPWGYLPTRVDGEWRLAPDPVQRERILEVYHRVVDNHEPLHLVAHDLNRRGVLSPKDYFAQLQGREPQGRKWSATALKRSMTSGAMLGYATLNGKTVRDEDGAPLVRAEPILTREQLEALRAELVKTSRAKPAVSTPSLLLRVLFCAVCGEPAYKFAGGGRKHPRYRCRSMGFPKHCGNGTVATAEWDAFCEEQVLDLLGDAERLEKVWVAGSDSAVELAEVNAELVDLASLVGSPAYRAGSPQREALDARIAALAARQEELEGLEARPSGWEWRGTGQRFGDWWREQDTAAKNTWLRSMNVRLTFDVRGGLTRTIDFGDLQEYVQHLRLGSVVGRLHTGMS

SEQ ID NO: 12607 - protein, 500 aa, synthetic construct
MRALVVIRLSRVTDATTSPERQLESCQQLCAQRGWDVVGVAEDLDVSGTVDPFDRKRRPNLARWLAFEEQPFDVIVAYRVDRLTRSIRHLQQLVHWAEDHKKLVVSATEAHFDTTTPFAAVVIALMGTVAQMELEAIRERSRSAAHFNIRAGKYRGSLPPWGYLPARVDGEWRLVPDPVQRERILEVYHRVVDNHEPLHLVAHDLNRRGVLSPKDYFAQLRGREPQGRKWSATALKRSMISEAMLGYATLNGKTVRDGDGAPLVRAEPILTREQLEALRAELVKASRAKPAVSTPSLLLRVLFCAVCGEPAYKFAGGGRKHPRYRCRSMGFPKHCGNGTVAMAEWDAFCEEQVLDLLGDAERLEKVWVAGSDSAVELAEVNAELVDLTSLIGSPAYRAGSPQREALDARIAALAARQEELEGLEARPSGWEWRETGQRFGDWWREQDTAAKNTWLRSMNVRLTFDVRGGPTRTIDFGDLQEYEQHLRLGGVVERLHTGMS

SEQ ID NO: 12608 - protein, 500 aa, synthetic construct
MRALVVIRLSRVTDATTSPERQLESCQQLCAQRGWDVVGVAEDLDVSGAVDPFDRKRRPNLARWLAFEEQPFDVIVAYRVDRLTRSIRHLQQLVHWAEDHKKLVVSATEAHFDTTTPFAAVVIALMGTVAQMELEAIKERSRSAAHFNIRAGKYRGSLPPWGYLPTRVDGEWRLVPDPVQRERILEVYHRVVVNHEPLHLVAHDLNRRGVLSPKDYFAQLRGREPQGRKWSATALKRSMISEAMLGYATLNGKTVRDDDGAPLVRAEPILTREQQEALRAELVKTSRAKPAVSTPSLLLRVLFCAVCGEPAYKFAGGGRKHPRYRCRSMGFPKHCGNGTVAMAEWDAFCEEQVLDLLGDAERLEKVWVAGSDSVVELAEVNAELVDLTSLIGSPAYRAGSPQREALDTRIAALAARQEELEGLEARPSGWEWRETGQRFGDWWREQDTVAKNTWLRSMNVRLTFDVRGGPTRTIDLGDLQEYEQHLRLGSVVERLHTGMP

SEQ ID NO: 12609 - protein, 500 aa, synthetic construct
MHALVVIRLSRVTDATTSPERQLESCQQLCAQRGWDVVGVAEDLDVSGAVDPFDRKRRPNLARWLAFEEQPFDAIVAYRVDRLTRSIRHLQRLVHWAEDHKKLVVSATEAHFDTTTPFAAVVIALMGTVAQMELEAIKERNRSAAHFNIRAGKYRGSLPPWGYLPTRVDGEWRLVPDPVQRERILEVYHRVVDNHEPLYLVAHDLNRRGVLSPKDYFAQLQGREPQGRKWSATALKRSMISEAMLGYATLNGKTVRDDDGAPLVRAEPILTREQQEALRAELVKTSRAKPAVSTPSLLLRVLFCAVCGEPAYKFAGGGRKHPRYRCRSMGFPKHCGNGTVAMAEWDAFCEEQVLSMLGDAERLEKVWVAGSDSAVELAEVNAELVDLTSLIGSPAYRAGSPQREALDARIAALAARQEELEGLEARPSGWEWRETGQRFGDWWREQDTAAKNTWLRSMNVRLTFDVRGGLTRTIDFGDLQEYEQHLRLGSVVERLHTGMS

SEQ ID NO: 12610 - protein, 500 aa, synthetic construct
MRALVVIRLSRVTDATTSPERQLESCQQLCAQRGWDVVGVAEDLDVSGAVDPFDRKRRPNLARWLAFEEQPFDAIVAYRVDRLTRSIRHLQQLVHWAEDHKKLVVSATEAHFDTTTPFAAVVIALMGTVAQMELEAIKERNRSAAHFNIRAGKYRGSLPPWGYLPARVDGEWRLVPDPVQRERILEVYHRVVDNHEPLHLVAHDLNRRGVLSPKDYFAQLQGREPQGRKWSATALKRSMISVAMLGYATLNGKTVRDDDGAPLVRAEPILTREQLGALRAELVKTSRAKPAVSTPSLLLRVLFCAVCGEPAYKFAGGGRKHPRYRCRSMGFPKHCGNGTVAMAEWDAFCEEQVLDLLGDAERLEKVWVAGSDSAVELAEVNAELVDLTSLIGSPAYRAGSPQREALDARIAALAARQEELEGLEARPSGWEWRETGQRFGDWWREQDTAAKNAWLRSMNVRLTFDVRGGLTRTIDFGDLQEYEQHLRLGSVAERLYTGMS

SEQ ID NO: 12611 - protein, 500 aa, synthetic construct
MRALVVIRLSRVTDATTSPERQLESCQQLCAQRGWDVVGVAGDLDVSGAVDPFDCKRRPNLARWLAFEEQPFDVIVAYRVDRLARSIRHLQQLVHWAEDHKKLVVSATEAHFDTTTPFAAVVIALMGTVAQMELEAIKERTRSAAHFNIRAGKYRGSLPPWGYLPTRVDGEWRLVPDPVQRERILEVYHRVVDNHEPLHLVAHDLNRRGVLSPKDYFAQLQGREPQGRKWSATALKRSMISEAMLGYATLNGKTVRDDDGAPLVRAEPILTREQQEALRAELVKTSRAKPAVSTPSLLLRVLFCAVCGEPAYKFAGGGRKHPRYRCRSMGFPKHCGNGTVAMVEWDAFCEEQVLGLLGDAERLEKVWVAGSDSAVGLAEVNAELVDLTSLIGSPAYRAGSPQREALDARIAALAARQEELEGLEARPSGWEWRETGQRFGDWWREQDTAAKNTWLRSMNVRLTFDVRGGLTRTIDFGDLQEYEQHLRLGSVAERSHTGMS

SEQ ID NO: 12612 - protein, 500 aa, synthetic construct
MRALVVIRLSRVTDATTSPERQLESCQQLCAQRGWDVVGVAEDLDVSGAVDPFDRKRRPNLARWLAFEEQPFDVIVAYRVDRLTRSVQHLQQLVHWAEDHKKLVVSATEAHFDTTTPFAAVVIALMGTVAQMELEAIRERNRSAAHFNIRAGKYRGSLPPWGYLPTRVDGEWRLAPDPVQRERILEVYHRVVDNHEPLHLVAHDLNQRGVLSPRDYFAQLQGREPQGRKWSATALKRSMTSEAMLGYATLNGKTVRDDDGAPLVRAEPILTRGQLEALRAELVKTSRAKPAVSTPSLLLRVLFCAVCGEPAYKFAGGGRRHPRYRCRSMGFPKHCGNGTIAMAEWDAFCEEQVLDLLGDAERLEKVWVAGSDSAVVLAEVNAELVDLTSLIGSPAYRAGSPQREALDARIAALAARQEELEGFEARPSGWEWRETGQRFGDWWREQDTAAKNTWLRSMNVRLTFDVRGGLTRTIDFGDLQGYEQHLRLGSVVERSHTGMS

SEQ ID NO: 12613 - protein, 500 aa, synthetic construct
MRALVVIRLSRVTDATTSPERQLESCQQLCAQRGWDVVGVAEDLDVSGAVDPFDRKRRPNLARWLAFEEQPFDVIVAYRVDRLARSVRHLQQLVHWAEDHKKLVVSATEAHFDTTTPFAAVVIALMGTVAQMELEAIKERSRSAAHFNIRAGKYRGSLPPWGYLPTRVDGEWRLVPDPVQRERILEVHHRVVDNHEPLHLVAHDLNRRGVLSPKDYFAQLQGREPRGRKWSATALKRSMTSEAMLGYATLNGKTVRDDDGAPLVRAEPILTREQREALRAELVKTSRAKPAVSTPSLLLRVLFCAVCGEPAYKFSGGGRKHPRYRCRSMGFPKHCGNGTVAMAEWDAFCEEQVLGLLGDAERLEKVWVAGSDSAVELAEVNAELVDLTSLIGSPAYRADSPQREALDARIATLAARQEELEGLEARPSGWEWRETGQRFGDWWREQDTAAKNTWLRSMNVRLTFDVRGGLIRTIDLGGLQEYEQHLRSGSVVERLHAGMS

SEQ ID NO: 12614 - protein, 500 aa, synthetic construct
MRALVVIRLSRVTDATTSPERQLESCQQLCAQRGWDVVGVAEDLDVSGAVDPFDRKRRPNLARWLAFEEQPFDVIVAYRVDRLARSIRHLQQLVHWAEDHKKLVVSATEAHFDTTTPFAAVVIALMGTVAQMELEAIKERSRSAAHFNIRAGKYRGSLPPWGYLPTRVDGEWRLVPDPVQRERILEVYHRVVDNHEPLHLVAHDLNRRGVLSPRDYFAQLRGREPQGRKWSATALKRSMISEAMLGYATLNGRTVRDDDGAPLVRAEPILTREQLEALRAELVKTSRAKPAVSTPSLLLRVLFCAVCGEPAYKFVGGGRKHPRYRCRSMGFPKHCGNGTVAMAEWDAFCEDQVLDLLGDAERLEKVWVAGSDSAVELAEVNAELVDLTSLIGSPAYRAGSPQREALDARIAALAARQEKLEGLEARPSGWEWRETGQRFGDWWRERDTAAKNAWLRSANVRLTFDVRGGLTRTIDFGDLQEYEQHLRLGSVVERLHTGVS

SEQ ID NO: 12615 - protein, 500 aa, synthetic construct
MRALVVIRLSRVTDATTSPERQLESCQQLCAQRGWDVVGVAEDLDVSGAVDPFDRKRRPNLARWLAFEERPFDVIVAYRVDRLTRSIRHLQQLVHWAEDHKKLVVSATEAHFDTTTPFAAVVIALMGTVAQMELEAIKERSRSAAHFNIRAGKYRGSLPPWGYLPARVDGVWRLVPDPVQRERILEVYHRVVNNHEPLHLVAHDLNRRGVLSPKDYFAQLQGREPQGRKWSATALKRSMISEAMLGYATLNGKTVRDDDGAPLVRAEPILTREQQEALRAELVKASRAKPAVSTPSLLLRVLFCAVCGEPAYKFAGGGRKHPRYRCRSMGFPKHCGNGTVAMAEWDAFCEEQVLNLLWDAERLEKVWVAGSDSAVELAEVNKELVDLTSLIGSPAYRAGSPQREALDARIAALAARQEELEGLEARPSGWEWRGTGQRFGDWWRELDTAAKNTWLRSMNVRLTFDVRDGLTRTIDFGDLQEYEQHLRLGSVVERSHTGVS

SEQ ID NO: 12616 - protein, 500 aa, synthetic construct
MRALVVIRLSRVTDATTSPERQLESCQQLCAQRGWGVVGVAEDLDVSGAVDPFDRKRRPNLARWLAFEEQPFDVIVAYRVDRLTRSTRHLQQLVHWAEDHKKLVVSATEAHFDTTTPFAAVVIALMGTVAQMELEAIKERSRSAAHFNIRAGKYRGSLPPWGYLPARVDGEWRLVPDPVQRERILEVYHRVVDNHEPLHLVAHDLNRRGVLSPKDYFAQLRGREPQGRKWSATALKRSMISEAMLGYATLNGKTVRDDDGAPLVRAEPILTREQLEALRAELVKTSRAKPAVSTPSLLLRVLFCAVCGEPAYKFAGGGRKHPRYRCRSMGFPKHCGNGTVAMAEWDALCEEQVLDLLGDAERLEKVWVAGSDSAVELAEVNAELVDLTSLVGSPAYRAGSPQREALDARIAALAARQEELEGLEARPSGWEWRETGQRFGDWWREQDTAAKNTWLRSMNVRLTFDVRGGLTRTIDFGDLQEYEQHLRLGSVVERLHTGMS

SEQ ID NO: 12617 - protein, 500 aa, synthetic construct
MRALVVIRLSRVTDATTSPERQLESCRQLCAQRGWDVVGVAEDLDVSGAVDPFDRKRRPNLARWLAFEEQPFDVIVAYRVDRLARSIRHLQQLVHWAEDHKKLVVSATEAHFDTTTPFAAVVIALMGTVAQMELEAIKERSRSAAHFNIRAGKYRGSLPPWGYLPARVDGEWRLVPDPVQRERILEVYHRVVDNHEPLHLVAHDLNRRGVLSPKDYFAQLQGREPQGRKWSATALKRSMISGAMLGYATLSGKTVRDDDGAPLVRAEPILTREQQEALRAELVETSRAKPAVSTPSLLLRVLFCAVCGEPAYKFTGGGRKHSRYRCRSMGFPEHCGNGTVAMAEWDAFCEEQVLNLLGDAGRLEKVWVAGSDSAVELAEVNAELVDLTSLIGSPAYRAGSLQREALDARIAALAARQEELEGLEARPSGWEWRATGQRFGDWWREQDTAAKNTWLRSMNVRLTFDVRGGLTRTIDFGDLQEYEQHLRLGSVVERLHTGMS

SEQ ID NO: 12618 - protein, 500 aa, synthetic construct
MRTLVVIRLSRVTDATTSPERQLESCQQLCAQRGWDVVGVAEDLDVSGAVDPFDRKRRPNLARWLAFEERPFDAIVAYRVDRLTRSIRHLQQLVHWAEDHKKLVVSATEAHFDTTTPFAAVVIALMGTVAQMELEAIKERSRSAAHFNIRAGKYRGSLPPWGYLPTRVDGEWRLVPDPVQRERILEVYRRVVDNHEPLHLVAHDLNRRGVLSPKDYFAQLRGREPQGRKWSATALKRSMTSEAMLGYATLNGKTVRDDDGAPLVRAEPILTREQLEALRAELAKTSRAKPAVSTPSLLLRVLFCAVCGEPAYKFAGGGRKHPRYRCRSMGFPKHCGNGTVAMAEWDAFCEEQVLDLLGDAECLEKVWVAGSDSAVELAEVNAELVDLTSLIGSPAYRAGSPQREALGARIAALAARQEELEGLEARPSGWEWRETGQRFGDWWREQDTAAKNTWLRSMNVRLTFDVRGGLTRTIDFGDLQEYEQHLRLGSVVERLHTGMS

SEQ ID NO: 12619 - protein, 500 aa, synthetic construct
MRALVVIRLSRVTDATTSPERQLESCQQLCAQRGWDVVGVAEDLDVSGAVDPFDRKRRPNLARWLAFEEQPFDAIVAYRVDRLARSIRHLQQLVHWAEDHKKLVVSATEAHFDTTTPFAAVVIALMGTVAQMELEAIKERSRSAAHFNIRAGKYRGSLPPWGYLPARVDGEWRLVPDPVQRERILEVYHRVVDNHEPLHLVAHDLNRRGVLSPKDYFAQLQGREPQGRKWSATALKRSMISEAMLGYATLNGKTVRDDDGAPLVRAEPILTREQQEALRAELVKTSRAKPAVSTPSLLLRVLFCAVCGEPAYKFAGGGRKHPRYRCRSMGFLKHCGNGTVAMAEWDAFCEEQVLDLLGDAERLEKVWVAGSDSAVELAEVNAELVDLTSLIGSPAYRAGSPQREALDARIAALAARQEELEGLEARPSGWEWRETGQRFGDWWREQDTAAKNTWLRSMNVRLTFDVRGGLTRTIDFGDLHEYEQHLRLGSVVERLHTGMS

SEQ ID NO: 12620 - protein, 500 aa, synthetic construct
MRALVVIRLSRVTDATTSPERQLESCQQLCAQRGWDVVGVAEDLDVSGSVDPFDRKRRPNLARWLAFEEQPFDVIVAYRVDRLARSIRHLQQLVHWAEDHKKLVVSATEAHFDTTTPFAAVVIALMGTVAQMELEAIKERSRSAAHFNIRAGKYRGSLPPWGYLPTRVDGEWRLVPDPVQRERILEVYHRVVDNHEPLHLVAHDLNRRGVLSPRDYFAQLRGREPQGRKWSATALKRSMISEAMLGYATLNGRTVRDGDGAPLVRAEPILTREQLEALRAELAKTSRAKPAVSTPSLLLRVLFCAVCGEPAYKFAGGGRKHPRYRCRSMGFPKHCGNGTVAMAEWDAFCEEQVLDLLGDAERLEKVWVAGSDSAVELAEVNAELVDLTSLIGSPTYRAGSPQREALDARIAALAARQEELEGLEARPSGWEWRETGQRFGDWWRGQDTAAKNTWLRSMNVRLTFDVRGGLTRTIDFGDLQEYEQHLRLGSVVERLHTGMS

SEQ ID NO: 12621 - protein, 500 aa, synthetic construct
MRALVVTRLSRVTDATTSPERQLESCQQLCAQRGWDVVGVAEDLDVSGAVDPFDRKRRPNLARWLAFEEQPFDVIVAYRVDRLARSIRHLQQLVHWAEDHKKLVVSATEAHFDTTTPFAAVVIALMGTVAQMELEAIKERNRSAAHFNIRAGKYRGSLPPWGYLPTRVDGEWRLVPDPVQRERILEVYHRVVDDHEPLHLVAHDLNRRGILSPRDYFAQLRGREPQGRKWSATALKRSMISEAMLGYVTLNGKTVRDDDGAPLVRAEPILTREQLEALRAELVKTSRAEPAVSTPSLLLRVLFCAVCGEPAYKFTGGGRKHPRYRCRSMGFPEHCGNGTVAMAEWDAFCEEQVLGLLGDAERLEKVWVAGSDSAVELAEVNAKLVDLTSLIGSPAYRAGSPQREALDARIAALAARQEELEGLEARPSGWEWRETGQRFGDWWREQDTAAKNTWLRSMNVRLTFDLRGGLTRTIDFGDLREYEQHLRLGSAVERLHTGMS

SEQ ID NO: 12622 - protein, 500 aa, synthetic construct
MRALVVIRLSRVTDATTSPERQLESCQQLCAQRGWDVVGVAEDLDVSGAVDPFDRKRRPNLARWLAFEEQPFDVIVAYRVDRLTRSVRHLQQLVHWAEDHKKLVVSATEAHFDTTTPFAAVVIALMGTVAQMELEAIKERSRSAAHFNIRAGKYRGSLPPWGYLPARVDGEWRLVPDPVQRERILEVYHRVVDNHEPLHLVAHDLNRRGVLSPKDYFAQLRGREPQGRKWSATALKRSMISVAMLGYATLCGKTVRDDDGAPLVRAEPILTREQLEALRAELVKTSRAKPAVSTPSLLLRVLFCAVCGEPAYKFAGGGRKHPRYRCRSMGFPKHCGNGTVAMAEWDAFCEEQVLNLLGDAERLEKVWVAGSDSAVELAEVNAELVDLTSLIGSPAYRAGSPQREALDARIAALAAHQEELEGLEARPSGWEWRETGQRFGDWWREQDTAAKNTWLRSMNVRLTFDVRGGLTRTIDFGDLQEYEQHLRLGSVVERLHTGMS

SEQ ID NO: 12623 - protein, 500 aa, synthetic construct
MRALVAIRLSRVTDATTSPERQLESCQQLCAQRGWDVVGVAEDLDVSGAVDPFDRKRRPNLARWLAFEELPFDVIVAYRVDRLTRSVRHLQQLVHWAEDHKKLVVSATEAHFDTTTPFAAVVIALMGTVAQMELEAIKERNRSAAHFNIRAGRYRGSLPPWGYLPTRVDGEWRLVPDPVQRERILEVYHRVVDNHEPLHLVAHDLNRRGVLSPRDYFAQLRGRKPQGRKWSATALKRSMISEAMLGYATLSGKTVRDDDGAPLVRAEPILTREQLEALRAELVKTSRAKPAVSTPSLLLRVLFCAVCGEPAYKFTGGGRKHPRYRCRSMGFPKHCGNGTVAMAEWDAFCEEQVLGLLGDAERLEKVWVAGSDSAVELAEVNAELVDLTSLIGSPAYRAGSPQREALDARIAALAARQEELEGLEARPSGWEWRETGQRFGDWWREQDTAAKNTWLRSMNVRLTFDVRGGLTRTVDFGDLQEYEQHLRLGSVVERSHTGMS

SEQ ID NO: 12624 - protein, 500 aa, synthetic construct
MRALVVIRLSRVTDATTSPERQLESCQQLCAQRGWDVVGVAEDLDVSGAVDPFDRKRRPNLARWLAFEEQPFDVIVAYRVDRLARSIRHLQQLVHWAEDHKKLVVSATEAHFDTTTPFAAVVIALMGTVAQMELEAIKERSRSAAHFNIRAGKYRGSLPPWGYLPIRVGGEWRLVPDPVQRERILEVYHRVVDDHEPLHLVAHDLNRRGVLSPKDYFAQLRGREPQGRKWSATALKRSMISEAMLGYATLNGKTVRDDDGAPLVRAEPILTREQQEALRAELVKTSRAKPAVSTPSLLLRVLFCAVCGEPAYKFAGGGRKHPRYRCRSMGFPKHCGNGTVAMAEWDAFCEEQVLNLLGDAERLEKVWVAGSDSAVELAEVNAELVDLTSLIGSPAYRAGSPQREALDARIAALTARQEKLEGLEARPSGWEWRGTGQRFGDWWHEQDTAAKNTWLRSMNVRLTFDVRGGLNRTIDFGDLQEYEQHLRLGSVVERLHTGMS

SEQ ID NO: 12625 - protein, 500 aa, synthetic construct
MRALVVIRLSRVTDATTSPERQLESCQQLCAQRGWDVVGVAEDLDVSGAVDPFDRKRRPNLARWLAFEEQPFDVIVAYRVDRLTRSTRHLQRLVHWAENHKKLVVSATEAHFDTTTPFAAVVIALMGTVAQMELEAIKERNRSAAHFNIRAGKYRGSLPPWGYLPARVDGEWRLVPDPVQRERILEVYHRVVGNHEPLHLVAHDLNRRGVLSPRDYFAQLQGREPQGRKWSATALKRSMISEAMLGHATLNGKTVRNDDGAPLVRAEPILTREQLEALRAELVKTSRAKPAVSTPSLLLRVLFCAVCGEPAYKFAGGGRKHPRYRCRSMGFPKHCGNGTVAMAEWDAFCEEQVLDLLGDAERLERVWVAGSDSAVELAEVNAELVDLTSLISSPAYRAGSPQREALDARIAALAARQKELEGLEARPSGWEWRETGQRFGDWWCEQDTAAKNTWLRSMNVRLTFDVRGELTRTIDFGDLQEYEQHLRLGSVVERLHTGMS

SEQ ID NO: 12626 - protein, 500 aa, synthetic construct
MRALVVIRLSRVTDATTSPERQLESCQQLCAQRGWDVVGVAEDLDVSGAVDPFNHKRRPNLARWLAFEEQPFDVIVAYRVDRLTRSVRHLQQLVHWAEDHKKLVVSATEAHFDTTTPFAAVVIALMGTVAQMELEAIKERSRSAAHFNIRAGKYRGSLPPWGYLPARVGGEWRLVPDPVQRERILEVYHRVVDNHEPLHLVAHDLNRRGVLSPKDYFAQLRGREPQGRKWSATALKRSMVSVAMLGYATLNGKTVRDDDGAPLVRAEPILTREQLEALRAELVKTSRAKPAVSTPSLLLRVLFCAVCGEPAYKFSGGGRKHPRYRCRSMGFPKHCGNGTVAMAEWDAFCEEQVLDLLGDAEHLEKVWVAGSDSAVELAGVNAELVDLTSLIGSPAYRAGSPQREALDARIAALAARQEELEGLEARPSGWEWRETGQRFGDWWREQDTAAKNAWLRSMNVRLTFDVRGGLTRTIDFGDLQEYEQHLRLGSVAERLHTGMS

SEQ ID NO: 12627 - protein, 500 aa, synthetic construct
MRALVVIRLSRVTDATTSPERQLESCQQLCAQRGWDVVGVAEDLDVSGAVDPFDRKRRPSLARWLASEEQPFDVIVAYRVDRLTRSIRHLQQLVHWAEDHKKLVVSATEAHFDTTTPFAAVVIALMGTVAQMELEAIKERSRSAAHFNIRAGKYRGSLPPWGYLPARVDGVWRLVPDPVQRERILEVYHRVVNNHEPLHLVAHDLNRRGVLSPKDYFAQLQGREPQGRKWSATALKRSMISEAMLGYATLNGKTVRDDDGAPLVRAEPILTREQQEALRAELVKTSRAKPAVSTPSLLLRVLFCAVCGEPAYKFAGGGRKHPRYRCRSMGFPKHCGNGTVAMAEWDAFCEEQVLGLLGDAERLEKVRVAGSDSAVELAEVNAELVDLTSLIGSPAYRAGSPQREALDARIAALAARQEELEGLGARPSGWEWRETGQRFGDWWREQDTAARNTWLRSMNVRLTFDVRGGLTRTIDFGDLREYEQHLRLGSVVERLHTGMS

SEQ ID NO: 12628 - protein, 500 aa, synthetic construct
MRALVVIRLSRVTDATTSPERQLGSCQQLCAQRGWDVVGVAEDLDVSGAVDPFDRKRRPNLARWLAFEEQPFDVIVAYRVDRLARSIRHLQQLVHWAEDHKKLVVSATEAHFDTTTPFAAVVIALMGTVAQMELEAIKERSRSAAHFNIRAGKYRGSLPPWGYLPTRVNGEWRLAPDPVQRERILEVYHRVVDNHEPLHLVAHDLNRRGVLSPKDYFAQLQGREPQGRKWSATALKRSMISEAMLGYATLNGKTVRDDDGAPLVRAEPILTREQLEALRAELVKTSRAKPAVSTPSLLLRVLFCAVCGEPAYKFAGGGRKHPRYRCRSMGFPKHCGNGTVAMAEWDAFCEGQVLDLLGDAERLEKVWVAGSDSAVELTEVNAELVDLTILIGSPAYRAGSPQREALDARIAALAARQEELEGLEARPSGWEWRETGQRFGDWWREQDTAAKNTWLRSMNVRLTFDVRGGLTRTIDFGDLQEYEQHLRLGSVVERLHTGMS

SEQ ID NO: 12629 - protein, 500 aa, synthetic construct
MRALVVIRLSRVTDATTSPERQLESCLQLCAQRGWDVVGVAEDLDVSGAVDPFDRKRRPNLARWLAFEERPFDVIVAYRIDRLTRSIRHLQQLVHWAEDHKKLVVSATEAHFDTTTPFAAVVIALMGTVAQMELEAIKERNRSAAHFNIRAGKYRGSLPPWGYLPTRVDGEWRLAPDPVQRERILEVYHRVVDNHEPLHLVAHDLNRRGVLSPKDYFAQLRGREPQGRKWSVTALKRSMTSEAMLGYATLSGKTVRDDDGAPLVRAEPILTREQLEALRAELVKTSRAKPAVSTPSLLLRVLFCAVCGEPAYKFAGGGRKHPRYRCRSMGFPKHCGNGTVAMAEWDAFCEEQVLDLLGDAERLEKVWVAGSDFAVELAEVNAELVDLTSLISSPAYRAGSPQREALDARIAALAARQEELEGLEVRPSGWEWRGTGQRFGDWWREQDTAAKNTWLRSMNVRLTFDVRGGLTRTFDFGDLREYKQHLRLGSVVERLHTGMS

SEQ ID NO: 12630 - protein, 500 aa, synthetic construct
MRALVVIRLSRVTDATTSPERQLESCRQLCAQRGWDVVGVAEDLDVSGAVDPFDRKRRPNLARWLAFEEQPFDAIVAYRVDRLTRSIRHLQQLVHWAEDHKKLVVSATEAHFDTTTPFAAVVIALMGTVAQMELEAIKERNRSAAHFNIRAGKYRGSLPPWGYLPARVDGEWRLVPDPVQRERILEVYHRVVDNHEPLHLVAHDLNRRGVLSPRDYFAQLRGREPQGRKWSATALKRSMISEAMLGHATLNGKTVRDEDGAPLVRAEPILTREQLEALRAELAKTSRAKPAVSIPSLLLRVLFCAVCGEPAYKFAGGGRKHPRYRCRSMGLPMHCGNGTVAMAEWDAFCEEQVLNLLGDAERPEKVWVAGSDSAVELAEVNAELVDLTSLIGSPAYRAGSPQREALDARIAALAARQEELEGLEVRPSGWEWRETGQRFRDWWREQDTSAKNTWLRSMNVRLTFDVRGGLTRTIDFGDLQEYEQHLRLGSVVERLHAGMS

SEQ ID NO: 12631 - protein, 500 aa, synthetic construct
MRALVVIRLSRVTDATTSPERQLESCQQLCAQRGWDVVGVAEDLDVSGAVDPFDRKRRPNLARWLAFEEQPFDVIVAYRVDRLTRSVRHLQQLVHWAEDHKKLVVSATEAHFDTTTPFAAVVIALMGTVAQMELEAIKERSRSAAHFNIRAGKYRGSLPPWGYLPARVDGEWRLAPDPVQRERILEVYHRVVDNHEPLHLVAHDLNRRGVLSPKDYFAQLQGREPQGRKWSATALKRSMISVAMLGYATLNGKTVRDDDGAPLVRAEPILTREQLEALRAELVRTSRAKPAVSTPSLLLRVLFCAVCGEPAYKFAGGGRKHPRYRCRSMGFPKHCGNGTVAMAEWDAFCEEQVLELLGDAERLEKVWVAGSDSAVELAEVNAELVDLTSLIGSPAYRAGSPQRGALDARIAALAARQAELEGLEARPSGWEWRETGQGFGDWWREQDTAAKNTWLRSMNVRLTFDVRGGLTRTIDFGDLQEYEQHLRLGSVVERLHTGMS

SEQ ID NO: 12632 - protein, 500 aa, synthetic construct
MRALVVIRLSRVTDATTSPERQLESCQQLCIQRGWDVVGVAEDLDVSGAIDPFDRKRRPNLARWLAFEEQPFDVIVAYRVDRLARSIRHLQQLVHWAEDHKKLVVSATEAHFDTTTPFAAVVIALMGTVAQMELEAIKERSRSAAHFNIRAGKYRGSLPPWGYLPTRVDGEWRLVPDPVQRERILEVYHRVVDNHEPLHLVAHDLNRRGILSPKDYFAQLRGREPQGRKWSATALKRSMISEAMLGYATLNGKTVRDDDGAPLVRAEPILTREQQEALRAELVKTSRAEPAVSTPSLLLRVLFCAVCGEPAYKFAGGGRKHPRYRCRSMGFPKHCGNGTVAMAEWDAFCEEQVLDLLGDAERLEKVWVAGSDSAVELAEVNAELVDLTSLIGSPAYRAGSPQREALDARIAALAARQEELEGLEARPSGWEWRETGQRFGDWWREQDTAAKNTWLRSMNVRLTFDVRGGLTRTIDFGDLQEYEQHLRLGSVVERLHTGTP

SEQ ID NO: 12633 - protein, 500 aa, synthetic construct
MRALVVIRLSRVTDATTSPERQLESCQQLCAQRGWDVAGVAEDLDVSGAVDPFDRKRRPNLARWLAFEEQPFDVIVAYRVDRLTRSTRHLQQLVHWAEDHKKLVVSATEAHFDTTTPFAAVVTALMGTVAQMELEAIKERSRSAAHFNIRAGKYRGSLPPWGYLPARVDGEWRLVPDPVQRERILEVYHRVVDNHEPLHLVAHDLNRRGVLSPKDYFAQLRGREPQGREWSATALKRSMISEAMLGYATLNGKIVRDDDGVPLVRAEPILTREQLEALRAELVKTSRAKPAVSTPSLLLRVLFCAVCGEPAYKFAGGGRKHPRYRCRSMGFPKHCGNGTVAMAEWDAFCEEQVLNLLGDAERLEKVWVAGSDSAVELAEVSAELVDLTSLIGSPAYRAGSPQRVALDARIAALAARQEELEGLEARPSGWEWRGTGQRFGDWWREQGTAAKNTWLRSMNVRLTFDVRGGLTRTIDFGDLQEYEQHLRLGSVVERLHTGMS

SEQ ID NO: 12634 - protein, 500 aa, synthetic construct
MRALVVIRLSRVTDATTSPERQLESCQQLCAQRGWDVVGVAEDLDVSGAADPFDRKRRPNLARWLAFEEQPFDVIVAHRVDRLARSIRHLQQLVHWAEDHKKLIVSATEAHFDTTTPFAAVVIALMGTVAQMELEAIKERSRSAAHFNIRAGKYRGSLPPWGYLPTRVDGEWRLVPDPVQRERILEVYHRVIDNHEPLHWVAHDLNRRGVLSPKDYFAQLRGREPQGHKWSATALKRSMISEAMLGYATLNGRTVRDDDGAPLVRAEPILTRGQLEALRAELVKTSRAKPAVSTPSLLLRVLFCAVCGEPAYKFAGGGRKHPRYRCRSMGFPKHCGNGTVAMAEWDAFCEEQVLDLLGDAERLEKVWVAGSDSAVELAEMNAELVDLTSLIGSPAYRAGSPQREALDTRIAALAARQEELKGLEARPSGWEWRETGQRFGDWWREQDTAAKNTWLRSMNVRLTFDVRGGLTRTIDFGDLQEYEQHLRLGSVVERLHTGMS

SEQ ID NO: 12635 - protein, 500 aa, synthetic construct
MRALVVIRLSRVTDATTSPERQLESCQQLCAQRGWDVVGVAEDLDVSGAVDPFDRKRRPNLARWLAFEEQPFDVIVAYRVDRLARSIRHLQQLVHWAEDHEKLVVSATEAHFDTTTPFAAVVIALMGTVAQMELEAIKERNRSAAHFNIRAGKYRGSLPPWGYLPTRVDGEWRLAPDPVQRERILEVYHRVVDNHEPLHLVAHDLNRRGVLSPKDYFAQLRGREPQGRKWSATALKRSMTSEAMLGYATLNGKTVRDDDGAPLVRAEPILTREQLEALRAELVKTSRAKPAVSTPSLLLRVLFCAVCGEPAYKFAGGGRKHPRYRCRSMGFPKHCGNGTVAMAEWDAFCEEQVLNLLGDAERLEKVWVAGSDSAVELAEVSAELVDLTSLIGSPAYRAGSPQREALDARIAALAARQEELEGLEARPSGWEWRETGQRFGDWWREQDTAAKNTWLRSMNVRLTFDVRGGLTRTIDFGDLQEYEQHLRLGSVVERLHTGMS

SEQ ID NO: 12636 - protein, 500 aa, synthetic construct
MRALVVIRLSRVTDATTSPERQLESCQQLCAQRGWDVVGVAEDLDVSGAVDPFDRKRRPNLARWLAFEERPFDVIVAYRVDRLTRSIRHLQQLVHWAEDHKKLVVSATEAHFDTTTPFAAVVIALMGTVAQMELEAIKERNRSAAHFNIRAGKYRGSLPPWGYLPTRVDGVWRLVPDPVQRERILEVYHRVVDNHEPLHLVAHDLNRRGVLSPKDYFAQLRGREPQGRKWSATALKRSMISVAMLGYATLNGKTVRDDDGAPSVRAEPILTREQQEALRAELAKTSRAKPAVSTPSLLLRVLFCAVCGEPAYKFAGGGRRHPRYRCRSMGFPKHCGNGTVAIAEWDAFCEEQVLNLLGDAERLEKVWVAGSDSAVELAEVNAELVDLTSLIGSPAYRAGSPQREALDARIAALAARQEELEGLEARPSGWEWRETGQRFGDWWREQDTAAKNTWLRSMNVRLTFDVRGGMTRTIDFGDLQEYEQHLRLGSVVERLHTGTT

SEQ ID NO: 12637 - protein, 500 aa, synthetic construct
MRALVVIRLSRVTDATTSPERQLESCQQLCAQRGWDVVGVAEDLDVSGAVDPFDRKRRPNLARWLAFEEQPFDVIVAYRVDRLTRSVRHLQQLVHWAEDHKKLVVSATEAHFDTTTPFAAVVIALMGTVAQMELEAIKERSRSAAHFNIRAGKYRGSLPPWGYLPTRVDGEWRLVPDPVQRERILEVYHRVVDNHESLHSVAHDLNRRGVLSPKDYFAQLQGREPQGRKWSATALKRSMISVAMLGYATLNGKTVRDDDGAPLVRAEPILTREQLEALRAELVKTSRAKPAVSTPSLLLRVLFCAVCGEPAYKFAGGGRKHPRYRCRSMGFPKHCGNGTVAMAEWDAFCEEQVLDLLGDAERLEKVWVAGSDSAVELAEVNTELVDLTSLIGSPAYRAGSPQREALDARIAALAARQEELEGLEARPSGWEWRGTGQRFGDWWREQDTAAKNAWLRSMNVRLTFDVRGGLTRTIDFGDLQEYEQHLRLGSAAERLHAGMS

SEQ ID NO: 12638 - protein, 500 aa, synthetic construct
MRALVVIRLSRVTDATTSPERQLESCQQLCAQRGWDVVGVAEDLDVSGAVDPFDRKRRPNLARWLAFEEQPFDVIVAYRVDRLARSIRHLQQLVHWAEDHKKLVVSATEAHFDTTTPFAAVVIALMGTVAQMELEAIKERSRSAAHFNIRAGKYRGSLPPWGYLPARVDGEWRLVPDPVQRERILEVYHRVVDNHEPLHLVAHDLNRRGVLSPKDYFAQLRGREPQGRKWSATALKRSMISEAMLGHATLNGKTVRDEDGAPLVRAEPILTREQLEALRAELVKASRAKPAVSTPSLLLRVLFCAVCGEPAYKFAGGGRKHPRYRCRSMGFPKHCGNGTVTMAEWDAFCEEQVLDLLGDAERLEKVWVAGSDSAVELAEVNAELVDLTSLIGSPAYRAGSPQREALGARIAALAARQEELEGLEARPSGWEWRGTGQRFGDWWREQDTATKNAWLRSMNVRLTFDVRGGLTRTIDFGDLQEYEQHLRLGSVVGRLHTGMS

SEQ ID NO: 12639 - protein, 500 aa, synthetic construct
MRALVVIRLSRATDATTSPERQLESCQQLCAQRGWDVVGVAEDLDVSGAVDPFDRKRRPNLARWLAFEEQPFDVIVAYRVDRLTRSIRHLQQLVHWAEDHKKLVVSATEAHFDTTTPFAAVVIALMGTVAQMELEAIKERNRSAAHFNIRAGKYRGSLPPWGYLPTRVDGEWRLAPDPVQRERILEVYHRVVDNHEPLHLVAHDLNRRGVLSPKDYFAQLQGREPQGRKWSATALKRSMISEAMLGHATLNGKTVRDDDGAPLVRAEPILTREQQEALRAELVKTSRAKPAVSTPSLLLRVLFCAVCGEPAYKFSGGGRKHPRYRCRSMGFPKHCGNGTVAMAEWDAFCEEQVLGLLGDAERLEKVWVAGSDSAVELAEVNAELVDLTSLIGSPAYRAGSPQREALDARIAVLAARQVELEGLEARPSGWEWRETGQRFGDWWREQDTAAKNTWLRSMNVRLTFDVRGGLTRTIDFGDLQEYEQHLRLGSVVERLHTGMS

SEQ ID NO: 12640 - protein, 500 aa, synthetic construct
MRALVVIRLSRVTDATTSPERQLESCQQLCAQRGWDVVGVAEDLDVSGAVDPFDRKRRPNLARWLAFEERPFDVIVAYRVDRLARSIRHLQQLVHWAEDHKKLVVSATEAHFDTTTPFAAVVIALMGTVAQMELEAIKERNRSAAHFNIRAGKYRGSLPPWGYLPARVDGEWRLVPDPVQRERILEVYHRVVDNHEPLHLVAHDLNRRGVLSPKDYFAELRGREPQGRKWSATALKRSMISEAMLGYATLNGKTVRDDDGAPLVRAEPILTREQLEALHAELAKTSRAKPAVSTPSLLLRVLFCAVCGEPAYKFAGGERKHPRYRCRSMGFPKHCGNGTVAMAEWDAFCEEQVLDLLGDAERLEKVWVAGSDSAVELAEVNAELVDLTSLIGSPAYRAGSPQREALDARIAALAARQEELEGLEARPSGWELRETGQRFGDWWREQDTAAKNTWLRSMNVRLTFDVRGGLTRTIDFGDLQEYVQHLRLGSVAERLHTGIS

SEQ ID NO: 12641 - protein, 500 aa, synthetic construct
MRALVVIRLSRVTDATTSPERQLESCQQLCAQRGWDVVGVAEDLDVSGAVDPFDRKRRPNLARWLTFEEQPFDVIVAYRVDRLTRSVRHLQQLVHWAEDHKKLVVSATEAHFDTTTPFAAVVIALMGTVAQMELEAIKERNRSAAHFNIRAGKYRGSLPPWGYLPTRVDGEWRLVPDPVQRERILEVYHRVVDNHEPLHLVAHDLNRRGALSPRDYFAQLRGREPQGRKWSATALKRSLISEAMLGYATLNGKTVRDDDGAPLVRAEPILTREQQEALRAELVKTSRAEPAVSTPSLLLRVLFCAVCGEPAYKFAGGGRKHPRYRCRSMGFPKHCGNGTVAMAGWDAFCEEQVLDLLGDAERLEKVWVAGSDSAVELAEVNAELVDLTSLIGSPAYRAGSPQREALDARIAALAARQEELEGLEARPSGWEWRETGQRFGDWWREQDTAAKNTWLRSMNVRLTFDVRGGLTRTIDFGDLQEYEQHLRLGSVVERLHTGMS

SEQ ID NO: 12642 - protein, 500 aa, synthetic construct
MRALVVIRLSRVTDATTSPERQLESCQQLCAQRGWDVVGVAEDLDVSGAVDPFNRKRRPNLARWLAFEEQPFDVIVAYRVDRLTRSIRHLQQLVHWAEDHKKLVVSATEAYFDTTTPFAAVVIALMGTVAQLELEAIKERSRSAAHFNIRAGKYRGSLPPWGYLPTRVDGEWRLAPDPVQRERILEVYHRVVDNHEPLHSVAHDLNRRGVLSPKDYFAQLQGREPQGRKWSATALKRSMTSEAMLGYATLNGKIVRDDDGAPLVRAEPILTREQLEALRAELVKTSRAKPAVSTPSLLLRVLFCAVCGEPAYKFAGGGRKHPRYRCRSMGFPKHCGNGTVAMAEWDAFCEEQVLDLLGDAERLEKVWVAGSDSAVELAEVNAELVDLTSLIGSPAYRAGSPQREALDARIAALAARREGLEGLEARPSGWEWRETGQRFGDWWREQDTAAKNTWLRSMNVRLTFDVRGGLTRTIDFGDLQEYEQHLRLGSVVERLHTGMS

SEQ ID NO: 12643 - protein, 500 aa, synthetic construct
MRALVVIRLSRVTDTTTSPERQRESCQQLCAQRGWDVVGVAEDLDVSGAVDPFDRKRRPNLARWLAFEEQPFDVIVAYRVDRLARSIRHLQQLVHWAEDHKKLVVSATEAHFDTTTPFAAVVIALMGTVAQMELEAIKERSRSAAHFNILAGKYRGSLPPWGYLPTRVDGEWRLVPDPVQRERILEVYHRVVDNHEPLHLVAHDLNRRGVLSPKDYFAQLRGREPQGRKWSATALKRSMTSEAMLGYATLNGKTVRDGDGAPLVRAEPILAREQLEALRAKLVKTSRARPAVSTPSLLLRVLFCAVCGEPAYKFAGGGRKHPRYRCRSMGFPKHCGNGTVAMAEWDAFCEEQVLDLLGDAERLEKVWVAGSDSAVELAEVNAELVDLTSLLGSPAYRAGSPQREALDARIAALAARQEELEGLEARPSGWEWRETGQRFGDWWREQDTAAKNTWLRSMNVRLTFDARGGPTRTIDFGDLQEYEQHLRLGGVVERLHTGMS

SEQ ID NO: 12644 - protein, 500 aa, synthetic construct
MRALVVIRLSRVTDATTSPERQLESCKQLCAQRGWDVVGVAEDLDVSGAVDPFDRKRRPNLARWLAFEGQPFDVIVAYRVDRLTRSIRHLQQLVHWAEDHKKLVVSATEAHFDTTTPFAAVVIALMGTVAQMELEAIKERNRSAAHFNIRAGKYRGSLPPWGYLPTRVDGEWRLVPDPVQRERILEVYHRVVNNHEPLHLVAHDLNRRGVLSPKDYFAQLQGREPQGRKWSATALKRSMISVAMLGYATLNGKTVRDDDGAPLVRAEPILTREQQEALRTELVKTSRAKPAVSTPSLLLRVLFCAVCGEPAYKFSGGGRKHPRYRCRSMGFPKHCGNGTVAMAEWDAFCEEQVLDLLGDAERLEKVWVAGSDSAVELAEVNAELVDLTSLIGSPAYRAGSPQREALDARIAALAARQEELEGLEARPSGWEWRETGQRFGDWWREQDTAAKNTWLRSMNVRLTFDVRGGLTRTIDFGDLQEYERHLRLGSVVERLHTGMS

SEQ ID NO: 12645 - protein, 500 aa, synthetic construct
MRALVVIRLSRVTDTTTSPERQLESCQRLCAQRGWDVVGVAEDLDVSGAVDPFDRKRRPNLARWLAFEEQPFDVIVAYRVDRLARSIRHLQRLVHWAEDHRKLVVSATEAHFDTTTPFAAVVIALMGTVAQMELEAIKERNRSAAHFNIRAGKYRGSLPPWGYLPTRVNGEWRLVPDPVQRERILEVYHRVVDNHEPLHLVAHDLNRRGVLSPKDYFAQLQGREPQGRKWSATALKRSMTSEAMLGYATLNGKTVRDDDGAPLVRAEPILTREQLEALRAELVKTSRAKPAVSTPSLLLRVLFCAVCGEPAYKFAGGGRKHARYRCRSMGFPKHCGNGTVAMAEWDAFCEERVLDLLGDAERLEKVWVAGSDSAVELAEVNAELVDLTSLIGSPAYRAGSPQREALDARIAALAARQEELEGLEARPSGWEWRETGRRFGDWWREQDTAAKNTWLRSMNVRLTFDVRGGLTRTIDFGELQEYGQHLRLGSVVERLHTGMS

SEQ ID NO: 12646 - protein, 500 aa, synthetic construct
MRALVVIRLSRVTDATTSPERQLESCQQLCAQRGWDVVGVAEDLDVSGAVDPFDRKRRPNLARWLAFEEQPFDVIVAYRVDRLTRSTRHLQQLVHWAEDHKKLVVSATEAHFDTTTPFAAVVIALMGTVAQMELEAIKERTRSAAHFNIRAGKYRGSLPPWGYLPARVDGEWRLAPDPVQRERILEVYHRVVDNHEPLHSVAHDLNRRGVLSPKDYFAQLQGREPQGRKWSATALKRSMISEAMLGYATLNGKTVRDDDGAPLVRAEPILTREQLEALRAELVKTSRVKPAVSTPSLLLRVLFCAVCGEPAYKFTGGGRKHPRYRCRSMGFPKHCGNGTVAMAEWDAFCEEQVLNLLGDAERLEKVWVAGSDSAVELAEVNTELVDLTSLIGSPAYRAGSPQREALDARIAALAARQEELEGLEARPSGWEWRKTGQGFGDWWREQDTAAKNTWLRSMNVRLTFDVRGGLTRTINFGDLQEYEQHLRLGSMVERLHTGMS

SEQ ID NO: 12647 - protein, 500 aa, synthetic construct
MRALVVIRLSRVTDATTSPERQLESCQQLCAQRGWDVVGVAEDLDVSGTVDPFDRKRRPNLARWLAFEEQPFDVIVAYRVDRLTRSVRHLQQLVHWAEDHKKLVASATEAHFDTTTPFAAVVIALMGTVAQMELEAIKERSRSAAHFNIRAGKYRGSLPPWGYLPTRVDGEWRLVPDPVQRERILEVYHRVVDNHEPLHLVAHDLNRRGVLSPRDYFAQLRGREPQGRKWSATALKRSMISEAMLGYVTLNGRTVRDDYGAPLVRAEPILTREQLGALRAELVKTSRAKPAVSTPSLLLRVLFCAVCGEPAYKFAGGGRKHPRYRCRSMGFPKHCGNGTVAMAEWDAFCEEQVLDLLGDAERLEKVWVAGSDSAVELAEVNAELMDLTSSIGSPAYRAGSPQREALDARIAALAARQEELEGLEARPSGWEWRETGQRFGDWWREQDTAVKNTWLRSMNVRLTFDVRGGLTRTIDFGDLQAYEQHLRLGSVVERLHTGMS

SEQ ID NO: 12648 - protein, 500 aa, synthetic construct
MRALVVIRLSRVTDTTTSPERQLESCQQLCAQRGWDVVGVAEDLDVSGAVDPFDRKRRPNLARWLAFEEQPFDVIVTYRVDRLTRSIRHLQQLVHWAEDHKKLVVSATEAHFDTTTPFAAVVIALMGTVAQMELEAIRERSRSAAHFNIRAGKYRGSLPPWGYLPARVGGEWRLVPDPVQRKRILEVYHRVVDDHEPLHSVAHDLNRRGVLSPRDYFAQLQGREPRGRKWSATALKRSMISEAMLGYVTLNGKTVRDDDGAPLVRAEPILTREQLEALRAELVKTSRAKPAVSTPSLLLRVLFCAVCGEPAYKFAGGGRKHPRYRCRSMGFPEHCGNGTVAMAEWDAFCEEQVLGLLGDAERLEKVWVAGSDSAVELAEVNAELVDLTSLIGSPAYRAGSPQREALDARIAALAARQEELEGLEARPSGWEWRETGQRFGDWWREQNTAAKNTWLRSMNVRLTFDVRGGLTRTIDFGDLQEYEQHLRLGSVVERLHTGMS

SEQ ID NO: 12649 - protein, 500 aa, synthetic construct
MRALVVIRLSRVTDATTSPERQLESCQQLCAQRGWDVVGVAEDLDVSGAVDPFDRKRRPNLARWLAFEEQPFDVIVAYRVDRLTRSTRHLQQLVHWAEDHKKLVVSATEAHFDTTTPFAAVVIALMGTVAQMELEAIKERSRSAAHFNIRAGKYRGSLPPWGYLPTRVDGEWRLAPDPVQRERILEVYHRVVDNHEPLHLVAHDLNRRGVLSPKDYFAQLQGREPQGRKWSATALKRSMISGAMLGYATLNGKTVRDDDGAPLVRAEPILTREQLEALRAELVKATRAKPAVSTPSLLLRVLFCAVCGEPAYKFAGGGRKHPRYRCRSMGFPKHCGNGTVAMAEWDAFCEEQVLDLLGDAERLEKVWVAGSDSAVELAEVNAELVDLTSLIGSPAYRAGSPQREALDARIAALAARQEELEGLEARPSGWEWRETGQRFGDWWREQDTAARNAWLRSMNVRLTFDVRGGLTRTIDFGDLQEYEQHLRLGSVVERLHTGMS

SEQ ID NO: 12650 - protein, 500 aa, synthetic construct
MRALVVIRLSRVTDATTSPERQLESCQQLCAQRGWDVVGVAEDLDVSGAVDPFDRKRRPNLARWLAFEEQPFDVIVAYRVDRLTRSVRHLQQLVHWAEDHKKLVVSATEAHFDTTTPFAAVVIALMGTVAQMELEAIKERSRSAAHFNIRAGKYRGSLPPWGYLPTRVDGEWRLAPDPVQRERILEVYHRVVDNHEPLHLVAHDLNRRGVLSPKDYFAQLQGREPQGRKWSATALKRSMISEAMLGYATLNGKTVRGDDGAPLVRAEPILTREQLEALRAELVKTSRAKPAVSTPSLLLRVLFCAVCGEPAYKFAGGGRKHPRYRCRSMGFPKHCGNGTVAMAEWDAFCEEQVIDLLGDAECLEKVWVAGSDSAVELAEVNAELVDLTSLIGSPAYRAGSPQREALDARIAALAARREELEGLEARPSGWEWRGTGQRFGDWWREQDTAARNTWLRSMNVRLTFDVRGGLTRTIDFGDLQEYEQHLRLGSVVERLHTGMS

SEQ ID NO: 12651 - protein, 500 aa, synthetic construct
MRALVVIRLSRVTDATTSPERQLESCQQLCAQRGWDVVGVAEDLDVSGAVDPFDRKRRPNLARWLAFEEQPFDVIVAYRVDRLARSIRHLQQLVHWAEDHKKLVVSATEAHFDTTTPFAAVVIALMGTVAQMELEAIKERSRSAAHFNIRAGKYRGSLPPWGYLPTRVDGEWRLVPDPVQRERILEVYHRVVDNHEPLHLVAHDLNRRGVLSPKDYFARLQGREPQGRKWSATALKRSMISVAMLGYVTLNGKTVRDEDGAPLVRAEPILTREQQEALRAELVKTSRAKPAVSTPSLLLRVLFCAVCGEPAYKFAGGGRKHPRYRCRSMGFPKHCGNGTVAMAEWDAFCEEQVLDLLGDAERLEKVWVAGSDSAVKLAEVNAELVDLTGLIGSPAYRAGSPQREALDARIAALAARQEELEGLEARPSGWEWRGTGQRFGDWWREQDTAAKNTWLRSMNVRLTFDVRSGLTRTIDFGDLQEYEQHLRLGSVVERLHTGMS

SEQ ID NO: 12652 - protein, 500 aa, synthetic construct
MRALVVIRLSRVTDATTSPERQLESCQQFCAQRGWDVVGVAEDLDVSGAVDPFDRKRRPNLARWLAFEEQPFDVIVAYRVDRLTRSIRHLQQLVHWAEDHKKLVVSATEAHFDTTTPFAAVVIALMGTVAQMELEAIKERSRSAAHFNIRAGKYRGSLPPWGYLPTRVDEEWRLVPDPVQRERILEVYHRVVDKHEPLHLVAHDLNRRGVLSPRDYFAQLRGREPQGRKWSATALKRSMISEAMLGYATLNGKTVRDDGGAPLVRAEPILTREQLEALRAELVKTSRAKPAVSAPSLLLRVLFCAVCGEPAYKFTGGGRKHPRYRCRSMGFPKHCGNGTVAMAEWDAFCEEQVLNLLGDAERLEKVWVAGSDFAVELAEVNAELVDLTSLIGSPAYRAGSPQREALDARIAALAARQEELEGLEARPSGWEWRETGQRFGDWWREQDTAAKNTWLRSMNVRLTFDVRGGLTRTIDFGDLQEYEQHLRLGSVVERLHTGMS

SEQ ID NO: 12653 - protein, 500 aa, synthetic construct
MRALVVIRLSRVTDATTSPERQLESCQQLCAQRGWDVVGVAEDLDVSGAIDPFDRKRRPNLVRWLAFEEQPFDVIVAYRVDRLTRSIRHLQQLAHWAEDHKKLVVSATEAHFDTTTPFAAVTIALMGTVAQMELEAIKERSRSAAHFNIRAGKYRGSLPPWGYLPTRVDGEWRLAPDPVQRERILEVYHRVVDDHEPLHSVAHDLNRRGVLSPRDHFAQLQGREPRGRKWSATALKRSMISEAMLGYATMNGKTVRDDDGAPLVRAEPILTREQLEALRAELVKTSRAKPVVSTPSLLLRVLFCAVCGEPAYKFAGGGRKHPRYRCRSMGFPEHCGNGTVAMAEWDAFCEEQVLGLLGDAERLEKVWVAGSDSAVELAEVNAELVDLTSLIGSPAYRAGSPQREALDARIAALAARQEELEGLEARPSGWEWRETGQRFGDWWREQDTAAKNTWLRSMNVRLTFDVRGGLTRTIGLGDLQEYEQHLRLGSAVERLHTGMS

SEQ ID NO: 12654 - protein, 500 aa, synthetic construct
MRALVVIRLSRVTDATTSPERQLESCQQLCAQRGWDVVGVAEDLDVSGAVDPFDCKRRPNLARWLAFEEQPFDVIVAYRVDRLTRSIRHLQQLVHWAEDHKKLVVSATEAHFDMTTPFAAVVIALMGTVAQMELEAIKERSRSAAHFNIRAGKYRGSLPPWGYLPTRVDGEWRLAPDPVQRERILEVYHRVVDNHEPLHLVAHDLNRRGVLSPKDYFAQLQGREPQGRKWSATALKRSMISEAMLGYVTLNGKTVRGDDGAPLVRAEPILTREQLEALRAELVKTSRAKPAVSTPSLLLRVLFCAVCGEPAYKFAGGGRKHPRYRCRSMGFPKHCGNGTVAMAEWDAFCEEQVLDLLGDAERLEKVWVAGSDSAVELAEVNAELVDLTSLIGSPAYHAGSPQREALDARIAALAARQEELEGLEARPSGWGWRGTGQRFGDWWREQDTAAKNTWLRSMNVRLTFDVRGGLTRTIDFGDLQEYEQHLRLGSVVERLHTGMS

SEQ ID NO: 12655 - protein, 500 aa, synthetic construct
MRALVVIRLSRVTDATTSPERQLESCQQLCAQRGWDVVGVAEDLDVSGAVDPFDRKRRPNLARWLAYEEQPFDAIVAYRVDRLTRSIRHLQQLVHWAEDHKKLVVSATEAHFDTTTPFAAVVIALMGTVAQMELEAIKERSRSAAHFNIRAGKYRGSLPPWGYLPTRVDGEWRLAPDPVQRERILEVYHRVVDNHEPLHLVAHDLNRRGVLSPKDYFAQLRGREPQGRKWSATALKRSMISEAMLGYATLNGKTVRDDDGAPLVRAEPILTREQLEALRAELVKTSRAKPAVSTPSLLLRVLFCAVCGEPAYKFAGGGRKHPRYRCRSMGFPKHCGNGTVAMAEWDAFCEEQVLDLLGDAERLEKVWVVSSDSAVEHAEVNAELVDLTSLIGSPAYRAGSPQREALDARIAALAARQEELEGLEARPSGWEWRETGQRFGDWWREQDTAAKNTWLRSMNVRLTFDVRGGLTRTIDFGDLHEYEQHLRLGSAVERLHTGMS

SEQ ID NO: 12656 - protein, 500 aa, synthetic construct
MRALVVIRLSRVTDATTSPERQLESCRQLCAQRGWDVVGVAEDLDVSGAVDPFDRKRRPNLARWLAFEEQSFDVIVAYRVDRLTRSIRHLQQLVHWAEDHKKLVVSATEAHFDTTTPFAAVVIALMGTVAQMELEAIKERNRSAAHFNIRAGKYRGSLPPWGYLPTRVDGEWRLVPDPVQRERILEVYRRVVDNHEPLHLVAHDLNRRGVLSPKDYFAQLRGREPQGRKWSATALKRSMISEAMLGYATLNGRTVRDEDGAPLVRAEPILTREQLEVLRAELVKTSRAKPAVSTPSLLLRVLFCAVCGEPAYKFTGGGRKHPRYRCRSMGFPKHCGNGTVAMAEWDAFCEEQVLNLLGDAERLEKVWVAGSDSAVELAEVNAELVDLTSLIGSPAYRAGSPQREALDARIAALAARQEELEGLEARPSGWEWRGTGQRFGDWWREQDTAAKNTWLRSMNVRLTFDVRGGLTRTIDFGELQEYEQHLRLGSVVERLHTGMS

SEQ ID NO: 12657 - protein, 500 aa, synthetic construct
MRALVVIRLSRVTDATTSPERQLESCQQLCAQRGWDVVGVAEDLDVSGAVDPFDRKRRPNLARWLAFEEQPFDVIVAYRVDRLARSIRHLQQLVHWAEDHKKLVVSATEAHFDTTTPFAAVVIALMGTVAQMELEAIKERSRSAAHFNIRAGKYRGSLPPWGYLPTRVDGEWRLAPDPVQRERILEVYHRVVDNHEPLHLVAHDLNQRGVLSPRDYFAQLQGREPQGRKWSATALKRSMISEAMLGYATLNGKTVRDDDGAPLVRAEPILTREQLEALRAELVKTSRAKPAVSTPSLLLRVLFCAVCEEPAYKFAGGGRKHPRYRCRSMGFPKHCGNGTVAMAEWDAFCEEQVLDLLGDAERLEKVWVAGSDSAVELAEVNAELVDLMSLIGSPAYRAGSPQREALDARIAALAARQEELEGLEARPSGWEWRETGQRFGDWWREQDTAAKNTWLRSMNVRLTFDVRGGLTRTIDFGDLQEYEQHLRLGSVVERLHTGMP

SEQ ID NO: 12658 - protein, 500 aa, synthetic construct
MRALVVIRLSRVTDATTSPERQLESCQLLCAQRGWDVVGVAEDLDVSGAVNPFDRKRRPNLARWLAFEEQPFDVIVAYRVDRLTRSTRHLQQLVHWAEDHKKLVVSATEAHFDTTTPFAAVVIALMGTVAQMELEAIKERSRSAAHFNIRAGKYRGSLPPWGYLPTRVDGEWRLVPDPVQRERILEVYHRVVDNHEPLHLVAHDLNRRGVLSPKDYFAQLQGREPQGRKWSATALKRSMISEAMLGYATLNGKTVRDDDGAPLVRAEPILTREQQEALRAELVKTSRAKPVVSTPSLLLRVLFCAVCGEPAYKFAGGGRKHPRYRCRSMGFPKHCGNGTVAMAEWDVFCEEQVLSLLGDAERLEKVWVAGSDSAVELAEVNAELVDLTSLIGSPAYRAGSPQREALDARIAALAARQEELEGLEARPSGWEWRGTGQRFGDWWREQDTAAKNAWLRSMNVRLTFDVRGGLTRTIDFGDLQEYEQHLRLGSVVERLHTGMS

SEQ ID NO: 12659 - protein, 500 aa, synthetic construct
MRALVVIRLSRVTDATTSPERQLESCQQLCAQRGWDVVGVAEDLDVSGAVDPFDRKRRPNLARWLAFEEQPFDVIVAYRVDRLTRSTRHLQQLVHWAEDHKKLVVSATEAHFDTTTPFAAVVIALMGTVAQMELEAIKERSRSAAHFNIRAGKYRGSLPPWGYLPTRVDGEWRLAPDPAQRERILEVYHRVVDNHEPLHLVAHDLNRRGVLSPRDYFAQLQGREPQGRKWSATALKRSMVSEAMLGYATLNGKTVRDDDGAPLVRAEPILTREQLEALRAELVKTSRAKPAVSTPSLLLRVLFCAVCGEPAYKFAGGGRKHPRYRCRSMGFPKHCGNGTVAMAEWDAFCEEQVLDLLGDAERLEKVWVAGSDSAVELAEVNAELVDLTSLIGSSAYRAGSPQREALDARIAALAARQEELEGLEARPSGWEWRETGQRFGDWWREQDTAAKNTWLRSMNVRLTFDVRGGLTRTIDFGDLQEYEQHLRLGSSVERLHTGMS

SEQ ID NO: 12660 - protein, 500 aa, synthetic construct
MRALVVIRLSRVTDATTSPERQLESCQQLCAQRGWDVVGVAEDLDVSGAVDPFDRKRRPNLARWLAFEKQPFDVIVAYRVDRLTRSIRHLQQLVHWAEDHKKLVVSATEAHFDTTTPFAAVIIALMGTVAQMELEAIKERNRSAAHFNIRAGKYRGSLPPWGYLPTRVDGEWRLVPDPVQRERILEVYHRVVDNHEPLHLVAHDLNRRGVLSPKDYFAQLRGREPQGRKWSATALKRSMTSVTMLGYATLNGKTVRDDNGAPLVRAEPILTREQLEALRAELVKTSRAKPAVSTPSLLLRVLFCAVCGEPAYKFAGGGRKHPRYRCRSMGFPKHCGNGTVAMAEWDAFCEEQVLSLLGDAERLEKVWVAGADSAVELAEVNAELVDLTSLIGSPAYRAGSPQREALDARIAALVARQEELEGLEARPSGWGWRETGQRFGDWWREQDTAAKNTWLRLMNVRLTFDVRGGLTRTIDFGDLREFEQHLRLGSVVERLHTGMS

SEQ ID NO: 12661 - protein, 500 aa, synthetic construct
MRALVVIRLSRVTDATTSPERQLESCQQLCAQRGWDVVGVAEDLDVSGAVDPFDRKRRPNLARWLAFEEQPFDVIVAYRVDRLVRSIRHLQQLVHWAEDHKKLVVSATEAHFDTTTPFAAVVIALMGTVAQMELEAIKERNRSAAHFNIRAGKYRGSLPPWGYLPTRVDGEWRLVPDPVQRERILEVYRRVVDNHEPLHLVAHDLNRRGVLSPKDYFAQLRGREPQGRKWSATALKRSMISEAMLGYATLNGKTVRDEDGAPLVRAEPILTREQLEALRAVLVKTSRAEPAVSTPSLLLRVLFCAVCGEPAYKFAGGGRKHPRYRCRSMGFPKHCGNGTVAMAEWDAFCEEQVLNLLGDAERLEKVWVAGSDSAVELAEVNAELVDLTSLIGSPAYRAGSPQREALDARIAALAARQEELEGLEARPSGWEWRETGQRFEDWWREQDTAAKNTWLRSMNVRLTFDVRGGLTRTIDFGDLQEYEQHLRLGSVVERSHTGMS

SEQ ID NO: 12662 - protein, 500 aa, synthetic construct
MRALVVIRLSRVTDATTSPERQLESCQQLCAQRGWDVVGVAEDLDVSGAVDPFDRKRRPNLARWLAFKEQPFDVIVAYRVDRLTRSARHLQQLVHWAEDHKKLVASATEAHFDTTTPFAAVVIALMGTVAQMELEAIKERTRSAAHFNIRAGKYRGSLPPWGYLPARVDGEWRLAPDPVQRERILEVYHRVVDNHEPLHLVAHDLNRRGVLSPKDYFAQLQGREPQGRKWSATALKRSMVSEAMLGHATLNGKTVRDDDGAPLVRAEPILTREQQEALRAELVKTSRAKPAVSTPSLLLRVLFCAVCGEPAYKFAGGGRKHPRYRCRSMGFPKHCGNGTVAMAEWDAFCEEQVLDLLGDAERLEKVWVAGSDSAVELAEVNAELVDLTSLIGSPAYRAGSPQREALDARIAALAARQEELEGLEARPSGWEWRETGQRFGDWWREQDTAAKNTWLRSMNVRLTFDVRGGLTRTIDFGDLQEYEQHLRSGSVVERLHTGVS

SEQ ID NO: 12663 - protein, 500 aa, synthetic construct
MRALVVIRLSRVTDATTSPERQLESCQQLCAQRGWDVVGVAEDLDVSGAVDPFDRKRRPNLARWLAFEEQPFDVIVAYRVDRLARSIRHLQQLVHWAEDHKKLVVSATEAHFDTTTPFAAVVIALMGTVAQMELEAIKERNRSAAHFNIRAGKYRGSLPPWGYLPTRVDGEWRLVPDPVQRERILEVYHRVVGNHEPLHLVAHDLNRRGVLSPRDYFAQLRGREPQGRKWSATALKRSMISEAMLGHATLNGKTVRDEDGAPLVRAEPILTREQLEALRAELAKTSRAKPAVSTPSLLLRVLFCAVCGEPAYKFAGGGRKHPRYRCRSMGFPKHCGNGTVAMAEWDTFCEEQVLDLLGDAERLEKVWVAGSDSAVELAEVNAELVDLTSLIGSPAYRAGSPQREALDARIAALAARQEELEGLEARPSGWEWRETGQRFGDWWREQDAAAKNTWLRSMNVRLTFDVRGGLTRTIDFGDLQEYEQHLRLGSVVERLRTGMS

SEQ ID NO: 12664 - protein, 500 aa, synthetic construct
MRALVVIRLSRVTDATTSPERQLESCQQLCAQRGWVVVGVAEDLDVSGAVDPFDRKRRPNLARWLAFEEQPFDVIVAYRVDRLTRSTRHLQQLVHWAEDHKKLVVSATEAHFDTTTPFAAVVIALMGTVAQMELEAIKERNRSAAHFNIRAGKYRGSLPPWGYLPTRVDGEWRLVPDPVQRERILEVYHRVVDNHEPLHLVAHDLNRRGVLSPKDYFAQLQGREPQGRKWSATALKRSMTSVTMLGYATLNGKTVRDDNGAPLVRAEPILTREQLEALRAELAKTSRAKPAVSTPSLLLRVLFCAVCGEPAYKFSGGGRKHPRYRCRSMDFPKHCGNGTVAMAEWDAFCEEQVLDLLGDAERLEKVWVAGSDSAVELAEVSAELVDLTSLIGSPAYRAGSPQREALDARIAALAARQEELEGLEARPSGWEWRETGQRFGDWWREQDTAAKNTWLRSMNVRLTFDVRGGLTRTIDFGDLQEYEQHLRLGGVVERLHTGMS

SEQ ID NO: 12665 - protein, 500 aa, synthetic construct
MRALVVIRLSRVTDATTSPERQLESCQQLCAQRGWDVVGVAEDLDVSGAVDPFDRKRRPNLARWLAFGEQPFDVIVAYRVDRLARSIRHLQQLVHWAEDHKKLVVSATEAHFDTTTPFAAVVIALMGTVAQMELEAIKERSRSAAHFNIRAGKYRGSLPPWGYLPTREDGEWRLVPDPVQRERILEVYHRVVDNHEPLHLVAHDLNRRGVLSPKDYFAQLQGREPQGRKWSATALKRSMTSEVMLGYATLNGKTVRDDDGAPLVRAEPILTREQLGALRAELVKTSRAKPAVSTPSLLLRVLFCAVCGEPAYKFAGGGRKHPRYRCRSMGFPKHCGNGTVAMAEWDAFCEEQVLDLLGDAERLEKVWVAGSDSAVELAEVNAELVDLTSLIGSPAYRAGSPQREALDARIAALAARQEELEGLEARPSGWEWRETGQRFGDWWRGQDTAAKNTWLRSMSVRLTFDVRGGLTRTIDFGDLQEYEQHLRLGNVVERLHTGMS

SEQ ID NO: 12666 - protein, 500 aa, synthetic construct
MRTLVVIRLSRVTDATTSPERQLESCQQLCAQRGWDVVGVAEDLDVSGAVDPFDRKRRPNLARWLAFEEQPFDVIVAYRVDRLTRSIRHLQQLVHWAEDHKKLVVSATEAHFDMTTPFAAVVIALMGTVAQMELEAIKERSRSAAHFNIRAGKYRGSLPPWGYLPTRVDGEWRLAPDPVQRERILEVYHRVVDNHEPLHLVAHDLNRRGVLSPKDYFAQLQGREPQGRKWSATALKRSMISVAMLGYATLNGKTVRGDDGAPLVRAEPILTREQLEALRAELVKTSRAKPAVPTPSLLLRVLFCAVCGEPAYKFVGGGRKHPRYRCRSMGFPEHCGNGTVAMAEWDAFCEEQVLDLLGDAERLEKVWVAGSDSAVELAEVNAELVDLTSLIGSPAYRAGSPQREALDARIAALAARQEELEGLEARPSGWEWRGTGQRFGDWWREQDTAAKNTWLRSMNVRLSFDVRGGLTRTIDFGDLQEYEQHLRLGSVVERLHTGMS

SEQ ID NO: 12667 - protein, 500 aa, synthetic construct
MRALVVIRLSRVSDATTSPERQLESCQQLCAQRGWDVVGVAEDLDVSGAVDPFDRKRRPNLARWLAFEEQPFDVIVAYRVDRLTRSTRHLQQLVHWAEDHKKLVVSATEAHFDTTTPFAAVAIALVGTVAQMELEAIKERSRSAAHFNIRAGKYRGSLPPWGYLPTRVDGEWRLVPDPVQRERILEVYHRVVDNHEPLHWVAHDLNRRGVLSPKDYFAQLRGREPQGHEWSATALKRSMTSEAMLGYATLNGKTVRGDDGAPLVRAEPILTREQLEALRAELVKTSRAKPAVSTPSLLLRVLFCAVCGEPAYKFAGGGRKHPRYRCRSMGFPKHCGNGTVAMAEWDAFCEEQVLDLLRDAERLEKVWVAGSGSAIELAEVNAELVDLTSLIGSPAYRAGSPQREALDARIAALAARQEELEGLEARPSGWEWRETGQRFRDWWREQDTAAKNTWLRSMNVRLTFDVRGGLTRTIDFGDLQEYEQHLRLGSVVERLHTGMS

SEQ ID NO: 12668 - protein, 500 aa, synthetic construct
MRALVVIRLSRVTDATTSPERQLESCQQLCAQRGWDVVGVAEDLDVSGAVDPFDRKRRPNLARWLAFEEQPFDVIVAYRVDRLTRSTRHLQQLVHWAEDHKKLVVSATEAHFDTTTPFAAVVIALMGTVAQMELEAIKERSRSAAHFNIRAGKYRGSLPPWGYLPARVDGEWRLVLDPVQRERILEVYHRVVDNHEPLHWVAHDLNRRGVLSPKDYFAQLQGREPQGRKWSATALKRSMTSEAMLGYATLNGETVRDDDGVPLVRAEPILTRGQLEALRAELVKTSRAKPAVSTPSLLLRVLFCAVCGEPAYKFAGGGRMHPRYRCRSMGFPKHCGNGTVAMAEWDAFCEEQVLDLLGDAERLEKVWVAGSDSAVELAEVNAELVDLTSLIGSPAYRAGSPQREALDARIAALAARQEELEGLGARPSGWEWRETGQRFGDWWREQDTAAKNTWLRSMNVRLTFGVRGGLTRTIDFGDLQEYEQHLRLGSVVEHLHTGMS

SEQ ID NO: 12669 - protein, 500 aa, synthetic construct
MRALVVIRLSRVTDATTSPERQLESCQQLCAQRGWDVVGVAEDLDVSGAVDPFDRKRRPNLARWLAFEEQPFDAIVAYRVDRLTRSIRHLQQLVHWAEDHKKLIVSATEAHFDTTTPFAAVVIALMGTVAQMELEAIKERNRSAAHFNIRAGKYRGSLPPWGYLPTRVDGEWRLVPDPVQRERILEVYHRVVDNHEPLHLVAHDLNRRGVLSPKDYFAQLQGREPQGRKWSATALKRSMTSEAMLGYATLNGKIVRDDDGAPLVRAEPILTREQQEALRAELVKTSRAKPAVSTPSLLLRVLFCAVCGEPAYKFAGGGRKHPRYRCRSMGFPKHCGNGTVAMAEWDAFCEEQVLGLLGDAERLEKVWVAGSDSAVELAEVNTELVDLTSLIGSPAYRAGSPQREALDARIAALAARQEELEGLEARPSGWEWRETGQRFGDWWREQDTAAKNTWLRSMNVRLTFDVRGGLTRTIDFGDLQEYEQHLRSGSVVERLHTGMS

SEQ ID NO: 12670 - protein, 500 aa, synthetic construct
MRALVVIRLSRVTDATTSPERQLESCQQLCAQRGWDVVGVAEDLDVSGAVDPFDRKRRPNLARWLAFEEQPFDVIVAYRVDRLTRSTRHLQQLVHWADDRKKLVVSATEAHFDTTTPFAAVVIALMGTVAQMELEAIKERSRSAAHFNIRAGKYRGSLPPWGYLPARVDGVWRLVPDPVQRERILEVYHRVVDNHEPLHLVAHDLNRRGVLSPKDYFAQLQGREPQGRKWSATALKRSMTSEAMLGYATLNGKTVRDDDGAPLMRAEPILTREQLEALRAELVKTSRAKPAVSTPSLLLRVLFCAVCGEPAYKFAGGGRKHPRYRCRSMGFQKHCGNGTVAMAEWDAYCEEQVLDLLGDTERLEKVWVAGSDSAVELAEVNAELVDLTSLIGSPAYRAGSPQREALDARIAALAARQEELEGLEAHPSGWVWREAGQRFGDWWREQDTAAKNTWLRSMNVRLTFDVRGGLTRTIDFGDLQEYEQHLRLGSVVERLHTGMS

SEQ ID NO: 12671 - protein, 500 aa, synthetic construct
MRALVVIRLSRVTEATTSPERQLESCQQLCAQRGWDVVGVAEDLDVSGAVDPFDRKRRPNLARWLAFEEQPFDVIAAYRVDRLTRSIRHLQRLVHWAEDHEKLVVSATEAHFDMTTPFAAVVIALMGTVAQMELEAIKERSRSAAHFNIRAGKYRGSLPPWGYLPTRVDGEWRLAPDPVQRERILEVYHRVVDNHEPLHLVAHDLNRRGVLSPKDYFAQLQGREPQGRKWSATALKRSMISVAMLGYATLNGKTVRDDDGAPLVRAEPILTREQLEALRAELVKTSRAKPAVSTPSLLLRVLFCAVCGEPAYKFAGGGRKHPRYRCRSMGFPKHCGNGTVAMAEWDAFCEEQVLDLLGDAERLEKVWVAGSDSAVELAEVNAELVDLTSLIGSPAYRAGSPQREALDARIAALAARQEELEGLEARPSSWEWRETGQRFGDWWREQDTAAKNTWLRSMNVRLTFDVRGGLTRTIDFGDLQEYEQHSRLGSVVERLHTGMS

SEQ ID NO: 12672 - protein, 500 aa, synthetic construct
MRALVVIRLSRVTDATTSPERQLESCQQLCAQRGWDVVGVAEDLDVSGAVDPFDRKRRPNLARWLASEEQPFDVIVAYRVDRLARSIRHLQQLVHWAEDHKKLVVSATEAHFDTTTPFAAVVIALMGTVAQMELEAIKERSRSAAHFNIRTGKYRGSLPPWGYLPTRVDGEWRLVPDPVQRERILEVYHRVVDNHEPLHLVAHDLNRRGVLSPKDYFAQLRGREPQGRKWSATALKRSMISEAMLGYATLNGKTVRGDDGAPLVRAEPILTREQLEALRAVLVKTSRAKPAVSTPSLLLRVLFCAVCGEPAYKFAGGGRKHPRYRCRSMGFPKHCGNGTVAMAEWDAFCEEQVLNLLGDAERLEKVWVAGSDSAVKLAEVNAELVDLTSLIGSPAYRAGSPQREALDARIAALAARQEVLEGLEARPSGWGWRGTGQRFGDWWREQDTAAKNTWLRSMNVRLTFDVRGGLTRTIDFGDLQEYEQHLRLGSVVERLHTGTT

SEQ ID NO: 12673 - protein, 500 aa, synthetic construct
MRALVVIRLSRVTDTTTSPERQLESCQQLCAQRGWDVVGVAEDLDVSGAVDPFDRKRRPNLARWLAFEEQPFDAIVAYRVDRLTRSIRHLQQLVHWAEDHKKLVVSATEAHFDTTTPFAAVVIALMGTVAQMELEAIKERNRSAAHFNIRAGKYRGSLPPWGYLPTRVDGEWRLVPDPVQRERILEVYHRVVDKHEPLHLVAHDLNRRGVLSPKDYFAQLRGREPQGRKWSATALKRSMTSEAMLGYATLNGRTVRDDDGAPLVRAEPILTREQLEALRAELVKTSRAKPAVSTPSLLLRVLFCAVCGEPAYKFAGGGRKHPRYRCRSMGFPKHCGNGTVAMAEWDTFCEEQVLDLLGDAERLEKVWVAGSDSAVELAEVNAELVDLTSLIGSPAYSAGSPQREALDARIAALAARQEELEGLEARPSGWEWRGTGQRFGDWWREQDTAAKNAWLRSMNVRLTFDVRGGLTRTIDFGDLQEYEQHLRLGGVVERLHTGVS

SEQ ID NO: 12674 - protein, 500 aa, synthetic construct
MRALIVIRLSRVTDATTSPERQLESCQQLCAQRGWDVVGVAEDLDVSGAVDPFDRKRRPNLARWLAFEEQPFDVIVAYRVDRLARSIRHLQQLVHWAEDHKKLVVSATEAHLDTTTPFAAVVIALMGTVAQMELEAIKERSRSAAHFNIRAGKYRGSLPPWGYLPARVDGEWRLAPDPVQRERILEVYHRVVDDHEPLHLVAHDLNRRGVLSPRDYFAQLRGREPQGRKWSATALKRSMISEAMLGYATLNGKTVRDDDGAPLVRAEPILTREQLEALRAELAKTSRAKPAVSTPSLLLRVLFCAVCGEPAYKFAGGGRKHPRYRCRSMGFLKHCGNGTVAMAEWDAFCEEQVLNLLGDAERLEKVWVAGSDSAVELAEVNAELVDLTSLIGSPAYRAGSPQREALDARIAALAARQEGLEGLEARPSGWEWRETGQRFGDWWREQDTAAKNTWLRSMNVRLTFDVRGGLTRTIDFGDLQEYEQHLRLGSVVERLHTGMS

SEQ ID NO: 12675 - protein, 500 aa, synthetic construct
MRALVVIRLSRVTDATTSPERQLESCQQLCAQRGWDVVGVAEDLDVSGAVDPFDRKRRPNLARWLAFEERPFDAIVAYRVDRLTRSIRHLQQLVHWAEDHKKLVVSATEAHFDTTTPFAAVVIALMGTVAQMELEAIKERSRSAAHFNIRAGKYRGSLPPWGYLPARVDGEWRLVPDPVQRERILEVYHRVVDDHEPLHLVAHDLNRRGVLSPKDYFAQLQGREPQGRKWSATALKRSMISGAMLGYATLSGKTVRDDDGAPLVRAEPILTREQQEALRAELVKTSRAKPAVSTPSLLLRVLFCAVCGEPAYKFTGGGRKHPRYRCRSMGFPKHCGNGTVAMAEWDAFCEEQVLDLLGDAERLEKVWVAGSDSAVELAEVNAELVDLTSLIGSPAYRAGSPQREALDARIAALAARQEELEGLEARPPGWEWRETGQRFGDWWREQDTVAKNTWLRSMNVRLTFDVRGGLTRSIDFGDLREYEQHLRLGSVVERLHTGMS

SEQ ID NO: 12676 - protein, 500 aa, synthetic construct
MRTLVVIRLSRVTDATTSPERQLESCQQLCAQRGWDVVGVAEDLDVSGAVDPFDRKRRPNLARWLAFEEQPFDVIVAYRVDRLARSIRHLQQLVHWAEDHKKLVVSATEAHFDTTTPFAAVVIALMGTVAQMELEAIRERNRSAAHFNIRAGKYRGSLPPWGYLPTRVDGEWRLAPDPVQRERILEVYHRVVDNHEPLHLVAHDLNRRGVLSPKDYFAQLQGREPQGRKWSATALKRSMISEAMLGYATLNGKTVRDDDGAPLVRAEPVLTREQLEALRAELVKTSRAKPAVSTPSLLLRVLFCAVCGEPAYKFAGGGRKHPRYRCRSMGFPKHCGNGTVAMAEWDAFCEEQVLDLLGDVERLEKVWVAGSDSAVELAEVNAELVDLTSLIGSPAYRAGSPQREALDARIAALAARQEELEGLEARPSGWKWRETGQRFGDWWREQDTAAKNTWLRSMNVRLTFDVRGGLTRTIDFGDLQEYVQHLRLGGVVGRLHTGMS

SEQ ID NO: 12677 - protein, 500 aa, synthetic construct
MRALVVIRLSRVTDATTSPERQLESCQQLCAQRGWDVVGVAEDLDVSGAVDPFDRKRRPNLARWLAFEEQPFDVIVAYRVDRLTRSTRHLQQLVHWADDHKKLVVSATEAHFDTTTPFAAVVIALMGTVAQMELEAIKERSRSAAHFNIRAGKYRGSLPPWGYLPARVDGVWRLVPDPVQRERILEVYHRVVNNHEPLHLVAHDLNRRGVLSPKDYFAQLRGREPQGREWSATALKRSMISEAMLGYATLNGKTVRDNDGAPLVRAEPILTREQLEAIRAVLVKTSRAKPAVSTPSLLLRVLFCAVCGEPAYKFTGGGRKHPRYRCRSMGFPKHCGNGTVAMAEWDAFCEEQVLDLLGDAERLEKVWVAGSDSAVELAEVNAELADLTSLIGSPAYRAGSPQREALDARIAALAARQEELEGLEARPSGWEWRGTGQRFGDWWHEQDTAAKNTWLRSMNVRLTFDVRGGLTRTIDFGDLQEYEQHLRLGSVVERLHTGMS

SEQ ID NO: 12678 - protein, 500 aa, synthetic construct
MRALVVIRLSRVTDATTSPERQLESCQQLCAQRGWDVVGVAEDLDVSGAVDPFDRKRRPNLARWLAFEEQPFDVIVAYRVDRLTRSVRHLQQLVHWAEDHKKLVVSATEAHFDTTTPFAAVVIALMGTVAQMELEAIKERSRSAAHFNIRAGKYRGSLPPWGYLPARVDGEWRLVPDPVQRERILEVYHRVVDNHEPLHLVAHDLNRRGVLSPKDYFAQLRGREPQGRKWSATALKRSMISEAMLGYATLNGKTVRDDDGAPLVRAEPILTREQQEALRAELVRTSRAKPAVSTPSLLLRVLFCVVCGEPAYKFSGGGRKHPRYRCRSMGFPKHCGNGTVAMAEWDAFCEEQVLDLLGDAERLEKVWVAGSDSAVELAEVNAELVDLTSLIGSPAYRTGSPQREALDARIAALAARQEELEGLEARPSGWEWRETGQRFGDWWREQDTAAKNTWLRSMNVRLTFDVRGEPTRTIDFGDLQEYEQHLRLGSVVERLHTGMS

SEQ ID NO: 12679 - protein, 500 aa, synthetic construct
MRALVVIRLSRVTDATTSPERQLESCQQLCAQRGWDVVGVAEDLDVSGAVDPFDRKRRPNLARWLAFEGQPFDVIVAYRVDRLARSIRHLQQLVHWAEDHKKLVVSATEAHFDTTTPFAAVVIALMGTVAQMELEAIRERSRSAAHFNIRAGKYRGSLPPWGYLPTRVDGEWRLVPDPVQRERILEVYHRVVDNHEPLHLVAHDLNRRGVLSPKDYFAQLQGREPQGRKWSATALKRSMISGAMLGYATLNGKTVRDDDGAPLVRAEPILTREQQEALRAELVKTSRAKPAVSTPSLLLRVLFCAVCGEPAYKFSGGGRKHPRYRCRSMGFPKHCGNGTVAMAEWDAFCEEQVLGLLGDAERLEKVWVAGSDSAVELAEVNAELVDLTSLIGSPAYRTGSPQREALDARIAALAARQEGLEGLEARPSGWEWRETGQRFGDWWREQDTAAKNTWLRSMNVRLTFDVRGGLTRTIDFGDLQEYEQHLRLGGVVERLHTGMS

SEQ ID NO: 12680 - protein, 500 aa, synthetic construct
MRALVVIRLSRVTDATTSPERQLESCQQLCAQRGWDVVGVAEDLDVSGAVDPFDRKRRPNLARWLAFEVQPFDVIVAYRVDRLTRSIRHLQQLVHWAEDHKKLVVSATEAHFDTTTPFAAVVIALMGTVAQMELEAIKERSRSAAHFNIRAGKYRGSLPPWGYLPARVDGEWRLVPDLVQRERILEVYHRVVDDHEPLHLVAHDLNRRGVLSPKDYFAQLRGREPQGRKWSATALKRSMTSEAMLGYATLNGKTVRDDDGAPLVRAEPILTREQQEALRAELVKTSRAKPAVSTPSLLLRVLFCAVCGEPAYKFAGGGRKHPRYRCRSMGFPKHCGNGTVAMAEWDAFCEEQVLGLLGGAERLEKVWVAGSDSAVELAEVNAELVDLTSLIGSPAYRAGSPQREALDARIAALAARQEELEGIEARPSGWEWRETGQRFGDWWREQDTAAKNTWLRSMNVRLTFDVRGGLTRTIDFGDLQEYEQHLRVGSVVERLHTGMS

SEQ ID NO: 12681 - protein, 500 aa, synthetic construct
MRALVVIRLSRVTDTTTSPERQLESCQQLCAQRDWNVVGVAEDLDVSGAVDPFDRKRRPNLARWLAFEEQPFDVIVAYRVDRLARSIRHLQQLVHWAEDHKKLVVSATEAHFDTTTPFAAVVIALMGTVAQMELEAIKERSRSAAHFNIRAGKYRGSLPPWGYLPTRVNGEWRLVPDPVQRERILEVYHRVVDNHEPLHLVAHDLNRRGVLSPRDYFAQLRGREPQGRKWSATALKRSMISEAMLGYATLNGKTVRDDDGAPLVRAEPILTREQLEAIRAELVKTSRAKPAVSTPSLLLRVLFCAVCGEPAYKFAGGGRKHPRYRCRSMRSPKHCGNGTVAMAEWDAFCEEQVLNLLGDAERLEKVWVAGSDSAVELAEVNAELVDLTSLIGSPAYRVGSPQREALDARIAALAARQEELEGLEGRPSGWEWRETGQRFGDWWREQDTAAKNTWLRSMNVRLTFDVRGGLTRTIDFGDLQEYEQHLCLGSVVGRLHTGMS

SEQ ID NO: 12682 - protein, 500 aa, synthetic construct
MRALVVIRLSRVTDATTSPERQLESCQQLCAQRGWDVVGVAEDLDVSGAVDPFDRKRRPNLARWLAFEEQPFDVIVAYRVDRLTRSTRHLQQLVHWAEDHKKLVVSATEAHFDTTTPFAAVVIALMGTVAQMELEAIKERSRSAAHFNIRAGKYRGSLPPWGYLPTRVDGEWRLVPDPVQRERILEVYRRVVDNHEPLHLVAHDLNRRGVFSPKDYFAQLQGREPQGRKWSATALKRSMTSGAMLGYATLNGKTVRGDDGAPLVRAEPILTREQQEALRAELVKTSRAKPAVSTPSLLLRVLFCAVCGEPAYKFAGGGRKHPRYRCRSMGFPKHCGNGTVAMAEWDAFCEEQVLDLLGDAECLERVWVAGSDSAVELAEVNAELVDLTSLIGSPAYRAGSPQREALDARIAALAARQGELEGLEARPSGWEWRGTGQRFGDWWREQGTAAKNTWLRSMNVRLTFDVRGGLTRTIDFGDLQEYEQHLRLGSVVERLHTGMS

SEQ ID NO: 12683 - protein, 500 aa, synthetic construct
MRALVVIRLSRVTDATTSPERQLESCQQLCAQRGWDVVGVAEDLDVSGAVDPFDRKRRPNLARWLAFEEQPFDVIVAYRVDRLTRSIRHLQQLVHWAEDHKKLVVSATEAHFDTTTPFAAVTIALMGTVAQMELEAIKERSRSAAHFNIRAGKYRGSLPPWGYLPTRVDGEWRLAPDPVQRERILEVYHRVVDDHEPLHSVAHDLNRRGVLSPRDYFAQLQGREPRGRKWSATALKRSIISEAMLGYVTLNGETVRDDGGAPLVRAEPILTREQLEALRAELVKTSRAGPAVSTPSLLLRVLFCAVCGEPAYKFAGGGRKHPRYRCRSMGFPKHCGNGTVAMAEWDAFCEGQVLDLLGDAERLEKVWVAGSDSAVELAEVNAELVDLTSLIGSPAYRAGSPQREALDARIAALAARQEELEGLEARPSGWEWRETGQRFGDWWREQDTAAKNTWLRSMNVRLTFDVRGGLTRTIDLGNLREYEQHLRLGGVVERLHTGMS

SEQ ID NO: 12684 - protein, 500 aa, synthetic construct
MRALVVIRLSRVTDATTSPERQLESCQQLCAQRGWDVVGVAEDLDVSGAVDPFDRKRRPNLARWLAFEEQPFDVIVAYRVDRLARSIRHLQQLVHWAEDHKKLVVSATEAHFDTTTPFAAVVIALMGTVAQMELEAIKERSRSAAHFNIRAGKYRGSLPPWGYLPTRVDGEWRLVPDPVQRERILEVYHRVVDNHEPLHLVAHDLNRRGVLSPKDYFAQLQGREPQGRKWSATALKRSMISEAMLGYATLNGKTVRGDDGAPLVRAEPILTREQQEALRAELVKTPRAKSAVSTPSLLLRVLFCAVCGEPAYKFAGGGRKHPRYRCRSMGFPKHCGNGTVAMAEWDAFCEEQVLDLLGDAERLEKVWVAGSDSAVELAEVNAELVDLTSLIGSPAYRAGSPQREALDARIAALAARQEELEGLEARPSGWEWRGTGQRFGDWWREQDTAAKNTWLRLMNVRLTFDVRGGLTRTIDFGDLQEYEQHLRLGNLVERSHTGMS

SEQ ID NO: 12685 - protein, 500 aa, synthetic construct
MRALVVIRLSRVTDATTSPERQLESCQQLCAQRGWDVVGVAEDLDVSGAVDPFDRKRRPSLARWLAFEEQPFDVIVAYRVDRLARSIRHLQQLVHWAEDHKKLVVSATEAHFDTTTPFAAVVIALMGTVAQMELEAIKERNRSAAHFNIRAGKYRGSLPPWGYLPTRVDGEWRLVPDPVQRERILEVYHRVVDNHEPLHLVAHDLNRRGVLSPKDYFAQLQGREPQGRKWSATALKRSMISGAMLGYATLNGKTVRDDDGAPLVRAEPILTREQQEALRAELVKTSRAKPAVSTPSLLLRVLFCAVCGEPAYKFAGGGRKHPRYRCRSMGFPGHCGNGTVAMAEWDAFCEEQVLDLLGDAERLEKVWVTGSDPAVELAEVNAELVDLTSLIGSPAYRAGSPQREALDARIAALAARQEELEGLEARPSGWEWRETGQRFGDWWRGQDTAAKNTWLRSMNVRLTFDVRGGLTRTIDFGDLQEYVQHLRLGSVVERLHAGMS

SEQ ID NO: 12686 - protein, 500 aa, synthetic construct
MRALVVIRLSRVTDATTSPERQLESCQQLCAQRGWDVVGVAEDLDVSGAVDPFDRKRRPNLARWLAFEEQPFDVIVAYRVDRLTRSTRHLQQLVHWAEDHRKLVVSATEAHFDTTTPFAAVVIALMGTVAQMELEAIKERSRSAAHFNIRAGKYRGSLPPWGYLPTRVDGEWRLVPDPVQHERILEVYHRVVDNHEPLHLVAHDLNRRGALSPKDYFAQLQGREPQGRKWSATALKRSMISEAMLGYATLNGKTVRGDDGAPLVRAEPILTREQQEALRAELVKTSRAKPAVSTPSLLLRVLFCAVCGEPAYKFAGGGRRHPRYRCRSMGFPKHCGNGTVAMAEWDAFCEEQVLGLLGDAERLEKVWVAGTDSAVELAEVNAELVDLTSLIGSPAYRAGSPQREALDARIAALAARQGELEGLEARPSGWGWRETGQRFGDWWRKQDTAAKNTWLRSMNVRLTFDVRGGLTRTIDFGDLQEYEQHLRSGSVVERSHTGMS

SEQ ID NO: 12687 - protein, 500 aa, synthetic construct
MRALVVIRLSRVTDATTSPERQLESCQQLCAQRGWDVVGVAEDLDVSGAVDPFDRKRRPNLARWLAFEEQPFDVIVAYRVDRLTRSVRHLQQLVHWAEDHKKLVVSATEAHFDTTTPFAAVVIALMGTVAQMELEAIKERSRSAAHFNIRAGKYRGSLPPWGYLPTRVDGEWRLVPDPVQRERILEVYRRVVDNHEPLHLVAHDLNRRGVLSPKDYFAQLQGREPQGRKWSATALKRSMISEAMLGYATLNGKTVRGDDGAPLVRAEPILTREQQEALRAELVKTSRAKPAVSTPSLLLRVLFCAVCGEPAYKFAGGGRKHPRYRCRSMGFPKHCGNGTVAMAEWDAFCEEQVLNLLGDAERLEKVWVAGADSAVELAEVNAELVDLTSLIGSPAYRAGSTQREALDARIAALAARQEELEGLEARPSGWEWRGTGQRFGDWWREQDTAAKNTWLRTMNVRLTYDVRGGLTRTIDFGDLQEYEQHLRSGSVVERLHTGMS

SEQ ID NO: 12688 - protein, 500 aa, synthetic construct
MRALVVIRLSRVTDATTSPERQLESCQQLCAQRGWDVVGVAEDLDVSGAVDPFDRKRRPNLARWLAFEEQPFDVIVAYRVDRLTRSTRRLQQLVHWAEDHKKLVVSATEAHFDTTTPFAAVVIALMGTVAQMELEAIKERSRSAAHFNIRAGKYRGSLPPWGYLPTRVDGEWRLVPDPVQRERILEVYHRVVDNHEPLHLVAHDLNRRGVLSPRDYFAQLRGREPQGRKWSATALKRSMISEAMLGHATLNGKTVRDGDGAPLVRAEPILTREQLEALRAELVKTSRAKPAVSTPSLLLRVLFCAVCGEPAYKFAGGGRRHPRYRCRSMGFPKHCGNGTVAMAEWDAFCEEQVLDLLGDAERLEKVWVAGSDSAVELAEVNADLVDLTSLIGSPAYRAGSPQREALDARIAALTARQEELEGLEAHPSGWEWRGTGQRFGDWWHEQDTAAKNTWLRSMNVRLTFDVRGGLTRTIDFGDLQEYEQHLRLGSVVERLHTGMS

SEQ ID NO: 12689 - protein, 500 aa, synthetic construct
MRALVVIRLSRVTDATTSPERQLESCQQLCAQRGWDVVGVAEDLDVSGAVDPFDRKRRPNLARWLAFEEQPFDVIVAYRVDRLARSIRHLQQLVHWAEDHKKLVVSATEAHFDTTTPFAAVVIALMGTVAQMELEAIKERSRSAAHFNIRAGKYRGSLPPWGYLPARVDGEWRLVPDPVQRERILEVYHRVVDNHEPLHLVAHDLNRRGVLSPKDYFAQLRGREPRGREWSATALKRSMTSEAMLGYATLNGKIVRDDDGAPLVRAEPILTREQLEALRAELVKTSRAKPAVSTPSLLLRVLFCAVCGEPAYKFAGGGRKHPRYRCRSMGFPKHCGNGTVAMAEWDAFCEEQVLDLLGDAERLEKVWVAGSDSAVELAGVNAELVDLTSLIGSPAYRVCSPQREALDARIAALAARQEELEGLEARPSGWEWRETGQRFGDWWREQDTAAKNTWLRSMNVRLTFDVRGGLTRTIDFGELQEYEQHLRLGSVVERLHTGMS

SEQ ID NO: 12690 - protein, 500 aa, synthetic construct
MRALVVIRLSRVTDATTSPERQLESCQQLCAQRGWDVVGVAEDLDVSGAVDPFDRKRRPNLARWLAFEEQPFDVIVAYRVDRLTRSVRHLQQLVHWAEDHKKLVVSATEAHFDTTTPFAAVVIALMGTVAQMELEAIKERNRSAAHFNIRAGKYRGSLPPWGYLPTRVDGEWRLAPDPVQRERILEVYHRVVDNHEPLHLVAHDLNRRGVLSPRDYFAQLQGREPQGRKWSATALKRSMTSEAMLGYASLNGKTVRDDDGAPLVRAEPILTRGQLEALRAELAKTSRAKPAVSTPSLLLRVLFCAVCGEPAYKFAGGGRKHPRYRCRSMGFPKHCGNGTVAMAEWDAFCEEQVLDLLGDAERLERVWVAGSDSAVELAEVNAELVDLTSLIGSPAYRAGSPQREALDARIAALAARQEELEGLEARPSGWEWRETGQRFGDWWREQDTAAKNTWLRSMNVRLTFDVRGGLTRTIDFGDLQEYEQHLRLGGVVERLHTGMS

SEQ ID NO: 12691 - protein, 500 aa, synthetic construct
MRALVVIRLSRVTDATTSPERQLESCQQLCAQRGWDVVGVAEDLDVSGSVDPFDRKRRPNLARWLAFEEQPFDVIVAYRVDRLARSIRHLQQLVHWAEDHKKLVVSATEAHFDTTTPFAAVVIALMGTVAQMELEAIKERNRSAAHFNIRAGKYRGSLPPWGYLPARVDGEWRLVPDPVQRERILEVYHRVVDNHEPLHLVAHDLNRRGVLSPKDYFAQLRGREPQGRKWSATALKRSMISEAMLGYATLNGKTVRDDDGVPLVRAEPILTREQLEALRAELVKTSRAKPAVSTPSLLLRVLFCAVCGEPAYKFAGGGRKHPRYRCRSMGFPKHCGNGTVAMAEWDAFCEEQVLDLLGDAERLEKVWVAGSDSAVELAEVSAELVDLTSLIGSPAYRAGSPQREALDARIAALAARQEELEGLETRPSGWEWRETGQRFGDWWREQDTAAKNTWLRSMNVRLTFDVRGGLTRTIDFGDLQEYEQHLRLGSVVERLHTGTS

SEQ ID NO: 12692 - protein, 500 aa, synthetic construct
MRALVVIRLSRVTDATTSPERQLESCQQLCAQRGWDVVGVAEDLDVSGAVDPFDRKRRPNLARWLAFEEQPFDVIVAYRVDRLTRSVRHLQQLVHWAEVHKKLVVSATEAHFDTTTPFAAVVIALMGTVAQMELEAIKERSRSAAHFNIRAGKYRGSLPPWGYLPARVDGEWRLVPDPVQRERILEVYHRVVDNHEPLHLVAYDLNRRGVLSPKDYFAQLRGREPQGRKWSATALKRSMISVAMLGYATLCGKTVRDDDGAPLVRAEPILTREQLEAVRAELVKTSRAKPVVSTPSLLLRVLFCAVCGEPAYKFAGGGRKHPRYRCRSMGFPKHCGNGTVAMAEWDAFCEEQVLDLLGDAERLEKVWVAGSDSAVELAEVNAELVDLTSLIGSPAYRAGSPQREALDARIAALAARQEELEGLEARPSGWEWRETGQRFGDWWREQDTAAKNAWLRSMNVRLTFDVRGGLTRTIDFGDLQEYEQHLRLGSVAERLHTGMS

SEQ ID NO: 12693 - protein, 500 aa, synthetic construct
MRALVVIRLSRVTDATTSPERQLESCQQLCAQRGWDVVGVAVDLDVSGAVDPFDRKRRPSLARWLAFEEQPFDVIVASRIDRLTRSIRHLQQLVHWAEDHKKLVVSATEAHFDTTTPFAAVVIALMGTVAQMELEAIRERNRSAAHFNIRAGKYRGSLPPWGYLPSRVDGEWRLVPDPVQRERILEVYHRVVDNHEPLHLVAHDLNRRGVLSPRDYFAQLRGREPQGRKWSATALKRSMISEAMLGYATLNGKTVRDDDGAPLVRAEPILTREQLEALRAELVKTSRAKPAVSTPSLLLRVLFCAVCGEPAYKFAGGGRKHPRYRCRSMGFPKHCGNGTVAMAEWDSFCEEQVLDLLGDAERLEKVWVAGSDSAVELAEVNAELVDLTSLIGSPAYRAGSPQREALDARIAALAARQEELEGLEARPSGWEWRETGQRFGDWWREQNTAAKNTWLRSMNVRLTFDVRGGLARTIDFGDLQEYEQHLRLGSVVERLHTGMS

SEQ ID NO: 12694 - protein, 500 aa, synthetic construct
MHALVVIRLSRVTDATTSPERQLESCQQLCAQRGWDVVGVAEDLDVSGAVDPFDRKRRPNLARWLAFEEQPFDVIVAYRVDRLARSIRHLQQLVHWAEDHKKLVVSATEAHFDTTTPFAAVVIALMGTVAQMELEAIKERSRSAAHFNIRAGKYRGSLPPWGYLPTRVDGEWRLVPDPVQRERILEVYHRVVDNHEPLHLVTHDLNRRGVLSPKDYFAQLRGREPQGRKWSATALKRSMISEAMLGYATLNGKTVRDDDGAPLVRAEPILTREQQEALRAELVRTSRAKPAVSTPSLLLRVLFCAVCGEPAYKFAGGGRRHPRYRCRSMGFPKHCGNGTVAMAEWDAFCEEQVLDLLGDVERLEKVWVAGSDSAVELAEVNAELVDLTSLIGSPAYRAGSPQRGALDARIAALAARQEELEGLEARPSGWEWRGTGQRFGDWWREQDTAAKNTWLRSMNVRLTFDVRGGLTRTIDFGDLQEYEQHLRLGSVVERLHTGMS

SEQ ID NO: 12695 - protein, 500 aa, synthetic construct
MRALVVIRLSRVTEATTSPERQLESCQQLCAQRGWDVVGVAEDLDVSGAVDPFDRKRRPNLARWLAFEEQPFDVIVAYRVDRLARSIRHLQQLVHWAEDHKKLVVSATEAHFDTTTPFAAVVIALMGTVAQMELEAIKERNRSAAHFNIRAGKYRGSLPPWGYLPTRVNGEWRLVPDPVQRERILEVYHRVVDNHEPLHLVAHDLNRRGVLSPKDYFAQLRGREPQGRKWSATALKRSMISEAMLGYATLNGKTVRDDDGAPLVRAEPILTREQLGALRAELVKTSRAKPAVSTPSLLLRVLFCAVCGEPAYKFAGGGRKHPRYRCRSMGFPKHCGNGTVAMAEWDAFCEEQVLDLLGDAERLEKVWVAGSDSAVELAEVNAELVDLTSLIGSPAYRAGSPQREALDARIAALAARQEELEGLEARPSGWEWRETGQRFGDWWREQDTAAKNTWLRSMNVRLTFDVRGGLTRTIDFGDLQGYEQHLRLGSVVERLHTGMS

SEQ ID NO: 12696 - protein, 500 aa, synthetic construct
MRALVVIRLSRVTDATTSPERQLESCQQLCAQRGWDVVGVAEDLDVSGAVDPFDRKRRPNLARWLAFEEQPFDVVVAYRVDRLTRSVRHLQRLVHWAEDHKKLVVSATEAHFDTTTPFAAVVIALMGTVAQMELEAIKERSRSAAHFNIRAGKYRGSLPPWGYLPTRVDGEWRLVPDPVQRERVLEVYHRVVDNHEPLHLVAHDLNRRGVLSPKDYFAQLRGREPQGRKWSATALKRSMISGAMLGYATLNGKTVRDDDGAPLVRAEPILTREQQEALRAELVKTSRAKPAVSTPSLLLRVLFCAVCGEPAYKFSGGGRKHPRYRCRSMGFPKHCGNGTVAMAEWDAFCEEQVLDLLGDAERLEKVWVAGSDSAVELAEVNAELVDLTSLIGSPAYRAGSPQREALDARIAALAARQGELEGLEARPSGWEWRETGQRFGDWWREQDTAARNTWLRSMNVRLTFDVRGGLTRTIDFGDLQEYEQHLRLGGVVERPHTGMS

SEQ ID NO: 12697 - protein, 500 aa, synthetic construct
MRALVVIRLSRVTDATTSPERQLESCQQLCAQRGWDVVGVAEDLDVSGAVDPFDRKRRPNLARWLAFEEQPFDVIVAYRVDRLTRSTRHLQQLVHWAEDHRKLVVSATEAHFDTTTPFAAVVIALMGTVAQMELEAIKERSRSAAHFNIRAGKYRGSLPPWGYLPTRVDGEWRLVPDPVQHERILEVYHRVVDNHEPLHLVAHDLNRRGVLSPKDYFAQLQGREPQGRKWSATALKRSMISEAMLGYATLNGKTVRDDDGAPLVRAEPILTREQQEALRAELAKTSRAKPAVSTPSLLLRVLFCAVCGEPAYKFAGGGRKHPRYRCRSMGFPKHCGNGTVAMAEWDAFCEEQVLNLLGDAERLEKVWVAGADSAVELAEVNAELVDLTSLIGSPAYRAGSTQREALDARIAALAARQEELEGLEARPSGWEWRGTGQRFGDWWREQDTAAKNTWLRTMNVRLTYDVRGGLTRTIDFGDLQEYEQHLRLGSVVERLHTGMS

SEQ ID NO: 12698 - protein, 500 aa, synthetic construct
MRTLVVIRLSRVTDATTSPERQLESCQQLCAQRGWDVVGVAEDLDVSGAVDPFDRKRRPNLARWLAFEERPFDVIVAYRVDRLTRSIRHLQQLVHWAEDHKKLVVSATEAHFDTTTPFAAVVIALMGTVAQMELEAIKERNRSAAHFNIRAGKYRGSLPPWGYLPTRVDGEWRLVPDPVQRERILEVYHRVVDNHEPLHLVAHDLNRRGVLSPKDYFAQLQGREPQGRKWSATALKRSMTSVTMLGYATLNGKTVRDDNGAPLVRAEPILTREQLEALRAELVKTSRAKPAVSTPSLLLRVLFCAVCGEPAYKFAGGGRKHPRYRCRSMGFPKHCGNGTVAMAEWDTFCEEQVLDLLGDAERLEKVWVAGSDSAVELAEVNAELVDLTSLIGSPAYRAGSPQREALDARIAALVARQGELEGLEARPSGWEWRETGQRFGDWWREQDTAAKNTWLRSMNVRLTFDVRGELTRTIDFGDLQEYEQHLRLGSVVERLHTGMS

SEQ ID NO: 12699 - protein, 500 aa, synthetic construct
MRALVVIRLSRVTDATTSPERQLESCQQLCAQRGWGVVGVAEDLDVSGAVDPFDRKRRPNLARWLAFEERPFDVIVAYRVDRLTRSIRHLQQLVHWAEDHKKLVVSATEAHFDTTTPFAAVVIALMGTVAQMELEAIKERSRSAAHFNIRAGKYRGSLPPWGYLPTRVDGEWRLAPDPVQRERILEVYHRVVDNHEPLHLVAHDLNRRGVLSPKDYFAQLQGREPQGRKWSATALKRSMISVAMLGYATLNGKTVRDDDGAPLVRAEPILTREQLGALRAELVKTSRAKPAVSTPSLLLRVLFCAVCGEPAYKFAGGGRKHPRYRCRSMGFPKHCGNGTVAMAEWDAFCEEQVLDLLGDAERLEKVWVAGSDSAVELAEVNAELVDLASLIGSPAYRAGSPQREALDARIAALAARQEELEGLEARPSGWEWRETGQRFGDWWREQDTAAKNTWLRSMNVRLTFDARGGLTRTIDLGDLQEYEQHLRLGSVVERLHTGMS

SEQ ID NO: 12700 - protein, 500 aa, synthetic construct
MRALVVIRLSRVTDATTSPERQLESCQQLCAQRGWDIVGVAEDLDVSGAVDPFDRKRRPNLARWLAFEEQPFDVIVAYRVDRLARSIRHLQQLVHWAEDHKKLIVSATEAHFDTTTPFAAVVIALMGTVAQMELEAIKERSRSAAHFNIRAGKYRGSLPPWGYLPTRVNGEWRLVPDPVQRERILEVYHRVVDDHEPLHLVAHDLNRRGVLSPRDYFAQLQGREPQGRKWSATALKRSMISEAMLGYATLNGKIVRDDDGAPLVRAEPILTREQLEAIRAELVKTSRAKPAVSTPSLLLRALFCAVCGEPAYKFAGGGRKHPRYRCRSMGFPKHCGNGTVAMAEWDAFCEEQVLDLLGDAERLEKVWVAGSDSAVELAEVNAELVDLTSLIGSPAYRAGSPQREALDARIAALAARQEELEGLEARPSGWEWRGTGQRFGDWWREQDTAAKNTWLRSMNVRLTFDVRGGLTRTIDFGDLQEYVQHLRLGSVVERLHTGMS

SEQ ID NO: 12701 - protein, 500 aa, synthetic construct
MRALVVIRLSRVTDATTSPERQLESCQQLCAQRGWDVVGVAEDLDVSGAVDPFDRKRRPNLARWLAFEEQPFDVIVAYRVDRLTRSIRHLQQLVHWAEDRKKLVVSATEAHFDMTTPFAAVVIALMGTVAQMELEAIKERSRSAAHFNIRAGKYRGSLPPWGYLPTRVDGEWRLVPDPVQRERILEVYHRVVDNHEPLHLVAHDLNRRGVLSPRDYFAQLRGREPQGRKWSATALKRSMISKAMLGYATLNGKTVRDDDGAPLVRAEPILSREQLEALRAELVKTSRAKPAVSTPSLLLRVLFCAVCGEPAYKFAGGGRKHSRYRCRSMGFPKHCGNGTVAMAEWDAFCEERVLDLLGDAERLEKVWVVGSDPAVELAEVNAELVDLTSLIGSPAYRAGSPQREALDARIAALAARQVELEGLEARPSGWEWRETGQRFGDWWREQDTAAKNTWLRSMNVRLTFDVRGGLTRTIDFGDLQEYEQHLRLGSVVERLHTGMS

SEQ ID NO: 12702 - protein, 500 aa, synthetic construct
MRALVVIRLSRVTDATTSPERQLESCQQLCAQRGWDVVGVAEDLDVSGAVGPFDCKRRPNLARWLAFEEQPFDVIVAYRVDRLARSIRHLQQLVHWAEDHKKLVVSATEAHFDTTTPFAAVVIALMGTVAQMELEAIKERCRSAAHFNIRAGKYRGSLPPWGYLPTRVDGEWRLAPDPVQRERILEVYHRVVDNHEPLHSVAHDLNRRGVLSPKDYFAQLRGREPQGRKWSATALKRSMISEAMLGYATLNGKTVRGDDGAPLVRAEPILTREQLEALRAELVKTSRAKPAVSTPSLLLHVLFCAVCGEPAYKFAGGGRKHPRYRCRSMGFPKHCGNGTVAMAEWDTFCEEQVLDLLGDAERLEKVWVAGSDSAVELAEVNAELVDLTSLIGSPAYRAGSPQREALDARIAALAARQEELEGLEARPSGWEWRGTGQRFGDWWREQDTAAKNTWLRSMNIRLTFDVRGGLTRTIDFGDLQEYEQHLRLGGVVERLHTGMS

SEQ ID NO: 12703 - protein, 500 aa, synthetic construct
MRALVVIRLSRVTDATTSPERQLESCQQLCAQRGWDVVGVAEDLDVSGAVDPFDRKRRPNLARWLAFEEQPFDVIVAYRVDRLARSIRHLQQLVHWAEDHKKLVVSATEAHFDTTTPFAAVVIALMGTVAQMELEAIKERSRSAAHFNIRAGKYRGSLPPWGYLPTRVDGEWRLVPDPVQRERILEVYHRVVDNHEPLHLVAHDLNRRGVLSPKDYFAQLRGREPQGREWSATALKRSMISEAMLGYATLNGKTVRDDDGAPLVRAEPILTREQQEALRAELAKTSRAKPAVSTPSLLLRVLFCAVCGEPAYKFAGGGRKHPRYRCRSMGFPKHCGNGTVAMAEWDAFCEEQVLDLLEDAERLERVWVAGSDSAVELAEVNAELVDLTSLIGSPTYRAGSPQREALDARIAALAARQEELEGLEARPSGWEWRGTGQRFGDWWREQDTAAKNTWLRSMNVRLTFDVRGGRTRTIDLGDLQEYEQHLRLGSVVERLHTGMS

SEQ ID NO: 12704 - protein, 500 aa, synthetic construct
MRALVVIRLSRVTDATTSPERQLESCQQLCAQRGWDVVGVAEDLDVSGAVDPFDRKRRPNLARWLAFEEQPFDAIVAYRVDRLTRSIRHLQQLVHWAEDHKKLVVSATEAHFDTTTPFAAVVIALMGTVAQMELEAIKERNRSAAHFNIRAGKYRGSLPPWGYLPTRVDGEWRLAPDPVQRERILEVYHRVVDNHEPLHLVAHDLNRRGVLSPKDYFAQLRGREPQGRKWSATALKRSMTSEAMLGYATLNGKTVRDDDGAPLVRAEPILTREQLEALRAELVKTSQAKPAVSTPSLLLRVLFCAVCGEPAYKFAGGGRKHPRYRCRSMGFPKHCGNGTVAMAEWDAFCEEQVLNLLGDAERLEKVWVAGSDSAVELAEVNKELADLTSLIGTPAYRAGSPQREALDARIAALAARQEELEGLEARPSGWEWRGTGQRFRDWWREQDTAAKNTWLRSMNVRLTFDVRGGLTRTIDFGDLQEYEQHLRLGSVVERLHTGMS

SEQ ID NO: 12705 - protein, 500 aa, synthetic construct
MRALVVIRLSRVTDATTSPERQLESCQQLCAQRGWDVVGVAEDLDVSGAVDPFDRKRRPNLARWLAFEERPFDVIVAYRVDRLTRSIRHLQQLVHWAEDHKKLVVSATEAHFDTTTPFAAVVIALMGTVAQMELEAIKERNRSAAHFNIRAGKYRGSLPPWGYLPTRVDGVWRLVPDPVQRERILEVYHRVVDNHEPLHLVAHDLNRRGVLSPKDYFAQLRGREPQGRKWSATALKRSMISVAMLGYATLNGKTVRDDDGAPLVRAEPILTREQLEALRAELVKTSRAKPAVSTPSLLLRVLFCAVCGEPAYKFAGGGRKHPRYRCRSMGFPKHCGNGTVAMAEWDAFCEEQVLNLLGDAERLEKVWVAGSDSAVELAEVNAELVDLTSLIGSPAYRAGSPQREALDARIAALAARQEELEGLEARPSGWEWRETGQRFGDWWREQDTAAKNTWLRSMNVRLTFDVRGGLIRTIDFGDLQEYEQHLRLGSVAERLHTGMS

SEQ ID NO: 12706 - protein, 500 aa, synthetic construct
MRALVVIRLSRVTDATTSPERQLESCQQLCAQRGWDVVGVAEDLDVSGAVDPFDRKRRPNLARWLAFEEHPFDVIVAYRVDRLTRSVRHLQQLVHWAEDHKKLVVSATEAHFDTTTPFAAVVIALMGTVAQMELEAIRERNRSAAHFNIRAGKYRGSLPPWGYLPTRVDGEWRLVPDPVQRKRILEVYHRVVVNHEPLHLVAHDLNRRGVLSPRDYFAQLRGREPQGRKWSATALKRSMISEAMLGYATLNGKTVRDDDGAPLVRAEPILTREQQEALRAELVKTSRAKPAVSTPSLLLRVLFCAVCGEPAYKFAGGGRKHPRYRCRSMGFPKHCGNGTVAMAEWDAFCEEQVLNLLGDAERLEKVWVAGSDSAVELAEVNAELVDLTSLIGSPAYRAGSPQREALDARIAALAARQEELEGLEARPSGWEWRGTGQRFGDWWREQDTAAKNTWLRSMNVRLTFDVRGGLTRTIDFGDLQEYVQHLRLGSVVERLHTGMS

SEQ ID NO: 12707 - protein, 500 aa, synthetic construct
MRALVVIRLSRVTDATTSPERQLESCQQLCAQRGWDVVGVAEDLDVSGAVDPFDRKRRPNLARWLAFEEQPFDAIVAYRVDRLTRSIRHLQQLVHWAEDHKKLVVSATEAHFDTTTPFAAVVIALMGTVAQMELEAIKERSRSAAHFNIRAGKYRGSLPPWGYLPTRVDGEWRLAPDPVQRERILEVYHRVVDNHEPLHLVAHDLNRRGVLSPKDYFAQLQGREPQGRKWSATALKRSMISEAMLGYATLNGKTVRDDDGAPLVRAEPILTREQLEALRAELVKTSRAKPAVSTPSLLLRVLFCAVCGEPAYKFAGGGRKHPRYRCRSMGFPKHCGNGTVAMAEWDAFCEEQVLGLLGDAERLEKVWVAGSDSAVELAEVNAELVDLTSLIGSPAYRADSPQREALDARIAALAARQEELEGLEARPSGWEWRETGQRFGDWWREQDTVAKNTWLRSMNVRLTFDVRGGLTRTIDFGDLQEYEQHLRLGSVVERLHTGTS

SEQ ID NO: 12708 - protein, 500 aa, synthetic construct
MRALVVIRLSRVTDATTSPERQLESCQQLCAQRGWDVVGVAEDLDVSGAVDPFDRKRRPNLARWLAFEERPFDVIVAYRVDRLTRSIRHLQQLVRWAEDHKKLVVSATEAHFDTTTPFAAVVIALMGTVAQMELEAIKERNRSAAHFNIRAGKYRGSLPPWGYLPTRVDGVWRLVPDPVQRERILEVYHRVVDNHEPLHLVAHDLNRRGVLSPKDYFAQLRGREPQGRKWSATALKRSMISVAMLGYATLNGKTVRDDDGAPLVRAEPILTREQLEALRAELVKTSRAKPAVSTPSLLLRVLFCAVCGEPAYKFSGGGRKHPRYRCRSMGFPKHCGNGTVAMAEWDAFCEEQVLDLLGDAERLEKVWVAGSDSAVELAEVNAELVDLTSLISSPAYRAGSPQREALDARIAALAARQGELEGLEARPSGWEWRETGQRFGDWWREQDTAAKNTWLRSMNVRLTFDVRGGLTRTIDFGDLQEYEQHLRLGSVVERLHTGMS

SEQ ID NO: 12709 - protein, 500 aa, synthetic construct
MRALVVIRLSRVTDATTSPERQLESCQQLCAQRGWDIVGVAEDLDVSGAIDPFDRKRRPNLARWLVFEEQPFDVIVAYRVDRLVRSIRHLQQLVHWAEDHKKLVVSATEAHFDTTTPFAAVVIALMGTVAQMELEAIKERTRSAAHFNIRAGKYRGSLPPWGYLPTRVDGEWRLAPDPVQRERILEVYHRVVDNHEPLHLVAHDLNRRGVLSPKDYFAQLRGREPQGRRWSATALKRSMISEAMLGYATLNGKTVRDDDGAPLVRAEPILTREQQEALRAELAKTSRAKPAVSTPSLLLRVLFCAVCGEPAYKFAGGGRKHPRYRCRSMGFPKHCGNGTVAMAEWDAFCEDQVLDLLGDAERLEKVWVAGSDSAVELAEVNAELVDLTSLISSPAYRVGSPQREALDARIAALAARQEELEGLEARPSGWEWRETGQRFGDWWREQDTAAKNTWLRSMNVRLTFDVRGGLSRTIDFGDLQEYEQHLRLGGVVERLHTGMS

SEQ ID NO: 12710 - protein, 500 aa, synthetic construct
MRALVVIRLSRVTDATTSPERQLESCQQLCAQRGWDVVGVAEDLDVSGAVDPFDRKRRPNLARWLAFEEQPFDVIVAYRVDRLTRSVRHLQQLVHWAEDHKKLVVSATEAHFDTTTPFAAVVIALMGTVAQMELEAIRERNRSAAHFNIRAGKYRGSLPPWGYLPTRVDGEWRLVPDPVQRERILEVYHRVVDNHEPLHLVAHDLNRRGVLSPKDYFAQLQGREPQGRKWSATALKRSMISRAMLGYATLNGKTVRGDDGAPLVRAEPILTRKQLEALRAELVKTSRAKPAVSTPSLLLRVLFCAVCGEPAYKFAGGGRKHPRYRCRSMGFPKHCGNGTVAMAEWDAFCEEQVLNLLGDAERLEKVWVAGSDSAVELAEVNAELVDLTSLIGSPAYRAGSPQREALDARIAALAARREELEGLEARPAGWEWRETGQRFGDWWHEQDTAAKNTWLRSMNVRLTFDVRGGLTRTIDFGDLQEYEQHLRLGSVVERLHTGMS
